United States Patent Application Publication US 2025/0171800 A1 - sequence listing, part 5

SEQ ID NO: 91887 - DNA, 22 bp, synthetic construct
  misc_feature 1..22: note = chemically synthesized
  source 1..22: mol_type = other DNA
gctgttctgtcaataaatttcc

SEQ ID NO: 91888 - DNA, 22 bp, synthetic construct
  misc_feature 1..22: note = chemically synthesized
  source 1..22: mol_type = other DNA
ctgttctgtcaataaatttcct

SEQ ID NO: 91889 - DNA, 22 bp, synthetic construct
  misc_feature 1..22: note = chemically synthesized
  source 1..22: mol_type = other DNA
ttctgtcaataaatttccttct

SEQ ID NO: 91890 - DNA, 22 bp, synthetic construct
  misc_feature 1..22: note = chemically synthesized
  source 1..22: mol_type = other DNA
tgtcaataaatttccttctttt

SEQ ID NO: 91891 - DNA, 22 bp, synthetic construct
  misc_feature 1..22: note = chemically synthesized
  source 1..22: mol_type = other DNA
tcaataaatttccttcttttca

SEQ ID NO: 91892 - DNA, 22 bp, synthetic construct
  misc_feature 1..22: note = chemically synthesized
  source 1..22: mol_type = other DNA
ccttcttttcattcacagacag

SEQ ID NO: 91893 - DNA, 22 bp, synthetic construct
  misc_feature 1..22: note = chemically synthesized
  source 1..22: mol_type = other DNA
cttcttttcattcacagacagg

SEQ ID NO: 91894 - DNA, 22 bp, synthetic construct
  misc_feature 1..22: note = chemically synthesized
  source 1..22: mol_type = other DNA
cttttcattcacagacagggat

SEQ ID NO: 91895 - DNA, 22 bp, synthetic construct
  misc_feature 1..22: note = chemically synthesized
  source 1..22: mol_type = other DNA
ttttcattcacagacagggatt

SEQ ID NO: 91896 - DNA, 22 bp, synthetic construct
  misc_feature 1..22: note = chemically synthesized
  source 1..22: mol_type = other DNA
ttcattcacagacagggatttt

SEQ ID NO: 91897 - DNA, 22 bp, synthetic construct
  misc_feature 1..22: note = chemically synthesized
  source 1..22: mol_type = other DNA
tcattcacagacagggatttta

SEQ ID NO: 91898 - DNA, 22 bp, synthetic construct
  misc_feature 1..22: note = chemically synthesized
  source 1..22: mol_type = other DNA
cattcacagacagggattttag

SEQ ID NO: 91899 - DNA, 22 bp, synthetic construct
  misc_feature 1..22: note = chemically synthesized
  source 1..22: mol_type = other DNA
attcacagacagggattttagc

SEQ ID NO: 91900 - DNA, 22 bp, synthetic construct
  misc_feature 1..22: note = chemically synthesized
  source 1..22: mol_type = other DNA
acagacagggattttagctgtc

SEQ ID NO: 91901 - DNA, 22 bp, synthetic construct
  misc_feature 1..22: note = chemically synthesized
  source 1..22: mol_type = other DNA
tagctgtcatctctgactctct

SEQ ID NO: 91902 - DNA, 22 bp, synthetic construct
  misc_feature 1..22: note = chemically synthesized
  source 1..22: mol_type = other DNA
agctgtcatctctgactctctg

SEQ ID NO: 91903 - DNA, 22 bp, synthetic construct
  misc_feature 1..22: note = chemically synthesized
  source 1..22: mol_type = other DNA
gctgtcatctctgactctctgt

SEQ ID NO: 91904 - DNA, 22 bp, synthetic construct
  misc_feature 1..22: note = chemically synthesized
  source 1..22: mol_type = other DNA
tcatctctgactctctgtttca

SEQ ID NO: 91905 - DNA, 22 bp, synthetic construct
  misc_feature 1..22: note = chemically synthesized
  source 1..22: mol_type = other DNA
tgactctctgtttcacaatgtt

SEQ ID NO: 91906 - DNA, 22 bp, synthetic construct
  misc_feature 1..22: note = chemically synthesized
  source 1..22: mol_type = other DNA
actctctgtttcacaatgtttt

SEQ ID NO: 91907 - DNA, 22 bp, synthetic construct
  misc_feature 1..22: note = chemically synthesized
  source 1..22: mol_type = other DNA
tctgtttcacaatgttttccag

SEQ ID NO: 91908 - DNA, 22 bp, synthetic construct
  misc_feature 1..22: note = chemically synthesized
  source 1..22: mol_type = other DNA
tgtttcacaatgttttccagtt

SEQ ID NO: 91909 - DNA, 22 bp, synthetic construct
  misc_feature 1..22: note = chemically synthesized
  source 1..22: mol_type = other DNA
tttcacaatgttttccagttct

SEQ ID NO: 91910 - DNA, 22 bp, synthetic construct
  misc_feature 1..22: note = chemically synthesized
  source 1..22: mol_type = other DNA
cacaatgttttccagttctgtg

SEQ ID NO: 91911 - DNA, 22 bp, synthetic construct
  misc_feature 1..22: note = chemically synthesized
  source 1..22: mol_type = other DNA
acaatgttttccagttctgtgc

SEQ ID NO: 91912 - DNA, 22 bp, synthetic construct
  misc_feature 1..22: note = chemically synthesized
  source 1..22: mol_type = other DNA
tccagttctgtgcaatcactgc

SEQ ID NO: 91913 - DNA, 22 bp, synthetic construct
  misc_feature 1..22: note = chemically synthesized
  source 1..22: mol_type = other DNA
ccagttctgtgcaatcactgcc

SEQ ID NO: 91914 - DNA, 22 bp, synthetic construct
  misc_feature 1..22: note = chemically synthesized
  source 1..22: mol_type = other DNA
cagttctgtgcaatcactgcca

SEQ ID NO: 91915 - DNA, 22 bp, synthetic construct
  misc_feature 1..22: note = chemically synthesized
  source 1..22: mol_type = other DNA
tgtgcaatcactgccacaatgg

SEQ ID NO: 91916 - DNA, 22 bp, synthetic construct
  misc_feature 1..22: note = chemically synthesized
  source 1..22: mol_type = other DNA
tgcaatcactgccacaatggtc

SEQ ID NO: 91917 - DNA, 22 bp, synthetic construct
  misc_feature 1..22: note = chemically synthesized
  source 1..22: mol_type = other DNA
ccacaatggtctcttactcgat

SEQ ID NO: 91918 - DNA, 22 bp, synthetic construct
  misc_feature 1..22: note = chemically synthesized
  source 1..22: mol_type = other DNA
ttactcgattttttttcttaac

SEQ ID NO: 91919 - DNA, 22 bp, synthetic construct
  misc_feature 1..22: note = chemically synthesized
  source 1..22: mol_type = other DNA
actcgattttttttcttaactt

SEQ ID NO: 91920 - DNA, 22 bp, synthetic construct
  misc_feature 1..22: note = chemically synthesized
  source 1..22: mol_type = other DNA
ctcgattttttttcttaacttc

SEQ ID NO: 91921 - DNA, 22 bp, synthetic construct
  misc_feature 1..22: note = chemically synthesized
  source 1..22: mol_type = other DNA
gattttttttcttaacttcatt

SEQ ID NO: 91922 - DNA, 22 bp, synthetic construct
  misc_feature 1..22: note = chemically synthesized
  source 1..22: mol_type = other DNA
tttttcttaacttcattgtttc

SEQ ID NO: 91923 - DNA, 22 bp, synthetic construct
  misc_feature 1..22: note = chemically synthesized
  source 1..22: mol_type = other DNA
ttttcttaacttcattgtttcc

SEQ ID NO: 91924 - DNA, 22 bp, synthetic construct
  misc_feature 1..22: note = chemically synthesized
  source 1..22: mol_type = other DNA
tttcttaacttcattgtttcca

SEQ ID NO: 91925 - DNA, 22 bp, synthetic construct
  misc_feature 1..22: note = chemically synthesized
  source 1..22: mol_type = other DNA
ttcttaacttcattgtttccat

SEQ ID NO: 91926 - DNA, 22 bp, synthetic construct
  misc_feature 1..22: note = chemically synthesized
  source 1..22: mol_type = other DNA
tcttaacttcattgtttccatc

SEQ ID NO: 91927 - DNA, 22 bp, synthetic construct
  misc_feature 1..22: note = chemically synthesized
  source 1..22: mol_type = other DNA
cttaacttcattgtttccatca

SEQ ID NO: 91928 - DNA, 22 bp, synthetic construct
  misc_feature 1..22: note = chemically synthesized
  source 1..22: mol_type = other DNA
ttaacttcattgtttccatcaa

SEQ ID NO: 91929 - DNA, 22 bp, synthetic construct
  misc_feature 1..22: note = chemically synthesized
  source 1..22: mol_type = other DNA
aacttcattgtttccatcaact

SEQ ID NO: 91930 - DNA, 22 bp, synthetic construct
  misc_feature 1..22: note = chemically synthesized
  source 1..22: mol_type = other DNA
acttcattgtttccatcaactt

SEQ ID NO: 91931 - DNA, 22 bp, synthetic construct
  misc_feature 1..22: note = chemically synthesized
  source 1..22: mol_type = other DNA
cattgtttccatcaacttcagt

SEQ ID NO: 91932 - DNA, 22 bp, synthetic construct
  misc_feature 1..22: note = chemically synthesized
  source 1..22: mol_type = other DNA
attgtttccatcaacttcagtt

SEQ ID NO: 91933 - DNA, 22 bp, synthetic construct
  misc_feature 1..22: note = chemically synthesized
  source 1..22: mol_type = other DNA
tttccatcaacttcagttcttt

SEQ ID NO: 91934 - DNA, 22 bp, synthetic construct
  misc_feature 1..22: note = chemically synthesized
  source 1..22: mol_type = other DNA
ccatcaacttcagttctttatc

SEQ ID NO: 91935 - DNA, 22 bp, synthetic construct
  misc_feature 1..22: note = chemically synthesized
  source 1..22: mol_type = other DNA
catcaacttcagttctttatcc

SEQ ID NO: 91936 - DNA, 22 bp, synthetic construct
  misc_feature 1..22: note = chemically synthesized
  source 1..22: mol_type = other DNA
cagttctttatccatcacctca

SEQ ID NO: 91937 - DNA, 22 bp, synthetic construct
  misc_feature 1..22: note = chemically synthesized
  source 1..22: mol_type = other DNA
agttctttatccatcacctcaa

SEQ ID NO: 91938 - DNA, 22 bp, synthetic construct
  misc_feature 1..22: note = chemically synthesized
  source 1..22: mol_type = other DNA
tttatccatcacctcaatataa

SEQ ID NO: 91939 - DNA, 22 bp, synthetic construct
  misc_feature 1..22: note = chemically synthesized
  source 1..22: mol_type = other DNA
tatccatcacctcaatataatt

SEQ ID NO: 91940 - DNA, 22 bp, synthetic construct
  misc_feature 1..22: note = chemically synthesized
  source 1..22: mol_type = other DNA
atccatcacctcaatataatta

SEQ ID NO: 91941 - DNA, 22 bp, synthetic construct
  misc_feature 1..22: note = chemically synthesized
  source 1..22: mol_type = other DNA
tccatcacctcaatataattac

SEQ ID NO: 91942 - DNA, 22 bp, synthetic construct
  misc_feature 1..22: note = chemically synthesized
  source 1..22: mol_type = other DNA
aatataattacagcaagctcct

SEQ ID NO: 91943 - DNA, 22 bp, synthetic construct
  misc_feature 1..22: note = chemically synthesized
  source 1..22: mol_type = other DNA
cagcaagctcctctgactatac

SEQ ID NO: 91944 - DNA, 22 bp, synthetic construct
  misc_feature 1..22: note = chemically synthesized
  source 1..22: mol_type = other DNA
ctctgactatacccaagttaga

SEQ ID NO: 91945 - DNA, 22 bp, synthetic construct
  misc_feature 1..22: note = chemically synthesized
  source 1..22: mol_type = other DNA
tgactatacccaagttagactt

SEQ ID NO: 91946 - DNA, 22 bp, synthetic construct
  misc_feature 1..22: note = chemically synthesized
  source 1..22: mol_type = other DNA
actatacccaagttagactttg

SEQ ID NO: 91947 - DNA, 22 bp, synthetic construct
  misc_feature 1..22: note = chemically synthesized
  source 1..22: mol_type = other DNA
tacccaagttagactttgtcta

SEQ ID NO: 91948 - DNA, 22 bp, synthetic construct
  misc_feature 1..22: note = chemically synthesized
  source 1..22: mol_type = other DNA
gactttgtctaatcagttctat

SEQ ID NO: 91949 - DNA, 22 bp, synthetic construct
  misc_feature 1..22: note = chemically synthesized
  source 1..22: mol_type = other DNA
tgtctaatcagttctatatata

SEQ ID NO: 91950 - DNA, 22 bp, synthetic construct
  misc_feature 1..22: note = chemically synthesized
  source 1..22: mol_type = other DNA
gtctaatcagttctatatatat

SEQ ID NO: 91951 - DNA, 22 bp, synthetic construct
  misc_feature 1..22: note = chemically synthesized
  source 1..22: mol_type = other DNA
tctaatcagttctatatatata

SEQ ID NO: 91952 - DNA, 22 bp, synthetic construct
  misc_feature 1..22: note = chemically synthesized
  source 1..22: mol_type = other DNA
atcagttctatatatatatata

SEQ ID NO: 91953 - DNA, 22 bp, synthetic construct
  misc_feature 1..22: note = chemically synthesized
  source 1..22: mol_type = other DNA
tatatatatatatacatgtgaa

SEQ ID NO: 91954 - DNA, 22 bp, synthetic construct
  misc_feature 1..22: note = chemically synthesized
  source 1..22: mol_type = other DNA
tatatatatatacatgtgaatc

SEQ ID NO: 91955 - DNA, 22 bp, synthetic construct
  misc_feature 1..22: note = chemically synthesized
  source 1..22: mol_type = other DNA
tctacgtttccctatttattat

SEQ ID NO: 91956 - DNA, 22 bp, synthetic construct
  misc_feature 1..22: note = chemically synthesized
  source 1..22: mol_type = other DNA
ctacgtttccctatttattatg

SEQ ID NO: 91957 - DNA, 22 bp, synthetic construct
  misc_feature 1..22: note = chemically synthesized
  source 1..22: mol_type = other DNA
tacgtttccctatttattatgt

SEQ ID NO: 91958 - DNA, 22 bp, synthetic construct
  misc_feature 1..22: note = chemically synthesized
  source 1..22: mol_type = other DNA
cgtttccctatttattatgtca

SEQ ID NO: 91959 - DNA, 22 bp, synthetic construct
  misc_feature 1..22: note = chemically synthesized
  source 1..22: mol_type = other DNA
ccctatttattatgtcactctc

SEQ ID NO: 91960 - DNA, 22 bp, synthetic construct
  misc_feature 1..22: note = chemically synthesized
  source 1..22: mol_type = other DNA
cctatttattatgtcactctca

SEQ ID NO: 91961 - DNA, 22 bp, synthetic construct
  misc_feature 1..22: note = chemically synthesized
  source 1..22: mol_type = other DNA
tttattatgtcactctcatatg

SEQ ID NO: 91962 - DNA, 22 bp, synthetic construct
  misc_feature 1..22: note = chemically synthesized
  source 1..22: mol_type = other DNA
attatgtcactctcatatgcaa

SEQ ID NO: 91963 - DNA, 22 bp, synthetic construct
  misc_feature 1..22: note = chemically synthesized
  source 1..22: mol_type = other DNA
ttatgtcactctcatatgcaag

SEQ ID NO: 91964 - DNA, 22 bp, synthetic construct
  misc_feature 1..22: note = chemically synthesized
  source 1..22: mol_type = other DNA
tgtcactctcatatgcaagaaa

SEQ ID NO: 91965 - DNA, 22 bp, synthetic construct
  misc_feature 1..22: note = chemically synthesized
  source 1..22: mol_type = other DNA
tcatatgcaagaaacttcagtg

SEQ ID NO: 91966 - DNA, 22 bp, synthetic construct
  misc_feature 1..22: note = chemically synthesized
  source 1..22: mol_type = other DNA
atatgcaagaaacttcagtgat

SEQ ID NO: 91967 - DNA, 22 bp, synthetic construct
  misc_feature 1..22: note = chemically synthesized
  source 1..22: mol_type = other DNA
cagtgatttttgctcaaaacga

SEQ ID NO: 91968 - DNA, 22 bp, synthetic construct
  misc_feature 1..22: note = chemically synthesized
  source 1..22: mol_type = other DNA
agtgatttttgctcaaaacgat

SEQ ID NO: 91969 - DNA, 22 bp, synthetic construct
  misc_feature 1..22: note = chemically synthesized
  source 1..22: mol_type = other DNA
ttgctcaaaacgatagctattt

SEQ ID NO: 91970 - DNA, 22 bp, synthetic construct
  misc_feature 1..22: note = chemically synthesized
  source 1..22: mol_type = other DNA
tgctcaaaacgatagctatttt

SEQ ID NO: 91971 - DNA, 22 bp, synthetic construct
  misc_feature 1..22: note = chemically synthesized
  source 1..22: mol_type = other DNA
gctcaaaacgatagctattttt

SEQ ID NO: 91972 - DNA, 22 bp, synthetic construct
  misc_feature 1..22: note = chemically synthesized
  source 1..22: mol_type = other DNA
ctcaaaacgatagctatttttc

SEQ ID NO: 91973 - DNA, 22 bp, synthetic construct
  misc_feature 1..22: note = chemically synthesized
  source 1..22: mol_type = other DNA
aaaacgatagctatttttctta

SEQ ID NO: 91974 - DNA, 22 bp, synthetic construct
  misc_feature 1..22: note = chemically synthesized
  source 1..22: mol_type = other DNA
tttttcttacttcatctggtct

SEQ ID NO: 91975 - DNA, 22 bp, synthetic construct
  misc_feature 1..22: note = chemically synthesized
  source 1..22: mol_type = other DNA
ttcttacttcatctggtctctg

SEQ ID NO: 91976 - DNA, 22 bp, synthetic construct
  misc_feature 1..22: note = chemically synthesized
  source 1..22: mol_type = other DNA
tcttacttcatctggtctctgc

SEQ ID NO: 91977 - DNA, 22 bp, synthetic construct
  misc_feature 1..22: note = chemically synthesized
  source 1..22: mol_type = other DNA
cttacttcatctggtctctgca

SEQ ID NO: 91978 - DNA, 22 bp, synthetic construct
  misc_feature 1..22: note = chemically synthesized
  source 1..22: mol_type = other DNA
ttacttcatctggtctctgcat

SEQ ID NO: 91979 - DNA, 22 bp, synthetic construct
  misc_feature 1..22: note = chemically synthesized
  source 1..22: mol_type = other DNA
acttcatctggtctctgcatcc

SEQ ID NO: 91980 - DNA, 22 bp, synthetic construct
  misc_feature 1..22: note = chemically synthesized
  source 1..22: mol_type = other DNA
cttcatctggtctctgcatcca

SEQ ID NO: 91981 - DNA, 22 bp, synthetic construct
  misc_feature 1..22: note = chemically synthesized
  source 1..22: mol_type = other DNA
catctggtctctgcatccagtt

SEQ ID NO: 91982 - DNA, 22 bp, synthetic construct
  misc_feature 1..22: note = chemically synthesized
  source 1..22: mol_type = other DNA
atctggtctctgcatccagttt

SEQ ID NO: 91983 - DNA, 22 bp, synthetic construct
  misc_feature 1..22: note = chemically synthesized
  source 1..22: mol_type = other DNA
gtctctgcatccagtttcccta

SEQ ID NO: 91984 - DNA, 22 bp, synthetic construct
  misc_feature 1..22: note = chemically synthesized
  source 1..22: mol_type = other DNA
tgcatccagtttccctaatttt

SEQ ID NO: 91985 - DNA, 22 bp, synthetic construct
  misc_feature 1..22: note = chemically synthesized
  source 1..22: mol_type = other DNA
catccagtttccctaattttat

SEQ ID NO: 91986 - DNA, 22 bp, synthetic construct
  misc_feature 1..22: note = chemically synthesized
  source 1..22: mol_type = other DNA
ccctaattttatatcatcctgc

SEQ ID NO: 91987 - DNA, 22 bp, synthetic construct
  misc_feature 1..22: note = chemically synthesized
  source 1..22: mol_type = other DNA
cctaattttatatcatcctgcc

SEQ ID NO: 91988 - DNA, 22 bp, synthetic construct
  misc_feature 1..22: note = chemically synthesized
  source 1..22: mol_type = other DNA
attttatatcatcctgcctctt

SEQ ID NO: 91989 - DNA, 22 bp, synthetic construct
  misc_feature 1..22: note = chemically synthesized
  source 1..22: mol_type = other DNA
tatatcatcctgcctcttttaa

SEQ ID NO: 91990 - DNA, 22 bp, synthetic construct
  misc_feature 1..22: note = chemically synthesized
  source 1..22: mol_type = other DNA
atatcatcctgcctcttttaaa

SEQ ID NO: 91991 - DNA, 22 bp, synthetic construct
  misc_feature 1..22: note = chemically synthesized
  source 1..22: mol_type = other DNA
tatcatcctgcctcttttaaat

SEQ ID NO: 91992 - DNA, 22 bp, synthetic construct
  misc_feature 1..22: note = chemically synthesized
  source 1..22: mol_type = other DNA
cctcttttaaatgtccatattc

SEQ ID NO: 91993 - DNA, 22 bp, synthetic construct
  misc_feature 1..22: note = chemically synthesized
  source 1..22: mol_type = other DNA
ttttaaatgtccatattctcct

SEQ ID NO: 91994 - DNA, 22 bp, synthetic construct
  misc_feature 1..22: note = chemically synthesized
  source 1..22: mol_type = other DNA
ttaaatgtccatattctcctct

SEQ ID NO: 91995 - DNA, 22 bp, synthetic construct
  misc_feature 1..22: note = chemically synthesized
  source 1..22: mol_type = other DNA
taaatgtccatattctcctcta

SEQ ID NO: 91996 - DNA, 22 bp, synthetic construct
  misc_feature 1..22: note = chemically synthesized
  source 1..22: mol_type = other DNA
aaatgtccatattctcctctat

SEQ ID NO: 91997 - DNA, 22 bp, synthetic construct
  misc_feature 1..22: note = chemically synthesized
  source 1..22: mol_type = other DNA
aatgtccatattctcctctatc

SEQ ID NO: 91998 - DNA, 22 bp, synthetic construct
  misc_feature 1..22: note = chemically synthesized
  source 1..22: mol_type = other DNA
tcctctatcaacttgacttaac

SEQ ID NO: 91999 - DNA, 22 bp, synthetic construct
  misc_feature 1..22: note = chemically synthesized
  source 1..22: mol_type = other DNA
ctctatcaacttgacttaacgt

SEQ ID NO: 92000 - DNA, 22 bp, synthetic construct
  misc_feature 1..22: note = chemically synthesized
  source 1..22: mol_type = other DNA
tatcaacttgacttaacgtgct

SEQ ID NO: 92001 - DNA, 22 bp, synthetic construct
  misc_feature 1..22: note = chemically synthesized
  source 1..22: mol_type = other DNA
tcaacttgacttaacgtgctgt

SEQ ID NO: 92002 - DNA, 22 bp, synthetic construct
  misc_feature 1..22: note = chemically synthesized
  source 1..22: mol_type = other DNA
gacttaacgtgctgtttcctaa

SEQ ID NO: 92003 - DNA, 22 bp, synthetic construct
  misc_feature 1..22: note = chemically synthesized
  source 1..22: mol_type = other DNA
acttaacgtgctgtttcctaaa

SEQ ID NO: 92004 - DNA, 22 bp, synthetic construct
  misc_feature 1..22: note = chemically synthesized
  source 1..22: mol_type = other DNA
aacgtgctgtttcctaaatctc

SEQ ID NO: 92005 - DNA, 22 bp, synthetic construct
  misc_feature 1..22: note = chemically synthesized
  source 1..22: mol_type = other DNA
acgtgctgtttcctaaatctca

SEQ ID NO: 92006 - DNA, 22 bp, synthetic construct
  misc_feature 1..22: note = chemically synthesized
  source 1..22: mol_type = other DNA
tttcctaaatctcagcctttta

SEQ ID NO: 92007 - DNA, 22 bp, synthetic construct
  misc_feature 1..22: note = chemically synthesized
  source 1..22: mol_type = other DNA
cctaaatctcagccttttaatc

SEQ ID NO: 92008 - DNA, 22 bp, synthetic construct
  misc_feature 1..22: note = chemically synthesized
  source 1..22: mol_type = other DNA
ctaaatctcagccttttaatct

SEQ ID NO: 92009 - DNA, 22 bp, synthetic construct
  misc_feature 1..22: note = chemically synthesized
  source 1..22: mol_type = other DNA
aatctcagccttttaatctgct

SEQ ID NO: 92010 - DNA, 22 bp, synthetic construct
  misc_feature 1..22: note = chemically synthesized
  source 1..22: mol_type = other DNA
agccttttaatctgctgtttgc

SEQ ID NO: 92011 - DNA, 22 bp, synthetic construct
  misc_feature 1..22: note = chemically synthesized
  source 1..22: mol_type = other DNA
ttaatctgctgtttgctcacat

SEQ ID NO: 92012 - DNA, 22 bp, synthetic construct
  misc_feature 1..22: note = chemically synthesized
  source 1..22: mol_type = other DNA
taatctgctgtttgctcacata

SEQ ID NO: 92013 - DNA, 22 bp, synthetic construct
  misc_feature 1..22: note = chemically synthesized
  source 1..22: mol_type = other DNA
aatctgctgtttgctcacataa

SEQ ID NO: 92014 - DNA, 22 bp, synthetic construct
  misc_feature 1..22: note = chemically synthesized
  source 1..22: mol_type = other DNA
atctgctgtttgctcacataaa

SEQ ID NO: 92015 - DNA, 22 bp, synthetic construct
  misc_feature 1..22: note = chemically synthesized
  source 1..22: mol_type = other DNA
ctgtttgctcacataaacaaaa

SEQ ID NO: 92016 - DNA, 22 bp, synthetic construct
  misc_feature 1..22: note = chemically synthesized
  source 1..22: mol_type = other DNA
tttgctcacataaacaaaaatc

SEQ ID NO: 92017 - DNA, 22 bp, synthetic construct
  misc_feature 1..22: note = chemically synthesized
  source 1..22: mol_type = other DNA
gctcacataaacaaaaatcagt

SEQ ID NO: 92018 - DNA, 22 bp, synthetic construct
  misc_feature 1..22: note = chemically synthesized
  source 1..22: mol_type = other DNA
ctcacataaacaaaaatcagtg

SEQ ID NO: 92019 - DNA, 22 bp, synthetic construct
  misc_feature 1..22: note = chemically synthesized
  source 1..22: mol_type = other DNA
acataaacaaaaatcagtggtt

SEQ ID NO: 92020 - DNA, 22 bp, synthetic construct
  misc_feature 1..22: note = chemically synthesized
  source 1..22: mol_type = other DNA
tcaatattgattgctaataatt

SEQ ID NO: 92021 - DNA, 22 bp, synthetic construct
  misc_feature 1..22: note = chemically synthesized
  source 1..22: mol_type = other DNA
caatattgattgctaataattt

SEQ ID NO: 92022 - DNA, 22 bp, synthetic construct
  misc_feature 1..22: note = chemically synthesized
  source 1..22: mol_type = other DNA
aatattgattgctaataatttt

SEQ ID NO: 92023 - DNA, 22 bp, synthetic construct
  misc_feature 1..22: note = chemically synthesized
  source 1..22: mol_type = other DNA
attgctaataattttttattca

SEQ ID NO: 92024 - DNA, 22 bp, synthetic construct
  misc_feature 1..22: note = chemically synthesized
  source 1..22: mol_type = other DNA
ctaataattttttattcataaa

SEQ ID NO: 92025 - DNA, 22 bp, synthetic construct
  misc_feature 1..22: note = chemically synthesized
  source 1..22: mol_type = other DNA
ataattttttattcataaaaat

SEQ ID NO: 92026 - DNA, 22 bp, synthetic construct
  misc_feature 1..22: note = chemically synthesized
  source 1..22: mol_type = other DNA
tttattcataaaaattgtatat

SEQ ID NO: 92027 - DNA, 22 bp, synthetic construct
  misc_feature 1..22: note = chemically synthesized
  source 1..22: mol_type = other DNA
ttattcataaaaattgtatata

SEQ ID NO: 92028 - DNA, 22 bp, synthetic construct
  misc_feature 1..22: note = chemically synthesized
  source 1..22: mol_type = other DNA
tattcataaaaattgtatatat

SEQ ID NO: 92029 - DNA, 22 bp, synthetic construct
  misc_feature 1..22: note = chemically synthesized
  source 1..22: mol_type = other DNA
attcataaaaattgtatatatt

SEQ ID NO: 92030 - DNA, 22 bp, synthetic construct
  misc_feature 1..22: note = chemically synthesized
  source 1..22: mol_type = other DNA
ttcataaaaattgtatatattt

SEQ ID NO: 92031 - DNA, 22 bp, synthetic construct
  misc_feature 1..22: note = chemically synthesized
  source 1..22: mol_type = other DNA
ataaaaattgtatatatttatg

SEQ ID NO: 92032 - DNA, 22 bp, synthetic construct
  misc_feature 1..22: note = chemically synthesized
  source 1..22: mol_type = other DNA
tatatatttatgaatgcacaca

SEQ ID NO: 92033 - DNA, 22 bp, synthetic construct
  misc_feature 1..22: note = chemically synthesized
  source 1..22: mol_type = other DNA
atgaatgcacacatgtgtgtgt

SEQ ID NO: 92034 - DNA, 22 bp, synthetic construct
  misc_feature 1..22: note = chemically synthesized
  source 1..22: mol_type = other DNA
tgaatgcacacatgtgtgtgta

SEQ ID NO: 92035 - DNA, 22 bp, synthetic construct
  misc_feature 1..22: note = chemically synthesized
  source 1..22: mol_type = other DNA
ccactaaaaacaataaaacttg

SEQ ID NO: 92036 - DNA, 22 bp, synthetic construct
  misc_feature 1..22: note = chemically synthesized
  source 1..22: mol_type = other DNA
aaaacaataaaacttgtacata

SEQ ID NO: 92037 - DNA, 22 bp, synthetic construct
  misc_feature 1..22: note = chemically synthesized
  source 1..22: mol_type = other DNA
gtacatatttatagaaacagag

SEQ ID NO: 92038 - DNA, 22 bp, synthetic construct
  misc_feature 1..22: note = chemically synthesized
  source 1..22: mol_type = other DNA
tacatatttatagaaacagaga

SEQ ID NO: 92039 - DNA, 22 bp, synthetic construct
  misc_feature 1..22: note = chemically synthesized
  source 1..22: mol_type = other DNA
atagaaacagagagctgaacaa

SEQ ID NO: 92040 - DNA, 22 bp, synthetic construct
  misc_feature 1..22: note = chemically synthesized
  source 1..22: mol_type = other DNA
tagaaacagagagctgaacaaa

SEQ ID NO: 92041 - DNA, 22 bp, synthetic construct
  misc_feature 1..22: note = chemically synthesized
  source 1..22: mol_type = other DNA
aacaaagagatttattatttat

SEQ ID NO: 92042 - DNA, 22 bp, synthetic construct
  misc_feature 1..22: note = chemically synthesized
  source 1..22: mol_type = other DNA
attatttattgggtagtgtgat

SEQ ID NO: 92043 - DNA, 22 bp, synthetic construct
  misc_feature 1..22: note = chemically synthesized
  source 1..22: mol_type = other DNA
ttatttattgggtagtgtgata

SEQ ID NO: 92044 - DNA, 22 bp, synthetic construct
  misc_feature 1..22: note = chemically synthesized
  source 1..22: mol_type = other DNA
tttattgggtagtgtgataaag

SEQ ID NO: 92045 - DNA, 22 bp, synthetic construct
  misc_feature 1..22: note = chemically synthesized
  source 1..22: mol_type = other DNA
attgggtagtgtgataaagact

SEQ ID NO: 92046 - DNA, 22 bp, synthetic construct
  misc_feature 1..22: note = chemically synthesized
  source 1..22: mol_type = other DNA
ttgggtagtgtgataaagactt

SEQ ID NO: 92047 - DNA, 22 bp, synthetic construct
  misc_feature 1..22: note = chemically synthesized
  source 1..22: mol_type = other DNA
ggtagtgtgataaagactttac

SEQ ID NO: 92048 - DNA, 22 bp, synthetic construct
  misc_feature 1..22: note = chemically synthesized
  source 1..22: mol_type = other DNA
tacaggtatcaattcaattagt

SEQ ID NO: 92049 - DNA, 22 bp, synthetic construct
  misc_feature 1..22: note = chemically synthesized
  source 1..22: mol_type = other DNA
acaggtatcaattcaattagtt

SEQ ID NO: 92050 - DNA, 22 bp, synthetic construct
  misc_feature 1..22: note = chemically synthesized
  source 1..22: mol_type = other DNA
caggtatcaattcaattagttc

SEQ ID NO: 92051 - DNA, 22 bp, synthetic construct
  misc_feature 1..22: note = chemically synthesized
  source 1..22: mol_type = other DNA
aattagttcttacaaaaatcct

SEQ ID NO: 92052 - DNA, 22 bp, synthetic construct
  misc_feature 1..22: note = chemically synthesized
  source 1..22: mol_type = other DNA
gttcttacaaaaatcctttaag

SEQ ID NO: 92053 - DNA, 22 bp, synthetic construct
  misc_feature 1..22: note = chemically synthesized
  source 1..22: mol_type = other DNA
ttacaaaaatcctttaaggaaa

SEQ ID NO: 92054 - DNA, 22 bp, synthetic construct
  misc_feature 1..22: note = chemically synthesized
  source 1..22: mol_type = other DNA
acaaaaatcctttaaggaaaat

SEQ ID NO: 92055 - DNA, 22 bp, synthetic construct
  misc_feature 1..22: note = chemically synthesized
  source 1..22: mol_type = other DNA
caaaaatcctttaaggaaaata

SEQ ID NO: 92056 - DNA, 22 bp, synthetic construct
  misc_feature 1..22: note = chemically synthesized
  source 1..22: mol_type = other DNA
taaggaaaatacatatgataaa

SEQ ID NO: 92057 - DNA, 22 bp, synthetic construct
  misc_feature 1..22: note = chemically synthesized
  source 1..22: mol_type = other DNA
aaggaaaatacatatgataaat

SEQ ID NO: 92058 - DNA, 22 bp, synthetic construct
  misc_feature 1..22: note = chemically synthesized
  source 1..22: mol_type = other DNA
aggaaaatacatatgataaatc

SEQ ID NO: 92059 - DNA, 22 bp, synthetic construct
  misc_feature 1..22: note = chemically synthesized
  source 1..22: mol_type = other DNA
tcatatgcacagcttaatggaa

SEQ ID NO: 92060 - DNA, 22 bp, synthetic construct
  misc_feature 1..22: note = chemically synthesized
  source 1..22: mol_type = other DNA
aatggaattataaatatgtttc

SEQ ID NO: 92061 - DNA, 22 bp, synthetic construct
  misc_feature 1..22: note = chemically synthesized
  source 1..22: mol_type = other DNA
atggaattataaatatgtttca

SEQ ID NO: 92062 - DNA, 22 bp, synthetic construct
  misc_feature 1..22: note = chemically synthesized
  source 1..22: mol_type = other DNA
taaatatgtttcaggtcacaga

SEQ ID NO: 92063 - DNA, 22 bp, synthetic construct
  misc_feature 1..22: note = chemically synthesized
  source 1..22: mol_type = other DNA
caggtcacagaggtagcagatg

SEQ ID NO: 92064 - DNA, 22 bp, synthetic construct
  misc_feature 1..22: note = chemically synthesized
  source 1..22: mol_type = other DNA
aggtcacagaggtagcagatga

SEQ ID NO: 92065 - DNA, 22 bp, synthetic construct
  misc_feature 1..22: note = chemically synthesized
  source 1..22: mol_type = other DNA
acatgccttagagataattctc

SEQ ID NO: 92066 - DNA, 22 bp, synthetic construct
  misc_feature 1..22: note = chemically synthesized
  source 1..22: mol_type = other DNA
agagataattctctattaatac

SEQ ID NO: 92067 - DNA, 22 bp, synthetic construct
  misc_feature 1..22: note = chemically synthesized
  source 1..22: mol_type = other DNA
gagataattctctattaatacc

SEQ ID NO: 92068 - DNA, 22 bp, synthetic construct
  misc_feature 1..22: note = chemically synthesized
  source 1..22: mol_type = other DNA
tctattaataccattgaagacg

SEQ ID NO: 92069 - DNA, 22 bp, synthetic construct
  misc_feature 1..22: note = chemically synthesized
  source 1..22: mol_type = other DNA
tattaataccattgaagacgtt

SEQ ID NO: 92070 - DNA, 22 bp, synthetic construct
  misc_feature 1..22: note = chemically synthesized
  source 1..22: mol_type = other DNA
ttaataccattgaagacgttaa

SEQ ID NO: 92071 - DNA, 22 bp, synthetic construct
  misc_feature 1..22: note = chemically synthesized
  source 1..22: mol_type = other DNA
ataccattgaagacgttaagag

SEQ ID NO: 92072 - DNA, 22 bp, synthetic construct
  misc_feature 1..22: note = chemically synthesized
  source 1..22: mol_type = other DNA
aagacgttaagagaaagttcaa

SEQ ID NO: 92073 - DNA, 22 bp, synthetic construct
  misc_feature 1..22: note = chemically synthesized
  source 1..22: mol_type = other DNA
agagaaagttcaaggtttggcc

SEQ ID NO: 92074 - DNA, 22 bp, synthetic construct
  misc_feature 1..22: note = chemically synthesized
  source 1..22: mol_type = other DNA
aaggtttggcccttgattggtc

SEQ ID NO: 92075 - DNA, 22 bp, synthetic construct
  misc_feature 1..22: note = chemically synthesized
  source 1..22: mol_type = other DNA
ggcccttgattggtctctagga

SEQ ID NO: 92076 - DNA, 22 bp, synthetic construct
  misc_feature 1..22: note = chemically synthesized
  source 1..22: mol_type = other DNA
gcccttgattggtctctaggaa

SEQ ID NO: 92077 - DNA, 22 bp, synthetic construct
  misc_feature 1..22: note = chemically synthesized
  source 1..22: mol_type = other DNA
gattggtctctaggaagcccca

SEQ ID NO: 92078 - DNA, 22 bp, synthetic construct
  misc_feature 1..22: note = chemically synthesized
  source 1..22: mol_type = other DNA
attggtctctaggaagccccat

SEQ ID NO: 92079 - DNA, 22 bp, synthetic construct
  misc_feature 1..22: note = chemically synthesized
  source 1..22: mol_type = other DNA
gtctctaggaagccccatcccc

SEQ ID NO: 92080 - DNA, 22 bp, synthetic construct
  misc_feature 1..22: note = chemically synthesized
  source 1..22: mol_type = other DNA
taggaagccccatccccacttc

SEQ ID NO: 92081 - DNA, 22 bp, synthetic construct
  misc_feature 1..22: note = chemically synthesized
  source 1..22: mol_type = other DNA
ggaagccccatccccacttcat

SEQ ID NO: 92082 - DNA, 22 bp, synthetic construct
  misc_feature 1..22: note = chemically synthesized
  source 1..22: mol_type = other DNA
cattataaataataaaaaatat

SEQ ID NO: 92083 - DNA, 22 bp, synthetic construct
  misc_feature 1..22: note = chemically synthesized
  source 1..22: mol_type = other DNA
attataaataataaaaaatatg

SEQ ID NO: 92084 - DNA, 22 bp, synthetic construct
  misc_feature 1..22: note = chemically synthesized
  source 1..22: mol_type = other DNA
taaataataaaaaatatgttgt

SEQ ID NO: 92085 - DNA, 22 bp, synthetic construct
  misc_feature 1..22: note = chemically synthesized
  source 1..22: mol_type = other DNA
tttaaaataagtagaagtgaac

SEQ ID NO: 92086 - DNA, 22 bp, synthetic construct
  misc_feature 1..22: note = chemically synthesized
  source 1..22: mol_type = other DNA
aaaataagtagaagtgaactgc

SEQ ID NO: 92087 - DNA, 22 bp, synthetic construct
  misc_feature 1..22: note = chemically synthesized
  source 1..22: mol_type = other DNA
aaataagtagaagtgaactgca

SEQ ID NO: 92088 - DNA, 22 bp, synthetic construct
  misc_feature 1..22: note = chemically synthesized
  source 1..22: mol_type = other DNA
cagtcaccaaatgagctatatc

SEQ ID NO: 92089 - DNA, 22 bp, synthetic construct
  misc_feature 1..22: note = chemically synthesized
  source 1..22: mol_type = other DNA
tatcctgagtttcatacaaata

SEQ ID NO: 92090 - DNA, 22 bp, synthetic construct
  misc_feature 1..22: note = chemically synthesized
  source 1..22: mol_type = other DNA
agtttcatacaaataatagcct

SEQ ID NO: 92091 - DNA, 22 bp, synthetic construct
  misc_feature 1..22: note = chemically synthesized
  source 1..22: mol_type = other DNA
catacaaataatagcctataca

SEQ ID NO: 92092 - DNA, 22 bp, synthetic construct
  misc_feature 1..22: note = chemically synthesized
  source 1..22: mol_type = other DNA
atacaaataatagcctatacag

SEQ ID NO: 92093 - DNA, 22 bp, synthetic construct
  misc_feature 1..22: note = chemically synthesized
  source 1..22: mol_type = other DNA
tacagaacttctaatttgagtc

SEQ ID NO: 92094 - DNA, 22 bp, synthetic construct
  misc_feature 1..22: note = chemically synthesized
  source 1..22: mol_type = other DNA
ctaatttgagtcctaacatacc

SEQ ID NO: 92095 - DNA, 22 bp, synthetic construct
  misc_feature 1..22: note = chemically synthesized
  source 1..22: mol_type = other DNA
taatttgagtcctaacatacct

SEQ ID NO: 92096 - DNA, 22 bp, synthetic construct
  misc_feature 1..22: note = chemically synthesized
  source 1..22: mol_type = other DNA
atttgagtcctaacatacctct

SEQ ID NO: 92097 - DNA, 22 bp, synthetic construct
  misc_feature 1..22: note = chemically synthesized
  source 1..22: mol_type = other DNA
gagtcctaacatacctctacac

SEQ ID NO: 92098 - DNA, 22 bp, synthetic construct
  misc_feature 1..22: note = chemically synthesized
  source 1..22: mol_type = other DNA
agtcctaacatacctctacaca

SEQ ID NO: 92099 - DNA, 22 bp, synthetic construct
  misc_feature 1..22: note = chemically synthesized
  source 1..22: mol_type = other DNA
acatacctctacacactaccaa

SEQ ID NO: 92100 - DNA, 22 bp, synthetic construct
  misc_feature 1..22: note = chemically synthesized
  source 1..22: mol_type = other DNA
tacacactaccaacaatcctct

SEQ ID NO: 92101 - DNA, 22 bp, synthetic construct
  misc_feature 1..22: note = chemically synthesized
  source 1..22: mol_type = other DNA
cacactaccaacaatcctctta

SEQ ID NO: 92102 - DNA, 22 bp, synthetic construct
  misc_feature 1..22: note = chemically synthesized
  source 1..22: mol_type = other DNA
ccaacaatcctcttacacctcc

SEQ ID NO: 92103 - DNA, 22 bp, synthetic construct
  misc_feature 1..22: note = chemically synthesized
  source 1..22: mol_type = other DNA
ttacacctccaaagagtacctc

SEQ ID NO: 92104 - DNA, 22 bp, synthetic construct
  misc_feature 1..22: note = chemically synthesized
  source 1..22: mol_type = other DNA
acacctccaaagagtacctcca

SEQ ID NO: 92105 - DNA, 22 bp, synthetic construct
  misc_feature 1..22: note = chemically synthesized
  source 1..22: mol_type = other DNA
cacctccaaagagtacctccat

SEQ ID NO: 92106 - DNA, 22 bp, synthetic construct
  misc_feature 1..22: note = chemically synthesized
  source 1..22: mol_type = other DNA
caaagagtacctccattgacct

SEQ ID NO: 92107 - DNA, 22 bp, synthetic construct
  misc_feature 1..22: note = chemically synthesized
  source 1..22: mol_type = other DNA
cattgacctccctttctgtaaa

SEQ ID NO: 92108 - DNA, 22 bp, synthetic construct
  misc_feature 1..22: note = chemically synthesized
  source 1..22: mol_type = other DNA
acctccctttctgtaaaaacat

SEQ ID NO: 92109 - DNA, 22 bp, synthetic construct
  misc_feature 1..22: note = chemically synthesized
  source 1..22: mol_type = other DNA
cctttctgtaaaaacattgtct

SEQ ID NO: 92110 - DNA, 22 bp, synthetic construct
  misc_feature 1..22: note = chemically synthesized
  source 1..22: mol_type = other DNA
tctgtaaaaacattgtcttatt

SEQ ID NO: 92111 - DNA, 22 bp, synthetic construct
  misc_feature 1..22: note = chemically synthesized
  source 1..22: mol_type = other DNA
ctgtaaaaacattgtcttattc

SEQ ID NO: 92112 - DNA, 22 bp, synthetic construct
  misc_feature 1..22: note = chemically synthesized
  source 1..22: mol_type = other DNA
tgtaaaaacattgtcttattct

SEQ ID NO: 92113 - DNA, 22 bp, synthetic construct
  misc_feature 1..22: note = chemically synthesized
  source 1..22: mol_type = other DNA
taaaaacattgtcttattctag

SEQ ID NO: 92114 - DNA, 22 bp, synthetic construct
  misc_feature 1..22: note = chemically synthesized
  source 1..22: mol_type = other DNA
tcttattctagagacgatttcc

SEQ ID NO: 92115 - DNA, 22 bp, synthetic construct
  misc_feature 1..22: note = chemically synthesized
  source 1..22: mol_type = other DNA
attctagagacgatttcccctt

SEQ ID NO: 92116 - DNA, 22 bp, synthetic construct
  misc_feature 1..22: note = chemically synthesized
  source 1..22: mol_type = other DNA
ttctagagacgatttccccttc

SEQ ID NO: 92117 - DNA, 22 bp, synthetic construct
  misc_feature 1..22: note = chemically synthesized
  source 1..22: mol_type = other DNA
tagagacgatttccccttccta

SEQ ID NO: 92118 - DNA, 22 bp, synthetic construct
  misc_feature 1..22: note = chemically synthesized
  source 1..22: mol_type = other DNA
gagacgatttccccttcctagg

SEQ ID NO: 92119 - DNA, 22 bp, synthetic construct
  misc_feature 1..22: note = chemically synthesized
  source 1..22: mol_type = other DNA
ccccttcctaggagtaactacc

SEQ ID NO: 92120 - DNA, 22 bp, synthetic construct
  misc_feature 1..22: note = chemically synthesized
  source 1..22: mol_type = other DNA
cccttcctaggagtaactaccc

SEQ ID NO: 92121 - DNA, 22 bp, synthetic construct
  misc_feature 1..22: note = chemically synthesized
  source 1..22: mol_type = other DNA
cctaggagtaactaccccacta

SEQ ID NO: 92122 - DNA, 22 bp, synthetic construct
  misc_feature 1..22: note = chemically synthesized
  source 1..22: mol_type = other DNA
ctaggagtaactaccccactaa

SEQ ID NO: 92123 - DNA, 22 bp, synthetic construct
  misc_feature 1..22: note = chemically synthesized
  source 1..22: mol_type = other DNA
ggagtaactaccccactaaatc

SEQ ID NO: 92124 - DNA, 22 bp, synthetic construct
  misc_feature 1..22: note = chemically synthesized
  source 1..22: mol_type = other DNA
ccccactaaatccacccacgag

SEQ ID NO: 92125 - DNA, 22 bp, synthetic construct
  misc_feature 1..22: note = chemically synthesized
  source 1..22: mol_type = other DNA
aatccacccacgagttctctct

SEQ ID NO: 92126 - DNA, 22 bp, synthetic construct
  misc_feature 1..22: note = chemically synthesized
  source 1..22: mol_type = other DNA
tctcttttcttgcaggattgca

SEQ ID NO: 92127 - DNA, 22 bp, synthetic construct
  misc_feature 1..22: note = chemically synthesized
  source 1..22: mol_type = other DNA
tcttttcttgcaggattgcaag

SEQ ID NO: 92128 - DNA, 22 bp, synthetic construct
  misc_feature 1..22: note = chemically synthesized
  source 1..22: mol_type = other DNA
ttttcttgcaggattgcaagaa

SEQ ID NO: 92129 - DNA, 22 bp, synthetic construct
  misc_feature 1..22: note = chemically synthesized
  source 1..22: mol_type = other DNA
ttcttgcaggattgcaagaaag

SEQ ID NO: 92130 - DNA, 22 bp, synthetic construct
  misc_feature 1..22: note = chemically synthesized
  source 1..22: mol_type = other DNA
tcttgcaggattgcaagaaagt

SEQ ID NO: 92131 - DNA, 22 bp, synthetic construct
  misc_feature 1..22: note = chemically synthesized
  source 1..22: mol_type = other DNA
cttgcaggattgcaagaaagta

SEQ ID NO: 92132 - DNA, 22 bp, synthetic construct
  misc_feature 1..22: note = chemically synthesized
  source 1..22: mol_type = other DNA
ttgcaggattgcaagaaagtat

SEQ ID NO: 92133 - DNA, 22 bp, synthetic construct
  misc_feature 1..22: note = chemically synthesized
  source 1..22: mol_type = other DNA
gcaggattgcaagaaagtatct

SEQ ID NO: 92134 - DNA, 22 bp, synthetic construct
  misc_feature 1..22: note = chemically synthesized
  source 1..22: mol_type = other DNA
caggattgcaagaaagtatctt

SEQ ID NO: 92135 - DNA, 22 bp, synthetic construct
  misc_feature 1..22: note = chemically synthesized
  source 1..22: mol_type = other DNA
caagaaagtatcttctctgtcc

SEQ ID NO: 92136 - DNA, 22 bp, synthetic construct
  misc_feature 1..22: note = chemically synthesized
  source 1..22: mol_type = other DNA
ctctgtccttaaactcccattc

SEQ ID NO: 92137 - DNA, 22 bp, synthetic construct
  misc_feature 1..22: note = chemically synthesized
  source 1..22: mol_type = other DNA
tctgtccttaaactcccattct

SEQ ID NO: 92138 - DNA, 22 bp, synthetic construct
  misc_feature 1..22: note = chemically synthesized
  source 1..22: mol_type = other DNA
tgtccttaaactcccattctcc

SEQ ID NO: 92139 - DNA, 22 bp, synthetic construct
  misc_feature 1..22: note = chemically synthesized
  source 1..22: mol_type = other DNA
tccttaaactcccattctccaa

SEQ ID NO: 92140 - DNA, 22 bp, synthetic construct
  misc_feature 1..22: note = chemically synthesized
  source 1..22: mol_type = other DNA
aaactcccattctccaacattc

SEQ ID NO: 92141 - DNA, 22 bp, synthetic construct
  misc_feature 1..22: note = chemically synthesized
  source 1..22: mol_type = other DNA
aactcccattctccaacattct

SEQ ID NO: 92142 - DNA, 22 bp, synthetic construct
  misc_feature 1..22: note = chemically synthesized
  source 1..22: mol_type = other DNA
ccattctccaacattctcattt

SEQ ID NO: 92143 - DNA, 22 bp, synthetic construct
  misc_feature 1..22: note = chemically synthesized
  source 1..22: mol_type = other DNA
tccaacattctcatttccatca

SEQ ID NO: 92144 - DNA, 22 bp, synthetic construct
  misc_feature 1..22: note = chemically synthesized
  source 1..22: mol_type = other DNA
caacattctcatttccatcaga

SEQ ID NO: 92145 - DNA, 22 bp, synthetic construct
  misc_feature 1..22: note = chemically synthesized
  source 1..22: mol_type = other DNA
tcatttccatcagaaatagtgc

SEQ ID NO: 92146 - DNA, 22 bp, synthetic construct
  misc_feature 1..22: note = chemically synthesized
  source 1..22: mol_type = other DNA
atttccatcagaaatagtgcgt

SEQ ID NO: 92147 - DNA, 22 bp, synthetic construct
  misc_feature 1..22: note = chemically synthesized
  source 1..22: mol_type = other DNA
ccatcagaaatagtgcgtcctt

SEQ ID NO: 92148 - DNA, 22 bp, synthetic construct
  misc_feature 1..22: note = chemically synthesized
  source 1..22: mol_type = other DNA
catcagaaatagtgcgtccttt

SEQ ID NO: 92149 - DNA, 22 bp, synthetic construct
  misc_feature 1..22: note = chemically synthesized
  source 1..22: mol_type = other DNA
ttggctgaatcagggtaaaata

SEQ ID NO: 92150 - DNA, 22 bp, synthetic construct
  misc_feature 1..22: note = chemically synthesized
  source 1..22: mol_type = other DNA
tggctgaatcagggtaaaatat

SEQ ID NO: 92151 - DNA, 22 bp, synthetic construct
  misc_feature 1..22: note = chemically synthesized
  source 1..22: mol_type = other DNA
ggctgaatcagggtaaaatata

SEQ ID NO: 92152 - DNA, 22 bp, synthetic construct
  misc_feature 1..22: note = chemically synthesized
  source 1..22: mol_type = other DNA
gctgaatcagggtaaaatataa

SEQ ID NO: 92153 - DNA, 22 bp, synthetic construct
  misc_feature 1..22: note = chemically synthesized
  source 1..22: mol_type = other DNA
aatcagggtaaaatataaagac

SEQ ID NO: 92154 - DNA, 22 bp, synthetic construct
  misc_feature 1..22: note = chemically synthesized
  source 1..22: mol_type = other DNA
cttagagagcatatttctttat

SEQ ID NO: 92155 - DNA, 22 bp, synthetic construct
  misc_feature 1..22: note = chemically synthesized
  source 1..22: mol_type = other DNA
ttagagagcatatttctttatt

SEQ ID NO: 92156 - DNA, 22 bp, synthetic construct
  misc_feature 1..22: note = chemically synthesized
  source 1..22: mol_type = other DNA
agagagcatatttctttattct

SEQ ID NO: 92157 - DNA, 22 bp, synthetic construct
  misc_feature 1..22: note = chemically synthesized
  source 1..22: mol_type = other DNA
gagagcatatttctttattcta

SEQ ID NO: 92158 - DNA, 22 bp, synthetic construct
  misc_feature 1..22: note = chemically synthesized
  source 1..22: mol_type = other DNA
ctttattctatttttatcatgc

SEQ ID NO: 92159 - DNA, 22 bp, synthetic construct
  misc_feature 1..22: note = chemically synthesized
  source 1..22: mol_type = other DNA
tttattctatttttatcatgca

SEQ ID NO: 92160 - DNA, 22 bp, synthetic construct
  misc_feature 1..22: note = chemically synthesized
  source 1..22: mol_type = other DNA
tattctatttttatcatgcagg

SEQ ID NO: 92161 - DNA, 22 bp, synthetic construct
  misc_feature 1..22: note = chemically synthesized
  source 1..22: mol_type = other DNA
attctatttttatcatgcagga

SEQ ID NO: 92162 - DNA, 22 bp, synthetic construct
  misc_feature 1..22: note = chemically synthesized
  source 1..22: mol_type = other DNA
ttctatttttatcatgcaggaa

SEQ ID NO: 92163 - DNA, 22 bp, synthetic construct
  misc_feature 1..22: note = chemically synthesized
  source 1..22: mol_type = other DNA
tatttttatcatgcaggaactg

SEQ ID NO: 92164 - DNA, 22 bp, synthetic construct
  misc_feature 1..22: note = chemically synthesized
  source 1..22: mol_type = other DNA
tttttatcatgcaggaactgaa

SEQ ID NO: 92165 - DNA, 22 bp, synthetic construct
  misc_feature 1..22: note = chemically synthesized
  source 1..22: mol_type = other DNA
ttatcatgcaggaactgaatca

SEQ ID NO: 92166 - DNA, 22 bp, synthetic construct
  misc_feature 1..22: note = chemically synthesized
  source 1..22: mol_type = other DNA
tatcatgcaggaactgaatcag

SEQ ID NO: 92167 - DNA, 22 bp, synthetic construct
  misc_feature 1..22: note = chemically synthesized
  source 1..22: mol_type = other DNA
atcatgcaggaactgaatcagc

SEQ ID NO: 92168 - DNA, 22 bp, synthetic construct
  misc_feature 1..22: note = chemically synthesized
  source 1..22: mol_type = other DNA
tcatgcaggaactgaatcagca

SEQ ID NO: 92169 - DNA, 22 bp, synthetic construct
  misc_feature 1..22: note = chemically synthesized
  source 1..22: mol_type = other DNA
aatcagcaggcaggatactgct

SEQ ID NO: 92170 - DNA, 22 bp, synthetic construct
  misc_feature 1..22: note = chemically synthesized
  source 1..22: mol_type = other DNA
ctcttctccccaacctccccca

SEQ ID NO: 92171 - DNA, 22 bp, synthetic construct
  misc_feature 1..22: note = chemically synthesized
  source 1..22: mol_type = other DNA
ttctccccaacctcccccatct

SEQ ID NO: 92172 - DNA, 22 bp, synthetic construct
  misc_feature 1..22: note = chemically synthesized
  source 1..22: mol_type = other DNA
ctccccaacctcccccatctaa

SEQ ID NO: 92173 - DNA, 22 bp, synthetic construct
  misc_feature 1..22: note = chemically synthesized
  source 1..22: mol_type = other DNA
tccccaacctcccccatctaaa

SEQ ID NO: 92174 - DNA, 22 bp, synthetic construct
  misc_feature 1..22: note = chemically synthesized
  source 1..22: mol_type = other DNA
cccaacctcccccatctaaagg

SEQ ID NO: 92175 - DNA, 22 bp, synthetic construct
  misc_feature 1..22: note = chemically synthesized
  source 1..22: mol_type = other DNA
ccccatctaaaggagatgagat

SEQ ID NO: 92176 - DNA, 22 bp, synthetic construct
  misc_feature 1..22: note = chemically synthesized
  source 1..22: mol_type = other DNA
aaggagatgagattttgggaca

SEQ ID NO: 92177 - DNA, 22 bp, synthetic construct
  misc_feature 1..22: note = chemically synthesized
  source 1..22: mol_type = other DNA
tgggacataggtacaaacatag

SEQ ID NO: 92178 - DNA, 22 bp, synthetic construct
  misc_feature 1..22: note = chemically synthesized
  source 1..22: mol_type = other DNA
gggacataggtacaaacatagt

SEQ ID NO: 92179 - DNA, 22 bp, synthetic construct
  misc_feature 1..22: note = chemically synthesized
  source 1..22: mol_type = other DNA
ggacataggtacaaacatagtg

SEQ ID NO: 92180 - DNA, 22 bp, synthetic construct
  misc_feature 1..22: note = chemically synthesized
  source 1..22: mol_type = other DNA
agtggtcttgtgggctacagca

SEQ ID NO: 92181 - DNA, 22 bp, synthetic construct
  misc_feature 1..22: note = chemically synthesized
  source 1..22: mol_type = other DNA
gtgggctacagcattaaccaca

SEQ ID NO: 92182 - DNA, 22 bp, synthetic construct
  misc_feature 1..22: note = chemically synthesized
  source 1..22: mol_type = other DNA
tgggctacagcattaaccacag

SEQ ID NO: 92183 - DNA, 22 bp, synthetic construct
  misc_feature 1..22: note = chemically synthesized
  source 1..22: mol_type = other DNA
cagcattaaccacagcatttgt

SEQ ID NO: 92184 - DNA, 22 bp, synthetic construct
  misc_feature 1..22: note = chemically synthesized
  source 1..22: mol_type = other DNA
accacagcatttgttagttact

SEQ ID NO: 92185 - DNA, 22 bp, synthetic construct
  misc_feature 1..22: note = chemically synthesized
  source 1..22: mol_type = other DNA
gttagttactgccaagaagcct

SEQ ID NO: 92186 - DNA, 22 bp, synthetic construct
  misc_feature 1..22: note = chemically synthesized
  source 1..22: mol_type = other DNA
ttagttactgccaagaagcctg

SEQ ID NO: 92187 - DNA, 22 bp, synthetic construct
  misc_feature 1..22: note = chemically synthesized
  source 1..22: mol_type = other DNA
gttactgccaagaagcctgtat

SEQ ID NO: 92188 - DNA, 22 bp, synthetic construct
  misc_feature 1..22: note = chemically synthesized
  source 1..22: mol_type = other DNA
ctgccaagaagcctgtatctgt

SEQ ID NO: 92189 - DNA, 22 bp, synthetic construct
  misc_feature 1..22: note = chemically synthesized
  source 1..22: mol_type = other DNA
ccaagaagcctgtatctgtagg

SEQ ID NO: 92190 - DNA, 22 bp, synthetic construct
  misc_feature 1..22: note = chemically synthesized
  source 1..22: mol_type = other DNA
tatctgtagggtaaaatcctcg

SEQ ID NO: 92191 - DNA, 22 bp, synthetic construct
  misc_feature 1..22: note = chemically synthesized
  source 1..22: mol_type = other DNA
tagggtaaaatcctcgctgaag

SEQ ID NO: 92192 - DNA, 22 bp, synthetic construct
  misc_feature 1..22: note = chemically synthesized
  source 1..22: mol_type = other DNA
gctgaagtgggttgccaaaaca

SEQ ID NO: 92193 - DNA, 22 bp, synthetic construct
  misc_feature 1..22: note = chemically synthesized
  source 1..22: mol_type = other DNA
aagtgggttgccaaaacaatca

SEQ ID NO: 92194 - DNA, 22 bp, synthetic construct
  misc_feature 1..22: note = chemically synthesized
  source 1..22: mol_type = other DNA
ccaaaacaatcaatatcacgtt

SEQ ID NO: 92195 - DNA, 22 bp, synthetic construct
  misc_feature 1..22: note = chemically synthesized
  source 1..22: mol_type = other DNA
cctaagagctggggagggagtg

SEQ ID NO: 92196 - DNA, 22 bp, synthetic construct
  misc_feature 1..22: note = chemically synthesized
  source 1..22: mol_type = other DNA
agagctggggagggagtgaaga

SEQ ID NO: 92197 - DNA, 22 bp, synthetic construct
  misc_feature 1..22: note = chemically synthesized
  source 1..22: mol_type = other DNA
gggagggagtgaagataaaaaa

SEQ ID NO: 92198 - DNA, 22 bp, synthetic construct
  misc_feature 1..22: note = chemically synthesized
  source 1..22: mol_type = other DNA
aagctggacttgcagtaaatag

SEQ ID NO: 92199 - DNA, 22 bp, synthetic construct
  misc_feature 1..22: note = chemically synthesized
  source 1..22: mol_type = other DNA
gacttgcagtaaatagatataa

SEQ ID NO: 92200 - DNA, 22 bp, synthetic construct
  misc_feature 1..22: note = chemically synthesized
  source 1..22: mol_type = other DNA
gcagtaaatagatataacactt

SEQ ID NO: 92201 - DNA, 22 bp, synthetic construct
  misc_feature 1..22: note = chemically synthesized
  source 1..22: mol_type = other DNA
cagtaaatagatataacactta

SEQ ID NO: 92202 - DNA, 22 bp, synthetic construct
  misc_feature 1..22: note = chemically synthesized
  source 1..22: mol_type = other DNA
acatcctttttcaccagagttt

SEQ ID NO: 92203 - DNA, 22 bp, synthetic construct
  misc_feature 1..22: note = chemically synthesized
  source 1..22: mol_type = other DNA
catcctttttcaccagagtttg

SEQ ID NO: 92204 - DNA, 22 bp, synthetic construct
  misc_feature 1..22: note = chemically synthesized
  source 1..22: mol_type = other DNA
tttcaccagagtttgagcaact

SEQ ID NO: 92205 - DNA, 22 bp, synthetic construct
  misc_feature 1..22: note = chemically synthesized
  source 1..22: mol_type = other DNA
ttcaccagagtttgagcaactc

SEQ ID NO: 92206 - DNA, 22 bp, synthetic construct
  misc_feature 1..22: note = chemically synthesized
  source 1..22: mol_type = other DNA
tcaccagagtttgagcaactct

SEQ ID NO: 92207 - DNA, 22 bp, synthetic construct
  misc_feature 1..22: note = chemically synthesized
  source 1..22: mol_type = other DNA
caccagagtttgagcaactctc

SEQ ID NO: 92208 - DNA, 22 bp, synthetic construct
  misc_feature 1..22: note = chemically synthesized
  source 1..22: mol_type = other DNA
accagagtttgagcaactctca

SEQ ID NO: 92209 - DNA, 22 bp, synthetic construct
  misc_feature 1..22: note = chemically synthesized
  source 1..22: mol_type = other DNA
gagcaactctcaccattatggg

SEQ ID NO: 92210 - DNA, 22 bp, synthetic construct
  misc_feature 1..22: note = chemically synthesized
  source 1..22: mol_type = other DNA
agcaactctcaccattatgggc

SEQ ID NO: 92211 - DNA, 22 bp, synthetic construct
  misc_feature 1..22: note = chemically synthesized
  source 1..22: mol_type = other DNA
tcaccattatgggctagatatc

SEQ ID NO: 92212 - DNA, 22 bp, synthetic construct
  misc_feature 1..22: note = chemically synthesized
  source 1..22: mol_type = other DNA
accattatgggctagatatcag

SEQ ID NO: 92213 - DNA, 22 bp, synthetic construct
  misc_feature 1..22: note = chemically synthesized
  source 1..22: mol_type = other DNA
tgggctagatatcagcttcaat

SEQ ID NO: 92214 - DNA, 22 bp, synthetic construct
  misc_feature 1..22: note = chemically synthesized
  source 1..22: mol_type = other DNA
gatatcagcttcaatatgactg

SEQ ID NO: 92215 - DNA, 22 bp, synthetic construct
  misc_feature 1..22: note = chemically synthesized
  source 1..22: mol_type = other DNA
caatatgactggcagccctgca

SEQ ID NO: 92216 - DNA, 22 bp, synthetic construct
  misc_feature 1..22: note = chemically synthesized
  source 1..22: mol_type = other DNA
aatatgactggcagccctgcac

SEQ ID NO: 92217 - DNA, 22 bp, synthetic construct
  misc_feature 1..22: note = chemically synthesized
  source 1..22: mol_type = other DNA
gcagccctgcacctcccattgt

SEQ ID NO: 92218 - DNA, 22 bp, synthetic construct
  misc_feature 1..22: note = chemically synthesized
  source 1..22: mol_type = other DNA
cacctcccattgtgtcctatcc

SEQ ID NO: 92219 - DNA, 22 bp, synthetic construct
  misc_feature 1..22: note = chemically synthesized
  source 1..22: mol_type = other DNA
ccattgtgtcctatccttctct

SEQ ID NO: 92220 - DNA, 22 bp, synthetic construct
  misc_feature 1..22: note = chemically synthesized
  source 1..22: mol_type = other DNA
tgtcctatccttctcttacttg

SEQ ID NO: 92221 - DNA, 22 bp, synthetic construct
  misc_feature 1..22: note = chemically synthesized
  source 1..22: mol_type = other DNA
tccttctcttacttgctatgcc

SEQ ID NO: 92222 - DNA, 22 bp, synthetic construct
  misc_feature 1..22: note = chemically synthesized
  source 1..22: mol_type = other DNA
ctcttacttgctatgccaactc

SEQ ID NO: 92223 - DNA, 22 bp, synthetic construct
  misc_feature 1..22: note = chemically synthesized
  source 1..22: mol_type = other DNA
tcttacttgctatgccaactca

SEQ ID NO: 92224 - DNA, 22 bp, synthetic construct
  misc_feature 1..22: note = chemically synthesized
  source 1..22: mol_type = other DNA
ttacttgctatgccaactcact

SEQ ID NO: 92225 - DNA, 22 bp, synthetic construct
  misc_feature 1..22: note = chemically synthesized
  source 1..22: mol_type = other DNA
acttgctatgccaactcactac

SEQ ID NO: 92226 - DNA, 22 bp, synthetic construct
  misc_feature 1..22: note = chemically synthesized
  source 1..22: mol_type = other DNA
cttgctatgccaactcactacc

SEQ ID NO: 92227 - DNA, 22 bp, synthetic construct
  misc_feature 1..22: note = chemically synthesized
  source 1..22: mol_type = other DNA
gctatgccaactcactacccca

SEQ ID NO: 92228 - DNA, 22 bp, synthetic construct
  misc_feature 1..22: note = chemically synthesized
  source 1..22: mol_type = other DNA
ctatgccaactcactaccccaa

SEQ ID NO: 92229 - DNA, 22 bp, synthetic construct
  misc_feature 1..22: note = chemically synthesized
  source 1..22: mol_type = other DNA
tgccaactcactaccccaacat

SEQ ID NO: 92230 - DNA, 22 bp, synthetic construct
  misc_feature 1..22: note = chemically synthesized
  source 1..22: mol_type = other DNA
actaccccaacatattgtgatt

SEQ ID NO: 92231 - DNA, 22 bp, synthetic construct
  misc_feature 1..22: note = chemically synthesized
  source 1..22: mol_type = other DNA
ccccaacatattgtgattgttt

SEQ ID NO: 92232 - DNA, 22 bp, synthetic construct
  misc_feature 1..22: note = chemically synthesized
  source 1..22: mol_type = other DNA
tgattgtttcatttttttttta

SEQ ID NO: 92233 - DNA, 22 bp, synthetic construct
  misc_feature 1..22: note = chemically synthesized
  source 1..22: mol_type = other DNA
tttcattttttttttagagact

SEQ ID NO: 92234 - DNA, 22 bp, synthetic construct
  misc_feature 1..22: note = chemically synthesized
  source 1..22: mol_type = other DNA
cattttttttttagagacttcg

SEQ ID NO: 92235 - DNA, 22 bp, synthetic construct
  misc_feature 1..22: note = chemically synthesized
  source 1..22: mol_type = other DNA
attttttttttagagacttcgt

SEQ ID NO: 92236 - DNA, 22 bp, synthetic construct
  misc_feature 1..22: note = chemically synthesized
  source 1..22: mol_type = other DNA
tttttttagagacttcgtcctt

SEQ ID NO: 92237 - DNA, 22 bp, synthetic construct
  misc_feature 1..22: note = chemically synthesized
  source 1..22: mol_type = other DNA
ttttttagagacttcgtccttt

SEQ ID NO: 92238 - DNA, 22 bp, synthetic construct
  misc_feature 1..22: note = chemically synthesized
  source 1..22: mol_type = other DNA
tttttagagacttcgtcctttt

SEQ ID NO: 92239 - DNA, 22 bp, synthetic construct
  misc_feature 1..22: note = chemically synthesized
  source 1..22: mol_type = other DNA
ttttagagacttcgtcctttta

SEQ ID NO: 92240 - DNA, 22 bp, synthetic construct
  misc_feature 1..22: note = chemically synthesized
  source 1..22: mol_type = other DNA
tttagagacttcgtccttttaa

SEQ ID NO: 92241 - DNA, 22 bp, synthetic construct
  misc_feature 1..22: note = chemically synthesized
  source 1..22: mol_type = other DNA
ttagagacttcgtccttttaaa

SEQ ID NO: 92242 - DNA, 22 bp, synthetic construct
  misc_feature 1..22: note = chemically synthesized
  source 1..22: mol_type = other DNA
tagagacttcgtccttttaaaa

SEQ ID NO: 92243 - DNA, 22 bp, synthetic construct
  misc_feature 1..22: note = chemically synthesized
  source 1..22: mol_type = other DNA
agagacttcgtccttttaaaaa

SEQ ID NO: 92244 - DNA, 22 bp, synthetic construct
  misc_feature 1..22: note = chemically synthesized
  source 1..22: mol_type = other DNA
gagacttcgtccttttaaaaag

SEQ ID NO: 92245 - DNA, 22 bp, synthetic construct
  misc_feature 1..22: note = chemically synthesized
  source 1..22: mol_type = other DNA
cgtccttttaaaaagtaggata

SEQ ID NO: 92246 - DNA, 22 bp, synthetic construct
  misc_feature 1..22: note = chemically synthesized
  source 1..22: mol_type = other DNA
gtccttttaaaaagtaggataa

SEQ ID NO: 92247 - DNA, 22 bp, synthetic construct
  misc_feature 1..22: note = chemically synthesized
  source 1..22: mol_type = other DNA
ttaaaaagtaggataatagtac

SEQ ID NO: 92248 - DNA, 22 bp, synthetic construct
  misc_feature 1..22: note = chemically synthesized
  source 1..22: mol_type = other DNA
taaaaagtaggataatagtact

SEQ ID NO: 92249 - DNA, 22 bp, synthetic construct
  misc_feature 1..22: note = chemically synthesized
  source 1..22: mol_type = other DNA
aaaaagtaggataatagtactt

SEQ ID NO: 92250 - DNA, 22 bp, synthetic construct
  misc_feature 1..22: note = chemically synthesized
  source 1..22: mol_type = other DNA
aaaagtaggataatagtacttc

SEQ ID NO: 92251 - DNA, 22 bp, synthetic construct
  misc_feature 1..22: note = chemically synthesized
  source 1..22: mol_type = other DNA
caaggaacagtaatggatagga

SEQ ID NO: 92252 - DNA, 22 bp, synthetic construct
  misc_feature 1..22: note = chemically synthesized
  source 1..22: mol_type = other DNA
aaggaacagtaatggataggat

SEQ ID NO: 92253 - DNA, 22 bp, synthetic construct
  misc_feature 1..22: note = chemically synthesized
  source 1..22: mol_type = other DNA
tcccaaacactcataacaaaga

SEQ ID NO: 92254 - DNA, 22 bp, synthetic construct
  misc_feature 1..22: note = chemically synthesized
  source 1..22: mol_type = other DNA
cccaaacactcataacaaagaa

SEQ ID NO: 92255 - DNA, 22 bp, synthetic construct
  misc_feature 1..22: note = chemically synthesized
  source 1..22: mol_type = other DNA
ccaaacactcataacaaagaat

SEQ ID NO: 92256 - DNA, 22 bp, synthetic construct
  misc_feature 1..22: note = chemically synthesized
  source 1..22: mol_type = other DNA
ataacaaagaatcctgtaccat

SEQ ID NO: 92257 - DNA, 22 bp, synthetic construct
  misc_feature 1..22: note = chemically synthesized
  source 1..22: mol_type = other DNA
taccatgcgtacaaaagtatac

SEQ ID NO: 92258 - DNA, 22 bp, synthetic construct
  misc_feature 1..22: note = chemically synthesized
  source 1..22: mol_type = other DNA
ggagggaaacaatcctcttttt

SEQ ID NO: 92259 - DNA, 22 bp, synthetic construct
  misc_feature 1..22: note = chemically synthesized
  source 1..22: mol_type = other DNA
tttttaacagcttcccactact

SEQ ID NO: 92260 - DNA, 22 bp, synthetic construct
  misc_feature 1..22: note = chemically synthesized
  source 1..22: mol_type = other DNA
tttaacagcttcccactacttt

SEQ ID NO: 92261 - DNA, 22 bp, synthetic construct
  misc_feature 1..22: note = chemically synthesized
  source 1..22: mol_type = other DNA
ttaacagcttcccactactttg

SEQ ID NO: 92262 - DNA, 22 bp, synthetic construct
  misc_feature 1..22: note = chemically synthesized
  source 1..22: mol_type = other DNA
taacagcttcccactactttgt

SEQ ID NO: 92263 - DNA, 22 bp, synthetic construct
  misc_feature 1..22: note = chemically synthesized
  source 1..22: mol_type = other DNA
aacagcttcccactactttgtt

SEQ ID NO: 92264 - DNA, 22 bp, synthetic construct
  misc_feature 1..22: note = chemically synthesized
  source 1..22: mol_type = other DNA
acagcttcccactactttgttc

SEQ ID NO: 92265 - DNA, 22 bp, synthetic construct
  misc_feature 1..22: note = chemically synthesized
  source 1..22: mol_type = other DNA
cccactactttgttcagttgat

SEQ ID NO: 92266 - DNA, 22 bp, synthetic construct
  misc_feature 1..22: note = chemically synthesized
  source 1..22: mol_type = other DNA
ccactactttgttcagttgatc

SEQ ID NO: 92267 - DNA, 22 bp, synthetic construct
  misc_feature 1..22: note = chemically synthesized
  source 1..22: mol_type = other DNA
ctttgttcagttgatctttttc

SEQ ID NO: 92268 - DNA, 22 bp, synthetic construct
  misc_feature 1..22: note = chemically synthesized
  source 1..22: mol_type = other DNA
tgttcagttgatctttttctaa

SEQ ID NO: 92269 - DNA, 22 bp, synthetic construct
  misc_feature 1..22: note = chemically synthesized
  source 1..22: mol_type = other DNA
gttcagttgatctttttctaac

SEQ ID NO: 92270 - DNA, 22 bp, synthetic construct
  misc_feature 1..22: note = chemically synthesized
  source 1..22: mol_type = other DNA
ttcagttgatctttttctaacc

SEQ ID NO: 92271 - DNA, 22 bp, synthetic construct
  misc_feature 1..22: note = chemically synthesized
  source 1..22: mol_type = other DNA
agttgatctttttctaacctcc

SEQ ID NO: 92272 - DNA, 22 bp, synthetic construct
  misc_feature 1..22: note = chemically synthesized
  source 1..22: mol_type = other DNA
atctttttctaacctccaggac

SEQ ID NO: 92273 - DNA, 22 bp, synthetic construct
  misc_feature 1..22: note = chemically synthesized
  source 1..22: mol_type = other DNA
tttctaacctccaggactatgc

SEQ ID NO: 92274 - DNA, 22 bp, synthetic construct
  misc_feature 1..22: note = chemically synthesized
  source 1..22: mol_type = other DNA
ttctaacctccaggactatgca

SEQ ID NO: 92275 - DNA, 22 bp, synthetic construct
  misc_feature 1..22: note = chemically synthesized
  source 1..22: mol_type = other DNA
tctaacctccaggactatgcag

SEQ ID NO: 92276 - DNA, 22 bp, synthetic construct
  misc_feature 1..22: note = chemically synthesized
  source 1..22: mol_type = other DNA
ctaacctccaggactatgcaga

SEQ ID NO: 92277 - DNA, 22 bp, synthetic construct
  misc_feature 1..22: note = chemically synthesized
  source 1..22: mol_type = other DNA
taacctccaggactatgcagaa

SEQ ID NO: 92278 - DNA, 22 bp, synthetic construct
  misc_feature 1..22: note = chemically synthesized
  source 1..22: mol_type = other DNA
acctccaggactatgcagaaaa

SEQ ID NO: 92279 - DNA, 22 bp, synthetic construct
  misc_feature 1..22: note = chemically synthesized
  source 1..22: mol_type = other DNA
caggactatgcagaaaagtgac

SEQ ID NO: 92280 - DNA, 22 bp, synthetic construct
  misc_feature 1..22: note = chemically synthesized
  source 1..22: mol_type = other DNA
tgcagaaaagtgactattaatt

SEQ ID NO: 92281 - DNA, 22 bp, synthetic construct
  misc_feature 1..22: note = chemically synthesized
  source 1..22: mol_type = other DNA
ttaatttttatagaaaatttcg

SEQ ID NO: 92282 - DNA, 22 bp, synthetic construct
  misc_feature 1..22: note = chemically synthesized
  source 1..22: mol_type = other DNA
atttttatagaaaatttcgctg

SEQ ID NO: 92283 - DNA, 22 bp, synthetic construct
  misc_feature 1..22: note = chemically synthesized
  source 1..22: mol_type = other DNA
ttatagaaaatttcgctgacca

SEQ ID NO: 92284 - DNA, 22 bp, synthetic construct
  misc_feature 1..22: note = chemically synthesized
  source 1..22: mol_type = other DNA
tatagaaaatttcgctgaccaa

SEQ ID NO: 92285 - DNA, 22 bp, synthetic construct
  misc_feature 1..22: note = chemically synthesized
  source 1..22: mol_type = other DNA
atagaaaatttcgctgaccaaa

SEQ ID NO: 92286 - DNA, 22 bp, synthetic construct
  misc_feature 1..22: note = chemically synthesized
  source 1..22: mol_type = other DNA
tagaaaatttcgctgaccaaag

SEQ ID NO: 92287 - DNA, 22 bp, synthetic construct
  misc_feature 1..22: note = chemically synthesized
  source 1..22: mol_type = other DNA
cgctgaccaaaggaaagatgtt

SEQ ID NO: 92288 - DNA, 22 bp, synthetic construct
  misc_feature 1..22: note = chemically synthesized
  source 1..22: mol_type = other DNA
gctgaccaaaggaaagatgtta

SEQ ID NO: 92289 - DNA, 22 bp, synthetic construct
  misc_feature 1..22: note = chemically synthesized
  source 1..22: mol_type = other DNA
accaaaggaaagatgttatttt

SEQ ID NO: 92290 - DNA, 22 bp, synthetic construct
  misc_feature 1..22: note = chemically synthesized
  source 1..22: mol_type = other DNA
ttttctctatctcaacttctgt

SEQ ID NO: 92291 - DNA, 22 bp, synthetic construct
  misc_feature 1..22: note = chemically synthesized
  source 1..22: mol_type = other DNA
tctctatctcaacttctgttcc

SEQ ID NO: 92292 - DNA, 22 bp, synthetic construct
  misc_feature 1..22: note = chemically synthesized
  source 1..22: mol_type = other DNA
ctctatctcaacttctgttccc

SEQ ID NO: 92293 - DNA, 22 bp, synthetic construct
  misc_feature 1..22: note = chemically synthesized
  source 1..22: mol_type = other DNA
tctatctcaacttctgttccct

SEQ ID NO: 92294 - DNA, 22 bp, synthetic construct
  misc_feature 1..22: note = chemically synthesized
  source 1..22: mol_type = other DNA
tatctcaacttctgttccctca

SEQ ID NO: 92295 - DNA, 22 bp, synthetic construct
  misc_feature 1..22: note = chemically synthesized
  source 1..22: mol_type = other DNA
tctcaacttctgttccctcatc

SEQ ID NO: 92296 - DNA, 22 bp, synthetic construct
  misc_feature 1..22: note = chemically synthesized
  source 1..22: mol_type = other DNA
aacttctgttccctcatccaaa

SEQ ID NO: 92297 - DNA, 22 bp, synthetic construct
  misc_feature 1..22: note = chemically synthesized
  source 1..22: mol_type = other DNA
ctgttccctcatccaaaaacac

SEQ ID NO: 92298 - DNA, 22 bp, synthetic construct
  misc_feature 1..22: note = chemically synthesized
  source 1..22: mol_type = other DNA
tgttccctcatccaaaaacact

SEQ ID NO: 92299 - DNA, 22 bp, synthetic construct
  misc_feature 1..22: note = chemically synthesized
  source 1..22: mol_type = other DNA
ttccctcatccaaaaacactca

SEQ ID NO: 92300 - DNA, 22 bp, synthetic construct
  misc_feature 1..22: note = chemically synthesized
  source 1..22: mol_type = other DNA
cctcatccaaaaacactcagtt

SEQ ID NO: 92301 - DNA, 22 bp, synthetic construct
  misc_feature 1..22: note = chemically synthesized
  source 1..22: mol_type = other DNA
atccaaaaacactcagtttgat

SEQ ID NO: 92302 - DNA, 22 bp, synthetic construct
  misc_feature 1..22: note = chemically synthesized
  source 1..22: mol_type = other DNA
agtttgattttggccagaattt

SEQ ID NO: 92303 - DNA, 22 bp, synthetic construct
  misc_feature 1..22: note = chemically synthesized
  source 1..22: mol_type = other DNA
gattttggccagaattttttat

SEQ ID NO: 92304 - DNA, 22 bp, synthetic construct
  misc_feature 1..22: note = chemically synthesized
  source 1..22: mol_type = other DNA
attttggccagaattttttata

SEQ ID NO: 92305 - DNA, 22 bp, synthetic construct
  misc_feature 1..22: note = chemically synthesized
  source 1..22: mol_type = other DNA
tggccagaattttttataagat

SEQ ID NO: 92306 - DNA, 22 bp, synthetic construct
  misc_feature 1..22: note = chemically synthesized
  source 1..22: mol_type = other DNA
ggccagaattttttataagatg

SEQ ID NO: 92307 - DNA, 22 bp, synthetic construct
  misc_feature 1..22: note = chemically synthesized
  source 1..22: mol_type = other DNA
gccagaattttttataagatgt

SEQ ID NO: 92308 - DNA, 22 bp, synthetic construct
  misc_feature 1..22: note = chemically synthesized
  source 1..22: mol_type = other DNA
tttataagatgtgtttttcaga

SEQ ID NO: 92309 - DNA, 22 bp, synthetic construct
  misc_feature 1..22: note = chemically synthesized
  source 1..22: mol_type = other DNA
ttataagatgtgtttttcagag

SEQ ID NO: 92310 - DNA, 22 bp, synthetic construct
  misc_feature 1..22: note = chemically synthesized
  source 1..22: mol_type = other DNA
tataagatgtgtttttcagagc

SEQ ID NO: 92311 - DNA, 22 bp, synthetic construct
  misc_feature 1..22: note = chemically synthesized
  source 1..22: mol_type = other DNA
ataagatgtgtttttcagagct

SEQ ID NO: 92312 - DNA, 22 bp, synthetic construct
  misc_feature 1..22: note = chemically synthesized
  source 1..22: mol_type = other DNA
taagatgtgtttttcagagcta

SEQ ID NO: 92313 - DNA, 22 bp, synthetic construct
  misc_feature 1..22: note = chemically synthesized
  source 1..22: mol_type = other DNA
ttcagagctatcaaatggtaag

SEQ ID NO: 92314 - DNA, 22 bp, synthetic construct
  misc_feature 1..22: note = chemically synthesized
  source 1..22: mol_type = other DNA
tcagagctatcaaatggtaagt

SEQ ID NO: 92315 - DNA, 22 bp, synthetic construct
  misc_feature 1..22: note = chemically synthesized
  source 1..22: mol_type = other DNA
cagagctatcaaatggtaagtg

SEQ ID NO: 92316 - DNA, 22 bp, synthetic construct
  misc_feature 1..22: note = chemically synthesized
  source 1..22: mol_type = other DNA
agagctatcaaatggtaagtgg

SEQ ID NO: 92317 - DNA, 22 bp, synthetic construct
  misc_feature 1..22: note = chemically synthesized
  source 1..22: mol_type = other DNA
tcaaatggtaagtggccttcca

SEQ ID NO: 92318 - DNA, 22 bp, synthetic construct
  misc_feature 1..22: note = chemically synthesized
  source 1..22: mol_type = other DNA
ccattattcatagtccttgctc

SEQ ID NO: 92319 - DNA, 22 bp, synthetic construct
  misc_feature 1..22: note = chemically synthesized
  source 1..22: mol_type = other DNA
cattattcatagtccttgctct

SEQ ID NO: 92320 - DNA, 22 bp, synthetic construct
  misc_feature 1..22: note = chemically synthesized
  source 1..22: mol_type = other DNA
ttcatagtccttgctctaccaa

SEQ ID NO: 92321 - DNA, 22 bp, synthetic construct
  misc_feature 1..22: note = chemically synthesized
  source 1..22: mol_type = other DNA
atagtccttgctctaccaaatt

SEQ ID NO: 92322 - DNA, 22 bp, synthetic construct
  misc_feature 1..22: note = chemically synthesized
  source 1..22: mol_type = other DNA
gctctaccaaattttagttatg

SEQ ID NO: 92323 - DNA, 22 bp, synthetic construct
  misc_feature 1..22: note = chemically synthesized
  source 1..22: mol_type = other DNA
ctctaccaaattttagttatgt

SEQ ID NO: 92324 - DNA, 22 bp, synthetic construct
  misc_feature 1..22: note = chemically synthesized
  source 1..22: mol_type = other DNA
taccaaattttagttatgttat

SEQ ID NO: 92325 - DNA, 22 bp, synthetic construct
  misc_feature 1..22: note = chemically synthesized
  source 1..22: mol_type = other DNA
ccaaattttagttatgttattt

SEQ ID NO: 92326 - DNA, 22 bp, synthetic construct
  misc_feature 1..22: note = chemically synthesized
  source 1..22: mol_type = other DNA
tagttatgttatttacagcaac

SEQ ID NO: 92327 - DNA, 22 bp, synthetic construct
  misc_feature 1..22: note = chemically synthesized
  source 1..22: mol_type = other DNA
agttatgttatttacagcaaca

SEQ ID NO: 92328 - DNA, 22 bp, synthetic construct
  misc_feature 1..22: note = chemically synthesized
  source 1..22: mol_type = other DNA
gttatgttatttacagcaacat

SEQ ID NO: 92329 - DNA, 22 bp, synthetic construct
  misc_feature 1..22: note = chemically synthesized
  source 1..22: mol_type = other DNA
tgttatttacagcaacataact

SEQ ID NO: 92330 - DNA, 22 bp, synthetic construct
  misc_feature 1..22: note = chemically synthesized
  source 1..22: mol_type = other DNA
tttacagcaacataactctcaa

SEQ ID NO: 92331 - DNA, 22 bp, synthetic construct
  misc_feature 1..22: note = chemically synthesized
  source 1..22: mol_type = other DNA
acagcaacataactctcaaaat

SEQ ID NO: 92332 - DNA, 22 bp, synthetic construct
  misc_feature 1..22: note = chemically synthesized
  source 1..22: mol_type = other DNA
cagcaacataactctcaaaatc

SEQ ID NO: 92333 - DNA, 22 bp, synthetic construct
  misc_feature 1..22: note = chemically synthesized
  source 1..22: mol_type = other DNA
tcaaaatcccactgctgaaata

SEQ ID NO: 92334 - DNA, 22 bp, synthetic construct
  misc_feature 1..22: note = chemically synthesized
  source 1..22: mol_type = other DNA
aaaatcccactgctgaaatatc

SEQ ID NO: 92335 - DNA, 22 bp, synthetic construct
  misc_feature 1..22: note = chemically synthesized
  source 1..22: mol_type = other DNA
ctgaaatatcatatcccatagc

SEQ ID NO: 92336 - DNA, 22 bp, synthetic construct
  misc_feature 1..22: note = chemically synthesized
  source 1..22: mol_type = other DNA
aaatatcatatcccatagctga

SEQ ID NO: 92337 - DNA, 22 bp, synthetic construct
  misc_feature 1..22: note = chemically synthesized
  source 1..22: mol_type = other DNA
actcataacacaagagaaagcc

SEQ ID NO: 92338 - DNA, 22 bp, synthetic construct
  misc_feature 1..22: note = chemically synthesized
  source 1..22: mol_type = other DNA
ataacacaagagaaagccacct

SEQ ID NO: 92339 - DNA, 22 bp, synthetic construct
  misc_feature 1..22: note = chemically synthesized
  source 1..22: mol_type = other DNA
tgctttcaaaagtacccatagt

SEQ ID NO: 92340 - DNA, 22 bp, synthetic construct
  misc_feature 1..22: note = chemically synthesized
  source 1..22: mol_type = other DNA
ctttcaaaagtacccatagtgc

SEQ ID NO: 92341 - DNA, 22 bp, synthetic construct
  misc_feature 1..22: note = chemically synthesized
  source 1..22: mol_type = other DNA
tcaaaagtacccatagtgcaaa

SEQ ID NO: 92342 - DNA, 22 bp, synthetic construct
  misc_feature 1..22: note = chemically synthesized
  source 1..22: mol_type = other DNA
caaaagtacccatagtgcaaat

SEQ ID NO: 92343 - DNA, 22 bp, synthetic construct
  misc_feature 1..22: note = chemically synthesized
  source 1..22: mol_type = other DNA
aaaagtacccatagtgcaaata

SEQ ID NO: 92344 - DNA, 22 bp, synthetic construct
  misc_feature 1..22: note = chemically synthesized
  source 1..22: mol_type = other DNA
agggtaaagaagaaagcgtgag

SEQ ID NO: 92345 - DNA, 22 bp, synthetic construct
  misc_feature 1..22: note = chemically synthesized
  source 1..22: mol_type = other DNA
actactcaccaggaagttctca

SEQ ID NO: 92346 - DNA, 22 bp, synthetic construct
  misc_feature 1..22: note = chemically synthesized
  source 1..22: mol_type = other DNA
ctactcaccaggaagttctcag

SEQ ID NO: 92347 - DNA, 22 bp, synthetic construct
  misc_feature 1..22: note = chemically synthesized
  source 1..22: mol_type = other DNA
ctcaccaggaagttctcagggt

SEQ ID NO: 92348 - DNA, 22 bp, synthetic construct
  misc_feature 1..22: note = chemically synthesized
  source 1..22: mol_type = other DNA
accaggaagttctcagggtcca

SEQ ID NO: 92349 - DNA, 22 bp, synthetic construct
  misc_feature 1..22: note = chemically synthesized
  source 1..22: mol_type = other DNA
tcagggtccacgtgcagcttgt

SEQ ID NO: 92350 - DNA, 22 bp, synthetic construct
  misc_feature 1..22: note = chemically synthesized
  source 1..22: mol_type = other DNA
agggtccacgtgcagcttgtta

SEQ ID NO: 92351 - DNA, 22 bp, synthetic construct
  misc_feature 1..22: note = chemically synthesized
  source 1..22: mol_type = other DNA
gttacagtgcaggtcactcagt

SEQ ID NO: 92352 - DNA, 22 bp, synthetic construct
  misc_feature 1..22: note = chemically synthesized
  source 1..22: mol_type = other DNA
ttacagtgcaggtcactcagtg

SEQ ID NO: 92353 - DNA, 22 bp, synthetic construct
  misc_feature 1..22: note = chemically synthesized
  source 1..22: mol_type = other DNA
cagtgcaggtcactcagtgtag

SEQ ID NO: 92354 - DNA, 22 bp, synthetic construct
  misc_feature 1..22: note = chemically synthesized
  source 1..22: mol_type = other DNA
agtgtagcaaaggtgcctttga

SEQ ID NO: 92355 - DNA, 22 bp, synthetic construct
  misc_feature 1..22: note = chemically synthesized
  source 1..22: mol_type = other DNA
tgaggtcatccgtgagcataac

SEQ ID NO: 92356 - DNA, 22 bp, synthetic construct
  misc_feature 1..22: note = chemically synthesized
  source 1..22: mol_type = other DNA
gaggtcatccgtgagcataaca

SEQ ID NO: 92357 - DNA, 22 bp, synthetic construct
  misc_feature 1..22: note = chemically synthesized
  source 1..22: mol_type = other DNA
aggtcatccgtgagcataacag

SEQ ID NO: 92358 - DNA, 22 bp, synthetic construct
  misc_feature 1..22: note = chemically synthesized
  source 1..22: mol_type = other DNA
ttccgaaggagatcagcacctt

SEQ ID NO: 92359 - DNA, 22 bp, synthetic construct
  misc_feature 1..22: note = chemically synthesized
  source 1..22: mol_type = other DNA
tccgaaggagatcagcaccttc

SEQ ID NO: 92360 - DNA, 22 bp, synthetic construct
  misc_feature 1..22: note = chemically synthesized
  source 1..22: mol_type = other DNA
ccgaaggagatcagcaccttct

SEQ ID NO: 92361 - DNA, 22 bp, synthetic construct
  misc_feature 1..22: note = chemically synthesized
  source 1..22: mol_type = other DNA
cgaaggagatcagcaccttctt

SEQ ID NO: 92362 - DNA, 22 bp, synthetic construct
  misc_feature 1..22: note = chemically synthesized
  source 1..22: mol_type = other DNA
cttgccatgtgccttgactttg

SEQ ID NO: 92363 - DNA, 22 bp, synthetic construct
  misc_feature 1..22: note = chemically synthesized
  source 1..22: mol_type = other DNA
ttgccatgtgccttgactttgg

SEQ ID NO: 92364 - DNA, 22 bp, synthetic construct
  misc_feature 1..22: note = chemically synthesized
  source 1..22: mol_type = other DNA
gccatgtgccttgactttgggg

SEQ ID NO: 92365 - DNA, 22 bp, synthetic construct
  misc_feature 1..22: note = chemically synthesized
  source 1..22: mol_type = other DNA
ccatgtgccttgactttggggt

SEQ ID NO: 92366 - DNA, 22 bp, synthetic construct
  misc_feature 1..22: note = chemically synthesized
  source 1..22: mol_type = other DNA
gactttggggttgcccattatt

SEQ ID NO: 92367 - DNA, 22 bp, synthetic construct
  misc_feature 1..22: note = chemically synthesized
  source 1..22: mol_type = other DNA
actttggggttgcccattattg

SEQ ID NO: 92368 - DNA, 22 bp, synthetic construct
  misc_feature 1..22: note = chemically synthesized
  source 1..22: mol_type = other DNA
tggggttgcccattattgcaca

SEQ ID NO: 92369 - DNA, 22 bp, synthetic construct
  misc_feature 1..22: note = chemically synthesized
  source 1..22: mol_type = other DNA
ggggttgcccattattgcacag

SEQ ID NO: 92370 - DNA, 22 bp, synthetic construct
  misc_feature 1..22: note = chemically synthesized
  source 1..22: mol_type = other DNA
gggttgcccattattgcacagt

SEQ ID NO: 92371 - DNA, 22 bp, synthetic construct
  misc_feature 1..22: note = chemically synthesized
  source 1..22: mol_type = other DNA
cccattattgcacagtcagagc

SEQ ID NO: 92372 - DNA, 22 bp, synthetic construct
  misc_feature 1..22: note = chemically synthesized
  source 1..22: mol_type = other DNA
ttgcacagtcagagcccagata

SEQ ID NO: 92373 - DNA, 22 bp, synthetic construct
  misc_feature 1..22: note = chemically synthesized
  source 1..22: mol_type = other DNA
cacagtcagagcccagatatcc

SEQ ID NO: 92374 - DNA, 22 bp, synthetic construct
  misc_feature 1..22: note = chemically synthesized
  source 1..22: mol_type = other DNA
tcaaagtacctctaggtccatg

SEQ ID NO: 92375 - DNA, 22 bp, synthetic construct
  misc_feature 1..22: note = chemically synthesized
  source 1..22: mol_type = other DNA
caaagtacctctaggtccatgg

SEQ ID NO: 92376 - DNA, 22 bp, synthetic construct
  misc_feature 1..22: note = chemically synthesized
  source 1..22: mol_type = other DNA
aaagtacctctaggtccatggg

SEQ ID NO: 92377 - DNA, 22 bp, synthetic construct
  misc_feature 1..22: note = chemically synthesized
  source 1..22: mol_type = other DNA
taggtccatgggtagacaacca

SEQ ID NO: 92378 - DNA, 22 bp, synthetic construct
  misc_feature 1..22: note = chemically synthesized
  source 1..22: mol_type = other DNA
ggtccatgggtagacaaccagg

SEQ ID NO: 92379 - DNA, 22 bp, synthetic construct
  misc_feature 1..22: note = chemically synthesized
  source 1..22: mol_type = other DNA
tgggatagtcataatcacagag

SEQ ID NO: 92380 - DNA, 22 bp, synthetic construct
  misc_feature 1..22: note = chemically synthesized
  source 1..22: mol_type = other DNA
tgtaagacaacgggctaatccc

SEQ ID NO: 92381 - DNA, 22 bp, synthetic construct
  misc_feature 1..22: note = chemically synthesized
  source 1..22: mol_type = other DNA
atccctctttcagaaacacttt

SEQ ID NO: 92382 - DNA, 22 bp, synthetic construct
  misc_feature 1..22: note = chemically synthesized
  source 1..22: mol_type = other DNA
tttcagaaacactttctgcctt

SEQ ID NO: 92383 - DNA, 22 bp, synthetic construct
  misc_feature 1..22: note = chemically synthesized
  source 1..22: mol_type = other DNA
tcagaaacactttctgcctttc

SEQ ID NO: 92384 - DNA, 22 bp, synthetic construct
  misc_feature 1..22: note = chemically synthesized
  source 1..22: mol_type = other DNA
cagaaacactttctgcctttct

SEQ ID NO: 92385 - DNA, 22 bp, synthetic construct
  misc_feature 1..22: note = chemically synthesized
  source 1..22: mol_type = other DNA
agaaacactttctgcctttctg

SEQ ID NO: 92386 - DNA, 22 bp, synthetic construct
  misc_feature 1..22: note = chemically synthesized
  source 1..22: mol_type = other DNA
tctgcctttctgcaccttgtcc

SEQ ID NO: 92387 - DNA, 22 bp, synthetic construct
  misc_feature 1..22: note = chemically synthesized
  source 1..22: mol_type = other DNA
ctgcctttctgcaccttgtccc

SEQ ID NO: 92388 - DNA, 22 bp, synthetic construct
  misc_feature 1..22: note = chemically synthesized
  source 1..22: mol_type = other DNA
tgcctttctgcaccttgtcccg

SEQ ID NO: 92389 - DNA, 22 bp, synthetic construct
  misc_feature 1..22: note = chemically synthesized
  source 1..22: mol_type = other DNA
cctttctgcaccttgtcccggc

SEQ ID NO: 92390 - DNA, 22 bp, synthetic construct
  misc_feature 1..22: note = chemically synthesized
  source 1..22: mol_type = other DNA
tctgcaccttgtcccggcttcc

SEQ ID NO: 92391 - DNA, 22 bp, synthetic construct
  misc_feature 1..22: note = chemically synthesized
  source 1..22: mol_type = other DNA
ctgcaccttgtcccggcttcca

SEQ ID NO: 92392 - DNA, 22 bp, synthetic construct
  misc_feature 1..22: note = chemically synthesized
  source 1..22: mol_type = other DNA
tgcaccttgtcccggcttccag

SEQ ID NO: 92393 - DNA, 22 bp, synthetic construct
  misc_feature 1..22: note = chemically synthesized
  source 1..22: mol_type = other DNA
caccttgtcccggcttccagta

SEQ ID NO: 92394 - DNA, 22 bp, synthetic construct
  misc_feature 1..22: note = chemically synthesized
  source 1..22: mol_type = other DNA
gtcccggcttccagtacctacc

SEQ ID NO: 92395 - DNA, 22 bp, synthetic construct
  misc_feature 1..22: note = chemically synthesized
  source 1..22: mol_type = other DNA
tcccggcttccagtacctacct

SEQ ID NO: 92396 - DNA, 22 bp, synthetic construct
  misc_feature 1..22: note = chemically synthesized
  source 1..22: mol_type = other DNA
ccagtacctacctgcccagaat

SEQ ID NO: 92397 - DNA, 22 bp, synthetic construct
  misc_feature 1..22: note = chemically synthesized
  source 1..22: mol_type = other DNA
cagtacctacctgcccagaatc

SEQ ID NO: 92398 - DNA, 22 bp, synthetic construct
  misc_feature 1..22: note = chemically synthesized
  source 1..22: mol_type = other DNA
cctgcccagaatctcacctcca

SEQ ID NO: 92399 - DNA, 22 bp, synthetic construct
  misc_feature 1..22: note = chemically synthesized
  source 1..22: mol_type = other DNA
cccagaatctcacctccagcct

SEQ ID NO: 92400 - DNA, 22 bp, synthetic construct
  misc_feature 1..22: note = chemically synthesized
  source 1..22: mol_type = other DNA
acctccagccttctcaccttaa

SEQ ID NO: 92401 - DNA, 22 bp, synthetic construct
  misc_feature 1..22: note = chemically synthesized
  source 1..22: mol_type = other DNA
cagccttctcaccttaaccttg

SEQ ID NO: 92402 - DNA, 22 bp, synthetic construct
  misc_feature 1..22: note = chemically synthesized
  source 1..22: mol_type = other DNA
ctcaccttaaccttgcttcaca

SEQ ID NO: 92403 - DNA, 22 bp, synthetic construct
  misc_feature 1..22: note = chemically synthesized
  source 1..22: mol_type = other DNA
tcaccttaaccttgcttcacag

SEQ ID NO: 92404 - DNA, 22 bp, synthetic construct
  misc_feature 1..22: note = chemically synthesized
  source 1..22: mol_type = other DNA
accttaaccttgcttcacaggc

SEQ ID NO: 92405 - DNA, 22 bp, synthetic construct
  misc_feature 1..22: note = chemically synthesized
  source 1..22: mol_type = other DNA
aaccttgcttcacaggctggtg

SEQ ID NO: 92406 - DNA, 22 bp, synthetic construct
  misc_feature 1..22: note = chemically synthesized
  source 1..22: mol_type = other DNA
accttgcttcacaggctggtgg

SEQ ID NO: 92407 - DNA, 22 bp, synthetic construct
  misc_feature 1..22: note = chemically synthesized
  source 1..22: mol_type = other DNA
gcttcacaggctggtggcagca

SEQ ID NO: 92408 - DNA, 22 bp, synthetic construct
  misc_feature 1..22: note = chemically synthesized
  source 1..22: mol_type = other DNA
cttcacaggctggtggcagcag

SEQ ID NO: 92409 - DNA, 22 bp, synthetic construct
  misc_feature 1..22: note = chemically synthesized
  source 1..22: mol_type = other DNA
cacaggctggtggcagcagcct

SEQ ID NO: 92410 - DNA, 22 bp, synthetic construct
  misc_feature 1..22: note = chemically synthesized
  source 1..22: mol_type = other DNA
acaggctggtggcagcagcctt

SEQ ID NO: 92411 - DNA, 22 bp, synthetic construct
  misc_feature 1..22: note = chemically synthesized
  source 1..22: mol_type = other DNA
gtggcagcagccttcttgtcag

SEQ ID NO: 92412 - DNA, 22 bp, synthetic construct
  misc_feature 1..22: note = chemically synthesized
  source 1..22: mol_type = other DNA
cttgtcagcagtgaaatgcact

SEQ ID NO: 92413 - DNA, 22 bp, synthetic construct
  misc_feature 1..22: note = chemically synthesized
  source 1..22: mol_type = other DNA
ttgtcagcagtgaaatgcacta

SEQ ID NO: 92414 - DNA, 22 bp, synthetic construct
  misc_feature 1..22: note = chemically synthesized
  source 1..22: mol_type = other DNA
gtcagcagtgaaatgcactaca

SEQ ID NO: 92415 - DNA, 22 bp, synthetic construct
  misc_feature 1..22: note = chemically synthesized
  source 1..22: mol_type = other DNA
tcagcagtgaaatgcactacag

SEQ ID NO: 92416 - DNA, 22 bp, synthetic construct
  misc_feature 1..22: note = chemically synthesized
  source 1..22: mol_type = other DNA
cagtgtcagatctgggagtttc

SEQ ID NO: 92417 - DNA, 22 bp, synthetic construct
  misc_feature 1..22: note = chemically synthesized
  source 1..22: mol_type = other DNA
ggagtttcctggtgatcacaga

SEQ ID NO: 92418 - DNA, 22 bp, synthetic construct
  misc_feature 1..22: note = chemically synthesized
  source 1..22: mol_type = other DNA
cctggtgatcacagatgagcca

SEQ ID NO: 92419 - DNA, 22 bp, synthetic construct
  misc_feature 1..22: note = chemically synthesized
  source 1..22: mol_type = other DNA
ctggtgatcacagatgagccag

SEQ ID NO: 92420 - DNA, 22 bp, synthetic construct
  misc_feature 1..22: note = chemically synthesized
  source 1..22: mol_type = other DNA
gtgatcacagatgagccagaag

SEQ ID NO: 92421 - DNA, 22 bp, synthetic construct
  misc_feature 1..22: note = chemically synthesized
  source 1..22: mol_type = other DNA
cattgctgcttcatgtgtggct

SEQ ID NO: 92422 - DNA, 22 bp, synthetic construct
  misc_feature 1..22: note = chemically synthesized
  source 1..22: mol_type = other DNA
ctgcttcatgtgtggcttttta

SEQ ID NO: 92423 - DNA, 22 bp, synthetic construct
  misc_feature 1..22: note = chemically synthesized
  source 1..22: mol_type = other DNA
cttcatgtgtggctttttactt

SEQ ID NO: 92424 - DNA, 22 bp, synthetic construct
  misc_feature 1..22: note = chemically synthesized
  source 1..22: mol_type = other DNA
catgtgtggctttttacttctc

SEQ ID NO: 92425 - DNA, 22 bp, synthetic construct
  misc_feature 1..22: note = chemically synthesized
  source 1..22: mol_type = other DNA
atgtgtggctttttacttctcc

SEQ ID NO: 92426 - DNA, 22 bp, synthetic construct
  misc_feature 1..22: note = chemically synthesized
  source 1..22: mol_type = other DNA
tttacttctcctctctggcccc

SEQ ID NO: 92427 - DNA, 22 bp, synthetic construct
  misc_feature 1..22: note = chemically synthesized
  source 1..22: mol_type = other DNA
ttacttctcctctctggccccc

SEQ ID NO: 92428 - DNA, 22 bp, synthetic construct
  misc_feature 1..22: note = chemically synthesized
  source 1..22: mol_type = other DNA
tacttctcctctctggccccca

SEQ ID NO: 92429 - DNA, 22 bp, synthetic construct
  misc_feature 1..22: note = chemically synthesized
  source 1..22: mol_type = other DNA
acttctcctctctggcccccag

SEQ ID NO: 92430 - DNA, 22 bp, synthetic construct
  misc_feature 1..22: note = chemically synthesized
  source 1..22: mol_type = other DNA
cttctcctctctggcccccagc

SEQ ID NO: 92431 - DNA, 22 bp, synthetic construct
  misc_feature 1..22: note = chemically synthesized
  source 1..22: mol_type = other DNA
ctcctctctggcccccagccct

SEQ ID NO: 92432 - DNA, 22 bp, synthetic construct
  misc_feature 1..22: note = chemically synthesized
  source 1..22: mol_type = other DNA
tcctctctggcccccagccctt

SEQ ID NO: 92433 - DNA, 22 bp, synthetic construct
  misc_feature 1..22: note = chemically synthesized
  source 1..22: mol_type = other DNA
ctctctggcccccagccctttg

SEQ ID NO: 92434 - DNA, 22 bp, synthetic construct
  misc_feature 1..22: note = chemically synthesized
  source 1..22: mol_type = other DNA
tctggcccccagccctttgcct

SEQ ID NO: 92435 - DNA, 22 bp, synthetic construct
  misc_feature 1..22: note = chemically synthesized
  source 1..22: mol_type = other DNA
tggcccccagccctttgcctct

SEQ ID NO: 92436 - DNA, 22 bp, synthetic construct
  misc_feature 1..22: note = chemically synthesized
  source 1..22: mol_type = other DNA
gcccccagccctttgcctctcc

SEQ ID NO: 92437 - DNA, 22 bp, synthetic construct
  misc_feature 1..22: note = chemically synthesized
  source 1..22: mol_type = other DNA
tgcctctcccagtgaaatgaat

SEQ ID NO: 92438 - DNA, 22 bp, synthetic construct
  misc_feature 1..22: note = chemically synthesized
  source 1..22: mol_type = other DNA
gcctctcccagtgaaatgaatc

SEQ ID NO: 92439 - DNA, 22 bp, synthetic construct
  misc_feature 1..22: note = chemically synthesized
  source 1..22: mol_type = other DNA
cctctcccagtgaaatgaatct

SEQ ID NO: 92440 - DNA, 22 bp, synthetic construct
  misc_feature 1..22: note = chemically synthesized
  source 1..22: mol_type = other DNA
tcccagtgaaatgaatctattg

SEQ ID NO: 92441 - DNA, 22 bp, synthetic construct
  misc_feature 1..22: note = chemically synthesized
  source 1..22: mol_type = other DNA
ccagtgaaatgaatctattgac

SEQ ID NO: 92442 - DNA, 22 bp, synthetic construct
  misc_feature 1..22: note = chemically synthesized
  source 1..22: mol_type = other DNA
ttgaccagccctttgcctccct

SEQ ID NO: 92443 - DNA, 22 bp, synthetic construct
  misc_feature 1..22: note = chemically synthesized
  source 1..22: mol_type = other DNA
accagccctttgcctccctcag

SEQ ID NO: 92444 - DNA, 22 bp, synthetic construct
  misc_feature 1..22: note = chemically synthesized
  source 1..22: mol_type = other DNA
tgcctccctcagtaaaatgaat

SEQ ID NO: 92445 - DNA, 22 bp, synthetic construct
  misc_feature 1..22: note = chemically synthesized
  source 1..22: mol_type = other DNA
gcctccctcagtaaaatgaatc

SEQ ID NO: 92446 - DNA, 22 bp, synthetic construct
  misc_feature 1..22: note = chemically synthesized
  source 1..22: mol_type = other DNA
cctccctcagtaaaatgaatct

SEQ ID NO: 92447 - DNA, 22 bp, synthetic construct
  misc_feature 1..22: note = chemically synthesized
  source 1..22: mol_type = other DNA
cctcagtaaaatgaatctattg

SEQ ID NO: 92448 - DNA, 22 bp, synthetic construct
  misc_feature 1..22: note = chemically synthesized
  source 1..22: mol_type = other DNA
agtaaaatgaatctattggtca

SEQ ID NO: 92449 - DNA, 22 bp, synthetic construct
  misc_feature 1..22: note = chemically synthesized
  source 1..22: mol_type = other DNA
ttggtcaagggtgggttgtgac

SEQ ID NO: 92450 - DNA, 22 bp, synthetic construct
  misc_feature 1..22: note = chemically synthesized
  source 1..22: mol_type = other DNA
gtcaagggtgggttgtgactcc

SEQ ID NO: 92451 - DNA, 22 bp, synthetic construct
  misc_feature 1..22: note = chemically synthesized
  source 1..22: mol_type = other DNA
tgactccaggggtggggtttgg

SEQ ID NO: 92452 - DNA, 22 bp, synthetic construct
  misc_feature 1..22: note = chemically synthesized
  source 1..22: mol_type = other DNA
caggggtggggtttgggcaagg

SEQ ID NO: 92453 - DNA, 22 bp, synthetic construct
  misc_feature 1..22: note = chemically synthesized
  source 1..22: mol_type = other DNA
gggcaaggaagttttgcaagat

SEQ ID NO: 92454 - DNA, 22 bp, synthetic construct
  misc_feature 1..22: note = chemically synthesized
  source 1..22: mol_type = other DNA
ggcaaggaagttttgcaagatg

SEQ ID NO: 92455 - DNA, 22 bp, synthetic construct
  misc_feature 1..22: note = chemically synthesized
  source 1..22: mol_type = other DNA
tgcaagatggacattcgagttt

SEQ ID NO: 92456 - DNA, 22 bp, synthetic construct
  misc_feature 1..22: note = chemically synthesized
  source 1..22: mol_type = other DNA
gcaagatggacattcgagtttc

SEQ ID NO: 92457 - DNA, 22 bp, synthetic construct
  misc_feature 1..22: note = chemically synthesized
  source 1..22: mol_type = other DNA
caagatggacattcgagtttct

SEQ ID NO: 92458 - DNA, 22 bp, synthetic construct
  misc_feature 1..22: note = chemically synthesized
  source 1..22: mol_type = other DNA
gagtttctgatagaatccaggt

SEQ ID NO: 92459 - DNA, 22 bp, synthetic construct
  misc_feature 1..22: note = chemically synthesized
  source 1..22: mol_type = other DNA
ctgatagaatccaggtggcctt

SEQ ID NO: 92460 - DNA, 22 bp, synthetic construct
  misc_feature 1..22: note = chemically synthesized
  source 1..22: mol_type = other DNA
tgatagaatccaggtggccttc

SEQ ID NO: 92461 - DNA, 22 bp, synthetic construct
  misc_feature 1..22: note = chemically synthesized
  source 1..22: mol_type = other DNA
atagaatccaggtggccttctc

SEQ ID NO: 92462 - DNA, 22 bp, synthetic construct
  misc_feature 1..22: note = chemically synthesized
  source 1..22: mol_type = other DNA
ctcaggggaactttgctgttca

SEQ ID NO: 92463 - DNA, 22 bp, synthetic construct
  misc_feature 1..22: note = chemically synthesized
  source 1..22: mol_type = other DNA
tcaggggaactttgctgttcag

SEQ ID NO: 92464 - DNA, 22 bp, synthetic construct
  misc_feature 1..22: note = chemically synthesized
  source 1..22: mol_type = other DNA
aggggaactttgctgttcaggc

SEQ ID NO: 92465 - DNA, 22 bp, synthetic construct
  misc_feature 1..22: note = chemically synthesized
  source 1..22: mol_type = other DNA
tgctgttcaggcttaatttgaa

SEQ ID NO: 92466 - DNA, 22 bp, synthetic construct
  misc_feature 1..22: note = chemically synthesized
  source 1..22: mol_type = other DNA
gctgttcaggcttaatttgaaa

SEQ ID NO: 92467 - DNA, 22 bp, synthetic construct
  misc_feature 1..22: note = chemically synthesized
  source 1..22: mol_type = other DNA
ctgttcaggcttaatttgaaac

SEQ ID NO: 92468 - DNA, 22 bp, synthetic construct
  misc_feature 1..22: note = chemically synthesized
  source 1..22: mol_type = other DNA
ttcaggcttaatttgaaacttt

SEQ ID NO: 92469 - DNA, 22 bp, synthetic construct
  misc_feature 1..22: note = chemically synthesized
  source 1..22: mol_type = other DNA
aggcttaatttgaaactttact

SEQ ID NO: 92470 - DNA, 22 bp, synthetic construct
  misc_feature 1..22: note = chemically synthesized
  source 1..22: mol_type = other DNA
aatttgaaactttacttccttc

SEQ ID NO: 92471 - DNA, 22 bp, synthetic construct
  misc_feature 1..22: note = chemically synthesized
  source 1..22: mol_type = other DNA
atttgaaactttacttccttcc

SEQ ID NO: 92472 - DNA, 22 bp, synthetic construct
  misc_feature 1..22: note = chemically synthesized
  source 1..22: mol_type = other DNA
gaaactttacttccttcccctc

SEQ ID NO: 92473 - DNA, 22 bp, synthetic construct
  misc_feature 1..22: note = chemically synthesized
  source 1..22: mol_type = other DNA
aaactttacttccttcccctcc

SEQ ID NO: 92474 - DNA, 22 bp, synthetic construct
  misc_feature 1..22: note = chemically synthesized
  source 1..22: mol_type = other DNA
tacttccttcccctccattttc

SEQ ID NO: 92475 - DNA, 22 bp, synthetic construct
  misc_feature 1..22: note = chemically synthesized
  source 1..22: mol_type = other DNA
acttccttcccctccattttcc

SEQ ID NO: 92476 - DNA, 22 bp, synthetic construct
  misc_feature 1..22: note = chemically synthesized
  source 1..22: mol_type = other DNA
cttccttcccctccattttcct

SEQ ID NO: 92477 - DNA, 22 bp, synthetic construct
  misc_feature 1..22: note = chemically synthesized
  source 1..22: mol_type = other DNA
ccttcccctccattttcctaca

SEQ ID NO: 92478 - DNA, 22 bp, synthetic construct
  misc_feature 1..22: note = chemically synthesized
  source 1..22: mol_type = other DNA
cttcccctccattttcctacac

SEQ ID NO: 92479 - DNA, 22 bp, synthetic construct
  misc_feature 1..22: note = chemically synthesized
  source 1..22: mol_type = other DNA
cccctccattttcctacactac

SEQ ID NO: 92480 - DNA, 22 bp, synthetic construct
  misc_feature 1..22: note = chemically synthesized
  source 1..22: mol_type = other DNA
ccctccattttcctacactacc

SEQ ID NO: 92481 - DNA, 22 bp, synthetic construct
  misc_feature 1..22: note = chemically synthesized
  source 1..22: mol_type = other DNA
cattttcctacactacccccac

SEQ ID NO: 92482 - DNA, 22 bp, synthetic construct
  misc_feature 1..22: note = chemically synthesized
  source 1..22: mol_type = other DNA
tcctacactacccccaccatcc

SEQ ID NO: 92483 - DNA, 22 bp, synthetic construct
  misc_feature 1..22: note = chemically synthesized
  source 1..22: mol_type = other DNA
cctacactacccccaccatcca

SEQ ID NO: 92484 - DNA, 22 bp, synthetic construct
  misc_feature 1..22: note = chemically synthesized
  source 1..22: mol_type = other DNA
ctacactacccccaccatccag

SEQ ID NO: 92485 - DNA, 22 bp, synthetic construct
  misc_feature 1..22: note = chemically synthesized
  source 1..22: mol_type = other DNA
cactacccccaccatccagtgt

SEQ ID NO: 92486 - DNA, 22 bp, synthetic construct
  misc_feature 1..22: note = chemically synthesized
  source 1..22: mol_type = other DNA
cccccaccatccagtgtgcagt

SEQ ID NO: 92487 - DNA, 22 bp, synthetic construct
  misc_feature 1..22: note = chemically synthesized
  source 1..22: mol_type = other DNA
atttctcaaggacttcgccagc

SEQ ID NO: 92488 - DNA, 22 bp, synthetic construct
  misc_feature 1..22: note = chemically synthesized
  source 1..22: mol_type = other DNA
tttctcaaggacttcgccagca

SEQ ID NO: 92489 - DNA, 22 bp, synthetic construct
  misc_feature 1..22: note = chemically synthesized
  source 1..22: mol_type = other DNA
ctcaaggacttcgccagcagcc

SEQ ID NO: 92490 - DNA, 22 bp, synthetic construct
  misc_feature 1..22: note = chemically synthesized
  source 1..22: mol_type = other DNA
tcaaggacttcgccagcagccg

SEQ ID NO: 92491 - DNA, 22 bp, synthetic construct
  misc_feature 1..22: note = chemically synthesized
  source 1..22: mol_type = other DNA
aaggacttcgccagcagccgct

SEQ ID NO: 92492 - DNA, 22 bp, synthetic construct
  misc_feature 1..22: note = chemically synthesized
  source 1..22: mol_type = other DNA
cgccagcagccgctaataacct

SEQ ID NO: 92493 - DNA, 22 bp, synthetic construct
  misc_feature 1..22: note = chemically synthesized
  source 1..22: mol_type = other DNA
gccagcagccgctaataacctg

SEQ ID NO: 92494 - DNA, 22 bp, synthetic construct
  misc_feature 1..22: note = chemically synthesized
  source 1..22: mol_type = other DNA
ataacctgaatgctgacaaata

SEQ ID NO: 92495 - DNA, 22 bp, synthetic construct
  misc_feature 1..22: note = chemically synthesized
  source 1..22: mol_type = other DNA
aatgctgacaaataggaataag

SEQ ID NO: 92496 - DNA, 22 bp, synthetic construct
  misc_feature 1..22: note = chemically synthesized
  source 1..22: mol_type = other DNA
acaaataggaataagttacaac

SEQ ID NO: 92497 - DNA, 22 bp, synthetic construct
  misc_feature 1..22: note = chemically synthesized
  source 1..22: mol_type = other DNA
caactgaaaaggataagaatta

SEQ ID NO: 92498 - DNA, 22 bp, synthetic construct
  misc_feature 1..22: note = chemically synthesized
  source 1..22: mol_type = other DNA
aaaaggataagaattacgaata

SEQ ID NO: 92499 - DNA, 22 bp, synthetic construct
  misc_feature 1..22: note = chemically synthesized
  source 1..22: mol_type = other DNA
cgaatatcttagccatcaattc

SEQ ID NO: 92500 - DNA, 22 bp, synthetic construct
  misc_feature 1..22: note = chemically synthesized
  source 1..22: mol_type = other DNA
agccatcaattcctggatcagg

SEQ ID NO: 92501 - DNA, 22 bp, synthetic construct
  misc_feature 1..22: note = chemically synthesized
  source 1..22: mol_type = other DNA
gccatcaattcctggatcagga

SEQ ID NO: 92502 - DNA, 22 bp, synthetic construct
  misc_feature 1..22: note = chemically synthesized
  source 1..22: mol_type = other DNA
ctggatcaggagttgtgacaat

SEQ ID NO: 92503 - DNA, 22 bp, synthetic construct
  misc_feature 1..22: note = chemically synthesized
  source 1..22: mol_type = other DNA
gatcaggagttgtgacaatgta

SEQ ID NO: 92504 - DNA, 22 bp, synthetic construct
  misc_feature 1..22: note = chemically synthesized
  source 1..22: mol_type = other DNA
tgacaatgtaacaacgtgttat

SEQ ID NO: 92505 - DNA, 22 bp, synthetic construct
  misc_feature 1..22: note = chemically synthesized
  source 1..22: mol_type = other DNA
tcctgttattcatccaggcttt

SEQ ID NO: 92506 - DNA, 22 bp, synthetic construct
  misc_feature 1..22: note = chemically synthesized
  source 1..22: mol_type = other DNA
ttattcatccaggctttatgtg

SEQ ID NO: 92507 - DNA, 22 bp, synthetic construct
  misc_feature 1..22: note = chemically synthesized
  source 1..22: mol_type = other DNA
ttcatccaggctttatgtggaa

SEQ ID NO: 92508 - DNA, 22 bp, synthetic construct
  misc_feature 1..22: note = chemically synthesized
  source 1..22: mol_type = other DNA
atccaggctttatgtggaagaa

SEQ ID NO: 92509 - DNA, 22 bp, synthetic construct
  misc_feature 1..22: note = chemically synthesized
  source 1..22: mol_type = other DNA
tatgtggaagaagccacagcct

SEQ ID NO: 92510 - DNA, 22 bp, synthetic construct
  misc_feature 1..22: note = chemically synthesized
  source 1..22: mol_type = other DNA
atgtggaagaagccacagcctt

SEQ ID NO: 92511 - DNA, 22 bp, synthetic construct
  misc_feature 1..22: note = chemically synthesized
  source 1..22: mol_type = other DNA
tgtggaagaagccacagccttt

SEQ ID NO: 92512 - DNA, 22 bp, synthetic construct
  misc_feature 1..22: note = chemically synthesized
  source 1..22: mol_type = other DNA
tcttggttttcaattctcttga

SEQ ID NO: 92513 - DNA, 22 bp, synthetic construct
  misc_feature 1..22: note = chemically synthesized
  source 1..22: mol_type = other DNA
cttggttttcaattctcttgag

SEQ ID NO: 92514 - DNA, 22 bp, synthetic construct
  misc_feature 1..22: note = chemically synthesized
  source 1..22: mol_type = other DNA
ttggttttcaattctcttgaga

SEQ ID NO: 92515 - DNA, 22 bp, synthetic construct
  misc_feature 1..22: note = chemically synthesized
  source 1..22: mol_type = other DNA
ggttttcaattctcttgagact

SEQ ID NO: 92516 - DNA, 22 bp, synthetic construct
  misc_feature 1..22: note = chemically synthesized
  source 1..22: mol_type = other DNA
gttttcaattctcttgagacta

SEQ ID NO: 92517 - DNA, 22 bp, synthetic construct
  misc_feature 1..22: note = chemically synthesized
  source 1..22: mol_type = other DNA
tcaattctcttgagactacatt

SEQ ID NO: 92518 - DNA, 22 bp, synthetic construct
  misc_feature 1..22: note = chemically synthesized
  source 1..22: mol_type = other DNA
caattctcttgagactacattg

SEQ ID NO: 92519 - DNA, 22 bp, synthetic construct
  misc_feature 1..22: note = chemically synthesized
  source 1..22: mol_type = other DNA
aattctcttgagactacattga

SEQ ID NO: 92520 - DNA, 22 bp, synthetic construct
  misc_feature 1..22: note = chemically synthesized
  source 1..22: mol_type = other DNA
tcttgagactacattgaataca

SEQ ID NO: 92521 - DNA, 22 bp, synthetic construct
  misc_feature 1..22: note = chemically synthesized
  source 1..22: mol_type = other DNA
ttgagactacattgaatacaca

SEQ ID NO: 92522 - DNA, 22 bp, synthetic construct
  misc_feature 1..22: note = chemically synthesized
  source 1..22: mol_type = other DNA
gagactacattgaatacacaat

SEQ ID NO: 92523 - DNA, 22 bp, synthetic construct
  misc_feature 1..22: note = chemically synthesized
  source 1..22: mol_type = other DNA
agactacattgaatacacaatt

SEQ ID NO: 92524 - DNA, 22 bp, synthetic construct
  misc_feature 1..22: note = chemically synthesized
  source 1..22: mol_type = other DNA
cattgaatacacaatttcatca

SEQ ID NO: 92525 - DNA, 22 bp, synthetic construct
  misc_feature 1..22: note = chemically synthesized
  source 1..22: mol_type = other DNA
aatacacaatttcatcagtttt

SEQ ID NO: 92526 - DNA, 22 bp, synthetic construct
  misc_feature 1..22: note = chemically synthesized
  source 1..22: mol_type = other DNA
catcagtttttttttctttctt

SEQ ID NO: 92527 - DNA, 22 bp, synthetic construct
  misc_feature 1..22: note = chemically synthesized
  source 1..22: mol_type = other DNA
atcagtttttttttctttcttt

SEQ ID NO: 92528 - DNA, 22 bp, synthetic construct
  misc_feature 1..22: note = chemically synthesized
  source 1..22: mol_type = other DNA
ttttttctttctttctttcttt

SEQ ID NO: 92529 - DNA, 22 bp, synthetic construct
  misc_feature 1..22: note = chemically synthesized
  source 1..22: mol_type = other DNA
tttttctttctttctttctttt

SEQ ID NO: 92530 - DNA, 22 bp, synthetic construct
  misc_feature 1..22: note = chemically synthesized
  source 1..22: mol_type = other DNA
ttttctttctttctttcttttt

SEQ ID NO: 92531 - DNA, 22 bp, synthetic construct
  misc_feature 1..22: note = chemically synthesized
  source 1..22: mol_type = other DNA
tttctttctttctttctttttc

SEQ ID NO: 92532 - DNA, 22 bp, synthetic construct
  misc_feature 1..22: note = chemically synthesized
  source 1..22: mol_type = other DNA
ttctttctttctttctttttct

SEQ ID NO: 92533 - DNA, 22 bp, synthetic construct
  misc_feature 1..22: note = chemically synthesized
  source 1..22: mol_type = other DNA
tctttctttctttctttttctt

SEQ ID NO: 92534 - DNA, 22 bp, synthetic construct
  misc_feature 1..22: note = chemically synthesized
  source 1..22: mol_type = other DNA
ctttctttctttctttttcttt

SEQ ID NO: 92535 - DNA, 22 bp, synthetic construct
  misc_feature 1..22: note = chemically synthesized
  source 1..22: mol_type = other DNA
tttctttctttctttttctttt

SEQ ID NO: 92536 - DNA, 22 bp, synthetic construct
  misc_feature 1..22: note = chemically synthesized
  source 1..22: mol_type = other DNA
tctttctttctttttctttttt

SEQ ID NO: 92537 - DNA, 22 bp, synthetic construct
  misc_feature 1..22: note = chemically synthesized
  source 1..22: mol_type = other DNA
ctttctttctttttcttttttt

SEQ ID NO: 92538 - DNA, 22 bp, synthetic construct
  misc_feature 1..22: note = chemically synthesized
  source 1..22: mol_type = other DNA
tttctttctttttctttttttt

SEQ ID NO: 92539 - DNA, 22 bp, synthetic construct
  misc_feature 1..22: note = chemically synthesized
  source 1..22: mol_type = other DNA
tctttctttttctttttttttt

SEQ ID NO: 92540 - DNA, 22 bp, synthetic construct
  misc_feature 1..22: note = chemically synthesized
  source 1..22: mol_type = other DNA
ctttctttttcttttttttttt

SEQ ID NO: 92541 - DNA, 22 bp, synthetic construct
  misc_feature 1..22: note = chemically synthesized
  source 1..22: mol_type = other DNA
tttctttttctttttttttttt

SEQ ID NO: 92542 - DNA, 22 bp, synthetic construct
  misc_feature 1..22: note = chemically synthesized
  source 1..22: mol_type = other DNA
tctttttctttttttttttttt

SEQ ID NO: 92543 - DNA, 22 bp, synthetic construct
  misc_feature 1..22: note = chemically synthesized
  source 1..22: mol_type = other DNA
ctttttcttttttttttttttt

SEQ ID NO: 92544 - DNA, 22 bp, synthetic construct
  misc_feature 1..22: note = chemically synthesized
  source 1..22: mol_type = other DNA
tttttctttttttttttttttt

SEQ ID NO: 92545 - DNA, 22 bp, synthetic construct
  misc_feature 1..22: note = chemically synthesized
  source 1..22: mol_type = other DNA
tttctttttttttttttttttt

SEQ ID NO: 92546 - DNA, 22 bp, synthetic construct
  misc_feature 1..22: note = chemically synthesized
  source 1..22: mol_type = other DNA
ttcttttttttttttttttttt

SEQ ID NO: 92547 - DNA, 22 bp, synthetic construct
  misc_feature 1..22: note = chemically synthesized
  source 1..22: mol_type = other DNA
tctttttttttttttttttttt

SEQ ID NO: 92548 - DNA, 22 bp, synthetic construct
  misc_feature 1..22: note = chemically synthesized
  source 1..22: mol_type = other DNA
cttttttttttttttttttttg

SEQ ID NO: 92549 - DNA, 22 bp, synthetic construct
  misc_feature 1..22: note = chemically synthesized
  source 1..22: mol_type = other DNA
ttttttttttttttttttttga

SEQ ID NO: 92550 - DNA, 22 bp, synthetic construct
  misc_feature 1..22: note = chemically synthesized
  source 1..22: mol_type = other DNA
ttttttttttttttttttgaga

SEQ ID NO: 92551 - DNA, 22 bp, synthetic construct
  misc_feature 1..22: note = chemically synthesized
  source 1..22: mol_type = other DNA
tttttttttttttttttgagat

SEQ ID NO: 92552 - DNA, 22 bp, synthetic construct
  misc_feature 1..22: note = chemically synthesized
  source 1..22: mol_type = other DNA
ttttttttttttttttgagatg

SEQ ID NO: 92553 - DNA, 22 bp, synthetic construct
  misc_feature 1..22: note = chemically synthesized
  source 1..22: mol_type = other DNA
tttttttttttttttgagatgg

SEQ ID NO: 92554 - DNA, 22 bp, synthetic construct
  misc_feature 1..22: note = chemically synthesized
  source 1..22: mol_type = other DNA
ttttttttttttttgagatgga

SEQ ID NO: 92555 - DNA, 22 bp, synthetic construct
  misc_feature 1..22: note = chemically synthesized
  source 1..22: mol_type = other DNA
tttttttttttttgagatggag

SEQ ID NO: 92556 - DNA, 22 bp, synthetic construct
  misc_feature 1..22: note = chemically synthesized
  source 1..22: mol_type = other DNA
ttttttttttttgagatggagt

SEQ ID NO: 92557 - DNA, 22 bp, synthetic construct
  misc_feature 1..22: note = chemically synthesized
  source 1..22: mol_type = other DNA
tttttttttttgagatggagtc

SEQ ID NO: 92558 - DNA, 22 bp, synthetic construct
  misc_feature 1..22: note = chemically synthesized
  source 1..22: mol_type = other DNA
ttttttttttgagatggagtct

SEQ ID NO: 92559 - DNA, 22 bp, synthetic construct
  misc_feature 1..22: note = chemically synthesized
  source 1..22: mol_type = other DNA
tttttttttgagatggagtctc

SEQ ID NO: 92560 - DNA, 22 bp, synthetic construct
  misc_feature 1..22: note = chemically synthesized
  source 1..22: mol_type = other DNA
ttttttttgagatggagtctcg

SEQ ID NO: 92561 - DNA, 22 bp, synthetic construct
  misc_feature 1..22: note = chemically synthesized
  source 1..22: mol_type = other DNA
tttttttgagatggagtctcgc

SEQ ID NO: 92562 - DNA, 22 bp, synthetic construct
  misc_feature 1..22: note = chemically synthesized
  source 1..22: mol_type = other DNA
ttttttgagatggagtctcgct

SEQ ID NO: 92563 - DNA, 22 bp, synthetic construct
  misc_feature 1..22: note = chemically synthesized
  source 1..22: mol_type = other DNA
tttttgagatggagtctcgctt

SEQ ID NO: 92564 - DNA, 22 bp, synthetic construct
  misc_feature 1..22: note = chemically synthesized
  source 1..22: mol_type = other DNA
ttttgagatggagtctcgcttt

SEQ ID NO: 92565 - DNA, 22 bp, synthetic construct
  misc_feature 1..22: note = chemically synthesized
  source 1..22: mol_type = other DNA
tttgagatggagtctcgctttg

SEQ ID NO: 92566 - DNA, 22 bp, synthetic construct
  misc_feature 1..22: note = chemically synthesized
  source 1..22: mol_type = other DNA
ttgagatggagtctcgctttgt

SEQ ID NO: 92567 - DNA, 22 bp, synthetic construct
  misc_feature 1..22: note = chemically synthesized
  source 1..22: mol_type = other DNA
tgagatggagtctcgctttgtc

SEQ ID NO: 92568 - DNA, 22 bp, synthetic construct
  misc_feature 1..22: note = chemically synthesized
  source 1..22: mol_type = other DNA
gagatggagtctcgctttgtca

SEQ ID NO: 92569 - DNA, 22 bp, synthetic construct
  misc_feature 1..22: note = chemically synthesized
  source 1..22: mol_type = other DNA
agatggagtctcgctttgtcac

SEQ ID NO: 92570 - DNA, 22 bp, synthetic construct
  misc_feature 1..22: note = chemically synthesized
  source 1..22: mol_type = other DNA
gctttgtcacccaggctggagt

SEQ ID NO: 92571 - DNA, 22 bp, synthetic construct
  misc_feature 1..22: note = chemically synthesized
  source 1..22: mol_type = other DNA
tgtcacccaggctggagtgtgc

SEQ ID NO: 92572 - DNA, 22 bp, synthetic construct
  misc_feature 1..22: note = chemically synthesized
  source 1..22: mol_type = other DNA
gtcacccaggctggagtgtgca

SEQ ID NO: 92573 - DNA, 22 bp, synthetic construct
  misc_feature 1..22: note = chemically synthesized
  source 1..22: mol_type = other DNA
tcacccaggctggagtgtgcag

SEQ ID NO: 92574 - DNA, 22 bp, synthetic construct
  misc_feature 1..22: note = chemically synthesized
  source 1..22: mol_type = other DNA
gagtgtgcagtggcgcgatctc

SEQ ID NO: 92575 - DNA, 22 bp, synthetic construct
  misc_feature 1..22: note = chemically synthesized
  source 1..22: mol_type = other DNA
tgctcaccgcaagctctgcctc

SEQ ID NO: 92576 - DNA, 22 bp, synthetic construct
  misc_feature 1..22: note = chemically synthesized
  source 1..22: mol_type = other DNA
ctcaccgcaagctctgcctccc

SEQ ID NO: 92577 - DNA, 22 bp, synthetic construct
  misc_feature 1..22: note = chemically synthesized
  source 1..22: mol_type = other DNA
accgcaagctctgcctcccagg

SEQ ID NO: 92578 - DNA, 22 bp, synthetic construct
  misc_feature 1..22: note = chemically synthesized
  source 1..22: mol_type = other DNA
tgcctcccaggttcacgccatt

SEQ ID NO: 92579 - DNA, 22 bp, synthetic construct
  misc_feature 1..22: note = chemically synthesized
  source 1..22: mol_type = other DNA
cctcccaggttcacgccattct

SEQ ID NO: 92580 - DNA, 22 bp, synthetic construct
  misc_feature 1..22: note = chemically synthesized
  source 1..22: mol_type = other DNA
ccaggttcacgccattctcctg

SEQ ID NO: 92581 - DNA, 22 bp, synthetic construct
  misc_feature 1..22: note = chemically synthesized
  source 1..22: mol_type = other DNA
acgccattctcctgcctcagcc

SEQ ID NO: 92582 - DNA, 22 bp, synthetic construct
  misc_feature 1..22: note = chemically synthesized
  source 1..22: mol_type = other DNA
tcctgcctcagcctcccgagta

SEQ ID NO: 92583 - DNA, 22 bp, synthetic construct
  misc_feature 1..22: note = chemically synthesized
  source 1..22: mol_type = other DNA
ctgcctcagcctcccgagtagc

SEQ ID NO: 92584 - DNA, 22 bp, synthetic construct
  misc_feature 1..22: note = chemically synthesized
  source 1..22: mol_type = other DNA
cctcagcctcccgagtagctgg

SEQ ID NO: 92585 - DNA, 22 bp, synthetic construct
  misc_feature 1..22: note = chemically synthesized
  source 1..22: mol_type = other DNA
agcctcccgagtagctgggact

SEQ ID NO: 92586 - DNA, 22 bp, synthetic construct
  misc_feature 1..22: note = chemically synthesized
  source 1..22: mol_type = other DNA
ccgagtagctgggactacaggc

SEQ ID NO: 92587 - DNA, 22 bp, synthetic construct
  misc_feature 1..22: note = chemically synthesized
  source 1..22: mol_type = other DNA
ggactacaggcacccgccactg

SEQ ID NO: 92588 - DNA, 22 bp, synthetic construct
  misc_feature 1..22: note = chemically synthesized
  source 1..22: mol_type = other DNA
caggcacccgccactgtctctg

SEQ ID NO: 92589 - DNA, 22 bp, synthetic construct
  misc_feature 1..22: note = chemically synthesized
  source 1..22: mol_type = other DNA
tctctggctaattttttgtatt

SEQ ID NO: 92590 - DNA, 22 bp, synthetic construct
  misc_feature 1..22: note = chemically synthesized
  source 1..22: mol_type = other DNA
tggctaattttttgtattttta

SEQ ID NO: 92591 - DNA, 22 bp, synthetic construct
  misc_feature 1..22: note = chemically synthesized
  source 1..22: mol_type = other DNA
gctaattttttgtatttttagt

SEQ ID NO: 92592 - DNA, 22 bp, synthetic construct
  misc_feature 1..22: note = chemically synthesized
  source 1..22: mol_type = other DNA
attttttgtatttttagtagag

SEQ ID NO: 92593 - DNA, 22 bp, synthetic construct
  misc_feature 1..22: note = chemically synthesized
  source 1..22: mol_type = other DNA
tttgtatttttagtagagatgg

SEQ ID NO: 92594 - DNA, 22 bp, synthetic construct
  misc_feature 1..22: note = chemically synthesized
  source 1..22: mol_type = other DNA
ttgtatttttagtagagatggg

SEQ ID NO: 92595 - DNA, 22 bp, synthetic construct
  misc_feature 1..22: note = chemically synthesized
  source 1..22: mol_type = other DNA
tgtatttttagtagagatgggg

SEQ ID NO: 92596 - DNA, 22 bp, synthetic construct
  misc_feature 1..22: note = chemically synthesized
  source 1..22: mol_type = other DNA
gtatttttagtagagatggggt

SEQ ID NO: 92597 - DNA, 22 bp, synthetic construct
  misc_feature 1..22: note = chemically synthesized
  source 1..22: mol_type = other DNA
tatttttagtagagatggggtt

SEQ ID NO: 92598 - DNA, 22 bp, synthetic construct
  misc_feature 1..22: note = chemically synthesized
  source 1..22: mol_type = other DNA
ttagtagagatggggtttcacc

SEQ ID NO: 92599 - DNA, 22 bp, synthetic construct
  misc_feature 1..22: note = chemically synthesized
  source 1..22: mol_type = other DNA
tagtagagatggggtttcacca

SEQ ID NO: 92600 - DNA, 22 bp, synthetic construct
  misc_feature 1..22: note = chemically synthesized
  source 1..22: mol_type = other DNA
agtagagatggggtttcaccat

SEQ ID NO: 92601 - DNA, 22 bp, synthetic construct
  misc_feature 1..22: note = chemically synthesized
  source 1..22: mol_type = other DNA
gtagagatggggtttcaccatg

SEQ ID NO: 92602 - DNA, 22 bp, synthetic construct
  misc_feature 1..22: note = chemically synthesized
  source 1..22: mol_type = other DNA
caccatgttagccaggatggtc

SEQ ID NO: 92603 - DNA, 22 bp, synthetic construct
  misc_feature 1..22: note = chemically synthesized
  source 1..22: mol_type = other DNA
accatgttagccaggatggtct

SEQ ID NO: 92604 - DNA, 22 bp, synthetic construct
  misc_feature 1..22: note = chemically synthesized
  source 1..22: mol_type = other DNA
gccaggatggtcttgatctcct

SEQ ID NO: 92605 - DNA, 22 bp, synthetic construct
  misc_feature 1..22: note = chemically synthesized
  source 1..22: mol_type = other DNA
gatctcctgacctcgtgatccg

SEQ ID NO: 92606 - DNA, 22 bp, synthetic construct
  misc_feature 1..22: note = chemically synthesized
  source 1..22: mol_type = other DNA
atctcctgacctcgtgatccgc

SEQ ID NO: 92607 - DNA, 22 bp, synthetic construct
  misc_feature 1..22: note = chemically synthesized
  source 1..22: mol_type = other DNA
ctgacctcgtgatccgcccacc

SEQ ID NO: 92608 - DNA, 22 bp, synthetic construct
  misc_feature 1..22: note = chemically synthesized
  source 1..22: mol_type = other DNA
acctcgtgatccgcccacctca

SEQ ID NO: 92609 - DNA, 22 bp, synthetic construct
  misc_feature 1..22: note = chemically synthesized
  source 1..22: mol_type = other DNA
gtgatccgcccacctcagcctc

SEQ ID NO: 92610 - DNA, 22 bp, synthetic construct
  misc_feature 1..22: note = chemically synthesized
  source 1..22: mol_type = other DNA
agcctcccaaagtgctgggatt

SEQ ID NO: 92611 - DNA, 22 bp, synthetic construct
  misc_feature 1..22: note = chemically synthesized
  source 1..22: mol_type = other DNA
ccaaagtgctgggattacaggt

SEQ ID NO: 92612 - DNA, 22 bp, synthetic construct
  misc_feature 1..22: note = chemically synthesized
  source 1..22: mol_type = other DNA
ggattacaggtgtgagccaccg

SEQ ID NO: 92613 - DNA, 22 bp, synthetic construct
  misc_feature 1..22: note = chemically synthesized
  source 1..22: mol_type = other DNA
caggtgtgagccaccgcgcccg

SEQ ID NO: 92614 - DNA, 22 bp, synthetic construct
  misc_feature 1..22: note = chemically synthesized
  source 1..22: mol_type = other DNA
catcactttttagaatagaaat

SEQ ID NO: 92615 - DNA, 22 bp, synthetic construct
  misc_feature 1..22: note = chemically synthesized
  source 1..22: mol_type = other DNA
atcactttttagaatagaaata

SEQ ID NO: 92616 - DNA, 22 bp, synthetic construct
  misc_feature 1..22: note = chemically synthesized
  source 1..22: mol_type = other DNA
tttagaatagaaataaacacct

SEQ ID NO: 92617 - DNA, 22 bp, synthetic construct
  misc_feature 1..22: note = chemically synthesized
  source 1..22: mol_type = other DNA
ttagaatagaaataaacacctc

SEQ ID NO: 92618 - DNA, 22 bp, synthetic construct
  misc_feature 1..22: note = chemically synthesized
  source 1..22: mol_type = other DNA
tagaatagaaataaacacctct

SEQ ID NO: 92619 - DNA, 22 bp, synthetic construct
  misc_feature 1..22: note = chemically synthesized
  source 1..22: mol_type = other DNA
agaatagaaataaacacctcta

SEQ ID NO: 92620 - DNA, 22 bp, synthetic construct
  misc_feature 1..22: note = chemically synthesized
  source 1..22: mol_type = other DNA
gaatagaaataaacacctctat

SEQ ID NO: 92621 - DNA, 22 bp, synthetic construct
  misc_feature 1..22: note = chemically synthesized
  source 1..22: mol_type = other DNA
tatccagcatcaacttggaaga

SEQ ID NO: 92622 - DNA, 22 bp, synthetic construct
  misc_feature 1..22: note = chemically synthesized
  source 1..22: mol_type = other DNA
tccagcatcaacttggaagaaa

SEQ ID NO: 92623 - DNA, 22 bp, synthetic construct
  misc_feature 1..22: note = chemically synthesized
  source 1..22: mol_type = other DNA
ggaagaaagcagaataagaaac

SEQ ID NO: 92624 - DNA, 22 bp, synthetic construct
  misc_feature 1..22: note = chemically synthesized
  source 1..22: mol_type = other DNA
gaagaaagcagaataagaaaca

SEQ ID NO: 92625 - DNA, 22 bp, synthetic construct
  misc_feature 1..22: note = chemically synthesized
  source 1..22: mol_type = other DNA
gggaagtaaggggaaaactggg

SEQ ID NO: 92626 - DNA, 22 bp, synthetic construct
  misc_feature 1..22: note = chemically synthesized
  source 1..22: mol_type = other DNA
ggttttattactgtgtttttta

SEQ ID NO: 92627 - DNA, 22 bp, synthetic construct
  misc_feature 1..22: note = chemically synthesized
  source 1..22: mol_type = other DNA
tattactgtgttttttaatcca

SEQ ID NO: 92628 - DNA, 22 bp, synthetic construct
  misc_feature 1..22: note = chemically synthesized
  source 1..22: mol_type = other DNA
attactgtgttttttaatccat

SEQ ID NO: 92629 - DNA, 22 bp, synthetic construct
  misc_feature 1..22: note = chemically synthesized
  source 1..22: mol_type = other DNA
ttactgtgttttttaatccatt

SEQ ID NO: 92630 - DNA, 22 bp, synthetic construct
  misc_feature 1..22: note = chemically synthesized
  source 1..22: mol_type = other DNA
ctgtgttttttaatccatttag

SEQ ID NO: 92631 - DNA, 22 bp, synthetic construct
  misc_feature 1..22: note = chemically synthesized
  source 1..22: mol_type = other DNA
tgttttttaatccatttagtag

SEQ ID NO: 92632 - DNA, 22 bp, synthetic construct
  misc_feature 1..22: note = chemically synthesized
  source 1..22: mol_type = other DNA
tttaatccatttagtagtcagt

SEQ ID NO: 92633 - DNA, 22 bp, synthetic construct
  misc_feature 1..22: note = chemically synthesized
  source 1..22: mol_type = other DNA
ttaatccatttagtagtcagtg

SEQ ID NO: 92634 - DNA, 22 bp, synthetic construct
  misc_feature 1..22: note = chemically synthesized
  source 1..22: mol_type = other DNA
taatccatttagtagtcagtgt

SEQ ID NO: 92635 - DNA, 22 bp, synthetic construct
  misc_feature 1..22: note = chemically synthesized
  source 1..22: mol_type = other DNA
aatccatttagtagtcagtgta

SEQ ID NO: 92636 - DNA, 22 bp, synthetic construct
  misc_feature 1..22: note = chemically synthesized
  source 1..22: mol_type = other DNA
atccatttagtagtcagtgtac

SEQ ID NO: 92637 - DNA, 22 bp, synthetic construct
  misc_feature 1..22: note = chemically synthesized
  source 1..22: mol_type = other DNA
agtagtcagtgtacttatctga

SEQ ID NO: 92638 - DNA, 22 bp, synthetic construct
  misc_feature 1..22: note = chemically synthesized
  source 1..22: mol_type = other DNA
gtagtcagtgtacttatctgaa

SEQ ID NO: 92639 - DNA, 22 bp, synthetic construct
  misc_feature 1..22: note = chemically synthesized
  source 1..22: mol_type = other DNA
atctgaacaaaggagatttcct

SEQ ID NO: 92640 - DNA, 22 bp, synthetic construct
  misc_feature 1..22: note = chemically synthesized
  source 1..22: mol_type = other DNA
tctgaacaaaggagatttcctc

SEQ ID NO: 92641 - DNA, 22 bp, synthetic construct
  misc_feature 1..22: note = chemically synthesized
  source 1..22: mol_type = other DNA
aacaaaggagatttcctctgaa

SEQ ID NO: 92642 - DNA, 22 bp, synthetic construct
  misc_feature 1..22: note = chemically synthesized
  source 1..22: mol_type = other DNA
cctctgaatcattgaacaatag

SEQ ID NO: 92643 - DNA, 22 bp, synthetic construct
  misc_feature 1..22: note = chemically synthesized
  source 1..22: mol_type = other DNA
ctctgaatcattgaacaatagt

SEQ ID NO: 92644 - DNA, 22 bp, synthetic construct
  misc_feature 1..22: note = chemically synthesized
  source 1..22: mol_type = other DNA
tgaatcattgaacaatagtcca

SEQ ID NO: 92645 - DNA, 22 bp, synthetic construct
  misc_feature 1..22: note = chemically synthesized
  source 1..22: mol_type = other DNA
aatcattgaacaatagtccatg

SEQ ID NO: 92646 - DNA, 22 bp, synthetic construct
  misc_feature 1..22: note = chemically synthesized
  source 1..22: mol_type = other DNA
aacaatagtccatgtcaaatcc

SEQ ID NO: 92647 - DNA, 22 bp, synthetic construct
  misc_feature 1..22: note = chemically synthesized
  source 1..22: mol_type = other DNA
catatctacaaaattatgccag

SEQ ID NO: 92648 - DNA, 22 bp, synthetic construct
  misc_feature 1..22: note = chemically synthesized
  source 1..22: mol_type = other DNA
caaaattatgccagaacatcta

SEQ ID NO: 92649 - DNA, 22 bp, synthetic construct
  misc_feature 1..22: note = chemically synthesized
  source 1..22: mol_type = other DNA
tgccagaacatctaatagtgtt

SEQ ID NO: 92650 - DNA, 22 bp, synthetic construct
  misc_feature 1..22: note = chemically synthesized
  source 1..22: mol_type = other DNA
atagtgttgggggagaagtgtg

SEQ ID NO: 92651 - DNA, 22 bp, synthetic construct
  misc_feature 1..22: note = chemically synthesized
  source 1..22: mol_type = other DNA
ggggagaagtgtgctgctctgt

SEQ ID NO: 92652 - DNA, 22 bp, synthetic construct
  misc_feature 1..22: note = chemically synthesized
  source 1..22: mol_type = other DNA
ctctgttcaagcaagaggatag

SEQ ID NO: 92653 - DNA, 22 bp, synthetic construct
  misc_feature 1..22: note = chemically synthesized
  source 1..22: mol_type = other DNA
tgttcaagcaagaggataggag

SEQ ID NO: 92654 - DNA, 22 bp, synthetic construct
  misc_feature 1..22: note = chemically synthesized
  source 1..22: mol_type = other DNA
ttcaagcaagaggataggagat

SEQ ID NO: 92655 - DNA, 22 bp, synthetic construct
  misc_feature 1..22: note = chemically synthesized
  source 1..22: mol_type = other DNA
aagcaagaggataggagattcc

SEQ ID NO: 92656 - DNA, 22 bp, synthetic construct
  misc_feature 1..22: note = chemically synthesized
  source 1..22: mol_type = other DNA
cgtggcccgtgctgggcattag

SEQ ID NO: 92657 - DNA, 22 bp, synthetic construct
  misc_feature 1..22: note = chemically synthesized
  source 1..22: mol_type = other DNA
ggcattaggtcatttgtgtctg

SEQ ID NO: 92658 - DNA, 22 bp, synthetic construct
  misc_feature 1..22: note = chemically synthesized
  source 1..22: mol_type = other DNA
ggtcatttgtgtctggcacagg

SEQ ID NO: 92659 - DNA, 22 bp, synthetic construct
  misc_feature 1..22: note = chemically synthesized
  source 1..22: mol_type = other DNA
gtgtctggcacaggcttgatct

SEQ ID NO: 92660 - DNA, 22 bp, synthetic construct
  misc_feature 1..22: note = chemically synthesized
  source 1..22: mol_type = other DNA
tgtctggcacaggcttgatcta

SEQ ID NO: 92661 - DNA, 22 bp, synthetic construct
  misc_feature 1..22: note = chemically synthesized
  source 1..22: mol_type = other DNA
gcacaggcttgatctatagtct

SEQ ID NO: 92662 - DNA, 22 bp, synthetic construct
  misc_feature 1..22: note = chemically synthesized
  source 1..22: mol_type = other DNA
gatctatagtctaatgctgtgt

SEQ ID NO: 92663 - DNA, 22 bp, synthetic construct
  misc_feature 1..22: note = chemically synthesized
  source 1..22: mol_type = other DNA
atctatagtctaatgctgtgtt

SEQ ID NO: 92664 - DNA, 22 bp, synthetic construct
  misc_feature 1..22: note = chemically synthesized
  source 1..22: mol_type = other DNA
tagtctaatgctgtgtttaact

SEQ ID NO: 92665 - DNA, 22 bp, synthetic construct
  misc_feature 1..22: note = chemically synthesized
  source 1..22: mol_type = other DNA
atgctgtgtttaacttgtcttt

SEQ ID NO: 92666 - DNA, 22 bp, synthetic construct
  misc_feature 1..22: note = chemically synthesized
  source 1..22: mol_type = other DNA
tgtttaacttgtctttatatct

SEQ ID NO: 92667 - DNA, 22 bp, synthetic construct
  misc_feature 1..22: note = chemically synthesized
  source 1..22: mol_type = other DNA
aacttgtctttatatctaatca

SEQ ID NO: 92668 - DNA, 22 bp, synthetic construct
  misc_feature 1..22: note = chemically synthesized
  source 1..22: mol_type = other DNA
acttgtctttatatctaatcag

SEQ ID NO: 92669 - DNA, 22 bp, synthetic construct
  misc_feature 1..22: note = chemically synthesized
  source 1..22: mol_type = other DNA
gtctttatatctaatcaggcaa

SEQ ID NO: 92670 - DNA, 22 bp, synthetic construct
  misc_feature 1..22: note = chemically synthesized
  source 1..22: mol_type = other DNA
tctttatatctaatcaggcaaa

SEQ ID NO: 92671 - DNA, 22 bp, synthetic construct
  misc_feature 1..22: note = chemically synthesized
  source 1..22: mol_type = other DNA
tatatctaatcaggcaaagaca

SEQ ID NO: 92672 - DNA, 22 bp, synthetic construct
  misc_feature 1..22: note = chemically synthesized
  source 1..22: mol_type = other DNA
atatctaatcaggcaaagacat

SEQ ID NO: 92673 - DNA, 22 bp, synthetic construct
  misc_feature 1..22: note = chemically synthesized
  source 1..22: mol_type = other DNA
tatctaatcaggcaaagacatt

SEQ ID NO: 92674 - DNA, 22 bp, synthetic construct
  misc_feature 1..22: note = chemically synthesized
  source 1..22: mol_type = other DNA
atcaggcaaagacattcttcac

SEQ ID NO: 92675 - DNA, 22 bp, synthetic construct
  misc_feature 1..22: note = chemically synthesized
  source 1..22: mol_type = other DNA
ttcactgacaatattccacagg

SEQ ID NO: 92676 - DNA, 22 bp, synthetic construct
  misc_feature 1..22: note = chemically synthesized
  source 1..22: mol_type = other DNA
cactgacaatattccacaggct

SEQ ID NO: 92677 - DNA, 22 bp, synthetic construct
  misc_feature 1..22: note = chemically synthesized
  source 1..22: mol_type = other DNA
actgacaatattccacaggctg

SEQ ID NO: 92678 - DNA, 22 bp, synthetic construct
  misc_feature 1..22: note = chemically synthesized
  source 1..22: mol_type = other DNA
acaatattccacaggctgctgc

SEQ ID NO: 92679 - DNA, 22 bp, synthetic construct
  misc_feature 1..22: note = chemically synthesized
  source 1..22: mol_type = other DNA
cacaggctgctgcacgtgtctc

SEQ ID NO: 92680 - DNA, 22 bp, synthetic construct
  misc_feature 1..22: note = chemically synthesized
  source 1..22: mol_type = other DNA
ctgcacgtgtctcatgtgctgc

SEQ ID NO: 92681 - DNA, 22 bp, synthetic construct
  misc_feature 1..22: note = chemically synthesized
  source 1..22: mol_type = other DNA
cacgtgtctcatgtgctgcacg

SEQ ID NO: 92682 - DNA, 22 bp, synthetic construct
  misc_feature 1..22: note = chemically synthesized
  source 1..22: mol_type = other DNA
atgtgctgcacgtctcatgcgt

SEQ ID NO: 92683 - DNA, 22 bp, synthetic construct
  misc_feature 1..22: note = chemically synthesized
  source 1..22: mol_type = other DNA
cacgtctcatgcgtctcaaaca

SEQ ID NO: 92684 - DNA, 22 bp, synthetic construct
  misc_feature 1..22: note = chemically synthesized
  source 1..22: mol_type = other DNA
atgcgtctcaaacaagcaattt

SEQ ID NO: 92685 - DNA, 22 bp, synthetic construct
  misc_feature 1..22: note = chemically synthesized
  source 1..22: mol_type = other DNA
aaacaagcaatttcaggaatag

SEQ ID NO: 92686 - DNA, 22 bp, synthetic construct
  misc_feature 1..22: note = chemically synthesized
  source 1..22: mol_type = other DNA
caggaatagacagggcacactt

SEQ ID NO: 92687 - DNA, 22 bp, synthetic construct
  misc_feature 1..22: note = chemically synthesized
  source 1..22: mol_type = other DNA
aggaatagacagggcacacttc

SEQ ID NO: 92688 - DNA, 22 bp, synthetic construct
  misc_feature 1..22: note = chemically synthesized
  source 1..22: mol_type = other DNA
ccaccggcagagagaagaacag

SEQ ID NO: 92689 - DNA, 22 bp, synthetic construct
  misc_feature 1..22: note = chemically synthesized
  source 1..22: mol_type = other DNA
caccggcagagagaagaacagt

SEQ ID NO: 92690 - DNA, 22 bp, synthetic construct
  misc_feature 1..22: note = chemically synthesized
  source 1..22: mol_type = other DNA
attttatattcttaaggcttac

SEQ ID NO: 92691 - DNA, 22 bp, synthetic construct
  misc_feature 1..22: note = chemically synthesized
  source 1..22: mol_type = other DNA
ttttatattcttaaggcttact

SEQ ID NO: 92692 - DNA, 22 bp, synthetic construct
  misc_feature 1..22: note = chemically synthesized
  source 1..22: mol_type = other DNA
tatattcttaaggcttactgtc

SEQ ID NO: 92693 - DNA, 22 bp, synthetic construct
  misc_feature 1..22: note = chemically synthesized
  source 1..22: mol_type = other DNA
atattcttaaggcttactgtcc

SEQ ID NO: 92694 - DNA, 22 bp, synthetic construct
  misc_feature 1..22: note = chemically synthesized
  source 1..22: mol_type = other DNA
tattcttaaggcttactgtcct

SEQ ID NO: 92695 - DNA, 22 bp, synthetic construct
  misc_feature 1..22: note = chemically synthesized
  source 1..22: mol_type = other DNA
ttaaggcttactgtcctcatac

SEQ ID NO: 92696 - DNA, 22 bp, synthetic construct
  misc_feature 1..22: note = chemically synthesized
  source 1..22: mol_type = other DNA
aaggcttactgtcctcatactt

SEQ ID NO: 92697 - DNA, 22 bp, synthetic construct
  misc_feature 1..22: note = chemically synthesized
  source 1..22: mol_type = other DNA
aggcttactgtcctcatactta

SEQ ID NO: 92698 - DNA, 22 bp, synthetic construct
  misc_feature 1..22: note = chemically synthesized
  source 1..22: mol_type = other DNA
actgtcctcatacttagaggtt

SEQ ID NO: 92699 - DNA, 22 bp, synthetic construct
  misc_feature 1..22: note = chemically synthesized
  source 1..22: mol_type = other DNA
ctgtcctcatacttagaggttc

SEQ ID NO: 92700 - DNA, 22 bp, synthetic construct
  misc_feature 1..22: note = chemically synthesized
  source 1..22: mol_type = other DNA
tcctcatacttagaggttcagg

SEQ ID NO: 92701 - DNA, 22 bp, synthetic construct
  misc_feature 1..22: note = chemically synthesized
  source 1..22: mol_type = other DNA
atacttagaggttcaggatgct

SEQ ID NO: 92702 - DNA, 22 bp, synthetic construct
  misc_feature 1..22: note = chemically synthesized
  source 1..22: mol_type = other DNA
agaggttcaggatgctggtttg

SEQ ID NO: 92703 - DNA, 22 bp, synthetic construct
  misc_feature 1..22: note = chemically synthesized
  source 1..22: mol_type = other DNA
gaggttcaggatgctggtttgt

SEQ ID NO: 92704 - DNA, 22 bp, synthetic construct
  misc_feature 1..22: note = chemically synthesized
  source 1..22: mol_type = other DNA
aggatgctggtttgtgtgttac

SEQ ID NO: 92705 - DNA, 22 bp, synthetic construct
  misc_feature 1..22: note = chemically synthesized
  source 1..22: mol_type = other DNA
gtttgtgtgttacccctgagat

SEQ ID NO: 92706 - DNA, 22 bp, synthetic construct
  misc_feature 1..22: note = chemically synthesized
  source 1..22: mol_type = other DNA
gtgtgttacccctgagataaat

SEQ ID NO: 92707 - DNA, 22 bp, synthetic construct
  misc_feature 1..22: note = chemically synthesized
  source 1..22: mol_type = other DNA
tgtgttacccctgagataaatc

SEQ ID NO: 92708 - DNA, 22 bp, synthetic construct
  misc_feature 1..22: note = chemically synthesized
  source 1..22: mol_type = other DNA
cccctgagataaatccttacaa

SEQ ID NO: 92709 - DNA, 22 bp, synthetic construct
  misc_feature 1..22: note = chemically synthesized
  source 1..22: mol_type = other DNA
agataaatccttacaagaaata

SEQ ID NO: 92710 - DNA, 22 bp, synthetic construct
  misc_feature 1..22: note = chemically synthesized
  source 1..22: mol_type = other DNA
acaagaaataaagtttaggaaa

SEQ ID NO: 92711 - DNA, 22 bp, synthetic construct
  misc_feature 1..22: note = chemically synthesized
  source 1..22: mol_type = other DNA
caagaaataaagtttaggaaat

SEQ ID NO: 92712 - DNA, 22 bp, synthetic construct
  misc_feature 1..22: note = chemically synthesized
  source 1..22: mol_type = other DNA
aggaaatcacccccatgtgtat

SEQ ID NO: 92713 - DNA, 22 bp, synthetic construct
  misc_feature 1..22: note = chemically synthesized
  source 1..22: mol_type = other DNA
ggaaatcacccccatgtgtatt

SEQ ID NO: 92714 - DNA, 22 bp, synthetic construct
  misc_feature 1..22: note = chemically synthesized
  source 1..22: mol_type = other DNA
caaggagactctaaatttcaaa

SEQ ID NO: 92715 - DNA, 22 bp, synthetic construct
  misc_feature 1..22: note = chemically synthesized
  source 1..22: mol_type = other DNA
aaggagactctaaatttcaaag

SEQ ID NO: 92716 - DNA, 22 bp, synthetic construct
  misc_feature 1..22: note = chemically synthesized
  source 1..22: mol_type = other DNA
taaatttcaaagagttaaaccc

SEQ ID NO: 92717 - DNA, 22 bp, synthetic construct
  misc_feature 1..22: note = chemically synthesized
  source 1..22: mol_type = other DNA
aatttcaaagagttaaacccaa

SEQ ID NO: 92718 - DNA, 22 bp, synthetic construct
  misc_feature 1..22: note = chemically synthesized
  source 1..22: mol_type = other DNA
caaagagttaaacccaatatat

SEQ ID NO: 92719 - DNA, 22 bp, synthetic construct
  misc_feature 1..22: note = chemically synthesized
  source 1..22: mol_type = other DNA
aaagagttaaacccaatatatt

SEQ ID NO: 92720 - DNA, 22 bp, synthetic construct
  misc_feature 1..22: note = chemically synthesized
  source 1..22: mol_type = other DNA
aacccaatatattaaagctgaa

SEQ ID NO: 92721 - DNA, 22 bp, synthetic construct
  misc_feature 1..22: note = chemically synthesized
  source 1..22: mol_type = other DNA
aagctgaatttctgatattaga

SEQ ID NO: 92722 - DNA, 22 bp, synthetic construct
  misc_feature 1..22: note = chemically synthesized
  source 1..22: mol_type = other DNA
aatttctgatattagagacaca

SEQ ID NO: 92723 - DNA, 22 bp, synthetic construct
  misc_feature 1..22: note = chemically synthesized
  source 1..22: mol_type = other DNA
ctgatattagagacacaatatt

SEQ ID NO: 92724 - DNA, 22 bp, synthetic construct
  misc_feature 1..22: note = chemically synthesized
  source 1..22: mol_type = other DNA
tgatattagagacacaatattt

SEQ ID NO: 92725 - DNA, 22 bp, synthetic construct
  misc_feature 1..22: note = chemically synthesized
  source 1..22: mol_type = other DNA
atattagagacacaatatttta

SEQ ID NO: 92726 - DNA, 22 bp, synthetic construct
  misc_feature 1..22: note = chemically synthesized
  source 1..22: mol_type = other DNA
gagacacaatattttagtctac

SEQ ID NO: 92727 - DNA, 22 bp, synthetic construct
  misc_feature 1..22: note = chemically synthesized
  source 1..22: mol_type = other DNA
tagtctacttgatatagttgag

SEQ ID NO: 92728 - DNA, 22 bp, synthetic construct
  misc_feature 1..22: note = chemically synthesized
  source 1..22: mol_type = other DNA
agtctacttgatatagttgaga

SEQ ID NO: 92729 - DNA, 22 bp, synthetic construct
  misc_feature 1..22: note = chemically synthesized
  source 1..22: mol_type = other DNA
gtctacttgatatagttgagag

SEQ ID NO: 92730 - DNA, 22 bp, synthetic construct
  misc_feature 1..22: note = chemically synthesized
  source 1..22: mol_type = other DNA
cttgatatagttgagaggcagt

SEQ ID NO: 92731 - DNA, 22 bp, synthetic construct
  misc_feature 1..22: note = chemically synthesized
  source 1..22: mol_type = other DNA
gatatagttgagaggcagttac

SEQ ID NO: 92732 - DNA, 22 bp, synthetic construct
  misc_feature 1..22: note = chemically synthesized
  source 1..22: mol_type = other DNA
atatagttgagaggcagttacc

SEQ ID NO: 92733 - DNA, 22 bp, synthetic construct
  misc_feature 1..22: note = chemically synthesized
  source 1..22: mol_type = other DNA
agaggcagttacctgttttact

SEQ ID NO: 92734 - DNA, 22 bp, synthetic construct
  misc_feature 1..22: note = chemically synthesized
  source 1..22: mol_type = other DNA
cctgttttacttaggaacatgg

SEQ ID NO: 92735 - DNA, 22 bp, synthetic construct
  misc_feature 1..22: note = chemically synthesized
  source 1..22: mol_type = other DNA
ttttacttaggaacatggggaa

SEQ ID NO: 92736 - DNA, 22 bp, synthetic construct
  misc_feature 1..22: note = chemically synthesized
  source 1..22: mol_type = other DNA
tacttaggaacatggggaaagt

SEQ ID NO: 92737 - DNA, 22 bp, synthetic construct
  misc_feature 1..22: note = chemically synthesized
  source 1..22: mol_type = other DNA
acttaggaacatggggaaagtt

SEQ ID NO: 92738 - DNA, 22 bp, synthetic construct
  misc_feature 1..22: note = chemically synthesized
  source 1..22: mol_type = other DNA
cttaggaacatggggaaagttt

SEQ ID NO: 92739 - DNA, 22 bp, synthetic construct
  misc_feature 1..22: note = chemically synthesized
  source 1..22: mol_type = other DNA
aggaacatggggaaagtttgta

SEQ ID NO: 92740 - DNA, 22 bp, synthetic construct
  misc_feature 1..22: note = chemically synthesized
  source 1..22: mol_type = other DNA
ggaacatggggaaagtttgtag

SEQ ID NO: 92741 - DNA, 22 bp, synthetic construct
  misc_feature 1..22: note = chemically synthesized
  source 1..22: mol_type = other DNA
gtagtgacaaacagtttgaggc

SEQ ID NO: 92742 - DNA, 22 bp, synthetic construct
  misc_feature 1..22: note = chemically synthesized
  source 1..22: mol_type = other DNA
tagtgacaaacagtttgaggca

SEQ ID NO: 92743 - DNA, 22 bp, synthetic construct
  misc_feature 1..22: note = chemically synthesized
  source 1..22: mol_type = other DNA
gaggcaaaaccaagattatctt

SEQ ID NO: 92744 - DNA, 22 bp, synthetic construct
  misc_feature 1..22: note = chemically synthesized
  source 1..22: mol_type = other DNA
aggcaaaaccaagattatcttt

SEQ ID NO: 92745 - DNA, 22 bp, synthetic construct
  misc_feature 1..22: note = chemically synthesized
  source 1..22: mol_type = other DNA
tctttaagagcagagatcgatg

SEQ ID NO: 92746 - DNA, 22 bp, synthetic construct
  misc_feature 1..22: note = chemically synthesized
  source 1..22: mol_type = other DNA
taagagcagagatcgatgatat

SEQ ID NO: 92747 - DNA, 22 bp, synthetic construct
  misc_feature 1..22: note = chemically synthesized
  source 1..22: mol_type = other DNA
aagagcagagatcgatgatatg

SEQ ID NO: 92748 - DNA, 22 bp, synthetic construct
  misc_feature 1..22: note = chemically synthesized
  source 1..22: mol_type = other DNA
agagcagagatcgatgatatga

SEQ ID NO: 92749 - DNA, 22 bp, synthetic construct
  misc_feature 1..22: note = chemically synthesized
  source 1..22: mol_type = other DNA
tgactatatgcaggaaacacat

SEQ ID NO: 92750 - DNA, 22 bp, synthetic construct
  misc_feature 1..22: note = chemically synthesized
  source 1..22: mol_type = other DNA
gactatatgcaggaaacacatt

SEQ ID NO: 92751 - DNA, 22 bp, synthetic construct
  misc_feature 1..22: note = chemically synthesized
  source 1..22: mol_type = other DNA
actatatgcaggaaacacattt

SEQ ID NO: 92752 - DNA, 22 bp, synthetic construct
  misc_feature 1..22: note = chemically synthesized
  source 1..22: mol_type = other DNA
tatgcaggaaacacatttatat

SEQ ID NO: 92753 - DNA, 22 bp, synthetic construct
  misc_feature 1..22: note = chemically synthesized
  source 1..22: mol_type = other DNA
atattgagttgtggggactggc

SEQ ID NO: 92754 - DNA, 22 bp, synthetic construct
  misc_feature 1..22: note = chemically synthesized
  source 1..22: mol_type = other DNA
tattgagttgtggggactggcc

SEQ ID NO: 92755 - DNA, 22 bp, synthetic construct
  misc_feature 1..22: note = chemically synthesized
  source 1..22: mol_type = other DNA
agttgtggggactggcctcaga

SEQ ID NO: 92756 - DNA, 22 bp, synthetic construct
  misc_feature 1..22: note = chemically synthesized
  source 1..22: mol_type = other DNA
tggggactggcctcagaggaaa

SEQ ID NO: 92757 - DNA, 22 bp, synthetic construct
  misc_feature 1..22: note = chemically synthesized
  source 1..22: mol_type = other DNA
gcctcagaggaaacttcaggtc

SEQ ID NO: 92758 - DNA, 22 bp, synthetic construct
  misc_feature 1..22: note = chemically synthesized
  source 1..22: mol_type = other DNA
agaggaaacttcaggtcatgtc

SEQ ID NO: 92759 - DNA, 22 bp, synthetic construct
  misc_feature 1..22: note = chemically synthesized
  source 1..22: mol_type = other DNA
caggtcatgtcctttaatggcc

SEQ ID NO: 92760 - DNA, 22 bp, synthetic construct
  misc_feature 1..22: note = chemically synthesized
  source 1..22: mol_type = other DNA
aggtcatgtcctttaatggccc

SEQ ID NO: 92761 - DNA, 22 bp, synthetic construct
  misc_feature 1..22: note = chemically synthesized
  source 1..22: mol_type = other DNA
taatggccctaaaactcattcc

SEQ ID NO: 92762 - DNA, 22 bp, synthetic construct
  misc_feature 1..22: note = chemically synthesized
  source 1..22: mol_type = other DNA
aatggccctaaaactcattccc

SEQ ID NO: 92763 - DNA, 22 bp, synthetic construct
  misc_feature 1..22: note = chemically synthesized
  source 1..22: mol_type = other DNA
atggccctaaaactcattccca

SEQ ID NO: 92764 - DNA, 22 bp, synthetic construct
  misc_feature 1..22: note = chemically synthesized
  source 1..22: mol_type = other DNA
aaactcattcccaaaagaattt

SEQ ID NO: 92765 - DNA, 22 bp, synthetic construct
  misc_feature 1..22: note = chemically synthesized
  source 1..22: mol_type = other DNA
attcccaaaagaatttctgttc

SEQ ID NO: 92766 - DNA, 22 bp, synthetic construct
  misc_feature 1..22: note = chemically synthesized
  source 1..22: mol_type = other DNA
ccaaaagaatttctgttcattg

SEQ ID NO: 92767 - DNA, 22 bp, synthetic construct
  misc_feature 1..22: note = chemically synthesized
  source 1..22: mol_type = other DNA
ctgttcattgccatacctcata

SEQ ID NO: 92768 - DNA, 22 bp, synthetic construct
  misc_feature 1..22: note = chemically synthesized
  source 1..22: mol_type = other DNA
tgttcattgccatacctcatat

SEQ ID NO: 92769 - DNA, 22 bp, synthetic construct
  misc_feature 1..22: note = chemically synthesized
  source 1..22: mol_type = other DNA
ttcattgccatacctcatatcc

SEQ ID NO: 92770 - DNA, 22 bp, synthetic construct
  misc_feature 1..22: note = chemically synthesized
  source 1..22: mol_type = other DNA
attgccatacctcatatcctta

SEQ ID NO: 92771 - DNA, 22 bp, synthetic construct
  misc_feature 1..22: note = chemically synthesized
  source 1..22: mol_type = other DNA
ccatacctcatatccttaggta

SEQ ID NO: 92772 - DNA, 22 bp, synthetic construct
  misc_feature 1..22: note = chemically synthesized
  source 1..22: mol_type = other DNA
atatccttaggtacatacatct

SEQ ID NO: 92773 - DNA, 22 bp, synthetic construct
  misc_feature 1..22: note = chemically synthesized
  source 1..22: mol_type = other DNA
aggtacatacatctaaaaccct

SEQ ID NO: 92774 - DNA, 22 bp, synthetic construct
  misc_feature 1..22: note = chemically synthesized
  source 1..22: mol_type = other DNA
ggtacatacatctaaaaccctg

SEQ ID NO: 92775 - DNA, 22 bp, synthetic construct
  misc_feature 1..22: note = chemically synthesized
  source 1..22: mol_type = other DNA
aaaccctgcgtaccagtgaaca

SEQ ID NO: 92776 - DNA, 22 bp, synthetic construct
  misc_feature 1..22: note = chemically synthesized
  source 1..22: mol_type = other DNA
cgtaccagtgaacagctgcccc

SEQ ID NO: 92777 - DNA, 22 bp, synthetic construct
  misc_feature 1..22: note = chemically synthesized
  source 1..22: mol_type = other DNA
ccccatctttccatcagccaac

SEQ ID NO: 92778 - DNA, 22 bp, synthetic construct
  misc_feature 1..22: note = chemically synthesized
  source 1..22: mol_type = other DNA
tccatcagccaaccaggaattc

SEQ ID NO: 92779 - DNA, 22 bp, synthetic construct
  misc_feature 1..22: note = chemically synthesized
  source 1..22: mol_type = other DNA
ccatcagccaaccaggaattca

SEQ ID NO: 92780 - DNA, 22 bp, synthetic construct
  misc_feature 1..22: note = chemically synthesized
  source 1..22: mol_type = other DNA
catcagccaaccaggaattcag

SEQ ID NO: 92781 - DNA, 22 bp, synthetic construct
  misc_feature 1..22: note = chemically synthesized
  source 1..22: mol_type = other DNA
agcagttactgctaacttccac

SEQ ID NO: 92782 - DNA, 22 bp, synthetic construct
  misc_feature 1..22: note = chemically synthesized
  source 1..22: mol_type = other DNA
ctgctaacttccacttttctct

SEQ ID NO: 92783 - DNA, 22 bp, synthetic construct
  misc_feature 1..22: note = chemically synthesized
  source 1..22: mol_type = other DNA
ctaacttccacttttctctcac

SEQ ID NO: 92784 - DNA, 22 bp, synthetic construct
  misc_feature 1..22: note = chemically synthesized
  source 1..22: mol_type = other DNA
acttccacttttctctcacccg

SEQ ID NO: 92785 - DNA, 22 bp, synthetic construct
  misc_feature 1..22: note = chemically synthesized
  source 1..22: mol_type = other DNA
ccacttttctctcacccgctcc

SEQ ID NO: 92786 - DNA, 22 bp, synthetic construct
  misc_feature 1..22: note = chemically synthesized
  source 1..22: mol_type = other DNA
cacttttctctcacccgctcca

SEQ ID NO: 92787 - DNA, 22 bp, synthetic construct
  misc_feature 1..22: note = chemically synthesized
  source 1..22: mol_type = other DNA
ttctctcacccgctccaggaaa

SEQ ID NO: 92788 - DNA, 22 bp, synthetic construct
  misc_feature 1..22: note = chemically synthesized
  source 1..22: mol_type = other DNA
tctctcacccgctccaggaaaa

SEQ ID NO: 92789 - DNA, 22 bp, synthetic construct
  misc_feature 1..22: note = chemically synthesized
  source 1..22: mol_type = other DNA
ctctcacccgctccaggaaaag

SEQ ID NO: 92790 - DNA, 22 bp, synthetic construct
  misc_feature 1..22: note = chemically synthesized
  source 1..22: mol_type = other DNA
tctcacccgctccaggaaaagt

SEQ ID NO: 92791 - DNA, 22 bp, synthetic construct
  misc_feature 1..22: note = chemically synthesized
  source 1..22: mol_type = other DNA
tcacccgctccaggaaaagtga

SEQ ID NO: 92792 - DNA, 22 bp, synthetic construct
  misc_feature 1..22: note = chemically synthesized
  source 1..22: mol_type = other DNA
acccgctccaggaaaagtgacc

SEQ ID NO: 92793 - DNA, 22 bp, synthetic construct
  misc_feature 1..22: note = chemically synthesized
  source 1..22: mol_type = other DNA
caggaaaagtgacctgcagtca

SEQ ID NO: 92794 - DNA, 22 bp, synthetic construct
  misc_feature 1..22: note = chemically synthesized
  source 1..22: mol_type = other DNA
cagtcactttcctggaagtatt

SEQ ID NO: 92795 - DNA, 22 bp, synthetic construct
  misc_feature 1..22: note = chemically synthesized
  source 1..22: mol_type = other DNA
tcctggaagtattgattctttc

SEQ ID NO: 92796 - DNA, 22 bp, synthetic construct
  misc_feature 1..22: note = chemically synthesized
  source 1..22: mol_type = other DNA
cctggaagtattgattctttct

SEQ ID NO: 92797 - DNA, 22 bp, synthetic construct
  misc_feature 1..22: note = chemically synthesized
  source 1..22: mol_type = other DNA
ctggaagtattgattctttctt

SEQ ID NO: 92798 - DNA, 22 bp, synthetic construct
  misc_feature 1..22: note = chemically synthesized
  source 1..22: mol_type = other DNA
gaagtattgattctttcttgtt

SEQ ID NO: 92799 - DNA, 22 bp, synthetic construct
  misc_feature 1..22: note = chemically synthesized
  source 1..22: mol_type = other DNA
attctttcttgtttgtggctgt

SEQ ID NO: 92800 - DNA, 22 bp, synthetic construct
  misc_feature 1..22: note = chemically synthesized
  source 1..22: mol_type = other DNA
tttcttgtttgtggctgttccc

SEQ ID NO: 92801 - DNA, 22 bp, synthetic construct
  misc_feature 1..22: note = chemically synthesized
  source 1..22: mol_type = other DNA
tcttgtttgtggctgttcccca

SEQ ID NO: 92802 - DNA, 22 bp, synthetic construct
  misc_feature 1..22: note = chemically synthesized
  source 1..22: mol_type = other DNA
cttgtttgtggctgttccccat

SEQ ID NO: 92803 - DNA, 22 bp, synthetic construct
  misc_feature 1..22: note = chemically synthesized
  source 1..22: mol_type = other DNA
ttgtttgtggctgttccccatt

SEQ ID NO: 92804 - DNA, 22 bp, synthetic construct
  misc_feature 1..22: note = chemically synthesized
  source 1..22: mol_type = other DNA
gtttgtggctgttccccatttc

SEQ ID NO: 92805 - DNA, 22 bp, synthetic construct
  misc_feature 1..22: note = chemically synthesized
  source 1..22: mol_type = other DNA
tttgtggctgttccccatttcc

SEQ ID NO: 92806 - DNA, 22 bp, synthetic construct
  misc_feature 1..22: note = chemically synthesized
  source 1..22: mol_type = other DNA
gtggctgttccccatttccaat

SEQ ID NO: 92807 - DNA, 22 bp, synthetic construct
  misc_feature 1..22: note = chemically synthesized
  source 1..22: mol_type = other DNA
tggctgttccccatttccaatt

SEQ ID NO: 92808 - DNA, 22 bp, synthetic construct
  misc_feature 1..22: note = chemically synthesized
  source 1..22: mol_type = other DNA
ttccccatttccaattgttttc

SEQ ID NO: 92809 - DNA, 22 bp, synthetic construct
  misc_feature 1..22: note = chemically synthesized
  source 1..22: mol_type = other DNA
cccatttccaattgttttccat

SEQ ID NO: 92810 - DNA, 22 bp, synthetic construct
  misc_feature 1..22: note = chemically synthesized
  source 1..22: mol_type = other DNA
ccaattgttttccatgattatt

SEQ ID NO: 92811 - DNA, 22 bp, synthetic construct
  misc_feature 1..22: note = chemically synthesized
  source 1..22: mol_type = other DNA
caattgttttccatgattattg

SEQ ID NO: 92812 - DNA, 22 bp, synthetic construct
  misc_feature 1..22: note = chemically synthesized
  source 1..22: mol_type = other DNA
ttttccatgattattgcttcta

SEQ ID NO: 92813 - DNA, 22 bp, synthetic construct
  misc_feature 1..22: note = chemically synthesized
  source 1..22: mol_type = other DNA
tccatgattattgcttctactg

SEQ ID NO: 92814 - DNA, 22 bp, synthetic construct
  misc_feature 1..22: note = chemically synthesized
  source 1..22: mol_type = other DNA
ccatgattattgcttctactgt

SEQ ID NO: 92815 - DNA, 22 bp, synthetic construct
  misc_feature 1..22: note = chemically synthesized
  source 1..22: mol_type = other DNA
catgattattgcttctactgtg

SEQ ID NO: 92816 - DNA, 22 bp, synthetic construct
  misc_feature 1..22: note = chemically synthesized
  source 1..22: mol_type = other DNA
ttgcttctactgtgatctatag

SEQ ID NO: 92817 - DNA, 22 bp, synthetic construct
  misc_feature 1..22: note = chemically synthesized
  source 1..22: mol_type = other DNA
cttctactgtgatctatagact

SEQ ID NO: 92818 - DNA, 22 bp, synthetic construct
  misc_feature 1..22: note = chemically synthesized
  source 1..22: mol_type = other DNA
ctactgtgatctatagactctt

SEQ ID NO: 92819 - DNA, 22 bp, synthetic construct
  misc_feature 1..22: note = chemically synthesized
  source 1..22: mol_type = other DNA
tactgtgatctatagactctta

SEQ ID NO: 92820 - DNA, 22 bp, synthetic construct
  misc_feature 1..22: note = chemically synthesized
  source 1..22: mol_type = other DNA
ctgtgatctatagactcttata

SEQ ID NO: 92821 - DNA, 22 bp, synthetic construct
  misc_feature 1..22: note = chemically synthesized
  source 1..22: mol_type = other DNA
tgatctatagactcttatatca

SEQ ID NO: 92822 - DNA, 22 bp, synthetic construct
  misc_feature 1..22: note = chemically synthesized
  source 1..22: mol_type = other DNA
tagactcttatatcatcaatac

SEQ ID NO: 92823 - DNA, 22 bp, synthetic construct
  misc_feature 1..22: note = chemically synthesized
  source 1..22: mol_type = other DNA
ttatatcatcaataccaggtta

SEQ ID NO: 92824 - DNA, 22 bp, synthetic construct
  misc_feature 1..22: note = chemically synthesized
  source 1..22: mol_type = other DNA
atatcatcaataccaggttatc

SEQ ID NO: 92825 - DNA, 22 bp, synthetic construct
  misc_feature 1..22: note = chemically synthesized
  source 1..22: mol_type = other DNA
tatcatcaataccaggttatca

SEQ ID NO: 92826 - DNA, 22 bp, synthetic construct
  misc_feature 1..22: note = chemically synthesized
  source 1..22: mol_type = other DNA
tcattgcagttgtcaacttctc

SEQ ID NO: 92827 - DNA, 22 bp, synthetic construct
  misc_feature 1..22: note = chemically synthesized
  source 1..22: mol_type = other DNA
cagttgtcaacttctctctgtt

SEQ ID NO: 92828 - DNA, 22 bp, synthetic construct
  misc_feature 1..22: note = chemically synthesized
  source 1..22: mol_type = other DNA
tcaacttctctctgttgcatct

SEQ ID NO: 92829 - DNA, 22 bp, synthetic construct
  misc_feature 1..22: note = chemically synthesized
  source 1..22: mol_type = other DNA
ctctctgttgcatcttatgcat

SEQ ID NO: 92830 - DNA, 22 bp, synthetic construct
  misc_feature 1..22: note = chemically synthesized
  source 1..22: mol_type = other DNA
tctctgttgcatcttatgcatt

SEQ ID NO: 92831 - DNA, 22 bp, synthetic construct
  misc_feature 1..22: note = chemically synthesized
  source 1..22: mol_type = other DNA
tctgttgcatcttatgcattaa

SEQ ID NO: 92832 - DNA, 22 bp, synthetic construct
  misc_feature 1..22: note = chemically synthesized
  source 1..22: mol_type = other DNA
tgttgcatcttatgcattaatt

SEQ ID NO: 92833 - DNA, 22 bp, synthetic construct
  misc_feature 1..22: note = chemically synthesized
  source 1..22: mol_type = other DNA
ttgcatcttatgcattaattca

SEQ ID NO: 92834 - DNA, 22 bp, synthetic construct
  misc_feature 1..22: note = chemically synthesized
  source 1..22: mol_type = other DNA
catcttatgcattaattcaaca

SEQ ID NO: 92835 - DNA, 22 bp, synthetic construct
  misc_feature 1..22: note = chemically synthesized
  source 1..22: mol_type = other DNA
atgcattaattcaacaaataca

SEQ ID NO: 92836 - DNA, 22 bp, synthetic construct
  misc_feature 1..22: note = chemically synthesized
  source 1..22: mol_type = other DNA
tgcattaattcaacaaatacat

SEQ ID NO: 92837 - DNA, 22 bp, synthetic construct
  misc_feature 1..22: note = chemically synthesized
  source 1..22: mol_type = other DNA
attcaacaaatacatattagat

SEQ ID NO: 92838 - DNA, 22 bp, synthetic construct
  misc_feature 1..22: note = chemically synthesized
  source 1..22: mol_type = other DNA
aacaaatacatattagattcca

SEQ ID NO: 92839 - DNA, 22 bp, synthetic construct
  misc_feature 1..22: note = chemically synthesized
  source 1..22: mol_type = other DNA
gattccatatgtcatccatgaa

SEQ ID NO: 92840 - DNA, 22 bp, synthetic construct
  misc_feature 1..22: note = chemically synthesized
  source 1..22: mol_type = other DNA
catatgtcatccatgaagtttc

SEQ ID NO: 92841 - DNA, 22 bp, synthetic construct
  misc_feature 1..22: note = chemically synthesized
  source 1..22: mol_type = other DNA
cattcatatgccatccattttt

SEQ ID NO: 92842 - DNA, 22 bp, synthetic construct
  misc_feature 1..22: note = chemically synthesized
  source 1..22: mol_type = other DNA
attcatatgccatccatttttc

SEQ ID NO: 92843 - DNA, 22 bp, synthetic construct
  misc_feature 1..22: note = chemically synthesized
  source 1..22: mol_type = other DNA
atatgccatccatttttcttaa

SEQ ID NO: 92844 - DNA, 22 bp, synthetic construct
  misc_feature 1..22: note = chemically synthesized
  source 1..22: mol_type = other DNA
ttcttaattctgagaatcttac

SEQ ID NO: 92845 - DNA, 22 bp, synthetic construct
  misc_feature 1..22: note = chemically synthesized
  source 1..22: mol_type = other DNA
tcttaattctgagaatcttaca

SEQ ID NO: 92846 - DNA, 22 bp, synthetic construct
  misc_feature 1..22: note = chemically synthesized
  source 1..22: mol_type = other DNA
cttaattctgagaatcttacat

SEQ ID NO: 92847 - DNA, 22 bp, synthetic construct
  misc_feature 1..22: note = chemically synthesized
  source 1..22: mol_type = other DNA
ttaattctgagaatcttacatg

SEQ ID NO: 92848 - DNA, 22 bp, synthetic construct
  misc_feature 1..22: note = chemically synthesized
  source 1..22: mol_type = other DNA
aattctgagaatcttacatgaa

SEQ ID NO: 92849 - DNA, 22 bp, synthetic construct
  misc_feature 1..22: note = chemically synthesized
  source 1..22: mol_type = other DNA
attctgagaatcttacatgaac

SEQ ID NO: 92850 - DNA, 22 bp, synthetic construct
  misc_feature 1..22: note = chemically synthesized
  source 1..22: mol_type = other DNA
tgagaatcttacatgaactaga

SEQ ID NO: 92851 - DNA, 22 bp, synthetic construct
  misc_feature 1..22: note = chemically synthesized
  source 1..22: mol_type = other DNA
agaatcttacatgaactagaca

SEQ ID NO: 92852 - DNA, 22 bp, synthetic construct
  misc_feature 1..22: note = chemically synthesized
  source 1..22: mol_type = other DNA
acatgaactagacagacagatt

SEQ ID NO: 92853 - DNA, 22 bp, synthetic construct
  misc_feature 1..22: note = chemically synthesized
  source 1..22: mol_type = other DNA
catgaactagacagacagattc

SEQ ID NO: 92854 - DNA, 22 bp, synthetic construct
  misc_feature 1..22: note = chemically synthesized
  source 1..22: mol_type = other DNA
gacagacagattctctggctaa

SEQ ID NO: 92855 - DNA, 22 bp, synthetic construct
  misc_feature 1..22: note = chemically synthesized
  source 1..22: mol_type = other DNA
tctggctaatggtgccctcact

SEQ ID NO: 92856 - DNA, 22 bp, synthetic construct
  misc_feature 1..22: note = chemically synthesized
  source 1..22: mol_type = other DNA
tggctaatggtgccctcactat

SEQ ID NO: 92857 - DNA, 22 bp, synthetic construct
  misc_feature 1..22: note = chemically synthesized
  source 1..22: mol_type = other DNA
gctaatggtgccctcactatag

SEQ ID NO: 92858 - DNA, 22 bp, synthetic construct
  misc_feature 1..22: note = chemically synthesized
  source 1..22: mol_type = other DNA
atggtgccctcactatagtgag

SEQ ID NO: 92859 - DNA, 22 bp, synthetic construct
  misc_feature 1..22: note = chemically synthesized
  source 1..22: mol_type = other DNA
actatagtgagcagaggagacc

SEQ ID NO: 92860 - DNA, 22 bp, synthetic construct
  misc_feature 1..22: note = chemically synthesized
  source 1..22: mol_type = other DNA
tagtgagcagaggagaccagca

SEQ ID NO: 92861 - DNA, 22 bp, synthetic construct
  misc_feature 1..22: note = chemically synthesized
  source 1..22: mol_type = other DNA
aaagaaatgaattaataagaga

SEQ ID NO: 92862 - DNA, 22 bp, synthetic construct
  misc_feature 1..22: note = chemically synthesized
  source 1..22: mol_type = other DNA
ataagagatttcagatggtatt

SEQ ID NO: 92863 - DNA, 22 bp, synthetic construct
  misc_feature 1..22: note = chemically synthesized
  source 1..22: mol_type = other DNA
cagatggtattatatgacttga

SEQ ID NO: 92864 - DNA, 22 bp, synthetic construct
  misc_feature 1..22: note = chemically synthesized
  source 1..22: mol_type = other DNA
agatggtattatatgacttgaa

SEQ ID NO: 92865 - DNA, 22 bp, synthetic construct
  misc_feature 1..22: note = chemically synthesized
  source 1..22: mol_type = other DNA
tatgacttgaagaaactgcata

SEQ ID NO: 92866 - DNA, 22 bp, synthetic construct
  misc_feature 1..22: note = chemically synthesized
  source 1..22: mol_type = other DNA
gaagaaactgcatattgtacct

SEQ ID NO: 92867 - DNA, 22 bp, synthetic construct
  misc_feature 1..22: note = chemically synthesized
  source 1..22: mol_type = other DNA
aagaaactgcatattgtaccta

SEQ ID NO: 92868 - DNA, 22 bp, synthetic construct
  misc_feature 1..22: note = chemically synthesized
  source 1..22: mol_type = other DNA
catattgtacctacaaccatct

SEQ ID NO: 92869 - DNA, 22 bp, synthetic construct
  misc_feature 1..22: note = chemically synthesized
  source 1..22: mol_type = other DNA
tacctacaaccatctggtcttt

SEQ ID NO: 92870 - DNA, 22 bp, synthetic construct
  misc_feature 1..22: note = chemically synthesized
  source 1..22: mol_type = other DNA
caaccatctggtcttttagaaa

SEQ ID NO: 92871 - DNA, 22 bp, synthetic construct
  misc_feature 1..22: note = chemically synthesized
  source 1..22: mol_type = other DNA
gtcttttagaaacctgacaaaa

SEQ ID NO: 92872 - DNA, 22 bp, synthetic construct
  misc_feature 1..22: note = chemically synthesized
  source 1..22: mol_type = other DNA
ttagaaacctgacaaaagcaag

SEQ ID NO: 92873 - DNA, 22 bp, synthetic construct
  misc_feature 1..22: note = chemically synthesized
  source 1..22: mol_type = other DNA
tagaaacctgacaaaagcaagc

SEQ ID NO: 92874 - DNA, 22 bp, synthetic construct
  misc_feature 1..22: note = chemically synthesized
  source 1..22: mol_type = other DNA
agaaacctgacaaaagcaagca

SEQ ID NO: 92875 - DNA, 22 bp, synthetic construct
  misc_feature 1..22: note = chemically synthesized
  source 1..22: mol_type = other DNA
gaaacctgacaaaagcaagcaa

SEQ ID NO: 92876 - DNA, 22 bp, synthetic construct
  misc_feature 1..22: note = chemically synthesized
  source 1..22: mol_type = other DNA
acaaaagcaagcaatggggaaa

SEQ ID NO: 92877 - DNA, 22 bp, synthetic construct
  misc_feature 1..22: note = chemically synthesized
  source 1..22: mol_type = other DNA
tcaatttaataaatgatggggg

SEQ ID NO: 92878 - DNA, 22 bp, synthetic construct
  misc_feature 1..22: note = chemically synthesized
  source 1..22: mol_type = other DNA
caatttaataaatgatggggga

SEQ ID NO: 92879 - DNA, 22 bp, synthetic construct
  misc_feature 1..22: note = chemically synthesized
  source 1..22: mol_type = other DNA
aatttaataaatgatgggggag

SEQ ID NO: 92880 - DNA, 22 bp, synthetic construct
  misc_feature 1..22: note = chemically synthesized
  source 1..22: mol_type = other DNA
aataaatgatgggggagaactg

SEQ ID NO: 92881 - DNA, 22 bp, synthetic construct
  misc_feature 1..22: note = chemically synthesized
  source 1..22: mol_type = other DNA
ataaatgatgggggagaactgg

SEQ ID NO: 92882 - DNA, 22 bp, synthetic construct
  misc_feature 1..22: note = chemically synthesized
  source 1..22: mol_type = other DNA
gctagccatatgctgaaaaatg

SEQ ID NO: 92883 - DNA, 22 bp, synthetic construct
  misc_feature 1..22: note = chemically synthesized
  source 1..22: mol_type = other DNA
gccatatgctgaaaaatgaaac

SEQ ID NO: 92884 - DNA, 22 bp, synthetic construct
  misc_feature 1..22: note = chemically synthesized
  source 1..22: mol_type = other DNA
aaaaatgaaactggactccttc

SEQ ID NO: 92885 - DNA, 22 bp, synthetic construct
  misc_feature 1..22: note = chemically synthesized
  source 1..22: mol_type = other DNA
gactccttccttataccttatc

SEQ ID NO: 92886 - DNA, 22 bp, synthetic construct
  misc_feature 1..22: note = chemically synthesized
  source 1..22: mol_type = other DNA
cttccttataccttatccaaaa

SEQ ID NO: 92887 - DNA, 22 bp, synthetic construct
  misc_feature 1..22: note = chemically synthesized
  source 1..22: mol_type = other DNA
ccttataccttatccaaaatta

SEQ ID NO: 92888 - DNA, 22 bp, synthetic construct
  misc_feature 1..22: note = chemically synthesized
  source 1..22: mol_type = other DNA
cttataccttatccaaaattaa

SEQ ID NO: 92889 - DNA, 22 bp, synthetic construct
  misc_feature 1..22: note = chemically synthesized
  source 1..22: mol_type = other DNA
ataccttatccaaaattaactc

SEQ ID NO: 92890 - DNA, 22 bp, synthetic construct
  misc_feature 1..22: note = chemically synthesized
  source 1..22: mol_type = other DNA
taccttatccaaaattaactcc

SEQ ID NO: 92891 - DNA, 22 bp, synthetic construct
  misc_feature 1..22: note = chemically synthesized
  source 1..22: mol_type = other DNA
atccaaaattaactccagatgg

SEQ ID NO: 92892 - DNA, 22 bp, synthetic construct
  misc_feature 1..22: note = chemically synthesized
  source 1..22: mol_type = other DNA
tccaaaattaactccagatgga

SEQ ID NO: 92893 - DNA, 22 bp, synthetic construct
  misc_feature 1..22: note = chemically synthesized
  source 1..22: mol_type = other DNA
actccagatggattagagactt

SEQ ID NO: 92894 - DNA, 22 bp, synthetic construct
  misc_feature 1..22: note = chemically synthesized
  source 1..22: mol_type = other DNA
cagatggattagagacttaaat

SEQ ID NO: 92895 - DNA, 22 bp, synthetic construct
  misc_feature 1..22: note = chemically synthesized
  source 1..22: mol_type = other DNA
gagacttaaatgaaaaacccca

SEQ ID NO: 92896 - DNA, 22 bp, synthetic construct
  misc_feature 1..22: note = chemically synthesized
  source 1..22: mol_type = other DNA
aaatgaaaaaccccaaactata

SEQ ID NO: 92897 - DNA, 22 bp, synthetic construct
  misc_feature 1..22: note = chemically synthesized
  source 1..22: mol_type = other DNA
aatgaaaaaccccaaactataa

SEQ ID NO: 92898 - DNA, 22 bp, synthetic construct
  misc_feature 1..22: note = chemically synthesized
  source 1..22: mol_type = other DNA
taaaaagcctagaaaaaaatca

SEQ ID NO: 92899 - DNA, 22 bp, synthetic construct
  misc_feature 1..22: note = chemically synthesized
  source 1..22: mol_type = other DNA
gaaaaaaatcaaggcaatacta

SEQ ID NO: 92900 - DNA, 22 bp, synthetic construct
  misc_feature 1..22: note = chemically synthesized
  source 1..22: mol_type = other DNA
ttcatgatataaacacgggcac

SEQ ID NO: 92901 - DNA, 22 bp, synthetic construct
  misc_feature 1..22: note = chemically synthesized
  source 1..22: mol_type = other DNA
atgatataaacacgggcacaga

SEQ ID NO: 92902 - DNA, 22 bp, synthetic construct
  misc_feature 1..22: note = chemically synthesized
  source 1..22: mol_type = other DNA
catgatgaaagcgtgaaaagca

SEQ ID NO: 92903 - DNA, 22 bp, synthetic construct
  misc_feature 1..22: note = chemically synthesized
  source 1..22: mol_type = other DNA
atgatgaaagcgtgaaaagcaa

SEQ ID NO: 92904 - DNA, 22 bp, synthetic construct
  misc_feature 1..22: note = chemically synthesized
  source 1..22: mol_type = other DNA
cagcaaaagcaaaaattgacca

SEQ ID NO: 92905 - DNA, 22 bp, synthetic construct
  misc_feature 1..22: note = chemically synthesized
  source 1..22: mol_type = other DNA
accaatggaatctaattaaact

SEQ ID NO: 92906 - DNA, 22 bp, synthetic construct
  misc_feature 1..22: note = chemically synthesized
  source 1..22: mol_type = other DNA
attaaactaaagagctcctgct

SEQ ID NO: 92907 - DNA, 22 bp, synthetic construct
  misc_feature 1..22: note = chemically synthesized
  source 1..22: mol_type = other DNA
aactaaagagctcctgctcagc

SEQ ID NO: 92908 - DNA, 22 bp, synthetic construct
  misc_feature 1..22: note = chemically synthesized
  source 1..22: mol_type = other DNA
aagagctcctgctcagcaaaag

SEQ ID NO: 92909 - DNA, 22 bp, synthetic construct
  misc_feature 1..22: note = chemically synthesized
  source 1..22: mol_type = other DNA
ctgctcagcaaaagaaactacc

SEQ ID NO: 92910 - DNA, 22 bp, synthetic construct
  misc_feature 1..22: note = chemically synthesized
  source 1..22: mol_type = other DNA
ctcagcaaaagaaactaccatc

SEQ ID NO: 92911 - DNA, 22 bp, synthetic construct
  misc_feature 1..22: note = chemically synthesized
  source 1..22: mol_type = other DNA
agcaaaagaaactaccatcaga

SEQ ID NO: 92912 - DNA, 22 bp, synthetic construct
  misc_feature 1..22: note = chemically synthesized
  source 1..22: mol_type = other DNA
ccatcagagcgaaagacaatct

SEQ ID NO: 92913 - DNA, 22 bp, synthetic construct
  misc_feature 1..22: note = chemically synthesized
  source 1..22: mol_type = other DNA
cagaatgggaaaaagattttcc

SEQ ID NO: 92914 - DNA, 22 bp, synthetic construct
  misc_feature 1..22: note = chemically synthesized
  source 1..22: mol_type = other DNA
tccaatctattcttctgacaaa

SEQ ID NO: 92915 - DNA, 22 bp, synthetic construct
  misc_feature 1..22: note = chemically synthesized
  source 1..22: mol_type = other DNA
ccaatctattcttctgacaaag

SEQ ID NO: 92916 - DNA, 22 bp, synthetic construct
  misc_feature 1..22: note = chemically synthesized
  source 1..22: mol_type = other DNA
caatctattcttctgacaaagg

SEQ ID NO: 92917 - DNA, 22 bp, synthetic construct
  misc_feature 1..22: note = chemically synthesized
  source 1..22: mol_type = other DNA
ttcttctgacaaaggcctaata

SEQ ID NO: 92918 - DNA, 22 bp, synthetic construct
  misc_feature 1..22: note = chemically synthesized
  source 1..22: mol_type = other DNA
ttctgacaaaggcctaatatcc

SEQ ID NO: 92919 - DNA, 22 bp, synthetic construct
  misc_feature 1..22: note = chemically synthesized
  source 1..22: mol_type = other DNA
ctgacaaaggcctaatatccag

SEQ ID NO: 92920 - DNA, 22 bp, synthetic construct
  misc_feature 1..22: note = chemically synthesized
  source 1..22: mol_type = other DNA
tgacaaaggcctaatatccaga

SEQ ID NO: 92921 - DNA, 22 bp, synthetic construct
  misc_feature 1..22: note = chemically synthesized
  source 1..22: mol_type = other DNA
acaaaggcctaatatccagagt

SEQ ID NO: 92922 - DNA, 22 bp, synthetic construct
  misc_feature 1..22: note = chemically synthesized
  source 1..22: mol_type = other DNA
atatccagagtaaacaagaaac

SEQ ID NO: 92923 - DNA, 22 bp, synthetic construct
  misc_feature 1..22: note = chemically synthesized
  source 1..22: mol_type = other DNA
aaacaactttacaagaaaaaaa

SEQ ID NO: 92924 - DNA, 22 bp, synthetic construct
  misc_feature 1..22: note = chemically synthesized
  source 1..22: mol_type = other DNA
aacaactttacaagaaaaaaaa

SEQ ID NO: 92925 - DNA, 22 bp, synthetic construct
  misc_feature 1..22: note = chemically synthesized
  source 1..22: mol_type = other DNA
tacaagaaaaaaaaaacccatt

SEQ ID NO: 92926 - DNA, 22 bp, synthetic construct
  misc_feature 1..22: note = chemically synthesized
  source 1..22: mol_type = other DNA
acaagaaaaaaaaaacccatta

SEQ ID NO: 92927 - DNA, 22 bp, synthetic construct
  misc_feature 1..22: note = chemically synthesized
  source 1..22: mol_type = other DNA
caagaaaaaaaaaacccattaa

SEQ ID NO: 92928 - DNA, 22 bp, synthetic construct
  misc_feature 1..22: note = chemically synthesized
  source 1..22: mol_type = other DNA
aaaccatggcacacttttacct

SEQ ID NO: 92929 - DNA, 22 bp, synthetic construct
  misc_feature 1..22: note = chemically synthesized
  source 1..22: mol_type = other DNA
ttacctataaaacaaacctgca

SEQ ID NO: 92930 - DNA, 22 bp, synthetic construct
  misc_feature 1..22: note = chemically synthesized
  source 1..22: mol_type = other DNA
tacctataaaacaaacctgcat

SEQ ID NO: 92931 - DNA, 22 bp, synthetic construct
  misc_feature 1..22: note = chemically synthesized
  source 1..22: mol_type = other DNA
acctataaaacaaacctgcata

SEQ ID NO: 92932 - DNA, 22 bp, synthetic construct
  misc_feature 1..22: note = chemically synthesized
  source 1..22: mol_type = other DNA
cctataaaacaaacctgcatat

SEQ ID NO: 92933 - DNA, 22 bp, synthetic construct
  misc_feature 1..22: note = chemically synthesized
  source 1..22: mol_type = other DNA
taaaacaaacctgcatatcctg

SEQ ID NO: 92934 - DNA, 22 bp, synthetic construct
  misc_feature 1..22: note = chemically synthesized
  source 1..22: mol_type = other DNA
catatcctgtacgtgtacccct

SEQ ID NO: 92935 - DNA, 22 bp, synthetic construct
  misc_feature 1..22: note = chemically synthesized
  source 1..22: mol_type = other DNA
tacgtgtacccctgaatttaag

SEQ ID NO: 92936 - DNA, 22 bp, synthetic construct
  misc_feature 1..22: note = chemically synthesized
  source 1..22: mol_type = other DNA
aatttaaggtaacagtaaatta

SEQ ID NO: 92937 - DNA, 22 bp, synthetic construct
  misc_feature 1..22: note = chemically synthesized
  source 1..22: mol_type = other DNA
aaggtaacagtaaattaaatta

SEQ ID NO: 92938 - DNA, 22 bp, synthetic construct
  misc_feature 1..22: note = chemically synthesized
  source 1..22: mol_type = other DNA
aggtaacagtaaattaaattaa

SEQ ID NO: 92939 - DNA, 22 bp, synthetic construct
  misc_feature 1..22: note = chemically synthesized
  source 1..22: mol_type = other DNA
aattaaaagaaaaatgccatgg

SEQ ID NO: 92940 - DNA, 22 bp, synthetic construct
  misc_feature 1..22: note = chemically synthesized
  source 1..22: mol_type = other DNA
aaagaaaaatgccatggcaatg

SEQ ID NO: 92941 - DNA, 22 bp, synthetic construct
  misc_feature 1..22: note = chemically synthesized
  source 1..22: mol_type = other DNA
ccctatatggcctaaaaagaga

SEQ ID NO: 92942 - DNA, 22 bp, synthetic construct
  misc_feature 1..22: note = chemically synthesized
  source 1..22: mol_type = other DNA
tatggcctaaaaagagaaggca

SEQ ID NO: 92943 - DNA, 22 bp, synthetic construct
  misc_feature 1..22: note = chemically synthesized
  source 1..22: mol_type = other DNA
aaaagagaaggcataaataatc

SEQ ID NO: 92944 - DNA, 22 bp, synthetic construct
  misc_feature 1..22: note = chemically synthesized
  source 1..22: mol_type = other DNA
gtttaacatatcatcaagaaat

SEQ ID NO: 92945 - DNA, 22 bp, synthetic construct
  misc_feature 1..22: note = chemically synthesized
  source 1..22: mol_type = other DNA
tttaacatatcatcaagaaata

SEQ ID NO: 92946 - DNA, 22 bp, synthetic construct
  misc_feature 1..22: note = chemically synthesized
  source 1..22: mol_type = other DNA
aacatatcatcaagaaataacc

SEQ ID NO: 92947 - DNA, 22 bp, synthetic construct
  misc_feature 1..22: note = chemically synthesized
  source 1..22: mol_type = other DNA
acatatcatcaagaaataacca

SEQ ID NO: 92948 - DNA, 22 bp, synthetic construct
  misc_feature 1..22: note = chemically synthesized
  source 1..22: mol_type = other DNA
ggggctgctctgcctatgcagt

SEQ ID NO: 92949 - DNA, 22 bp, synthetic construct
  misc_feature 1..22: note = chemically synthesized
  source 1..22: mol_type = other DNA
ctctgcctatgcagtagtcatt

SEQ ID NO: 92950 - DNA, 22 bp, synthetic construct
  misc_feature 1..22: note = chemically synthesized
  source 1..22: mol_type = other DNA
tgcctatgcagtagtcattcgt

SEQ ID NO: 92951 - DNA, 22 bp, synthetic construct
  misc_feature 1..22: note = chemically synthesized
  source 1..22: mol_type = other DNA
cctatgcagtagtcattcgttt

SEQ ID NO: 92952 - DNA, 22 bp, synthetic construct
  misc_feature 1..22: note = chemically synthesized
  source 1..22: mol_type = other DNA
tgcagtagtcattcgtttattt

SEQ ID NO: 92953 - DNA, 22 bp, synthetic construct
  misc_feature 1..22: note = chemically synthesized
  source 1..22: mol_type = other DNA
gtttatttctttactctctcaa

SEQ ID NO: 92954 - DNA, 22 bp, synthetic construct
  misc_feature 1..22: note = chemically synthesized
  source 1..22: mol_type = other DNA
atttctttactctctcaagaaa

SEQ ID NO: 92955 - DNA, 22 bp, synthetic construct
  misc_feature 1..22: note = chemically synthesized
  source 1..22: mol_type = other DNA
tttctttactctctcaagaaat

SEQ ID NO: 92956 - DNA, 22 bp, synthetic construct
  misc_feature 1..22: note = chemically synthesized
  source 1..22: mol_type = other DNA
ctttactctctcaagaaatttg

SEQ ID NO: 92957 - DNA, 22 bp, synthetic construct
  misc_feature 1..22: note = chemically synthesized
  source 1..22: mol_type = other DNA
tttactctctcaagaaatttgc

SEQ ID NO: 92958 - DNA, 22 bp, synthetic construct
  misc_feature 1..22: note = chemically synthesized
  source 1..22: mol_type = other DNA
tactctctcaagaaatttgctt

SEQ ID NO: 92959 - DNA, 22 bp, synthetic construct
  misc_feature 1..22: note = chemically synthesized
  source 1..22: mol_type = other DNA
actctctcaagaaatttgcttt

SEQ ID NO: 92960 - DNA, 22 bp, synthetic construct
  misc_feature 1..22: note = chemically synthesized
  source 1..22: mol_type = other DNA
ctctctcaagaaatttgctttg

SEQ ID NO: 92961 - DNA, 22 bp, synthetic construct
  misc_feature 1..22: note = chemically synthesized
  source 1..22: mol_type = other DNA
tctcaagaaatttgctttgact

SEQ ID NO: 92962 - DNA, 22 bp, synthetic construct
  misc_feature 1..22: note = chemically synthesized
  source 1..22: mol_type = other DNA
tcaagaaatttgctttgactta

SEQ ID NO: 92963 - DNA, 22 bp, synthetic construct
  misc_feature 1..22: note = chemically synthesized
  source 1..22: mol_type = other DNA
aagaaatttgctttgacttaaa

SEQ ID NO: 92964 - DNA, 22 bp, synthetic construct
  misc_feature 1..22: note = chemically synthesized
  source 1..22: mol_type = other DNA
gctttgacttaaaaaaaacaaa

SEQ ID NO: 92965 - DNA, 22 bp, synthetic construct
  misc_feature 1..22: note = chemically synthesized
  source 1..22: mol_type = other DNA
ctttgacttaaaaaaaacaaaa

SEQ ID NO: 92966 - DNA, 22 bp, synthetic construct
  misc_feature 1..22: note = chemically synthesized
  source 1..22: mol_type = other DNA
tgacttaaaaaaaacaaaaaac

SEQ ID NO: 92967 - DNA, 22 bp, synthetic construct
  misc_feature 1..22: note = chemically synthesized
  source 1..22: mol_type = other DNA
gacttaaaaaaaacaaaaaaca

SEQ ID NO: 92968 - DNA, 22 bp, synthetic construct
  misc_feature 1..22: note = chemically synthesized
  source 1..22: mol_type = other DNA
acttaaaaaaaacaaaaaacaa

SEQ ID NO: 92969 - DNA, 22 bp, synthetic construct
  misc_feature 1..22: note = chemically synthesized
  source 1..22: mol_type = other DNA
aaaaaaaacaaaaaacaaaaaa

SEQ ID NO: 92970 - DNA, 22 bp, synthetic construct
  misc_feature 1..22: note = chemically synthesized
  source 1..22: mol_type = other DNA
aaaaaaacaaaaaacaaaaaag

SEQ ID NO: 92971 - DNA, 22 bp, synthetic construct
  misc_feature 1..22: note = chemically synthesized
  source 1..22: mol_type = other DNA
tgaaacggtagtgactgcattt

SEQ ID NO: 92972 - DNA, 22 bp, synthetic construct
  misc_feature 1..22: note = chemically synthesized
  source 1..22: mol_type = other DNA
aaacggtagtgactgcatttga

SEQ ID NO: 92973 - DNA, 22 bp, synthetic construct
  misc_feature 1..22: note = chemically synthesized
  source 1..22: mol_type = other DNA
catttgaagtgggacctttatg

SEQ ID NO: 92974 - DNA, 22 bp, synthetic construct
  misc_feature 1..22: note = chemically synthesized
  source 1..22: mol_type = other DNA
gaagtgggacctttatgatatg

SEQ ID NO: 92975 - DNA, 22 bp, synthetic construct
  misc_feature 1..22: note = chemically synthesized
  source 1..22: mol_type = other DNA
aagtgggacctttatgatatga

SEQ ID NO: 92976 - DNA, 22 bp, synthetic construct
  misc_feature 1..22: note = chemically synthesized
  source 1..22: mol_type = other DNA
tatgatatgatggagccaggca

SEQ ID NO: 92977 - DNA, 22 bp, synthetic construct
  misc_feature 1..22: note = chemically synthesized
  source 1..22: mol_type = other DNA
atgatatgatggagccaggcag

SEQ ID NO: 92978 - DNA, 22 bp, synthetic construct
  misc_feature 1..22: note = chemically synthesized
  source 1..22: mol_type = other DNA
tgatatgatggagccaggcaga

SEQ ID NO: 92979 - DNA, 22 bp, synthetic construct
  misc_feature 1..22: note = chemically synthesized
  source 1..22: mol_type = other DNA
gagaagttcctgaaagaaggaa

SEQ ID NO: 92980 - DNA, 22 bp, synthetic construct
  misc_feature 1..22: note = chemically synthesized
  source 1..22: mol_type = other DNA
ctgaaagaaggaagggcatgtg

SEQ ID NO: 92981 - DNA, 22 bp, synthetic construct
  misc_feature 1..22: note = chemically synthesized
  source 1..22: mol_type = other DNA
aaagaaggaagggcatgtgcca

SEQ ID NO: 92982 - DNA, 22 bp, synthetic construct
  misc_feature 1..22: note = chemically synthesized
  source 1..22: mol_type = other DNA
tgaggctgaggagaaaaaagaa

SEQ ID NO: 92983 - DNA, 22 bp, synthetic construct
  misc_feature 1..22: note = chemically synthesized
  source 1..22: mol_type = other DNA
aggctgaggagaaaaaagaaag

SEQ ID NO: 92984 - DNA, 22 bp, synthetic construct
  misc_feature 1..22: note = chemically synthesized
  source 1..22: mol_type = other DNA
aggagaaaaaagaaagaaagaa

SEQ ID NO: 92985 - DNA, 22 bp, synthetic construct
  misc_feature 1..22: note = chemically synthesized
  source 1..22: mol_type = other DNA
tacatttcactgtatgtaaaga

SEQ ID NO: 92986 - DNA, 22 bp, synthetic construct
  misc_feature 1..22: note = chemically synthesized
  source 1..22: mol_type = other DNA
acatttcactgtatgtaaagac

SEQ ID NO: 92987 - DNA, 22 bp, synthetic construct
  misc_feature 1..22: note = chemically synthesized
  source 1..22: mol_type = other DNA
catttcactgtatgtaaagaca

SEQ ID NO: 92988 - DNA, 22 bp, synthetic construct
  misc_feature 1..22: note = chemically synthesized
  source 1..22: mol_type = other DNA
cactgtatgtaaagacattaca

SEQ ID NO: 92989 - DNA, 22 bp, synthetic construct
  misc_feature 1..22: note = chemically synthesized
  source 1..22: mol_type = other DNA
actgtatgtaaagacattacaa

SEQ ID NO: 92990 - DNA, 22 bp, synthetic construct
  misc_feature 1..22: note = chemically synthesized
  source 1..22: mol_type = other DNA
tatgtaaagacattacaaggct

SEQ ID NO: 92991 - DNA, 22 bp, synthetic construct
  misc_feature 1..22: note = chemically synthesized
  source 1..22: mol_type = other DNA
caaggctagagtaaagcatgtt

SEQ ID NO: 92992 - DNA, 22 bp, synthetic construct
  misc_feature 1..22: note = chemically synthesized
  source 1..22: mol_type = other DNA
gagtaaagcatgttgaagtaaa

SEQ ID NO: 92993 - DNA, 22 bp, synthetic construct
  misc_feature 1..22: note = chemically synthesized
  source 1..22: mol_type = other DNA
aagtaaaaataggagaaatcaa

SEQ ID NO: 92994 - DNA, 22 bp, synthetic construct
  misc_feature 1..22: note = chemically synthesized
  source 1..22: mol_type = other DNA
gagagaagggcgcaggcttatt

SEQ ID NO: 92995 - DNA, 22 bp, synthetic construct
  misc_feature 1..22: note = chemically synthesized
  source 1..22: mol_type = other DNA
attatttgggtcttatagatga

SEQ ID NO: 92996 - DNA, 22 bp, synthetic construct
  misc_feature 1..22: note = chemically synthesized
  source 1..22: mol_type = other DNA
ttatttgggtcttatagatgag

SEQ ID NO: 92997 - DNA, 22 bp, synthetic construct
  misc_feature 1..22: note = chemically synthesized
  source 1..22: mol_type = other DNA
tttgggtcttatagatgagagt

SEQ ID NO: 92998 - DNA, 22 bp, synthetic construct
  misc_feature 1..22: note = chemically synthesized
  source 1..22: mol_type = other DNA
gggtcttatagatgagagtagt

SEQ ID NO: 92999 - DNA, 22 bp, synthetic construct
  misc_feature 1..22: note = chemically synthesized
  source 1..22: mol_type = other DNA
ggtcttatagatgagagtagta

SEQ ID NO: 93000 - DNA, 22 bp, synthetic construct
  misc_feature 1..22: note = chemically synthesized
  source 1..22: mol_type = other DNA
atagatgagagtagtagagtag

SEQ ID NO: 93001 - DNA, 22 bp, synthetic construct
  misc_feature 1..22: note = chemically synthesized
  source 1..22: mol_type = other DNA
tagatgagagtagtagagtagg

SEQ ID NO: 93002 - DNA, 22 bp, synthetic construct
  misc_feature 1..22: note = chemically synthesized
  source 1..22: mol_type = other DNA
tatactgaaacataggggacga

SEQ ID NO: 93003 - DNA, 22 bp, synthetic construct
  misc_feature 1..22: note = chemically synthesized
  source 1..22: mol_type = other DNA
atactgaaacataggggacgag

SEQ ID NO: 93004 - DNA, 22 bp, synthetic construct
  misc_feature 1..22: note = chemically synthesized
  source 1..22: mol_type = other DNA
tactgaaacataggggacgagg

SEQ ID NO: 93005 - DNA, 22 bp, synthetic construct
  misc_feature 1..22: note = chemically synthesized
  source 1..22: mol_type = other DNA
aaacataggggacgaggggagc

SEQ ID NO: 93006 - DNA, 22 bp, synthetic construct
  misc_feature 1..22: note = chemically synthesized
  source 1..22: mol_type = other DNA
tgcaaacctgagataaacatgg

SEQ ID NO: 93007 - DNA, 22 bp, synthetic construct
  misc_feature 1..22: note = chemically synthesized
  source 1..22: mol_type = other DNA
gcaaacctgagataaacatggt

SEQ ID NO: 93008 - DNA, 22 bp, synthetic construct
  misc_feature 1..22: note = chemically synthesized
  source 1..22: mol_type = other DNA
caaacctgagataaacatggtc

SEQ ID NO: 93009 - DNA, 22 bp, synthetic construct
  misc_feature 1..22: note = chemically synthesized
  source 1..22: mol_type = other DNA
agataaacatggtctgtagtcc

SEQ ID NO: 93010 - DNA, 22 bp, synthetic construct
  misc_feature 1..22: note = chemically synthesized
  source 1..22: mol_type = other DNA
tagtccactcaaaacccaagct

SEQ ID NO: 93011 - DNA, 22 bp, synthetic construct
  misc_feature 1..22: note = chemically synthesized
  source 1..22: mol_type = other DNA
aaaacccaagcttatttttttc

SEQ ID NO: 93012 - DNA, 22 bp, synthetic construct
  misc_feature 1..22: note = chemically synthesized
  source 1..22: mol_type = other DNA
atttttttctccttcttcatct

SEQ ID NO: 93013 - DNA, 22 bp, synthetic construct
  misc_feature 1..22: note = chemically synthesized
  source 1..22: mol_type = other DNA
tttttttctccttcttcatctg

SEQ ID NO: 93014 - DNA, 22 bp, synthetic construct
  misc_feature 1..22: note = chemically synthesized
  source 1..22: mol_type = other DNA
ttttctccttcttcatctgcct

SEQ ID NO: 93015 - DNA, 22 bp, synthetic construct
  misc_feature 1..22: note = chemically synthesized
  source 1..22: mol_type = other DNA
tttctccttcttcatctgcctt

SEQ ID NO: 93016 - DNA, 22 bp, synthetic construct
  misc_feature 1..22: note = chemically synthesized
  source 1..22: mol_type = other DNA
ttctccttcttcatctgcctta

SEQ ID NO: 93017 - DNA, 22 bp, synthetic construct
  misc_feature 1..22: note = chemically synthesized
  source 1..22: mol_type = other DNA
tctccttcttcatctgccttac

SEQ ID NO: 93018 - DNA, 22 bp, synthetic construct
  misc_feature 1..22: note = chemically synthesized
  source 1..22: mol_type = other DNA
ctccttcttcatctgccttact

SEQ ID NO: 93019 - DNA, 22 bp, synthetic construct
  misc_feature 1..22: note = chemically synthesized
  source 1..22: mol_type = other DNA
tccttcttcatctgccttactc

SEQ ID NO: 93020 - DNA, 22 bp, synthetic construct
  misc_feature 1..22: note = chemically synthesized
  source 1..22: mol_type = other DNA
cttcttcatctgccttactcag

SEQ ID NO: 93021 - DNA, 22 bp, synthetic construct
  misc_feature 1..22: note = chemically synthesized
  source 1..22: mol_type = other DNA
cttcatctgccttactcagtgc

SEQ ID NO: 93022 - DNA, 22 bp, synthetic construct
  misc_feature 1..22: note = chemically synthesized
  source 1..22: mol_type = other DNA
ttcatctgccttactcagtgca

SEQ ID NO: 93023 - DNA, 22 bp, synthetic construct
  misc_feature 1..22: note = chemically synthesized
  source 1..22: mol_type = other DNA
catctgccttactcagtgcaag

SEQ ID NO: 93024 - DNA, 22 bp, synthetic construct
  misc_feature 1..22: note = chemically synthesized
  source 1..22: mol_type = other DNA
atctgccttactcagtgcaagg

SEQ ID NO: 93025 - DNA, 22 bp, synthetic construct
  misc_feature 1..22: note = chemically synthesized
  source 1..22: mol_type = other DNA
ccttactcagtgcaaggtgcta

SEQ ID NO: 93026 - DNA, 22 bp, synthetic construct
  misc_feature 1..22: note = chemically synthesized
  source 1..22: mol_type = other DNA
actcagtgcaaggtgctataac

SEQ ID NO: 93027 - DNA, 22 bp, synthetic construct
  misc_feature 1..22: note = chemically synthesized
  source 1..22: mol_type = other DNA
ctcagtgcaaggtgctataaca

SEQ ID NO: 93028 - DNA, 22 bp, synthetic construct
  misc_feature 1..22: note = chemically synthesized
  source 1..22: mol_type = other DNA
agtgcaaggtgctataacaaaa

SEQ ID NO: 93029 - DNA, 22 bp, synthetic construct
  misc_feature 1..22: note = chemically synthesized
  source 1..22: mol_type = other DNA
taacaaaatacaaaagactggg

SEQ ID NO: 93030 - DNA, 22 bp, synthetic construct
  misc_feature 1..22: note = chemically synthesized
  source 1..22: mol_type = other DNA
ggtggcttcaacaacagagttt

SEQ ID NO: 93031 - DNA, 22 bp, synthetic construct
  misc_feature 1..22: note = chemically synthesized
  source 1..22: mol_type = other DNA
caacaacagagttttttctcac

SEQ ID NO: 93032 - DNA, 22 bp, synthetic construct
  misc_feature 1..22: note = chemically synthesized
  source 1..22: mol_type = other DNA
aacaacagagttttttctcaca

SEQ ID NO: 93033 - DNA, 22 bp, synthetic construct
  misc_feature 1..22: note = chemically synthesized
  source 1..22: mol_type = other DNA
tttctcacatttctgaaggctg

SEQ ID NO: 93034 - DNA, 22 bp, synthetic construct
  misc_feature 1..22: note = chemically synthesized
  source 1..22: mol_type = other DNA
ttctcacatttctgaaggctga

SEQ ID NO: 93035 - DNA, 22 bp, synthetic construct
  misc_feature 1..22: note = chemically synthesized
  source 1..22: mol_type = other DNA
tctcacatttctgaaggctgac

SEQ ID NO: 93036 - DNA, 22 bp, synthetic construct
  misc_feature 1..22: note = chemically synthesized
  source 1..22: mol_type = other DNA
ctcacatttctgaaggctgact

SEQ ID NO: 93037 - DNA, 22 bp, synthetic construct
  misc_feature 1..22: note = chemically synthesized
  source 1..22: mol_type = other DNA
tcacatttctgaaggctgactc

SEQ ID NO: 93038 - DNA, 22 bp, synthetic construct
  misc_feature 1..22: note = chemically synthesized
  source 1..22: mol_type = other DNA
acatttctgaaggctgactcgt

SEQ ID NO: 93039 - DNA, 22 bp, synthetic construct
  misc_feature 1..22: note = chemically synthesized
  source 1..22: mol_type = other DNA
ctgaaggctgactcgtggtcag

SEQ ID NO: 93040 - DNA, 22 bp, synthetic construct
  misc_feature 1..22: note = chemically synthesized
  source 1..22: mol_type = other DNA
tgaaggctgactcgtggtcagg

SEQ ID NO: 93041 - DNA, 22 bp, synthetic construct
  misc_feature 1..22: note = chemically synthesized
  source 1..22: mol_type = other DNA
aaggctgactcgtggtcagggt

SEQ ID NO: 93042 - DNA, 22 bp, synthetic construct
  misc_feature 1..22: note = chemically synthesized
  source 1..22: mol_type = other DNA
actcgtggtcagggttctcttc

SEQ ID NO: 93043 - DNA, 22 bp, synthetic construct
  misc_feature 1..22: note = chemically synthesized
  source 1..22: mol_type = other DNA
gtggtcagggttctcttcctgg

SEQ ID NO: 93044 - DNA, 22 bp, synthetic construct
  misc_feature 1..22: note = chemically synthesized
  source 1..22: mol_type = other DNA
tcttcctggattgcagatggcg

SEQ ID NO: 93045 - DNA, 22 bp, synthetic construct
  misc_feature 1..22: note = chemically synthesized
  source 1..22: mol_type = other DNA
ttcctggattgcagatggcgga

SEQ ID NO: 93046 - DNA, 22 bp, synthetic construct
  misc_feature 1..22: note = chemically synthesized
  source 1..22: mol_type = other DNA
cctggattgcagatggcggact

SEQ ID NO: 93047 - DNA, 22 bp, synthetic construct
  misc_feature 1..22: note = chemically synthesized
  source 1..22: mol_type = other DNA
ctggattgcagatggcggactt

SEQ ID NO: 93048 - DNA, 22 bp, synthetic construct
  misc_feature 1..22: note = chemically synthesized
  source 1..22: mol_type = other DNA
gattgcagatggcggacttctc

SEQ ID NO: 93049 - DNA, 22 bp, synthetic construct
  misc_feature 1..22: note = chemically synthesized
  source 1..22: mol_type = other DNA
cagatggcggacttctcactgt

SEQ ID NO: 93050 - DNA, 22 bp, synthetic construct
  misc_feature 1..22: note = chemically synthesized
  source 1..22: mol_type = other DNA
ctcactgtgtcctcaccgggag

SEQ ID NO: 93051 - DNA, 22 bp, synthetic construct
  misc_feature 1..22: note = chemically synthesized
  source 1..22: mol_type = other DNA
tcactgtgtcctcaccgggagg

SEQ ID NO: 93052 - DNA, 22 bp, synthetic construct
  misc_feature 1..22: note = chemically synthesized
  source 1..22: mol_type = other DNA
actgtgtcctcaccgggaggaa

SEQ ID NO: 93053 - DNA, 22 bp, synthetic construct
  misc_feature 1..22: note = chemically synthesized
  source 1..22: mol_type = other DNA
tgtcctcaccgggaggaaagag

SEQ ID NO: 93054 - DNA, 22 bp, synthetic construct
  misc_feature 1..22: note = chemically synthesized
  source 1..22: mol_type = other DNA
accgggaggaaagagaaatggc

SEQ ID NO: 93055 - DNA, 22 bp, synthetic construct
  misc_feature 1..22: note = chemically synthesized
  source 1..22: mol_type = other DNA
gtctctctgcttctgataagga

SEQ ID NO: 93056 - DNA, 22 bp, synthetic construct
  misc_feature 1..22: note = chemically synthesized
  source 1..22: mol_type = other DNA
tctctctgcttctgataaggaa

SEQ ID NO: 93057 - DNA, 22 bp, synthetic construct
  misc_feature 1..22: note = chemically synthesized
  source 1..22: mol_type = other DNA
tctgcttctgataaggaaaata

SEQ ID NO: 93058 - DNA, 22 bp, synthetic construct
  misc_feature 1..22: note = chemically synthesized
  source 1..22: mol_type = other DNA
tgcttctgataaggaaaataat

SEQ ID NO: 93059 - DNA, 22 bp, synthetic construct
  misc_feature 1..22: note = chemically synthesized
  source 1..22: mol_type = other DNA
cttctgataaggaaaataattt

SEQ ID NO: 93060 - DNA, 22 bp, synthetic construct
  misc_feature 1..22: note = chemically synthesized
  source 1..22: mol_type = other DNA
ctgataaggaaaataattttat

SEQ ID NO: 93061 - DNA, 22 bp, synthetic construct
  misc_feature 1..22: note = chemically synthesized
  source 1..22: mol_type = other DNA
tgataaggaaaataattttatg

SEQ ID NO: 93062 - DNA, 22 bp, synthetic construct
  misc_feature 1..22: note = chemically synthesized
  source 1..22: mol_type = other DNA
ataaggaaaataattttatgat

SEQ ID NO: 93063 - DNA, 22 bp, synthetic construct
  misc_feature 1..22: note = chemically synthesized
  source 1..22: mol_type = other DNA
tatgatggggatctgctcttat

SEQ ID NO: 93064 - DNA, 22 bp, synthetic construct
  misc_feature 1..22: note = chemically synthesized
  source 1..22: mol_type = other DNA
atgatggggatctgctcttatg

SEQ ID NO: 93065 - DNA, 22 bp, synthetic construct
  misc_feature 1..22: note = chemically synthesized
  source 1..22: mol_type = other DNA
tgatggggatctgctcttatga

SEQ ID NO: 93066 - DNA, 22 bp, synthetic construct
  misc_feature 1..22: note = chemically synthesized
  source 1..22: mol_type = other DNA
ctcttatgagctcatctaaacc

SEQ ID NO: 93067 - DNA, 22 bp, synthetic construct
  misc_feature 1..22: note = chemically synthesized
  source 1..22: mol_type = other DNA
ttatgagctcatctaaacctaa

SEQ ID NO: 93068 - DNA, 22 bp, synthetic construct
  misc_feature 1..22: note = chemically synthesized
  source 1..22: mol_type = other DNA
atgagctcatctaaacctaatt

SEQ ID NO: 93069 - DNA, 22 bp, synthetic construct
  misc_feature 1..22: note = chemically synthesized
  source 1..22: mol_type = other DNA
tgagctcatctaaacctaatta

SEQ ID NO: 93070 - DNA, 22 bp, synthetic construct
  misc_feature 1..22: note = chemically synthesized
  source 1..22: mol_type = other DNA
atctaaacctaattacttttca

SEQ ID NO: 93071 - DNA, 22 bp, synthetic construct
  misc_feature 1..22: note = chemically synthesized
  source 1..22: mol_type = other DNA
aacctaattacttttcaaaagc

SEQ ID NO: 93072 - DNA, 22 bp, synthetic construct
  misc_feature 1..22: note = chemically synthesized
  source 1..22: mol_type = other DNA
attacttttcaaaagcctcccc

SEQ ID NO: 93073 - DNA, 22 bp, synthetic construct
  misc_feature 1..22: note = chemically synthesized
  source 1..22: mol_type = other DNA
cttttcaaaagcctcccccaca

SEQ ID NO: 93074 - DNA, 22 bp, synthetic construct
  misc_feature 1..22: note = chemically synthesized
  source 1..22: mol_type = other DNA
ttcaaaagcctcccccacagat

SEQ ID NO: 93075 - DNA, 22 bp, synthetic construct
  misc_feature 1..22: note = chemically synthesized
  source 1..22: mol_type = other DNA
tcaaaagcctcccccacagata

SEQ ID NO: 93076 - DNA, 22 bp, synthetic construct
  misc_feature 1..22: note = chemically synthesized
  source 1..22: mol_type = other DNA
caaaagcctcccccacagataa

SEQ ID NO: 93077 - DNA, 22 bp, synthetic construct
  misc_feature 1..22: note = chemically synthesized
  source 1..22: mol_type = other DNA
aaaagcctcccccacagataag

SEQ ID NO: 93078 - DNA, 22 bp, synthetic construct
  misc_feature 1..22: note = chemically synthesized
  source 1..22: mol_type = other DNA
ccccacagataaggtcagttgg

SEQ ID NO: 93079 - DNA, 22 bp, synthetic construct
  misc_feature 1..22: note = chemically synthesized
  source 1..22: mol_type = other DNA
ggagttggggattcagcatgtg

SEQ ID NO: 93080 - DNA, 22 bp, synthetic construct
  misc_feature 1..22: note = chemically synthesized
  source 1..22: mol_type = other DNA
gggattcagcatgtgaattttg

SEQ ID NO: 93081 - DNA, 22 bp, synthetic construct
  misc_feature 1..22: note = chemically synthesized
  source 1..22: mol_type = other DNA
agcatgtgaattttgaggagac

SEQ ID NO: 93082 - DNA, 22 bp, synthetic construct
  misc_feature 1..22: note = chemically synthesized
  source 1..22: mol_type = other DNA
tgaggagacacaaacattaggt

SEQ ID NO: 93083 - DNA, 22 bp, synthetic construct
  misc_feature 1..22: note = chemically synthesized
  source 1..22: mol_type = other DNA
gaggagacacaaacattaggtc

SEQ ID NO: 93084 - DNA, 22 bp, synthetic construct
  misc_feature 1..22: note = chemically synthesized
  source 1..22: mol_type = other DNA
aggagacacaaacattaggtcc

SEQ ID NO: 93085 - DNA, 22 bp, synthetic construct
  misc_feature 1..22: note = chemically synthesized
  source 1..22: mol_type = other DNA
ggtccgtaacaccatcatatta

SEQ ID NO: 93086 - DNA, 22 bp, synthetic construct
  misc_feature 1..22: note = chemically synthesized
  source 1..22: mol_type = other DNA
aactcttacttatagagatgca

SEQ ID NO: 93087 - DNA, 22 bp, synthetic construct
  misc_feature 1..22: note = chemically synthesized
  source 1..22: mol_type = other DNA
ttacttatagagatgcactaac

SEQ ID NO: 93088 - DNA, 22 bp, synthetic construct
  misc_feature 1..22: note = chemically synthesized
  source 1..22: mol_type = other DNA
acttatagagatgcactaacat

SEQ ID NO: 93089 - DNA, 22 bp, synthetic construct
  misc_feature 1..22: note = chemically synthesized
  source 1..22: mol_type = other DNA
cttatagagatgcactaacatc

SEQ ID NO: 93090 - DNA, 22 bp, synthetic construct
  misc_feature 1..22: note = chemically synthesized
  source 1..22: mol_type = other DNA
atagagatgcactaacatccaa

SEQ ID NO: 93091 - DNA, 22 bp, synthetic construct
  misc_feature 1..22: note = chemically synthesized
  source 1..22: mol_type = other DNA
tagagatgcactaacatccaac

SEQ ID NO: 93092 - DNA, 22 bp, synthetic construct
  misc_feature 1..22: note = chemically synthesized
  source 1..22: mol_type = other DNA
acatccaactatacaaaaattc

SEQ ID NO: 93093 - DNA, 22 bp, synthetic construct
  misc_feature 1..22: note = chemically synthesized
  source 1..22: mol_type = other DNA
tacaaaaattccattaagtaag

SEQ ID NO: 93094 - DNA, 22 bp, synthetic construct
  misc_feature 1..22: note = chemically synthesized
  source 1..22: mol_type = other DNA
cattaagtaagccttccaatta

SEQ ID NO: 93095 - DNA, 22 bp, synthetic construct
  misc_feature 1..22: note = chemically synthesized
  source 1..22: mol_type = other DNA
agtaagccttccaattaatgtt

SEQ ID NO: 93096 - DNA, 22 bp, synthetic construct
  misc_feature 1..22: note = chemically synthesized
  source 1..22: mol_type = other DNA
ccaattaatgttgtacaaattc

SEQ ID NO: 93097 - DNA, 22 bp, synthetic construct
  misc_feature 1..22: note = chemically synthesized
  source 1..22: mol_type = other DNA
caattaatgttgtacaaattct

SEQ ID NO: 93098 - DNA, 22 bp, synthetic construct
  misc_feature 1..22: note = chemically synthesized
  source 1..22: mol_type = other DNA
atgttgtacaaattcttcccac

SEQ ID NO: 93099 - DNA, 22 bp, synthetic construct
  misc_feature 1..22: note = chemically synthesized
  source 1..22: mol_type = other DNA
tacaaattcttcccactacatt

SEQ ID NO: 93100 - DNA, 22 bp, synthetic construct
  misc_feature 1..22: note = chemically synthesized
  source 1..22: mol_type = other DNA
ttcccactacattttgatctca

SEQ ID NO: 93101 - DNA, 22 bp, synthetic construct
  misc_feature 1..22: note = chemically synthesized
  source 1..22: mol_type = other DNA
cccactacattttgatctcaca

SEQ ID NO: 93102 - DNA, 22 bp, synthetic construct
  misc_feature 1..22: note = chemically synthesized
  source 1..22: mol_type = other DNA
ccactacattttgatctcacag

SEQ ID NO: 93103 - DNA, 22 bp, synthetic construct
  misc_feature 1..22: note = chemically synthesized
  source 1..22: mol_type = other DNA
cattttgatctcacagtgctgg

SEQ ID NO: 93104 - DNA, 22 bp, synthetic construct
  misc_feature 1..22: note = chemically synthesized
  source 1..22: mol_type = other DNA
tgatctcacagtgctggtctgt

SEQ ID NO: 93105 - DNA, 22 bp, synthetic construct
  misc_feature 1..22: note = chemically synthesized
  source 1..22: mol_type = other DNA
gatctcacagtgctggtctgtt

SEQ ID NO: 93106 - DNA, 22 bp, synthetic construct
  misc_feature 1..22: note = chemically synthesized
  source 1..22: mol_type = other DNA
atctcacagtgctggtctgttt

SEQ ID NO: 93107 - DNA, 22 bp, synthetic construct
  misc_feature 1..22: note = chemically synthesized
  source 1..22: mol_type = other DNA
acagtgctggtctgtttctcag

SEQ ID NO: 93108 - DNA, 22 bp, synthetic construct
  misc_feature 1..22: note = chemically synthesized
  source 1..22: mol_type = other DNA
gtctgtttctcagacataacat

SEQ ID NO: 93109 - DNA, 22 bp, synthetic construct
  misc_feature 1..22: note = chemically synthesized
  source 1..22: mol_type = other DNA
tttctcagacataacatgctca

SEQ ID NO: 93110 - DNA, 22 bp, synthetic construct
  misc_feature 1..22: note = chemically synthesized
  source 1..22: mol_type = other DNA
ctcagacataacatgctcatgc

SEQ ID NO: 93111 - DNA, 22 bp, synthetic construct
  misc_feature 1..22: note = chemically synthesized
  source 1..22: mol_type = other DNA
tcagacataacatgctcatgct

SEQ ID NO: 93112 - DNA, 22 bp, synthetic construct
  misc_feature 1..22: note = chemically synthesized
  source 1..22: mol_type = other DNA
agacataacatgctcatgctga

SEQ ID NO: 93113 - DNA, 22 bp, synthetic construct
  misc_feature 1..22: note = chemically synthesized
  source 1..22: mol_type = other DNA
atgctgacttgtgagcctctgc

SEQ ID NO: 93114 - DNA, 22 bp, synthetic construct
  misc_feature 1..22: note = chemically synthesized
  source 1..22: mol_type = other DNA
acttgtgagcctctgctgattc

SEQ ID NO: 93115 - DNA, 22 bp, synthetic construct
  misc_feature 1..22: note = chemically synthesized
  source 1..22: mol_type = other DNA
gtgagcctctgctgattcattt

SEQ ID NO: 93116 - DNA, 22 bp, synthetic construct
  misc_feature 1..22: note = chemically synthesized
  source 1..22: mol_type = other DNA
tgagcctctgctgattcatttc

SEQ ID NO: 93117 - DNA, 22 bp, synthetic construct
  misc_feature 1..22: note = chemically synthesized
  source 1..22: mol_type = other DNA
tgctgattcatttcttacacct

SEQ ID NO: 93118 - DNA, 22 bp, synthetic construct
  misc_feature 1..22: note = chemically synthesized
  source 1..22: mol_type = other DNA
ctgattcatttcttacacctaa

SEQ ID NO: 93119 - DNA, 22 bp, synthetic construct
  misc_feature 1..22: note = chemically synthesized
  source 1..22: mol_type = other DNA
attcatttcttacacctaagtc

SEQ ID NO: 93120 - DNA, 22 bp, synthetic construct
  misc_feature 1..22: note = chemically synthesized
  source 1..22: mol_type = other DNA
atttcttacacctaagtcccca

SEQ ID NO: 93121 - DNA, 22 bp, synthetic construct
  misc_feature 1..22: note = chemically synthesized
  source 1..22: mol_type = other DNA
cttacacctaagtccccacctc

SEQ ID NO: 93122 - DNA, 22 bp, synthetic construct
  misc_feature 1..22: note = chemically synthesized
  source 1..22: mol_type = other DNA
ttacacctaagtccccacctcc

SEQ ID NO: 93123 - DNA, 22 bp, synthetic construct
  misc_feature 1..22: note = chemically synthesized
  source 1..22: mol_type = other DNA
acacctaagtccccacctcccc

SEQ ID NO: 93124 - DNA, 22 bp, synthetic construct
  misc_feature 1..22: note = chemically synthesized
  source 1..22: mol_type = other DNA
cacctaagtccccacctccccc

SEQ ID NO: 93125 - DNA, 22 bp, synthetic construct
  misc_feature 1..22: note = chemically synthesized
  source 1..22: mol_type = other DNA
agtccccacctcccccagagtc

SEQ ID NO: 93126 - DNA, 22 bp, synthetic construct
  misc_feature 1..22: note = chemically synthesized
  source 1..22: mol_type = other DNA
ccccagagtcttacaatgaggt

SEQ ID NO: 93127 - DNA, 22 bp, synthetic construct
  misc_feature 1..22: note = chemically synthesized
  source 1..22: mol_type = other DNA
acaatgaggtctctcccttgaa

SEQ ID NO: 93128 - DNA, 22 bp, synthetic construct
  misc_feature 1..22: note = chemically synthesized
  source 1..22: mol_type = other DNA
caatgaggtctctcccttgaaa

SEQ ID NO: 93129 - DNA, 22 bp, synthetic construct
  misc_feature 1..22: note = chemically synthesized
  source 1..22: mol_type = other DNA
tcccttgaaatgctgtgaccaa

SEQ ID NO: 93130 - DNA, 22 bp, synthetic construct
  misc_feature 1..22: note = chemically synthesized
  source 1..22: mol_type = other DNA
ccttgaaatgctgtgaccaatc

SEQ ID NO: 93131 - DNA, 22 bp, synthetic construct
  misc_feature 1..22: note = chemically synthesized
  source 1..22: mol_type = other DNA
gaaatgctgtgaccaatctgca

SEQ ID NO: 93132 - DNA, 22 bp, synthetic construct
  misc_feature 1..22: note = chemically synthesized
  source 1..22: mol_type = other DNA
aaatgctgtgaccaatctgcac

SEQ ID NO: 93133 - DNA, 22 bp, synthetic construct
  misc_feature 1..22: note = chemically synthesized
  source 1..22: mol_type = other DNA
tgaccaatctgcacacttgagg

SEQ ID NO: 93134 - DNA, 22 bp, synthetic construct
  misc_feature 1..22: note = chemically synthesized
  source 1..22: mol_type = other DNA
cacacttgagggcatgggatta

SEQ ID NO: 93135 - DNA, 22 bp, synthetic construct
  misc_feature 1..22: note = chemically synthesized
  source 1..22: mol_type = other DNA
gagggcatgggattaatttcac

SEQ ID NO: 93136 - DNA, 22 bp, synthetic construct
  misc_feature 1..22: note = chemically synthesized
  source 1..22: mol_type = other DNA
agggcatgggattaatttcact

SEQ ID NO: 93137 - DNA, 22 bp, synthetic construct
  misc_feature 1..22: note = chemically synthesized
  source 1..22: mol_type = other DNA
atttcactttcttaggcatcca

SEQ ID NO: 93138 - DNA, 22 bp, synthetic construct
  misc_feature 1..22: note = chemically synthesized
  source 1..22: mol_type = other DNA
cactttcttaggcatccacaag

SEQ ID NO: 93139 - DNA, 22 bp, synthetic construct
  misc_feature 1..22: note = chemically synthesized
  source 1..22: mol_type = other DNA
actttcttaggcatccacaagg

SEQ ID NO: 93140 - DNA, 22 bp, synthetic construct
  misc_feature 1..22: note = chemically synthesized
  source 1..22: mol_type = other DNA
tcttaggcatccacaagggctg

SEQ ID NO: 93141 - DNA, 22 bp, synthetic construct
  misc_feature 1..22: note = chemically synthesized
  source 1..22: mol_type = other DNA
cttaggcatccacaagggctgt

SEQ ID NO: 93142 - DNA, 22 bp, synthetic construct
  misc_feature 1..22: note = chemically synthesized
  source 1..22: mol_type = other DNA
ttaggcatccacaagggctgtg

SEQ ID NO: 93143 - DNA, 22 bp, synthetic construct
  misc_feature 1..22: note = chemically synthesized
  source 1..22: mol_type = other DNA
aggcatccacaagggctgtgaa

SEQ ID NO: 93144 - DNA, 22 bp, synthetic construct
  misc_feature 1..22: note = chemically synthesized
  source 1..22: mol_type = other DNA
ggcatccacaagggctgtgaaa

SEQ ID NO: 93145 - DNA, 22 bp, synthetic construct
  misc_feature 1..22: note = chemically synthesized
  source 1..22: mol_type = other DNA
tgaaaagctaagtgccattaga

SEQ ID NO: 93146 - DNA, 22 bp, synthetic construct
  misc_feature 1..22: note = chemically synthesized
  source 1..22: mol_type = other DNA
agtgccattagaaatagtattc

SEQ ID NO: 93147 - DNA, 22 bp, synthetic construct
  misc_feature 1..22: note = chemically synthesized
  source 1..22: mol_type = other DNA
gaaatagtattcctcctaataa

SEQ ID NO: 93148 - DNA, 22 bp, synthetic construct
  misc_feature 1..22: note = chemically synthesized
  source 1..22: mol_type = other DNA
ctcctaataaaatagaattgct

SEQ ID NO: 93149 - DNA, 22 bp, synthetic construct
  misc_feature 1..22: note = chemically synthesized
  source 1..22: mol_type = other DNA
ctaataaaatagaattgctaca

SEQ ID NO: 93150 - DNA, 22 bp, synthetic construct
  misc_feature 1..22: note = chemically synthesized
  source 1..22: mol_type = other DNA
ataaaatagaattgctacacct

SEQ ID NO: 93151 - DNA, 22 bp, synthetic construct
  misc_feature 1..22: note = chemically synthesized
  source 1..22: mol_type = other DNA
ctacacctgactaaaccttgaa

SEQ ID NO: 93152 - DNA, 22 bp, synthetic construct
  misc_feature 1..22: note = chemically synthesized
  source 1..22: mol_type = other DNA
cacctgactaaaccttgaattc

SEQ ID NO: 93153 - DNA, 22 bp, synthetic construct
  misc_feature 1..22: note = chemically synthesized
  source 1..22: mol_type = other DNA
actaaaccttgaattcctaaag

SEQ ID NO: 93154 - DNA, 22 bp, synthetic construct
  misc_feature 1..22: note = chemically synthesized
  source 1..22: mol_type = other DNA
aaccttgaattcctaaagcttg

SEQ ID NO: 93155 - DNA, 22 bp, synthetic construct
  misc_feature 1..22: note = chemically synthesized
  source 1..22: mol_type = other DNA
gaattcctaaagcttggaacac

SEQ ID NO: 93156 - DNA, 22 bp, synthetic construct
  misc_feature 1..22: note = chemically synthesized
  source 1..22: mol_type = other DNA
aattcctaaagcttggaacact

SEQ ID NO: 93157 - DNA, 22 bp, synthetic construct
  misc_feature 1..22: note = chemically synthesized
  source 1..22: mol_type = other DNA
ctaaagcttggaacactttccc

SEQ ID NO: 93158 - DNA, 22 bp, synthetic construct
  misc_feature 1..22: note = chemically synthesized
  source 1..22: mol_type = other DNA
aagcttggaacactttcccttc

SEQ ID NO: 93159 - DNA, 22 bp, synthetic construct
  misc_feature 1..22: note = chemically synthesized
  source 1..22: mol_type = other DNA
ggaacactttcccttccttaag

SEQ ID NO: 93160 - DNA, 22 bp, synthetic construct
  misc_feature 1..22: note = chemically synthesized
  source 1..22: mol_type = other DNA
gaacactttcccttccttaaga

SEQ ID NO: 93161 - DNA, 22 bp, synthetic construct
  misc_feature 1..22: note = chemically synthesized
  source 1..22: mol_type = other DNA
tcccttccttaagaaccatcct

SEQ ID NO: 93162 - DNA, 22 bp, synthetic construct
  misc_feature 1..22: note = chemically synthesized
  source 1..22: mol_type = other DNA
cccttccttaagaaccatcctt

SEQ ID NO: 93163 - DNA, 22 bp, synthetic construct
  misc_feature 1..22: note = chemically synthesized
  source 1..22: mol_type = other DNA
ccttccttaagaaccatccttg

SEQ ID NO: 93164 - DNA, 22 bp, synthetic construct
  misc_feature 1..22: note = chemically synthesized
  source 1..22: mol_type = other DNA
ccttaagaaccatccttgctac

SEQ ID NO: 93165 - DNA, 22 bp, synthetic construct
  misc_feature 1..22: note = chemically synthesized
  source 1..22: mol_type = other DNA
cttaagaaccatccttgctact

SEQ ID NO: 93166 - DNA, 22 bp, synthetic construct
  misc_feature 1..22: note = chemically synthesized
  source 1..22: mol_type = other DNA
aagaaccatccttgctactcag

SEQ ID NO: 93167 - DNA, 22 bp, synthetic construct
  misc_feature 1..22: note = chemically synthesized
  source 1..22: mol_type = other DNA
agaaccatccttgctactcagc

SEQ ID NO: 93168 - DNA, 22 bp, synthetic construct
  misc_feature 1..22: note = chemically synthesized
  source 1..22: mol_type = other DNA
gctactcagctgcaatcaatcc

SEQ ID NO: 93169 - DNA, 22 bp, synthetic construct
  misc_feature 1..22: note = chemically synthesized
  source 1..22: mol_type = other DNA
ctactcagctgcaatcaatcca

SEQ ID NO: 93170 - DNA, 22 bp, synthetic construct
  misc_feature 1..22: note = chemically synthesized
  source 1..22: mol_type = other DNA
ctcagctgcaatcaatccagcc

SEQ ID NO: 93171 - DNA, 22 bp, synthetic construct
  misc_feature 1..22: note = chemically synthesized
  source 1..22: mol_type = other DNA
agctgcaatcaatccagccccc

SEQ ID NO: 93172 - DNA, 22 bp, synthetic construct
  misc_feature 1..22: note = chemically synthesized
  source 1..22: mol_type = other DNA
caatcaatccagcccccaggtc

SEQ ID NO: 93173 - DNA, 22 bp, synthetic construct
  misc_feature 1..22: note = chemically synthesized
  source 1..22: mol_type = other DNA
cactgaaccttttcccatctct

SEQ ID NO: 93174 - DNA, 22 bp, synthetic construct
  misc_feature 1..22: note = chemically synthesized
  source 1..22: mol_type = other DNA
actgaaccttttcccatctctt

SEQ ID NO: 93175 - DNA, 22 bp, synthetic construct
  misc_feature 1..22: note = chemically synthesized
  source 1..22: mol_type = other DNA
aaccttttcccatctcttccaa

SEQ ID NO: 93176 - DNA, 22 bp, synthetic construct
  misc_feature 1..22: note = chemically synthesized
  source 1..22: mol_type = other DNA
ttcccatctcttccaaaacatc

SEQ ID NO: 93177 - DNA, 22 bp, synthetic construct
  misc_feature 1..22: note = chemically synthesized
  source 1..22: mol_type = other DNA
tcccatctcttccaaaacatct

SEQ ID NO: 93178 - DNA, 22 bp, synthetic construct
  misc_feature 1..22: note = chemically synthesized
  source 1..22: mol_type = other DNA
cccatctcttccaaaacatctg

SEQ ID NO: 93179 - DNA, 22 bp, synthetic construct
  misc_feature 1..22: note = chemically synthesized
  source 1..22: mol_type = other DNA
ccatctcttccaaaacatctgt

SEQ ID NO: 93180 - DNA, 22 bp, synthetic construct
  misc_feature 1..22: note = chemically synthesized
  source 1..22: mol_type = other DNA
ttccaaaacatctgtttctgag

SEQ ID NO: 93181 - DNA, 22 bp, synthetic construct
  misc_feature 1..22: note = chemically synthesized
  source 1..22: mol_type = other DNA
ccaaaacatctgtttctgagaa

SEQ ID NO: 93182 - DNA, 22 bp, synthetic construct
  misc_feature 1..22: note = chemically synthesized
  source 1..22: mol_type = other DNA
caaaacatctgtttctgagaag

SEQ ID NO: 93183 - DNA, 22 bp, synthetic construct
  misc_feature 1..22: note = chemically synthesized
  source 1..22: mol_type = other DNA
tttctgagaagtcctgtcctat

SEQ ID NO: 93184 - DNA, 22 bp, synthetic construct
  misc_feature 1..22: note = chemically synthesized
  source 1..22: mol_type = other DNA
ctgagaagtcctgtcctataga

SEQ ID NO: 93185 - DNA, 22 bp, synthetic construct
  misc_feature 1..22: note = chemically synthesized
  source 1..22: mol_type = other DNA
tgagaagtcctgtcctatagag

SEQ ID NO: 93186 - DNA, 22 bp, synthetic construct
  misc_feature 1..22: note = chemically synthesized
  source 1..22: mol_type = other DNA
agaagtcctgtcctatagaggt

SEQ ID NO: 93187 - DNA, 22 bp, synthetic construct
  misc_feature 1..22: note = chemically synthesized
  source 1..22: mol_type = other DNA
tcctatagaggtctttcttccc

SEQ ID NO: 93188 - DNA, 22 bp, synthetic construct
  misc_feature 1..22: note = chemically synthesized
  source 1..22: mol_type = other DNA
tagaggtctttcttcccaccgg

SEQ ID NO: 93189 - DNA, 22 bp, synthetic construct
  misc_feature 1..22: note = chemically synthesized
  source 1..22: mol_type = other DNA
tcttcccaccggatttctccta

SEQ ID NO: 93190 - DNA, 22 bp, synthetic construct
  misc_feature 1..22: note = chemically synthesized
  source 1..22: mol_type = other DNA
cttcccaccggatttctcctac

SEQ ID NO: 93191 - DNA, 22 bp, synthetic construct
  misc_feature 1..22: note = chemically synthesized
  source 1..22: mol_type = other DNA
ttcccaccggatttctcctaca

SEQ ID NO: 93192 - DNA, 22 bp, synthetic construct
  misc_feature 1..22: note = chemically synthesized
  source 1..22: mol_type = other DNA
cccaccggatttctcctacacc

SEQ ID NO: 93193 - DNA, 22 bp, synthetic construct
  misc_feature 1..22: note = chemically synthesized
  source 1..22: mol_type = other DNA
ccaccggatttctcctacacca

SEQ ID NO: 93194 - DNA, 22 bp, synthetic construct
  misc_feature 1..22: note = chemically synthesized
  source 1..22: mol_type = other DNA
ctcctacaccatttactcccac

SEQ ID NO: 93195 - DNA, 22 bp, synthetic construct
  misc_feature 1..22: note = chemically synthesized
  source 1..22: mol_type = other DNA
tcctacaccatttactcccact

SEQ ID NO: 93196 - DNA, 22 bp, synthetic construct
  misc_feature 1..22: note = chemically synthesized
  source 1..22: mol_type = other DNA
ctacaccatttactcccacttg

SEQ ID NO: 93197 - DNA, 22 bp, synthetic construct
  misc_feature 1..22: note = chemically synthesized
  source 1..22: mol_type = other DNA
caccatttactcccacttgcag

SEQ ID NO: 93198 - DNA, 22 bp, synthetic construct
  misc_feature 1..22: note = chemically synthesized
  source 1..22: mol_type = other DNA
actcccacttgcagaactcccg

SEQ ID NO: 93199 - DNA, 22 bp, synthetic construct
  misc_feature 1..22: note = chemically synthesized
  source 1..22: mol_type = other DNA
ctcccacttgcagaactcccgt

SEQ ID NO: 93200 - DNA, 22 bp, synthetic construct
  misc_feature 1..22: note = chemically synthesized
  source 1..22: mol_type = other DNA
ccacttgcagaactcccgtgta

SEQ ID NO: 93201 - DNA, 22 bp, synthetic construct
  misc_feature 1..22: note = chemically synthesized
  source 1..22: mol_type = other DNA
gcagaactcccgtgtacaagtg

SEQ ID NO: 93202 - DNA, 22 bp, synthetic construct
  misc_feature 1..22: note = chemically synthesized
  source 1..22: mol_type = other DNA
cagaactcccgtgtacaagtgt

SEQ ID NO: 93203 - DNA, 22 bp, synthetic construct
  misc_feature 1..22: note = chemically synthesized
  source 1..22: mol_type = other DNA
ccgtgtacaagtgtctttactg

SEQ ID NO: 93204 - DNA, 22 bp, synthetic construct
  misc_feature 1..22: note = chemically synthesized
  source 1..22: mol_type = other DNA
tactgcttttatttgctcatca

SEQ ID NO: 93205 - DNA, 22 bp, synthetic construct
  misc_feature 1..22: note = chemically synthesized
  source 1..22: mol_type = other DNA
actgcttttatttgctcatcaa

SEQ ID NO: 93206 - DNA, 22 bp, synthetic construct
  misc_feature 1..22: note = chemically synthesized
  source 1..22: mol_type = other DNA
ctgcttttatttgctcatcaaa

SEQ ID NO: 93207 - DNA, 22 bp, synthetic construct
  misc_feature 1..22: note = chemically synthesized
  source 1..22: mol_type = other DNA
cttttatttgctcatcaaaatg

SEQ ID NO: 93208 - DNA, 22 bp, synthetic construct
  misc_feature 1..22: note = chemically synthesized
  source 1..22: mol_type = other DNA
ttatttgctcatcaaaatgcac

SEQ ID NO: 93209 - DNA, 22 bp, synthetic construct
  misc_feature 1..22: note = chemically synthesized
  source 1..22: mol_type = other DNA
tatttgctcatcaaaatgcaca

SEQ ID NO: 93210 - DNA, 22 bp, synthetic construct
  misc_feature 1..22: note = chemically synthesized
  source 1..22: mol_type = other DNA
atttgctcatcaaaatgcacat

SEQ ID NO: 93211 - DNA, 22 bp, synthetic construct
  misc_feature 1..22: note = chemically synthesized
  source 1..22: mol_type = other DNA
tttgctcatcaaaatgcacatc

SEQ ID NO: 93212 - DNA, 22 bp, synthetic construct
  misc_feature 1..22: note = chemically synthesized
  source 1..22: mol_type = other DNA
gctcatcaaaatgcacatctca

SEQ ID NO: 93213 - DNA, 22 bp, synthetic construct
  misc_feature 1..22: note = chemically synthesized
  source 1..22: mol_type = other DNA
ctcatcaaaatgcacatctcat

SEQ ID NO: 93214 - DNA, 22 bp, synthetic construct
  misc_feature 1..22: note = chemically synthesized
  source 1..22: mol_type = other DNA
atcaaaatgcacatctcatata

SEQ ID NO: 93215 - DNA, 22 bp, synthetic construct
  misc_feature 1..22: note = chemically synthesized
  source 1..22: mol_type = other DNA
atataaaaataaatgaggagca

SEQ ID NO: 93216 - DNA, 22 bp, synthetic construct
  misc_feature 1..22: note = chemically synthesized
  source 1..22: mol_type = other DNA
ccctcaatataaaccctttgtg

SEQ ID NO: 93217 - DNA, 22 bp, synthetic construct
  misc_feature 1..22: note = chemically synthesized
  source 1..22: mol_type = other DNA
cctcaatataaaccctttgtgg

SEQ ID NO: 93218 - DNA, 22 bp, synthetic construct
  misc_feature 1..22: note = chemically synthesized
  source 1..22: mol_type = other DNA
aatataaaccctttgtggctca

SEQ ID NO: 93219 - DNA, 22 bp, synthetic construct
  misc_feature 1..22: note = chemically synthesized
  source 1..22: mol_type = other DNA
tgtggctcatatatttaaaaag

SEQ ID NO: 93220 - DNA, 22 bp, synthetic construct
  misc_feature 1..22: note = chemically synthesized
  source 1..22: mol_type = other DNA
gtggctcatatatttaaaaaga

SEQ ID NO: 93221 - DNA, 22 bp, synthetic construct
  misc_feature 1..22: note = chemically synthesized
  source 1..22: mol_type = other DNA
tggctcatatatttaaaaagat

SEQ ID NO: 93222 - DNA, 22 bp, synthetic construct
  misc_feature 1..22: note = chemically synthesized
  source 1..22: mol_type = other DNA
atatatttaaaaagatgtaaaa

SEQ ID NO: 93223 - DNA, 22 bp, synthetic construct
  misc_feature 1..22: note = chemically synthesized
  source 1..22: mol_type = other DNA
aaaaagatgtaaaaaaaagagc

SEQ ID NO: 93224 - DNA, 22 bp, synthetic construct
  misc_feature 1..22: note = chemically synthesized
  source 1..22: mol_type = other DNA
aaaagatgtaaaaaaaagagct

SEQ ID NO: 93225 - DNA, 22 bp, synthetic construct
  misc_feature 1..22: note = chemically synthesized
  source 1..22: mol_type = other DNA
aagaaaatcatgtgtgatctct

SEQ ID NO: 93226 - DNA, 22 bp, synthetic construct
  misc_feature 1..22: note = chemically synthesized
  source 1..22: mol_type = other DNA
tcagcagaatagatttattatt

SEQ ID NO: 93227 - DNA, 22 bp, synthetic construct
  misc_feature 1..22: note = chemically synthesized
  source 1..22: mol_type = other DNA
agcagaatagatttattatttg

SEQ ID NO: 93228 - DNA, 22 bp, synthetic construct
  misc_feature 1..22: note = chemically synthesized
  source 1..22: mol_type = other DNA
attatttgtattgcttgcagaa

SEQ ID NO: 93229 - DNA, 22 bp, synthetic construct
  misc_feature 1..22: note = chemically synthesized
  source 1..22: mol_type = other DNA
ttatttgtattgcttgcagaat

SEQ ID NO: 93230 - DNA, 22 bp, synthetic construct
  misc_feature 1..22: note = chemically synthesized
  source 1..22: mol_type = other DNA
tttgtattgcttgcagaataaa

SEQ ID NO: 93231 - DNA, 22 bp, synthetic construct
  misc_feature 1..22: note = chemically synthesized
  source 1..22: mol_type = other DNA
gtattgcttgcagaataaagcc

SEQ ID NO: 93232 - DNA, 22 bp, synthetic construct
  misc_feature 1..22: note = chemically synthesized
  source 1..22: mol_type = other DNA
tattgcttgcagaataaagcct

SEQ ID NO: 93233 - DNA, 22 bp, synthetic construct
  misc_feature 1..22: note = chemically synthesized
  source 1..22: mol_type = other DNA
cttgcagaataaagcctatcct

SEQ ID NO: 93234 - DNA, 22 bp, synthetic construct
  misc_feature 1..22: note = chemically synthesized
  source 1..22: mol_type = other DNA
gcagaataaagcctatccttga

SEQ ID NO: 93235 - DNA, 22 bp, synthetic construct
  misc_feature 1..22: note = chemically synthesized
  source 1..22: mol_type = other DNA
cagaataaagcctatccttgaa

SEQ ID NO: 93236 - DNA, 22 bp, synthetic construct
  misc_feature 1..22: note = chemically synthesized
  source 1..22: mol_type = other DNA
tccttgaaagctctgaatcatg

SEQ ID NO: 93237 - DNA, 22 bp, synthetic construct
  misc_feature 1..22: note = chemically synthesized
  source 1..22: mol_type = other DNA
gaaagctctgaatcatgggcag

SEQ ID NO: 93238 - DNA, 22 bp, synthetic construct
  misc_feature 1..22: note = chemically synthesized
  source 1..22: mol_type = other DNA
aaagctctgaatcatgggcagt

SEQ ID NO: 93239 - DNA, 22 bp, synthetic construct
  misc_feature 1..22: note = chemically synthesized
  source 1..22: mol_type = other DNA
tgaatcatgggcagtgagctca

SEQ ID NO: 93240 - DNA, 22 bp, synthetic construct
  misc_feature 1..22: note = chemically synthesized
  source 1..22: mol_type = other DNA
aatcatgggcagtgagctcagt

SEQ ID NO: 93241 - DNA, 22 bp, synthetic construct
  misc_feature 1..22: note = chemically synthesized
  source 1..22: mol_type = other DNA
agtggtatctggaggacagggc

SEQ ID NO: 93242 - DNA, 22 bp, synthetic construct
  misc_feature 1..22: note = chemically synthesized
  source 1..22: mol_type = other DNA
gaggacagggcactggccactg

SEQ ID NO: 93243 - DNA, 22 bp, synthetic construct
  misc_feature 1..22: note = chemically synthesized
  source 1..22: mol_type = other DNA
gccactgcagtcaccatcttct

SEQ ID NO: 93244 - DNA, 22 bp, synthetic construct
  misc_feature 1..22: note = chemically synthesized
  source 1..22: mol_type = other DNA
cagtcaccatcttctgccagga

SEQ ID NO: 93245 - DNA, 22 bp, synthetic construct
  misc_feature 1..22: note = chemically synthesized
  source 1..22: mol_type = other DNA
ctgccaggaagcctgcacctca

SEQ ID NO: 93246 - DNA, 22 bp, synthetic construct
  misc_feature 1..22: note = chemically synthesized
  source 1..22: mol_type = other DNA
tgccaggaagcctgcacctcag

SEQ ID NO: 93247 - DNA, 22 bp, synthetic construct
  misc_feature 1..22: note = chemically synthesized
  source 1..22: mol_type = other DNA
ccaggaagcctgcacctcaggg

SEQ ID NO: 93248 - DNA, 22 bp, synthetic construct
  misc_feature 1..22: note = chemically synthesized
  source 1..22: mol_type = other DNA
cacctcaggggtgaattctttg

SEQ ID NO: 93249 - DNA, 22 bp, synthetic construct
  misc_feature 1..22: note = chemically synthesized
  source 1..22: mol_type = other DNA
aggggtgaattctttgccgaaa

SEQ ID NO: 93250 - DNA, 22 bp, synthetic construct
  misc_feature 1..22: note = chemically synthesized
  source 1..22: mol_type = other DNA
tttgccgaaatggattgccaaa

SEQ ID NO: 93251 - DNA, 22 bp, synthetic construct
  misc_feature 1..22: note = chemically synthesized
  source 1..22: mol_type = other DNA
tgccgaaatggattgccaaaac

SEQ ID NO: 93252 - DNA, 22 bp, synthetic construct
  misc_feature 1..22: note = chemically synthesized
  source 1..22: mol_type = other DNA
gccgaaatggattgccaaaacg

SEQ ID NO: 93253 - DNA, 22 bp, synthetic construct
  misc_feature 1..22: note = chemically synthesized
  source 1..22: mol_type = other DNA
ccgaaatggattgccaaaacgg

SEQ ID NO: 93254 - DNA, 22 bp, synthetic construct
  misc_feature 1..22: note = chemically synthesized
  source 1..22: mol_type = other DNA
ccaaaacggtcaccagcacatt

SEQ ID NO: 93255 - DNA, 22 bp, synthetic construct
  misc_feature 1..22: note = chemically synthesized
  source 1..22: mol_type = other DNA
cccaggagctgttgagatgaaa

SEQ ID NO: 93256 - DNA, 22 bp, synthetic construct
  misc_feature 1..22: note = chemically synthesized
  source 1..22: mol_type = other DNA
ccaggagctgttgagatgaaag

SEQ ID NO: 93257 - DNA, 22 bp, synthetic construct
  misc_feature 1..22: note = chemically synthesized
  source 1..22: mol_type = other DNA
ttgagatgaaaggagacaataa

SEQ ID NO: 93258 - DNA, 22 bp, synthetic construct
  misc_feature 1..22: note = chemically synthesized
  source 1..22: mol_type = other DNA
agatgaaaggagacaataaaga

SEQ ID NO: 93259 - DNA, 22 bp, synthetic construct
  misc_feature 1..22: note = chemically synthesized
  source 1..22: mol_type = other DNA
agagctccagcctggcctccag

SEQ ID NO: 93260 - DNA, 22 bp, synthetic construct
  misc_feature 1..22: note = chemically synthesized
  source 1..22: mol_type = other DNA
cagcctggcctccagataacta

SEQ ID NO: 93261 - DNA, 22 bp, synthetic construct
  misc_feature 1..22: note = chemically synthesized
  source 1..22: mol_type = other DNA
gcctccagataactacacacca

SEQ ID NO: 93262 - DNA, 22 bp, synthetic construct
  misc_feature 1..22: note = chemically synthesized
  source 1..22: mol_type = other DNA
cagataactacacaccaagctt

SEQ ID NO: 93263 - DNA, 22 bp, synthetic construct
  misc_feature 1..22: note = chemically synthesized
  source 1..22: mol_type = other DNA
cacaccaagcttccacccagaa

SEQ ID NO: 93264 - DNA, 22 bp, synthetic construct
  misc_feature 1..22: note = chemically synthesized
  source 1..22: mol_type = other DNA
ccacccagaatcaagcctatgt

SEQ ID NO: 93265 - DNA, 22 bp, synthetic construct
  misc_feature 1..22: note = chemically synthesized
  source 1..22: mol_type = other DNA
cacccagaatcaagcctatgtt

SEQ ID NO: 93266 - DNA, 22 bp, synthetic construct
  misc_feature 1..22: note = chemically synthesized
  source 1..22: mol_type = other DNA
tgttaacttccctcaaagcctg

SEQ ID NO: 93267 - DNA, 22 bp, synthetic construct
  misc_feature 1..22: note = chemically synthesized
  source 1..22: mol_type = other DNA
acttccctcaaagcctgagatt

SEQ ID NO: 93268 - DNA, 22 bp, synthetic construct
  misc_feature 1..22: note = chemically synthesized
  source 1..22: mol_type = other DNA
ccctcaaagcctgagattttgc

SEQ ID NO: 93269 - DNA, 22 bp, synthetic construct
  misc_feature 1..22: note = chemically synthesized
  source 1..22: mol_type = other DNA
cctcaaagcctgagattttgcc

SEQ ID NO: 93270 - DNA, 22 bp, synthetic construct
  misc_feature 1..22: note = chemically synthesized
  source 1..22: mol_type = other DNA
aaagcctgagattttgccttcc

SEQ ID NO: 93271 - DNA, 22 bp, synthetic construct
  misc_feature 1..22: note = chemically synthesized
  source 1..22: mol_type = other DNA
agattttgccttcccattaaat

SEQ ID NO: 93272 - DNA, 22 bp, synthetic construct
  misc_feature 1..22: note = chemically synthesized
  source 1..22: mol_type = other DNA
tgccttcccattaaatgcaggt

SEQ ID NO: 93273 - DNA, 22 bp, synthetic construct
  misc_feature 1..22: note = chemically synthesized
  source 1..22: mol_type = other DNA
gccttcccattaaatgcaggta

SEQ ID NO: 93274 - DNA, 22 bp, synthetic construct
  misc_feature 1..22: note = chemically synthesized
  source 1..22: mol_type = other DNA
ccttcccattaaatgcaggtag

SEQ ID NO: 93275 - DNA, 22 bp, synthetic construct
  misc_feature 1..22: note = chemically synthesized
  source 1..22: mol_type = other DNA
cccattaaatgcaggtagttgt

SEQ ID NO: 93276 - DNA, 22 bp, synthetic construct
  misc_feature 1..22: note = chemically synthesized
  source 1..22: mol_type = other DNA
ccattaaatgcaggtagttgtt

SEQ ID NO: 93277 - DNA, 22 bp, synthetic construct
  misc_feature 1..22: note = chemically synthesized
  source 1..22: mol_type = other DNA
aatgcaggtagttgttcccctt

SEQ ID NO: 93278 - DNA, 22 bp, synthetic construct
  misc_feature 1..22: note = chemically synthesized
  source 1..22: mol_type = other DNA
ttccccttcaagcactagtcac

SEQ ID NO: 93279 - DNA, 22 bp, synthetic construct
  misc_feature 1..22: note = chemically synthesized
  source 1..22: mol_type = other DNA
cccttcaagcactagtcactgg

SEQ ID NO: 93280 - DNA, 22 bp, synthetic construct
  misc_feature 1..22: note = chemically synthesized
  source 1..22: mol_type = other DNA
caagcactagtcactggccata

SEQ ID NO: 93281 - DNA, 22 bp, synthetic construct
  misc_feature 1..22: note = chemically synthesized
  source 1..22: mol_type = other DNA
aagcactagtcactggccataa

SEQ ID NO: 93282 - DNA, 22 bp, synthetic construct
  misc_feature 1..22: note = chemically synthesized
  source 1..22: mol_type = other DNA
gtcactggccataatttaaatc

SEQ ID NO: 93283 - DNA, 22 bp, synthetic construct
  misc_feature 1..22: note = chemically synthesized
  source 1..22: mol_type = other DNA
gccataatttaaatcttgctat

SEQ ID NO: 93284 - DNA, 22 bp, synthetic construct
  misc_feature 1..22: note = chemically synthesized
  source 1..22: mol_type = other DNA
aaatcttgctatcttcttgcca

SEQ ID NO: 93285 - DNA, 22 bp, synthetic construct
  misc_feature 1..22: note = chemically synthesized
  source 1..22: mol_type = other DNA
aatcttgctatcttcttgccac

SEQ ID NO: 93286 - DNA, 22 bp, synthetic construct
  misc_feature 1..22: note = chemically synthesized
  source 1..22: mol_type = other DNA
gctatcttcttgccaccatgaa

SEQ ID NO: 93287 - DNA, 22 bp, synthetic construct
  misc_feature 1..22: note = chemically synthesized
  source 1..22: mol_type = other DNA
ctatcttcttgccaccatgaac

SEQ ID NO: 93288 - DNA, 22 bp, synthetic construct
  misc_feature 1..22: note = chemically synthesized
  source 1..22: mol_type = other DNA
tcttcttgccaccatgaaccct

SEQ ID NO: 93289 - DNA, 22 bp, synthetic construct
  misc_feature 1..22: note = chemically synthesized
  source 1..22: mol_type = other DNA
cttgccaccatgaaccctgtat

SEQ ID NO: 93290 - DNA, 22 bp, synthetic construct
  misc_feature 1..22: note = chemically synthesized
  source 1..22: mol_type = other DNA
ttgccaccatgaaccctgtatg

SEQ ID NO: 93291 - DNA, 22 bp, synthetic construct
  misc_feature 1..22: note = chemically synthesized
  source 1..22: mol_type = other DNA
gccaccatgaaccctgtatgtt

SEQ ID NO: 93292 - DNA, 22 bp, synthetic construct
  misc_feature 1..22: note = chemically synthesized
  source 1..22: mol_type = other DNA
ccaccatgaaccctgtatgttg

SEQ ID NO: 93293 - DNA, 22 bp, synthetic construct
  misc_feature 1..22: note = chemically synthesized
  source 1..22: mol_type = other DNA
tatgttgtaggctgaagacgtt

SEQ ID NO: 93294 - DNA, 22 bp, synthetic construct
  misc_feature 1..22: note = chemically synthesized
  source 1..22: mol_type = other DNA
taggctgaagacgttaaaagaa

SEQ ID NO: 93295 - DNA, 22 bp, synthetic construct
  misc_feature 1..22: note = chemically synthesized
  source 1..22: mol_type = other DNA
aagacgttaaaagaaacacacg

SEQ ID NO: 93296 - DNA, 22 bp, synthetic construct
  misc_feature 1..22: note = chemically synthesized
  source 1..22: mol_type = other DNA
aaagaaacacacgctgacacac

SEQ ID NO: 93297 - DNA, 22 bp, synthetic construct
  misc_feature 1..22: note = chemically synthesized
  source 1..22: mol_type = other DNA
acacacacacacacacgcgcgc

SEQ ID NO: 93298 - DNA, 22 bp, synthetic construct
  misc_feature 1..22: note = chemically synthesized
  source 1..22: mol_type = other DNA
actttcaaaatctactccagcc

SEQ ID NO: 93299 - DNA, 22 bp, synthetic construct
  misc_feature 1..22: note = chemically synthesized
  source 1..22: mol_type = other DNA
tcaaaatctactccagcccaaa

SEQ ID NO: 93300 - DNA, 22 bp, synthetic construct
  misc_feature 1..22: note = chemically synthesized
  source 1..22: mol_type = other DNA
caaaatctactccagcccaaat

SEQ ID NO: 93301 - DNA, 22 bp, synthetic construct
  misc_feature 1..22: note = chemically synthesized
  source 1..22: mol_type = other DNA
aaaatctactccagcccaaatg

SEQ ID NO: 93302 - DNA, 22 bp, synthetic construct
  misc_feature 1..22: note = chemically synthesized
  source 1..22: mol_type = other DNA
ctccagcccaaatgtttcaatt

SEQ ID NO: 93303 - DNA, 22 bp, synthetic construct
  misc_feature 1..22: note = chemically synthesized
  source 1..22: mol_type = other DNA
cagcccaaatgtttcaattgtt

SEQ ID NO: 93304 - DNA, 22 bp, synthetic construct
  misc_feature 1..22: note = chemically synthesized
  source 1..22: mol_type = other DNA
caattgttcctcacccctggac

SEQ ID NO: 93305 - DNA, 22 bp, synthetic construct
  misc_feature 1..22: note = chemically synthesized
  source 1..22: mol_type = other DNA
aattgttcctcacccctggaca

SEQ ID NO: 93306 - DNA, 22 bp, synthetic construct
  misc_feature 1..22: note = chemically synthesized
  source 1..22: mol_type = other DNA
ttcctcacccctggacatactt

SEQ ID NO: 93307 - DNA, 22 bp, synthetic construct
  misc_feature 1..22: note = chemically synthesized
  source 1..22: mol_type = other DNA
ctcacccctggacatactttgc

SEQ ID NO: 93308 - DNA, 22 bp, synthetic construct
  misc_feature 1..22: note = chemically synthesized
  source 1..22: mol_type = other DNA
acccctggacatactttgcccc

SEQ ID NO: 93309 - DNA, 22 bp, synthetic construct
  misc_feature 1..22: note = chemically synthesized
  source 1..22: mol_type = other DNA
gacatactttgcccccatctgg

SEQ ID NO: 93310 - DNA, 22 bp, synthetic construct
  misc_feature 1..22: note = chemically synthesized
  source 1..22: mol_type = other DNA
tgcccccatctggaattaaagg

SEQ ID NO: 93311 - DNA, 22 bp, synthetic construct
  misc_feature 1..22: note = chemically synthesized
  source 1..22: mol_type = other DNA
gcccccatctggaattaaagga

SEQ ID NO: 93312 - DNA, 22 bp, synthetic construct
  misc_feature 1..22: note = chemically synthesized
  source 1..22: mol_type = other DNA
cccccatctggaattaaaggat

SEQ ID NO: 93313 - DNA, 22 bp, synthetic construct
  misc_feature 1..22: note = chemically synthesized
  source 1..22: mol_type = other DNA
gaattaaaggatataagtttgt

SEQ ID NO: 93314 - DNA, 22 bp, synthetic construct
  misc_feature 1..22: note = chemically synthesized
  source 1..22: mol_type = other DNA
aaggatataagtttgtaatgaa

SEQ ID NO: 93315 - DNA, 22 bp, synthetic construct
  misc_feature 1..22: note = chemically synthesized
  source 1..22: mol_type = other DNA
gtaatgaagcattagcagcatt

SEQ ID NO: 93316 - DNA, 22 bp, synthetic construct
  misc_feature 1..22: note = chemically synthesized
  source 1..22: mol_type = other DNA
taatgaagcattagcagcattt

SEQ ID NO: 93317 - DNA, 22 bp, synthetic construct
  misc_feature 1..22: note = chemically synthesized
  source 1..22: mol_type = other DNA
gcagcattttatatgtgtccag

SEQ ID NO: 93318 - DNA, 22 bp, synthetic construct
  misc_feature 1..22: note = chemically synthesized
  source 1..22: mol_type = other DNA
tatatgtgtccagctgatatag

SEQ ID NO: 93319 - DNA, 22 bp, synthetic construct
  misc_feature 1..22: note = chemically synthesized
  source 1..22: mol_type = other DNA
atatgtgtccagctgatatagg

SEQ ID NO: 93320 - DNA, 22 bp, synthetic construct
  misc_feature 1..22: note = chemically synthesized
  source 1..22: mol_type = other DNA
tatgtgtccagctgatatagga

SEQ ID NO: 93321 - DNA, 22 bp, synthetic construct
  misc_feature 1..22: note = chemically synthesized
  source 1..22: mol_type = other DNA
atataggaatagccttagcaat

SEQ ID NO: 93322 - DNA, 22 bp, synthetic construct
  misc_feature 1..22: note = chemically synthesized
  source 1..22: mol_type = other DNA
agcaatgtatgtttggccacca

SEQ ID NO: 93323 - DNA, 22 bp, synthetic construct
  misc_feature 1..22: note = chemically synthesized
  source 1..22: mol_type = other DNA
gcaatgtatgtttggccaccaa

SEQ ID NO: 93324 - DNA, 22 bp, synthetic construct
  misc_feature 1..22: note = chemically synthesized
  source 1..22: mol_type = other DNA
ggccaccaaagttccccacttt

SEQ ID NO: 93325 - DNA, 22 bp, synthetic construct
  misc_feature 1..22: note = chemically synthesized
  source 1..22: mol_type = other DNA
gccaccaaagttccccactttg

SEQ ID NO: 93326 - DNA, 22 bp, synthetic construct
  misc_feature 1..22: note = chemically synthesized
  source 1..22: mol_type = other DNA
cccactttgactgagccaatat

SEQ ID NO: 93327 - DNA, 22 bp, synthetic construct
  misc_feature 1..22: note = chemically synthesized
  source 1..22: mol_type = other DNA
tgactgagccaatatatgcctt

SEQ ID NO: 93328 - DNA, 22 bp, synthetic construct
  misc_feature 1..22: note = chemically synthesized
  source 1..22: mol_type = other DNA
gactgagccaatatatgccttc

SEQ ID NO: 93329 - DNA, 22 bp, synthetic construct
  misc_feature 1..22: note = chemically synthesized
  source 1..22: mol_type = other DNA
actgagccaatatatgccttct

SEQ ID NO: 93330 - DNA, 22 bp, synthetic construct
  misc_feature 1..22: note = chemically synthesized
  source 1..22: mol_type = other DNA
agccaatatatgccttctgcct

SEQ ID NO: 93331 - DNA, 22 bp, synthetic construct
  misc_feature 1..22: note = chemically synthesized
  source 1..22: mol_type = other DNA
ctgcctgcatctttttaacgac

SEQ ID NO: 93332 - DNA, 22 bp, synthetic construct
  misc_feature 1..22: note = chemically synthesized
  source 1..22: mol_type = other DNA
tgcctgcatctttttaacgacc

SEQ ID NO: 93333 - DNA, 22 bp, synthetic construct
  misc_feature 1..22: note = chemically synthesized
  source 1..22: mol_type = other DNA
cctgcatctttttaacgaccat

SEQ ID NO: 93334 - DNA, 22 bp, synthetic construct
  misc_feature 1..22: note = chemically synthesized
  source 1..22: mol_type = other DNA
catctttttaacgaccatactt

SEQ ID NO: 93335 - DNA, 22 bp, synthetic construct
  misc_feature 1..22: note = chemically synthesized
  source 1..22: mol_type = other DNA
tttaacgaccatacttgtcctg

SEQ ID NO: 93336 - DNA, 22 bp, synthetic construct
  misc_feature 1..22: note = chemically synthesized
  source 1..22: mol_type = other DNA
ttaacgaccatacttgtcctgc

SEQ ID NO: 93337 - DNA, 22 bp, synthetic construct
  misc_feature 1..22: note = chemically synthesized
  source 1..22: mol_type = other DNA
taacgaccatacttgtcctgcc

SEQ ID NO: 93338 - DNA, 22 bp, synthetic construct
  misc_feature 1..22: note = chemically synthesized
  source 1..22: mol_type = other DNA
aacgaccatacttgtcctgcct

SEQ ID NO: 93339 - DNA, 22 bp, synthetic construct
  misc_feature 1..22: note = chemically synthesized
  source 1..22: mol_type = other DNA
acgaccatacttgtcctgcctc

SEQ ID NO: 93340 - DNA, 22 bp, synthetic construct
  misc_feature 1..22: note = chemically synthesized
  source 1..22: mol_type = other DNA
gtcctgcctccagatagatgtt

SEQ ID NO: 93341 - DNA, 22 bp, synthetic construct
  misc_feature 1..22: note = chemically synthesized
  source 1..22: mol_type = other DNA
tcctgcctccagatagatgttt

SEQ ID NO: 93342 - DNA, 22 bp, synthetic construct
  misc_feature 1..22: note = chemically synthesized
  source 1..22: mol_type = other DNA
cctccagatagatgttttaaaa

SEQ ID NO: 93343 - DNA, 22 bp, synthetic construct
  misc_feature 1..22: note = chemically synthesized
  source 1..22: mol_type = other DNA
cagatagatgttttaaaacaac

SEQ ID NO: 93344 - DNA, 22 bp, synthetic construct
  misc_feature 1..22: note = chemically synthesized
  source 1..22: mol_type = other DNA
taaaacaacaaaaatgagggaa

SEQ ID NO: 93345 - DNA, 22 bp, synthetic construct
  misc_feature 1..22: note = chemically synthesized
  source 1..22: mol_type = other DNA
aaaacaacaaaaatgagggaaa

SEQ ID NO: 93346 - DNA, 22 bp, synthetic construct
  misc_feature 1..22: note = chemically synthesized
  source 1..22: mol_type = other DNA
aaacaacaaaaatgagggaaag

SEQ ID NO: 93347 - DNA, 22 bp, synthetic construct
  misc_feature 1..22: note = chemically synthesized
  source 1..22: mol_type = other DNA
tttctactggaatctaataaag

SEQ ID NO: 93348 - DNA, 22 bp, synthetic construct
  misc_feature 1..22: note = chemically synthesized
  source 1..22: mol_type = other DNA
tctactggaatctaataaagaa

SEQ ID NO: 93349 - DNA, 22 bp, synthetic construct
  misc_feature 1..22: note = chemically synthesized
  source 1..22: mol_type = other DNA
ctactggaatctaataaagaaa

SEQ ID NO: 93350 - DNA, 22 bp, synthetic construct
  misc_feature 1..22: note = chemically synthesized
  source 1..22: mol_type = other DNA
tactggaatctaataaagaaaa

SEQ ID NO: 93351 - DNA, 22 bp, synthetic construct
  misc_feature 1..22: note = chemically synthesized
  source 1..22: mol_type = other DNA
ctggaatctaataaagaaaagt

SEQ ID NO: 93352 - DNA, 22 bp, synthetic construct
  misc_feature 1..22: note = chemically synthesized
  source 1..22: mol_type = other DNA
gaatctaataaagaaaagtcat

SEQ ID NO: 93353 - DNA, 22 bp, synthetic construct
  misc_feature 1..22: note = chemically synthesized
  source 1..22: mol_type = other DNA
ataaagaaaagtcattttcctc

SEQ ID NO: 93354 - DNA, 22 bp, synthetic construct
  misc_feature 1..22: note = chemically synthesized
  source 1..22: mol_type = other DNA
tcctcatttccacctctctttt

SEQ ID NO: 93355 - DNA, 22 bp, synthetic construct
  misc_feature 1..22: note = chemically synthesized
  source 1..22: mol_type = other DNA
cctcatttccacctctcttttc

SEQ ID NO: 93356 - DNA, 22 bp, synthetic construct
  misc_feature 1..22: note = chemically synthesized
  source 1..22: mol_type = other DNA
ctcatttccacctctcttttct

SEQ ID NO: 93357 - DNA, 22 bp, synthetic construct
  misc_feature 1..22: note = chemically synthesized
  source 1..22: mol_type = other DNA
atttccacctctcttttctcaa

SEQ ID NO: 93358 - DNA, 22 bp, synthetic construct
  misc_feature 1..22: note = chemically synthesized
  source 1..22: mol_type = other DNA
ccacctctcttttctcaaagtc

SEQ ID NO: 93359 - DNA, 22 bp, synthetic construct
  misc_feature 1..22: note = chemically synthesized
  source 1..22: mol_type = other DNA
cacctctcttttctcaaagtca

SEQ ID NO: 93360 - DNA, 22 bp, synthetic construct
  misc_feature 1..22: note = chemically synthesized
  source 1..22: mol_type = other DNA
tcttttctcaaagtcaaaattg

SEQ ID NO: 93361 - DNA, 22 bp, synthetic construct
  misc_feature 1..22: note = chemically synthesized
  source 1..22: mol_type = other DNA
ttttctcaaagtcaaaattgtc

SEQ ID NO: 93362 - DNA, 22 bp, synthetic construct
  misc_feature 1..22: note = chemically synthesized
  source 1..22: mol_type = other DNA
ttctcaaagtcaaaattgtcca

SEQ ID NO: 93363 - DNA, 22 bp, synthetic construct
  misc_feature 1..22: note = chemically synthesized
  source 1..22: mol_type = other DNA
tctcaaagtcaaaattgtccat

SEQ ID NO: 93364 - DNA, 22 bp, synthetic construct
  misc_feature 1..22: note = chemically synthesized
  source 1..22: mol_type = other DNA
ctcaaagtcaaaattgtccatc

SEQ ID NO: 93365 - DNA, 22 bp, synthetic construct
  misc_feature 1..22: note = chemically synthesized
  source 1..22: mol_type = other DNA
tcaaagtcaaaattgtccatct

SEQ ID NO: 93366 - DNA, 22 bp, synthetic construct
  misc_feature 1..22: note = chemically synthesized
  source 1..22: mol_type = other DNA
aaagtcaaaattgtccatctag

SEQ ID NO: 93367 - DNA, 22 bp, synthetic construct
  misc_feature 1..22: note = chemically synthesized
  source 1..22: mol_type = other DNA
tccatctagatttttagaggca

SEQ ID NO: 93368 - DNA, 22 bp, synthetic construct
  misc_feature 1..22: note = chemically synthesized
  source 1..22: mol_type = other DNA
gatttttagaggcactccttag

SEQ ID NO: 93369 - DNA, 22 bp, synthetic construct
  misc_feature 1..22: note = chemically synthesized
  source 1..22: mol_type = other DNA
ttagaggcactccttaggccct

SEQ ID NO: 93370 - DNA, 22 bp, synthetic construct
  misc_feature 1..22: note = chemically synthesized
  source 1..22: mol_type = other DNA
tagaggcactccttaggcccta

SEQ ID NO: 93371 - DNA, 22 bp, synthetic construct
  misc_feature 1..22: note = chemically synthesized
  source 1..22: mol_type = other DNA
agaggcactccttaggccctaa

SEQ ID NO: 93372 - DNA, 22 bp, synthetic construct
  misc_feature 1..22: note = chemically synthesized
  source 1..22: mol_type = other DNA
gaggcactccttaggccctaaa

SEQ ID NO: 93373 - DNA, 22 bp, synthetic construct
  misc_feature 1..22: note = chemically synthesized
  source 1..22: mol_type = other DNA
cttaggccctaaaacattacca

SEQ ID NO: 93374 - DNA, 22 bp, synthetic construct
  misc_feature 1..22: note = chemically synthesized
  source 1..22: mol_type = other DNA
aggccctaaaacattaccactg

SEQ ID NO: 93375 - DNA, 22 bp, synthetic construct
  misc_feature 1..22: note = chemically synthesized
  source 1..22: mol_type = other DNA
ggccctaaaacattaccactgg

SEQ ID NO: 93376 - DNA, 22 bp, synthetic construct
  misc_feature 1..22: note = chemically synthesized
  source 1..22: mol_type = other DNA
aaacattaccactgggtctcag

SEQ ID NO: 93377 - DNA, 22 bp, synthetic construct
  misc_feature 1..22: note = chemically synthesized
  source 1..22: mol_type = other DNA
ccactgggtctcagcccagtta

SEQ ID NO: 93378 - DNA, 22 bp, synthetic construct
  misc_feature 1..22: note = chemically synthesized
  source 1..22: mol_type = other DNA
ggtctcagcccagttagtcctc

SEQ ID NO: 93379 - DNA, 22 bp, synthetic construct
  misc_feature 1..22: note = chemically synthesized
  source 1..22: mol_type = other DNA
agcccagttagtcctctgcagt

SEQ ID NO: 93380 - DNA, 22 bp, synthetic construct
  misc_feature 1..22: note = chemically synthesized
  source 1..22: mol_type = other DNA
gtcctctgcagtttcttcaccc

SEQ ID NO: 93381 - DNA, 22 bp, synthetic construct
  misc_feature 1..22: note = chemically synthesized
  source 1..22: mol_type = other DNA
tgcagtttcttcacccccaacc

SEQ ID NO: 93382 - DNA, 22 bp, synthetic construct
  misc_feature 1..22: note = chemically synthesized
  source 1..22: mol_type = other DNA
cagtttcttcacccccaacccc

SEQ ID NO: 93383 - DNA, 22 bp, synthetic construct
  misc_feature 1..22: note = chemically synthesized
  source 1..22: mol_type = other DNA
cttcacccccaaccccagtatc

SEQ ID NO: 93384 - DNA, 22 bp, synthetic construct
  misc_feature 1..22: note = chemically synthesized
  source 1..22: mol_type = other DNA
ttcacccccaaccccagtatct

SEQ ID NO: 93385 - DNA, 22 bp, synthetic construct
  misc_feature 1..22: note = chemically synthesized
  source 1..22: mol_type = other DNA
cacccccaaccccagtatcttc

SEQ ID NO: 93386 - DNA, 22 bp, synthetic construct
  misc_feature 1..22: note = chemically synthesized
  source 1..22: mol_type = other DNA
acccccaaccccagtatcttca

SEQ ID NO: 93387 - DNA, 22 bp, synthetic construct
  misc_feature 1..22: note = chemically synthesized
  source 1..22: mol_type = other DNA
caaacagctcacaccctgctgt

SEQ ID NO: 93388 - DNA, 22 bp, synthetic construct
  misc_feature 1..22: note = chemically synthesized
  source 1..22: mol_type = other DNA
aaacagctcacaccctgctgtg

SEQ ID NO: 93389 - DNA, 22 bp, synthetic construct
  misc_feature 1..22: note = chemically synthesized
  source 1..22: mol_type = other DNA
acaccctgctgtgctcagatca

SEQ ID NO: 93390 - DNA, 22 bp, synthetic construct
  misc_feature 1..22: note = chemically synthesized
  source 1..22: mol_type = other DNA
ctgtgctcagatcaatactccg

SEQ ID NO: 93391 - DNA, 22 bp, synthetic construct
  misc_feature 1..22: note = chemically synthesized
  source 1..22: mol_type = other DNA
tgctcagatcaatactccgttg

SEQ ID NO: 93392 - DNA, 22 bp, synthetic construct
  misc_feature 1..22: note = chemically synthesized
  source 1..22: mol_type = other DNA
agatcaatactccgttgtctaa

SEQ ID NO: 93393 - DNA, 22 bp, synthetic construct
  misc_feature 1..22: note = chemically synthesized
  source 1..22: mol_type = other DNA
cgttgtctaagttgcctcgaga

SEQ ID NO: 93394 - DNA, 22 bp, synthetic construct
  misc_feature 1..22: note = chemically synthesized
  source 1..22: mol_type = other DNA
tctaagttgcctcgagactaaa

SEQ ID NO: 93395 - DNA, 22 bp, synthetic construct
  misc_feature 1..22: note = chemically synthesized
  source 1..22: mol_type = other DNA
agttgcctcgagactaaaggca

SEQ ID NO: 93396 - DNA, 22 bp, synthetic construct
  misc_feature 1..22: note = chemically synthesized
  source 1..22: mol_type = other DNA
cctcgagactaaaggcaacagg

SEQ ID NO: 93397 - DNA, 22 bp, synthetic construct
  misc_feature 1..22: note = chemically synthesized
  source 1..22: mol_type = other DNA
gagactaaaggcaacagggctg

SEQ ID NO: 93398 - DNA, 22 bp, synthetic construct
  misc_feature 1..22: note = chemically synthesized
  source 1..22: mol_type = other DNA
aaggcaacagggctgaaacatc

SEQ ID NO: 93399 - DNA, 22 bp, synthetic construct
  misc_feature 1..22: note = chemically synthesized
  source 1..22: mol_type = other DNA
aaacatctcctggactcacctt

SEQ ID NO: 93400 - DNA, 22 bp, synthetic construct
  misc_feature 1..22: note = chemically synthesized
  source 1..22: mol_type = other DNA
ctggactcaccttgaagttctc

SEQ ID NO: 93401 - DNA, 22 bp, synthetic construct
  misc_feature 1..22: note = chemically synthesized
  source 1..22: mol_type = other DNA
gactcaccttgaagttctcagg

SEQ ID NO: 93402 - DNA, 22 bp, synthetic construct
  misc_feature 1..22: note = chemically synthesized
  source 1..22: mol_type = other DNA
accttgaagttctcaggatcca

SEQ ID NO: 93403 - DNA, 22 bp, synthetic construct
  misc_feature 1..22: note = chemically synthesized
  source 1..22: mol_type = other DNA
gaagttctcaggatccacatgc

SEQ ID NO: 93404 - DNA, 22 bp, synthetic construct
  misc_feature 1..22: note = chemically synthesized
  source 1..22: mol_type = other DNA
aagttctcaggatccacatgca

SEQ ID NO: 93405 - DNA, 22 bp, synthetic construct
  misc_feature 1..22: note = chemically synthesized
  source 1..22: mol_type = other DNA
tcaggatccacatgcagcttgt

SEQ ID NO: 93406 - DNA, 22 bp, synthetic construct
  misc_feature 1..22: note = chemically synthesized
  source 1..22: mol_type = other DNA
aggatccacatgcagcttgtca

SEQ ID NO: 93407 - DNA, 22 bp, synthetic construct
  misc_feature 1..22: note = chemically synthesized
  source 1..22: mol_type = other DNA
gtcacagtgcagttcactcagc

SEQ ID NO: 93408 - DNA, 22 bp, synthetic construct
  misc_feature 1..22: note = chemically synthesized
  source 1..22: mol_type = other DNA
tcacagtgcagttcactcagct

SEQ ID NO: 93409 - DNA, 22 bp, synthetic construct
  misc_feature 1..22: note = chemically synthesized
  source 1..22: mol_type = other DNA
actcagctgggcaaaggtgccc

SEQ ID NO: 93410 - DNA, 22 bp, synthetic construct
  misc_feature 1..22: note = chemically synthesized
  source 1..22: mol_type = other DNA
agctgggcaaaggtgcccttga

SEQ ID NO: 93411 - DNA, 22 bp, synthetic construct
  misc_feature 1..22: note = chemically synthesized
  source 1..22: mol_type = other DNA
ggcaaaggtgcccttgagatca

SEQ ID NO: 93412 - DNA, 22 bp, synthetic construct
  misc_feature 1..22: note = chemically synthesized
  source 1..22: mol_type = other DNA
gagatcatccaggtgctttgtg

SEQ ID NO: 93413 - DNA, 22 bp, synthetic construct
  misc_feature 1..22: note = chemically synthesized
  source 1..22: mol_type = other DNA
agatcatccaggtgctttgtgg

SEQ ID NO: 93414 - DNA, 22 bp, synthetic construct
  misc_feature 1..22: note = chemically synthesized
  source 1..22: mol_type = other DNA
tgtggcatctcccaaggaagtc

SEQ ID NO: 93415 - DNA, 22 bp, synthetic construct
  misc_feature 1..22: note = chemically synthesized
  source 1..22: mol_type = other DNA
gtggcatctcccaaggaagtca

SEQ ID NO: 93416 - DNA, 22 bp, synthetic construct
  misc_feature 1..22: note = chemically synthesized
  source 1..22: mol_type = other DNA
tggcatctcccaaggaagtcag

SEQ ID NO: 93417 - DNA, 22 bp, synthetic construct
  misc_feature 1..22: note = chemically synthesized
  source 1..22: mol_type = other DNA
ccaaggaagtcagcaccttctt

SEQ ID NO: 93418 - DNA, 22 bp, synthetic construct
  misc_feature 1..22: note = chemically synthesized
  source 1..22: mol_type = other DNA
cttgccatgtgccttgactttg

SEQ ID NO: 93419 - DNA, 22 bp, synthetic construct
  misc_feature 1..22: note = chemically synthesized
  source 1..22: mol_type = other DNA
ttgccatgtgccttgactttgg

SEQ ID NO: 93420 - DNA, 22 bp, synthetic construct
  misc_feature 1..22: note = chemically synthesized
  source 1..22: mol_type = other DNA
gccatgtgccttgactttgggg

SEQ ID NO: 93421 - DNA, 22 bp, synthetic construct
  misc_feature 1..22: note = chemically synthesized
  source 1..22: mol_type = other DNA
ccatgtgccttgactttggggt

SEQ ID NO: 93422 - DNA, 22 bp, synthetic construct
  misc_feature 1..22: note = chemically synthesized
  source 1..22: mol_type = other DNA
gactttggggttgcccatgatg

SEQ ID NO: 93423 - DNA, 22 bp, synthetic construct
  misc_feature 1..22: note = chemically synthesized
  source 1..22: mol_type = other DNA
actttggggttgcccatgatgg

SEQ ID NO: 93424 - DNA, 22 bp, synthetic construct
  misc_feature 1..22: note = chemically synthesized
  source 1..22: mol_type = other DNA
tggggttgcccatgatggcaga

SEQ ID NO: 93425 - DNA, 22 bp, synthetic construct
  misc_feature 1..22: note = chemically synthesized
  source 1..22: mol_type = other DNA
ggggttgcccatgatggcagag

SEQ ID NO: 93426 - DNA, 22 bp, synthetic construct
  misc_feature 1..22: note = chemically synthesized
  source 1..22: mol_type = other DNA
gggttgcccatgatggcagagg

SEQ ID NO: 93427 - DNA, 22 bp, synthetic construct
  misc_feature 1..22: note = chemically synthesized
  source 1..22: mol_type = other DNA
cccatgatggcagaggcagagg

SEQ ID NO: 93428 - DNA, 22 bp, synthetic construct
  misc_feature 1..22: note = chemically synthesized
  source 1..22: mol_type = other DNA
ccaaagctgtcaaagaacctct

SEQ ID NO: 93429 - DNA, 22 bp, synthetic construct
  misc_feature 1..22: note = chemically synthesized
  source 1..22: mol_type = other DNA
tcaaagaacctctgggtccatg

SEQ ID NO: 93430 - DNA, 22 bp, synthetic construct
  misc_feature 1..22: note = chemically synthesized
  source 1..22: mol_type = other DNA
tgggtccatgggtagacaacca

SEQ ID NO: 93431 - DNA, 22 bp, synthetic construct
  misc_feature 1..22: note = chemically synthesized
  source 1..22: mol_type = other DNA
ggtccatgggtagacaaccagg

SEQ ID NO: 93432 - DNA, 22 bp, synthetic construct
  misc_feature 1..22: note = chemically synthesized
  source 1..22: mol_type = other DNA
tgagattgacaagaacagtttg

SEQ ID NO: 93433 - DNA, 22 bp, synthetic construct
  misc_feature 1..22: note = chemically synthesized
  source 1..22: mol_type = other DNA
acaagaacagtttgacagtcag

SEQ ID NO: 93434 - DNA, 22 bp, synthetic construct
  misc_feature 1..22: note = chemically synthesized
  source 1..22: mol_type = other DNA
gacagtcagaaggtgccacaaa

SEQ ID NO: 93435 - DNA, 22 bp, synthetic construct
  misc_feature 1..22: note = chemically synthesized
  source 1..22: mol_type = other DNA
acagtcagaaggtgccacaaat

SEQ ID NO: 93436 - DNA, 22 bp, synthetic construct
  misc_feature 1..22: note = chemically synthesized
  source 1..22: mol_type = other DNA
agaagcgacctggacttttgcc

SEQ ID NO: 93437 - DNA, 22 bp, synthetic construct
  misc_feature 1..22: note = chemically synthesized
  source 1..22: mol_type = other DNA
gacttttgccaggcacagggtc

SEQ ID NO: 93438 - DNA, 22 bp, synthetic construct
  misc_feature 1..22: note = chemically synthesized
  source 1..22: mol_type = other DNA
ttgccaggcacagggtccttcc

SEQ ID NO: 93439 - DNA, 22 bp, synthetic construct
  misc_feature 1..22: note = chemically synthesized
  source 1..22: mol_type = other DNA
tgccaggcacagggtccttcct

SEQ ID NO: 93440 - DNA, 22 bp, synthetic construct
  misc_feature 1..22: note = chemically synthesized
  source 1..22: mol_type = other DNA
gccaggcacagggtccttcctt

SEQ ID NO: 93441 - DNA, 22 bp, synthetic construct
  misc_feature 1..22: note = chemically synthesized
  source 1..22: mol_type = other DNA
ccaggcacagggtccttccttc

SEQ ID NO: 93442 - DNA, 22 bp, synthetic construct
  misc_feature 1..22: note = chemically synthesized
  source 1..22: mol_type = other DNA
ccttccctcccttgtcctggtc

SEQ ID NO: 93443 - DNA, 22 bp, synthetic construct
  misc_feature 1..22: note = chemically synthesized
  source 1..22: mol_type = other DNA
cttccctcccttgtcctggtca

SEQ ID NO: 93444 - DNA, 22 bp, synthetic construct
  misc_feature 1..22: note = chemically synthesized
  source 1..22: mol_type = other DNA
ccctcccttgtcctggtcacca

SEQ ID NO: 93445 - DNA, 22 bp, synthetic construct
  misc_feature 1..22: note = chemically synthesized
  source 1..22: mol_type = other DNA
cctcccttgtcctggtcaccag

SEQ ID NO: 93446 - DNA, 22 bp, synthetic construct
  misc_feature 1..22: note = chemically synthesized
  source 1..22: mol_type = other DNA
ccttgtcctggtcaccagagcc

SEQ ID NO: 93447 - DNA, 22 bp, synthetic construct
  misc_feature 1..22: note = chemically synthesized
  source 1..22: mol_type = other DNA
gtcctggtcaccagagcctacc

SEQ ID NO: 93448 - DNA, 22 bp, synthetic construct
  misc_feature 1..22: note = chemically synthesized
  source 1..22: mol_type = other DNA
tcctggtcaccagagcctacct

SEQ ID NO: 93449 - DNA, 22 bp, synthetic construct
  misc_feature 1..22: note = chemically synthesized
  source 1..22: mol_type = other DNA
gtcaccagagcctaccttccca

SEQ ID NO: 93450 - DNA, 22 bp, synthetic construct
  misc_feature 1..22: note = chemically synthesized
  source 1..22: mol_type = other DNA
ccttcccagggtttctcctcca

SEQ ID NO: 93451 - DNA, 22 bp, synthetic construct
  misc_feature 1..22: note = chemically synthesized
  source 1..22: mol_type = other DNA
cccagggtttctcctccagcat

SEQ ID NO: 93452 - DNA, 22 bp, synthetic construct
  misc_feature 1..22: note = chemically synthesized
  source 1..22: mol_type = other DNA
ccagggtttctcctccagcatc

SEQ ID NO: 93453 - DNA, 22 bp, synthetic construct
  misc_feature 1..22: note = chemically synthesized
  source 1..22: mol_type = other DNA
ctcctccagcatcttccacatt

SEQ ID NO: 93454 - DNA, 22 bp, synthetic construct
  misc_feature 1..22: note = chemically synthesized
  source 1..22: mol_type = other DNA
tcctccagcatcttccacattc

SEQ ID NO: 93455 - DNA, 22 bp, synthetic construct
  misc_feature 1..22: note = chemically synthesized
  source 1..22: mol_type = other DNA
ctccagcatcttccacattcac

SEQ ID NO: 93456 - DNA, 22 bp, synthetic construct
  misc_feature 1..22: note = chemically synthesized
  source 1..22: mol_type = other DNA
cagcatcttccacattcacctt

SEQ ID NO: 93457 - DNA, 22 bp, synthetic construct
  misc_feature 1..22: note = chemically synthesized
  source 1..22: mol_type = other DNA
ccacattcaccttgccccacag

SEQ ID NO: 93458 - DNA, 22 bp, synthetic construct
  misc_feature 1..22: note = chemically synthesized
  source 1..22: mol_type = other DNA
cacattcaccttgccccacagg

SEQ ID NO: 93459 - DNA, 22 bp, synthetic construct
  misc_feature 1..22: note = chemically synthesized
  source 1..22: mol_type = other DNA
accttgccccacaggcttgtga

SEQ ID NO: 93460 - DNA, 22 bp, synthetic construct
  misc_feature 1..22: note = chemically synthesized
  source 1..22: mol_type = other DNA
gccccacaggcttgtgatagta

SEQ ID NO: 93461 - DNA, 22 bp, synthetic construct
  misc_feature 1..22: note = chemically synthesized
  source 1..22: mol_type = other DNA
ccccacaggcttgtgatagtag

SEQ ID NO: 93462 - DNA, 22 bp, synthetic construct
  misc_feature 1..22: note = chemically synthesized
  source 1..22: mol_type = other DNA
gtgatagtagccttgtcctcct

SEQ ID NO: 93463 - DNA, 22 bp, synthetic construct
  misc_feature 1..22: note = chemically synthesized
  source 1..22: mol_type = other DNA
tgatagtagccttgtcctcctc

SEQ ID NO: 93464 - DNA, 22 bp, synthetic construct
  misc_feature 1..22: note = chemically synthesized
  source 1..22: mol_type = other DNA
gtcctcctctgtgaaatgaccc

SEQ ID NO: 93465 - DNA, 22 bp, synthetic construct
  misc_feature 1..22: note = chemically synthesized
  source 1..22: mol_type = other DNA
tcctcctctgtgaaatgaccca

SEQ ID NO: 93466 - DNA, 22 bp, synthetic construct
  misc_feature 1..22: note = chemically synthesized
  source 1..22: mol_type = other DNA
ctctgtgaaatgacccatggcg

SEQ ID NO: 93467 - DNA, 22 bp, synthetic construct
  misc_feature 1..22: note = chemically synthesized
  source 1..22: mol_type = other DNA
tgtgaaatgacccatggcgtct

SEQ ID NO: 93468 - DNA, 22 bp, synthetic construct
  misc_feature 1..22: note = chemically synthesized
  source 1..22: mol_type = other DNA
tgaaatgacccatggcgtctgg

SEQ ID NO: 93469 - DNA, 22 bp, synthetic construct
  misc_feature 1..22: note = chemically synthesized
  source 1..22: mol_type = other DNA
gactaggagcttattgataacc

SEQ ID NO: 93470 - DNA, 22 bp, synthetic construct
  misc_feature 1..22: note = chemically synthesized
  source 1..22: mol_type = other DNA
ggagcttattgataacctcaga

SEQ ID NO: 93471 - DNA, 22 bp, synthetic construct
  misc_feature 1..22: note = chemically synthesized
  source 1..22: mol_type = other DNA
attgataacctcagacgttcca

SEQ ID NO: 93472 - DNA, 22 bp, synthetic construct
  misc_feature 1..22: note = chemically synthesized
  source 1..22: mol_type = other DNA
ttgataacctcagacgttccag

SEQ ID NO: 93473 - DNA, 22 bp, synthetic construct
  misc_feature 1..22: note = chemically synthesized
  source 1..22: mol_type = other DNA
ataacctcagacgttccagaag

SEQ ID NO: 93474 - DNA, 22 bp, synthetic construct
  misc_feature 1..22: note = chemically synthesized
  source 1..22: mol_type = other DNA
agacgttccagaagcgagtgtg

SEQ ID NO: 93475 - DNA, 22 bp, synthetic construct
  misc_feature 1..22: note = chemically synthesized
  source 1..22: mol_type = other DNA
cagaagcgagtgtgtggaactg

SEQ ID NO: 93476 - DNA, 22 bp, synthetic construct
  misc_feature 1..22: note = chemically synthesized
  source 1..22: mol_type = other DNA
ctgaagggtgcttccttttatt

SEQ ID NO: 93477 - DNA, 22 bp, synthetic construct
  misc_feature 1..22: note = chemically synthesized
  source 1..22: mol_type = other DNA
aagggtgcttccttttattctt

SEQ ID NO: 93478 - DNA, 22 bp, synthetic construct
  misc_feature 1..22: note = chemically synthesized
  source 1..22: mol_type = other DNA
ccttttattcttcatccctagc

SEQ ID NO: 93479 - DNA, 22 bp, synthetic construct
  misc_feature 1..22: note = chemically synthesized
  source 1..22: mol_type = other DNA
cttttattcttcatccctagcc

SEQ ID NO: 93480 - DNA, 22 bp, synthetic construct
  misc_feature 1..22: note = chemically synthesized
  source 1..22: mol_type = other DNA
ttattcttcatccctagccagc

SEQ ID NO: 93481 - DNA, 22 bp, synthetic construct
  misc_feature 1..22: note = chemically synthesized
  source 1..22: mol_type = other DNA
tattcttcatccctagccagcc

SEQ ID NO: 93482 - DNA, 22 bp, synthetic construct
  misc_feature 1..22: note = chemically synthesized
  source 1..22: mol_type = other DNA
attcttcatccctagccagccg

SEQ ID NO: 93483 - DNA, 22 bp, synthetic construct
  misc_feature 1..22: note = chemically synthesized
  source 1..22: mol_type = other DNA
ttcttcatccctagccagccgc

SEQ ID NO: 93484 - DNA, 22 bp, synthetic construct
  misc_feature 1..22: note = chemically synthesized
  source 1..22: mol_type = other DNA
ttcatccctagccagccgccgg

SEQ ID NO: 93485 - DNA, 22 bp, synthetic construct
  misc_feature 1..22: note = chemically synthesized
  source 1..22: mol_type = other DNA
catccctagccagccgccggcc

SEQ ID NO: 93486 - DNA, 22 bp, synthetic construct
  misc_feature 1..22: note = chemically synthesized
  source 1..22: mol_type = other DNA
atccctagccagccgccggccc

SEQ ID NO: 93487 - DNA, 22 bp, synthetic construct
  misc_feature 1..22: note = chemically synthesized
  source 1..22: mol_type = other DNA
gccagccgccggcccctggcct

SEQ ID NO: 93488 - DNA, 22 bp, synthetic construct
  misc_feature 1..22: note = chemically synthesized
  source 1..22: mol_type = other DNA
gcctcactggatactctaagac

SEQ ID NO: 93489 - DNA, 22 bp, synthetic construct
  misc_feature 1..22: note = chemically synthesized
  source 1..22: mol_type = other DNA
actggatactctaagactattg

SEQ ID NO: 93490 - DNA, 22 bp, synthetic construct
  misc_feature 1..22: note = chemically synthesized
  source 1..22: mol_type = other DNA
gatactctaagactattggtca

SEQ ID NO: 93491 - DNA, 22 bp, synthetic construct
  misc_feature 1..22: note = chemically synthesized
  source 1..22: mol_type = other DNA
taagactattggtcaagtttgc

SEQ ID NO: 93492 - DNA, 22 bp, synthetic construct
  misc_feature 1..22: note = chemically synthesized
  source 1..22: mol_type = other DNA
agactattggtcaagtttgcct

SEQ ID NO: 93493 - DNA, 22 bp, synthetic construct
  misc_feature 1..22: note = chemically synthesized
  source 1..22: mol_type = other DNA
ttggtcaagtttgccttgtcaa

SEQ ID NO: 93494 - DNA, 22 bp, synthetic construct
  misc_feature 1..22: note = chemically synthesized
  source 1..22: mol_type = other DNA
gtcaagtttgccttgtcaaggc

SEQ ID NO: 93495 - DNA, 22 bp, synthetic construct
  misc_feature 1..22: note = chemically synthesized
  source 1..22: mol_type = other DNA
gccttgtcaaggctattggtca

SEQ ID NO: 93496 - DNA, 22 bp, synthetic construct
  misc_feature 1..22: note = chemically synthesized
  source 1..22: mol_type = other DNA
ccttgtcaaggctattggtcaa

SEQ ID NO: 93497 - DNA, 22 bp, synthetic construct
  misc_feature 1..22: note = chemically synthesized
  source 1..22: mol_type = other DNA
gtcaaggctattggtcaaggca

SEQ ID NO: 93498 - DNA, 22 bp, synthetic construct
  misc_feature 1..22: note = chemically synthesized
  source 1..22: mol_type = other DNA
tcaaggctattggtcaaggcaa

SEQ ID NO: 93499 - DNA, 22 bp, synthetic construct
  misc_feature 1..22: note = chemically synthesized
  source 1..22: mol_type = other DNA
ttggtcaaggcaaggctggcca

SEQ ID NO: 93500 - DNA, 22 bp, synthetic construct
  misc_feature 1..22: note = chemically synthesized
  source 1..22: mol_type = other DNA
gtcaaggcaaggctggccaacc

SEQ ID NO: 93501 - DNA, 22 bp, synthetic construct
  misc_feature 1..22: note = chemically synthesized
  source 1..22: mol_type = other DNA
gccaacccatgggtggagttta

SEQ ID NO: 93502 - DNA, 22 bp, synthetic construct
  misc_feature 1..22: note = chemically synthesized
  source 1..22: mol_type = other DNA
agccagggaccgtttcagacag

SEQ ID NO: 93503 - DNA, 22 bp, synthetic construct
  misc_feature 1..22: note = chemically synthesized
  source 1..22: mol_type = other DNA
gccagggaccgtttcagacaga

SEQ ID NO: 93504 - DNA, 22 bp, synthetic construct
  misc_feature 1..22: note = chemically synthesized
  source 1..22: mol_type = other DNA
cagacagatatttgcattgaga

SEQ ID NO: 93505 - DNA, 22 bp, synthetic construct
  misc_feature 1..22: note = chemically synthesized
  source 1..22: mol_type = other DNA
agacagatatttgcattgagat

SEQ ID NO: 93506 - DNA, 22 bp, synthetic construct
  misc_feature 1..22: note = chemically synthesized
  source 1..22: mol_type = other DNA
gcattgagatagtgtggggaag

SEQ ID NO: 93507 - DNA, 22 bp, synthetic construct
  misc_feature 1..22: note = chemically synthesized
  source 1..22: mol_type = other DNA
cattgagatagtgtggggaagg

SEQ ID NO: 93508 - DNA, 22 bp, synthetic construct
  misc_feature 1..22: note = chemically synthesized
  source 1..22: mol_type = other DNA
agatagtgtggggaaggggccc

SEQ ID NO: 93509 - DNA, 22 bp, synthetic construct
  misc_feature 1..22: note = chemically synthesized
  source 1..22: mol_type = other DNA
ctaattttttttatagcctttg

SEQ ID NO: 93510 - DNA, 22 bp, synthetic construct
  misc_feature 1..22: note = chemically synthesized
  source 1..22: mol_type = other DNA
attttttttatagcctttgcct

SEQ ID NO: 93511 - DNA, 22 bp, synthetic construct
  misc_feature 1..22: note = chemically synthesized
  source 1..22: mol_type = other DNA
tttttatagcctttgccttgtt

SEQ ID NO: 93512 - DNA, 22 bp, synthetic construct
  misc_feature 1..22: note = chemically synthesized
  source 1..22: mol_type = other DNA
ttttatagcctttgccttgttc

SEQ ID NO: 93513 - DNA, 22 bp, synthetic construct
  misc_feature 1..22: note = chemically synthesized
  source 1..22: mol_type = other DNA
tttatagcctttgccttgttcc

SEQ ID NO: 93514 - DNA, 22 bp, synthetic construct
  misc_feature 1..22: note = chemically synthesized
  source 1..22: mol_type = other DNA
ttatagcctttgccttgttccg

SEQ ID NO: 93515 - DNA, 22 bp, synthetic construct
  misc_feature 1..22: note = chemically synthesized
  source 1..22: mol_type = other DNA
tatagcctttgccttgttccga

SEQ ID NO: 93516 - DNA, 22 bp, synthetic construct
  misc_feature 1..22: note = chemically synthesized
  source 1..22: mol_type = other DNA
atagcctttgccttgttccgat

SEQ ID NO: 93517 - DNA, 22 bp, synthetic construct
  misc_feature 1..22: note = chemically synthesized
  source 1..22: mol_type = other DNA
tagcctttgccttgttccgatt

SEQ ID NO: 93518 - DNA, 22 bp, synthetic construct
  misc_feature 1..22: note = chemically synthesized
  source 1..22: mol_type = other DNA
tgccttgttccgattcagtcat

SEQ ID NO: 93519 - DNA, 22 bp, synthetic construct
  misc_feature 1..22: note = chemically synthesized
  source 1..22: mol_type = other DNA
gccttgttccgattcagtcatt

SEQ ID NO: 93520 - DNA, 22 bp, synthetic construct
  misc_feature 1..22: note = chemically synthesized
  source 1..22: mol_type = other DNA
ccttgttccgattcagtcattc

SEQ ID NO: 93521 - DNA, 22 bp, synthetic construct
  misc_feature 1..22: note = chemically synthesized
  source 1..22: mol_type = other DNA
gttccgattcagtcattccagt

SEQ ID NO: 93522 - DNA, 22 bp, synthetic construct
  misc_feature 1..22: note = chemically synthesized
  source 1..22: mol_type = other DNA
ttccgattcagtcattccagtt

SEQ ID NO: 93523 - DNA, 22 bp, synthetic construct
  misc_feature 1..22: note = chemically synthesized
  source 1..22: mol_type = other DNA
cgattcagtcattccagttttt

SEQ ID NO: 93524 - DNA, 22 bp, synthetic construct
  misc_feature 1..22: note = chemically synthesized
  source 1..22: mol_type = other DNA
agtcattccagtttttctctaa

SEQ ID NO: 93525 - DNA, 22 bp, synthetic construct
  misc_feature 1..22: note = chemically synthesized
  source 1..22: mol_type = other DNA
cagtttttctctaatttattct

SEQ ID NO: 93526 - DNA, 22 bp, synthetic construct
  misc_feature 1..22: note = chemically synthesized
  source 1..22: mol_type = other DNA
ttctctaatttattcttccctt

SEQ ID NO: 93527 - DNA, 22 bp, synthetic construct
  misc_feature 1..22: note = chemically synthesized
  source 1..22: mol_type = other DNA
tctctaatttattcttcccttt

SEQ ID NO: 93528 - DNA, 22 bp, synthetic construct
  misc_feature 1..22: note = chemically synthesized
  source 1..22: mol_type = other DNA
ctctaatttattcttcccttta

SEQ ID NO: 93529 - DNA, 22 bp, synthetic construct
  misc_feature 1..22: note = chemically synthesized
  source 1..22: mol_type = other DNA
tctaatttattcttccctttag

SEQ ID NO: 93530 - DNA, 22 bp, synthetic construct
  misc_feature 1..22: note = chemically synthesized
  source 1..22: mol_type = other DNA
taatttattcttccctttagct

SEQ ID NO: 93531 - DNA, 22 bp, synthetic construct
  misc_feature 1..22: note = chemically synthesized
  source 1..22: mol_type = other DNA
atttattcttccctttagctag

SEQ ID NO: 93532 - DNA, 22 bp, synthetic construct
  misc_feature 1..22: note = chemically synthesized
  source 1..22: mol_type = other DNA
attcttccctttagctagtttc

SEQ ID NO: 93533 - DNA, 22 bp, synthetic construct
  misc_feature 1..22: note = chemically synthesized
  source 1..22: mol_type = other DNA
ttcttccctttagctagtttcc

SEQ ID NO: 93534 - DNA, 22 bp, synthetic construct
  misc_feature 1..22: note = chemically synthesized
  source 1..22: mol_type = other DNA
ttccctttagctagtttccttc

SEQ ID NO: 93535 - DNA, 22 bp, synthetic construct
  misc_feature 1..22: note = chemically synthesized
  source 1..22: mol_type = other DNA
ccctttagctagtttccttctc

SEQ ID NO: 93536 - DNA, 22 bp, synthetic construct
  misc_feature 1..22: note = chemically synthesized
  source 1..22: mol_type = other DNA
cctttagctagtttccttctcc

SEQ ID NO: 93537 - DNA, 22 bp, synthetic construct
  misc_feature 1..22: note = chemically synthesized
  source 1..22: mol_type = other DNA
tagctagtttccttctcccatc

SEQ ID NO: 93538 - DNA, 22 bp, synthetic construct
  misc_feature 1..22: note = chemically synthesized
  source 1..22: mol_type = other DNA
agctagtttccttctcccatca

SEQ ID NO: 93539 - DNA, 22 bp, synthetic construct
  misc_feature 1..22: note = chemically synthesized
  source 1..22: mol_type = other DNA
gctagtttccttctcccatcat

SEQ ID NO: 93540 - DNA, 22 bp, synthetic construct
  misc_feature 1..22: note = chemically synthesized
  source 1..22: mol_type = other DNA
gtttccttctcccatcatagag

SEQ ID NO: 93541 - DNA, 22 bp, synthetic construct
  misc_feature 1..22: note = chemically synthesized
  source 1..22: mol_type = other DNA
ccttctcccatcatagaggata

SEQ ID NO: 93542 - DNA, 22 bp, synthetic construct
  misc_feature 1..22: note = chemically synthesized
  source 1..22: mol_type = other DNA
cttctcccatcatagaggatac

SEQ ID NO: 93543 - DNA, 22 bp, synthetic construct
  misc_feature 1..22: note = chemically synthesized
  source 1..22: mol_type = other DNA
ctcccatcatagaggataccag

SEQ ID NO: 93544 - DNA, 22 bp, synthetic construct
  misc_feature 1..22: note = chemically synthesized
  source 1..22: mol_type = other DNA
tcccatcatagaggataccagg

SEQ ID NO: 93545 - DNA, 22 bp, synthetic construct
  misc_feature 1..22: note = chemically synthesized
  source 1..22: mol_type = other DNA
ccatcatagaggataccaggac

SEQ ID NO: 93546 - DNA, 22 bp, synthetic construct
  misc_feature 1..22: note = chemically synthesized
  source 1..22: mol_type = other DNA
cttttgtcagccgttttttacc

SEQ ID NO: 93547 - DNA, 22 bp, synthetic construct
  misc_feature 1..22: note = chemically synthesized
  source 1..22: mol_type = other DNA
ttttgtcagccgttttttacct

SEQ ID NO: 93548 - DNA, 22 bp, synthetic construct
  misc_feature 1..22: note = chemically synthesized
  source 1..22: mol_type = other DNA
ttgtcagccgttttttaccttc

SEQ ID NO: 93549 - DNA, 22 bp, synthetic construct
  misc_feature 1..22: note = chemically synthesized
  source 1..22: mol_type = other DNA
tgtcagccgttttttaccttct

SEQ ID NO: 93550 - DNA, 22 bp, synthetic construct
  misc_feature 1..22: note = chemically synthesized
  source 1..22: mol_type = other DNA
gtcagccgttttttaccttctt

SEQ ID NO: 93551 - DNA, 22 bp, synthetic construct
  misc_feature 1..22: note = chemically synthesized
  source 1..22: mol_type = other DNA
tcagccgttttttaccttcttg

SEQ ID NO: 93552 - DNA, 22 bp, synthetic construct
  misc_feature 1..22: note = chemically synthesized
  source 1..22: mol_type = other DNA
tttaccttcttgtctctagctc

SEQ ID NO: 93553 - DNA, 22 bp, synthetic construct
  misc_feature 1..22: note = chemically synthesized
  source 1..22: mol_type = other DNA
ttaccttcttgtctctagctcc

SEQ ID NO: 93554 - DNA, 22 bp, synthetic construct
  misc_feature 1..22: note = chemically synthesized
  source 1..22: mol_type = other DNA
taccttcttgtctctagctcca

SEQ ID NO: 93555 - DNA, 22 bp, synthetic construct
  misc_feature 1..22: note = chemically synthesized
  source 1..22: mol_type = other DNA
accttcttgtctctagctccag

SEQ ID NO: 93556 - DNA, 22 bp, synthetic construct
  misc_feature 1..22: note = chemically synthesized
  source 1..22: mol_type = other DNA
ccttcttgtctctagctccagt

SEQ ID NO: 93557 - DNA, 22 bp, synthetic construct
  misc_feature 1..22: note = chemically synthesized
  source 1..22: mol_type = other DNA
cttgtctctagctccagtgagg

SEQ ID NO: 93558 - DNA, 22 bp, synthetic construct
  misc_feature 1..22: note = chemically synthesized
  source 1..22: mol_type = other DNA
ttgtctctagctccagtgaggc

SEQ ID NO: 93559 - DNA, 22 bp, synthetic construct
  misc_feature 1..22: note = chemically synthesized
  source 1..22: mol_type = other DNA
gtctctagctccagtgaggcct

SEQ ID NO: 93560 - DNA, 22 bp, synthetic construct
  misc_feature 1..22: note = chemically synthesized
  source 1..22: mol_type = other DNA
tctctagctccagtgaggcctg

SEQ ID NO: 93561 - DNA, 22 bp, synthetic construct
  misc_feature 1..22: note = chemically synthesized
  source 1..22: mol_type = other DNA
tagctccagtgaggcctgtagt

SEQ ID NO: 93562 - DNA, 22 bp, synthetic construct
  misc_feature 1..22: note = chemically synthesized
  source 1..22: mol_type = other DNA
gctccagtgaggcctgtagttt

SEQ ID NO: 93563 - DNA, 22 bp, synthetic construct
  misc_feature 1..22: note = chemically synthesized
  source 1..22: mol_type = other DNA
cagtgaggcctgtagtttaaag

SEQ ID NO: 93564 - DNA, 22 bp, synthetic construct
  misc_feature 1..22: note = chemically synthesized
  source 1..22: mol_type = other DNA
tagtttaaagctaaagcatgta

SEQ ID NO: 93565 - DNA, 22 bp, synthetic construct
  misc_feature 1..22: note = chemically synthesized
  source 1..22: mol_type = other DNA
aaagctaaagcatgtaccaatt

SEQ ID NO: 93566 - DNA, 22 bp, synthetic construct
  misc_feature 1..22: note = chemically synthesized
  source 1..22: mol_type = other DNA
aagctaaagcatgtaccaattt

SEQ ID NO: 93567 - DNA, 22 bp, synthetic construct
  misc_feature 1..22: note = chemically synthesized
  source 1..22: mol_type = other DNA
aagcatgtaccaatttttgaaa

SEQ ID NO: 93568 - DNA, 22 bp, synthetic construct
  misc_feature 1..22: note = chemically synthesized
  source 1..22: mol_type = other DNA
ttgaaaagttcagggattgtga

SEQ ID NO: 93569 - DNA, 22 bp, synthetic construct
  misc_feature 1..22: note = chemically synthesized
  source 1..22: mol_type = other DNA
tgaaaagttcagggattgtgaa

SEQ ID NO: 93570 - DNA, 22 bp, synthetic construct
  misc_feature 1..22: note = chemically synthesized
  source 1..22: mol_type = other DNA
gaaaagttcagggattgtgaaa

SEQ ID NO: 93571 - DNA, 22 bp, synthetic construct
  misc_feature 1..22: note = chemically synthesized
  source 1..22: mol_type = other DNA
aaaagttcagggattgtgaaat

SEQ ID NO: 93572 - DNA, 22 bp, synthetic construct
  misc_feature 1..22: note = chemically synthesized
  source 1..22: mol_type = other DNA
agggattgtgaaatgtgtttta

SEQ ID NO: 93573 - DNA, 22 bp, synthetic construct
  misc_feature 1..22: note = chemically synthesized
  source 1..22: mol_type = other DNA
tgaaatgtgttttaggcatagg

SEQ ID NO: 93574 - DNA, 22 bp, synthetic construct
  misc_feature 1..22: note = chemically synthesized
  source 1..22: mol_type = other DNA
taggcataggtccaggattttt

SEQ ID NO: 93575 - DNA, 22 bp, synthetic construct
  misc_feature 1..22: note = chemically synthesized
  source 1..22: mol_type = other DNA
aggcataggtccaggatttttg

SEQ ID NO: 93576 - DNA, 22 bp, synthetic construct
  misc_feature 1..22: note = chemically synthesized
  source 1..22: mol_type = other DNA
ggcataggtccaggatttttga

SEQ ID NO: 93577 - DNA, 22 bp, synthetic construct
  misc_feature 1..22: note = chemically synthesized
  source 1..22: mol_type = other DNA
ttgacgggacaaatcttagtct

SEQ ID NO: 93578 - DNA, 22 bp, synthetic construct
  misc_feature 1..22: note = chemically synthesized
  source 1..22: mol_type = other DNA
tgacgggacaaatcttagtctc

SEQ ID NO: 93579 - DNA, 22 bp, synthetic construct
  misc_feature 1..22: note = chemically synthesized
  source 1..22: mol_type = other DNA
gacgggacaaatcttagtctct

SEQ ID NO: 93580 - DNA, 22 bp, synthetic construct
  misc_feature 1..22: note = chemically synthesized
  source 1..22: mol_type = other DNA
acgggacaaatcttagtctctt

SEQ ID NO: 93581 - DNA, 22 bp, synthetic construct
  misc_feature 1..22: note = chemically synthesized
  source 1..22: mol_type = other DNA
agtctctttcagttagcagtgg

SEQ ID NO: 93582 - DNA, 22 bp, synthetic construct
  misc_feature 1..22: note = chemically synthesized
  source 1..22: mol_type = other DNA
gtctctttcagttagcagtggt

SEQ ID NO: 93583 - DNA, 22 bp, synthetic construct
  misc_feature 1..22: note = chemically synthesized
  source 1..22: mol_type = other DNA
tttcagttagcagtggtttcta

SEQ ID NO: 93584 - DNA, 22 bp, synthetic construct
  misc_feature 1..22: note = chemically synthesized
  source 1..22: mol_type = other DNA
tcagttagcagtggtttctaag

SEQ ID NO: 93585 - DNA, 22 bp, synthetic construct
  misc_feature 1..22: note = chemically synthesized
  source 1..22: mol_type = other DNA
cagttagcagtggtttctaagg

SEQ ID NO: 93586 - DNA, 22 bp, synthetic construct
  misc_feature 1..22: note = chemically synthesized
  source 1..22: mol_type = other DNA
agttagcagtggtttctaagga

SEQ ID NO: 93587 - DNA, 22 bp, synthetic construct
  misc_feature 1..22: note = chemically synthesized
  source 1..22: mol_type = other DNA
gcagtggtttctaaggaaaaag

SEQ ID NO: 93588 - DNA, 22 bp, synthetic construct
  misc_feature 1..22: note = chemically synthesized
  source 1..22: mol_type = other DNA
ctaaggaaaaagtgctatactt

SEQ ID NO: 93589 - DNA, 22 bp, synthetic construct
  misc_feature 1..22: note = chemically synthesized
  source 1..22: mol_type = other DNA
taaggaaaaagtgctatacttc

SEQ ID NO: 93590 - DNA, 22 bp, synthetic construct
  misc_feature 1..22: note = chemically synthesized
  source 1..22: mol_type = other DNA
aggaaaaagtgctatacttctt

SEQ ID NO: 93591 - DNA, 22 bp, synthetic construct
  misc_feature 1..22: note = chemically synthesized
  source 1..22: mol_type = other DNA
tacttctttttgaatatactct

SEQ ID NO: 93592 - DNA, 22 bp, synthetic construct
  misc_feature 1..22: note = chemically synthesized
  source 1..22: mol_type = other DNA
ctttttgaatatactctttgtg

SEQ ID NO: 93593 - DNA, 22 bp, synthetic construct
  misc_feature 1..22: note = chemically synthesized
  source 1..22: mol_type = other DNA
tttttgaatatactctttgtga

SEQ ID NO: 93594 - DNA, 22 bp, synthetic construct
  misc_feature 1..22: note = chemically synthesized
  source 1..22: mol_type = other DNA
tttgaatatactctttgtgact

SEQ ID NO: 93595 - DNA, 22 bp, synthetic construct
  misc_feature 1..22: note = chemically synthesized
  source 1..22: mol_type = other DNA
ttgaatatactctttgtgactt

SEQ ID NO: 93596 - DNA, 22 bp, synthetic construct
  misc_feature 1..22: note = chemically synthesized
  source 1..22: mol_type = other DNA
tgaatatactctttgtgacttt

SEQ ID NO: 93597 - DNA, 22 bp, synthetic construct
  misc_feature 1..22: note = chemically synthesized
  source 1..22: mol_type = other DNA
gaatatactctttgtgactttt

SEQ ID NO: 93598 - DNA, 22 bp, synthetic construct
  misc_feature 1..22: note = chemically synthesized
  source 1..22: mol_type = other DNA
aatatactctttgtgacttttg

SEQ ID NO: 93599 - DNA, 22 bp, synthetic construct
  misc_feature 1..22: note = chemically synthesized
  source 1..22: mol_type = other DNA
tttgtgacttttgccattatct

SEQ ID NO: 93600 - DNA, 22 bp, synthetic construct
  misc_feature 1..22: note = chemically synthesized
  source 1..22: mol_type = other DNA
tgtgacttttgccattatctct

SEQ ID NO: 93601 - DNA, 22 bp, synthetic construct
  misc_feature 1..22: note = chemically synthesized
  source 1..22: mol_type = other DNA
gtgacttttgccattatctctt

SEQ ID NO: 93602 - DNA, 22 bp, synthetic construct
  misc_feature 1..22: note = chemically synthesized
  source 1..22: mol_type = other DNA
tgacttttgccattatctctta

SEQ ID NO: 93603 - DNA, 22 bp, synthetic construct
  misc_feature 1..22: note = chemically synthesized
  source 1..22: mol_type = other DNA
ttgccattatctcttaatttct

SEQ ID NO: 93604 - DNA, 22 bp, synthetic construct
  misc_feature 1..22: note = chemically synthesized
  source 1..22: mol_type = other DNA
tgccattatctcttaatttctc

SEQ ID NO: 93605 - DNA, 22 bp, synthetic construct
  misc_feature 1..22: note = chemically synthesized
  source 1..22: mol_type = other DNA
gccattatctcttaatttctca

SEQ ID NO: 93606 - DNA, 22 bp, synthetic construct
  misc_feature 1..22: note = chemically synthesized
  source 1..22: mol_type = other DNA
ccattatctcttaatttctcaa

SEQ ID NO: 93607 - DNA, 22 bp, synthetic construct
  misc_feature 1..22: note = chemically synthesized
  source 1..22: mol_type = other DNA
tctcttaatttctcaatagtgc

SEQ ID NO: 93608 - DNA, 22 bp, synthetic construct
  misc_feature 1..22: note = chemically synthesized
  source 1..22: mol_type = other DNA
ttaatttctcaatagtgcagtg

SEQ ID NO: 93609 - DNA, 22 bp, synthetic construct
  misc_feature 1..22: note = chemically synthesized
  source 1..22: mol_type = other DNA
aatttctcaatagtgcagtgaa

SEQ ID NO: 93610 - DNA, 22 bp, synthetic construct
  misc_feature 1..22: note = chemically synthesized
  source 1..22: mol_type = other DNA
atttctcaatagtgcagtgaaa

SEQ ID NO: 93611 - DNA, 22 bp, synthetic construct
  misc_feature 1..22: note = chemically synthesized
  source 1..22: mol_type = other DNA
ctcaatagtgcagtgaaaacaa

SEQ ID NO: 93612 - DNA, 22 bp, synthetic construct
  misc_feature 1..22: note = chemically synthesized
  source 1..22: mol_type = other DNA
tcaatagtgcagtgaaaacaat

SEQ ID NO: 93613 - DNA, 22 bp, synthetic construct
  misc_feature 1..22: note = chemically synthesized
  source 1..22: mol_type = other DNA
aatagtgcagtgaaaacaattt

SEQ ID NO: 93614 - DNA, 22 bp, synthetic construct
  misc_feature 1..22: note = chemically synthesized
  source 1..22: mol_type = other DNA
ctataaagccacagtttcagcg

SEQ ID NO: 93615 - DNA, 22 bp, synthetic construct
  misc_feature 1..22: note = chemically synthesized
  source 1..22: mol_type = other DNA
tataaagccacagtttcagcgc

SEQ ID NO: 93616 - DNA, 22 bp, synthetic construct
  misc_feature 1..22: note = chemically synthesized
  source 1..22: mol_type = other DNA
taaagccacagtttcagcgcag

SEQ ID NO: 93617 - DNA, 22 bp, synthetic construct
  misc_feature 1..22: note = chemically synthesized
  source 1..22: mol_type = other DNA
cagcgcagtaatagattagtgt

SEQ ID NO: 93618 - DNA, 22 bp, synthetic construct
  misc_feature 1..22: note = chemically synthesized
  source 1..22: mol_type = other DNA
agcgcagtaatagattagtgtt

SEQ ID NO: 93619 - DNA, 22 bp, synthetic construct
  misc_feature 1..22: note = chemically synthesized
  source 1..22: mol_type = other DNA
gtgttacataatataagaccta

SEQ ID NO: 93620 - DNA, 22 bp, synthetic construct
  misc_feature 1..22: note = chemically synthesized
  source 1..22: mol_type = other DNA
cataatataagacctaatgctt

SEQ ID NO: 93621 - DNA, 22 bp, synthetic construct
  misc_feature 1..22: note = chemically synthesized
  source 1..22: mol_type = other DNA
atgcttacctcaatatctactt

SEQ ID NO: 93622 - DNA, 22 bp, synthetic construct
  misc_feature 1..22: note = chemically synthesized
  source 1..22: mol_type = other DNA
acctcaatatctacttatccgt

SEQ ID NO: 93623 - DNA, 22 bp, synthetic construct
  misc_feature 1..22: note = chemically synthesized
  source 1..22: mol_type = other DNA
cctcaatatctacttatccgta

SEQ ID NO: 93624 - DNA, 22 bp, synthetic construct
  misc_feature 1..22: note = chemically synthesized
  source 1..22: mol_type = other DNA
aatatctacttatccgtaccta

SEQ ID NO: 93625 - DNA, 22 bp, synthetic construct
  misc_feature 1..22: note = chemically synthesized
  source 1..22: mol_type = other DNA
cttatccgtacctatttgaaat

SEQ ID NO: 93626 - DNA, 22 bp, synthetic construct
  misc_feature 1..22: note = chemically synthesized
  source 1..22: mol_type = other DNA
atccgtacctatttgaaataaa

SEQ ID NO: 93627 - DNA, 22 bp, synthetic construct
  misc_feature 1..22: note = chemically synthesized
  source 1..22: mol_type = other DNA
tccgtacctatttgaaataaat

SEQ ID NO: 93628 - DNA, 22 bp, synthetic construct
  misc_feature 1..22: note = chemically synthesized
  source 1..22: mol_type = other DNA
tttgaaataaatcatgactgtt

SEQ ID NO: 93629 - DNA, 22 bp, synthetic construct
  misc_feature 1..22: note = chemically synthesized
  source 1..22: mol_type = other DNA
gaaataaatcatgactgtttca

SEQ ID NO: 93630 - DNA, 22 bp, synthetic construct
  misc_feature 1..22: note = chemically synthesized
  source 1..22: mol_type = other DNA
aaataaatcatgactgtttcat

SEQ ID NO: 93631 - DNA, 22 bp, synthetic construct
  misc_feature 1..22: note = chemically synthesized
  source 1..22: mol_type = other DNA
tttcatcttagaaaaatatttg

SEQ ID NO: 93632 - DNA, 22 bp, synthetic construct
  misc_feature 1..22: note = chemically synthesized
  source 1..22: mol_type = other DNA
catcttagaaaaatatttgatt

SEQ ID NO: 93633 - DNA, 22 bp, synthetic construct
  misc_feature 1..22: note = chemically synthesized
  source 1..22: mol_type = other DNA
atcttagaaaaatatttgattc

SEQ ID NO: 93634 - DNA, 22 bp, synthetic construct
  misc_feature 1..22: note = chemically synthesized
  source 1..22: mol_type = other DNA
agaaaaatatttgattccatat

SEQ ID NO: 93635 - DNA, 22 bp, synthetic construct
  misc_feature 1..22: note = chemically synthesized
  source 1..22: mol_type = other DNA
gaaaaatatttgattccatatt

SEQ ID NO: 93636 - DNA, 22 bp, synthetic construct
  misc_feature 1..22: note = chemically synthesized
  source 1..22: mol_type = other DNA
gattccatattcaggtatgtat

SEQ ID NO: 93637 - DNA, 22 bp, synthetic construct
  misc_feature 1..22: note = chemically synthesized
  source 1..22: mol_type = other DNA
attccatattcaggtatgtatg

SEQ ID NO: 93638 - DNA, 22 bp, synthetic construct
  misc_feature 1..22: note = chemically synthesized
  source 1..22: mol_type = other DNA
catattcaggtatgtatgtata

SEQ ID NO: 93639 - DNA, 22 bp, synthetic construct
  misc_feature 1..22: note = chemically synthesized
  source 1..22: mol_type = other DNA
aggtatgtatgtatacaccaga

SEQ ID NO: 93640 - DNA, 22 bp, synthetic construct
  misc_feature 1..22: note = chemically synthesized
  source 1..22: mol_type = other DNA
accactggataagtgtgtgtgc

SEQ ID NO: 93641 - DNA, 22 bp, synthetic construct
  misc_feature 1..22: note = chemically synthesized
  source 1..22: mol_type = other DNA
ccactggataagtgtgtgtgct

SEQ ID NO: 93642 - DNA, 22 bp, synthetic construct
  misc_feature 1..22: note = chemically synthesized
  source 1..22: mol_type = other DNA
gataagtgtgtgtgctggctga

SEQ ID NO: 93643 - DNA, 22 bp, synthetic construct
  misc_feature 1..22: note = chemically synthesized
  source 1..22: mol_type = other DNA
gctgatgacccagggttttggc

SEQ ID NO: 93644 - DNA, 22 bp, synthetic construct
  misc_feature 1..22: note = chemically synthesized
  source 1..22: mol_type = other DNA
atgacccagggttttggcgtag

SEQ ID NO: 93645 - DNA, 22 bp, synthetic construct
  misc_feature 1..22: note = chemically synthesized
  source 1..22: mol_type = other DNA
tggcgtagctcttctatgctca

SEQ ID NO: 93646 - DNA, 22 bp, synthetic construct
  misc_feature 1..22: note = chemically synthesized
  source 1..22: mol_type = other DNA
ggcgtagctcttctatgctcag

SEQ ID NO: 93647 - DNA, 22 bp, synthetic construct
  misc_feature 1..22: note = chemically synthesized
  source 1..22: mol_type = other DNA
gcgtagctcttctatgctcagt

SEQ ID NO: 93648 - DNA, 22 bp, synthetic construct
  misc_feature 1..22: note = chemically synthesized
  source 1..22: mol_type = other DNA
ttctatgctcagtaaagatgat

SEQ ID NO: 93649 - DNA, 22 bp, synthetic construct
  misc_feature 1..22: note = chemically synthesized
  source 1..22: mol_type = other DNA
ctatgctcagtaaagatgatgg

SEQ ID NO: 93650 - DNA, 22 bp, synthetic construct
  misc_feature 1..22: note = chemically synthesized
  source 1..22: mol_type = other DNA
tatgctcagtaaagatgatggt

SEQ ID NO: 93651 - DNA, 22 bp, synthetic construct
  misc_feature 1..22: note = chemically synthesized
  source 1..22: mol_type = other DNA
tgctcagtaaagatgatggtag

SEQ ID NO: 93652 - DNA, 22 bp, synthetic construct
  misc_feature 1..22: note = chemically synthesized
  source 1..22: mol_type = other DNA
agtaaagatgatggtagaatgt

SEQ ID NO: 93653 - DNA, 22 bp, synthetic construct
  misc_feature 1..22: note = chemically synthesized
  source 1..22: mol_type = other DNA
tttggcaggtactgtggattag

SEQ ID NO: 93654 - DNA, 22 bp, synthetic construct
  misc_feature 1..22: note = chemically synthesized
  source 1..22: mol_type = other DNA
tggcaggtactgtggattagaa

SEQ ID NO: 93655 - DNA, 22 bp, synthetic construct
  misc_feature 1..22: note = chemically synthesized
  source 1..22: mol_type = other DNA
ggcaggtactgtggattagaat

SEQ ID NO: 93656 - DNA, 22 bp, synthetic construct
  misc_feature 1..22: note = chemically synthesized
  source 1..22: mol_type = other DNA
gcaggtactgtggattagaatt

SEQ ID NO: 93657 - DNA, 22 bp, synthetic construct
  misc_feature 1..22: note = chemically synthesized
  source 1..22: mol_type = other DNA
tggattagaattaattatcttg

SEQ ID NO: 93658 - DNA, 22 bp, synthetic construct
  misc_feature 1..22: note = chemically synthesized
  source 1..22: mol_type = other DNA
gaattaattatcttgtataaat

SEQ ID NO: 93659 - DNA, 22 bp, synthetic construct
  misc_feature 1..22: note = chemically synthesized
  source 1..22: mol_type = other DNA
attatcttgtataaatgctagg

SEQ ID NO: 93660 - DNA, 22 bp, synthetic construct
  misc_feature 1..22: note = chemically synthesized
  source 1..22: mol_type = other DNA
tcttgtataaatgctaggttca

SEQ ID NO: 93661 - DNA, 22 bp, synthetic construct
  misc_feature 1..22: note = chemically synthesized
  source 1..22: mol_type = other DNA
gtataaatgctaggttcacttc

SEQ ID NO: 93662 - DNA, 22 bp, synthetic construct
  misc_feature 1..22: note = chemically synthesized
  source 1..22: mol_type = other DNA
tataaatgctaggttcacttct

SEQ ID NO: 93663 - DNA, 22 bp, synthetic construct
  misc_feature 1..22: note = chemically synthesized
  source 1..22: mol_type = other DNA
ggttcacttctcagggaatctt

SEQ ID NO: 93664 - DNA, 22 bp, synthetic construct
  misc_feature 1..22: note = chemically synthesized
  source 1..22: mol_type = other DNA
acttctcagggaatcttactct

SEQ ID NO: 93665 - DNA, 22 bp, synthetic construct
  misc_feature 1..22: note = chemically synthesized
  source 1..22: mol_type = other DNA
ctcagggaatcttactctaaga

SEQ ID NO: 93666 - DNA, 22 bp, synthetic construct
  misc_feature 1..22: note = chemically synthesized
  source 1..22: mol_type = other DNA
tcagggaatcttactctaagac

SEQ ID NO: 93667 - DNA, 22 bp, synthetic construct
  misc_feature 1..22: note = chemically synthesized
  source 1..22: mol_type = other DNA
agggaatcttactctaagacat

SEQ ID NO: 93668 - DNA, 22 bp, synthetic construct
  misc_feature 1..22: note = chemically synthesized
  source 1..22: mol_type = other DNA
actctaagacataagatgtgcg

SEQ ID NO: 93669 - DNA, 22 bp, synthetic construct
  misc_feature 1..22: note = chemically synthesized
  source 1..22: mol_type = other DNA
ctctaagacataagatgtgcgt

SEQ ID NO: 93670 - DNA, 22 bp, synthetic construct
  misc_feature 1..22: note = chemically synthesized
  source 1..22: mol_type = other DNA
taagacataagatgtgcgtgta

SEQ ID NO: 93671 - DNA, 22 bp, synthetic construct
  misc_feature 1..22: note = chemically synthesized
  source 1..22: mol_type = other DNA
agacataagatgtgcgtgtaca

SEQ ID NO: 93672 - DNA, 22 bp, synthetic construct
  misc_feature 1..22: note = chemically synthesized
  source 1..22: mol_type = other DNA
taaagaggcaagggttgttttt

SEQ ID NO: 93673 - DNA, 22 bp, synthetic construct
  misc_feature 1..22: note = chemically synthesized
  source 1..22: mol_type = other DNA
aagaggcaagggttgtttttat

SEQ ID NO: 93674 - DNA, 22 bp, synthetic construct
  misc_feature 1..22: note = chemically synthesized
  source 1..22: mol_type = other DNA
tttttattgactaatagtccac

SEQ ID NO: 93675 - DNA, 22 bp, synthetic construct
  misc_feature 1..22: note = chemically synthesized
  source 1..22: mol_type = other DNA
ttattgactaatagtccacaca

SEQ ID NO: 93676 - DNA, 22 bp, synthetic construct
  misc_feature 1..22: note = chemically synthesized
  source 1..22: mol_type = other DNA
tattgactaatagtccacacac

SEQ ID NO: 93677 - DNA, 22 bp, synthetic construct
  misc_feature 1..22: note = chemically synthesized
  source 1..22: mol_type = other DNA
attgactaatagtccacacact

SEQ ID NO: 93678 - DNA, 22 bp, synthetic construct
  misc_feature 1..22: note = chemically synthesized
  source 1..22: mol_type = other DNA
ttgactaatagtccacacacta

SEQ ID NO: 93679 - DNA, 22 bp, synthetic construct
  misc_feature 1..22: note = chemically synthesized
  source 1..22: mol_type = other DNA
actaatagtccacacactatta

SEQ ID NO: 93680 - DNA, 22 bp, synthetic construct
  misc_feature 1..22: note = chemically synthesized
  source 1..22: mol_type = other DNA
atagtccacacactattataac

SEQ ID NO: 93681 - DNA, 22 bp, synthetic construct
  misc_feature 1..22: note = chemically synthesized
  source 1..22: mol_type = other DNA
ttataactcgaatattagtgta

SEQ ID NO: 93682 - DNA, 22 bp, synthetic construct
  misc_feature 1..22: note = chemically synthesized
  source 1..22: mol_type = other DNA
taactcgaatattagtgtactt

SEQ ID NO: 93683 - DNA, 22 bp, synthetic construct
  misc_feature 1..22: note = chemically synthesized
  source 1..22: mol_type = other DNA
gaatattagtgtactttagaca

SEQ ID NO: 93684 - DNA, 22 bp, synthetic construct
  misc_feature 1..22: note = chemically synthesized
  source 1..22: mol_type = other DNA
gtgtactttagacagctttatt

SEQ ID NO: 93685 - DNA, 22 bp, synthetic construct
  misc_feature 1..22: note = chemically synthesized
  source 1..22: mol_type = other DNA
tagacagctttatttctaacac

SEQ ID NO: 93686 - DNA, 22 bp, synthetic construct
  misc_feature 1..22: note = chemically synthesized
  source 1..22: mol_type = other DNA
agacagctttatttctaacaca

SEQ ID NO: 93687 - DNA, 22 bp, synthetic construct
  misc_feature 1..22: note = chemically synthesized
  source 1..22: mol_type = other DNA
gacagctttatttctaacacag

SEQ ID NO: 93688 - DNA, 22 bp, synthetic construct
  misc_feature 1..22: note = chemically synthesized
  source 1..22: mol_type = other DNA
tatttctaacacagtgctgttt

SEQ ID NO: 93689 - DNA, 22 bp, synthetic construct
  misc_feature 1..22: note = chemically synthesized
  source 1..22: mol_type = other DNA
atttctaacacagtgctgtttc

SEQ ID NO: 93690 - DNA, 22 bp, synthetic construct
  misc_feature 1..22: note = chemically synthesized
  source 1..22: mol_type = other DNA
tttctaacacagtgctgtttct

SEQ ID NO: 93691 - DNA, 22 bp, synthetic construct
  misc_feature 1..22: note = chemically synthesized
  source 1..22: mol_type = other DNA
ctaacacagtgctgtttctgac

SEQ ID NO: 93692 - DNA, 22 bp, synthetic construct
  misc_feature 1..22: note = chemically synthesized
  source 1..22: mol_type = other DNA
taacacagtgctgtttctgaca

SEQ ID NO: 93693 - DNA, 22 bp, synthetic construct
  misc_feature 1..22: note = chemically synthesized
  source 1..22: mol_type = other DNA
acacagtgctgtttctgacata

SEQ ID NO: 93694 - DNA, 22 bp, synthetic construct
  misc_feature 1..22: note = chemically synthesized
  source 1..22: mol_type = other DNA
tttctgacatattggaccatta

SEQ ID NO: 93695 - DNA, 22 bp, synthetic construct
  misc_feature 1..22: note = chemically synthesized
  source 1..22: mol_type = other DNA
ctgacatattggaccattaaca

SEQ ID NO: 93696 - DNA, 22 bp, synthetic construct
  misc_feature 1..22: note = chemically synthesized
  source 1..22: mol_type = other DNA
tgacatattggaccattaacag

SEQ ID NO: 93697 - DNA, 22 bp, synthetic construct
  misc_feature 1..22: note = chemically synthesized
  source 1..22: mol_type = other DNA
acatattggaccattaacaggg

SEQ ID NO: 93698 - DNA, 22 bp, synthetic construct
  misc_feature 1..22: note = chemically synthesized
  source 1..22: mol_type = other DNA
gaccattaacagggtaggaagt

SEQ ID NO: 93699 - DNA, 22 bp, synthetic construct
  misc_feature 1..22: note = chemically synthesized
  source 1..22: mol_type = other DNA
acagggtaggaagtatttatgg

SEQ ID NO: 93700 - DNA, 22 bp, synthetic construct
  misc_feature 1..22: note = chemically synthesized
  source 1..22: mol_type = other DNA
atggtggttttttggttctgtt

SEQ ID NO: 93701 - DNA, 22 bp, synthetic construct
  misc_feature 1..22: note = chemically synthesized
  source 1..22: mol_type = other DNA
tggtggttttttggttctgttt

SEQ ID NO: 93702 - DNA, 22 bp, synthetic construct
  misc_feature 1..22: note = chemically synthesized
  source 1..22: mol_type = other DNA
tttggttctgttttgcttttgg

SEQ ID NO: 93703 - DNA, 22 bp, synthetic construct
  misc_feature 1..22: note = chemically synthesized
  source 1..22: mol_type = other DNA
ttggttctgttttgcttttggt

SEQ ID NO: 93704 - DNA, 22 bp, synthetic construct
  misc_feature 1..22: note = chemically synthesized
  source 1..22: mol_type = other DNA
tggttctgttttgcttttggtt

SEQ ID NO: 93705 - DNA, 22 bp, synthetic construct
  misc_feature 1..22: note = chemically synthesized
  source 1..22: mol_type = other DNA
ggttctgttttgcttttggtta

SEQ ID NO: 93706 - DNA, 22 bp, synthetic construct
  misc_feature 1..22: note = chemically synthesized
  source 1..22: mol_type = other DNA
gttctgttttgcttttggttag

SEQ ID NO: 93707 - DNA, 22 bp, synthetic construct
  misc_feature 1..22: note = chemically synthesized
  source 1..22: mol_type = other DNA
tgttttgcttttggttagtttg

SEQ ID NO: 93708 - DNA, 22 bp, synthetic construct
  misc_feature 1..22: note = chemically synthesized
  source 1..22: mol_type = other DNA
ttttgcttttggttagtttgtt

SEQ ID NO: 93709 - DNA, 22 bp, synthetic construct
  misc_feature 1..22: note = chemically synthesized
  source 1..22: mol_type = other DNA
tgcttttggttagtttgttttt

SEQ ID NO: 93710 - DNA, 22 bp, synthetic construct
  misc_feature 1..22: note = chemically synthesized
  source 1..22: mol_type = other DNA
gcttttggttagtttgtttttg

SEQ ID NO: 93711 - DNA, 22 bp, synthetic construct
  misc_feature 1..22: note = chemically synthesized
  source 1..22: mol_type = other DNA
cttttggttagtttgtttttgt

SEQ ID NO: 93712 - DNA, 22 bp, synthetic construct
  misc_feature 1..22: note = chemically synthesized
  source 1..22: mol_type = other DNA
ttggttagtttgtttttgtttt

SEQ ID NO: 93713 - DNA, 22 bp, synthetic construct
  misc_feature 1..22: note = chemically synthesized
  source 1..22: mol_type = other DNA
tggttagtttgtttttgttttt

SEQ ID NO: 93714 - DNA, 22 bp, synthetic construct
  misc_feature 1..22: note = chemically synthesized
  source 1..22: mol_type = other DNA
ggttagtttgtttttgtttttc

SEQ ID NO: 93715 - DNA, 22 bp, synthetic construct
  misc_feature 1..22: note = chemically synthesized
  source 1..22: mol_type = other DNA
gttagtttgtttttgtttttct

SEQ ID NO: 93716 - DNA, 22 bp, synthetic construct
  misc_feature 1..22: note = chemically synthesized
  source 1..22: mol_type = other DNA
gtttgtttttgtttttctctga

SEQ ID NO: 93717 - DNA, 22 bp, synthetic construct
  misc_feature 1..22: note = chemically synthesized
  source 1..22: mol_type = other DNA
gtttttgtttttctctgaaagt

SEQ ID NO: 93718 - DNA, 22 bp, synthetic construct
  misc_feature 1..22: note = chemically synthesized
  source 1..22: mol_type = other DNA
tttttgtttttctctgaaagtg

SEQ ID NO: 93719 - DNA, 22 bp, synthetic construct
  misc_feature 1..22: note = chemically synthesized
  source 1..22: mol_type = other DNA
ttgtttttctctgaaagtgatc

SEQ ID NO: 93720 - DNA, 22 bp, synthetic construct
  misc_feature 1..22: note = chemically synthesized
  source 1..22: mol_type = other DNA
tgtttttctctgaaagtgatcc

SEQ ID NO: 93721 - DNA, 22 bp, synthetic construct
  misc_feature 1..22: note = chemically synthesized
  source 1..22: mol_type = other DNA
gtttttctctgaaagtgatcca

SEQ ID NO: 93722 - DNA, 22 bp, synthetic construct
  misc_feature 1..22: note = chemically synthesized
  source 1..22: mol_type = other DNA
tttttctctgaaagtgatccat

SEQ ID NO: 93723 - DNA, 22 bp, synthetic construct
  misc_feature 1..22: note = chemically synthesized
  source 1..22: mol_type = other DNA
ttctctgaaagtgatccatgat

SEQ ID NO: 93724 - DNA, 22 bp, synthetic construct
  misc_feature 1..22: note = chemically synthesized
  source 1..22: mol_type = other DNA
tctctgaaagtgatccatgatc

SEQ ID NO: 93725 - DNA, 22 bp, synthetic construct
  misc_feature 1..22: note = chemically synthesized
  source 1..22: mol_type = other DNA
ctctgaaagtgatccatgatct

SEQ ID NO: 93726 - DNA, 22 bp, synthetic construct
  misc_feature 1..22: note = chemically synthesized
  source 1..22: mol_type = other DNA
tctgaaagtgatccatgatctc

SEQ ID NO: 93727 - DNA, 22 bp, synthetic construct
  misc_feature 1..22: note = chemically synthesized
  source 1..22: mol_type = other DNA
tgaaagtgatccatgatctcta

SEQ ID NO: 93728 - DNA, 22 bp, synthetic construct
  misc_feature 1..22: note = chemically synthesized
  source 1..22: mol_type = other DNA
aaagtgatccatgatctctaac

SEQ ID NO: 93729 - DNA, 22 bp, synthetic construct
  misc_feature 1..22: note = chemically synthesized
  source 1..22: mol_type = other DNA
taaccttgctagattataatgc

SEQ ID NO: 93730 - DNA, 22 bp, synthetic construct
  misc_feature 1..22: note = chemically synthesized
  source 1..22: mol_type = other DNA
accttgctagattataatgcca

SEQ ID NO: 93731 - DNA, 22 bp, synthetic construct
  misc_feature 1..22: note = chemically synthesized
  source 1..22: mol_type = other DNA
gctagattataatgccagaagc

SEQ ID NO: 93732 - DNA, 22 bp, synthetic construct
  misc_feature 1..22: note = chemically synthesized
  source 1..22: mol_type = other DNA
ctagattataatgccagaagct

SEQ ID NO: 93733 - DNA, 22 bp, synthetic construct
  misc_feature 1..22: note = chemically synthesized
  source 1..22: mol_type = other DNA
gattataatgccagaagctctg

SEQ ID NO: 93734 - DNA, 22 bp, synthetic construct
  misc_feature 1..22: note = chemically synthesized
  source 1..22: mol_type = other DNA
taatgccagaagctctggaatt

SEQ ID NO: 93735 - DNA, 22 bp, synthetic construct
  misc_feature 1..22: note = chemically synthesized
  source 1..22: mol_type = other DNA
tggaattctggcttatcggagg

SEQ ID NO: 93736 - DNA, 22 bp, synthetic construct
  misc_feature 1..22: note = chemically synthesized
  source 1..22: mol_type = other DNA
gaattctggcttatcggaggca

SEQ ID NO: 93737 - DNA, 22 bp, synthetic construct
  misc_feature 1..22: note = chemically synthesized
  source 1..22: mol_type = other DNA
tggcttatcggaggcaagctgt

SEQ ID NO: 93738 - DNA, 22 bp, synthetic construct
  misc_feature 1..22: note = chemically synthesized
  source 1..22: mol_type = other DNA
gcttatcggaggcaagctgtat

SEQ ID NO: 93739 - DNA, 22 bp, synthetic construct
  misc_feature 1..22: note = chemically synthesized
  source 1..22: mol_type = other DNA
atcggaggcaagctgtatcttc

SEQ ID NO: 93740 - DNA, 22 bp, synthetic construct
  misc_feature 1..22: note = chemically synthesized
  source 1..22: mol_type = other DNA
tcggaggcaagctgtatcttca

SEQ ID NO: 93741 - DNA, 22 bp, synthetic construct
  misc_feature 1..22: note = chemically synthesized
  source 1..22: mol_type = other DNA
tatcttcaaattagtttatccc

SEQ ID NO: 93742 - DNA, 22 bp, synthetic construct
  misc_feature 1..22: note = chemically synthesized
  source 1..22: mol_type = other DNA
caaattagtttatcccctaagc

SEQ ID NO: 93743 - DNA, 22 bp, synthetic construct
  misc_feature 1..22: note = chemically synthesized
  source 1..22: mol_type = other DNA
aaattagtttatcccctaagct

SEQ ID NO: 93744 - DNA, 22 bp, synthetic construct
  misc_feature 1..22: note = chemically synthesized
  source 1..22: mol_type = other DNA
gtttatcccctaagctatcagg

SEQ ID NO: 93745 - DNA, 22 bp, synthetic construct
  misc_feature 1..22: note = chemically synthesized
  source 1..22: mol_type = other DNA
atcccctaagctatcaggttga

SEQ ID NO: 93746 - DNA, 22 bp, synthetic construct
  misc_feature 1..22: note = chemically synthesized
  source 1..22: mol_type = other DNA
tcccctaagctatcaggttgat

SEQ ID NO: 93747 - DNA, 22 bp, synthetic construct
  misc_feature 1..22: note = chemically synthesized
  source 1..22: mol_type = other DNA
agctatcaggttgattgaaatt

SEQ ID NO: 93748 - DNA, 22 bp, synthetic construct
  misc_feature 1..22: note = chemically synthesized
  source 1..22: mol_type = other DNA
tcaggttgattgaaattattat

SEQ ID NO: 93749 - DNA, 22 bp, synthetic construct
  misc_feature 1..22: note = chemically synthesized
  source 1..22: mol_type = other DNA
attgaaattattataatattgg

SEQ ID NO: 93750 - DNA, 22 bp, synthetic construct
  misc_feature 1..22: note = chemically synthesized
  source 1..22: mol_type = other DNA
aaattattataatattggtgaa

SEQ ID NO: 93751 - DNA, 22 bp, synthetic construct
  misc_feature 1..22: note = chemically synthesized
  source 1..22: mol_type = other DNA
ttataatattggtgaaattctt

SEQ ID NO: 93752 - DNA, 22 bp, synthetic construct
  misc_feature 1..22: note = chemically synthesized
  source 1..22: mol_type = other DNA
taatattggtgaaattctttca

SEQ ID NO: 93753 - DNA, 22 bp, synthetic construct
  misc_feature 1..22: note = chemically synthesized
  source 1..22: mol_type = other DNA
gtgaaattctttcatccttcat

SEQ ID NO: 93754 - DNA, 22 bp, synthetic construct
  misc_feature 1..22: note = chemically synthesized
  source 1..22: mol_type = other DNA
tttcatccttcatgatcctgtg

SEQ ID NO: 93755 - DNA, 22 bp, synthetic construct
  misc_feature 1..22: note = chemically synthesized
  source 1..22: mol_type = other DNA
tcatccttcatgatcctgtgta

SEQ ID NO: 93756 - DNA, 22 bp, synthetic construct
  misc_feature 1..22: note = chemically synthesized
  source 1..22: mol_type = other DNA
catccttcatgatcctgtgtaa

SEQ ID NO: 93757 - DNA, 22 bp, synthetic construct
  misc_feature 1..22: note = chemically synthesized
  source 1..22: mol_type = other DNA
atccttcatgatcctgtgtaaa

SEQ ID NO: 93758 - DNA, 22 bp, synthetic construct
  misc_feature 1..22: note = chemically synthesized
  source 1..22: mol_type = other DNA
catgatcctgtgtaaagcttat

SEQ ID NO: 93759 - DNA, 22 bp, synthetic construct
  misc_feature 1..22: note = chemically synthesized
  source 1..22: mol_type = other DNA
atgatcctgtgtaaagcttata

SEQ ID NO: 93760 - DNA, 22 bp, synthetic construct
  misc_feature 1..22: note = chemically synthesized
  source 1..22: mol_type = other DNA
tgtaaagcttatatctgctcat

SEQ ID NO: 93761 - DNA, 22 bp, synthetic construct
  misc_feature 1..22: note = chemically synthesized
  source 1..22: mol_type = other DNA
atatctgctcattgatacagat

SEQ ID NO: 93762 - DNA, 22 bp, synthetic construct
  misc_feature 1..22: note = chemically synthesized
  source 1..22: mol_type = other DNA
tatctgctcattgatacagatg

SEQ ID NO: 93763 - DNA, 22 bp, synthetic construct
  misc_feature 1..22: note = chemically synthesized
  source 1..22: mol_type = other DNA
ctcattgatacagatggctaaa

SEQ ID NO: 93764 - DNA, 22 bp, synthetic construct
  misc_feature 1..22: note = chemically synthesized
  source 1..22: mol_type = other DNA
attgatacagatggctaaaagg

SEQ ID NO: 93765 - DNA, 22 bp, synthetic construct
  misc_feature 1..22: note = chemically synthesized
  source 1..22: mol_type = other DNA
atacagatggctaaaaggccag

SEQ ID NO: 93766 - DNA, 22 bp, synthetic construct
  misc_feature 1..22: note = chemically synthesized
  source 1..22: mol_type = other DNA
aaaggccagaaagacacacatt

SEQ ID NO: 93767 - DNA, 22 bp, synthetic construct
  misc_feature 1..22: note = chemically synthesized
  source 1..22: mol_type = other DNA
acccatgtaacaagcctgcaca

SEQ ID NO: 93768 - DNA, 22 bp, synthetic construct
  misc_feature 1..22: note = chemically synthesized
  source 1..22: mol_type = other DNA
cccatgtaacaagcctgcacat

SEQ ID NO: 93769 - DNA, 22 bp, synthetic construct
  misc_feature 1..22: note = chemically synthesized
  source 1..22: mol_type = other DNA
cacatcctgcacatgtaccttc

SEQ ID NO: 93770 - DNA, 22 bp, synthetic construct
  misc_feature 1..22: note = chemically synthesized
  source 1..22: mol_type = other DNA
cacatgtaccttcgaaattaaa

SEQ ID NO: 93771 - DNA, 22 bp, synthetic construct
  misc_feature 1..22: note = chemically synthesized
  source 1..22: mol_type = other DNA
cgaaattaaaatgaaatgaaat

SEQ ID NO: 93772 - DNA, 22 bp, synthetic construct
  misc_feature 1..22: note = chemically synthesized
  source 1..22: mol_type = other DNA
gaaattaaaatgaaatgaaata

SEQ ID NO: 93773 - DNA, 22 bp, synthetic construct
  misc_feature 1..22: note = chemically synthesized
  source 1..22: mol_type = other DNA
aaatgaaatgaaataaaattaa

SEQ ID NO: 93774 - DNA, 22 bp, synthetic construct
  misc_feature 1..22: note = chemically synthesized
  source 1..22: mol_type = other DNA
aaaggaaaaaaatgccatggca

SEQ ID NO: 93775 - DNA, 22 bp, synthetic construct
  misc_feature 1..22: note = chemically synthesized
  source 1..22: mol_type = other DNA
tcttttatggtctaaaaatggg

SEQ ID NO: 93776 - DNA, 22 bp, synthetic construct
  misc_feature 1..22: note = chemically synthesized
  source 1..22: mol_type = other DNA
ttatggtctaaaaatgggcagc

SEQ ID NO: 93777 - DNA, 22 bp, synthetic construct
  misc_feature 1..22: note = chemically synthesized
  source 1..22: mol_type = other DNA
tatggtctaaaaatgggcagca

SEQ ID NO: 93778 - DNA, 22 bp, synthetic construct
  misc_feature 1..22: note = chemically synthesized
  source 1..22: mol_type = other DNA
atggtctaaaaatgggcagcat

SEQ ID NO: 93779 - DNA, 22 bp, synthetic construct
  misc_feature 1..22: note = chemically synthesized
  source 1..22: mol_type = other DNA
tggtctaaaaatgggcagcata

SEQ ID NO: 93780 - DNA, 22 bp, synthetic construct
  misc_feature 1..22: note = chemically synthesized
  source 1..22: mol_type = other DNA
aaaatgggcagcataaataatc

SEQ ID NO: 93781 - DNA, 22 bp, synthetic construct
  misc_feature 1..22: note = chemically synthesized
  source 1..22: mol_type = other DNA
ccccttgtttagcatactattg

SEQ ID NO: 93782 - DNA, 22 bp, synthetic construct
  misc_feature 1..22: note = chemically synthesized
  source 1..22: mol_type = other DNA
gtttagcatactattgaaaaat

SEQ ID NO: 93783 - DNA, 22 bp, synthetic construct
  misc_feature 1..22: note = chemically synthesized
  source 1..22: mol_type = other DNA
tttagcatactattgaaaaata

SEQ ID NO: 93784 - DNA, 22 bp, synthetic construct
  misc_feature 1..22: note = chemically synthesized
  source 1..22: mol_type = other DNA
agcatactattgaaaaataaca

SEQ ID NO: 93785 - DNA, 22 bp, synthetic construct
  misc_feature 1..22: note = chemically synthesized
  source 1..22: mol_type = other DNA
gcatactattgaaaaataacaa

SEQ ID NO: 93786 - DNA, 22 bp, synthetic construct
  misc_feature 1..22: note = chemically synthesized
  source 1..22: mol_type = other DNA
ttgaaaaataacaataaaaatc

SEQ ID NO: 93787 - DNA, 22 bp, synthetic construct
  misc_feature 1..22: note = chemically synthesized
  source 1..22: mol_type = other DNA
aaaaataacaataaaaatcggc

SEQ ID NO: 93788 - DNA, 22 bp, synthetic construct
  misc_feature 1..22: note = chemically synthesized
  source 1..22: mol_type = other DNA
gcgtctactctgcctatgaagt

SEQ ID NO: 93789 - DNA, 22 bp, synthetic construct
  misc_feature 1..22: note = chemically synthesized
  source 1..22: mol_type = other DNA
cgtctactctgcctatgaagta

SEQ ID NO: 93790 - DNA, 22 bp, synthetic construct
  misc_feature 1..22: note = chemically synthesized
  source 1..22: mol_type = other DNA
ctctgcctatgaagtagccatt

SEQ ID NO: 93791 - DNA, 22 bp, synthetic construct
  misc_feature 1..22: note = chemically synthesized
  source 1..22: mol_type = other DNA
tgcctatgaagtagccattcat

SEQ ID NO: 93792 - DNA, 22 bp, synthetic construct
  misc_feature 1..22: note = chemically synthesized
  source 1..22: mol_type = other DNA
cctatgaagtagccattcattt

SEQ ID NO: 93793 - DNA, 22 bp, synthetic construct
  misc_feature 1..22: note = chemically synthesized
  source 1..22: mol_type = other DNA
tgaagtagccattcatttattc

SEQ ID NO: 93794 - DNA, 22 bp, synthetic construct
  misc_feature 1..22: note = chemically synthesized
  source 1..22: mol_type = other DNA
atttattccttcaattttttat

SEQ ID NO: 93795 - DNA, 22 bp, synthetic construct
  misc_feature 1..22: note = chemically synthesized
  source 1..22: mol_type = other DNA
attccttcaattttttataaac

SEQ ID NO: 93796 - DNA, 22 bp, synthetic construct
  misc_feature 1..22: note = chemically synthesized
  source 1..22: mol_type = other DNA
ttccttcaattttttataaact

SEQ ID NO: 93797 - DNA, 22 bp, synthetic construct
  misc_feature 1..22: note = chemically synthesized
  source 1..22: mol_type = other DNA
cttcaattttttataaacttgt

SEQ ID NO: 93798 - DNA, 22 bp, synthetic construct
  misc_feature 1..22: note = chemically synthesized
  source 1..22: mol_type = other DNA
caattttttataaacttgtttt

SEQ ID NO: 93799 - DNA, 22 bp, synthetic construct
  misc_feature 1..22: note = chemically synthesized
  source 1..22: mol_type = other DNA
aattttttataaacttgtttta

SEQ ID NO: 93800 - DNA, 22 bp, synthetic construct
  misc_feature 1..22: note = chemically synthesized
  source 1..22: mol_type = other DNA
tttataaacttgttttactaaa

SEQ ID NO: 93801 - DNA, 22 bp, synthetic construct
  misc_feature 1..22: note = chemically synthesized
  source 1..22: mol_type = other DNA
ttataaacttgttttactaaaa

SEQ ID NO: 93802 - DNA, 22 bp, synthetic construct
  misc_feature 1..22: note = chemically synthesized
  source 1..22: mol_type = other DNA
tataaacttgttttactaaaaa

SEQ ID NO: 93803 - DNA, 22 bp, synthetic construct
  misc_feature 1..22: note = chemically synthesized
  source 1..22: mol_type = other DNA
ataaacttgttttactaaaaaa

SEQ ID NO: 93804 - DNA, 22 bp, synthetic construct
  misc_feature 1..22: note = chemically synthesized
  source 1..22: mol_type = other DNA
taaacttgttttactaaaaaaa

SEQ ID NO: 93805 - DNA, 22 bp, synthetic construct
  misc_feature 1..22: note = chemically synthesized
  source 1..22: mol_type = other DNA
gttttactaaaaaaaaaaagga

SEQ ID NO: 93806 - DNA, 22 bp, synthetic construct
  misc_feature 1..22: note = chemically synthesized
  source 1..22: mol_type = other DNA
ttttactaaaaaaaaaaaggac

SEQ ID NO: 93807 - DNA, 22 bp, synthetic construct
  misc_feature 1..22: note = chemically synthesized
  source 1..22: mol_type = other DNA
tactaaaaaaaaaaaggacaaa

SEQ ID NO: 93808 - DNA, 22 bp, synthetic construct
  misc_feature 1..22: note = chemically synthesized
  source 1..22: mol_type = other DNA
actaaaaaaaaaaaggacaaag

SEQ ID NO: 93809 - DNA, 22 bp, synthetic construct
  misc_feature 1..22: note = chemically synthesized
  source 1..22: mol_type = other DNA
ctaaaaaaaaaaaggacaaaga

SEQ ID NO: 93810 - DNA, 22 bp, synthetic construct
  misc_feature 1..22: note = chemically synthesized
  source 1..22: mol_type = other DNA
aaaaaaaaaaggacaaagaaag

SEQ ID NO: 93811 - DNA, 22 bp, synthetic construct
  misc_feature 1..22: note = chemically synthesized
  source 1..22: mol_type = other DNA
tgaaatggtagtgagtgatggc

SEQ ID NO: 93812 - DNA, 22 bp, synthetic construct
  misc_feature 1..22: note = chemically synthesized
  source 1..22: mol_type = other DNA
gaagtgggtcctttatgatttg

SEQ ID NO: 93813 - DNA, 22 bp, synthetic construct
  misc_feature 1..22: note = chemically synthesized
  source 1..22: mol_type = other DNA
aagtgggtcctttatgatttga

SEQ ID NO: 93814 - DNA, 22 bp, synthetic construct
  misc_feature 1..22: note = chemically synthesized
  source 1..22: mol_type = other DNA
tatgatttgatggagccaggca

SEQ ID NO: 93815 - DNA, 22 bp, synthetic construct
  misc_feature 1..22: note = chemically synthesized
  source 1..22: mol_type = other DNA
atgatttgatggagccaggcag

SEQ ID NO: 93816 - DNA, 22 bp, synthetic construct
  misc_feature 1..22: note = chemically synthesized
  source 1..22: mol_type = other DNA
tgatttgatggagccaggcaga

SEQ ID NO: 93817 - DNA, 22 bp, synthetic construct
  misc_feature 1..22: note = chemically synthesized
  source 1..22: mol_type = other DNA
gatggagccaggcagaagacgt

SEQ ID NO: 93818 - DNA, 22 bp, synthetic construct
  misc_feature 1..22: note = chemically synthesized
  source 1..22: mol_type = other DNA
atggagccaggcagaagacgtt

SEQ ID NO: 93819 - DNA, 22 bp, synthetic construct
  misc_feature 1..22: note = chemically synthesized
  source 1..22: mol_type = other DNA
ggagaaagaagttcctgaaagt

SEQ ID NO: 93820 - DNA, 22 bp, synthetic construct
  misc_feature 1..22: note = chemically synthesized
  source 1..22: mol_type = other DNA
gagaaagaagttcctgaaagta

SEQ ID NO: 93821 - DNA, 22 bp, synthetic construct
  misc_feature 1..22: note = chemically synthesized
  source 1..22: mol_type = other DNA
ctgaaagtaggaagggcatgtg

SEQ ID NO: 93822 - DNA, 22 bp, synthetic construct
  misc_feature 1..22: note = chemically synthesized
  source 1..22: mol_type = other DNA
aaagtaggaagggcatgtggaa

SEQ ID NO: 93823 - DNA, 22 bp, synthetic construct
  misc_feature 1..22: note = chemically synthesized
  source 1..22: mol_type = other DNA
tgaggctgaggaaaaaaaagaa

SEQ ID NO: 93824 - DNA, 22 bp, synthetic construct
  misc_feature 1..22: note = chemically synthesized
  source 1..22: mol_type = other DNA
aggctgaggaaaaaaaagaaag

SEQ ID NO: 93825 - DNA, 22 bp, synthetic construct
  misc_feature 1..22: note = chemically synthesized
  source 1..22: mol_type = other DNA
aggaaaaaaaagaaagaaagaa

SEQ ID NO: 93826 - DNA, 22 bp, synthetic construct
  misc_feature 1..22: note = chemically synthesized
  source 1..22: mol_type = other DNA
gacatttcactgtatataaaca

SEQ ID NO: 93827 - DNA, 22 bp, synthetic construct
  misc_feature 1..22: note = chemically synthesized
  source 1..22: mol_type = other DNA
acatttcactgtatataaacac

SEQ ID NO: 93828 - DNA, 22 bp, synthetic construct
  misc_feature 1..22: note = chemically synthesized
  source 1..22: mol_type = other DNA
cactgtatataaacacattaca

SEQ ID NO: 93829 - DNA, 22 bp, synthetic construct
  misc_feature 1..22: note = chemically synthesized
  source 1..22: mol_type = other DNA
actgtatataaacacattacaa

SEQ ID NO: 93830 - DNA, 22 bp, synthetic construct
  misc_feature 1..22: note = chemically synthesized
  source 1..22: mol_type = other DNA
tatataaacacattacaagcct

SEQ ID NO: 93831 - DNA, 22 bp, synthetic construct
  misc_feature 1..22: note = chemically synthesized
  source 1..22: mol_type = other DNA
caagcctaaagtacgttgaaga

SEQ ID NO: 93832 - DNA, 22 bp, synthetic construct
  misc_feature 1..22: note = chemically synthesized
  source 1..22: mol_type = other DNA
aagtacgttgaagaaaaaatag

SEQ ID NO: 93833 - DNA, 22 bp, synthetic construct
  misc_feature 1..22: note = chemically synthesized
  source 1..22: mol_type = other DNA
aagaaaaaatagaattcaaagt

SEQ ID NO: 93834 - DNA, 22 bp, synthetic construct
  misc_feature 1..22: note = chemically synthesized
  source 1..22: mol_type = other DNA
aaagttagacagaagggctcag

SEQ ID NO: 93835 - DNA, 22 bp, synthetic construct
  misc_feature 1..22: note = chemically synthesized
  source 1..22: mol_type = other DNA
gacagaagggctcaggcttact

SEQ ID NO: 93836 - DNA, 22 bp, synthetic construct
  misc_feature 1..22: note = chemically synthesized
  source 1..22: mol_type = other DNA
aggcttactatttgcatcttac

SEQ ID NO: 93837 - DNA, 22 bp, synthetic construct
  misc_feature 1..22: note = chemically synthesized
  source 1..22: mol_type = other DNA
actatttgcatcttacagatga

SEQ ID NO: 93838 - DNA, 22 bp, synthetic construct
  misc_feature 1..22: note = chemically synthesized
  source 1..22: mol_type = other DNA
ctatttgcatcttacagatgag

SEQ ID NO: 93839 - DNA, 22 bp, synthetic construct
  misc_feature 1..22: note = chemically synthesized
  source 1..22: mol_type = other DNA
tttgcatcttacagatgagagt

SEQ ID NO: 93840 - DNA, 22 bp, synthetic construct
  misc_feature 1..22: note = chemically synthesized
  source 1..22: mol_type = other DNA
gcatcttacagatgagagtagt

SEQ ID NO: 93841 - DNA, 22 bp, synthetic construct
  misc_feature 1..22: note = chemically synthesized
  source 1..22: mol_type = other DNA
catcttacagatgagagtagta

SEQ ID NO: 93842 - DNA, 22 bp, synthetic construct
  misc_feature 1..22: note = chemically synthesized
  source 1..22: mol_type = other DNA
acagatgagagtagtagagttg

SEQ ID NO: 93843 - DNA, 22 bp, synthetic construct
  misc_feature 1..22: note = chemically synthesized
  source 1..22: mol_type = other DNA
cagatgagagtagtagagttgg

SEQ ID NO: 93844 - DNA, 22 bp, synthetic construct
  misc_feature 1..22: note = chemically synthesized
  source 1..22: mol_type = other DNA
gtattttattctgaaacacaga

SEQ ID NO: 93845 - DNA, 22 bp, synthetic construct
  misc_feature 1..22: note = chemically synthesized
  source 1..22: mol_type = other DNA
tattctgaaacacagaggacaa

SEQ ID NO: 93846 - DNA, 22 bp, synthetic construct
  misc_feature 1..22: note = chemically synthesized
  source 1..22: mol_type = other DNA
attctgaaacacagaggacaag

SEQ ID NO: 93847 - DNA, 22 bp, synthetic construct
  misc_feature 1..22: note = chemically synthesized
  source 1..22: mol_type = other DNA
ttctgaaacacagaggacaagt

SEQ ID NO: 93848 - DNA, 22 bp, synthetic construct
  misc_feature 1..22: note = chemically synthesized
  source 1..22: mol_type = other DNA
tgaaacacagaggacaagtgga

SEQ ID NO: 93849 - DNA, 22 bp, synthetic construct
  misc_feature 1..22: note = chemically synthesized
  source 1..22: mol_type = other DNA
aaacacagaggacaagtggaga

SEQ ID NO: 93850 - DNA, 22 bp, synthetic construct
  misc_feature 1..22: note = chemically synthesized
  source 1..22: mol_type = other DNA
gtaaacctgagataaacatggt

SEQ ID NO: 93851 - DNA, 22 bp, synthetic construct
  misc_feature 1..22: note = chemically synthesized
  source 1..22: mol_type = other DNA
taaacctgagataaacatggtt

SEQ ID NO: 93852 - DNA, 22 bp, synthetic construct
  misc_feature 1..22: note = chemically synthesized
  source 1..22: mol_type = other DNA
agataaacatggtttctaatcc

SEQ ID NO: 93853 - DNA, 22 bp, synthetic construct
  misc_feature 1..22: note = chemically synthesized
  source 1..22: mol_type = other DNA
ctaatccactgaacaccgaagc

SEQ ID NO: 93854 - DNA, 22 bp, synthetic construct
  misc_feature 1..22: note = chemically synthesized
  source 1..22: mol_type = other DNA
taatccactgaacaccgaagct

SEQ ID NO: 93855 - DNA, 22 bp, synthetic construct
  misc_feature 1..22: note = chemically synthesized
  source 1..22: mol_type = other DNA
atccactgaacaccgaagctta

SEQ ID NO: 93856 - DNA, 22 bp, synthetic construct
  misc_feature 1..22: note = chemically synthesized
  source 1..22: mol_type = other DNA
aacaccgaagcttatttttttc

SEQ ID NO: 93857 - DNA, 22 bp, synthetic construct
  misc_feature 1..22: note = chemically synthesized
  source 1..22: mol_type = other DNA
atttttttctctttcttcatct

SEQ ID NO: 93858 - DNA, 22 bp, synthetic construct
  misc_feature 1..22: note = chemically synthesized
  source 1..22: mol_type = other DNA
tttttttctctttcttcatctg

SEQ ID NO: 93859 - DNA, 22 bp, synthetic construct
  misc_feature 1..22: note = chemically synthesized
  source 1..22: mol_type = other DNA
ttttctctttcttcatctgcct

SEQ ID NO: 93860 - DNA, 22 bp, synthetic construct
  misc_feature 1..22: note = chemically synthesized
  source 1..22: mol_type = other DNA
tttctctttcttcatctgcctt

SEQ ID NO: 93861 - DNA, 22 bp, synthetic construct
  misc_feature 1..22: note = chemically synthesized
  source 1..22: mol_type = other DNA
ttctctttcttcatctgcctta

SEQ ID NO: 93862 - DNA, 22 bp, synthetic construct
  misc_feature 1..22: note = chemically synthesized
  source 1..22: mol_type = other DNA
tctctttcttcatctgccttac

SEQ ID NO: 93863 - DNA, 22 bp, synthetic construct
  misc_feature 1..22: note = chemically synthesized
  source 1..22: mol_type = other DNA
ctctttcttcatctgccttact

SEQ ID NO: 93864 - DNA, 22 bp, synthetic construct
  misc_feature 1..22: note = chemically synthesized
  source 1..22: mol_type = other DNA
tctttcttcatctgccttactt

SEQ ID NO: 93865 - DNA, 22 bp, synthetic construct
  misc_feature 1..22: note = chemically synthesized
  source 1..22: mol_type = other DNA
tttcttcatctgccttacttag

SEQ ID NO: 93866 - DNA, 22 bp, synthetic construct
  misc_feature 1..22: note = chemically synthesized
  source 1..22: mol_type = other DNA
tcttcatctgccttacttagtg

SEQ ID NO: 93867 - DNA, 22 bp, synthetic construct
  misc_feature 1..22: note = chemically synthesized
  source 1..22: mol_type = other DNA
cttcatctgccttacttagtgc

SEQ ID NO: 93868 - DNA, 22 bp, synthetic construct
  misc_feature 1..22: note = chemically synthesized
  source 1..22: mol_type = other DNA
ttcatctgccttacttagtgca

SEQ ID NO: 93869 - DNA, 22 bp, synthetic construct
  misc_feature 1..22: note = chemically synthesized
  source 1..22: mol_type = other DNA
catctgccttacttagtgcaag

SEQ ID NO: 93870 - DNA, 22 bp, synthetic construct
  misc_feature 1..22: note = chemically synthesized
  source 1..22: mol_type = other DNA
atctgccttacttagtgcaagg

SEQ ID NO: 93871 - DNA, 22 bp, synthetic construct
  misc_feature 1..22: note = chemically synthesized
  source 1..22: mol_type = other DNA
ccttacttagtgcaaggtgcta

SEQ ID NO: 93872 - DNA, 22 bp, synthetic construct
  misc_feature 1..22: note = chemically synthesized
  source 1..22: mol_type = other DNA
acttagtgcaaggtgctataac

SEQ ID NO: 93873 - DNA, 22 bp, synthetic construct
  misc_feature 1..22: note = chemically synthesized
  source 1..22: mol_type = other DNA
cttagtgcaaggtgctataaca

SEQ ID NO: 93874 - DNA, 22 bp, synthetic construct
  misc_feature 1..22: note = chemically synthesized
  source 1..22: mol_type = other DNA
agtgcaaggtgctataacaaaa

SEQ ID NO: 93875 - DNA, 22 bp, synthetic construct
  misc_feature 1..22: note = chemically synthesized
  source 1..22: mol_type = other DNA
gtgcaaggtgctataacaaaat

SEQ ID NO: 93876 - DNA, 22 bp, synthetic construct
  misc_feature 1..22: note = chemically synthesized
  source 1..22: mol_type = other DNA
taacaaaatagcatagactggg

SEQ ID NO: 93877 - DNA, 22 bp, synthetic construct
  misc_feature 1..22: note = chemically synthesized
  source 1..22: mol_type = other DNA
ggtgacttcaacaacaggattt

SEQ ID NO: 93878 - DNA, 22 bp, synthetic construct
  misc_feature 1..22: note = chemically synthesized
  source 1..22: mol_type = other DNA
caacaacaggattttttctcac

SEQ ID NO: 93879 - DNA, 22 bp, synthetic construct
  misc_feature 1..22: note = chemically synthesized
  source 1..22: mol_type = other DNA
aacaacaggattttttctcact

SEQ ID NO: 93880 - DNA, 22 bp, synthetic construct
  misc_feature 1..22: note = chemically synthesized
  source 1..22: mol_type = other DNA
tttctcacttttctgctggttc

SEQ ID NO: 93881 - DNA, 22 bp, synthetic construct
  misc_feature 1..22: note = chemically synthesized
  source 1..22: mol_type = other DNA
ttctcacttttctgctggttcc

SEQ ID NO: 93882 - DNA, 22 bp, synthetic construct
  misc_feature 1..22: note = chemically synthesized
  source 1..22: mol_type = other DNA
tctcacttttctgctggttcct

SEQ ID NO: 93883 - DNA, 22 bp, synthetic construct
  misc_feature 1..22: note = chemically synthesized
  source 1..22: mol_type = other DNA
ctcacttttctgctggttcctg

SEQ ID NO: 93884 - DNA, 22 bp, synthetic construct
  misc_feature 1..22: note = chemically synthesized
  source 1..22: mol_type = other DNA
tcacttttctgctggttcctgg

SEQ ID NO: 93885 - DNA, 22 bp, synthetic construct
  misc_feature 1..22: note = chemically synthesized
  source 1..22: mol_type = other DNA
acttttctgctggttcctggtc

SEQ ID NO: 93886 - DNA, 22 bp, synthetic construct
  misc_feature 1..22: note = chemically synthesized
  source 1..22: mol_type = other DNA
ttctgctggttcctggtcaggg

SEQ ID NO: 93887 - DNA, 22 bp, synthetic construct
  misc_feature 1..22: note = chemically synthesized
  source 1..22: mol_type = other DNA
tctgctggttcctggtcagggc

SEQ ID NO: 93888 - DNA, 22 bp, synthetic construct
  misc_feature 1..22: note = chemically synthesized
  source 1..22: mol_type = other DNA
ctgctggttcctggtcagggct

SEQ ID NO: 93889 - DNA, 22 bp, synthetic construct
  misc_feature 1..22: note = chemically synthesized
  source 1..22: mol_type = other DNA
tgctggttcctggtcagggctc

SEQ ID NO: 93890 - DNA, 22 bp, synthetic construct
  misc_feature 1..22: note = chemically synthesized
  source 1..22: mol_type = other DNA
ctggttcctggtcagggctctc

SEQ ID NO: 93891 - DNA, 22 bp, synthetic construct
  misc_feature 1..22: note = chemically synthesized
  source 1..22: mol_type = other DNA
gttcctggtcagggctctcttc

SEQ ID NO: 93892 - DNA, 22 bp, synthetic construct
  misc_feature 1..22: note = chemically synthesized
  source 1..22: mol_type = other DNA
ctggtcagggctctcttcctgg

SEQ ID NO: 93893 - DNA, 22 bp, synthetic construct
  misc_feature 1..22: note = chemically synthesized
  source 1..22: mol_type = other DNA
gtcagggctctcttcctgggtt

SEQ ID NO: 93894 - DNA, 22 bp, synthetic construct
  misc_feature 1..22: note = chemically synthesized
  source 1..22: mol_type = other DNA
tcttcctgggttgcaggtggct

SEQ ID NO: 93895 - DNA, 22 bp, synthetic construct
  misc_feature 1..22: note = chemically synthesized
  source 1..22: mol_type = other DNA
ttcctgggttgcaggtggctga

SEQ ID NO: 93896 - DNA, 22 bp, synthetic construct
  misc_feature 1..22: note = chemically synthesized
  source 1..22: mol_type = other DNA
cctgggttgcaggtggctgact

SEQ ID NO: 93897 - DNA, 22 bp, synthetic construct
  misc_feature 1..22: note = chemically synthesized
  source 1..22: mol_type = other DNA
ctgggttgcaggtggctgactt

SEQ ID NO: 93898 - DNA, 22 bp, synthetic construct
  misc_feature 1..22: note = chemically synthesized
  source 1..22: mol_type = other DNA
ggttgcaggtggctgacttccc

SEQ ID NO: 93899 - DNA, 22 bp, synthetic construct
  misc_feature 1..22: note = chemically synthesized
  source 1..22: mol_type = other DNA
caggtggctgacttcccactgt

SEQ ID NO: 93900 - DNA, 22 bp, synthetic construct
  misc_feature 1..22: note = chemically synthesized
  source 1..22: mol_type = other DNA
acttcccactgtgtcctcacca

SEQ ID NO: 93901 - DNA, 22 bp, synthetic construct
  misc_feature 1..22: note = chemically synthesized
  source 1..22: mol_type = other DNA
cccactgtgtcctcaccagaag

SEQ ID NO: 93902 - DNA, 22 bp, synthetic construct
  misc_feature 1..22: note = chemically synthesized
  source 1..22: mol_type = other DNA
ccactgtgtcctcaccagaagg

SEQ ID NO: 93903 - DNA, 22 bp, synthetic construct
  misc_feature 1..22: note = chemically synthesized
  source 1..22: mol_type = other DNA
tgtcctcaccagaaggaagaga

SEQ ID NO: 93904 - DNA, 22 bp, synthetic construct
  misc_feature 1..22: note = chemically synthesized
  source 1..22: mol_type = other DNA
accagaaggaagagaaatggct

SEQ ID NO: 93905 - DNA, 22 bp, synthetic construct
  misc_feature 1..22: note = chemically synthesized
  source 1..22: mol_type = other DNA
atctctctgcttctgatgagga

SEQ ID NO: 93906 - DNA, 22 bp, synthetic construct
  misc_feature 1..22: note = chemically synthesized
  source 1..22: mol_type = other DNA
tctgcttctgatgaggaaaata

SEQ ID NO: 93907 - DNA, 22 bp, synthetic construct
  misc_feature 1..22: note = chemically synthesized
  source 1..22: mol_type = other DNA
tgcttctgatgaggaaaataat

SEQ ID NO: 93908 - DNA, 22 bp, synthetic construct
  misc_feature 1..22: note = chemically synthesized
  source 1..22: mol_type = other DNA
cttctgatgaggaaaataattc

SEQ ID NO: 93909 - DNA, 22 bp, synthetic construct
  misc_feature 1..22: note = chemically synthesized
  source 1..22: mol_type = other DNA
ctgatgaggaaaataattctat

SEQ ID NO: 93910 - DNA, 22 bp, synthetic construct
  misc_feature 1..22: note = chemically synthesized
  source 1..22: mol_type = other DNA
tgatgaggaaaataattctatg

SEQ ID NO: 93911 - DNA, 22 bp, synthetic construct
  misc_feature 1..22: note = chemically synthesized
  source 1..22: mol_type = other DNA
atgaggaaaataattctatgat

SEQ ID NO: 93912 - DNA, 22 bp, synthetic construct
  misc_feature 1..22: note = chemically synthesized
  source 1..22: mol_type = other DNA
tatgatggggatctgctctcat

SEQ ID NO: 93913 - DNA, 22 bp, synthetic construct
  misc_feature 1..22: note = chemically synthesized
  source 1..22: mol_type = other DNA
tgatggggatctgctctcatga

SEQ ID NO: 93914 - DNA, 22 bp, synthetic construct
  misc_feature 1..22: note = chemically synthesized
  source 1..22: mol_type = other DNA
ctctcatgagctcctctaaacc

SEQ ID NO: 93915 - DNA, 22 bp, synthetic construct
  misc_feature 1..22: note = chemically synthesized
  source 1..22: mol_type = other DNA
tcatgagctcctctaaacctga

SEQ ID NO: 93916 - DNA, 22 bp, synthetic construct
  misc_feature 1..22: note = chemically synthesized
  source 1..22: mol_type = other DNA
atgagctcctctaaacctgatt

SEQ ID NO: 93917 - DNA, 22 bp, synthetic construct
  misc_feature 1..22: note = chemically synthesized
  source 1..22: mol_type = other DNA
ctctaaacctgattacttttcc

SEQ ID NO: 93918 - DNA, 22 bp, synthetic construct
  misc_feature 1..22: note = chemically synthesized
  source 1..22: mol_type = other DNA
taaacctgattacttttccaaa

SEQ ID NO: 93919 - DNA, 22 bp, synthetic construct
  misc_feature 1..22: note = chemically synthesized
  source 1..22: mol_type = other DNA
aacctgattacttttccaaagc

SEQ ID NO: 93920 - DNA, 22 bp, synthetic construct
  misc_feature 1..22: note = chemically synthesized
  source 1..22: mol_type = other DNA
attacttttccaaagcctcccc

SEQ ID NO: 93921 - DNA, 22 bp, synthetic construct
  misc_feature 1..22: note = chemically synthesized
  source 1..22: mol_type = other DNA
cttttccaaagcctcccccaca

SEQ ID NO: 93922 - DNA, 22 bp, synthetic construct
  misc_feature 1..22: note = chemically synthesized
  source 1..22: mol_type = other DNA
ttccaaagcctcccccacaaat

SEQ ID NO: 93923 - DNA, 22 bp, synthetic construct
  misc_feature 1..22: note = chemically synthesized
  source 1..22: mol_type = other DNA
tccaaagcctcccccacaaatg

SEQ ID NO: 93924 - DNA, 22 bp, synthetic construct
  misc_feature 1..22: note = chemically synthesized
  source 1..22: mol_type = other DNA
ccaaagcctcccccacaaatgg

SEQ ID NO: 93925 - DNA, 22 bp, synthetic construct
  misc_feature 1..22: note = chemically synthesized
  source 1..22: mol_type = other DNA
caaagcctcccccacaaatgga

SEQ ID NO: 93926 - DNA, 22 bp, synthetic construct
  misc_feature 1..22: note = chemically synthesized
  source 1..22: mol_type = other DNA
ccccacaaatggagccaattgg

SEQ ID NO: 93927 - DNA, 22 bp, synthetic construct
  misc_feature 1..22: note = chemically synthesized
  source 1..22: mol_type = other DNA
ggagttggggattcagcatgtg

SEQ ID NO: 93928 - DNA, 22 bp, synthetic construct
  misc_feature 1..22: note = chemically synthesized
  source 1..22: mol_type = other DNA
gggattcagcatgtgaattttc

SEQ ID NO: 93929 - DNA, 22 bp, synthetic construct
  misc_feature 1..22: note = chemically synthesized
  source 1..22: mol_type = other DNA
agcatgtgaattttctggagac

SEQ ID NO: 93930 - DNA, 22 bp, synthetic construct
  misc_feature 1..22: note = chemically synthesized
  source 1..22: mol_type = other DNA
tctggagacacaagcgttaagt

SEQ ID NO: 93931 - DNA, 22 bp, synthetic construct
  misc_feature 1..22: note = chemically synthesized
  source 1..22: mol_type = other DNA
ctggagacacaagcgttaagtt

SEQ ID NO: 93932 - DNA, 22 bp, synthetic construct
  misc_feature 1..22: note = chemically synthesized
  source 1..22: mol_type = other DNA
tggagacacaagcgttaagttc

SEQ ID NO: 93933 - DNA, 22 bp, synthetic construct
  misc_feature 1..22: note = chemically synthesized
  source 1..22: mol_type = other DNA
gagacacaagcgttaagttcat

SEQ ID NO: 93934 - DNA, 22 bp, synthetic construct
  misc_feature 1..22: note = chemically synthesized
  source 1..22: mol_type = other DNA
agttcataacaccatcacatta

SEQ ID NO: 93935 - DNA, 22 bp, synthetic construct
  misc_feature 1..22: note = chemically synthesized
  source 1..22: mol_type = other DNA
ataacaccatcacattaaacta

SEQ ID NO: 93936 - DNA, 22 bp, synthetic construct
  misc_feature 1..22: note = chemically synthesized
  source 1..22: mol_type = other DNA
aactaaactcttgcttattaac

SEQ ID NO: 93937 - DNA, 22 bp, synthetic construct
  misc_feature 1..22: note = chemically synthesized
  source 1..22: mol_type = other DNA
aactcttgcttattaacgtgca

SEQ ID NO: 93938 - DNA, 22 bp, synthetic construct
  misc_feature 1..22: note = chemically synthesized
  source 1..22: mol_type = other DNA
ttgcttattaacgtgcattaac

SEQ ID NO: 93939 - DNA, 22 bp, synthetic construct
  misc_feature 1..22: note = chemically synthesized
  source 1..22: mol_type = other DNA
gcttattaacgtgcattaactt

SEQ ID NO: 93940 - DNA, 22 bp, synthetic construct
  misc_feature 1..22: note = chemically synthesized
  source 1..22: mol_type = other DNA
cttattaacgtgcattaacttt

SEQ ID NO: 93941 - DNA, 22 bp, synthetic construct
  misc_feature 1..22: note = chemically synthesized
  source 1..22: mol_type = other DNA
attaacgtgcattaactttcaa

SEQ ID NO: 93942 - DNA, 22 bp, synthetic construct
  misc_feature 1..22: note = chemically synthesized
  source 1..22: mol_type = other DNA
ttaacgtgcattaactttcaat

SEQ ID NO: 93943 - DNA, 22 bp, synthetic construct
  misc_feature 1..22: note = chemically synthesized
  source 1..22: mol_type = other DNA
acgtgcattaactttcaattat

SEQ ID NO: 93944 - DNA, 22 bp, synthetic construct
  misc_feature 1..22: note = chemically synthesized
  source 1..22: mol_type = other DNA
actttcaattatataagaactc

SEQ ID NO: 93945 - DNA, 22 bp, synthetic construct
  misc_feature 1..22: note = chemically synthesized
  source 1..22: mol_type = other DNA
tcaattatataagaactccagt

SEQ ID NO: 93946 - DNA, 22 bp, synthetic construct
  misc_feature 1..22: note = chemically synthesized
  source 1..22: mol_type = other DNA
caattatataagaactccagtg

SEQ ID NO: 93947 - DNA, 22 bp, synthetic construct
  misc_feature 1..22: note = chemically synthesized
  source 1..22: mol_type = other DNA
aattatataagaactccagtga

SEQ ID NO: 93948 - DNA, 22 bp, synthetic construct
  misc_feature 1..22: note = chemically synthesized
  source 1..22: mol_type = other DNA
tataagaactccagtgaatctg

SEQ ID NO: 93949 - DNA, 22 bp, synthetic construct
  misc_feature 1..22: note = chemically synthesized
  source 1..22: mol_type = other DNA
cagtgaatctgccttctcaatt

SEQ ID NO: 93950 - DNA, 22 bp, synthetic construct
  misc_feature 1..22: note = chemically synthesized
  source 1..22: mol_type = other DNA
ccttctcaattaatgttataca

SEQ ID NO: 93951 - DNA, 22 bp, synthetic construct
  misc_feature 1..22: note = chemically synthesized
  source 1..22: mol_type = other DNA
ctcaattaatgttatacaaatt

SEQ ID NO: 93952 - DNA, 22 bp, synthetic construct
  misc_feature 1..22: note = chemically synthesized
  source 1..22: mol_type = other DNA
tcaattaatgttatacaaattc

SEQ ID NO: 93953 - DNA, 22 bp, synthetic construct
  misc_feature 1..22: note = chemically synthesized
  source 1..22: mol_type = other DNA
aattaatgttatacaaattctt

SEQ ID NO: 93954 - DNA, 22 bp, synthetic construct
  misc_feature 1..22: note = chemically synthesized
  source 1..22: mol_type = other DNA
atgttatacaaattcttcacac

SEQ ID NO: 93955 - DNA, 22 bp, synthetic construct
  misc_feature 1..22: note = chemically synthesized
  source 1..22: mol_type = other DNA
tacaaattcttcacactatatt

SEQ ID NO: 93956 - DNA, 22 bp, synthetic construct
  misc_feature 1..22: note = chemically synthesized
  source 1..22: mol_type = other DNA
ttcacactatattttcatctga

SEQ ID NO: 93957 - DNA, 22 bp, synthetic construct
  misc_feature 1..22: note = chemically synthesized
  source 1..22: mol_type = other DNA
cacactatattttcatctgacc

SEQ ID NO: 93958 - DNA, 22 bp, synthetic construct
  misc_feature 1..22: note = chemically synthesized
  source 1..22: mol_type = other DNA
acactatattttcatctgaccg

SEQ ID NO: 93959 - DNA, 22 bp, synthetic construct
  misc_feature 1..22: note = chemically synthesized
  source 1..22: mol_type = other DNA
tattttcatctgaccgtgctgt

SEQ ID NO: 93960 - DNA, 22 bp, synthetic construct
  misc_feature 1..22: note = chemically synthesized
  source 1..22: mol_type = other DNA
tcatctgaccgtgctgttctgc

SEQ ID NO: 93961 - DNA, 22 bp, synthetic construct
  misc_feature 1..22: note = chemically synthesized
  source 1..22: mol_type = other DNA
catctgaccgtgctgttctgct

SEQ ID NO: 93962 - DNA, 22 bp, synthetic construct
  misc_feature 1..22: note = chemically synthesized
  source 1..22: mol_type = other DNA
atctgaccgtgctgttctgctg

SEQ ID NO: 93963 - DNA, 22 bp, synthetic construct
  misc_feature 1..22: note = chemically synthesized
  source 1..22: mol_type = other DNA
accgtgctgttctgctgctgag

SEQ ID NO: 93964 - DNA, 22 bp, synthetic construct
  misc_feature 1..22: note = chemically synthesized
  source 1..22: mol_type = other DNA
ttctgctgctgagacatgacac

SEQ ID NO: 93965 - DNA, 22 bp, synthetic construct
  misc_feature 1..22: note = chemically synthesized
  source 1..22: mol_type = other DNA
tgctgctgagacatgacacgct

SEQ ID NO: 93966 - DNA, 22 bp, synthetic construct
  misc_feature 1..22: note = chemically synthesized
  source 1..22: mol_type = other DNA
ctgctgagacatgacacgctga

SEQ ID NO: 93967 - DNA, 22 bp, synthetic construct
  misc_feature 1..22: note = chemically synthesized
  source 1..22: mol_type = other DNA
ctgagacatgacacgctgatgc

SEQ ID NO: 93968 - DNA, 22 bp, synthetic construct
  misc_feature 1..22: note = chemically synthesized
  source 1..22: mol_type = other DNA
agacatgacacgctgatgctga

SEQ ID NO: 93969 - DNA, 22 bp, synthetic construct
  misc_feature 1..22: note = chemically synthesized
  source 1..22: mol_type = other DNA
atgctgacttgtgagcttctgc

SEQ ID NO: 93970 - DNA, 22 bp, synthetic construct
  misc_feature 1..22: note = chemically synthesized
  source 1..22: mol_type = other DNA
acttgtgagcttctgctggctc

SEQ ID NO: 93971 - DNA, 22 bp, synthetic construct
  misc_feature 1..22: note = chemically synthesized
  source 1..22: mol_type = other DNA
gtgagcttctgctggctcattt

SEQ ID NO: 93972 - DNA, 22 bp, synthetic construct
  misc_feature 1..22: note = chemically synthesized
  source 1..22: mol_type = other DNA
tgagcttctgctggctcatttc

SEQ ID NO: 93973 - DNA, 22 bp, synthetic construct
  misc_feature 1..22: note = chemically synthesized
  source 1..22: mol_type = other DNA
ctgctggctcatttccttcacc

SEQ ID NO: 93974 - DNA, 22 bp, synthetic construct
  misc_feature 1..22: note = chemically synthesized
  source 1..22: mol_type = other DNA
tgctggctcatttccttcacct

SEQ ID NO: 93975 - DNA, 22 bp, synthetic construct
  misc_feature 1..22: note = chemically synthesized
  source 1..22: mol_type = other DNA
ctggctcatttccttcacctaa

SEQ ID NO: 93976 - DNA, 22 bp, synthetic construct
  misc_feature 1..22: note = chemically synthesized
  source 1..22: mol_type = other DNA
gctcatttccttcacctaagtc

SEQ ID NO: 93977 - DNA, 22 bp, synthetic construct
  misc_feature 1..22: note = chemically synthesized
  source 1..22: mol_type = other DNA
atttccttcacctaagtcccca

SEQ ID NO: 93978 - DNA, 22 bp, synthetic construct
  misc_feature 1..22: note = chemically synthesized
  source 1..22: mol_type = other DNA
ccttcacctaagtccccacctc

SEQ ID NO: 93979 - DNA, 22 bp, synthetic construct
  misc_feature 1..22: note = chemically synthesized
  source 1..22: mol_type = other DNA
cttcacctaagtccccacctcc

SEQ ID NO: 93980 - DNA, 22 bp, synthetic construct
  misc_feature 1..22: note = chemically synthesized
  source 1..22: mol_type = other DNA
cacctaagtccccacctcccta

SEQ ID NO: 93981 - DNA, 22 bp, synthetic construct
  misc_feature 1..22: note = chemically synthesized
  source 1..22: mol_type = other DNA
acctaagtccccacctccctag

SEQ ID NO: 93982 - DNA, 22 bp, synthetic construct
  misc_feature 1..22: note = chemically synthesized
  source 1..22: mol_type = other DNA
agtccccacctccctagaagct

SEQ ID NO: 93983 - DNA, 22 bp, synthetic construct
  misc_feature 1..22: note = chemically synthesized
  source 1..22: mol_type = other DNA
cctagaagcttacaatgaggtc

SEQ ID NO: 93984 - DNA, 22 bp, synthetic construct
  misc_feature 1..22: note = chemically synthesized
  source 1..22: mol_type = other DNA
gaagcttacaatgaggtctcct

SEQ ID NO: 93985 - DNA, 22 bp, synthetic construct
  misc_feature 1..22: note = chemically synthesized
  source 1..22: mol_type = other DNA
acaatgaggtctcctccttgaa

SEQ ID NO: 93986 - DNA, 22 bp, synthetic construct
  misc_feature 1..22: note = chemically synthesized
  source 1..22: mol_type = other DNA
caatgaggtctcctccttgaaa

SEQ ID NO: 93987 - DNA, 22 bp, synthetic construct
  misc_feature 1..22: note = chemically synthesized
  source 1..22: mol_type = other DNA
ctccttgaaatgctgtgaccag

SEQ ID NO: 93988 - DNA, 22 bp, synthetic construct
  misc_feature 1..22: note = chemically synthesized
  source 1..22: mol_type = other DNA
cttgaaatgctgtgaccagtct

SEQ ID NO: 93989 - DNA, 22 bp, synthetic construct
  misc_feature 1..22: note = chemically synthesized
  source 1..22: mol_type = other DNA
gaaatgctgtgaccagtctgta

SEQ ID NO: 93990 - DNA, 22 bp, synthetic construct
  misc_feature 1..22: note = chemically synthesized
  source 1..22: mol_type = other DNA
aaatgctgtgaccagtctgtag

SEQ ID NO: 93991 - DNA, 22 bp, synthetic construct
  misc_feature 1..22: note = chemically synthesized
  source 1..22: mol_type = other DNA
tgaccagtctgtagacttaagg

SEQ ID NO: 93992 - DNA, 22 bp, synthetic construct
  misc_feature 1..22: note = chemically synthesized
  source 1..22: mol_type = other DNA
tagacttaagggtatgggatta

SEQ ID NO: 93993 - DNA, 22 bp, synthetic construct
  misc_feature 1..22: note = chemically synthesized
  source 1..22: mol_type = other DNA
aagggtatgggattaatttcac

SEQ ID NO: 93994 - DNA, 22 bp, synthetic construct
  misc_feature 1..22: note = chemically synthesized
  source 1..22: mol_type = other DNA
agggtatgggattaatttcacc

SEQ ID NO: 93995 - DNA, 22 bp, synthetic construct
  misc_feature 1..22: note = chemically synthesized
  source 1..22: mol_type = other DNA
atttcacctctttaggcatgcg

SEQ ID NO: 93996 - DNA, 22 bp, synthetic construct
  misc_feature 1..22: note = chemically synthesized
  source 1..22: mol_type = other DNA
cacctctttaggcatgcgtcaa

SEQ ID NO: 93997 - DNA, 22 bp, synthetic construct
  misc_feature 1..22: note = chemically synthesized
  source 1..22: mol_type = other DNA
acctctttaggcatgcgtcaac

SEQ ID NO: 93998 - DNA, 22 bp, synthetic construct
  misc_feature 1..22: note = chemically synthesized
  source 1..22: mol_type = other DNA
tttaggcatgcgtcaacactta

SEQ ID NO: 93999 - DNA, 22 bp, synthetic construct
  misc_feature 1..22: note = chemically synthesized
  source 1..22: mol_type = other DNA
taggcatgcgtcaacacttaaa

SEQ ID NO: 94000 - DNA, 22 bp, synthetic construct
  misc_feature 1..22: note = chemically synthesized
  source 1..22: mol_type = other DNA
aggcatgcgtcaacacttaaaa

SEQ ID NO: 94001 - DNA, 22 bp, synthetic construct
  misc_feature 1..22: note = chemically synthesized
  source 1..22: mol_type = other DNA
ggcatgcgtcaacacttaaaat

SEQ ID NO: 94002 - DNA, 22 bp, synthetic construct
  misc_feature 1..22: note = chemically synthesized
  source 1..22: mol_type = other DNA
aaaatgaaaagttccttagtaa

SEQ ID NO: 94003 - DNA, 22 bp, synthetic construct
  misc_feature 1..22: note = chemically synthesized
  source 1..22: mol_type = other DNA
aaatgaaaagttccttagtaaa

SEQ ID NO: 94004 - DNA, 22 bp, synthetic construct
  misc_feature 1..22: note = chemically synthesized
  source 1..22: mol_type = other DNA
cttagtaaagtaaggatcactt

SEQ ID NO: 94005 - DNA, 22 bp, synthetic construct
  misc_feature 1..22: note = chemically synthesized
  source 1..22: mol_type = other DNA
agtaaagtaaggatcacttcat

SEQ ID NO: 94006 - DNA, 22 bp, synthetic construct
  misc_feature 1..22: note = chemically synthesized
  source 1..22: mol_type = other DNA
gtaaagtaaggatcacttcatt

SEQ ID NO: 94007 - DNA, 22 bp, synthetic construct
  misc_feature 1..22: note = chemically synthesized
  source 1..22: mol_type = other DNA
cattgtagttaccgtggaaaga

SEQ ID NO: 94008 - DNA, 22 bp, synthetic construct
  misc_feature 1..22: note = chemically synthesized
  source 1..22: mol_type = other DNA
attgtagttaccgtggaaagaa

SEQ ID NO: 94009 - DNA, 22 bp, synthetic construct
  misc_feature 1..22: note = chemically synthesized
  source 1..22: mol_type = other DNA
tagttaccgtggaaagaaaaac

SEQ ID NO: 94010 - DNA, 22 bp, synthetic construct
  misc_feature 1..22: note = chemically synthesized
  source 1..22: mol_type = other DNA
ccgtggaaagaaaaacctgttt

SEQ ID NO: 94011 - DNA, 22 bp, synthetic construct
  misc_feature 1..22: note = chemically synthesized
  source 1..22: mol_type = other DNA
tttcctgctctgatctctaaca

SEQ ID NO: 94012 - DNA, 22 bp, synthetic construct
  misc_feature 1..22: note = chemically synthesized
  source 1..22: mol_type = other DNA
cctgctctgatctctaacacct

SEQ ID NO: 94013 - DNA, 22 bp, synthetic construct
  misc_feature 1..22: note = chemically synthesized
  source 1..22: mol_type = other DNA
ctgctctgatctctaacacctc

SEQ ID NO: 94014 - DNA, 22 bp, synthetic construct
  misc_feature 1..22: note = chemically synthesized
  source 1..22: mol_type = other DNA
ctctgatctctaacacctcaac

SEQ ID NO: 94015 - DNA, 22 bp, synthetic construct
  misc_feature 1..22: note = chemically synthesized
  source 1..22: mol_type = other DNA
tgatctctaacacctcaacctc

SEQ ID NO: 94016 - DNA, 22 bp, synthetic construct
  misc_feature 1..22: note = chemically synthesized
  source 1..22: mol_type = other DNA
atctctaacacctcaacctccc

SEQ ID NO: 94017 - DNA, 22 bp, synthetic construct
  misc_feature 1..22: note = chemically synthesized
  source 1..22: mol_type = other DNA
taacacctcaacctccctgtag

SEQ ID NO: 94018 - DNA, 22 bp, synthetic construct
  misc_feature 1..22: note = chemically synthesized
  source 1..22: mol_type = other DNA
acacctcaacctccctgtagag

SEQ ID NO: 94019 - DNA, 22 bp, synthetic construct
  misc_feature 1..22: note = chemically synthesized
  source 1..22: mol_type = other DNA
aacctccctgtagagcctcaca

SEQ ID NO: 94020 - DNA, 22 bp, synthetic construct
  misc_feature 1..22: note = chemically synthesized
  source 1..22: mol_type = other DNA
cctgtagagcctcacaagggct

SEQ ID NO: 94021 - DNA, 22 bp, synthetic construct
  misc_feature 1..22: note = chemically synthesized
  source 1..22: mol_type = other DNA
tagagcctcacaagggctgaga

SEQ ID NO: 94022 - DNA, 22 bp, synthetic construct
  misc_feature 1..22: note = chemically synthesized
  source 1..22: mol_type = other DNA
acaagggctgagaaaagccaga

SEQ ID NO: 94023 - DNA, 22 bp, synthetic construct
  misc_feature 1..22: note = chemically synthesized
  source 1..22: mol_type = other DNA
agaaaagccagatgccgttgga

SEQ ID NO: 94024 - DNA, 22 bp, synthetic construct
  misc_feature 1..22: note = chemically synthesized
  source 1..22: mol_type = other DNA
gaaatagtattgcccctaataa

SEQ ID NO: 94025 - DNA, 22 bp, synthetic construct
  misc_feature 1..22: note = chemically synthesized
  source 1..22: mol_type = other DNA
cccctaataaaatagaatggct

SEQ ID NO: 94026 - DNA, 22 bp, synthetic construct
  misc_feature 1..22: note = chemically synthesized
  source 1..22: mol_type = other DNA
ataaaatagaatggctatccct

SEQ ID NO: 94027 - DNA, 22 bp, synthetic construct
  misc_feature 1..22: note = chemically synthesized
  source 1..22: mol_type = other DNA
tccctgcctaaaccttgacttc

SEQ ID NO: 94028 - DNA, 22 bp, synthetic construct
  misc_feature 1..22: note = chemically synthesized
  source 1..22: mol_type = other DNA
cctaaaccttgacttcctaaag

SEQ ID NO: 94029 - DNA, 22 bp, synthetic construct
  misc_feature 1..22: note = chemically synthesized
  source 1..22: mol_type = other DNA
aaccttgacttcctaaagcttg

SEQ ID NO: 94030 - DNA, 22 bp, synthetic construct
  misc_feature 1..22: note = chemically synthesized
  source 1..22: mol_type = other DNA
gacttcctaaagcttggaacac

SEQ ID NO: 94031 - DNA, 22 bp, synthetic construct
  misc_feature 1..22: note = chemically synthesized
  source 1..22: mol_type = other DNA
acttcctaaagcttggaacact

SEQ ID NO: 94032 - DNA, 22 bp, synthetic construct
  misc_feature 1..22: note = chemically synthesized
  source 1..22: mol_type = other DNA
cctaaagcttggaacacttttt

SEQ ID NO: 94033 - DNA, 22 bp, synthetic construct
  misc_feature 1..22: note = chemically synthesized
  source 1..22: mol_type = other DNA
ctaaagcttggaacactttttc

SEQ ID NO: 94034 - DNA, 22 bp, synthetic construct
  misc_feature 1..22: note = chemically synthesized
  source 1..22: mol_type = other DNA
aagcttggaacactttttcttc

SEQ ID NO: 94035 - DNA, 22 bp, synthetic construct
  misc_feature 1..22: note = chemically synthesized
  source 1..22: mol_type = other DNA
ggaacactttttcttcgttgag

SEQ ID NO: 94036 - DNA, 22 bp, synthetic construct
  misc_feature 1..22: note = chemically synthesized
  source 1..22: mol_type = other DNA
gaacactttttcttcgttgagc

SEQ ID NO: 94037 - DNA, 22 bp, synthetic construct
  misc_feature 1..22: note = chemically synthesized
  source 1..22: mol_type = other DNA
tttcttcgttgagccccttcct

SEQ ID NO: 94038 - DNA, 22 bp, synthetic construct
  misc_feature 1..22: note = chemically synthesized
  source 1..22: mol_type = other DNA
ttcttcgttgagccccttcctc

SEQ ID NO: 94039 - DNA, 22 bp, synthetic construct
  misc_feature 1..22: note = chemically synthesized
  source 1..22: mol_type = other DNA
tcttcgttgagccccttcctcg

SEQ ID NO: 94040 - DNA, 22 bp, synthetic construct
  misc_feature 1..22: note = chemically synthesized
  source 1..22: mol_type = other DNA
cttcgttgagccccttcctcgc

SEQ ID NO: 94041 - DNA, 22 bp, synthetic construct
  misc_feature 1..22: note = chemically synthesized
  source 1..22: mol_type = other DNA
ttcgttgagccccttcctcgct

SEQ ID NO: 94042 - DNA, 22 bp, synthetic construct
  misc_feature 1..22: note = chemically synthesized
  source 1..22: mol_type = other DNA
cgttgagccccttcctcgctgc

SEQ ID NO: 94043 - DNA, 22 bp, synthetic construct
  misc_feature 1..22: note = chemically synthesized
  source 1..22: mol_type = other DNA
gttgagccccttcctcgctgct

SEQ ID NO: 94044 - DNA, 22 bp, synthetic construct
  misc_feature 1..22: note = chemically synthesized
  source 1..22: mol_type = other DNA
agccccttcctcgctgctgtgc

SEQ ID NO: 94045 - DNA, 22 bp, synthetic construct
  misc_feature 1..22: note = chemically synthesized
  source 1..22: mol_type = other DNA
cctcgctgctgtgctgcaatcc

SEQ ID NO: 94046 - DNA, 22 bp, synthetic construct
  misc_feature 1..22: note = chemically synthesized
  source 1..22: mol_type = other DNA
ctcgctgctgtgctgcaatcca

SEQ ID NO: 94047 - DNA, 22 bp, synthetic construct
  misc_feature 1..22: note = chemically synthesized
  source 1..22: mol_type = other DNA
gctgctgtgctgcaatccaggg

SEQ ID NO: 94048 - DNA, 22 bp, synthetic construct
  misc_feature 1..22: note = chemically synthesized
  source 1..22: mol_type = other DNA
ctgtgctgcaatccagggaagg

SEQ ID NO: 94049 - DNA, 22 bp, synthetic construct
  misc_feature 1..22: note = chemically synthesized
  source 1..22: mol_type = other DNA
tgctgcaatccagggaaggggg

SEQ ID NO: 94050 - DNA, 22 bp, synthetic construct
  misc_feature 1..22: note = chemically synthesized
  source 1..22: mol_type = other DNA
caatccagggaagggggttcag

SEQ ID NO: 94051 - DNA, 22 bp, synthetic construct
  misc_feature 1..22: note = chemically synthesized
  source 1..22: mol_type = other DNA
agcccccttcactgaacctttc

SEQ ID NO: 94052 - DNA, 22 bp, synthetic construct
  misc_feature 1..22: note = chemically synthesized
  source 1..22: mol_type = other DNA
cactgaacctttccccatctct

SEQ ID NO: 94053 - DNA, 22 bp, synthetic construct
  misc_feature 1..22: note = chemically synthesized
  source 1..22: mol_type = other DNA
actgaacctttccccatctctt

SEQ ID NO: 94054 - DNA, 22 bp, synthetic construct
  misc_feature 1..22: note = chemically synthesized
  source 1..22: mol_type = other DNA
aacctttccccatctcttccaa

SEQ ID NO: 94055 - DNA, 22 bp, synthetic construct
  misc_feature 1..22: note = chemically synthesized
  source 1..22: mol_type = other DNA
tccccatctcttccaaaacatc

SEQ ID NO: 94056 - DNA, 22 bp, synthetic construct
  misc_feature 1..22: note = chemically synthesized
  source 1..22: mol_type = other DNA
ccccatctcttccaaaacatct

SEQ ID NO: 94057 - DNA, 22 bp, synthetic construct
  misc_feature 1..22: note = chemically synthesized
  source 1..22: mol_type = other DNA
cccatctcttccaaaacatctg

SEQ ID NO: 94058 - DNA, 22 bp, synthetic construct
  misc_feature 1..22: note = chemically synthesized
  source 1..22: mol_type = other DNA
ttccaaaacatctgtttctgag

SEQ ID NO: 94059 - DNA, 22 bp, synthetic construct
  misc_feature 1..22: note = chemically synthesized
  source 1..22: mol_type = other DNA
ccaaaacatctgtttctgagga

SEQ ID NO: 94060 - DNA, 22 bp, synthetic construct
  misc_feature 1..22: note = chemically synthesized
  source 1..22: mol_type = other DNA
caaaacatctgtttctgaggag

SEQ ID NO: 94061 - DNA, 22 bp, synthetic construct
  misc_feature 1..22: note = chemically synthesized
  source 1..22: mol_type = other DNA
tttctgaggagtcctgtcctat

SEQ ID NO: 94062 - DNA, 22 bp, synthetic construct
  misc_feature 1..22: note = chemically synthesized
  source 1..22: mol_type = other DNA
ctgaggagtcctgtcctataga

SEQ ID NO: 94063 - DNA, 22 bp, synthetic construct
  misc_feature 1..22: note = chemically synthesized
  source 1..22: mol_type = other DNA
tgaggagtcctgtcctatagag

SEQ ID NO: 94064 - DNA, 22 bp, synthetic construct
  misc_feature 1..22: note = chemically synthesized
  source 1..22: mol_type = other DNA
aggagtcctgtcctatagaggt

SEQ ID NO: 94065 - DNA, 22 bp, synthetic construct
  misc_feature 1..22: note = chemically synthesized
  source 1..22: mol_type = other DNA
tcctatagaggtctttcttcca

SEQ ID NO: 94066 - DNA, 22 bp, synthetic construct
  misc_feature 1..22: note = chemically synthesized
  source 1..22: mol_type = other DNA
tagaggtctttcttccaaccag

SEQ ID NO: 94067 - DNA, 22 bp, synthetic construct
  misc_feature 1..22: note = chemically synthesized
  source 1..22: mol_type = other DNA
tcttccaaccagatttctcctg

SEQ ID NO: 94068 - DNA, 22 bp, synthetic construct
  misc_feature 1..22: note = chemically synthesized
  source 1..22: mol_type = other DNA
cttccaaccagatttctcctgc

SEQ ID NO: 94069 - DNA, 22 bp, synthetic construct
  misc_feature 1..22: note = chemically synthesized
  source 1..22: mol_type = other DNA
ttccaaccagatttctcctgca

SEQ ID NO: 94070 - DNA, 22 bp, synthetic construct
  misc_feature 1..22: note = chemically synthesized
  source 1..22: mol_type = other DNA
ccaaccagatttctcctgcacc

SEQ ID NO: 94071 - DNA, 22 bp, synthetic construct
  misc_feature 1..22: note = chemically synthesized
  source 1..22: mol_type = other DNA
caaccagatttctcctgcacct

SEQ ID NO: 94072 - DNA, 22 bp, synthetic construct
  misc_feature 1..22: note = chemically synthesized
  source 1..22: mol_type = other DNA
ctcctgcaccttttactcccac

SEQ ID NO: 94073 - DNA, 22 bp, synthetic construct
  misc_feature 1..22: note = chemically synthesized
  source 1..22: mol_type = other DNA
tcctgcaccttttactcccact

SEQ ID NO: 94074 - DNA, 22 bp, synthetic construct
  misc_feature 1..22: note = chemically synthesized
  source 1..22: mol_type = other DNA
ctgcaccttttactcccacttg

SEQ ID NO: 94075 - DNA, 22 bp, synthetic construct
  misc_feature 1..22: note = chemically synthesized
  source 1..22: mol_type = other DNA
caccttttactcccacttgcag

SEQ ID NO: 94076 - DNA, 22 bp, synthetic construct
  misc_feature 1..22: note = chemically synthesized
  source 1..22: mol_type = other DNA
ttactcccacttgcagaactcc

SEQ ID NO: 94077 - DNA, 22 bp, synthetic construct
  misc_feature 1..22: note = chemically synthesized
  source 1..22: mol_type = other DNA
tactcccacttgcagaactccc

SEQ ID NO: 94078 - DNA, 22 bp, synthetic construct
  misc_feature 1..22: note = chemically synthesized
  source 1..22: mol_type = other DNA
actcccacttgcagaactccca

SEQ ID NO: 94079 - DNA, 22 bp, synthetic construct
  misc_feature 1..22: note = chemically synthesized
  source 1..22: mol_type = other DNA
ctcccacttgcagaactcccat

SEQ ID NO: 94080 - DNA, 22 bp, synthetic construct
  misc_feature 1..22: note = chemically synthesized
  source 1..22: mol_type = other DNA
ccacttgcagaactcccatgta

SEQ ID NO: 94081 - DNA, 22 bp, synthetic construct
  misc_feature 1..22: note = chemically synthesized
  source 1..22: mol_type = other DNA
gcagaactcccatgtacaagtt

SEQ ID NO: 94082 - DNA, 22 bp, synthetic construct
  misc_feature 1..22: note = chemically synthesized
  source 1..22: mol_type = other DNA
cagaactcccatgtacaagttt

SEQ ID NO: 94083 - DNA, 22 bp, synthetic construct
  misc_feature 1..22: note = chemically synthesized
  source 1..22: mol_type = other DNA
ccatgtacaagtttctttattg

SEQ ID NO: 94084 - DNA, 22 bp, synthetic construct
  misc_feature 1..22: note = chemically synthesized
  source 1..22: mol_type = other DNA
ctttattgcctagttcttttat

SEQ ID NO: 94085 - DNA, 22 bp, synthetic construct
  misc_feature 1..22: note = chemically synthesized
  source 1..22: mol_type = other DNA
tttattgcctagttcttttatt

SEQ ID NO: 94086 - DNA, 22 bp, synthetic construct
  misc_feature 1..22: note = chemically synthesized
  source 1..22: mol_type = other DNA
tattgcctagttcttttatttg

SEQ ID NO: 94087 - DNA, 22 bp, synthetic construct
  misc_feature 1..22: note = chemically synthesized
  source 1..22: mol_type = other DNA
attgcctagttcttttatttgc

SEQ ID NO: 94088 - DNA, 22 bp, synthetic construct
  misc_feature 1..22: note = chemically synthesized
  source 1..22: mol_type = other DNA
ttgcctagttcttttatttgct

SEQ ID NO: 94089 - DNA, 22 bp, synthetic construct
  misc_feature 1..22: note = chemically synthesized
  source 1..22: mol_type = other DNA
cctagttcttttatttgctcat

SEQ ID NO: 94090 - DNA, 22 bp, synthetic construct
  misc_feature 1..22: note = chemically synthesized
  source 1..22: mol_type = other DNA
gttcttttatttgctcatcaaa

SEQ ID NO: 94091 - DNA, 22 bp, synthetic construct
  misc_feature 1..22: note = chemically synthesized
  source 1..22: mol_type = other DNA
ttttatttgctcatcaaaaccc

SEQ ID NO: 94092 - DNA, 22 bp, synthetic construct
  misc_feature 1..22: note = chemically synthesized
  source 1..22: mol_type = other DNA
ttatttgctcatcaaaacccac

SEQ ID NO: 94093 - DNA, 22 bp, synthetic construct
  misc_feature 1..22: note = chemically synthesized
  source 1..22: mol_type = other DNA
tatttgctcatcaaaacccaca

SEQ ID NO: 94094 - DNA, 22 bp, synthetic construct
  misc_feature 1..22: note = chemically synthesized
  source 1..22: mol_type = other DNA
atttgctcatcaaaacccacat

SEQ ID NO: 94095 - DNA, 22 bp, synthetic construct
  misc_feature 1..22: note = chemically synthesized
  source 1..22: mol_type = other DNA
tttgctcatcaaaacccacatc

SEQ ID NO: 94096 - DNA, 22 bp, synthetic construct
  misc_feature 1..22: note = chemically synthesized
  source 1..22: mol_type = other DNA
gctcatcaaaacccacatctaa

SEQ ID NO: 94097 - DNA, 22 bp, synthetic construct
  misc_feature 1..22: note = chemically synthesized
  source 1..22: mol_type = other DNA
ctcatcaaaacccacatctaac

SEQ ID NO: 94098 - DNA, 22 bp, synthetic construct
  misc_feature 1..22: note = chemically synthesized
  source 1..22: mol_type = other DNA
atcaaaacccacatctaacgta

SEQ ID NO: 94099 - DNA, 22 bp, synthetic construct
  misc_feature 1..22: note = chemically synthesized
  source 1..22: mol_type = other DNA
acgtaaacaaaaaagtgtggag

SEQ ID NO: 94100 - DNA, 22 bp, synthetic construct
  misc_feature 1..22: note = chemically synthesized
  source 1..22: mol_type = other DNA
aacataaaaccctttgtggctc

SEQ ID NO: 94101 - DNA, 22 bp, synthetic construct
  misc_feature 1..22: note = chemically synthesized
  source 1..22: mol_type = other DNA
tgtggctcatatatttaaaaag

SEQ ID NO: 94102 - DNA, 22 bp, synthetic construct
  misc_feature 1..22: note = chemically synthesized
  source 1..22: mol_type = other DNA
gtggctcatatatttaaaaaga

SEQ ID NO: 94103 - DNA, 22 bp, synthetic construct
  misc_feature 1..22: note = chemically synthesized
  source 1..22: mol_type = other DNA
tggctcatatatttaaaaagac

SEQ ID NO: 94104 - DNA, 22 bp, synthetic construct
  misc_feature 1..22: note = chemically synthesized
  source 1..22: mol_type = other DNA
atatatttaaaaagacataaaa

SEQ ID NO: 94105 - DNA, 22 bp, synthetic construct
  misc_feature 1..22: note = chemically synthesized
  source 1..22: mol_type = other DNA
aaaaagacataaaaaaagaact

SEQ ID NO: 94106 - DNA, 22 bp, synthetic construct
  misc_feature 1..22: note = chemically synthesized
  source 1..22: mol_type = other DNA
aaaagacataaaaaaagaactg

SEQ ID NO: 94107 - DNA, 22 bp, synthetic construct
  misc_feature 1..22: note = chemically synthesized
  source 1..22: mol_type = other DNA
aagacaaccatgtgtgatctct

SEQ ID NO: 94108 - DNA, 22 bp, synthetic construct
  misc_feature 1..22: note = chemically synthesized
  source 1..22: mol_type = other DNA
ttagcagaatagatttattatt

SEQ ID NO: 94109 - DNA, 22 bp, synthetic construct
  misc_feature 1..22: note = chemically synthesized
  source 1..22: mol_type = other DNA
agcagaatagatttattatttg

SEQ ID NO: 94110 - DNA, 22 bp, synthetic construct
  misc_feature 1..22: note = chemically synthesized
  source 1..22: mol_type = other DNA
gcagaatagatttattatttga

SEQ ID NO: 94111 - DNA, 22 bp, synthetic construct
  misc_feature 1..22: note = chemically synthesized
  source 1..22: mol_type = other DNA
attatttgattgcttgcagaat

SEQ ID NO: 94112 - DNA, 22 bp, synthetic construct
  misc_feature 1..22: note = chemically synthesized
  source 1..22: mol_type = other DNA
ttatttgattgcttgcagaata

SEQ ID NO: 94113 - DNA, 22 bp, synthetic construct
  misc_feature 1..22: note = chemically synthesized
  source 1..22: mol_type = other DNA
tttgattgcttgcagaataaag

SEQ ID NO: 94114 - DNA, 22 bp, synthetic construct
  misc_feature 1..22: note = chemically synthesized
  source 1..22: mol_type = other DNA
gattgcttgcagaataaagcct

SEQ ID NO: 94115 - DNA, 22 bp, synthetic construct
  misc_feature 1..22: note = chemically synthesized
  source 1..22: mol_type = other DNA
attgcttgcagaataaagccta

SEQ ID NO: 94116 - DNA, 22 bp, synthetic construct
  misc_feature 1..22: note = chemically synthesized
  source 1..22: mol_type = other DNA
cttgcagaataaagcctatcct

SEQ ID NO: 94117 - DNA, 22 bp, synthetic construct
  misc_feature 1..22: note = chemically synthesized
  source 1..22: mol_type = other DNA
gcagaataaagcctatccttga

SEQ ID NO: 94118 - DNA, 22 bp, synthetic construct
  misc_feature 1..22: note = chemically synthesized
  source 1..22: mol_type = other DNA
cagaataaagcctatccttgaa

SEQ ID NO: 94119 - DNA, 22 bp, synthetic construct
  misc_feature 1..22: note = chemically synthesized
  source 1..22: mol_type = other DNA
tccttgaaagctctgcatcatg

SEQ ID NO: 94120 - DNA, 22 bp, synthetic construct
  misc_feature 1..22: note = chemically synthesized
  source 1..22: mol_type = other DNA
gaaagctctgcatcatgggcag

SEQ ID NO: 94121 - DNA, 22 bp, synthetic construct
  misc_feature 1..22: note = chemically synthesized
  source 1..22: mol_type = other DNA
aaagctctgcatcatgggcagt

SEQ ID NO: 94122 - DNA, 22 bp, synthetic construct
  misc_feature 1..22: note = chemically synthesized
  source 1..22: mol_type = other DNA
tgcatcatgggcagtgagctca

SEQ ID NO: 94123 - DNA, 22 bp, synthetic construct
  misc_feature 1..22: note = chemically synthesized
  source 1..22: mol_type = other DNA
catcatgggcagtgagctcagt

SEQ ID NO: 94124 - DNA, 22 bp, synthetic construct
  misc_feature 1..22: note = chemically synthesized
  source 1..22: mol_type = other DNA
agtggtatctggaggacagggc

SEQ ID NO: 94125 - DNA, 22 bp, synthetic construct
  misc_feature 1..22: note = chemically synthesized
  source 1..22: mol_type = other DNA
gaggacagggcactggccactc

SEQ ID NO: 94126 - DNA, 22 bp, synthetic construct
  misc_feature 1..22: note = chemically synthesized
  source 1..22: mol_type = other DNA
gccactccagtcaccatcttct

SEQ ID NO: 94127 - DNA, 22 bp, synthetic construct
  misc_feature 1..22: note = chemically synthesized
  source 1..22: mol_type = other DNA
cagtcaccatcttctgccagga

SEQ ID NO: 94128 - DNA, 22 bp, synthetic construct
  misc_feature 1..22: note = chemically synthesized
  source 1..22: mol_type = other DNA
ctgccaggaagcctgcacctca

SEQ ID NO: 94129 - DNA, 22 bp, synthetic construct
  misc_feature 1..22: note = chemically synthesized
  source 1..22: mol_type = other DNA
tgccaggaagcctgcacctcag

SEQ ID NO: 94130 - DNA, 22 bp, synthetic construct
  misc_feature 1..22: note = chemically synthesized
  source 1..22: mol_type = other DNA
ccaggaagcctgcacctcaggg

SEQ ID NO: 94131 - DNA, 22 bp, synthetic construct
  misc_feature 1..22: note = chemically synthesized
  source 1..22: mol_type = other DNA
cacctcaggggtgaattctttg

SEQ ID NO: 94132 - DNA, 22 bp, synthetic construct
  misc_feature 1..22: note = chemically synthesized
  source 1..22: mol_type = other DNA
aggggtgaattctttgccgaaa

SEQ ID NO: 94133 - DNA, 22 bp, synthetic construct
  misc_feature 1..22: note = chemically synthesized
  source 1..22: mol_type = other DNA
tttgccgaaatggattgccaaa

SEQ ID NO: 94134 - DNA, 22 bp, synthetic construct
  misc_feature 1..22: note = chemically synthesized
  source 1..22: mol_type = other DNA
tgccgaaatggattgccaaaac

SEQ ID NO: 94135 - DNA, 22 bp, synthetic construct
  misc_feature 1..22: note = chemically synthesized
  source 1..22: mol_type = other DNA
gccgaaatggattgccaaaacg

SEQ ID NO: 94136 - DNA, 22 bp, synthetic construct
  misc_feature 1..22: note = chemically synthesized
  source 1..22: mol_type = other DNA
ccgaaatggattgccaaaacgg

SEQ ID NO: 94137 - DNA, 22 bp, synthetic construct
  misc_feature 1..22: note = chemically synthesized
  source 1..22: mol_type = other DNA
ccaaaacggtcaccagcacatt

SEQ ID NO: 94138 - DNA, 22 bp, synthetic construct
  misc_feature 1..22: note = chemically synthesized
  source 1..22: mol_type = other DNA
cccaggagctgttgagatgaaa

SEQ ID NO: 94139 - DNA, 22 bp, synthetic construct
  misc_feature 1..22: note = chemically synthesized
  source 1..22: mol_type = other DNA
ccaggagctgttgagatgaaag

SEQ ID NO: 94140 - DNA, 22 bp, synthetic construct
  misc_feature 1..22: note = chemically synthesized
  source 1..22: mol_type = other DNA
ttgagatgaaaggagacaataa

SEQ ID NO: 94141 - DNA, 22 bp, synthetic construct
  misc_feature 1..22: note = chemically synthesized
  source 1..22: mol_type = other DNA
agatgaaaggagacaataaaga

SEQ ID NO: 94142 - DNA, 22 bp, synthetic construct
  misc_feature 1..22: note = chemically synthesized
  source 1..22: mol_type = other DNA
agagctccagcctggcctccag

SEQ ID NO: 94143 - DNA, 22 bp, synthetic construct
  misc_feature 1..22: note = chemically synthesized
  source 1..22: mol_type = other DNA
cagcctggcctccagataacta

SEQ ID NO: 94144 - DNA, 22 bp, synthetic construct
  misc_feature 1..22: note = chemically synthesized
  source 1..22: mol_type = other DNA
gcctccagataactacacacca

SEQ ID NO: 94145 - DNA, 22 bp, synthetic construct
  misc_feature 1..22: note = chemically synthesized
  source 1..22: mol_type = other DNA
cagataactacacaccaagctt

SEQ ID NO: 94146 - DNA, 22 bp, synthetic construct
  misc_feature 1..22: note = chemically synthesized
  source 1..22: mol_type = other DNA
cacaccaagcttccacccagaa

SEQ ID NO: 94147 - DNA, 22 bp, synthetic construct
  misc_feature 1..22: note = chemically synthesized
  source 1..22: mol_type = other DNA
ccacccagaatcaagcctatgt

SEQ ID NO: 94148 - DNA, 22 bp, synthetic construct
  misc_feature 1..22: note = chemically synthesized
  source 1..22: mol_type = other DNA
cacccagaatcaagcctatgtt

SEQ ID NO: 94149 - DNA, 22 bp, synthetic construct
  misc_feature 1..22: note = chemically synthesized
  source 1..22: mol_type = other DNA
tgttaacttccctcaaagcctg

SEQ ID NO: 94150 - DNA, 22 bp, synthetic construct
  misc_feature 1..22: note = chemically synthesized
  source 1..22: mol_type = other DNA
acttccctcaaagcctgagatt

SEQ ID NO: 94151 - DNA, 22 bp, synthetic construct
  misc_feature 1..22: note = chemically synthesized
  source 1..22: mol_type = other DNA
ccctcaaagcctgagattttgc

SEQ ID NO: 94152 - DNA, 22 bp, synthetic construct
  misc_feature 1..22: note = chemically synthesized
  source 1..22: mol_type = other DNA
cctcaaagcctgagattttgct

SEQ ID NO: 94153 - DNA, 22 bp, synthetic construct
  misc_feature 1..22: note = chemically synthesized
  source 1..22: mol_type = other DNA
aaagcctgagattttgctttcc

SEQ ID NO: 94154 - DNA, 22 bp, synthetic construct
  misc_feature 1..22: note = chemically synthesized
  source 1..22: mol_type = other DNA
agattttgctttcccattaaat

SEQ ID NO: 94155 - DNA, 22 bp, synthetic construct
  misc_feature 1..22: note = chemically synthesized
  source 1..22: mol_type = other DNA
tgctttcccattaaatgcaggt

SEQ ID NO: 94156 - DNA, 22 bp, synthetic construct
  misc_feature 1..22: note = chemically synthesized
  source 1..22: mol_type = other DNA
gctttcccattaaatgcaggta

SEQ ID NO: 94157 - DNA, 22 bp, synthetic construct
  misc_feature 1..22: note = chemically synthesized
  source 1..22: mol_type = other DNA
ctttcccattaaatgcaggtag

SEQ ID NO: 94158 - DNA, 22 bp, synthetic construct
  misc_feature 1..22: note = chemically synthesized
  source 1..22: mol_type = other DNA
tcccattaaatgcaggtagttg

SEQ ID NO: 94159 - DNA, 22 bp, synthetic construct
  misc_feature 1..22: note = chemically synthesized
  source 1..22: mol_type = other DNA
cccattaaatgcaggtagttgt

SEQ ID NO: 94160 - DNA, 22 bp, synthetic construct
  misc_feature 1..22: note = chemically synthesized
  source 1..22: mol_type = other DNA
ccattaaatgcaggtagttgtt

SEQ ID NO: 94161 - DNA, 22 bp, synthetic construct
  misc_feature 1..22: note = chemically synthesized
  source 1..22: mol_type = other DNA
aatgcaggtagttgttcttctt

SEQ ID NO: 94162 - DNA, 22 bp, synthetic construct
  misc_feature 1..22: note = chemically synthesized
  source 1..22: mol_type = other DNA
ttcttcttgcagcactagtcac

SEQ ID NO: 94163 - DNA, 22 bp, synthetic construct
  misc_feature 1..22: note = chemically synthesized
  source 1..22: mol_type = other DNA
ttcttgcagcactagtcactgg

SEQ ID NO: 94164 - DNA, 22 bp, synthetic construct
  misc_feature 1..22: note = chemically synthesized
  source 1..22: mol_type = other DNA
cttgcagcactagtcactggcc

SEQ ID NO: 94165 - DNA, 22 bp, synthetic construct
  misc_feature 1..22: note = chemically synthesized
  source 1..22: mol_type = other DNA
ttgcagcactagtcactggcca

SEQ ID NO: 94166 - DNA, 22 bp, synthetic construct
  misc_feature 1..22: note = chemically synthesized
  source 1..22: mol_type = other DNA
gcagcactagtcactggccata

SEQ ID NO: 94167 - DNA, 22 bp, synthetic construct
  misc_feature 1..22: note = chemically synthesized
  source 1..22: mol_type = other DNA
cagcactagtcactggccataa

SEQ ID NO: 94168 - DNA, 22 bp, synthetic construct
  misc_feature 1..22: note = chemically synthesized
  source 1..22: mol_type = other DNA
gtcactggccataatttaaatc

SEQ ID NO: 94169 - DNA, 22 bp, synthetic construct
  misc_feature 1..22: note = chemically synthesized
  source 1..22: mol_type = other DNA
gccataatttaaatcttgttat

SEQ ID NO: 94170 - DNA, 22 bp, synthetic construct
  misc_feature 1..22: note = chemically synthesized
  source 1..22: mol_type = other DNA
aaatcttgttatcttcttgcca

SEQ ID NO: 94171 - DNA, 22 bp, synthetic construct
  misc_feature 1..22: note = chemically synthesized
  source 1..22: mol_type = other DNA
aatcttgttatcttcttgccac

SEQ ID NO: 94172 - DNA, 22 bp, synthetic construct
  misc_feature 1..22: note = chemically synthesized
  source 1..22: mol_type = other DNA
gttatcttcttgccaccatgaa

SEQ ID NO: 94173 - DNA, 22 bp, synthetic construct
  misc_feature 1..22: note = chemically synthesized
  source 1..22: mol_type = other DNA
ttatcttcttgccaccatgaac

SEQ ID NO: 94174 - DNA, 22 bp, synthetic construct
  misc_feature 1..22: note = chemically synthesized
  source 1..22: mol_type = other DNA
tcttcttgccaccatgaaccct

SEQ ID NO: 94175 - DNA, 22 bp, synthetic construct
  misc_feature 1..22: note = chemically synthesized
  source 1..22: mol_type = other DNA
cttgccaccatgaaccctgtat

SEQ ID NO: 94176 - DNA, 22 bp, synthetic construct
  misc_feature 1..22: note = chemically synthesized
  source 1..22: mol_type = other DNA
ttgccaccatgaaccctgtatg

SEQ ID NO: 94177 - DNA, 22 bp, synthetic construct
  misc_feature 1..22: note = chemically synthesized
  source 1..22: mol_type = other DNA
gccaccatgaaccctgtatgct

SEQ ID NO: 94178 - DNA, 22 bp, synthetic construct
  misc_feature 1..22: note = chemically synthesized
  source 1..22: mol_type = other DNA
ccaccatgaaccctgtatgctg

SEQ ID NO: 94179 - DNA, 22 bp, synthetic construct
  misc_feature 1..22: note = chemically synthesized
  source 1..22: mol_type = other DNA
tatgctgtaggctgaaaacgtt

SEQ ID NO: 94180 - DNA, 22 bp, synthetic construct
  misc_feature 1..22: note = chemically synthesized
  source 1..22: mol_type = other DNA
taggctgaaaacgttaaaagaa

SEQ ID NO: 94181 - DNA, 22 bp, synthetic construct
  misc_feature 1..22: note = chemically synthesized
  source 1..22: mol_type = other DNA
aaaacgttaaaagaaacacacg

SEQ ID NO: 94182 - DNA, 22 bp, synthetic construct
  misc_feature 1..22: note = chemically synthesized
  source 1..22: mol_type = other DNA
aaagaaacacacgctctcacac

SEQ ID NO: 94183 - DNA, 22 bp, synthetic construct
  misc_feature 1..22: note = chemically synthesized
  source 1..22: mol_type = other DNA
tcacacacacacaaacacacgc

SEQ ID NO: 94184 - DNA, 22 bp, synthetic construct
  misc_feature 1..22: note = chemically synthesized
  source 1..22: mol_type = other DNA
acacacacacaaacacacgcgc

SEQ ID NO: 94185 - DNA, 22 bp, synthetic construct
  misc_feature 1..22: note = chemically synthesized
  source 1..22: mol_type = other DNA
actttcaaaatctactccagcc

SEQ ID NO: 94186 - DNA, 22 bp, synthetic construct
  misc_feature 1..22: note = chemically synthesized
  source 1..22: mol_type = other DNA
tcaaaatctactccagcccaaa

SEQ ID NO: 94187 - DNA, 22 bp, synthetic construct
  misc_feature 1..22: note = chemically synthesized
  source 1..22: mol_type = other DNA
caaaatctactccagcccaaat

SEQ ID NO: 94188 - DNA, 22 bp, synthetic construct
  misc_feature 1..22: note = chemically synthesized
  source 1..22: mol_type = other DNA
aaaatctactccagcccaaatg

SEQ ID NO: 94189 - DNA, 22 bp, synthetic construct
  misc_feature 1..22: note = chemically synthesized
  source 1..22: mol_type = other DNA
ctccagcccaaatgtttcaatt

SEQ ID NO: 94190 - DNA, 22 bp, synthetic construct
  misc_feature 1..22: note = chemically synthesized
  source 1..22: mol_type = other DNA
cagcccaaatgtttcaattgtt

SEQ ID NO: 94191 - DNA, 22 bp, synthetic construct
  misc_feature 1..22: note = chemically synthesized
  source 1..22: mol_type = other DNA
caattgttcctcacccctggac

SEQ ID NO: 94192 - DNA, 22 bp, synthetic construct
  misc_feature 1..22: note = chemically synthesized
  source 1..22: mol_type = other DNA
aattgttcctcacccctggaca

SEQ ID NO: 94193 - DNA, 22 bp, synthetic construct
  misc_feature 1..22: note = chemically synthesized
  source 1..22: mol_type = other DNA
ttcctcacccctggacatactt

SEQ ID NO: 94194 - DNA, 22 bp, synthetic construct
  misc_feature 1..22: note = chemically synthesized
  source 1..22: mol_type = other DNA
ctcacccctggacatactttgc

SEQ ID NO: 94195 - DNA, 22 bp, synthetic construct
  misc_feature 1..22: note = chemically synthesized
  source 1..22: mol_type = other DNA
acccctggacatactttgcccc

SEQ ID NO: 94196 - DNA, 22 bp, synthetic construct
  misc_feature 1..22: note = chemically synthesized
  source 1..22: mol_type = other DNA
gacatactttgcccccatctgg

SEQ ID NO: 94197 - DNA, 22 bp, synthetic construct
  misc_feature 1..22: note = chemically synthesized
  source 1..22: mol_type = other DNA
tgcccccatctggaattaaagg

SEQ ID NO: 94198 - DNA, 22 bp, synthetic construct
  misc_feature 1..22: note = chemically synthesized
  source 1..22: mol_type = other DNA
gcccccatctggaattaaagga

SEQ ID NO: 94199 - DNA, 22 bp, synthetic construct
  misc_feature 1..22: note = chemically synthesized
  source 1..22: mol_type = other DNA
cccccatctggaattaaaggat

SEQ ID NO: 94200 - DNA, 22 bp, synthetic construct
  misc_feature 1..22: note = chemically synthesized
  source 1..22: mol_type = other DNA
gaattaaaggatataagtttgt

SEQ ID NO: 94201 - DNA, 22 bp, synthetic construct
  misc_feature 1..22: note = chemically synthesized
  source 1..22: mol_type = other DNA
aaggatataagtttgtaatgaa

SEQ ID NO: 94202 - DNA, 22 bp, synthetic construct
  misc_feature 1..22: note = chemically synthesized
  source 1..22: mol_type = other DNA
gtaatgaagcattagcagcatt

SEQ ID NO: 94203 - DNA, 22 bp, synthetic construct
  misc_feature 1..22: note = chemically synthesized
  source 1..22: mol_type = other DNA
taatgaagcattagcagcattt

SEQ ID NO: 94204 - DNA, 22 bp, synthetic construct
  misc_feature 1..22: note = chemically synthesized
  source 1..22: mol_type = other DNA
gcagcattttatatgtgtccag

SEQ ID NO: 94205 - DNA, 22 bp, synthetic construct
  misc_feature 1..22: note = chemically synthesized
  source 1..22: mol_type = other DNA
tatatgtgtccagctgatatag

SEQ ID NO: 94206 - DNA, 22 bp, synthetic construct
  misc_feature 1..22: note = chemically synthesized
  source 1..22: mol_type = other DNA
atatgtgtccagctgatatagg

SEQ ID NO: 94207 - DNA, 22 bp, synthetic construct
  misc_feature 1..22: note = chemically synthesized
  source 1..22: mol_type = other DNA
tatgtgtccagctgatatagga

SEQ ID NO: 94208 - DNA, 22 bp, synthetic construct
  misc_feature 1..22: note = chemically synthesized
  source 1..22: mol_type = other DNA
atataggaatagccttagcaat

SEQ ID NO: 94209 - DNA, 22 bp, synthetic construct
  misc_feature 1..22: note = chemically synthesized
  source 1..22: mol_type = other DNA
agcaatgtatgtttggccacca

SEQ ID NO: 94210 - DNA, 22 bp, synthetic construct
  misc_feature 1..22: note = chemically synthesized
  source 1..22: mol_type = other DNA
gcaatgtatgtttggccaccaa

SEQ ID NO: 94211 - DNA, 22 bp, synthetic construct
  misc_feature 1..22: note = chemically synthesized
  source 1..22: mol_type = other DNA
ggccaccaaagttccccacttt

SEQ ID NO: 94212 - DNA, 22 bp, synthetic construct
  misc_feature 1..22: note = chemically synthesized
  source 1..22: mol_type = other DNA
gccaccaaagttccccactttg

SEQ ID NO: 94213 - DNA, 22 bp, synthetic construct
  misc_feature 1..22: note = chemically synthesized
  source 1..22: mol_type = other DNA
cccactttgactgagccaatat

SEQ ID NO: 94214 - DNA, 22 bp, synthetic construct
  misc_feature 1..22: note = chemically synthesized
  source 1..22: mol_type = other DNA
tgactgagccaatatatgcctt

SEQ ID NO: 94215 - DNA, 22 bp, synthetic construct
  misc_feature 1..22: note = chemically synthesized
  source 1..22: mol_type = other DNA
gactgagccaatatatgccttc

SEQ ID NO: 94216 - DNA, 22 bp, synthetic construct
  misc_feature 1..22: note = chemically synthesized
  source 1..22: mol_type = other DNA
actgagccaatatatgccttct

SEQ ID NO: 94217 - DNA, 22 bp, synthetic construct
  misc_feature 1..22: note = chemically synthesized
  source 1..22: mol_type = other DNA
agccaatatatgccttctgcct

SEQ ID NO: 94218 - DNA, 22 bp, synthetic construct
  misc_feature 1..22: note = chemically synthesized
  source 1..22: mol_type = other DNA
ctgcctgcatctttttaatgac

SEQ ID NO: 94219 - DNA, 22 bp, synthetic construct
  misc_feature 1..22: note = chemically synthesized
  source 1..22: mol_type = other DNA
tgcctgcatctttttaatgacc

SEQ ID NO: 94220 - DNA, 22 bp, synthetic construct
  misc_feature 1..22: note = chemically synthesized
  source 1..22: mol_type = other DNA
cctgcatctttttaatgaccat

SEQ ID NO: 94221 - DNA, 22 bp, synthetic construct
  misc_feature 1..22: note = chemically synthesized
  source 1..22: mol_type = other DNA
catctttttaatgaccatactt

SEQ ID NO: 94222 - DNA, 22 bp, synthetic construct
  misc_feature 1..22: note = chemically synthesized
  source 1..22: mol_type = other DNA
tttaatgaccatacttgtcctg

SEQ ID NO: 94223 - DNA, 22 bp, synthetic construct
  misc_feature 1..22: note = chemically synthesized
  source 1..22: mol_type = other DNA
ttaatgaccatacttgtcctgc

SEQ ID NO: 94224 - DNA, 22 bp, synthetic construct
  misc_feature 1..22: note = chemically synthesized
  source 1..22: mol_type = other DNA
taatgaccatacttgtcctgcc

SEQ ID NO: 94225 - DNA, 22 bp, synthetic construct
  misc_feature 1..22: note = chemically synthesized
  source 1..22: mol_type = other DNA
aatgaccatacttgtcctgcct

SEQ ID NO: 94226 - DNA, 22 bp, synthetic construct
  misc_feature 1..22: note = chemically synthesized
  source 1..22: mol_type = other DNA
atgaccatacttgtcctgcctc

SEQ ID NO: 94227 - DNA, 22 bp, synthetic construct
  misc_feature 1..22: note = chemically synthesized
  source 1..22: mol_type = other DNA
gtcctgcctccagatagatgtt

SEQ ID NO: 94228 - DNA, 22 bp, synthetic construct
  misc_feature 1..22: note = chemically synthesized
  source 1..22: mol_type = other DNA
tcctgcctccagatagatgttt

SEQ ID NO: 94229 - DNA, 22 bp, synthetic construct
  misc_feature 1..22: note = chemically synthesized
  source 1..22: mol_type = other DNA
cctccagatagatgttttaaaa

SEQ ID NO: 94230 - DNA, 22 bp, synthetic construct
  misc_feature 1..22: note = chemically synthesized
  source 1..22: mol_type = other DNA
cagatagatgttttaaaacgaa

SEQ ID NO: 94231 - DNA, 22 bp, synthetic construct
  misc_feature 1..22: note = chemically synthesized
  source 1..22: mol_type = other DNA
taaaacgaataacaaaaatagg

SEQ ID NO: 94232 - DNA, 22 bp, synthetic construct
  misc_feature 1..22: note = chemically synthesized
  source 1..22: mol_type = other DNA
aaaacgaataacaaaaataggg

SEQ ID NO: 94233 - DNA, 22 bp, synthetic construct
  misc_feature 1..22: note = chemically synthesized
  source 1..22: mol_type = other DNA
aaacgaataacaaaaatagggg

SEQ ID NO: 94234 - DNA, 22 bp, synthetic construct
  misc_feature 1..22: note = chemically synthesized
  source 1..22: mol_type = other DNA
tttctaccgaaatctaataaag

SEQ ID NO: 94235 - DNA, 22 bp, synthetic construct
  misc_feature 1..22: note = chemically synthesized
  source 1..22: mol_type = other DNA
tctaccgaaatctaataaagaa

SEQ ID NO: 94236 - DNA, 22 bp, synthetic construct
  misc_feature 1..22: note = chemically synthesized
  source 1..22: mol_type = other DNA
ctaccgaaatctaataaagaaa

SEQ ID NO: 94237 - DNA, 22 bp, synthetic construct
  misc_feature 1..22: note = chemically synthesized
  source 1..22: mol_type = other DNA
taccgaaatctaataaagaaaa

SEQ ID NO: 94238 - DNA, 22 bp, synthetic construct
  misc_feature 1..22: note = chemically synthesized
  source 1..22: mol_type = other DNA
ccgaaatctaataaagaaaagt

SEQ ID NO: 94239 - DNA, 22 bp, synthetic construct
  misc_feature 1..22: note = chemically synthesized
  source 1..22: mol_type = other DNA
ataaagaaaagtcattttcctc

SEQ ID NO: 94240 - DNA, 22 bp, synthetic construct
  misc_feature 1..22: note = chemically synthesized
  source 1..22: mol_type = other DNA
tcctcatttccacctctctttt

SEQ ID NO: 94241 - DNA, 22 bp, synthetic construct
  misc_feature 1..22: note = chemically synthesized
  source 1..22: mol_type = other DNA
cctcatttccacctctcttttc

SEQ ID NO: 94242 - DNA, 22 bp, synthetic construct
  misc_feature 1..22: note = chemically synthesized
  source 1..22: mol_type = other DNA
ctcatttccacctctcttttct

SEQ ID NO: 94243 - DNA, 22 bp, synthetic construct
  misc_feature 1..22: note = chemically synthesized
  source 1..22: mol_type = other DNA
atttccacctctcttttctcaa

SEQ ID NO: 94244 - DNA, 22 bp, synthetic construct
  misc_feature 1..22: note = chemically synthesized
  source 1..22: mol_type = other DNA
ccacctctcttttctcaaagtc

SEQ ID NO: 94245 - DNA, 22 bp, synthetic construct
  misc_feature 1..22: note = chemically synthesized
  source 1..22: mol_type = other DNA
cacctctcttttctcaaagtca

SEQ ID NO: 94246 - DNA, 22 bp, synthetic construct
  misc_feature 1..22: note = chemically synthesized
  source 1..22: mol_type = other DNA
tcttttctcaaagtcaaagttg

SEQ ID NO: 94247 - DNA, 22 bp, synthetic construct
  misc_feature 1..22: note = chemically synthesized
  source 1..22: mol_type = other DNA
ttttctcaaagtcaaagttgtc

SEQ ID NO: 94248 - DNA, 22 bp, synthetic construct
  misc_feature 1..22: note = chemically synthesized
  source 1..22: mol_type = other DNA
ttctcaaagtcaaagttgtcca

SEQ ID NO: 94249 - DNA, 22 bp, synthetic construct
  misc_feature 1..22: note = chemically synthesized
  source 1..22: mol_type = other DNA
tctcaaagtcaaagttgtccat

SEQ ID NO: 94250 - DNA, 22 bp, synthetic construct
  misc_feature 1..22: note = chemically synthesized
  source 1..22: mol_type = other DNA
ctcaaagtcaaagttgtccatc

SEQ ID NO: 94251 - DNA, 22 bp, synthetic construct
  misc_feature 1..22: note = chemically synthesized
  source 1..22: mol_type = other DNA
tcaaagtcaaagttgtccatct

SEQ ID NO: 94252 - DNA, 22 bp, synthetic construct
  misc_feature 1..22: note = chemically synthesized
  source 1..22: mol_type = other DNA
aaagtcaaagttgtccatctag

SEQ ID NO: 94253 - DNA, 22 bp, synthetic construct
  misc_feature 1..22: note = chemically synthesized
  source 1..22: mol_type = other DNA
tccatctagattttcagaggca

SEQ ID NO: 94254 - DNA, 22 bp, synthetic construct
  misc_feature 1..22: note = chemically synthesized
  source 1..22: mol_type = other DNA
gattttcagaggcactccttag

SEQ ID NO: 94255 - DNA, 22 bp, synthetic construct
  misc_feature 1..22: note = chemically synthesized
  source 1..22: mol_type = other DNA
tcagaggcactccttaggccct

SEQ ID NO: 94256 - DNA, 22 bp, synthetic construct
  misc_feature 1..22: note = chemically synthesized
  source 1..22: mol_type = other DNA
cagaggcactccttaggcccta

SEQ ID NO: 94257 - DNA, 22 bp, synthetic construct
  misc_feature 1..22: note = chemically synthesized
  source 1..22: mol_type = other DNA
agaggcactccttaggccctaa

SEQ ID NO: 94258 - DNA, 22 bp, synthetic construct
  misc_feature 1..22: note = chemically synthesized
  source 1..22: mol_type = other DNA
cttaggccctaaaacattgcca

SEQ ID NO: 94259 - DNA, 22 bp, synthetic construct
  misc_feature 1..22: note = chemically synthesized
  source 1..22: mol_type = other DNA
aggccctaaaacattgccactg

SEQ ID NO: 94260 - DNA, 22 bp, synthetic construct
  misc_feature 1..22: note = chemically synthesized
  source 1..22: mol_type = other DNA
ggccctaaaacattgccactgg

SEQ ID NO: 94261 - DNA, 22 bp, synthetic construct
  misc_feature 1..22: note = chemically synthesized
  source 1..22: mol_type = other DNA
aaacattgccactgggtctcag

SEQ ID NO: 94262 - DNA, 22 bp, synthetic construct
  misc_feature 1..22: note = chemically synthesized
  source 1..22: mol_type = other DNA
ccactgggtctcagcccagtta

SEQ ID NO: 94263 - DNA, 22 bp, synthetic construct
  misc_feature 1..22: note = chemically synthesized
  source 1..22: mol_type = other DNA
ggtctcagcccagttagtcctc

SEQ ID NO: 94264 - DNA, 22 bp, synthetic construct
  misc_feature 1..22: note = chemically synthesized
  source 1..22: mol_type = other DNA
agcccagttagtcctctgcagt

SEQ ID NO: 94265 - DNA, 22 bp, synthetic construct
  misc_feature 1..22: note = chemically synthesized
  source 1..22: mol_type = other DNA
gtcctctgcagtttcttcactc

SEQ ID NO: 94266 - DNA, 22 bp, synthetic construct
  misc_feature 1..22: note = chemically synthesized
  source 1..22: mol_type = other DNA
tgcagtttcttcactcccaacc

SEQ ID NO: 94267 - DNA, 22 bp, synthetic construct
  misc_feature 1..22: note = chemically synthesized
  source 1..22: mol_type = other DNA
cagtttcttcactcccaacccc

SEQ ID NO: 94268 - DNA, 22 bp, synthetic construct
  misc_feature 1..22: note = chemically synthesized
  source 1..22: mol_type = other DNA
cttcactcccaaccccagtatc

SEQ ID NO: 94269 - DNA, 22 bp, synthetic construct
  misc_feature 1..22: note = chemically synthesized
  source 1..22: mol_type = other DNA
ttcactcccaaccccagtatct

SEQ ID NO: 94270 - DNA, 22 bp, synthetic construct
  misc_feature 1..22: note = chemically synthesized
  source 1..22: mol_type = other DNA
cactcccaaccccagtatcttc

SEQ ID NO: 94271 - DNA, 22 bp, synthetic construct
  misc_feature 1..22: note = chemically synthesized
  source 1..22: mol_type = other DNA
actcccaaccccagtatcttca

SEQ ID NO: 94272 - DNA, 22 bp, synthetic construct
  misc_feature 1..22: note = chemically synthesized
  source 1..22: mol_type = other DNA
ccaaccccagtatcttcaaaca

SEQ ID NO: 94273 - DNA, 22 bp, synthetic construct
  misc_feature 1..22: note = chemically synthesized
  source 1..22: mol_type = other DNA
caaacagctcacaccctgctgt

SEQ ID NO: 94274 - DNA, 22 bp, synthetic construct
  misc_feature 1..22: note = chemically synthesized
  source 1..22: mol_type = other DNA
aaacagctcacaccctgctgtg

SEQ ID NO: 94275 - DNA, 22 bp, synthetic construct
  misc_feature 1..22: note = chemically synthesized
  source 1..22: mol_type = other DNA
acaccctgctgtgctcagatca

SEQ ID NO: 94276 - DNA, 22 bp, synthetic construct
  misc_feature 1..22: note = chemically synthesized
  source 1..22: mol_type = other DNA
ctgtgctcagatcaatactcag

SEQ ID NO: 94277 - DNA, 22 bp, synthetic construct
  misc_feature 1..22: note = chemically synthesized
  source 1..22: mol_type = other DNA
tgctcagatcaatactcagttg

SEQ ID NO: 94278 - DNA, 22 bp, synthetic construct
  misc_feature 1..22: note = chemically synthesized
  source 1..22: mol_type = other DNA
agatcaatactcagttgtctaa

SEQ ID NO: 94279 - DNA, 22 bp, synthetic construct
  misc_feature 1..22: note = chemically synthesized
  source 1..22: mol_type = other DNA
agttgtctaagttgcctcgaga

SEQ ID NO: 94280 - DNA, 22 bp, synthetic construct
  misc_feature 1..22: note = chemically synthesized
  source 1..22: mol_type = other DNA
tctaagttgcctcgagactaaa

SEQ ID NO: 94281 - DNA, 22 bp, synthetic construct
  misc_feature 1..22: note = chemically synthesized
  source 1..22: mol_type = other DNA
agttgcctcgagactaaaggca

SEQ ID NO: 94282 - DNA, 22 bp, synthetic construct
  misc_feature 1..22: note = chemically synthesized
  source 1..22: mol_type = other DNA
cctcgagactaaaggcaacagt

SEQ ID NO: 94283 - DNA, 22 bp, synthetic construct
  misc_feature 1..22: note = chemically synthesized
  source 1..22: mol_type = other DNA
gagactaaaggcaacagtgctg

SEQ ID NO: 94284 - DNA, 22 bp, synthetic construct
  misc_feature 1..22: note = chemically synthesized
  source 1..22: mol_type = other DNA
aaggcaacagtgctgaaacatc

SEQ ID NO: 94285 - DNA, 22 bp, synthetic construct
  misc_feature 1..22: note = chemically synthesized
  source 1..22: mol_type = other DNA
aaacatctcctggactcacctt

SEQ ID NO: 94286 - DNA, 22 bp, synthetic construct
  misc_feature 1..22: note = chemically synthesized
  source 1..22: mol_type = other DNA
ctggactcaccttgaagttctc

SEQ ID NO: 94287 - DNA, 22 bp, synthetic construct
  misc_feature 1..22: note = chemically synthesized
  source 1..22: mol_type = other DNA
gactcaccttgaagttctcagg

SEQ ID NO: 94288 - DNA, 22 bp, synthetic construct
  misc_feature 1..22: note = chemically synthesized
  source 1..22: mol_type = other DNA
accttgaagttctcaggatcca

SEQ ID NO: 94289 - DNA, 22 bp, synthetic construct
  misc_feature 1..22: note = chemically synthesized
  source 1..22: mol_type = other DNA
gaagttctcaggatccacatgc

SEQ ID NO: 94290 - DNA, 22 bp, synthetic construct
  misc_feature 1..22: note = chemically synthesized
  source 1..22: mol_type = other DNA
aagttctcaggatccacatgca

SEQ ID NO: 94291 - DNA, 22 bp, synthetic construct
  misc_feature 1..22: note = chemically synthesized
  source 1..22: mol_type = other DNA
tcaggatccacatgcagcttgt

SEQ ID NO: 94292 - DNA, 22 bp, synthetic construct
  misc_feature 1..22: note = chemically synthesized
  source 1..22: mol_type = other DNA
aggatccacatgcagcttgtca

SEQ ID NO: 94293 - DNA, 22 bp, synthetic construct
  misc_feature 1..22: note = chemically synthesized
  source 1..22: mol_type = other DNA
gtcacagtgcagttcactcagc

SEQ ID NO: 94294 - DNA, 22 bp, synthetic construct
  misc_feature 1..22: note = chemically synthesized
  source 1..22: mol_type = other DNA
tcacagtgcagttcactcagct

SEQ ID NO: 94295 - DNA, 22 bp, synthetic construct
  misc_feature 1..22: note = chemically synthesized
  source 1..22: mol_type = other DNA
actcagctgggcaaaggtgccc

SEQ ID NO: 94296 - DNA, 22 bp, synthetic construct
  misc_feature 1..22: note = chemically synthesized
  source 1..22: mol_type = other DNA
agctgggcaaaggtgcccttga

SEQ ID NO: 94297 - DNA, 22 bp, synthetic construct
  misc_feature 1..22: note = chemically synthesized
  source 1..22: mol_type = other DNA
ggcaaaggtgcccttgagatca

SEQ ID NO: 94298 - DNA, 22 bp, synthetic construct
  misc_feature 1..22: note = chemically synthesized
  source 1..22: mol_type = other DNA
gagatcatccaggtgctttatg

SEQ ID NO: 94299 - DNA, 22 bp, synthetic construct
  misc_feature 1..22: note = chemically synthesized
  source 1..22: mol_type = other DNA
agatcatccaggtgctttatgg

SEQ ID NO: 94300 - DNA, 22 bp, synthetic construct
  misc_feature 1..22: note = chemically synthesized
  source 1..22: mol_type = other DNA
tatggcatctcccaaggaagtc

SEQ ID NO: 94301 - DNA, 22 bp, synthetic construct
  misc_feature 1..22: note = chemically synthesized
  source 1..22: mol_type = other DNA
atggcatctcccaaggaagtca

SEQ ID NO: 94302 - DNA, 22 bp, synthetic construct
  misc_feature 1..22: note = chemically synthesized
  source 1..22: mol_type = other DNA
tggcatctcccaaggaagtcag

SEQ ID NO: 94303 - DNA, 22 bp, synthetic construct
  misc_feature 1..22: note = chemically synthesized
  source 1..22: mol_type = other DNA
ccaaggaagtcagcaccttctt

SEQ ID NO: 94304 - DNA, 22 bp, synthetic construct
  misc_feature 1..22: note = chemically synthesized
  source 1..22: mol_type = other DNA
cttgccatgtgccttgactttg

SEQ ID NO: 94305 - DNA, 22 bp, synthetic construct
  misc_feature 1..22: note = chemically synthesized
  source 1..22: mol_type = other DNA
ttgccatgtgccttgactttgg

SEQ ID NO: 94306 - DNA, 22 bp, synthetic construct
  misc_feature 1..22: note = chemically synthesized
  source 1..22: mol_type = other DNA
gccatgtgccttgactttgggg

SEQ ID NO: 94307 - DNA, 22 bp, synthetic construct
  misc_feature 1..22: note = chemically synthesized
  source 1..22: mol_type = other DNA
ccatgtgccttgactttggggt

SEQ ID NO: 94308 - DNA, 22 bp, synthetic construct
  misc_feature 1..22: note = chemically synthesized
  source 1..22: mol_type = other DNA
gactttggggttgcccatgatg

SEQ ID NO: 94309 - DNA, 22 bp, synthetic construct
  misc_feature 1..22: note = chemically synthesized
  source 1..22: mol_type = other DNA
actttggggttgcccatgatgg

SEQ ID NO: 94310 - DNA, 22 bp, synthetic construct
  misc_feature 1..22: note = chemically synthesized
  source 1..22: mol_type = other DNA
tggggttgcccatgatggcaga

SEQ ID NO: 94311 - DNA, 22 bp, synthetic construct
  misc_feature 1..22: note = chemically synthesized
  source 1..22: mol_type = other DNA
ggggttgcccatgatggcagag

SEQ ID NO: 94312 - DNA, 22 bp, synthetic construct
  misc_feature 1..22: note = chemically synthesized
  source 1..22: mol_type = other DNA
gggttgcccatgatggcagagg

SEQ ID NO: 94313 - DNA, 22 bp, synthetic construct
  misc_feature 1..22: note = chemically synthesized
  source 1..22: mol_type = other DNA
cccatgatggcagaggcagagg

SEQ ID NO: 94314 - DNA, 22 bp, synthetic construct
  misc_feature 1..22: note = chemically synthesized
  source 1..22: mol_type = other DNA
ccaaagctgtcaaagaacctct

SEQ ID NO: 94315 - DNA, 22 bp, synthetic construct
  misc_feature 1..22: note = chemically synthesized
  source 1..22: mol_type = other DNA
tcaaagaacctctgggtccatg

SEQ ID NO: 94316 - DNA, 22 bp, synthetic construct
  misc_feature 1..22: note = chemically synthesized
  source 1..22: mol_type = other DNA
tgggtccatgggtagacaacca

SEQ ID NO: 94317 - DNA, 22 bp, synthetic construct
  misc_feature 1..22: note = chemically synthesized
  source 1..22: mol_type = other DNA
ggtccatgggtagacaaccagg

SEQ ID NO: 94318 - DNA, 22 bp, synthetic construct
  misc_feature 1..22: note = chemically synthesized
  source 1..22: mol_type = other DNA
tgagattgacaagaacagtttg

SEQ ID NO: 94319 - DNA, 22 bp, synthetic construct
  misc_feature 1..22: note = chemically synthesized
  source 1..22: mol_type = other DNA
acaagaacagtttgacagtcag

SEQ ID NO: 94320 - DNA, 22 bp, synthetic construct
  misc_feature 1..22: note = chemically synthesized
  source 1..22: mol_type = other DNA
gacagtcagaaggtgccacaaa

SEQ ID NO: 94321 - DNA, 22 bp, synthetic construct
  misc_feature 1..22: note = chemically synthesized
  source 1..22: mol_type = other DNA
acagtcagaaggtgccacaaat

SEQ ID NO: 94322 - DNA, 22 bp, synthetic construct
  misc_feature 1..22: note = chemically synthesized
  source 1..22: mol_type = other DNA
agaagcgacctggacttttgcc

SEQ ID NO: 94323 - DNA, 22 bp, synthetic construct
  misc_feature 1..22: note = chemically synthesized
  source 1..22: mol_type = other DNA
gacttttgccaggcacagggtc

SEQ ID NO: 94324 - DNA, 22 bp, synthetic construct
  misc_feature 1..22: note = chemically synthesized
  source 1..22: mol_type = other DNA
ttgccaggcacagggtccttcc

SEQ ID NO: 94325 - DNA, 22 bp, synthetic construct
  misc_feature 1..22: note = chemically synthesized
  source 1..22: mol_type = other DNA
tgccaggcacagggtccttcct

SEQ ID NO: 94326 - DNA, 22 bp, synthetic construct
  misc_feature 1..22: note = chemically synthesized
  source 1..22: mol_type = other DNA
gccaggcacagggtccttcctt

SEQ ID NO: 94327 - DNA, 22 bp, synthetic construct
  misc_feature 1..22: note = chemically synthesized
  source 1..22: mol_type = other DNA
ccaggcacagggtccttccttc

SEQ ID NO: 94328 - DNA, 22 bp, synthetic construct
  misc_feature 1..22: note = chemically synthesized
  source 1..22: mol_type = other DNA
ccttccctcccttgtcctggtc

SEQ ID NO: 94329 - DNA, 22 bp, synthetic construct
  misc_feature 1..22: note = chemically synthesized
  source 1..22: mol_type = other DNA
cttccctcccttgtcctggtca

SEQ ID NO: 94330 - DNA, 22 bp, synthetic construct
  misc_feature 1..22: note = chemically synthesized
  source 1..22: mol_type = other DNA
ccctcccttgtcctggtcacca

SEQ ID NO: 94331 - DNA, 22 bp, synthetic construct
  misc_feature 1..22: note = chemically synthesized
  source 1..22: mol_type = other DNA
cctcccttgtcctggtcaccag

SEQ ID NO: 94332 - DNA, 22 bp, synthetic construct
  misc_feature 1..22: note = chemically synthesized
  source 1..22: mol_type = other DNA
ccttgtcctggtcaccagagcc

SEQ ID NO: 94333 - DNA, 22 bp, synthetic construct
  misc_feature 1..22: note = chemically synthesized
  source 1..22: mol_type = other DNA
gtcctggtcaccagagcctacc

SEQ ID NO: 94334 - DNA, 22 bp, synthetic construct
  misc_feature 1..22: note = chemically synthesized
  source 1..22: mol_type = other DNA
tcctggtcaccagagcctacct

SEQ ID NO: 94335 - DNA, 22 bp, synthetic construct
  misc_feature 1..22: note = chemically synthesized
  source 1..22: mol_type = other DNA
gtcaccagagcctaccttccca

SEQ ID NO: 94336 - DNA, 22 bp, synthetic construct
  misc_feature 1..22: note = chemically synthesized
  source 1..22: mol_type = other DNA
ccttcccagggtttctcctcca

SEQ ID NO: 94337 - DNA, 22 bp, synthetic construct
  misc_feature 1..22: note = chemically synthesized
  source 1..22: mol_type = other DNA
cccagggtttctcctccagcat

SEQ ID NO: 94338 - DNA, 22 bp, synthetic construct
  misc_feature 1..22: note = chemically synthesized
  source 1..22: mol_type = other DNA
ccagggtttctcctccagcatc

SEQ ID NO: 94339 - DNA, 22 bp, synthetic construct
  misc_feature 1..22: note = chemically synthesized
  source 1..22: mol_type = other DNA
ctcctccagcatcttccacatt

SEQ ID NO: 94340 - DNA, 22 bp, synthetic construct
  misc_feature 1..22: note = chemically synthesized
  source 1..22: mol_type = other DNA
tcctccagcatcttccacattc

SEQ ID NO: 94341 - DNA, 22 bp, synthetic construct
  misc_feature 1..22: note = chemically synthesized
  source 1..22: mol_type = other DNA
ctccagcatcttccacattcac

SEQ ID NO: 94342 - DNA, 22 bp, synthetic construct
  misc_feature 1..22: note = chemically synthesized
  source 1..22: mol_type = other DNA
cagcatcttccacattcacctt

SEQ ID NO: 94343 - DNA, 22 bp, synthetic construct
  misc_feature 1..22: note = chemically synthesized
  source 1..22: mol_type = other DNA
ccacattcaccttgccccacag

SEQ ID NO: 94344 - DNA, 22 bp, synthetic construct
  misc_feature 1..22: note = chemically synthesized
  source 1..22: mol_type = other DNA
cacattcaccttgccccacagg

SEQ ID NO: 94345 - DNA, 22 bp, synthetic construct
  misc_feature 1..22: note = chemically synthesized
  source 1..22: mol_type = other DNA
accttgccccacaggcttgtga

SEQ ID NO: 94346 - DNA, 22 bp, synthetic construct
  misc_feature 1..22: note = chemically synthesized
  source 1..22: mol_type = other DNA
gccccacaggcttgtgatagta

SEQ ID NO: 94347 - DNA, 22 bp, synthetic construct
  misc_feature 1..22: note = chemically synthesized
  source 1..22: mol_type = other DNA
ccccacaggcttgtgatagtag

SEQ ID NO: 94348 - DNA, 22 bp, synthetic construct
  misc_feature 1..22: note = chemically synthesized
  source 1..22: mol_type = other DNA
gtgatagtagccttgtcctcct

SEQ ID NO: 94349 - DNA, 22 bp, synthetic construct
  misc_feature 1..22: note = chemically synthesized
  source 1..22: mol_type = other DNA
tgatagtagccttgtcctcctc

SEQ ID NO: 94350 - DNA, 22 bp, synthetic construct
  misc_feature 1..22: note = chemically synthesized
  source 1..22: mol_type = other DNA
gtcctcctctgtgaaatgaccc

SEQ ID NO: 94351 - DNA, 22 bp, synthetic construct
  misc_feature 1..22: note = chemically synthesized
  source 1..22: mol_type = other DNA
tcctcctctgtgaaatgaccca

SEQ ID NO: 94352 - DNA, 22 bp, synthetic construct
  misc_feature 1..22: note = chemically synthesized
  source 1..22: mol_type = other DNA
ctctgtgaaatgacccatggcg

SEQ ID NO: 94353 - DNA, 22 bp, synthetic construct
  misc_feature 1..22: note = chemically synthesized
  source 1..22: mol_type = other DNA
tgtgaaatgacccatggcgtct

SEQ ID NO: 94354 - DNA, 22 bp, synthetic construct
  misc_feature 1..22: note = chemically synthesized
  source 1..22: mol_type = other DNA
tgaaatgacccatggcgtctgg

SEQ ID NO: 94355 - DNA, 22 bp, synthetic construct
  misc_feature 1..22: note = chemically synthesized
  source 1..22: mol_type = other DNA
gactaggagcttattgataacc

SEQ ID NO: 94356 - DNA, 22 bp, synthetic construct
  misc_feature 1..22: note = chemically synthesized
  source 1..22: mol_type = other DNA
ggagcttattgataacctcaga

SEQ ID NO: 94357 - DNA, 22 bp, synthetic construct
  misc_feature 1..22: note = chemically synthesized
  source 1..22: mol_type = other DNA
attgataacctcagacgttcca

SEQ ID NO: 94358 - DNA, 22 bp, synthetic construct
  misc_feature 1..22: note = chemically synthesized
  source 1..22: mol_type = other DNA
ttgataacctcagacgttccag

SEQ ID NO: 94359 - DNA, 22 bp, synthetic construct
  misc_feature 1..22: note = chemically synthesized
  source 1..22: mol_type = other DNA
ataacctcagacgttccagaag

SEQ ID NO: 94360 - DNA, 22 bp, synthetic construct
  misc_feature 1..22: note = chemically synthesized
  source 1..22: mol_type = other DNA
agacgttccagaagcgagtgtg

SEQ ID NO: 94361 - DNA, 22 bp, synthetic construct
  misc_feature 1..22: note = chemically synthesized
  source 1..22: mol_type = other DNA
cagaagcgagtgtgtggaactg

SEQ ID NO: 94362 - DNA, 22 bp, synthetic construct
  misc_feature 1..22: note = chemically synthesized
  source 1..22: mol_type = other DNA
ctgaagggtgcttccttttatt

SEQ ID NO: 94363 - DNA, 22 bp, synthetic construct
  misc_feature 1..22: note = chemically synthesized
  source 1..22: mol_type = other DNA
aagggtgcttccttttattctt

SEQ ID NO: 94364 - DNA, 22 bp, synthetic construct
  misc_feature 1..22: note = chemically synthesized
  source 1..22: mol_type = other DNA
ccttttattcttcatccctagc

SEQ ID NO: 94365 - DNA, 22 bp, synthetic construct
  misc_feature 1..22: note = chemically synthesized
  source 1..22: mol_type = other DNA
cttttattcttcatccctagcc

SEQ ID NO: 94366 - DNA, 22 bp, synthetic construct
  misc_feature 1..22: note = chemically synthesized
  source 1..22: mol_type = other DNA
ttattcttcatccctagccagc

SEQ ID NO: 94367 - DNA, 22 bp, synthetic construct
  misc_feature 1..22: note = chemically synthesized
  source 1..22: mol_type = other DNA
tattcttcatccctagccagcc

SEQ ID NO: 94368 - DNA, 22 bp, synthetic construct
  misc_feature 1..22: note = chemically synthesized
  source 1..22: mol_type = other DNA
attcttcatccctagccagccg

SEQ ID NO: 94369 - DNA, 22 bp, synthetic construct
  misc_feature 1..22: note = chemically synthesized
  source 1..22: mol_type = other DNA
ttcttcatccctagccagccgc

SEQ ID NO: 94370 - DNA, 22 bp, synthetic construct
  misc_feature 1..22: note = chemically synthesized
  source 1..22: mol_type = other DNA
ttcatccctagccagccgccgg

SEQ ID NO: 94371 - DNA, 22 bp, synthetic construct
  misc_feature 1..22: note = chemically synthesized
  source 1..22: mol_type = other DNA
catccctagccagccgccggcc

SEQ ID NO: 94372 - DNA, 22 bp, synthetic construct
  misc_feature 1..22: note = chemically synthesized
  source 1..22: mol_type = other DNA
atccctagccagccgccggccc

SEQ ID NO: 94373 - DNA, 22 bp, synthetic construct
  misc_feature 1..22: note = chemically synthesized
  source 1..22: mol_type = other DNA
gccagccgccggcccctggcct

SEQ ID NO: 94374 - DNA, 22 bp, synthetic construct
  misc_feature 1..22: note = chemically synthesized
  source 1..22: mol_type = other DNA
gcctcactggatactctaagac

SEQ ID NO: 94375 - DNA, 22 bp, synthetic construct
  misc_feature 1..22: note = chemically synthesized
  source 1..22: mol_type = other DNA
actggatactctaagactattg

SEQ ID NO: 94376 - DNA, 22 bp, synthetic construct
  misc_feature 1..22: note = chemically synthesized
  source 1..22: mol_type = other DNA
gatactctaagactattggtca

SEQ ID NO: 94377 - DNA, 22 bp, synthetic construct
  misc_feature 1..22: note = chemically synthesized
  source 1..22: mol_type = other DNA
taagactattggtcaagtttgc

SEQ ID NO: 94378 - DNA, 22 bp, synthetic construct
  misc_feature 1..22: note = chemically synthesized
  source 1..22: mol_type = other DNA
agactattggtcaagtttgcct

SEQ ID NO: 94379 - DNA, 22 bp, synthetic construct
  misc_feature 1..22: note = chemically synthesized
  source 1..22: mol_type = other DNA
ttggtcaagtttgccttgtcaa

SEQ ID NO: 94380 - DNA, 22 bp, synthetic construct
  misc_feature 1..22: note = chemically synthesized
  source 1..22: mol_type = other DNA
gtcaagtttgccttgtcaaggc

SEQ ID NO: 94381 - DNA, 22 bp, synthetic construct
  misc_feature 1..22: note = chemically synthesized
  source 1..22: mol_type = other DNA
gccttgtcaaggctattggtca

SEQ ID NO: 94382 - DNA, 22 bp, synthetic construct
  misc_feature 1..22: note = chemically synthesized
  source 1..22: mol_type = other DNA
ccttgtcaaggctattggtcaa

SEQ ID NO: 94383 - DNA, 22 bp, synthetic construct
  misc_feature 1..22: note = chemically synthesized
  source 1..22: mol_type = other DNA
gtcaaggctattggtcaaggca

SEQ ID NO: 94384 - DNA, 22 bp, synthetic construct
  misc_feature 1..22: note = chemically synthesized
  source 1..22: mol_type = other DNA
tcaaggctattggtcaaggcaa

SEQ ID NO: 94385 - DNA, 22 bp, synthetic construct
  misc_feature 1..22: note = chemically synthesized
  source 1..22: mol_type = other DNA
ttggtcaaggcaaggctggcca

SEQ ID NO: 94386 - DNA, 22 bp, synthetic construct
  misc_feature 1..22: note = chemically synthesized
  source 1..22: mol_type = other DNA
gtcaaggcaaggctggccaacc

SEQ ID NO: 94387 - DNA, 22 bp, synthetic construct
  misc_feature 1..22: note = chemically synthesized
  source 1..22: mol_type = other DNA
gccaacccatgggtggagttta

SEQ ID NO: 94388 - DNA, 22 bp, synthetic construct
  misc_feature 1..22: note = chemically synthesized
  source 1..22: mol_type = other DNA
agccagggaccgtttcagacag

SEQ ID NO: 94389 - DNA, 22 bp, synthetic construct
  misc_feature 1..22: note = chemically synthesized
  source 1..22: mol_type = other DNA
gccagggaccgtttcagacaga

SEQ ID NO: 94390 - DNA, 22 bp, synthetic construct
  misc_feature 1..22: note = chemically synthesized
  source 1..22: mol_type = other DNA
cagacagatatttgcattgaga

SEQ ID NO: 94391 - DNA, 22 bp, synthetic construct
  misc_feature 1..22: note = chemically synthesized
  source 1..22: mol_type = other DNA
agacagatatttgcattgagat

SEQ ID NO: 94392 - DNA, 22 bp, synthetic construct
  misc_feature 1..22: note = chemically synthesized
  source 1..22: mol_type = other DNA
gcattgagatagtgtggggaag

SEQ ID NO: 94393 - DNA, 22 bp, synthetic construct
  misc_feature 1..22: note = chemically synthesized
  source 1..22: mol_type = other DNA
cattgagatagtgtggggaagg

SEQ ID NO: 94394 - DNA, 22 bp, synthetic construct
  misc_feature 1..22: note = chemically synthesized
  source 1..22: mol_type = other DNA
agatagtgtggggaaggggccc

SEQ ID NO: 94395 - DNA, 22 bp, synthetic construct
  misc_feature 1..22: note = chemically synthesized
  source 1..22: mol_type = other DNA
ctgcttaattttttttatagcc

SEQ ID NO: 94396 - DNA, 22 bp, synthetic construct
  misc_feature 1..22: note = chemically synthesized
  source 1..22: mol_type = other DNA
cttaattttttttatagccttt

SEQ ID NO: 94397 - DNA, 22 bp, synthetic construct
  misc_feature 1..22: note = chemically synthesized
  source 1..22: mol_type = other DNA
aattttttttatagcctttgcc

SEQ ID NO: 94398 - DNA, 22 bp, synthetic construct
  misc_feature 1..22: note = chemically synthesized
  source 1..22: mol_type = other DNA
attttttttatagcctttgcct

SEQ ID NO: 94399 - DNA, 22 bp, synthetic construct
  misc_feature 1..22: note = chemically synthesized
  source 1..22: mol_type = other DNA
tttttatagcctttgccttgtt

SEQ ID NO: 94400 - DNA, 22 bp, synthetic construct
  misc_feature 1..22: note = chemically synthesized
  source 1..22: mol_type = other DNA
ttttatagcctttgccttgttc

SEQ ID NO: 94401 - DNA, 22 bp, synthetic construct
  misc_feature 1..22: note = chemically synthesized
  source 1..22: mol_type = other DNA
tttatagcctttgccttgttcc

SEQ ID NO: 94402 - DNA, 22 bp, synthetic construct
  misc_feature 1..22: note = chemically synthesized
  source 1..22: mol_type = other DNA
ttatagcctttgccttgttccg

SEQ ID NO: 94403 - DNA, 22 bp, synthetic construct
  misc_feature 1..22: note = chemically synthesized
  source 1..22: mol_type = other DNA
tatagcctttgccttgttccga

SEQ ID NO: 94404 - DNA, 22 bp, synthetic construct
  misc_feature 1..22: note = chemically synthesized
  source 1..22: mol_type = other DNA
atagcctttgccttgttccgat

SEQ ID NO: 94405 - DNA, 22 bp, synthetic construct
  misc_feature 1..22: note = chemically synthesized
  source 1..22: mol_type = other DNA
tagcctttgccttgttccgatt

SEQ ID NO: 94406 - DNA, 22 bp, synthetic construct
  misc_feature 1..22: note = chemically synthesized
  source 1..22: mol_type = other DNA
tgccttgttccgattcagtcat

SEQ ID NO: 94407 - DNA, 22 bp, synthetic construct
  misc_feature 1..22: note = chemically synthesized
  source 1..22: mol_type = other DNA
gccttgttccgattcagtcatt

SEQ ID NO: 94408 - DNA, 22 bp, synthetic construct
  misc_feature 1..22: note = chemically synthesized
  source 1..22: mol_type = other DNA
ccttgttccgattcagtcattc

SEQ ID NO: 94409 - DNA, 22 bp, synthetic construct
  misc_feature 1..22: note = chemically synthesized
  source 1..22: mol_type = other DNA
gttccgattcagtcattccaat

SEQ ID NO: 94410 - DNA, 22 bp, synthetic construct
  misc_feature 1..22: note = chemically synthesized
  source 1..22: mol_type = other DNA
ttccgattcagtcattccaatt

SEQ ID NO: 94411 - DNA, 22 bp, synthetic construct
  misc_feature 1..22: note = chemically synthesized
  source 1..22: mol_type = other DNA
cgattcagtcattccaattttt

SEQ ID NO: 94412 - DNA, 22 bp, synthetic construct
  misc_feature 1..22: note = chemically synthesized
  source 1..22: mol_type = other DNA
agtcattccaatttttctctaa

SEQ ID NO: 94413 - DNA, 22 bp, synthetic construct
  misc_feature 1..22: note = chemically synthesized
  source 1..22: mol_type = other DNA
caatttttctctaatttattct

SEQ ID NO: 94414 - DNA, 22 bp, synthetic construct
  misc_feature 1..22: note = chemically synthesized
  source 1..22: mol_type = other DNA
ttctctaatttattcttccctt

SEQ ID NO: 94415 - DNA, 22 bp, synthetic construct
  misc_feature 1..22: note = chemically synthesized
  source 1..22: mol_type = other DNA
tctctaatttattcttcccttt

SEQ ID NO: 94416 - DNA, 22 bp, synthetic construct
  misc_feature 1..22: note = chemically synthesized
  source 1..22: mol_type = other DNA
ctctaatttattcttcccttta

SEQ ID NO: 94417 - DNA, 22 bp, synthetic construct
  misc_feature 1..22: note = chemically synthesized
  source 1..22: mol_type = other DNA
tctaatttattcttccctttag

SEQ ID NO: 94418 - DNA, 22 bp, synthetic construct
  misc_feature 1..22: note = chemically synthesized
  source 1..22: mol_type = other DNA
taatttattcttccctttagct

SEQ ID NO: 94419 - DNA, 22 bp, synthetic construct
  misc_feature 1..22: note = chemically synthesized
  source 1..22: mol_type = other DNA
atttattcttccctttagctag

SEQ ID NO: 94420 - DNA, 22 bp, synthetic construct
  misc_feature 1..22: note = chemically synthesized
  source 1..22: mol_type = other DNA
attcttccctttagctagtttt

SEQ ID NO: 94421 - DNA, 22 bp, synthetic construct
  misc_feature 1..22: note = chemically synthesized
  source 1..22: mol_type = other DNA
ttcttccctttagctagttttc

SEQ ID NO: 94422 - DNA, 22 bp, synthetic construct
  misc_feature 1..22: note = chemically synthesized
  source 1..22: mol_type = other DNA
ttccctttagctagttttcttc

SEQ ID NO: 94423 - DNA, 22 bp, synthetic construct
  misc_feature 1..22: note = chemically synthesized
  source 1..22: mol_type = other DNA
ccctttagctagttttcttctc

SEQ ID NO: 94424 - DNA, 22 bp, synthetic construct
  misc_feature 1..22: note = chemically synthesized
  source 1..22: mol_type = other DNA
cctttagctagttttcttctcc

SEQ ID NO: 94425 - DNA, 22 bp, synthetic construct
  misc_feature 1..22: note = chemically synthesized
  source 1..22: mol_type = other DNA
tagctagttttcttctcccacc

SEQ ID NO: 94426 - DNA, 22 bp, synthetic construct
  misc_feature 1..22: note = chemically synthesized
  source 1..22: mol_type = other DNA
agctagttttcttctcccacca

SEQ ID NO: 94427 - DNA, 22 bp, synthetic construct
  misc_feature 1..22: note = chemically synthesized
  source 1..22: mol_type = other DNA
gctagttttcttctcccaccat

SEQ ID NO: 94428 - DNA, 22 bp, synthetic construct
  misc_feature 1..22: note = chemically synthesized
  source 1..22: mol_type = other DNA
gttttcttctcccaccatagaa

SEQ ID NO: 94429 - DNA, 22 bp, synthetic construct
  misc_feature 1..22: note = chemically synthesized
  source 1..22: mol_type = other DNA
tcttctcccaccatagaagata

SEQ ID NO: 94430 - DNA, 22 bp, synthetic construct
  misc_feature 1..22: note = chemically synthesized
  source 1..22: mol_type = other DNA
cttctcccaccatagaagatac

SEQ ID NO: 94431 - DNA, 22 bp, synthetic construct
  misc_feature 1..22: note = chemically synthesized
  source 1..22: mol_type = other DNA
ttctcccaccatagaagatacc

SEQ ID NO: 94432 - DNA, 22 bp, synthetic construct
  misc_feature 1..22: note = chemically synthesized
  source 1..22: mol_type = other DNA
ctcccaccatagaagataccag

SEQ ID NO: 94433 - DNA, 22 bp, synthetic construct
  misc_feature 1..22: note = chemically synthesized
  source 1..22: mol_type = other DNA
tcccaccatagaagataccagg

SEQ ID NO: 94434 - DNA, 22 bp, synthetic construct
  misc_feature 1..22: note = chemically synthesized
  source 1..22: mol_type = other DNA
ccaccatagaagataccaggac

SEQ ID NO: 94435 - DNA, 22 bp, synthetic construct
  misc_feature 1..22: note = chemically synthesized
  source 1..22: mol_type = other DNA
cttttgtcagccgtttttcacc

SEQ ID NO: 94436 - DNA, 22 bp, synthetic construct
  misc_feature 1..22: note = chemically synthesized
  source 1..22: mol_type = other DNA
ttttgtcagccgtttttcacct

SEQ ID NO: 94437 - DNA, 22 bp, synthetic construct
  misc_feature 1..22: note = chemically synthesized
  source 1..22: mol_type = other DNA
ttgtcagccgtttttcaccttc

SEQ ID NO: 94438 - DNA, 22 bp, synthetic construct
  misc_feature 1..22: note = chemically synthesized
  source 1..22: mol_type = other DNA
tgtcagccgtttttcaccttct

SEQ ID NO: 94439 - DNA, 22 bp, synthetic construct
  misc_feature 1..22: note = chemically synthesized
  source 1..22: mol_type = other DNA
gtcagccgtttttcaccttctt

SEQ ID NO: 94440 - DNA, 22 bp, synthetic construct
  misc_feature 1..22: note = chemically synthesized
  source 1..22: mol_type = other DNA
tcagccgtttttcaccttcttg

SEQ ID NO: 94441 - DNA, 22 bp, synthetic construct
  misc_feature 1..22: note = chemically synthesized
  source 1..22: mol_type = other DNA
ttcaccttcttgtctgtagctc

SEQ ID NO: 94442 - DNA, 22 bp, synthetic construct
  misc_feature 1..22: note = chemically synthesized
  source 1..22: mol_type = other DNA
tcaccttcttgtctgtagctcc

SEQ ID NO: 94443 - DNA, 22 bp, synthetic construct
  misc_feature 1..22: note = chemically synthesized
  source 1..22: mol_type = other DNA
caccttcttgtctgtagctcca

SEQ ID NO: 94444 - DNA, 22 bp, synthetic construct
  misc_feature 1..22: note = chemically synthesized
  source 1..22: mol_type = other DNA
accttcttgtctgtagctccag

SEQ ID NO: 94445 - DNA, 22 bp, synthetic construct
  misc_feature 1..22: note = chemically synthesized
  source 1..22: mol_type = other DNA
cttgtctgtagctccagtgagg

SEQ ID NO: 94446 - DNA, 22 bp, synthetic construct
  misc_feature 1..22: note = chemically synthesized
  source 1..22: mol_type = other DNA
ttgtctgtagctccagtgaggc

SEQ ID NO: 94447 - DNA, 22 bp, synthetic construct
  misc_feature 1..22: note = chemically synthesized
  source 1..22: mol_type = other DNA
gtctgtagctccagtgaggcct

SEQ ID NO: 94448 - DNA, 22 bp, synthetic construct
  misc_feature 1..22: note = chemically synthesized
  source 1..22: mol_type = other DNA
tctgtagctccagtgaggcctg

SEQ ID NO: 94449 - DNA, 22 bp, synthetic construct
  misc_feature 1..22: note = chemically synthesized
  source 1..22: mol_type = other DNA
tagctccagtgaggcctgtagt

SEQ ID NO: 94450 - DNA, 22 bp, synthetic construct
  misc_feature 1..22: note = chemically synthesized
  source 1..22: mol_type = other DNA
cagtgaggcctgtagtttaaag

SEQ ID NO: 94451 - DNA, 22 bp, synthetic construct
  misc_feature 1..22: note = chemically synthesized
  source 1..22: mol_type = other DNA
tagtttaaagttaaagcatgta

SEQ ID NO: 94452 - DNA, 22 bp, synthetic construct
  misc_feature 1..22: note = chemically synthesized
  source 1..22: mol_type = other DNA
aaagttaaagcatgtaccaatt

SEQ ID NO: 94453 - DNA, 22 bp, synthetic construct
  misc_feature 1..22: note = chemically synthesized
  source 1..22: mol_type = other DNA
aagttaaagcatgtaccaattt

SEQ ID NO: 94454 - DNA, 22 bp, synthetic construct
  misc_feature 1..22: note = chemically synthesized
  source 1..22: mol_type = other DNA
aagcatgtaccaatttttgaaa

SEQ ID NO: 94455 - DNA, 22 bp, synthetic construct
  misc_feature 1..22: note = chemically synthesized
  source 1..22: mol_type = other DNA
ttgaaaagttcagggattgtga

SEQ ID NO: 94456 - DNA, 22 bp, synthetic construct
  misc_feature 1..22: note = chemically synthesized
  source 1..22: mol_type = other DNA
tgaaaagttcagggattgtgaa

SEQ ID NO: 94457 - DNA, 22 bp, synthetic construct
  misc_feature 1..22: note = chemically synthesized
  source 1..22: mol_type = other DNA
gaaaagttcagggattgtgaaa

SEQ ID NO: 94458 - DNA, 22 bp, synthetic construct
  misc_feature 1..22: note = chemically synthesized
  source 1..22: mol_type = other DNA
aaaagttcagggattgtgaaat

SEQ ID NO: 94459 - DNA, 22 bp, synthetic construct
  misc_feature 1..22: note = chemically synthesized
  source 1..22: mol_type = other DNA
agggattgtgaaatgtgtttta

SEQ ID NO: 94460 - DNA, 22 bp, synthetic construct
  misc_feature 1..22: note = chemically synthesized
  source 1..22: mol_type = other DNA
tgaaatgtgttttaggcatagg

SEQ ID NO: 94461 - DNA, 22 bp, synthetic construct
  misc_feature 1..22: note = chemically synthesized
  source 1..22: mol_type = other DNA
taggcataggtccaggattttt

SEQ ID NO: 94462 - DNA, 22 bp, synthetic construct
  misc_feature 1..22: note = chemically synthesized
  source 1..22: mol_type = other DNA
aggcataggtccaggatttttg

SEQ ID NO: 94463 - DNA, 22 bp, synthetic construct
  misc_feature 1..22: note = chemically synthesized
  source 1..22: mol_type = other DNA
ggcataggtccaggatttttga

SEQ ID NO: 94464 - DNA, 22 bp, synthetic construct
  misc_feature 1..22: note = chemically synthesized
  source 1..22: mol_type = other DNA
ttgatgggacacgtcttagtct

SEQ ID NO: 94465 - DNA, 22 bp, synthetic construct
  misc_feature 1..22: note = chemically synthesized
  source 1..22: mol_type = other DNA
tgatgggacacgtcttagtctc

SEQ ID NO: 94466 - DNA, 22 bp, synthetic construct
  misc_feature 1..22: note = chemically synthesized
  source 1..22: mol_type = other DNA
gatgggacacgtcttagtctca

SEQ ID NO: 94467 - DNA, 22 bp, synthetic construct
  misc_feature 1..22: note = chemically synthesized
  source 1..22: mol_type = other DNA
atgggacacgtcttagtctcat

SEQ ID NO: 94468 - DNA, 22 bp, synthetic construct
  misc_feature 1..22: note = chemically synthesized
  source 1..22: mol_type = other DNA
agtctcatttagtaagcattgg

SEQ ID NO: 94469 - DNA, 22 bp, synthetic construct
  misc_feature 1..22: note = chemically synthesized
  source 1..22: mol_type = other DNA
gtctcatttagtaagcattggt

SEQ ID NO: 94470 - DNA, 22 bp, synthetic construct
  misc_feature 1..22: note = chemically synthesized
  source 1..22: mol_type = other DNA
atttagtaagcattggtttcca

SEQ ID NO: 94471 - DNA, 22 bp, synthetic construct
  misc_feature 1..22: note = chemically synthesized
  source 1..22: mol_type = other DNA
agtaagcattggtttccaaata

SEQ ID NO: 94472 - DNA, 22 bp, synthetic construct
  misc_feature 1..22: note = chemically synthesized
  source 1..22: mol_type = other DNA
gtaagcattggtttccaaataa

SEQ ID NO: 94473 - DNA, 22 bp, synthetic construct
  misc_feature 1..22: note = chemically synthesized
  source 1..22: mol_type = other DNA
gtttccaaataagaagtgctat

SEQ ID NO: 94474 - DNA, 22 bp, synthetic construct
  misc_feature 1..22: note = chemically synthesized
  source 1..22: mol_type = other DNA
ccaaataagaagtgctatactt

SEQ ID NO: 94475 - DNA, 22 bp, synthetic construct
  misc_feature 1..22: note = chemically synthesized
  source 1..22: mol_type = other DNA
caaataagaagtgctatactta

SEQ ID NO: 94476 - DNA, 22 bp, synthetic construct
  misc_feature 1..22: note = chemically synthesized
  source 1..22: mol_type = other DNA
tacttatctttgaatatactct

SEQ ID NO: 94477 - DNA, 22 bp, synthetic construct
  misc_feature 1..22: note = chemically synthesized
  source 1..22: mol_type = other DNA
atctttgaatatactctctgtg

SEQ ID NO: 94478 - DNA, 22 bp, synthetic construct
  misc_feature 1..22: note = chemically synthesized
  source 1..22: mol_type = other DNA
tctttgaatatactctctgtgg

SEQ ID NO: 94479 - DNA, 22 bp, synthetic construct
  misc_feature 1..22: note = chemically synthesized
  source 1..22: mol_type = other DNA
tgaatatactctctgtggtttt

SEQ ID NO: 94480 - DNA, 22 bp, synthetic construct
  misc_feature 1..22: note = chemically synthesized
  source 1..22: mol_type = other DNA
gaatatactctctgtggtttta

SEQ ID NO: 94481 - DNA, 22 bp, synthetic construct
  misc_feature 1..22: note = chemically synthesized
  source 1..22: mol_type = other DNA
aatatactctctgtggttttag

SEQ ID NO: 94482 - DNA, 22 bp, synthetic construct
  misc_feature 1..22: note = chemically synthesized
  source 1..22: mol_type = other DNA
tctgtggttttaggccattatc

SEQ ID NO: 94483 - DNA, 22 bp, synthetic construct
  misc_feature 1..22: note = chemically synthesized
  source 1..22: mol_type = other DNA
tgtggttttaggccattatctc

SEQ ID NO: 94484 - DNA, 22 bp, synthetic construct
  misc_feature 1..22: note = chemically synthesized
  source 1..22: mol_type = other DNA
tggttttaggccattatctctt

SEQ ID NO: 94485 - DNA, 22 bp, synthetic construct
  misc_feature 1..22: note = chemically synthesized
  source 1..22: mol_type = other DNA
taggccattatctcttaagttc

SEQ ID NO: 94486 - DNA, 22 bp, synthetic construct
  misc_feature 1..22: note = chemically synthesized
  source 1..22: mol_type = other DNA
aggccattatctcttaagttct

SEQ ID NO: 94487 - DNA, 22 bp, synthetic construct
  misc_feature 1..22: note = chemically synthesized
  source 1..22: mol_type = other DNA
ggccattatctcttaagttctc

SEQ ID NO: 94488 - DNA, 22 bp, synthetic construct
  misc_feature 1..22: note = chemically synthesized
  source 1..22: mol_type = other DNA
tctcttaagttctcattagtgt

SEQ ID NO: 94489 - DNA, 22 bp, synthetic construct
  misc_feature 1..22: note = chemically synthesized
  source 1..22: mol_type = other DNA
ttaagttctcattagtgtagtg

SEQ ID NO: 94490 - DNA, 22 bp, synthetic construct
  misc_feature 1..22: note = chemically synthesized
  source 1..22: mol_type = other DNA
aagttctcattagtgtagtgaa

SEQ ID NO: 94491 - DNA, 22 bp, synthetic construct
  misc_feature 1..22: note = chemically synthesized
  source 1..22: mol_type = other DNA
agttctcattagtgtagtgaaa

SEQ ID NO: 94492 - DNA, 22 bp, synthetic construct
  misc_feature 1..22: note = chemically synthesized
  source 1..22: mol_type = other DNA
tcattagtgtagtgaaaaatcc

SEQ ID NO: 94493 - DNA, 22 bp, synthetic construct
  misc_feature 1..22: note = chemically synthesized
  source 1..22: mol_type = other DNA
attagtgtagtgaaaaatccta

SEQ ID NO: 94494 - DNA, 22 bp, synthetic construct
  misc_feature 1..22: note = chemically synthesized
  source 1..22: mol_type = other DNA
gtgtagtgaaaaatcctataaa

SEQ ID NO: 94495 - DNA, 22 bp, synthetic construct
  misc_feature 1..22: note = chemically synthesized
  source 1..22: mol_type = other DNA
taaagcaacagtttcagtgcag

SEQ ID NO: 94496 - DNA, 22 bp, synthetic construct
  misc_feature 1..22: note = chemically synthesized
  source 1..22: mol_type = other DNA
cagtgcaggaatagattaatgt

SEQ ID NO: 94497 - DNA, 22 bp, synthetic construct
  misc_feature 1..22: note = chemically synthesized
  source 1..22: mol_type = other DNA
agtgcaggaatagattaatgtt

SEQ ID NO: 94498 - DNA, 22 bp, synthetic construct
  misc_feature 1..22: note = chemically synthesized
  source 1..22: mol_type = other DNA
atgttatgtaatataatataag

SEQ ID NO: 94499 - DNA, 22 bp, synthetic construct
  misc_feature 1..22: note = chemically synthesized
  source 1..22: mol_type = other DNA
tgtaatataatataagactgaa

SEQ ID NO: 94500 - DNA, 22 bp, synthetic construct
  misc_feature 1..22: note = chemically synthesized
  source 1..22: mol_type = other DNA
aatccttacttcaatatctact

SEQ ID NO: 94501 - DNA, 22 bp, synthetic construct
  misc_feature 1..22: note = chemically synthesized
  source 1..22: mol_type = other DNA
acttcaatatctacttatccgt

SEQ ID NO: 94502 - DNA, 22 bp, synthetic construct
  misc_feature 1..22: note = chemically synthesized
  source 1..22: mol_type = other DNA
cttcaatatctacttatccgta

SEQ ID NO: 94503 - DNA, 22 bp, synthetic construct
  misc_feature 1..22: note = chemically synthesized
  source 1..22: mol_type = other DNA
caatatctacttatccgtacct

SEQ ID NO: 94504 - DNA, 22 bp, synthetic construct
  misc_feature 1..22: note = chemically synthesized
  source 1..22: mol_type = other DNA
aatatctacttatccgtaccta

SEQ ID NO: 94505 - DNA, 22 bp, synthetic construct
  misc_feature 1..22: note = chemically synthesized
  source 1..22: mol_type = other DNA
cttatccgtacctatttgaaat

SEQ ID NO: 94506 - DNA, 22 bp, synthetic construct
  misc_feature 1..22: note = chemically synthesized
  source 1..22: mol_type = other DNA
atccgtacctatttgaaataaa

SEQ ID NO: 94507 - DNA, 22 bp, synthetic construct
  misc_feature 1..22: note = chemically synthesized
  source 1..22: mol_type = other DNA
tccgtacctatttgaaataaat

SEQ ID NO: 94508 - DNA, 22 bp, synthetic construct
  misc_feature 1..22: note = chemically synthesized
  source 1..22: mol_type = other DNA
tttgaaataaatcacgcctgtt

SEQ ID NO: 94509 - DNA, 22 bp, synthetic construct
  misc_feature 1..22: note = chemically synthesized
  source 1..22: mol_type = other DNA
gaaataaatcacgcctgtttca

SEQ ID NO: 94510 - DNA, 22 bp, synthetic construct
  misc_feature 1..22: note = chemically synthesized
  source 1..22: mol_type = other DNA
aaataaatcacgcctgtttcat

SEQ ID NO: 94511 - DNA, 22 bp, synthetic construct
  misc_feature 1..22: note = chemically synthesized
  source 1..22: mol_type = other DNA
tttcatctcagcaaaagtattt

SEQ ID NO: 94512 - DNA, 22 bp, synthetic construct
  misc_feature 1..22: note = chemically synthesized
  source 1..22: mol_type = other DNA
catctcagcaaaagtatttttt

SEQ ID NO: 94513 - DNA, 22 bp, synthetic construct
  misc_feature 1..22: note = chemically synthesized
  source 1..22: mol_type = other DNA
atctcagcaaaagtattttttt

SEQ ID NO: 94514 - DNA, 22 bp, synthetic construct
  misc_feature 1..22: note = chemically synthesized
  source 1..22: mol_type = other DNA
agcaaaagtattttttttatat

SEQ ID NO: 94515 - DNA, 22 bp, synthetic construct
  misc_feature 1..22: note = chemically synthesized
  source 1..22: mol_type = other DNA
tttttatattcaggtatgtatg

SEQ ID NO: 94516 - DNA, 22 bp, synthetic construct
  misc_feature 1..22: note = chemically synthesized
  source 1..22: mol_type = other DNA
ttttatattcaggtatgtatgt

SEQ ID NO: 94517 - DNA, 22 bp, synthetic construct
  misc_feature 1..22: note = chemically synthesized
  source 1..22: mol_type = other DNA
tttatattcaggtatgtatgta

SEQ ID NO: 94518 - DNA, 22 bp, synthetic construct
  misc_feature 1..22: note = chemically synthesized
  source 1..22: mol_type = other DNA
ttatattcaggtatgtatgtag

SEQ ID NO: 94519 - DNA, 22 bp, synthetic construct
  misc_feature 1..22: note = chemically synthesized
  source 1..22: mol_type = other DNA
tatattcaggtatgtatgtagg

SEQ ID NO: 94520 - DNA, 22 bp, synthetic construct
  misc_feature 1..22: note = chemically synthesized
  source 1..22: mol_type = other DNA
atattcaggtatgtatgtaggc

SEQ ID NO: 94521 - DNA, 22 bp, synthetic construct
  misc_feature 1..22: note = chemically synthesized
  source 1..22: mol_type = other DNA
tattcaggtatgtatgtaggca

SEQ ID NO: 94522 - DNA, 22 bp, synthetic construct
  misc_feature 1..22: note = chemically synthesized
  source 1..22: mol_type = other DNA
aggtatgtatgtaggcacccga

SEQ ID NO: 94523 - DNA, 22 bp, synthetic construct
  misc_feature 1..22: note = chemically synthesized
  source 1..22: mol_type = other DNA
atcactggataagtgtatgtgc

SEQ ID NO: 94524 - DNA, 22 bp, synthetic construct
  misc_feature 1..22: note = chemically synthesized
  source 1..22: mol_type = other DNA
tcactggataagtgtatgtgct

SEQ ID NO: 94525 - DNA, 22 bp, synthetic construct
  misc_feature 1..22: note = chemically synthesized
  source 1..22: mol_type = other DNA
gataagtgtatgtgctggctga

SEQ ID NO: 94526 - DNA, 22 bp, synthetic construct
  misc_feature 1..22: note = chemically synthesized
  source 1..22: mol_type = other DNA
gctgatgacccagggttttggt

SEQ ID NO: 94527 - DNA, 22 bp, synthetic construct
  misc_feature 1..22: note = chemically synthesized
  source 1..22: mol_type = other DNA
atgacccagggttttggtgtag

SEQ ID NO: 94528 - DNA, 22 bp, synthetic construct
  misc_feature 1..22: note = chemically synthesized
  source 1..22: mol_type = other DNA
tggtgtagctcttctatgctcg

SEQ ID NO: 94529 - DNA, 22 bp, synthetic construct
  misc_feature 1..22: note = chemically synthesized
  source 1..22: mol_type = other DNA
ggtgtagctcttctatgctcgg

SEQ ID NO: 94530 - DNA, 22 bp, synthetic construct
  misc_feature 1..22: note = chemically synthesized
  source 1..22: mol_type = other DNA
gtgtagctcttctatgctcggt

SEQ ID NO: 94531 - DNA, 22 bp, synthetic construct
  misc_feature 1..22: note = chemically synthesized
  source 1..22: mol_type = other DNA
ttctatgctcggtaaagatgat

SEQ ID NO: 94532 - DNA, 22 bp, synthetic construct
  misc_feature 1..22: note = chemically synthesized
  source 1..22: mol_type = other DNA
ctatgctcggtaaagatgatgg

SEQ ID NO: 94533 - DNA, 22 bp, synthetic construct
  misc_feature 1..22: note = chemically synthesized
  source 1..22: mol_type = other DNA
tatgctcggtaaagatgatggt

SEQ ID NO: 94534 - DNA, 22 bp, synthetic construct
  misc_feature 1..22: note = chemically synthesized
  source 1..22: mol_type = other DNA
tgctcggtaaagatgatggtag

SEQ ID NO: 94535 - DNA, 22 bp, synthetic construct
  misc_feature 1..22: note = chemically synthesized
  source 1..22: mol_type = other DNA
ggtaaagatgatggtagaatgc

SEQ ID NO: 94536 - DNA, 22 bp, synthetic construct
  misc_feature 1..22: note = chemically synthesized
  source 1..22: mol_type = other DNA
tttaccagatactatggattag

SEQ ID NO: 94537 - DNA, 22 bp, synthetic construct
  misc_feature 1..22: note = chemically synthesized
  source 1..22: mol_type = other DNA
taccagatactatggattagaa

SEQ ID NO: 94538 - DNA, 22 bp, synthetic construct
  misc_feature 1..22: note = chemically synthesized
  source 1..22: mol_type = other DNA
accagatactatggattagaat

SEQ ID NO: 94539 - DNA, 22 bp, synthetic construct
  misc_feature 1..22: note = chemically synthesized
  source 1..22: mol_type = other DNA
ccagatactatggattagaatt

SEQ ID NO: 94540 - DNA, 22 bp, synthetic construct
  misc_feature 1..22: note = chemically synthesized
  source 1..22: mol_type = other DNA
tggattagaattaattatcttg

SEQ ID NO: 94541 - DNA, 22 bp, synthetic construct
  misc_feature 1..22: note = chemically synthesized
  source 1..22: mol_type = other DNA
gaattaattatcttgtataaat

SEQ ID NO: 94542 - DNA, 22 bp, synthetic construct
  misc_feature 1..22: note = chemically synthesized
  source 1..22: mol_type = other DNA
attatcttgtataaatgctagg

SEQ ID NO: 94543 - DNA, 22 bp, synthetic construct
  misc_feature 1..22: note = chemically synthesized
  source 1..22: mol_type = other DNA
tcttgtataaatgctaggttca

SEQ ID NO: 94544 - DNA, 22 bp, synthetic construct
  misc_feature 1..22: note = chemically synthesized
  source 1..22: mol_type = other DNA
gtataaatgctaggttcacttc

SEQ ID NO: 94545 - DNA, 22 bp, synthetic construct
  misc_feature 1..22: note = chemically synthesized
  source 1..22: mol_type = other DNA
tataaatgctaggttcacttct

SEQ ID NO: 94546 - DNA, 22 bp, synthetic construct
  misc_feature 1..22: note = chemically synthesized
  source 1..22: mol_type = other DNA
ggttcacttcttagggaatctt

SEQ ID NO: 94547 - DNA, 22 bp, synthetic construct
  misc_feature 1..22: note = chemically synthesized
  source 1..22: mol_type = other DNA
acttcttagggaatcttattct

SEQ ID NO: 94548 - DNA, 22 bp, synthetic construct
  misc_feature 1..22: note = chemically synthesized
  source 1..22: mol_type = other DNA
cttagggaatcttattctaaga

SEQ ID NO: 94549 - DNA, 22 bp, synthetic construct
  misc_feature 1..22: note = chemically synthesized
  source 1..22: mol_type = other DNA
ttagggaatcttattctaagac

SEQ ID NO: 94550 - DNA, 22 bp, synthetic construct
  misc_feature 1..22: note = chemically synthesized
  source 1..22: mol_type = other DNA
agggaatcttattctaagacat

SEQ ID NO: 94551 - DNA, 22 bp, synthetic construct
  misc_feature 1..22: note = chemically synthesized
  source 1..22: mol_type = other DNA
gggaatcttattctaagacata

SEQ ID NO: 94552 - DNA, 22 bp, synthetic construct
  misc_feature 1..22: note = chemically synthesized
  source 1..22: mol_type = other DNA
attctaagacataagacatgta

SEQ ID NO: 94553 - DNA, 22 bp, synthetic construct
  misc_feature 1..22: note = chemically synthesized
  source 1..22: mol_type = other DNA
ttctaagacataagacatgtat

SEQ ID NO: 94554 - DNA, 22 bp, synthetic construct
  misc_feature 1..22: note = chemically synthesized
  source 1..22: mol_type = other DNA
taagacataagacatgtatttg

SEQ ID NO: 94555 - DNA, 22 bp, synthetic construct
  misc_feature 1..22: note = chemically synthesized
  source 1..22: mol_type = other DNA
agacataagacatgtatttgca

SEQ ID NO: 94556 - DNA, 22 bp, synthetic construct
  misc_feature 1..22: note = chemically synthesized
  source 1..22: mol_type = other DNA
gcatggaaaacaactcttaaga

SEQ ID NO: 94557 - DNA, 22 bp, synthetic construct
  misc_feature 1..22: note = chemically synthesized
  source 1..22: mol_type = other DNA
catggaaaacaactcttaagag

SEQ ID NO: 94558 - DNA, 22 bp, synthetic construct
  misc_feature 1..22: note = chemically synthesized
  source 1..22: mol_type = other DNA
ttaagaggcagggactgtttta

SEQ ID NO: 94559 - DNA, 22 bp, synthetic construct
  misc_feature 1..22: note = chemically synthesized
  source 1..22: mol_type = other DNA
aagaggcagggactgttttatt

SEQ ID NO: 94560 - DNA, 22 bp, synthetic construct
  misc_feature 1..22: note = chemically synthesized
  source 1..22: mol_type = other DNA
agaggcagggactgttttattg

SEQ ID NO: 94561 - DNA, 22 bp, synthetic construct
  misc_feature 1..22: note = chemically synthesized
  source 1..22: mol_type = other DNA
ttttattgactaatagtccaca

SEQ ID NO: 94562 - DNA, 22 bp, synthetic construct
  misc_feature 1..22: note = chemically synthesized
  source 1..22: mol_type = other DNA
tattgactaatagtccacacac

SEQ ID NO: 94563 - DNA, 22 bp, synthetic construct
  misc_feature 1..22: note = chemically synthesized
  source 1..22: mol_type = other DNA
attgactaatagtccacacact

SEQ ID NO: 94564 - DNA, 22 bp, synthetic construct
  misc_feature 1..22: note = chemically synthesized
  source 1..22: mol_type = other DNA
ttgactaatagtccacacactg

SEQ ID NO: 94565 - DNA, 22 bp, synthetic construct
  misc_feature 1..22: note = chemically synthesized
  source 1..22: mol_type = other DNA
actaatagtccacacactgtga

SEQ ID NO: 94566 - DNA, 22 bp, synthetic construct
  misc_feature 1..22: note = chemically synthesized
  source 1..22: mol_type = other DNA
atagtccacacactgtgacagc

SEQ ID NO: 94567 - DNA, 22 bp, synthetic construct
  misc_feature 1..22: note = chemically synthesized
  source 1..22: mol_type = other DNA
tgacagctgggatgtcactgta

SEQ ID NO: 94568 - DNA, 22 bp, synthetic construct
  misc_feature 1..22: note = chemically synthesized
  source 1..22: mol_type = other DNA
ggatgtcactgtagtttagaca

SEQ ID NO: 94569 - DNA, 22 bp, synthetic construct
  misc_feature 1..22: note = chemically synthesized
  source 1..22: mol_type = other DNA
tagtttagacatctttatctgt

SEQ ID NO: 94570 - DNA, 22 bp, synthetic construct
  misc_feature 1..22: note = chemically synthesized
  source 1..22: mol_type = other DNA
agacatctttatctgtaactca

SEQ ID NO: 94571 - DNA, 22 bp, synthetic construct
  misc_feature 1..22: note = chemically synthesized
  source 1..22: mol_type = other DNA
gacatctttatctgtaactcag

SEQ ID NO: 94572 - DNA, 22 bp, synthetic construct
  misc_feature 1..22: note = chemically synthesized
  source 1..22: mol_type = other DNA
tatctgtaactcagtgctgttt

SEQ ID NO: 94573 - DNA, 22 bp, synthetic construct
  misc_feature 1..22: note = chemically synthesized
  source 1..22: mol_type = other DNA
atctgtaactcagtgctgtttc

SEQ ID NO: 94574 - DNA, 22 bp, synthetic construct
  misc_feature 1..22: note = chemically synthesized
  source 1..22: mol_type = other DNA
tctgtaactcagtgctgtttct

SEQ ID NO: 94575 - DNA, 22 bp, synthetic construct
  misc_feature 1..22: note = chemically synthesized
  source 1..22: mol_type = other DNA
taactcagtgctgtttctgaca

SEQ ID NO: 94576 - DNA, 22 bp, synthetic construct
  misc_feature 1..22: note = chemically synthesized
  source 1..22: mol_type = other DNA
agtgctgtttctgacatattgg

SEQ ID NO: 94577 - DNA, 22 bp, synthetic construct
  misc_feature 1..22: note = chemically synthesized
  source 1..22: mol_type = other DNA
tttctgacatattggccactta

SEQ ID NO: 94578 - DNA, 22 bp, synthetic construct
  misc_feature 1..22: note = chemically synthesized
  source 1..22: mol_type = other DNA
ctgacatattggccacttaaca

SEQ ID NO: 94579 - DNA, 22 bp, synthetic construct
  misc_feature 1..22: note = chemically synthesized
  source 1..22: mol_type = other DNA
tgacatattggccacttaacat

SEQ ID NO: 94580 - DNA, 22 bp, synthetic construct
  misc_feature 1..22: note = chemically synthesized
  source 1..22: mol_type = other DNA
acatattggccacttaacatgg

SEQ ID NO: 94581 - DNA, 22 bp, synthetic construct
  misc_feature 1..22: note = chemically synthesized
  source 1..22: mol_type = other DNA
gccacttaacatggcaggaagt

SEQ ID NO: 94582 - DNA, 22 bp, synthetic construct
  misc_feature 1..22: note = chemically synthesized
  source 1..22: mol_type = other DNA
aacatggcaggaagtattcatg

SEQ ID NO: 94583 - DNA, 22 bp, synthetic construct
  misc_feature 1..22: note = chemically synthesized
  source 1..22: mol_type = other DNA
acatggcaggaagtattcatgc

SEQ ID NO: 94584 - DNA, 22 bp, synthetic construct
  misc_feature 1..22: note = chemically synthesized
  source 1..22: mol_type = other DNA
atgctgtttttttctttatttt

SEQ ID NO: 94585 - DNA, 22 bp, synthetic construct
  misc_feature 1..22: note = chemically synthesized
  source 1..22: mol_type = other DNA
tttttttctttattttttcttt

SEQ ID NO: 94586 - DNA, 22 bp, synthetic construct
  misc_feature 1..22: note = chemically synthesized
  source 1..22: mol_type = other DNA
ttttctttattttttctttggg

SEQ ID NO: 94587 - DNA, 22 bp, synthetic construct
  misc_feature 1..22: note = chemically synthesized
  source 1..22: mol_type = other DNA
tttctttattttttctttggga

SEQ ID NO: 94588 - DNA, 22 bp, synthetic construct
  misc_feature 1..22: note = chemically synthesized
  source 1..22: mol_type = other DNA
ttctttattttttctttgggat

SEQ ID NO: 94589 - DNA, 22 bp, synthetic construct
  misc_feature 1..22: note = chemically synthesized
  source 1..22: mol_type = other DNA
tctttattttttctttgggatt

SEQ ID NO: 94590 - DNA, 22 bp, synthetic construct
  misc_feature 1..22: note = chemically synthesized
  source 1..22: mol_type = other DNA
ctttattttttctttgggattt

SEQ ID NO: 94591 - DNA, 22 bp, synthetic construct
  misc_feature 1..22: note = chemically synthesized
  source 1..22: mol_type = other DNA
tttattttttctttgggatttt

SEQ ID NO: 94592 - DNA, 22 bp, synthetic construct
  misc_feature 1..22: note = chemically synthesized
  source 1..22: mol_type = other DNA
tattttttctttgggattttta

SEQ ID NO: 94593 - DNA, 22 bp, synthetic construct
  misc_feature 1..22: note = chemically synthesized
  source 1..22: mol_type = other DNA
attttttctttgggatttttat

SEQ ID NO: 94594 - DNA, 22 bp, synthetic construct
  misc_feature 1..22: note = chemically synthesized
  source 1..22: mol_type = other DNA
ttttttctttgggatttttatt

SEQ ID NO: 94595 - DNA, 22 bp, synthetic construct
  misc_feature 1..22: note = chemically synthesized
  source 1..22: mol_type = other DNA
tttctttgggatttttattttt

SEQ ID NO: 94596 - DNA, 22 bp, synthetic construct
  misc_feature 1..22: note = chemically synthesized
  source 1..22: mol_type = other DNA
ttctttgggatttttatttttt

SEQ ID NO: 94597 - DNA, 22 bp, synthetic construct
  misc_feature 1..22: note = chemically synthesized
  source 1..22: mol_type = other DNA
tctttgggatttttattttttg

SEQ ID NO: 94598 - DNA, 22 bp, synthetic construct
  misc_feature 1..22: note = chemically synthesized
  source 1..22: mol_type = other DNA
ctttgggatttttattttttgg

SEQ ID NO: 94599 - DNA, 22 bp, synthetic construct
  misc_feature 1..22: note = chemically synthesized
  source 1..22: mol_type = other DNA
tttgggatttttattttttggt

SEQ ID NO: 94600 - DNA, 22 bp, synthetic construct
  misc_feature 1..22: note = chemically synthesized
  source 1..22: mol_type = other DNA
tgggatttttattttttggtag

SEQ ID NO: 94601 - DNA, 22 bp, synthetic construct
  misc_feature 1..22: note = chemically synthesized
  source 1..22: mol_type = other DNA
gggatttttattttttggtagg

SEQ ID NO: 94602 - DNA, 22 bp, synthetic construct
  misc_feature 1..22: note = chemically synthesized
  source 1..22: mol_type = other DNA
ggatttttattttttggtaggt

SEQ ID NO: 94603 - DNA, 22 bp, synthetic construct
  misc_feature 1..22: note = chemically synthesized
  source 1..22: mol_type = other DNA
ttattttttggtaggtttggtt

SEQ ID NO: 94604 - DNA, 22 bp, synthetic construct
  misc_feature 1..22: note = chemically synthesized
  source 1..22: mol_type = other DNA
tattttttggtaggtttggttt

SEQ ID NO: 94605 - DNA, 22 bp, synthetic construct
  misc_feature 1..22: note = chemically synthesized
  source 1..22: mol_type = other DNA
attttttggtaggtttggtttt

SEQ ID NO: 94606 - DNA, 22 bp, synthetic construct
  misc_feature 1..22: note = chemically synthesized
  source 1..22: mol_type = other DNA
ttttttggtaggtttggttttg

SEQ ID NO: 94607 - DNA, 22 bp, synthetic construct
  misc_feature 1..22: note = chemically synthesized
  source 1..22: mol_type = other DNA
tttggtaggtttggttttgctt

SEQ ID NO: 94608 - DNA, 22 bp, synthetic construct
  misc_feature 1..22: note = chemically synthesized
  source 1..22: mol_type = other DNA
ttggtaggtttggttttgcttt

SEQ ID NO: 94609 - DNA, 22 bp, synthetic construct
  misc_feature 1..22: note = chemically synthesized
  source 1..22: mol_type = other DNA
tggtaggtttggttttgctttt

SEQ ID NO: 94610 - DNA, 22 bp, synthetic construct
  misc_feature 1..22: note = chemically synthesized
  source 1..22: mol_type = other DNA
ggtaggtttggttttgcttttg

SEQ ID NO: 94611 - DNA, 22 bp, synthetic construct
  misc_feature 1..22: note = chemically synthesized
  source 1..22: mol_type = other DNA
gtaggtttggttttgcttttgt

SEQ ID NO: 94612 - DNA, 22 bp, synthetic construct
  misc_feature 1..22: note = chemically synthesized
  source 1..22: mol_type = other DNA
ggttttgcttttgttttttctc

SEQ ID NO: 94613 - DNA, 22 bp, synthetic construct
  misc_feature 1..22: note = chemically synthesized
  source 1..22: mol_type = other DNA
gttttgcttttgttttttctct

SEQ ID NO: 94614 - DNA, 22 bp, synthetic construct
  misc_feature 1..22: note = chemically synthesized
  source 1..22: mol_type = other DNA
tgcttttgttttttctctgaac

SEQ ID NO: 94615 - DNA, 22 bp, synthetic construct
  misc_feature 1..22: note = chemically synthesized
  source 1..22: mol_type = other DNA
gcttttgttttttctctgaact

SEQ ID NO: 94616 - DNA, 22 bp, synthetic construct
  misc_feature 1..22: note = chemically synthesized
  source 1..22: mol_type = other DNA
cttttgttttttctctgaactc

SEQ ID NO: 94617 - DNA, 22 bp, synthetic construct
  misc_feature 1..22: note = chemically synthesized
  source 1..22: mol_type = other DNA
ttgttttttctctgaactcgat

SEQ ID NO: 94618 - DNA, 22 bp, synthetic construct
  misc_feature 1..22: note = chemically synthesized
  source 1..22: mol_type = other DNA
tgttttttctctgaactcgatc

SEQ ID NO: 94619 - DNA, 22 bp, synthetic construct
  misc_feature 1..22: note = chemically synthesized
  source 1..22: mol_type = other DNA
gttttttctctgaactcgatcc

SEQ ID NO: 94620 - DNA, 22 bp, synthetic construct
  misc_feature 1..22: note = chemically synthesized
  source 1..22: mol_type = other DNA
ttttttctctgaactcgatcca

SEQ ID NO: 94621 - DNA, 22 bp, synthetic construct
  misc_feature 1..22: note = chemically synthesized
  source 1..22: mol_type = other DNA
tttctctgaactcgatccatga

SEQ ID NO: 94622 - DNA, 22 bp, synthetic construct
  misc_feature 1..22: note = chemically synthesized
  source 1..22: mol_type = other DNA
ttctctgaactcgatccatgac

SEQ ID NO: 94623 - DNA, 22 bp, synthetic construct
  misc_feature 1..22: note = chemically synthesized
  source 1..22: mol_type = other DNA
tctctgaactcgatccatgacc

SEQ ID NO: 94624 - DNA, 22 bp, synthetic construct
  misc_feature 1..22: note = chemically synthesized
  source 1..22: mol_type = other DNA
ctctgaactcgatccatgacct

SEQ ID NO: 94625 - DNA, 22 bp, synthetic construct
  misc_feature 1..22: note = chemically synthesized
  source 1..22: mol_type = other DNA
tctgaactcgatccatgacctt

SEQ ID NO: 94626 - DNA, 22 bp, synthetic construct
  misc_feature 1..22: note = chemically synthesized
  source 1..22: mol_type = other DNA
tgaactcgatccatgaccttgg

SEQ ID NO: 94627 - DNA, 22 bp, synthetic construct
  misc_feature 1..22: note = chemically synthesized
  source 1..22: mol_type = other DNA
aactcgatccatgaccttggta

SEQ ID NO: 94628 - DNA, 22 bp, synthetic construct
  misc_feature 1..22: note = chemically synthesized
  source 1..22: mol_type = other DNA
gatccatgaccttggtagatta

SEQ ID NO: 94629 - DNA, 22 bp, synthetic construct
  misc_feature 1..22: note = chemically synthesized
  source 1..22: mol_type = other DNA
ggtagattatgacgtcagaaac

SEQ ID NO: 94630 - DNA, 22 bp, synthetic construct
  misc_feature 1..22: note = chemically synthesized
  source 1..22: mol_type = other DNA
gtagattatgacgtcagaaact

SEQ ID NO: 94631 - DNA, 22 bp, synthetic construct
  misc_feature 1..22: note = chemically synthesized
  source 1..22: mol_type = other DNA
tgacgtcagaaactctggaaat

SEQ ID NO: 94632 - DNA, 22 bp, synthetic construct
  misc_feature 1..22: note = chemically synthesized
  source 1..22: mol_type = other DNA
tggaaatctggcttattggagg

SEQ ID NO: 94633 - DNA, 22 bp, synthetic construct
  misc_feature 1..22: note = chemically synthesized
  source 1..22: mol_type = other DNA
gaaatctggcttattggaggag

SEQ ID NO: 94634 - DNA, 22 bp, synthetic construct
  misc_feature 1..22: note = chemically synthesized
  source 1..22: mol_type = other DNA
gcttattggaggagagctctac

SEQ ID NO: 94635 - DNA, 22 bp, synthetic construct
  misc_feature 1..22: note = chemically synthesized
  source 1..22: mol_type = other DNA
attggaggagagctctaccttc

SEQ ID NO: 94636 - DNA, 22 bp, synthetic construct
  misc_feature 1..22: note = chemically synthesized
  source 1..22: mol_type = other DNA
ttggaggagagctctaccttcc

SEQ ID NO: 94637 - DNA, 22 bp, synthetic construct
  misc_feature 1..22: note = chemically synthesized
  source 1..22: mol_type = other DNA
gaggagagctctaccttcccct

SEQ ID NO: 94638 - DNA, 22 bp, synthetic construct
  misc_feature 1..22: note = chemically synthesized
  source 1..22: mol_type = other DNA
taccttcccctaacctatcagg

SEQ ID NO: 94639 - DNA, 22 bp, synthetic construct
  misc_feature 1..22: note = chemically synthesized
  source 1..22: mol_type = other DNA
ccttcccctaacctatcaggtt

SEQ ID NO: 94640 - DNA, 22 bp, synthetic construct
  misc_feature 1..22: note = chemically synthesized
  source 1..22: mol_type = other DNA
cccctaacctatcaggttgata

SEQ ID NO: 94641 - DNA, 22 bp, synthetic construct
  misc_feature 1..22: note = chemically synthesized
  source 1..22: mol_type = other DNA
ccctaacctatcaggttgatag

SEQ ID NO: 94642 - DNA, 22 bp, synthetic construct
  misc_feature 1..22: note = chemically synthesized
  source 1..22: mol_type = other DNA
acctatcaggttgataggaatt

SEQ ID NO: 94643 - DNA, 22 bp, synthetic construct
  misc_feature 1..22: note = chemically synthesized
  source 1..22: mol_type = other DNA
tcaggttgataggaattataat

SEQ ID NO: 94644 - DNA, 22 bp, synthetic construct
  misc_feature 1..22: note = chemically synthesized
  source 1..22: mol_type = other DNA
ataggaattataataatattgg

SEQ ID NO: 94645 - DNA, 22 bp, synthetic construct
  misc_feature 1..22: note = chemically synthesized
  source 1..22: mol_type = other DNA
taataatattggtggaatcctt

SEQ ID NO: 94646 - DNA, 22 bp, synthetic construct
  misc_feature 1..22: note = chemically synthesized
  source 1..22: mol_type = other DNA
gtggaatcctttcagacttcat

SEQ ID NO: 94647 - DNA, 22 bp, synthetic construct
  misc_feature 1..22: note = chemically synthesized
  source 1..22: mol_type = other DNA
tcagacttcataatcctgtgta

SEQ ID NO: 94648 - DNA, 22 bp, synthetic construct
  misc_feature 1..22: note = chemically synthesized
  source 1..22: mol_type = other DNA
cagacttcataatcctgtgtaa

SEQ ID NO: 94649 - DNA, 22 bp, synthetic construct
  misc_feature 1..22: note = chemically synthesized
  source 1..22: mol_type = other DNA
agacttcataatcctgtgtaag

SEQ ID NO: 94650 - DNA, 22 bp, synthetic construct
  misc_feature 1..22: note = chemically synthesized
  source 1..22: mol_type = other DNA
cataatcctgtgtaaggcttat

SEQ ID NO: 94651 - DNA, 22 bp, synthetic construct
  misc_feature 1..22: note = chemically synthesized
  source 1..22: mol_type = other DNA
ataatcctgtgtaaggcttata

SEQ ID NO: 94652 - DNA, 22 bp, synthetic construct
  misc_feature 1..22: note = chemically synthesized
  source 1..22: mol_type = other DNA
tgtaaggcttatatctgctcaa

SEQ ID NO: 94653 - DNA, 22 bp, synthetic construct
  misc_feature 1..22: note = chemically synthesized
  source 1..22: mol_type = other DNA
atatctgctcaaagtgttaggc

SEQ ID NO: 94654 - DNA, 22 bp, synthetic construct
  misc_feature 1..22: note = chemically synthesized
  source 1..22: mol_type = other DNA
tatctgctcaaagtgttaggcg

SEQ ID NO: 94655 - DNA, 22 bp, synthetic construct
  misc_feature 1..22: note = chemically synthesized
  source 1..22: mol_type = other DNA
ctcaaagtgttaggcggctaaa

SEQ ID NO: 94656 - DNA, 22 bp, synthetic construct
  misc_feature 1..22: note = chemically synthesized
  source 1..22: mol_type = other DNA
aaagtgttaggcggctaaaaga

SEQ ID NO: 94657 - DNA, 22 bp, synthetic construct
  misc_feature 1..22: note = chemically synthesized
  source 1..22: mol_type = other DNA
ggcggctaaaagaccagaaaga

SEQ ID NO: 94658 - DNA, 22 bp, synthetic construct
  misc_feature 1..22: note = chemically synthesized
  source 1..22: mol_type = other DNA
aaagaccagaaagatacatgtt

SEQ ID NO: 94659 - DNA, 22 bp, synthetic construct
  misc_feature 1..22: note = chemically synthesized
  source 1..22: mol_type = other DNA
acctgcgcaacaaagctgcaca

SEQ ID NO: 94660 - DNA, 22 bp, synthetic construct
  misc_feature 1..22: note = chemically synthesized
  source 1..22: mol_type = other DNA
cgcaacaaagctgcacatattg

SEQ ID NO: 94661 - DNA, 22 bp, synthetic construct
  misc_feature 1..22: note = chemically synthesized
  source 1..22: mol_type = other DNA
cacatattgcacttgttctttg

SEQ ID NO: 94662 - DNA, 22 bp, synthetic construct
  misc_feature 1..22: note = chemically synthesized
  source 1..22: mol_type = other DNA
cacttgttctttggaagttaaa

SEQ ID NO: 94663 - DNA, 22 bp, synthetic construct
  misc_feature 1..22: note = chemically synthesized
  source 1..22: mol_type = other DNA
gttctttggaagttaaaataaa

SEQ ID NO: 94664 - DNA, 22 bp, synthetic construct
  misc_feature 1..22: note = chemically synthesized
  source 1..22: mol_type = other DNA
ttctttggaagttaaaataaaa

SEQ ID NO: 94665 - DNA, 22 bp, synthetic construct
  misc_feature 1..22: note = chemically synthesized
  source 1..22: mol_type = other DNA
tttggaagttaaaataaaagtt

SEQ ID NO: 94666 - DNA, 22 bp, synthetic construct
  misc_feature 1..22: note = chemically synthesized
  source 1..22: mol_type = other DNA
tggaagttaaaataaaagttga

SEQ ID NO: 94667 - DNA, 22 bp, synthetic construct
  misc_feature 1..22: note = chemically synthesized
  source 1..22: mol_type = other DNA
ggaagttaaaataaaagttgaa

SEQ ID NO: 94668 - DNA, 22 bp, synthetic construct
  misc_feature 1..22: note = chemically synthesized
  source 1..22: mol_type = other DNA
gaagttaaaataaaagttgaat

SEQ ID NO: 94669 - DNA, 22 bp, synthetic construct
  misc_feature 1..22: note = chemically synthesized
  source 1..22: mol_type = other DNA
aaataaaagttgaataagaaag

SEQ ID NO: 94670 - DNA, 22 bp, synthetic construct
  misc_feature 1..22: note = chemically synthesized
  source 1..22: mol_type = other DNA
aataagaaaggaaagaaaaaga

SEQ ID NO: 94671 - DNA, 22 bp, synthetic construct
  misc_feature 1..22: note = chemically synthesized
  source 1..22: mol_type = other DNA
gtcaacttatcagtatcttcca

SEQ ID NO: 94672 - DNA, 22 bp, synthetic construct
  misc_feature 1..22: note = chemically synthesized
  source 1..22: mol_type = other DNA
tcaacttatcagtatcttccag

SEQ ID NO: 94673 - DNA, 22 bp, synthetic construct
  misc_feature 1..22: note = chemically synthesized
  source 1..22: mol_type = other DNA
atcagtatcttccagttactca

SEQ ID NO: 94674 - DNA, 22 bp, synthetic construct
  misc_feature 1..22: note = chemically synthesized
  source 1..22: mol_type = other DNA
tcagtatcttccagttactcac

SEQ ID NO: 94675 - DNA, 22 bp, synthetic construct
  misc_feature 1..22: note = chemically synthesized
  source 1..22: mol_type = other DNA
ccagttactcacataataataa

SEQ ID NO: 94676 - DNA, 22 bp, synthetic construct
  misc_feature 1..22: note = chemically synthesized
  source 1..22: mol_type = other DNA
cagttactcacataataataag

SEQ ID NO: 94677 - DNA, 22 bp, synthetic construct
  misc_feature 1..22: note = chemically synthesized
  source 1..22: mol_type = other DNA
ctcacataataataagtgactt

SEQ ID NO: 94678 - DNA, 22 bp, synthetic construct
  misc_feature 1..22: note = chemically synthesized
  source 1..22: mol_type = other DNA
acataataataagtgacttctc

SEQ ID NO: 94679 - DNA, 22 bp, synthetic construct
  misc_feature 1..22: note = chemically synthesized
  source 1..22: mol_type = other DNA
ctctcaatctaaggatgggtga

SEQ ID NO: 94680 - DNA, 22 bp, synthetic construct
  misc_feature 1..22: note = chemically synthesized
  source 1..22: mol_type = other DNA
tctcaatctaaggatgggtgag

SEQ ID NO: 94681 - DNA, 22 bp, synthetic construct
  misc_feature 1..22: note = chemically synthesized
  source 1..22: mol_type = other DNA
tcaatctaaggatgggtgagaa

SEQ ID NO: 94682 - DNA, 22 bp, synthetic construct
  misc_feature 1..22: note = chemically synthesized
  source 1..22: mol_type = other DNA
aatctaaggatgggtgagaaag

SEQ ID NO: 94683 - DNA, 22 bp, synthetic construct
  misc_feature 1..22: note = chemically synthesized
  source 1..22: mol_type = other DNA
aggatgggtgagaaagattttt

SEQ ID NO: 94684 - DNA, 22 bp, synthetic construct
  misc_feature 1..22: note = chemically synthesized
  source 1..22: mol_type = other DNA
ttattggtatgctggtacagat

SEQ ID NO: 94685 - DNA, 22 bp, synthetic construct
  misc_feature 1..22: note = chemically synthesized
  source 1..22: mol_type = other DNA
tattggtatgctggtacagatt

SEQ ID NO: 94686 - DNA, 22 bp, synthetic construct
  misc_feature 1..22: note = chemically synthesized
  source 1..22: mol_type = other DNA
attggtatgctggtacagatta

SEQ ID NO: 94687 - DNA, 22 bp, synthetic construct
  misc_feature 1..22: note = chemically synthesized
  source 1..22: mol_type = other DNA
ttggtatgctggtacagattat

SEQ ID NO: 94688 - DNA, 22 bp, synthetic construct
  misc_feature 1..22: note = chemically synthesized
  source 1..22: mol_type = other DNA
gtatgctggtacagattataga

SEQ ID NO: 94689 - DNA, 22 bp, synthetic construct
  misc_feature 1..22: note = chemically synthesized
  source 1..22: mol_type = other DNA
gtacagattatagagactgagg

SEQ ID NO: 94690 - DNA, 22 bp, synthetic construct
  misc_feature 1..22: note = chemically synthesized
  source 1..22: mol_type = other DNA
tagagactgaggtgaacccaaa

SEQ ID NO: 94691 - DNA, 22 bp, synthetic construct
  misc_feature 1..22: note = chemically synthesized
  source 1..22: mol_type = other DNA
aggtgaacccaaattagggtct

SEQ ID NO: 94692 - DNA, 22 bp, synthetic construct
  misc_feature 1..22: note = chemically synthesized
  source 1..22: mol_type = other DNA
gggtctctttaagataggggat

SEQ ID NO: 94693 - DNA, 22 bp, synthetic construct
  misc_feature 1..22: note = chemically synthesized
  source 1..22: mol_type = other DNA
tttaagataggggatctgtgag

SEQ ID NO: 94694 - DNA, 22 bp, synthetic construct
  misc_feature 1..22: note = chemically synthesized
  source 1..22: mol_type = other DNA
taagataggggatctgtgagat

SEQ ID NO: 94695 - DNA, 22 bp, synthetic construct
  misc_feature 1..22: note = chemically synthesized
  source 1..22: mol_type = other DNA
aagataggggatctgtgagatg

SEQ ID NO: 94696 - DNA, 22 bp, synthetic construct
  misc_feature 1..22: note = chemically synthesized
  source 1..22: mol_type = other DNA
agataggggatctgtgagatgg

SEQ ID NO: 94697 - DNA, 22 bp, synthetic construct
  misc_feature 1..22: note = chemically synthesized
  source 1..22: mol_type = other DNA
tgagatgggtgtgtatagatct

SEQ ID NO: 94698 - DNA, 22 bp, synthetic construct
  misc_feature 1..22: note = chemically synthesized
  source 1..22: mol_type = other DNA
tggccatatctgagagtctggt

SEQ ID NO: 94699 - DNA, 22 bp, synthetic construct
  misc_feature 1..22: note = chemically synthesized
  source 1..22: mol_type = other DNA
ggccatatctgagagtctggtt

SEQ ID NO: 94700 - DNA, 22 bp, synthetic construct
  misc_feature 1..22: note = chemically synthesized
  source 1..22: mol_type = other DNA
gccatatctgagagtctggttg

SEQ ID NO: 94701 - DNA, 22 bp, synthetic construct
  misc_feature 1..22: note = chemically synthesized
  source 1..22: mol_type = other DNA
agagtctggttgggttccattt

SEQ ID NO: 94702 - DNA, 22 bp, synthetic construct
  misc_feature 1..22: note = chemically synthesized
  source 1..22: mol_type = other DNA
gttgggttccatttgtagagcc

SEQ ID NO: 94703 - DNA, 22 bp, synthetic construct
  misc_feature 1..22: note = chemically synthesized
  source 1..22: mol_type = other DNA
ggttccatttgtagagcctgac

SEQ ID NO: 94704 - DNA, 22 bp, synthetic construct
  misc_feature 1..22: note = chemically synthesized
  source 1..22: mol_type = other DNA
catttgtagagcctgaccttta

SEQ ID NO: 94705 - DNA, 22 bp, synthetic construct
  misc_feature 1..22: note = chemically synthesized
  source 1..22: mol_type = other DNA
gtagagcctgacctttaagaat

SEQ ID NO: 94706 - DNA, 22 bp, synthetic construct
  misc_feature 1..22: note = chemically synthesized
  source 1..22: mol_type = other DNA
tagagcctgacctttaagaatg

SEQ ID NO: 94707 - DNA, 22 bp, synthetic construct
  misc_feature 1..22: note = chemically synthesized
  source 1..22: mol_type = other DNA
acctttaagaatgtgtcagaga

SEQ ID NO: 94708 - DNA, 22 bp, synthetic construct
  misc_feature 1..22: note = chemically synthesized
  source 1..22: mol_type = other DNA
taagaatgtgtcagagactggt

SEQ ID NO: 94709 - DNA, 22 bp, synthetic construct
  misc_feature 1..22: note = chemically synthesized
  source 1..22: mol_type = other DNA
aagaatgtgtcagagactggtg

SEQ ID NO: 94710 - DNA, 22 bp, synthetic construct
  misc_feature 1..22: note = chemically synthesized
  source 1..22: mol_type = other DNA
agaatgtgtcagagactggtgt

SEQ ID NO: 94711 - DNA, 22 bp, synthetic construct
  misc_feature 1..22: note = chemically synthesized
  source 1..22: mol_type = other DNA
gtgtctaagcccgctaaggcct

SEQ ID NO: 94712 - DNA, 22 bp, synthetic construct
  misc_feature 1..22: note = chemically synthesized
  source 1..22: mol_type = other DNA
agcccgctaaggcctaaacaag

SEQ ID NO: 94713 - DNA, 22 bp, synthetic construct
  misc_feature 1..22: note = chemically synthesized
  source 1..22: mol_type = other DNA
aggcctaaacaagtgaatcttt

SEQ ID NO: 94714 - DNA, 22 bp, synthetic construct
  misc_feature 1..22: note = chemically synthesized
  source 1..22: mol_type = other DNA
aacaagtgaatcttttgaatct

SEQ ID NO: 94715 - DNA, 22 bp, synthetic construct
  misc_feature 1..22: note = chemically synthesized
  source 1..22: mol_type = other DNA
ttgaatctctcttttttttttt

SEQ ID NO: 94716 - DNA, 22 bp, synthetic construct
  misc_feature 1..22: note = chemically synthesized
  source 1..22: mol_type = other DNA
tgaatctctctttttttttttt

SEQ ID NO: 94717 - DNA, 22 bp, synthetic construct
  misc_feature 1..22: note = chemically synthesized
  source 1..22: mol_type = other DNA
gaatctctcttttttttttttg

SEQ ID NO: 94718 - DNA, 22 bp, synthetic construct
  misc_feature 1..22: note = chemically synthesized
  source 1..22: mol_type = other DNA
aatctctcttttttttttttga

SEQ ID NO: 94719 - DNA, 22 bp, synthetic construct
  misc_feature 1..22: note = chemically synthesized
  source 1..22: mol_type = other DNA
tcttttttttttttgagacaga

SEQ ID NO: 94720 - DNA, 22 bp, synthetic construct
  misc_feature 1..22: note = chemically synthesized
  source 1..22: mol_type = other DNA
ttttttttttttgagacagagt

SEQ ID NO: 94721 - DNA, 22 bp, synthetic construct
  misc_feature 1..22: note = chemically synthesized
  source 1..22: mol_type = other DNA
ttttttttttgagacagagtct

SEQ ID NO: 94722 - DNA, 22 bp, synthetic construct
  misc_feature 1..22: note = chemically synthesized
  source 1..22: mol_type = other DNA
tttttttttgagacagagtctt

SEQ ID NO: 94723 - DNA, 22 bp, synthetic construct
  misc_feature 1..22: note = chemically synthesized
  source 1..22: mol_type = other DNA
ttttttttgagacagagtcttg

SEQ ID NO: 94724 - DNA, 22 bp, synthetic construct
  misc_feature 1..22: note = chemically synthesized
  source 1..22: mol_type = other DNA
tttttttgagacagagtcttgt

SEQ ID NO: 94725 - DNA, 22 bp, synthetic construct
  misc_feature 1..22: note = chemically synthesized
  source 1..22: mol_type = other DNA
ttttttgagacagagtcttgtt

SEQ ID NO: 94726 - DNA, 22 bp, synthetic construct
  misc_feature 1..22: note = chemically synthesized
  source 1..22: mol_type = other DNA
tttttgagacagagtcttgttc

SEQ ID NO: 94727 - DNA, 22 bp, synthetic construct
  misc_feature 1..22: note = chemically synthesized
  source 1..22: mol_type = other DNA
ttttgagacagagtcttgttct

SEQ ID NO: 94728 - DNA, 22 bp, synthetic construct
  misc_feature 1..22: note = chemically synthesized
  source 1..22: mol_type = other DNA
tttgagacagagtcttgttctg

SEQ ID NO: 94729 - DNA, 22 bp, synthetic construct
  misc_feature 1..22: note = chemically synthesized
  source 1..22: mol_type = other DNA
ttgagacagagtcttgttctgt

SEQ ID NO: 94730 - DNA, 22 bp, synthetic construct
  misc_feature 1..22: note = chemically synthesized
  source 1..22: mol_type = other DNA
tgagacagagtcttgttctgtc

SEQ ID NO: 94731 - DNA, 22 bp, synthetic construct
  misc_feature 1..22: note = chemically synthesized
  source 1..22: mol_type = other DNA
gagacagagtcttgttctgtca

SEQ ID NO: 94732 - DNA, 22 bp, synthetic construct
  misc_feature 1..22: note = chemically synthesized
  source 1..22: mol_type = other DNA
agacagagtcttgttctgtcac

SEQ ID NO: 94733 - DNA, 22 bp, synthetic construct
  misc_feature 1..22: note = chemically synthesized
  source 1..22: mol_type = other DNA
gttctgtcacccaggctggagt

SEQ ID NO: 94734 - DNA, 22 bp, synthetic construct
  misc_feature 1..22: note = chemically synthesized
  source 1..22: mol_type = other DNA
ttctgtcacccaggctggagtg

SEQ ID NO: 94735 - DNA, 22 bp, synthetic construct
  misc_feature 1..22: note = chemically synthesized
  source 1..22: mol_type = other DNA
tgtcacccaggctggagtgcag

SEQ ID NO: 94736 - DNA, 22 bp, synthetic construct
  misc_feature 1..22: note = chemically synthesized
  source 1..22: mol_type = other DNA
tcacccaggctggagtgcagtg

SEQ ID NO: 94737 - DNA, 22 bp, synthetic construct
  misc_feature 1..22: note = chemically synthesized
  source 1..22: mol_type = other DNA
gagtgcagtggtatgatctcgg

SEQ ID NO: 94738 - DNA, 22 bp, synthetic construct
  misc_feature 1..22: note = chemically synthesized
  source 1..22: mol_type = other DNA
ggctcactgcaactcctgcctt

SEQ ID NO: 94739 - DNA, 22 bp, synthetic construct
  misc_feature 1..22: note = chemically synthesized
  source 1..22: mol_type = other DNA
actgcaactcctgccttccagg

SEQ ID NO: 94740 - DNA, 22 bp, synthetic construct
  misc_feature 1..22: note = chemically synthesized
  source 1..22: mol_type = other DNA
caactcctgccttccaggttca

SEQ ID NO: 94741 - DNA, 22 bp, synthetic construct
  misc_feature 1..22: note = chemically synthesized
  source 1..22: mol_type = other DNA
ctgccttccaggttcaagcaat

SEQ ID NO: 94742 - DNA, 22 bp, synthetic construct
  misc_feature 1..22: note = chemically synthesized
  source 1..22: mol_type = other DNA
ccttccaggttcaagcaattct

SEQ ID NO: 94743 - DNA, 22 bp, synthetic construct
  misc_feature 1..22: note = chemically synthesized
  source 1..22: mol_type = other DNA
ccaggttcaagcaattctcctt

SEQ ID NO: 94744 - DNA, 22 bp, synthetic construct
  misc_feature 1..22: note = chemically synthesized
  source 1..22: mol_type = other DNA
caggttcaagcaattctccttc

SEQ ID NO: 94745 - DNA, 22 bp, synthetic construct
  misc_feature 1..22: note = chemically synthesized
  source 1..22: mol_type = other DNA
aagcaattctccttcctcagcc

SEQ ID NO: 94746 - DNA, 22 bp, synthetic construct
  misc_feature 1..22: note = chemically synthesized
  source 1..22: mol_type = other DNA
tccttcctcagcctcccaagta

SEQ ID NO: 94747 - DNA, 22 bp, synthetic construct
  misc_feature 1..22: note = chemically synthesized
  source 1..22: mol_type = other DNA
cttcctcagcctcccaagtagc

SEQ ID NO: 94748 - DNA, 22 bp, synthetic construct
  misc_feature 1..22: note = chemically synthesized
  source 1..22: mol_type = other DNA
cctcagcctcccaagtagctgg

SEQ ID NO: 94749 - DNA, 22 bp, synthetic construct
  misc_feature 1..22: note = chemically synthesized
  source 1..22: mol_type = other DNA
ctcagcctcccaagtagctggg

SEQ ID NO: 94750 - DNA, 22 bp, synthetic construct
  misc_feature 1..22: note = chemically synthesized
  source 1..22: mol_type = other DNA
agcctcccaagtagctgggatt

SEQ ID NO: 94751 - DNA, 22 bp, synthetic construct
  misc_feature 1..22: note = chemically synthesized
  source 1..22: mol_type = other DNA
ccaagtagctgggattacaggc

SEQ ID NO: 94752 - DNA, 22 bp, synthetic construct
  misc_feature 1..22: note = chemically synthesized
  source 1..22: mol_type = other DNA
ggattacaggcacttgccatca

SEQ ID NO: 94753 - DNA, 22 bp, synthetic construct
  misc_feature 1..22: note = chemically synthesized
  source 1..22: mol_type = other DNA
caggcacttgccatcatgcctg

SEQ ID NO: 94754 - DNA, 22 bp, synthetic construct
  misc_feature 1..22: note = chemically synthesized
  source 1..22: mol_type = other DNA
gccatcatgcctgtctaatttt

SEQ ID NO: 94755 - DNA, 22 bp, synthetic construct
  misc_feature 1..22: note = chemically synthesized
  source 1..22: mol_type = other DNA
ccatcatgcctgtctaattttt

SEQ ID NO: 94756 - DNA, 22 bp, synthetic construct
  misc_feature 1..22: note = chemically synthesized
  source 1..22: mol_type = other DNA
tctaatttttgtatttttgtag

SEQ ID NO: 94757 - DNA, 22 bp, synthetic construct
  misc_feature 1..22: note = chemically synthesized
  source 1..22: mol_type = other DNA
atttttgtatttttgtagagat

SEQ ID NO: 94758 - DNA, 22 bp, synthetic construct
  misc_feature 1..22: note = chemically synthesized
  source 1..22: mol_type = other DNA
ttgtatttttgtagagatggga

SEQ ID NO: 94759 - DNA, 22 bp, synthetic construct
  misc_feature 1..22: note = chemically synthesized
  source 1..22: mol_type = other DNA
tgtatttttgtagagatgggat

SEQ ID NO: 94760 - DNA, 22 bp, synthetic construct
  misc_feature 1..22: note = chemically synthesized
  source 1..22: mol_type = other DNA
gtatttttgtagagatgggatt

SEQ ID NO: 94761 - DNA, 22 bp, synthetic construct
  misc_feature 1..22: note = chemically synthesized
  source 1..22: mol_type = other DNA
tatttttgtagagatgggattt

SEQ ID NO: 94762 - DNA, 22 bp, synthetic construct
  misc_feature 1..22: note = chemically synthesized
  source 1..22: mol_type = other DNA
ttgtagagatgggatttcacca

SEQ ID NO: 94763 - DNA, 22 bp, synthetic construct
  misc_feature 1..22: note = chemically synthesized
  source 1..22: mol_type = other DNA
tgtagagatgggatttcaccat

SEQ ID NO: 94764 - DNA, 22 bp, synthetic construct
  misc_feature 1..22: note = chemically synthesized
  source 1..22: mol_type = other DNA
gtagagatgggatttcaccatg

SEQ ID NO: 94765 - DNA, 22 bp, synthetic construct
  misc_feature 1..22: note = chemically synthesized
  source 1..22: mol_type = other DNA
tagagatgggatttcaccatgt

SEQ ID NO: 94766 - DNA, 22 bp, synthetic construct
  misc_feature 1..22: note = chemically synthesized
  source 1..22: mol_type = other DNA
caccatgttggccaggttggtc

SEQ ID NO: 94767 - DNA, 22 bp, synthetic construct
  misc_feature 1..22: note = chemically synthesized
  source 1..22: mol_type = other DNA
accatgttggccaggttggtct

SEQ ID NO: 94768 - DNA, 22 bp, synthetic construct
  misc_feature 1..22: note = chemically synthesized
  source 1..22: mol_type = other DNA
gccaggttggtcttgaactctt

SEQ ID NO: 94769 - DNA, 22 bp, synthetic construct
  misc_feature 1..22: note = chemically synthesized
  source 1..22: mol_type = other DNA
gtcttgaactcttgacctcagg

SEQ ID NO: 94770 - DNA, 22 bp, synthetic construct
  misc_feature 1..22: note = chemically synthesized
  source 1..22: mol_type = other DNA
gaactcttgacctcaggtgatc

SEQ ID NO: 94771 - DNA, 22 bp, synthetic construct
  misc_feature 1..22: note = chemically synthesized
  source 1..22: mol_type = other DNA
aactcttgacctcaggtgatct

SEQ ID NO: 94772 - DNA, 22 bp, synthetic construct
  misc_feature 1..22: note = chemically synthesized
  source 1..22: mol_type = other DNA
ttgacctcaggtgatctgcctg

SEQ ID NO: 94773 - DNA, 22 bp, synthetic construct
  misc_feature 1..22: note = chemically synthesized
  source 1..22: mol_type = other DNA
gacctcaggtgatctgcctgcc

SEQ ID NO: 94774 - DNA, 22 bp, synthetic construct
  misc_feature 1..22: note = chemically synthesized
  source 1..22: mol_type = other DNA
acctcaggtgatctgcctgcct

SEQ ID NO: 94775 - DNA, 22 bp, synthetic construct
  misc_feature 1..22: note = chemically synthesized
  source 1..22: mol_type = other DNA
aggtgatctgcctgccttggcc

SEQ ID NO: 94776 - DNA, 22 bp, synthetic construct
  misc_feature 1..22: note = chemically synthesized
  source 1..22: mol_type = other DNA
cctgccttggcctcccaaaatt

SEQ ID NO: 94777 - DNA, 22 bp, synthetic construct
  misc_feature 1..22: note = chemically synthesized
  source 1..22: mol_type = other DNA
ccttggcctcccaaaattctgg

SEQ ID NO: 94778 - DNA, 22 bp, synthetic construct
  misc_feature 1..22: note = chemically synthesized
  source 1..22: mol_type = other DNA
ggcctcccaaaattctgggatt

SEQ ID NO: 94779 - DNA, 22 bp, synthetic construct
  misc_feature 1..22: note = chemically synthesized
  source 1..22: mol_type = other DNA
gcctcccaaaattctgggatta

SEQ ID NO: 94780 - DNA, 22 bp, synthetic construct
  misc_feature 1..22: note = chemically synthesized
  source 1..22: mol_type = other DNA
ccaaaattctgggattacaggc

SEQ ID NO: 94781 - DNA, 22 bp, synthetic construct
  misc_feature 1..22: note = chemically synthesized
  source 1..22: mol_type = other DNA
tgggattacaggcgtgagccac

SEQ ID NO: 94782 - DNA, 22 bp, synthetic construct
  misc_feature 1..22: note = chemically synthesized
  source 1..22: mol_type = other DNA
ggattacaggcgtgagccacca

SEQ ID NO: 94783 - DNA, 22 bp, synthetic construct
  misc_feature 1..22: note = chemically synthesized
  source 1..22: mol_type = other DNA
caggcgtgagccaccactccca

SEQ ID NO: 94784 - DNA, 22 bp, synthetic construct
  misc_feature 1..22: note = chemically synthesized
  source 1..22: mol_type = other DNA
ccagcctctaaacaagtgaatc

SEQ ID NO: 94785 - DNA, 22 bp, synthetic construct
  misc_feature 1..22: note = chemically synthesized
  source 1..22: mol_type = other DNA
taaacaagtgaatcttaattgc

SEQ ID NO: 94786 - DNA, 22 bp, synthetic construct
  misc_feature 1..22: note = chemically synthesized
  source 1..22: mol_type = other DNA
aacaagtgaatcttaattgctc

SEQ ID NO: 94787 - DNA, 22 bp, synthetic construct
  misc_feature 1..22: note = chemically synthesized
  source 1..22: mol_type = other DNA
aattgctcctcctcagactaag

SEQ ID NO: 94788 - DNA, 22 bp, synthetic construct
  misc_feature 1..22: note = chemically synthesized
  source 1..22: mol_type = other DNA
attgctcctcctcagactaagg

SEQ ID NO: 94789 - DNA, 22 bp, synthetic construct
  misc_feature 1..22: note = chemically synthesized
  source 1..22: mol_type = other DNA
ctcctcctcagactaaggaata

SEQ ID NO: 94790 - DNA, 22 bp, synthetic construct
  misc_feature 1..22: note = chemically synthesized
  source 1..22: mol_type = other DNA
ctcctcagactaaggaatatct

SEQ ID NO: 94791 - DNA, 22 bp, synthetic construct
  misc_feature 1..22: note = chemically synthesized
  source 1..22: mol_type = other DNA
ctcagactaaggaatatctagg

SEQ ID NO: 94792 - DNA, 22 bp, synthetic construct
  misc_feature 1..22: note = chemically synthesized
  source 1..22: mol_type = other DNA
agactaaggaatatctaggatc

SEQ ID NO: 94793 - DNA, 22 bp, synthetic construct
  misc_feature 1..22: note = chemically synthesized
  source 1..22: mol_type = other DNA
aggaatatctaggatccctcct

SEQ ID NO: 94794 - DNA, 22 bp, synthetic construct
  misc_feature 1..22: note = chemically synthesized
  source 1..22: mol_type = other DNA
ggatccctcctgttttcaaaca

SEQ ID NO: 94795 - DNA, 22 bp, synthetic construct
  misc_feature 1..22: note = chemically synthesized
  source 1..22: mol_type = other DNA
ctgttttcaaacaacttcccca

SEQ ID NO: 94796 - DNA, 22 bp, synthetic construct
  misc_feature 1..22: note = chemically synthesized
  source 1..22: mol_type = other DNA
ttttcaaacaacttccccattt

SEQ ID NO: 94797 - DNA, 22 bp, synthetic construct
  misc_feature 1..22: note = chemically synthesized
  source 1..22: mol_type = other DNA
tcaaacaacttccccatttatc

SEQ ID NO: 94798 - DNA, 22 bp, synthetic construct
  misc_feature 1..22: note = chemically synthesized
  source 1..22: mol_type = other DNA
caaacaacttccccatttatcc

SEQ ID NO: 94799 - DNA, 22 bp, synthetic construct
  misc_feature 1..22: note = chemically synthesized
  source 1..22: mol_type = other DNA
aaacaacttccccatttatcca

SEQ ID NO: 94800 - DNA, 22 bp, synthetic construct
  misc_feature 1..22: note = chemically synthesized
  source 1..22: mol_type = other DNA
ccccatttatccaaaaaccaag

SEQ ID NO: 94801 - DNA, 22 bp, synthetic construct
  misc_feature 1..22: note = chemically synthesized
  source 1..22: mol_type = other DNA
cccatttatccaaaaaccaagg

SEQ ID NO: 94802 - DNA, 22 bp, synthetic construct
  misc_feature 1..22: note = chemically synthesized
  source 1..22: mol_type = other DNA
atccaaaaaccaaggcagtgtt

SEQ ID NO: 94803 - DNA, 22 bp, synthetic construct
  misc_feature 1..22: note = chemically synthesized
  source 1..22: mol_type = other DNA
tccaaaaaccaaggcagtgttc

SEQ ID NO: 94804 - DNA, 22 bp, synthetic construct
  misc_feature 1..22: note = chemically synthesized
  source 1..22: mol_type = other DNA
taaaagtcatgtataaaccctt

SEQ ID NO: 94805 - DNA, 22 bp, synthetic construct
  misc_feature 1..22: note = chemically synthesized
  source 1..22: mol_type = other DNA
aaagtcatgtataaacccttat

SEQ ID NO: 94806 - DNA, 22 bp, synthetic construct
  misc_feature 1..22: note = chemically synthesized
  source 1..22: mol_type = other DNA
atttcctcttatgcttttgagg

SEQ ID NO: 94807 - DNA, 22 bp, synthetic construct
  misc_feature 1..22: note = chemically synthesized
  source 1..22: mol_type = other DNA
tttcctcttatgcttttgaggc

SEQ ID NO: 94808 - DNA, 22 bp, synthetic construct
  misc_feature 1..22: note = chemically synthesized
  source 1..22: mol_type = other DNA
cctcttatgcttttgaggcaat

SEQ ID NO: 94809 - DNA, 22 bp, synthetic construct
  misc_feature 1..22: note = chemically synthesized
  source 1..22: mol_type = other DNA
ctcttatgcttttgaggcaata

SEQ ID NO: 94810 - DNA, 22 bp, synthetic construct
  misc_feature 1..22: note = chemically synthesized
  source 1..22: mol_type = other DNA
ttatgcttttgaggcaatatct

SEQ ID NO: 94811 - DNA, 22 bp, synthetic construct
  misc_feature 1..22: note = chemically synthesized
  source 1..22: mol_type = other DNA
atgcttttgaggcaatatcttt

SEQ ID NO: 94812 - DNA, 22 bp, synthetic construct
  misc_feature 1..22: note = chemically synthesized
  source 1..22: mol_type = other DNA
tgcttttgaggcaatatctttt

SEQ ID NO: 94813 - DNA, 22 bp, synthetic construct
  misc_feature 1..22: note = chemically synthesized
  source 1..22: mol_type = other DNA
ttgaggcaatatcttttaagag

SEQ ID NO: 94814 - DNA, 22 bp, synthetic construct
  misc_feature 1..22: note = chemically synthesized
  source 1..22: mol_type = other DNA
tgaggcaatatcttttaagagt

SEQ ID NO: 94815 - DNA, 22 bp, synthetic construct
  misc_feature 1..22: note = chemically synthesized
  source 1..22: mol_type = other DNA
gaggcaatatcttttaagagtt

SEQ ID NO: 94816 - DNA, 22 bp, synthetic construct
  misc_feature 1..22: note = chemically synthesized
  source 1..22: mol_type = other DNA
aggcaatatcttttaagagttt

SEQ ID NO: 94817 - DNA, 22 bp, synthetic construct
  misc_feature 1..22: note = chemically synthesized
  source 1..22: mol_type = other DNA
ttaagagtttgttgatttctcc

SEQ ID NO: 94818 - DNA, 22 bp, synthetic construct
  misc_feature 1..22: note = chemically synthesized
  source 1..22: mol_type = other DNA
taagagtttgttgatttctcct

SEQ ID NO: 94819 - DNA, 22 bp, synthetic construct
  misc_feature 1..22: note = chemically synthesized
  source 1..22: mol_type = other DNA
aagagtttgttgatttctcctt

SEQ ID NO: 94820 - DNA, 22 bp, synthetic construct
  misc_feature 1..22: note = chemically synthesized
  source 1..22: mol_type = other DNA
agagtttgttgatttctcctta

SEQ ID NO: 94821 - DNA, 22 bp, synthetic construct
  misc_feature 1..22: note = chemically synthesized
  source 1..22: mol_type = other DNA
gttgatttctccttatccataa

SEQ ID NO: 94822 - DNA, 22 bp, synthetic construct
  misc_feature 1..22: note = chemically synthesized
  source 1..22: mol_type = other DNA
ttgatttctccttatccataac

SEQ ID NO: 94823 - DNA, 22 bp, synthetic construct
  misc_feature 1..22: note = chemically synthesized
  source 1..22: mol_type = other DNA
atttctccttatccataactgt

SEQ ID NO: 94824 - DNA, 22 bp, synthetic construct
  misc_feature 1..22: note = chemically synthesized
  source 1..22: mol_type = other DNA
ctccttatccataactgtctta

SEQ ID NO: 94825 - DNA, 22 bp, synthetic construct
  misc_feature 1..22: note = chemically synthesized
  source 1..22: mol_type = other DNA
tccttatccataactgtcttat

SEQ ID NO: 94826 - DNA, 22 bp, synthetic construct
  misc_feature 1..22: note = chemically synthesized
  source 1..22: mol_type = other DNA
cttatccataactgtcttattc

SEQ ID NO: 94827 - DNA, 22 bp, synthetic construct
  misc_feature 1..22: note = chemically synthesized
  source 1..22: mol_type = other DNA
atccataactgtcttattcctc

SEQ ID NO: 94828 - DNA, 22 bp, synthetic construct
  misc_feature 1..22: note = chemically synthesized
  source 1..22: mol_type = other DNA
tccataactgtcttattcctcg

SEQ ID NO: 94829 - DNA, 22 bp, synthetic construct
  misc_feature 1..22: note = chemically synthesized
  source 1..22: mol_type = other DNA
tcttattcctcgatttttccta

SEQ ID NO: 94830 - DNA, 22 bp, synthetic construct
  misc_feature 1..22: note = chemically synthesized
  source 1..22: mol_type = other DNA
attcctcgatttttcctatatc

SEQ ID NO: 94831 - DNA, 22 bp, synthetic construct
  misc_feature 1..22: note = chemically synthesized
  source 1..22: mol_type = other DNA
ttcctcgatttttcctatatca

SEQ ID NO: 94832 - DNA, 22 bp, synthetic construct
  misc_feature 1..22: note = chemically synthesized
  source 1..22: mol_type = other DNA
ctcgatttttcctatatcattg

SEQ ID NO: 94833 - DNA, 22 bp, synthetic construct
  misc_feature 1..22: note = chemically synthesized
  source 1..22: mol_type = other DNA
gatttttcctatatcattgctt

SEQ ID NO: 94834 - DNA, 22 bp, synthetic construct
  misc_feature 1..22: note = chemically synthesized
  source 1..22: mol_type = other DNA
ttcctatatcattgcttctgac

SEQ ID NO: 94835 - DNA, 22 bp, synthetic construct
  misc_feature 1..22: note = chemically synthesized
  source 1..22: mol_type = other DNA
tcctatatcattgcttctgaca

SEQ ID NO: 94836 - DNA, 22 bp, synthetic construct
  misc_feature 1..22: note = chemically synthesized
  source 1..22: mol_type = other DNA
cctatatcattgcttctgacat

SEQ ID NO: 94837 - DNA, 22 bp, synthetic construct
  misc_feature 1..22: note = chemically synthesized
  source 1..22: mol_type = other DNA
ctatatcattgcttctgacatt

SEQ ID NO: 94838 - DNA, 22 bp, synthetic construct
  misc_feature 1..22: note = chemically synthesized
  source 1..22: mol_type = other DNA
tatcattgcttctgacattgat

SEQ ID NO: 94839 - DNA, 22 bp, synthetic construct
  misc_feature 1..22: note = chemically synthesized
  source 1..22: mol_type = other DNA
cttctgacattgattaaatcct

SEQ ID NO: 94840 - DNA, 22 bp, synthetic construct
  misc_feature 1..22: note = chemically synthesized
  source 1..22: mol_type = other DNA
ctgacattgattaaatcctaac

SEQ ID NO: 94841 - DNA, 22 bp, synthetic construct
  misc_feature 1..22: note = chemically synthesized
  source 1..22: mol_type = other DNA
tgacattgattaaatcctaact

SEQ ID NO: 94842 - DNA, 22 bp, synthetic construct
  misc_feature 1..22: note = chemically synthesized
  source 1..22: mol_type = other DNA
acattgattaaatcctaactga

SEQ ID NO: 94843 - DNA, 22 bp, synthetic construct
  misc_feature 1..22: note = chemically synthesized
  source 1..22: mol_type = other DNA
attaaatcctaactgataaaac

SEQ ID NO: 94844 - DNA, 22 bp, synthetic construct
  misc_feature 1..22: note = chemically synthesized
  source 1..22: mol_type = other DNA
aatcctaactgataaaactgtt

SEQ ID NO: 94845 - DNA, 22 bp, synthetic construct
  misc_feature 1..22: note = chemically synthesized
  source 1..22: mol_type = other DNA
actgataaaactgtttctttac

SEQ ID NO: 94846 - DNA, 22 bp, synthetic construct
  misc_feature 1..22: note = chemically synthesized
  source 1..22: mol_type = other DNA
ataaaactgtttctttacacaa

SEQ ID NO: 94847 - DNA, 22 bp, synthetic construct
  misc_feature 1..22: note = chemically synthesized
  source 1..22: mol_type = other DNA
tttctttacacaagcaatttca

SEQ ID NO: 94848 - DNA, 22 bp, synthetic construct
  misc_feature 1..22: note = chemically synthesized
  source 1..22: mol_type = other DNA
ctttacacaagcaatttcaagt

SEQ ID NO: 94849 - DNA, 22 bp, synthetic construct
  misc_feature 1..22: note = chemically synthesized
  source 1..22: mol_type = other DNA
tttacacaagcaatttcaagtg

SEQ ID NO: 94850 - DNA, 22 bp, synthetic construct
  misc_feature 1..22: note = chemically synthesized
  source 1..22: mol_type = other DNA
tacacaagcaatttcaagtgtt

SEQ ID NO: 94851 - DNA, 22 bp, synthetic construct
  misc_feature 1..22: note = chemically synthesized
  source 1..22: mol_type = other DNA
acacaagcaatttcaagtgttt

SEQ ID NO: 94852 - DNA, 22 bp, synthetic construct
  misc_feature 1..22: note = chemically synthesized
  source 1..22: mol_type = other DNA
cacaagcaatttcaagtgtttt

SEQ ID NO: 94853 - DNA, 22 bp, synthetic construct
  misc_feature 1..22: note = chemically synthesized
  source 1..22: mol_type = other DNA
caagtgttttcaagcattcttt

SEQ ID NO: 94854 - DNA, 22 bp, synthetic construct
  misc_feature 1..22: note = chemically synthesized
  source 1..22: mol_type = other DNA
aagtgttttcaagcattctttc

SEQ ID NO: 94855 - DNA, 22 bp, synthetic construct
  misc_feature 1..22: note = chemically synthesized
  source 1..22: mol_type = other DNA
tcaagcattctttcccatgtat

SEQ ID NO: 94856 - DNA, 22 bp, synthetic construct
  misc_feature 1..22: note = chemically synthesized
  source 1..22: mol_type = other DNA
caagcattctttcccatgtatt

SEQ ID NO: 94857 - DNA, 22 bp, synthetic construct
  misc_feature 1..22: note = chemically synthesized
  source 1..22: mol_type = other DNA
aagcattctttcccatgtattt

SEQ ID NO: 94858 - DNA, 22 bp, synthetic construct
  misc_feature 1..22: note = chemically synthesized
  source 1..22: mol_type = other DNA
tttcccatgtattttcaaacat

SEQ ID NO: 94859 - DNA, 22 bp, synthetic construct
  misc_feature 1..22: note = chemically synthesized
  source 1..22: mol_type = other DNA
tcccatgtattttcaaacattt

SEQ ID NO: 94860 - DNA, 22 bp, synthetic construct
  misc_feature 1..22: note = chemically synthesized
  source 1..22: mol_type = other DNA
cccatgtattttcaaacatttg

SEQ ID NO: 94861 - DNA, 22 bp, synthetic construct
  misc_feature 1..22: note = chemically synthesized
  source 1..22: mol_type = other DNA
ccatgtattttcaaacatttgt

SEQ ID NO: 94862 - DNA, 22 bp, synthetic construct
  misc_feature 1..22: note = chemically synthesized
  source 1..22: mol_type = other DNA
tcaaacatttgttcagcaaata

SEQ ID NO: 94863 - DNA, 22 bp, synthetic construct
  misc_feature 1..22: note = chemically synthesized
  source 1..22: mol_type = other DNA
caaacatttgttcagcaaatat

SEQ ID NO: 94864 - DNA, 22 bp, synthetic construct
  misc_feature 1..22: note = chemically synthesized
  source 1..22: mol_type = other DNA
aaacatttgttcagcaaatatc

SEQ ID NO: 94865 - DNA, 22 bp, synthetic construct
  misc_feature 1..22: note = chemically synthesized
  source 1..22: mol_type = other DNA
gttcagcaaatatctgttaaat

SEQ ID NO: 94866 - DNA, 22 bp, synthetic construct
  misc_feature 1..22: note = chemically synthesized
  source 1..22: mol_type = other DNA
ttcagcaaatatctgttaaata

SEQ ID NO: 94867 - DNA, 22 bp, synthetic construct
  misc_feature 1..22: note = chemically synthesized
  source 1..22: mol_type = other DNA
agcaaatatctgttaaataaat

SEQ ID NO: 94868 - DNA, 22 bp, synthetic construct
  misc_feature 1..22: note = chemically synthesized
  source 1..22: mol_type = other DNA
ttaaataaatgtcataattttt

SEQ ID NO: 94869 - DNA, 22 bp, synthetic construct
  misc_feature 1..22: note = chemically synthesized
  source 1..22: mol_type = other DNA
aataaatgtcataatttttaaa

SEQ ID NO: 94870 - DNA, 22 bp, synthetic construct
  misc_feature 1..22: note = chemically synthesized
  source 1..22: mol_type = other DNA
ttaaagtagtgggcatttaagt

SEQ ID NO: 94871 - DNA, 22 bp, synthetic construct
  misc_feature 1..22: note = chemically synthesized
  source 1..22: mol_type = other DNA
taaagtagtgggcatttaagtt

SEQ ID NO: 94872 - DNA, 22 bp, synthetic construct
  misc_feature 1..22: note = chemically synthesized
  source 1..22: mol_type = other DNA
aaagtagtgggcatttaagtta

SEQ ID NO: 94873 - DNA, 22 bp, synthetic construct
  misc_feature 1..22: note = chemically synthesized
  source 1..22: mol_type = other DNA
aagtagtgggcatttaagttaa

SEQ ID NO: 94874 - DNA, 22 bp, synthetic construct
  misc_feature 1..22: note = chemically synthesized
  source 1..22: mol_type = other DNA
aagttaaataagtcagagaata

SEQ ID NO: 94875 - DNA, 22 bp, synthetic construct
  misc_feature 1..22: note = chemically synthesized
  source 1..22: mol_type = other DNA
agttaaataagtcagagaataa

SEQ ID NO: 94876 - DNA, 22 bp, synthetic construct
  misc_feature 1..22: note = chemically synthesized
  source 1..22: mol_type = other DNA
aataagtcagagaataaaactt

SEQ ID NO: 94877 - DNA, 22 bp, synthetic construct
  misc_feature 1..22: note = chemically synthesized
  source 1..22: mol_type = other DNA
tcctctgaagattataatctag

SEQ ID NO: 94878 - DNA, 22 bp, synthetic construct
  misc_feature 1..22: note = chemically synthesized
  source 1..22: mol_type = other DNA
cctctgaagattataatctagg

SEQ ID NO: 94879 - DNA, 22 bp, synthetic construct
  misc_feature 1..22: note = chemically synthesized
  source 1..22: mol_type = other DNA
ctctgaagattataatctaggt

SEQ ID NO: 94880 - DNA, 22 bp, synthetic construct
  misc_feature 1..22: note = chemically synthesized
  source 1..22: mol_type = other DNA
tgaagattataatctaggtaga

SEQ ID NO: 94881 - DNA, 22 bp, synthetic construct
  misc_feature 1..22: note = chemically synthesized
  source 1..22: mol_type = other DNA
aagattataatctaggtagaac

SEQ ID NO: 94882 - DNA, 22 bp, synthetic construct
  misc_feature 1..22: note = chemically synthesized
  source 1..22: mol_type = other DNA
taatctaggtagaacatacata

SEQ ID NO: 94883 - DNA, 22 bp, synthetic construct
  misc_feature 1..22: note = chemically synthesized
  source 1..22: mol_type = other DNA
ggtagaacatacataaaattaa

SEQ ID NO: 94884 - DNA, 22 bp, synthetic construct
  misc_feature 1..22: note = chemically synthesized
  source 1..22: mol_type = other DNA
ataattaagttaaacaacaaaa

SEQ ID NO: 94885 - DNA, 22 bp, synthetic construct
  misc_feature 1..22: note = chemically synthesized
  source 1..22: mol_type = other DNA
agttaaacaacaaaataatttc

SEQ ID NO: 94886 - DNA, 22 bp, synthetic construct
  misc_feature 1..22: note = chemically synthesized
  source 1..22: mol_type = other DNA
aacaacaaaataatttcagata

SEQ ID NO: 94887 - DNA, 22 bp, synthetic construct
  misc_feature 1..22: note = chemically synthesized
  source 1..22: mol_type = other DNA
cagatattattaactaagaatg

SEQ ID NO: 94888 - DNA, 22 bp, synthetic construct
  misc_feature 1..22: note = chemically synthesized
  source 1..22: mol_type = other DNA
agatattattaactaagaatga

SEQ ID NO: 94889 - DNA, 22 bp, synthetic construct
  misc_feature 1..22: note = chemically synthesized
  source 1..22: mol_type = other DNA
ttaactaagaatgaaattaagg

SEQ ID NO: 94890 - DNA, 22 bp, synthetic construct
  misc_feature 1..22: note = chemically synthesized
  source 1..22: mol_type = other DNA
actaagaatgaaattaaggaga

SEQ ID NO: 94891 - DNA, 22 bp, synthetic construct
  misc_feature 1..22: note = chemically synthesized
  source 1..22: mol_type = other DNA
agaatgaaattaaggagaaagt

SEQ ID NO: 94892 - DNA, 22 bp, synthetic construct
  misc_feature 1..22: note = chemically synthesized
  source 1..22: mol_type = other DNA
aggagaaagtattcgaacagag

SEQ ID NO: 94893 - DNA, 22 bp, synthetic construct
  misc_feature 1..22: note = chemically synthesized
  source 1..22: mol_type = other DNA
gaacagaggcaaaatgacagaa

SEQ ID NO: 94894 - DNA, 22 bp, synthetic construct
  misc_feature 1..22: note = chemically synthesized
  source 1..22: mol_type = other DNA
ccatgggaaggcattgccaaat

SEQ ID NO: 94895 - DNA, 22 bp, synthetic construct
  misc_feature 1..22: note = chemically synthesized
  source 1..22: mol_type = other DNA
ccaaataaagtttagaagctga

SEQ ID NO: 94896 - DNA, 22 bp, synthetic construct
  misc_feature 1..22: note = chemically synthesized
  source 1..22: mol_type = other DNA
agaagctgaaatagtaaattca

SEQ ID NO: 94897 - DNA, 22 bp, synthetic construct
  misc_feature 1..22: note = chemically synthesized
  source 1..22: mol_type = other DNA
gaagctgaaatagtaaattcaa

SEQ ID NO: 94898 - DNA, 22 bp, synthetic construct
  misc_feature 1..22: note = chemically synthesized
  source 1..22: mol_type = other DNA
aaatagtaaattcaaagctctg

SEQ ID NO: 94899 - DNA, 22 bp, synthetic construct
  misc_feature 1..22: note = chemically synthesized
  source 1..22: mol_type = other DNA
aaagctctgaagcagaagaaaa

SEQ ID NO: 94900 - DNA, 22 bp, synthetic construct
  misc_feature 1..22: note = chemically synthesized
  source 1..22: mol_type = other DNA
tgaagcagaagaaaacaaactc

SEQ ID NO: 94901 - DNA, 22 bp, synthetic construct
  misc_feature 1..22: note = chemically synthesized
  source 1..22: mol_type = other DNA
aagcagaagaaaacaaactcct

SEQ ID NO: 94902 - DNA, 22 bp, synthetic construct
  misc_feature 1..22: note = chemically synthesized
  source 1..22: mol_type = other DNA
ctgctgtgccagagagttagat

SEQ ID NO: 94903 - DNA, 22 bp, synthetic construct
  misc_feature 1..22: note = chemically synthesized
  source 1..22: mol_type = other DNA
ctgtgccagagagttagataaa

SEQ ID NO: 94904 - DNA, 22 bp, synthetic construct
  misc_feature 1..22: note = chemically synthesized
  source 1..22: mol_type = other DNA
tgccagagagttagataaagaa

SEQ ID NO: 94905 - DNA, 22 bp, synthetic construct
  misc_feature 1..22: note = chemically synthesized
  source 1..22: mol_type = other DNA
gataaagaaccagtgccgttga

SEQ ID NO: 94906 - DNA, 22 bp, synthetic construct
  misc_feature 1..22: note = chemically synthesized
  source 1..22: mol_type = other DNA
atatgtaaagtggagaatagca

SEQ ID NO: 94907 - DNA, 22 bp, synthetic construct
  misc_feature 1..22: note = chemically synthesized
  source 1..22: mol_type = other DNA
tttcagggaagcataaacctaa

SEQ ID NO: 94908 - DNA, 22 bp, synthetic construct
  misc_feature 1..22: note = chemically synthesized
  source 1..22: mol_type = other DNA
cagggaagcataaacctaagga

SEQ ID NO: 94909 - DNA, 22 bp, synthetic construct
  misc_feature 1..22: note = chemically synthesized
  source 1..22: mol_type = other DNA
agggaagcataaacctaaggac

SEQ ID NO: 94910 - DNA, 22 bp, synthetic construct
  misc_feature 1..22: note = chemically synthesized
  source 1..22: mol_type = other DNA
aggacataaacttgtcctcagt

SEQ ID NO: 94911 - DNA, 22 bp, synthetic construct
  misc_feature 1..22: note = chemically synthesized
  source 1..22: mol_type = other DNA
gtcctcagtggtagggagtgag

SEQ ID NO: 94912 - DNA, 22 bp, synthetic construct
  misc_feature 1..22: note = chemically synthesized
  source 1..22: mol_type = other DNA
tcctcagtggtagggagtgaga

SEQ ID NO: 94913 - DNA, 22 bp, synthetic construct
  misc_feature 1..22: note = chemically synthesized
  source 1..22: mol_type = other DNA
agtggtagggagtgagaagcca

SEQ ID NO: 94914 - DNA, 22 bp, synthetic construct
  misc_feature 1..22: note = chemically synthesized
  source 1..22: mol_type = other DNA
tagaattttaactctggtaatg

SEQ ID NO: 94915 - DNA, 22 bp, synthetic construct
  misc_feature 1..22: note = chemically synthesized
  source 1..22: mol_type = other DNA
taactctggtaatgacataatc

SEQ ID NO: 94916 - DNA, 22 bp, synthetic construct
  misc_feature 1..22: note = chemically synthesized
  source 1..22: mol_type = other DNA
aactctggtaatgacataatct

SEQ ID NO: 94917 - DNA, 22 bp, synthetic construct
  misc_feature 1..22: note = chemically synthesized
  source 1..22: mol_type = other DNA
actctggtaatgacataatctc

SEQ ID NO: 94918 - DNA, 22 bp, synthetic construct
  misc_feature 1..22: note = chemically synthesized
  source 1..22: mol_type = other DNA
tggtaatgacataatctctaag

SEQ ID NO: 94919 - DNA, 22 bp, synthetic construct
  misc_feature 1..22: note = chemically synthesized
  source 1..22: mol_type = other DNA
gtaatgacataatctctaagca

SEQ ID NO: 94920 - DNA, 22 bp, synthetic construct
  misc_feature 1..22: note = chemically synthesized
  source 1..22: mol_type = other DNA
taagcaacctgtactattggct

SEQ ID NO: 94921 - DNA, 22 bp, synthetic construct
  misc_feature 1..22: note = chemically synthesized
  source 1..22: mol_type = other DNA
agcaacctgtactattggctgg

SEQ ID NO: 94922 - DNA, 22 bp, synthetic construct
  misc_feature 1..22: note = chemically synthesized
  source 1..22: mol_type = other DNA
tactattggctggattactatt

SEQ ID NO: 94923 - DNA, 22 bp, synthetic construct
  misc_feature 1..22: note = chemically synthesized
  source 1..22: mol_type = other DNA
ttggctggattactattctaag

SEQ ID NO: 94924 - DNA, 22 bp, synthetic construct
  misc_feature 1..22: note = chemically synthesized
  source 1..22: mol_type = other DNA
gctggattactattctaagaat

SEQ ID NO: 94925 - DNA, 22 bp, synthetic construct
  misc_feature 1..22: note = chemically synthesized
  source 1..22: mol_type = other DNA
gattactattctaagaatgacc

SEQ ID NO: 94926 - DNA, 22 bp, synthetic construct
  misc_feature 1..22: note = chemically synthesized
  source 1..22: mol_type = other DNA
ctattctaagaatgacctgttt

SEQ ID NO: 94927 - DNA, 22 bp, synthetic construct
  misc_feature 1..22: note = chemically synthesized
  source 1..22: mol_type = other DNA
ttctaagaatgacctgtttatc

SEQ ID NO: 94928 - DNA, 22 bp, synthetic construct
  misc_feature 1..22: note = chemically synthesized
  source 1..22: mol_type = other DNA
taagaatgacctgtttatcaca

SEQ ID NO: 94929 - DNA, 22 bp, synthetic construct
  misc_feature 1..22: note = chemically synthesized
  source 1..22: mol_type = other DNA
agaatgacctgtttatcacaac

SEQ ID NO: 94930 - DNA, 22 bp, synthetic construct
  misc_feature 1..22: note = chemically synthesized
  source 1..22: mol_type = other DNA
tttatcacaactgttttgctta

SEQ ID NO: 94931 - DNA, 22 bp, synthetic construct
  misc_feature 1..22: note = chemically synthesized
  source 1..22: mol_type = other DNA
atcacaactgttttgcttaaaa

SEQ ID NO: 94932 - DNA, 22 bp, synthetic construct
  misc_feature 1..22: note = chemically synthesized
  source 1..22: mol_type = other DNA
tcacaactgttttgcttaaaaa

SEQ ID NO: 94933 - DNA, 22 bp, synthetic construct
  misc_feature 1..22: note = chemically synthesized
  source 1..22: mol_type = other DNA
ttttgcttaaaaagcccttatt

SEQ ID NO: 94934 - DNA, 22 bp, synthetic construct
  misc_feature 1..22: note = chemically synthesized
  source 1..22: mol_type = other DNA
tgcttaaaaagcccttattgcc

SEQ ID NO: 94935 - DNA, 22 bp, synthetic construct
  misc_feature 1..22: note = chemically synthesized
  source 1..22: mol_type = other DNA
gcttaaaaagcccttattgcct

SEQ ID NO: 94936 - DNA, 22 bp, synthetic construct
  misc_feature 1..22: note = chemically synthesized
  source 1..22: mol_type = other DNA
cttaaaaagcccttattgcctg

SEQ ID NO: 94937 - DNA, 22 bp, synthetic construct
  misc_feature 1..22: note = chemically synthesized
  source 1..22: mol_type = other DNA
aaaaagcccttattgcctgtgg

SEQ ID NO: 94938 - DNA, 22 bp, synthetic construct
  misc_feature 1..22: note = chemically synthesized
  source 1..22: mol_type = other DNA
aaaagcccttattgcctgtgga

SEQ ID NO: 94939 - DNA, 22 bp, synthetic construct
  misc_feature 1..22: note = chemically synthesized
  source 1..22: mol_type = other DNA
attgcctgtggacaattattag

SEQ ID NO: 94940 - DNA, 22 bp, synthetic construct
  misc_feature 1..22: note = chemically synthesized
  source 1..22: mol_type = other DNA
ttgcctgtggacaattattagt

SEQ ID NO: 94941 - DNA, 22 bp, synthetic construct
  misc_feature 1..22: note = chemically synthesized
  source 1..22: mol_type = other DNA
cctgtggacaattattagttat

SEQ ID NO: 94942 - DNA, 22 bp, synthetic construct
  misc_feature 1..22: note = chemically synthesized
  source 1..22: mol_type = other DNA
tggacaattattagttattctt

SEQ ID NO: 94943 - DNA, 22 bp, synthetic construct
  misc_feature 1..22: note = chemically synthesized
  source 1..22: mol_type = other DNA
ttagttattctttcaactatta

SEQ ID NO: 94944 - DNA, 22 bp, synthetic construct
  misc_feature 1..22: note = chemically synthesized
  source 1..22: mol_type = other DNA
gttattctttcaactattaaaa

SEQ ID NO: 94945 - DNA, 22 bp, synthetic construct
  misc_feature 1..22: note = chemically synthesized
  source 1..22: mol_type = other DNA
ttctttcaactattaaaaatct

SEQ ID NO: 94946 - DNA, 22 bp, synthetic construct
  misc_feature 1..22: note = chemically synthesized
  source 1..22: mol_type = other DNA
tttcaactattaaaaatcttgt

SEQ ID NO: 94947 - DNA, 22 bp, synthetic construct
  misc_feature 1..22: note = chemically synthesized
  source 1..22: mol_type = other DNA
tcaactattaaaaatcttgtca

SEQ ID NO: 94948 - DNA, 22 bp, synthetic construct
  misc_feature 1..22: note = chemically synthesized
  source 1..22: mol_type = other DNA
caactattaaaaatcttgtcat

SEQ ID NO: 94949 - DNA, 22 bp, synthetic construct
  misc_feature 1..22: note = chemically synthesized
  source 1..22: mol_type = other DNA
aactattaaaaatcttgtcatg

SEQ ID NO: 94950 - DNA, 22 bp, synthetic construct
  misc_feature 1..22: note = chemically synthesized
  source 1..22: mol_type = other DNA
ttaaaaatcttgtcatgcagat

SEQ ID NO: 94951 - DNA, 22 bp, synthetic construct
  misc_feature 1..22: note = chemically synthesized
  source 1..22: mol_type = other DNA
aaaatcttgtcatgcagatgtg

SEQ ID NO: 94952 - DNA, 22 bp, synthetic construct
  misc_feature 1..22: note = chemically synthesized
  source 1..22: mol_type = other DNA
gtcatgcagatgtgtgtgtgtg

SEQ ID NO: 94953 - DNA, 22 bp, synthetic construct
  misc_feature 1..22: note = chemically synthesized
  source 1..22: mol_type = other DNA
tcatgcagatgtgtgtgtgtgt

SEQ ID NO: 94954 - DNA, 22 bp, synthetic construct
  misc_feature 1..22: note = chemically synthesized
  source 1..22: mol_type = other DNA
attatgaatttgctttcaatta

SEQ ID NO: 94955 - DNA, 22 bp, synthetic construct
  misc_feature 1..22: note = chemically synthesized
  source 1..22: mol_type = other DNA
tgaatttgctttcaattaagtt

SEQ ID NO: 94956 - DNA, 22 bp, synthetic construct
  misc_feature 1..22: note = chemically synthesized
  source 1..22: mol_type = other DNA
gctttcaattaagttatcttga

SEQ ID NO: 94957 - DNA, 22 bp, synthetic construct
  misc_feature 1..22: note = chemically synthesized
  source 1..22: mol_type = other DNA
ctttcaattaagttatcttgaa

SEQ ID NO: 94958 - DNA, 22 bp, synthetic construct
  misc_feature 1..22: note = chemically synthesized
  source 1..22: mol_type = other DNA
tcaattaagttatcttgaattg

SEQ ID NO: 94959 - DNA, 22 bp, synthetic construct
  misc_feature 1..22: note = chemically synthesized
  source 1..22: mol_type = other DNA
caattaagttatcttgaattgg

SEQ ID NO: 94960 - DNA, 22 bp, synthetic construct
  misc_feature 1..22: note = chemically synthesized
  source 1..22: mol_type = other DNA
aattaagttatcttgaattggc

SEQ ID NO: 94961 - DNA, 22 bp, synthetic construct
  misc_feature 1..22: note = chemically synthesized
  source 1..22: mol_type = other DNA
agttatcttgaattggcaatat

SEQ ID NO: 94962 - DNA, 22 bp, synthetic construct
  misc_feature 1..22: note = chemically synthesized
  source 1..22: mol_type = other DNA
tcttgaattggcaatatctaaa

SEQ ID NO: 94963 - DNA, 22 bp, synthetic construct
  misc_feature 1..22: note = chemically synthesized
  source 1..22: mol_type = other DNA
gaattggcaatatctaaatcta

SEQ ID NO: 94964 - DNA, 22 bp, synthetic construct
  misc_feature 1..22: note = chemically synthesized
  source 1..22: mol_type = other DNA
aattggcaatatctaaatctag

SEQ ID NO: 94965 - DNA, 22 bp, synthetic construct
  misc_feature 1..22: note = chemically synthesized
  source 1..22: mol_type = other DNA
gcaatatctaaatctagatata

SEQ ID NO: 94966 - DNA, 22 bp, synthetic construct
  misc_feature 1..22: note = chemically synthesized
  source 1..22: mol_type = other DNA
aatctagatatagctccctaag

SEQ ID NO: 94967 - DNA, 22 bp, synthetic construct
  misc_feature 1..22: note = chemically synthesized
  source 1..22: mol_type = other DNA
gatatagctccctaaggggtaa

SEQ ID NO: 94968 - DNA, 22 bp, synthetic construct
  misc_feature 1..22: note = chemically synthesized
  source 1..22: mol_type = other DNA
cctaaggggtaaagagtgtatc

SEQ ID NO: 94969 - DNA, 22 bp, synthetic construct
  misc_feature 1..22: note = chemically synthesized
  source 1..22: mol_type = other DNA
aggggtaaagagtgtatccact

SEQ ID NO: 94970 - DNA, 22 bp, synthetic construct
  misc_feature 1..22: note = chemically synthesized
  source 1..22: mol_type = other DNA
cccacccctcaacatcacgtcc

SEQ ID NO: 94971 - DNA, 22 bp, synthetic construct
  misc_feature 1..22: note = chemically synthesized
  source 1..22: mol_type = other DNA
aacatcacgtccttgattcctt

SEQ ID NO: 94972 - DNA, 22 bp, synthetic construct
  misc_feature 1..22: note = chemically synthesized
  source 1..22: mol_type = other DNA
gattccttgatatcaaagggca

SEQ ID NO: 94973 - DNA, 22 bp, synthetic construct
  misc_feature 1..22: note = chemically synthesized
  source 1..22: mol_type = other DNA
attccttgatatcaaagggcag

SEQ ID NO: 94974 - DNA, 22 bp, synthetic construct
  misc_feature 1..22: note = chemically synthesized
  source 1..22: mol_type = other DNA
cttgatatcaaagggcagtata

SEQ ID NO: 94975 - DNA, 22 bp, synthetic construct
  misc_feature 1..22: note = chemically synthesized
  source 1..22: mol_type = other DNA
gatatcaaagggcagtatagtt

SEQ ID NO: 94976 - DNA, 22 bp, synthetic construct
  misc_feature 1..22: note = chemically synthesized
  source 1..22: mol_type = other DNA
atatcaaagggcagtatagttt

SEQ ID NO: 94977 - DNA, 22 bp, synthetic construct
  misc_feature 1..22: note = chemically synthesized
  source 1..22: mol_type = other DNA
tgggggagaagaaaaagagaga

SEQ ID NO: 94978 - DNA, 22 bp, synthetic construct
  misc_feature 1..22: note = chemically synthesized
  source 1..22: mol_type = other DNA
gggggagaagaaaaagagagag

SEQ ID NO: 94979 - DNA, 22 bp, synthetic construct
  misc_feature 1..22: note = chemically synthesized
  source 1..22: mol_type = other DNA
ggggagaagaaaaagagagaga

SEQ ID NO: 94980 - DNA, 22 bp, synthetic construct
  misc_feature 1..22: note = chemically synthesized
  source 1..22: mol_type = other DNA
attaaaaatgcatattaccgac

SEQ ID NO: 94981 - DNA, 22 bp, synthetic construct
  misc_feature 1..22: note = chemically synthesized
  source 1..22: mol_type = other DNA
aaaatgcatattaccgacaaat

SEQ ID NO: 94982 - DNA, 22 bp, synthetic construct
  misc_feature 1..22: note = chemically synthesized
  source 1..22: mol_type = other DNA
ccgacaaattagagggtgatgg

SEQ ID NO: 94983 - DNA, 22 bp, synthetic construct
  misc_feature 1..22: note = chemically synthesized
  source 1..22: mol_type = other DNA
gagggtgatggcagatgggagg

SEQ ID NO: 94984 - DNA, 22 bp, synthetic construct
  misc_feature 1..22: note = chemically synthesized
  source 1..22: mol_type = other DNA
cagctcccactcggatgcacag

SEQ ID NO: 94985 - DNA, 22 bp, synthetic construct
  misc_feature 1..22: note = chemically synthesized
  source 1..22: mol_type = other DNA
ccactcggatgcacagagcagc

SEQ ID NO: 94986 - DNA, 22 bp, synthetic construct
  misc_feature 1..22: note = chemically synthesized
  source 1..22: mol_type = other DNA
ggatgcacagagcagcatgtga

SEQ ID NO: 94987 - DNA, 22 bp, synthetic construct
  misc_feature 1..22: note = chemically synthesized
  source 1..22: mol_type = other DNA
ccatcaggaattttttttgcag

SEQ ID NO: 94988 - DNA, 22 bp, synthetic construct
  misc_feature 1..22: note = chemically synthesized
  source 1..22: mol_type = other DNA
tttttgcagaaccacctgcaga

SEQ ID NO: 94989 - DNA, 22 bp, synthetic construct
  misc_feature 1..22: note = chemically synthesized
  source 1..22: mol_type = other DNA
ttttgcagaaccacctgcagaa

SEQ ID NO: 94990 - DNA, 22 bp, synthetic construct
  misc_feature 1..22: note = chemically synthesized
  source 1..22: mol_type = other DNA
tttgcagaaccacctgcagaaa

SEQ ID NO: 94991 - DNA, 22 bp, synthetic construct
  misc_feature 1..22: note = chemically synthesized
  source 1..22: mol_type = other DNA
ttgcagaaccacctgcagaaat

SEQ ID NO: 94992 - DNA, 22 bp, synthetic construct
  misc_feature 1..22: note = chemically synthesized
  source 1..22: mol_type = other DNA
tgcagaaccacctgcagaaata

SEQ ID NO: 94993 - DNA, 22 bp, synthetic construct
  misc_feature 1..22: note = chemically synthesized
  source 1..22: mol_type = other DNA
gcagaaccacctgcagaaataa

SEQ ID NO: 94994 - DNA, 22 bp, synthetic construct
  misc_feature 1..22: note = chemically synthesized
  source 1..22: mol_type = other DNA
cagaaccacctgcagaaataaa

SEQ ID NO: 94995 - DNA, 22 bp, synthetic construct
  misc_feature 1..22: note = chemically synthesized
  source 1..22: mol_type = other DNA
cagaaataaatcaagaaagctg

SEQ ID NO: 94996 - DNA, 22 bp, synthetic construct
  misc_feature 1..22: note = chemically synthesized
  source 1..22: mol_type = other DNA
agagaacgcacacaccctctga

SEQ ID NO: 94997 - DNA, 22 bp, synthetic construct
  misc_feature 1..22: note = chemically synthesized
  source 1..22: mol_type = other DNA
tgaaagaagcagattgctcctg

SEQ ID NO: 94998 - DNA, 22 bp, synthetic construct
  misc_feature 1..22: note = chemically synthesized
  source 1..22: mol_type = other DNA
aaagaagcagattgctcctgca

SEQ ID NO: 94999 - DNA, 22 bp, synthetic construct
  misc_feature 1..22: note = chemically synthesized
  source 1..22: mol_type = other DNA
ctcctgcaggacccgggaaaca

SEQ ID NO: 95000 - DNA, 22 bp, synthetic construct
  misc_feature 1..22: note = chemically synthesized
  source 1..22: mol_type = other DNA
ctgcaggacccgggaaacaccc

SEQ ID NO: 95001 - DNA, 22 bp, synthetic construct
  misc_feature 1..22: note = chemically synthesized
  source 1..22: mol_type = other DNA
caggacccgggaaacaccccaa

SEQ ID NO: 95002 - DNA, 22 bp, synthetic construct
  misc_feature 1..22: note = chemically synthesized
  source 1..22: mol_type = other DNA
tgagtgcccaaactgtggaagt

SEQ ID NO: 95003 - DNA, 22 bp, synthetic construct
  misc_feature 1..22: note = chemically synthesized
  source 1..22: mol_type = other DNA
tggaagtggaaaagggggaccg

SEQ ID NO: 95004 - DNA, 22 bp, synthetic construct
  misc_feature 1..22: note = chemically synthesized
  source 1..22: mol_type = other DNA
cccccaaacacacatcctcact

SEQ ID NO: 95005 - DNA, 22 bp, synthetic construct
  misc_feature 1..22: note = chemically synthesized
  source 1..22: mol_type = other DNA
actggggaacctgaagatctag

SEQ ID NO: 95006 - DNA, 22 bp, synthetic construct
  misc_feature 1..22: note = chemically synthesized
  source 1..22: mol_type = other DNA
gggaacctgaagatctagacca

SEQ ID NO: 95007 - DNA, 22 bp, synthetic construct
  misc_feature 1..22: note = chemically synthesized
  source 1..22: mol_type = other DNA
aagatctagaccacaggagaag

SEQ ID NO: 95008 - DNA, 22 bp, synthetic construct
  misc_feature 1..22: note = chemically synthesized
  source 1..22: mol_type = other DNA
gaccacaggagaagattctgac

SEQ ID NO: 95009 - DNA, 22 bp, synthetic construct
  misc_feature 1..22: note = chemically synthesized
  source 1..22: mol_type = other DNA
tgaccttacctggagctgagtc

SEQ ID NO: 95010 - DNA, 22 bp, synthetic construct
  misc_feature 1..22: note = chemically synthesized
  source 1..22: mol_type = other DNA
accttacctggagctgagtcaa

SEQ ID NO: 95011 - DNA, 22 bp, synthetic construct
  misc_feature 1..22: note = chemically synthesized
  source 1..22: mol_type = other DNA
acctggagctgagtcaatttag

SEQ ID NO: 95012 - DNA, 22 bp, synthetic construct
  misc_feature 1..22: note = chemically synthesized
  source 1..22: mol_type = other DNA
cctggagctgagtcaatttaga

SEQ ID NO: 95013 - DNA, 22 bp, synthetic construct
  misc_feature 1..22: note = chemically synthesized
  source 1..22: mol_type = other DNA
gagctgagtcaatttagagggc

SEQ ID NO: 95014 - DNA, 22 bp, synthetic construct
  misc_feature 1..22: note = chemically synthesized
  source 1..22: mol_type = other DNA
agtcaatttagagggccaagca

SEQ ID NO: 95015 - DNA, 22 bp, synthetic construct
  misc_feature 1..22: note = chemically synthesized
  source 1..22: mol_type = other DNA
agagggccaagcaaaatacagg

SEQ ID NO: 95016 - DNA, 22 bp, synthetic construct
  misc_feature 1..22: note = chemically synthesized
  source 1..22: mol_type = other DNA
gagggccaagcaaaatacaggg

SEQ ID NO: 95017 - DNA, 22 bp, synthetic construct
  misc_feature 1..22: note = chemically synthesized
  source 1..22: mol_type = other DNA
tgggctctctgggtcccctagg

SEQ ID NO: 95018 - DNA, 22 bp, synthetic construct
  misc_feature 1..22: note = chemically synthesized
  source 1..22: mol_type = other DNA
tctgggtcccctaggaagccat

SEQ ID NO: 95019 - DNA, 22 bp, synthetic construct
  misc_feature 1..22: note = chemically synthesized
  source 1..22: mol_type = other DNA
tgggtcccctaggaagccattt

SEQ ID NO: 95020 - DNA, 22 bp, synthetic construct
  misc_feature 1..22: note = chemically synthesized
  source 1..22: mol_type = other DNA
ggtcccctaggaagccatttct

SEQ ID NO: 95021 - DNA, 22 bp, synthetic construct
  misc_feature 1..22: note = chemically synthesized
  source 1..22: mol_type = other DNA
ggaagccatttctgccttgcct

SEQ ID NO: 95022 - DNA, 22 bp, synthetic construct
  misc_feature 1..22: note = chemically synthesized
  source 1..22: mol_type = other DNA
ctgccttgcctcacaggggtca

SEQ ID NO: 95023 - DNA, 22 bp, synthetic construct
  misc_feature 1..22: note = chemically synthesized
  source 1..22: mol_type = other DNA
tgccttgcctcacaggggtcat

SEQ ID NO: 95024 - DNA, 22 bp, synthetic construct
  misc_feature 1..22: note = chemically synthesized
  source 1..22: mol_type = other DNA
ccttgcctcacaggggtcattt

SEQ ID NO: 95025 - DNA, 22 bp, synthetic construct
  misc_feature 1..22: note = chemically synthesized
  source 1..22: mol_type = other DNA
gcctcacaggggtcatttggga

SEQ ID NO: 95026 - DNA, 22 bp, synthetic construct
  misc_feature 1..22: note = chemically synthesized
  source 1..22: mol_type = other DNA
cctcacaggggtcatttgggag

SEQ ID NO: 95027 - DNA, 22 bp, synthetic construct
  misc_feature 1..22: note = chemically synthesized
  source 1..22: mol_type = other DNA
acaggggtcatttgggagggct

SEQ ID NO: 95028 - DNA, 22 bp, synthetic construct
  misc_feature 1..22: note = chemically synthesized
  source 1..22: mol_type = other DNA
gggagggctgccagaggaactg

SEQ ID NO: 95029 - DNA, 22 bp, synthetic construct
  misc_feature 1..22: note = chemically synthesized
  source 1..22: mol_type = other DNA
ggagggctgccagaggaactgg

SEQ ID NO: 95030 - DNA, 22 bp, synthetic construct
  misc_feature 1..22: note = chemically synthesized
  source 1..22: mol_type = other DNA
ccagaggaactgggaaaagatg

SEQ ID NO: 95031 - DNA, 22 bp, synthetic construct
  misc_feature 1..22: note = chemically synthesized
  source 1..22: mol_type = other DNA
ggaaaagatgacaggaaaaaga

SEQ ID NO: 95032 - DNA, 22 bp, synthetic construct
  misc_feature 1..22: note = chemically synthesized
  source 1..22: mol_type = other DNA
cacctggccagatctaggggct

SEQ ID NO: 95033 - DNA, 22 bp, synthetic construct
  misc_feature 1..22: note = chemically synthesized
  source 1..22: mol_type = other DNA
gccagatctaggggctgggcag

SEQ ID NO: 95034 - DNA, 22 bp, synthetic construct
  misc_feature 1..22: note = chemically synthesized
  source 1..22: mol_type = other DNA
ggggctgggcagtgggggggtt

SEQ ID NO: 95035 - DNA, 22 bp, synthetic construct
  misc_feature 1..22: note = chemically synthesized
  source 1..22: mol_type = other DNA
ggcagtgggggggttggtgggg

SEQ ID NO: 95036 - DNA, 22 bp, synthetic construct
  misc_feature 1..22: note = chemically synthesized
  source 1..22: mol_type = other DNA
gtggggggacatgaatttggtg

SEQ ID NO: 95037 - DNA, 22 bp, synthetic construct
  misc_feature 1..22: note = chemically synthesized
  source 1..22: mol_type = other DNA
ggtgtgcagactccactggcag

SEQ ID NO: 95038 - DNA, 22 bp, synthetic construct
  misc_feature 1..22: note = chemically synthesized
  source 1..22: mol_type = other DNA
gtgtgcagactccactggcagg

SEQ ID NO: 95039 - DNA, 22 bp, synthetic construct
  misc_feature 1..22: note = chemically synthesized
  source 1..22: mol_type = other DNA
cactggcagggaagtaggacag

SEQ ID NO: 95040 - DNA, 22 bp, synthetic construct
  misc_feature 1..22: note = chemically synthesized
  source 1..22: mol_type = other DNA
gcagggaagtaggacagcccta

SEQ ID NO: 95041 - DNA, 22 bp, synthetic construct
  misc_feature 1..22: note = chemically synthesized
  source 1..22: mol_type = other DNA
cttggtttcgcagctggtagcc

SEQ ID NO: 95042 - DNA, 22 bp, synthetic construct
  misc_feature 1..22: note = chemically synthesized
  source 1..22: mol_type = other DNA
ggtttcgcagctggtagcctgg

SEQ ID NO: 95043 - DNA, 22 bp, synthetic construct
  misc_feature 1..22: note = chemically synthesized
  source 1..22: mol_type = other DNA
gtttcgcagctggtagcctggg

SEQ ID NO: 95044 - DNA, 22 bp, synthetic construct
  misc_feature 1..22: note = chemically synthesized
  source 1..22: mol_type = other DNA
cgcagctggtagcctggggcaa

SEQ ID NO: 95045 - DNA, 22 bp, synthetic construct
  misc_feature 1..22: note = chemically synthesized
  source 1..22: mol_type = other DNA
gcagctggtagcctggggcaag

SEQ ID NO: 95046 - DNA, 22 bp, synthetic construct
  misc_feature 1..22: note = chemically synthesized
  source 1..22: mol_type = other DNA
gtagcctggggcaagttctcag

SEQ ID NO: 95047 - DNA, 22 bp, synthetic construct
  misc_feature 1..22: note = chemically synthesized
  source 1..22: mol_type = other DNA
gggcaagttctcagccttgctc

SEQ ID NO: 95048 - DNA, 22 bp, synthetic construct
  misc_feature 1..22: note = chemically synthesized
  source 1..22: mol_type = other DNA
tcagccttgctcactgactgca

SEQ ID NO: 95049 - DNA, 22 bp, synthetic construct
  misc_feature 1..22: note = chemically synthesized
  source 1..22: mol_type = other DNA
agccttgctcactgactgcatg

SEQ ID NO: 95050 - DNA, 22 bp, synthetic construct
  misc_feature 1..22: note = chemically synthesized
  source 1..22: mol_type = other DNA
gctcactgactgcatggaaaca

SEQ ID NO: 95051 - DNA, 22 bp, synthetic construct
  misc_feature 1..22: note = chemically synthesized
  source 1..22: mol_type = other DNA
ctcactgactgcatggaaacag

SEQ ID NO: 95052 - DNA, 22 bp, synthetic construct
  misc_feature 1..22: note = chemically synthesized
  source 1..22: mol_type = other DNA
actgactgcatggaaacagatt

SEQ ID NO: 95053 - DNA, 22 bp, synthetic construct
  misc_feature 1..22: note = chemically synthesized
  source 1..22: mol_type = other DNA
actgcatggaaacagattcggt

SEQ ID NO: 95054 - DNA, 22 bp, synthetic construct
  misc_feature 1..22: note = chemically synthesized
  source 1..22: mol_type = other DNA
catggaaacagattcggtgctg

SEQ ID NO: 95055 - DNA, 22 bp, synthetic construct
  misc_feature 1..22: note = chemically synthesized
  source 1..22: mol_type = other DNA
ggtgctgttgcgggggagggtg

SEQ ID NO: 95056 - DNA, 22 bp, synthetic construct
  misc_feature 1..22: note = chemically synthesized
  source 1..22: mol_type = other DNA
ttgcgggggagggtgcacgctg

SEQ ID NO: 95057 - DNA, 22 bp, synthetic construct
  misc_feature 1..22: note = chemically synthesized
  source 1..22: mol_type = other DNA
cgggggagggtgcacgctggaa

SEQ ID NO: 95058 - DNA, 22 bp, synthetic construct
  misc_feature 1..22: note = chemically synthesized
  source 1..22: mol_type = other DNA
gaagtgagaccaaccttttgag

SEQ ID NO: 95059 - DNA, 22 bp, synthetic construct
  misc_feature 1..22: note = chemically synthesized
  source 1..22: mol_type = other DNA
ttgagttgcatgggagctgggc

SEQ ID NO: 95060 - DNA, 22 bp, synthetic construct
  misc_feature 1..22: note = chemically synthesized
  source 1..22: mol_type = other DNA
tgagttgcatgggagctgggca

SEQ ID NO: 95061 - DNA, 22 bp, synthetic construct
  misc_feature 1..22: note = chemically synthesized
  source 1..22: mol_type = other DNA
gagttgcatgggagctgggcaa

SEQ ID NO: 95062 - DNA, 22 bp, synthetic construct
  misc_feature 1..22: note = chemically synthesized
  source 1..22: mol_type = other DNA
agttgcatgggagctgggcaag

SEQ ID NO: 95063 - DNA, 22 bp, synthetic construct
  misc_feature 1..22: note = chemically synthesized
  source 1..22: mol_type = other DNA
catgggagctgggcaagtcacg

SEQ ID NO: 95064 - DNA, 22 bp, synthetic construct
  misc_feature 1..22: note = chemically synthesized
  source 1..22: mol_type = other DNA
ggcaagtcacgtgactgcttgc

SEQ ID NO: 95065 - DNA, 22 bp, synthetic construct
  misc_feature 1..22: note = chemically synthesized
  source 1..22: mol_type = other DNA
cttgctttcccccactttcctg

SEQ ID NO: 95066 - DNA, 22 bp, synthetic construct
  misc_feature 1..22: note = chemically synthesized
  source 1..22: mol_type = other DNA
gctttcccccactttcctgatg

SEQ ID NO: 95067 - DNA, 22 bp, synthetic construct
  misc_feature 1..22: note = chemically synthesized
  source 1..22: mol_type = other DNA
ctttcccccactttcctgatga

SEQ ID NO: 95068 - DNA, 22 bp, synthetic construct
  misc_feature 1..22: note = chemically synthesized
  source 1..22: mol_type = other DNA
tcccccactttcctgatgacct

SEQ ID NO: 95069 - DNA, 22 bp, synthetic construct
  misc_feature 1..22: note = chemically synthesized
  source 1..22: mol_type = other DNA
cccccactttcctgatgacctg

SEQ ID NO: 95070 - DNA, 22 bp, synthetic construct
  misc_feature 1..22: note = chemically synthesized
  source 1..22: mol_type = other DNA
ccccactttcctgatgacctgc

SEQ ID NO: 95071 - DNA, 22 bp, synthetic construct
  misc_feature 1..22: note = chemically synthesized
  source 1..22: mol_type = other DNA
tcctgatgacctgcatgacaca

SEQ ID NO: 95072 - DNA, 22 bp, synthetic construct
  misc_feature 1..22: note = chemically synthesized
  source 1..22: mol_type = other DNA
cctgatgacctgcatgacacag

SEQ ID NO: 95073 - DNA, 22 bp, synthetic construct
  misc_feature 1..22: note = chemically synthesized
  source 1..22: mol_type = other DNA
ctgatgacctgcatgacacagc

SEQ ID NO: 95074 - DNA, 22 bp, synthetic construct
  misc_feature 1..22: note = chemically synthesized
  source 1..22: mol_type = other DNA
atgacctgcatgacacagcaga

SEQ ID NO: 95075 - DNA, 22 bp, synthetic construct
  misc_feature 1..22: note = chemically synthesized
  source 1..22: mol_type = other DNA
catgacacagcagaggcagcca

SEQ ID NO: 95076 - DNA, 22 bp, synthetic construct
  misc_feature 1..22: note = chemically synthesized
  source 1..22: mol_type = other DNA
tcctaggaacataaatccattg

SEQ ID NO: 95077 - DNA, 22 bp, synthetic construct
  misc_feature 1..22: note = chemically synthesized
  source 1..22: mol_type = other DNA
ggaacataaatccattgacctg

SEQ ID NO: 95078 - DNA, 22 bp, synthetic construct
  misc_feature 1..22: note = chemically synthesized
  source 1..22: mol_type = other DNA
acctggaaactacacccccatc

SEQ ID NO: 95079 - DNA, 22 bp, synthetic construct
  misc_feature 1..22: note = chemically synthesized
  source 1..22: mol_type = other DNA
gaaactacacccccatcctccc

SEQ ID NO: 95080 - DNA, 22 bp, synthetic construct
  misc_feature 1..22: note = chemically synthesized
  source 1..22: mol_type = other DNA
cacccccatcctcccacagtag

SEQ ID NO: 95081 - DNA, 22 bp, synthetic construct
  misc_feature 1..22: note = chemically synthesized
  source 1..22: mol_type = other DNA
ccacagtagccacagaaagacc

SEQ ID NO: 95082 - DNA, 22 bp, synthetic construct
  misc_feature 1..22: note = chemically synthesized
  source 1..22: mol_type = other DNA
cccaaggagactctgagctcag

SEQ ID NO: 95083 - DNA, 22 bp, synthetic construct
  misc_feature 1..22: note = chemically synthesized
  source 1..22: mol_type = other DNA
tgagctcagacacgactagtcc

SEQ ID NO: 95084 - DNA, 22 bp, synthetic construct
  misc_feature 1..22: note = chemically synthesized
  source 1..22: mol_type = other DNA
agctcagacacgactagtcctg

SEQ ID NO: 95085 - DNA, 22 bp, synthetic construct
  misc_feature 1..22: note = chemically synthesized
  source 1..22: mol_type = other DNA
agacacgactagtcctgccccc

SEQ ID NO: 95086 - DNA, 22 bp, synthetic construct
  misc_feature 1..22: note = chemically synthesized
  source 1..22: mol_type = other DNA
gtcctgcccccacctgatggtc

SEQ ID NO: 95087 - DNA, 22 bp, synthetic construct
  misc_feature 1..22: note = chemically synthesized
  source 1..22: mol_type = other DNA
cccccacctgatggtccttcct

SEQ ID NO: 95088 - DNA, 22 bp, synthetic construct
  misc_feature 1..22: note = chemically synthesized
  source 1..22: mol_type = other DNA
atggtccttccttactcaccct

SEQ ID NO: 95089 - DNA, 22 bp, synthetic construct
  misc_feature 1..22: note = chemically synthesized
  source 1..22: mol_type = other DNA
ccttactcaccctggtagctga

SEQ ID NO: 95090 - DNA, 22 bp, synthetic construct
  misc_feature 1..22: note = chemically synthesized
  source 1..22: mol_type = other DNA
cttactcaccctggtagctgaa

SEQ ID NO: 95091 - DNA, 22 bp, synthetic construct
  misc_feature 1..22: note = chemically synthesized
  source 1..22: mol_type = other DNA
actcaccctggtagctgaagac

SEQ ID NO: 95092 - DNA, 22 bp, synthetic construct
  misc_feature 1..22: note = chemically synthesized
  source 1..22: mol_type = other DNA
ctcaccctggtagctgaagaca

SEQ ID NO: 95093 - DNA, 22 bp, synthetic construct
  misc_feature 1..22: note = chemically synthesized
  source 1..22: mol_type = other DNA
accctggtagctgaagacaaag

SEQ ID NO: 95094 - DNA, 22 bp, synthetic construct
  misc_feature 1..22: note = chemically synthesized
  source 1..22: mol_type = other DNA
gtagctgaagacaaagggcata

SEQ ID NO: 95095 - DNA, 22 bp, synthetic construct
  misc_feature 1..22: note = chemically synthesized
  source 1..22: mol_type = other DNA
aagacaaagggcatatattctt

SEQ ID NO: 95096 - DNA, 22 bp, synthetic construct
  misc_feature 1..22: note = chemically synthesized
  source 1..22: mol_type = other DNA
ttgggagttctagggtgcccca

SEQ ID NO: 95097 - DNA, 22 bp, synthetic construct
  misc_feature 1..22: note = chemically synthesized
  source 1..22: mol_type = other DNA
gggagttctagggtgccccagc

SEQ ID NO: 95098 - DNA, 22 bp, synthetic construct
  misc_feature 1..22: note = chemically synthesized
  source 1..22: mol_type = other DNA
ggagttctagggtgccccagcc

SEQ ID NO: 95099 - DNA, 22 bp, synthetic construct
  misc_feature 1..22: note = chemically synthesized
  source 1..22: mol_type = other DNA
tagggtgccccagcccccccag

SEQ ID NO: 95100 - DNA, 22 bp, synthetic construct
  misc_feature 1..22: note = chemically synthesized
  source 1..22: mol_type = other DNA
gggtgccccagcccccccagcc

SEQ ID NO: 95101 - DNA, 22 bp, synthetic construct
  misc_feature 1..22: note = chemically synthesized
  source 1..22: mol_type = other DNA
actgcctctgctgatgctttct

SEQ ID NO: 95102 - DNA, 22 bp, synthetic construct
  misc_feature 1..22: note = chemically synthesized
  source 1..22: mol_type = other DNA
cctctgctgatgctttctagaa

SEQ ID NO: 95103 - DNA, 22 bp, synthetic construct
  misc_feature 1..22: note = chemically synthesized
  source 1..22: mol_type = other DNA
tgctgatgctttctagaaagtg

SEQ ID NO: 95104 - DNA, 22 bp, synthetic construct
  misc_feature 1..22: note = chemically synthesized
  source 1..22: mol_type = other DNA
ctgatgctttctagaaagtgcc

SEQ ID NO: 95105 - DNA, 22 bp, synthetic construct
  misc_feature 1..22: note = chemically synthesized
  source 1..22: mol_type = other DNA
atgctttctagaaagtgccacc

SEQ ID NO: 95106 - DNA, 22 bp, synthetic construct
  misc_feature 1..22: note = chemically synthesized
  source 1..22: mol_type = other DNA
tctagaaagtgccacctcctgg

SEQ ID NO: 95107 - DNA, 22 bp, synthetic construct
  misc_feature 1..22: note = chemically synthesized
  source 1..22: mol_type = other DNA
ctagaaagtgccacctcctggc

SEQ ID NO: 95108 - DNA, 22 bp, synthetic construct
  misc_feature 1..22: note = chemically synthesized
  source 1..22: mol_type = other DNA
tagaaagtgccacctcctggca

SEQ ID NO: 95109 - DNA, 22 bp, synthetic construct
  misc_feature 1..22: note = chemically synthesized
  source 1..22: mol_type = other DNA
gaaagtgccacctcctggcagg

SEQ ID NO: 95110 - DNA, 22 bp, synthetic construct
  misc_feature 1..22: note = chemically synthesized
  source 1..22: mol_type = other DNA
ctggcaggaggccaaccagcac

SEQ ID NO: 95111 - DNA, 22 bp, synthetic construct
  misc_feature 1..22: note = chemically synthesized
  source 1..22: mol_type = other DNA
gcaggaggccaaccagcacaaa

SEQ ID NO: 95112 - DNA, 22 bp, synthetic construct
  misc_feature 1..22: note = chemically synthesized
  source 1..22: mol_type = other DNA
aacaaccaaaagtaaggaccct

SEQ ID NO: 95113 - DNA, 22 bp, synthetic construct
  misc_feature 1..22: note = chemically synthesized
  source 1..22: mol_type = other DNA
acagagtccatttcatcctctg

SEQ ID NO: 95114 - DNA, 22 bp, synthetic construct
  misc_feature 1..22: note = chemically synthesized
  source 1..22: mol_type = other DNA
catcctctgccacctccattgg

SEQ ID NO: 95115 - DNA, 22 bp, synthetic construct
  misc_feature 1..22: note = chemically synthesized
  source 1..22: mol_type = other DNA
atcctctgccacctccattgga

SEQ ID NO: 95116 - DNA, 22 bp, synthetic construct
  misc_feature 1..22: note = chemically synthesized
  source 1..22: mol_type = other DNA
tgccacctccattggagcaggt

SEQ ID NO: 95117 - DNA, 22 bp, synthetic construct
  misc_feature 1..22: note = chemically synthesized
  source 1..22: mol_type = other DNA
ccacctccattggagcaggtgg

SEQ ID NO: 95118 - DNA, 22 bp, synthetic construct
  misc_feature 1..22: note = chemically synthesized
  source 1..22: mol_type = other DNA
cattggagcaggtggttgtatc

SEQ ID NO: 95119 - DNA, 22 bp, synthetic construct
  misc_feature 1..22: note = chemically synthesized
  source 1..22: mol_type = other DNA
gagcaggtggttgtatctatgg

SEQ ID NO: 95120 - DNA, 22 bp, synthetic construct
  misc_feature 1..22: note = chemically synthesized
  source 1..22: mol_type = other DNA
tatctatggctgagagacccac

SEQ ID NO: 95121 - DNA, 22 bp, synthetic construct
  misc_feature 1..22: note = chemically synthesized
  source 1..22: mol_type = other DNA
tggctgagagacccacagatgg

SEQ ID NO: 95122 - DNA, 22 bp, synthetic construct
  misc_feature 1..22: note = chemically synthesized
  source 1..22: mol_type = other DNA
agagacccacagatggttcacg

SEQ ID NO: 95123 - DNA, 22 bp, synthetic construct
  misc_feature 1..22: note = chemically synthesized
  source 1..22: mol_type = other DNA
acgtcacaagactctgtgcaga

SEQ ID NO: 95124 - DNA, 22 bp, synthetic construct
  misc_feature 1..22: note = chemically synthesized
  source 1..22: mol_type = other DNA
tgtgcagacaaaccccagtacc

SEQ ID NO: 95125 - DNA, 22 bp, synthetic construct
  misc_feature 1..22: note = chemically synthesized
  source 1..22: mol_type = other DNA
tgcagacaaaccccagtaccag

SEQ ID NO: 95126 - DNA, 22 bp, synthetic construct
  misc_feature 1..22: note = chemically synthesized
  source 1..22: mol_type = other DNA
gagtctggtagacctgatgggt

SEQ ID NO: 95127 - DNA, 22 bp, synthetic construct
  misc_feature 1..22: note = chemically synthesized
  source 1..22: mol_type = other DNA
gtagacctgatgggtggctaga

SEQ ID NO: 95128 - DNA, 22 bp, synthetic construct
  misc_feature 1..22: note = chemically synthesized
  source 1..22: mol_type = other DNA
atgggtggctagatccagaaga

SEQ ID NO: 95129 - DNA, 22 bp, synthetic construct
  misc_feature 1..22: note = chemically synthesized
  source 1..22: mol_type = other DNA
gatccagaagagagataacaat

SEQ ID NO: 95130 - DNA, 22 bp, synthetic construct
  misc_feature 1..22: note = chemically synthesized
  source 1..22: mol_type = other DNA
cagttcggctctcaggaagccc

SEQ ID NO: 95131 - DNA, 22 bp, synthetic construct
  misc_feature 1..22: note = chemically synthesized
  source 1..22: mol_type = other DNA
ggctctcaggaagccccacgcc

SEQ ID NO: 95132 - DNA, 22 bp, synthetic construct
  misc_feature 1..22: note = chemically synthesized
  source 1..22: mol_type = other DNA
tcaggaagccccacgcctagga

SEQ ID NO: 95133 - DNA, 22 bp, synthetic construct
  misc_feature 1..22: note = chemically synthesized
  source 1..22: mol_type = other DNA
aggaagccccacgcctaggaaa

SEQ ID NO: 95134 - DNA, 22 bp, synthetic construct
  misc_feature 1..22: note = chemically synthesized
  source 1..22: mol_type = other DNA
ggaaaagggggactgtgctaca

SEQ ID NO: 95135 - DNA, 22 bp, synthetic construct
  misc_feature 1..22: note = chemically synthesized
  source 1..22: mol_type = other DNA
tgctacatcaagggaacacctc

SEQ ID NO: 95136 - DNA, 22 bp, synthetic construct
  misc_feature 1..22: note = chemically synthesized
  source 1..22: mol_type = other DNA
catcaagggaacacctcatggg

SEQ ID NO: 95137 - DNA, 22 bp, synthetic construct
  misc_feature 1..22: note = chemically synthesized
  source 1..22: mol_type = other DNA
atgggacaaaagtctcagcctt

SEQ ID NO: 95138 - DNA, 22 bp, synthetic construct
  misc_feature 1..22: note = chemically synthesized
  source 1..22: mol_type = other DNA
agccttgaggcctagactttcc

SEQ ID NO: 95139 - DNA, 22 bp, synthetic construct
  misc_feature 1..22: note = chemically synthesized
  source 1..22: mol_type = other DNA
gaggcctagactttccctctga

SEQ ID NO: 95140 - DNA, 22 bp, synthetic construct
  misc_feature 1..22: note = chemically synthesized
  source 1..22: mol_type = other DNA
aggcctagactttccctctgac

SEQ ID NO: 95141 - DNA, 22 bp, synthetic construct
  misc_feature 1..22: note = chemically synthesized
  source 1..22: mol_type = other DNA
gactttccctctgacagagcct

SEQ ID NO: 95142 - DNA, 22 bp, synthetic construct
  misc_feature 1..22: note = chemically synthesized
  source 1..22: mol_type = other DNA
tccctctgacagagcctaccca

SEQ ID NO: 95143 - DNA, 22 bp, synthetic construct
  misc_feature 1..22: note = chemically synthesized
  source 1..22: mol_type = other DNA
ccctctgacagagcctacccaa

SEQ ID NO: 95144 - DNA, 22 bp, synthetic construct
  misc_feature 1..22: note = chemically synthesized
  source 1..22: mol_type = other DNA
cctctgacagagcctacccaag

SEQ ID NO: 95145 - DNA, 22 bp, synthetic construct
  misc_feature 1..22: note = chemically synthesized
  source 1..22: mol_type = other DNA
tgacagagcctacccaagtgag

SEQ ID NO: 95146 - DNA, 22 bp, synthetic construct
  misc_feature 1..22: note = chemically synthesized
  source 1..22: mol_type = other DNA
acagagcctacccaagtgagaa

SEQ ID NO: 95147 - DNA, 22 bp, synthetic construct
  misc_feature 1..22: note = chemically synthesized
  source 1..22: mol_type = other DNA
cccaagtgagaaggaaccagaa

SEQ ID NO: 95148 - DNA, 22 bp, synthetic construct
  misc_feature 1..22: note = chemically synthesized
  source 1..22: mol_type = other DNA
actctggtaatatgaaaaacaa

SEQ ID NO: 95149 - DNA, 22 bp, synthetic construct
  misc_feature 1..22: note = chemically synthesized
  source 1..22: mol_type = other DNA
tggtaatatgaaaaacaaggtt

SEQ ID NO: 95150 - DNA, 22 bp, synthetic construct
  misc_feature 1..22: note = chemically synthesized
  source 1..22: mol_type = other DNA
gtaatatgaaaaacaaggttct

SEQ ID NO: 95151 - DNA, 22 bp, synthetic construct
  misc_feature 1..22: note = chemically synthesized
  source 1..22: mol_type = other DNA
tttaacaccccccaaaaaatca

SEQ ID NO: 95152 - DNA, 22 bp, synthetic construct
  misc_feature 1..22: note = chemically synthesized
  source 1..22: mol_type = other DNA
taacaccccccaaaaaatcata

SEQ ID NO: 95153 - DNA, 22 bp, synthetic construct
  misc_feature 1..22: note = chemically synthesized
  source 1..22: mol_type = other DNA
aacaccccccaaaaaatcatac

SEQ ID NO: 95154 - DNA, 22 bp, synthetic construct
  misc_feature 1..22: note = chemically synthesized
  source 1..22: mol_type = other DNA
acaccccccaaaaaatcatact

SEQ ID NO: 95155 - DNA, 22 bp, synthetic construct
  misc_feature 1..22: note = chemically synthesized
  source 1..22: mol_type = other DNA
gctcaccagcaatgcatccaaa

SEQ ID NO: 95156 - DNA, 22 bp, synthetic construct
  misc_feature 1..22: note = chemically synthesized
  source 1..22: mol_type = other DNA
accagcaatgcatccaaaccaa

SEQ ID NO: 95157 - DNA, 22 bp, synthetic construct
  misc_feature 1..22: note = chemically synthesized
  source 1..22: mol_type = other DNA
atttacctgaaaaataattcag

SEQ ID NO: 95158 - DNA, 22 bp, synthetic construct
  misc_feature 1..22: note = chemically synthesized
  source 1..22: mol_type = other DNA
acctgaaaaataattcagaagg

SEQ ID NO: 95159 - DNA, 22 bp, synthetic construct
  misc_feature 1..22: note = chemically synthesized
  source 1..22: mol_type = other DNA
cctgaaaaataattcagaaggt

SEQ ID NO: 95160 - DNA, 22 bp, synthetic construct
  misc_feature 1..22: note = chemically synthesized
  source 1..22: mol_type = other DNA
aaaaataattcagaaggtcagt

SEQ ID NO: 95161 - DNA, 22 bp, synthetic construct
  misc_feature 1..22: note = chemically synthesized
  source 1..22: mol_type = other DNA
agaaggtcagttattaagctaa

SEQ ID NO: 95162 - DNA, 22 bp, synthetic construct
  misc_feature 1..22: note = chemically synthesized
  source 1..22: mol_type = other DNA
ttaagctaatcaaggaggcatc

SEQ ID NO: 95163 - DNA, 22 bp, synthetic construct
  misc_feature 1..22: note = chemically synthesized
  source 1..22: mol_type = other DNA
agctaatcaaggaggcatccga

SEQ ID NO: 95164 - DNA, 22 bp, synthetic construct
  misc_feature 1..22: note = chemically synthesized
  source 1..22: mol_type = other DNA
atcaaggaggcatccgaggaag

SEQ ID NO: 95165 - DNA, 22 bp, synthetic construct
  misc_feature 1..22: note = chemically synthesized
  source 1..22: mol_type = other DNA
taaaaaaaccaaaaatatgata

SEQ ID NO: 95166 - DNA, 22 bp, synthetic construct
  misc_feature 1..22: note = chemically synthesized
  source 1..22: mol_type = other DNA
aaaaaaaccaaaaatatgatac

SEQ ID NO: 95167 - DNA, 22 bp, synthetic construct
  misc_feature 1..22: note = chemically synthesized
  source 1..22: mol_type = other DNA
aaaaaaccaaaaatatgataca

SEQ ID NO: 95168 - DNA, 22 bp, synthetic construct
  misc_feature 1..22: note = chemically synthesized
  source 1..22: mol_type = other DNA
cagttaaagagatagcataaat

SEQ ID NO: 95169 - DNA, 22 bp, synthetic construct
  misc_feature 1..22: note = chemically synthesized
  source 1..22: mol_type = other DNA
agttaaagagatagcataaata

SEQ ID NO: 95170 - DNA, 22 bp, synthetic construct
  misc_feature 1..22: note = chemically synthesized
  source 1..22: mol_type = other DNA
aagagatagcataaataaaaaa

SEQ ID NO: 95171 - DNA, 22 bp, synthetic construct
  misc_feature 1..22: note = chemically synthesized
  source 1..22: mol_type = other DNA
aaaacttcaggaaacaatggat

SEQ ID NO: 95172 - DNA, 22 bp, synthetic construct
  misc_feature 1..22: note = chemically synthesized
  source 1..22: mol_type = other DNA
caggaaacaatggatgaatgga

SEQ ID NO: 95173 - DNA, 22 bp, synthetic construct
  misc_feature 1..22: note = chemically synthesized
  source 1..22: mol_type = other DNA
aggaaacaatggatgaatggat

SEQ ID NO: 95174 - DNA, 22 bp, synthetic construct
  misc_feature 1..22: note = chemically synthesized
  source 1..22: mol_type = other DNA
atagaaatgcaaaatgctctag

SEQ ID NO: 95175 - DNA, 22 bp, synthetic construct
  misc_feature 1..22: note = chemically synthesized
  source 1..22: mol_type = other DNA
tagaaatgcaaaatgctctaga

SEQ ID NO: 95176 - DNA, 22 bp, synthetic construct
  misc_feature 1..22: note = chemically synthesized
  source 1..22: mol_type = other DNA
tagaaagtctcagcaatagaat

SEQ ID NO: 95177 - DNA, 22 bp, synthetic construct
  misc_feature 1..22: note = chemically synthesized
  source 1..22: mol_type = other DNA
gaaagtctcagcaatagaatcc

SEQ ID NO: 95178 - DNA, 22 bp, synthetic construct
  misc_feature 1..22: note = chemically synthesized
  source 1..22: mol_type = other DNA
agcaatagaatccaagcagaag

SEQ ID NO: 95179 - DNA, 22 bp, synthetic construct
  misc_feature 1..22: note = chemically synthesized
  source 1..22: mol_type = other DNA
agagcttgaagacaaagttttt

SEQ ID NO: 95180 - DNA, 22 bp, synthetic construct
  misc_feature 1..22: note = chemically synthesized
  source 1..22: mol_type = other DNA
gaagacaaagtttttgaattaa

SEQ ID NO: 95181 - DNA, 22 bp, synthetic construct
  misc_feature 1..22: note = chemically synthesized
  source 1..22: mol_type = other DNA
aagacaaagtttttgaattaac

SEQ ID NO: 95182 - DNA, 22 bp, synthetic construct
  misc_feature 1..22: note = chemically synthesized
  source 1..22: mol_type = other DNA
ttgaattaacccaatccaacaa

SEQ ID NO: 95183 - DNA, 22 bp, synthetic construct
  misc_feature 1..22: note = chemically synthesized
  source 1..22: mol_type = other DNA
tgaattaacccaatccaacaaa

SEQ ID NO: 95184 - DNA, 22 bp, synthetic construct
  misc_feature 1..22: note = chemically synthesized
  source 1..22: mol_type = other DNA
gaattaacccaatccaacaaag

SEQ ID NO: 95185 - DNA, 22 bp, synthetic construct
  misc_feature 1..22: note = chemically synthesized
  source 1..22: mol_type = other DNA
aattaacccaatccaacaaaga

SEQ ID NO: 95186 - DNA, 22 bp, synthetic construct
  misc_feature 1..22: note = chemically synthesized
  source 1..22: mol_type = other DNA
acccaatccaacaaagacaaag

SEQ ID NO: 95187 - DNA, 22 bp, synthetic construct
  misc_feature 1..22: note = chemically synthesized
  source 1..22: mol_type = other DNA
caagaaatctgggattatgtta

SEQ ID NO: 95188 - DNA, 22 bp, synthetic construct
  misc_feature 1..22: note = chemically synthesized
  source 1..22: mol_type = other DNA
ggattatgttaaacaatcaaac

SEQ ID NO: 95189 - DNA, 22 bp, synthetic construct
  misc_feature 1..22: note = chemically synthesized
  source 1..22: mol_type = other DNA
tgttaaacaatcaaacctaaga

SEQ ID NO: 95190 - DNA, 22 bp, synthetic construct
  misc_feature 1..22: note = chemically synthesized
  source 1..22: mol_type = other DNA
aacaatcaaacctaagaataat

SEQ ID NO: 95191 - DNA, 22 bp, synthetic construct
  misc_feature 1..22: note = chemically synthesized
  source 1..22: mol_type = other DNA
agaataatcagcattcctgaga

SEQ ID NO: 95192 - DNA, 22 bp, synthetic construct
  misc_feature 1..22: note = chemically synthesized
  source 1..22: mol_type = other DNA
ctgagaaagaagagaaatctaa

SEQ ID NO: 95193 - DNA, 22 bp, synthetic construct
  misc_feature 1..22: note = chemically synthesized
  source 1..22: mol_type = other DNA
agaaagaagagaaatctaaaag

SEQ ID NO: 95194 - DNA, 22 bp, synthetic construct
  misc_feature 1..22: note = chemically synthesized
  source 1..22: mol_type = other DNA
aaagtttggaaaacttatccag

SEQ ID NO: 95195 - DNA, 22 bp, synthetic construct
  misc_feature 1..22: note = chemically synthesized
  source 1..22: mol_type = other DNA
ggaaaacttatccagggaaata

SEQ ID NO: 95196 - DNA, 22 bp, synthetic construct
  misc_feature 1..22: note = chemically synthesized
  source 1..22: mol_type = other DNA
gaaaacttatccagggaaataa

SEQ ID NO: 95197 - DNA, 22 bp, synthetic construct
  misc_feature 1..22: note = chemically synthesized
  source 1..22: mol_type = other DNA
atccagggaaataatcaaggaa

SEQ ID NO: 95198 - DNA, 22 bp, synthetic construct
  misc_feature 1..22: note = chemically synthesized
  source 1..22: mol_type = other DNA
tccagggaaataatcaaggaaa

SEQ ID NO: 95199 - DNA, 22 bp, synthetic construct
  misc_feature 1..22: note = chemically synthesized
  source 1..22: mol_type = other DNA
cccccaccttgctagagaccta

SEQ ID NO: 95200 - DNA, 22 bp, synthetic construct
  misc_feature 1..22: note = chemically synthesized
  source 1..22: mol_type = other DNA
ccccaccttgctagagacctag

SEQ ID NO: 95201 - DNA, 22 bp, synthetic construct
  misc_feature 1..22: note = chemically synthesized
  source 1..22: mol_type = other DNA
gctagagacctagatatccaaa

SEQ ID NO: 95202 - DNA, 22 bp, synthetic construct
  misc_feature 1..22: note = chemically synthesized
  source 1..22: mol_type = other DNA
ctagagacctagatatccaaat

SEQ ID NO: 95203 - DNA, 22 bp, synthetic construct
  misc_feature 1..22: note = chemically synthesized
  source 1..22: mol_type = other DNA
gagacctagatatccaaataca

SEQ ID NO: 95204 - DNA, 22 bp, synthetic construct
  misc_feature 1..22: note = chemically synthesized
  source 1..22: mol_type = other DNA
gatatccaaatacaagaagctc

SEQ ID NO: 95205 - DNA, 22 bp, synthetic construct
  misc_feature 1..22: note = chemically synthesized
  source 1..22: mol_type = other DNA
aataaacacctgggaaattcat

SEQ ID NO: 95206 - DNA, 22 bp, synthetic construct
  misc_feature 1..22: note = chemically synthesized
  source 1..22: mol_type = other DNA
ggaaattcattgcaaaaatatc

SEQ ID NO: 95207 - DNA, 22 bp, synthetic construct
  misc_feature 1..22: note = chemically synthesized
  source 1..22: mol_type = other DNA
attgcaaaaatatcattgccta

SEQ ID NO: 95208 - DNA, 22 bp, synthetic construct
  misc_feature 1..22: note = chemically synthesized
  source 1..22: mol_type = other DNA
caaaaatatcattgcctaggta

SEQ ID NO: 95209 - DNA, 22 bp, synthetic construct
  misc_feature 1..22: note = chemically synthesized
  source 1..22: mol_type = other DNA
cctaggtacattgtcatcagag

SEQ ID NO: 95210 - DNA, 22 bp, synthetic construct
  misc_feature 1..22: note = chemically synthesized
  source 1..22: mol_type = other DNA
ggtacattgtcatcagagtatc

SEQ ID NO: 95211 - DNA, 22 bp, synthetic construct
  misc_feature 1..22: note = chemically synthesized
  source 1..22: mol_type = other DNA
tcatcagagtatccaaagttat

SEQ ID NO: 95212 - DNA, 22 bp, synthetic construct
  misc_feature 1..22: note = chemically synthesized
  source 1..22: mol_type = other DNA
tctaaagacaaagagaatctta

SEQ ID NO: 95213 - DNA, 22 bp, synthetic construct
  misc_feature 1..22: note = chemically synthesized
  source 1..22: mol_type = other DNA
aagacaaagagaatcttaagag

SEQ ID NO: 95214 - DNA, 22 bp, synthetic construct
  misc_feature 1..22: note = chemically synthesized
  source 1..22: mol_type = other DNA
aagagctgtgaggtgaaactac

SEQ ID NO: 95215 - DNA, 22 bp, synthetic construct
  misc_feature 1..22: note = chemically synthesized
  source 1..22: mol_type = other DNA
agagctgtgaggtgaaactacc

SEQ ID NO: 95216 - DNA, 22 bp, synthetic construct
  misc_feature 1..22: note = chemically synthesized
  source 1..22: mol_type = other DNA
tgaggtgaaactaccaggtaac

SEQ ID NO: 95217 - DNA, 22 bp, synthetic construct
  misc_feature 1..22: note = chemically synthesized
  source 1..22: mol_type = other DNA
ccaggtaacctatgaaagaaaa

SEQ ID NO: 95218 - DNA, 22 bp, synthetic construct
  misc_feature 1..22: note = chemically synthesized
  source 1..22: mol_type = other DNA
tgaaagaaaacctatcagatta

SEQ ID NO: 95219 - DNA, 22 bp, synthetic construct
  misc_feature 1..22: note = chemically synthesized
  source 1..22: mol_type = other DNA
tcagattaacagcagatttctc

SEQ ID NO: 95220 - DNA, 22 bp, synthetic construct
  misc_feature 1..22: note = chemically synthesized
  source 1..22: mol_type = other DNA
acagcagatttctcagcagaaa

SEQ ID NO: 95221 - DNA, 22 bp, synthetic construct
  misc_feature 1..22: note = chemically synthesized
  source 1..22: mol_type = other DNA
ctcagcagaaaccgtaaaagct

SEQ ID NO: 95222 - DNA, 22 bp, synthetic construct
  misc_feature 1..22: note = chemically synthesized
  source 1..22: mol_type = other DNA
tcagcagaaaccgtaaaagcta

SEQ ID NO: 95223 - DNA, 22 bp, synthetic construct
  misc_feature 1..22: note = chemically synthesized
  source 1..22: mol_type = other DNA
agcagaaaccgtaaaagctaga

SEQ ID NO: 95224 - DNA, 22 bp, synthetic construct
  misc_feature 1..22: note = chemically synthesized
  source 1..22: mol_type = other DNA
gaagtgaatatggccctatctt

SEQ ID NO: 95225 - DNA, 22 bp, synthetic construct
  misc_feature 1..22: note = chemically synthesized
  source 1..22: mol_type = other DNA
tcttcagccttcttaaacaaaa

SEQ ID NO: 95226 - DNA, 22 bp, synthetic construct
  misc_feature 1..22: note = chemically synthesized
  source 1..22: mol_type = other DNA
cagccttcttaaacaaaacaat

SEQ ID NO: 95227 - DNA, 22 bp, synthetic construct
  misc_feature 1..22: note = chemically synthesized
  source 1..22: mol_type = other DNA
agccttcttaaacaaaacaatt

SEQ ID NO: 95228 - DNA, 22 bp, synthetic construct
  misc_feature 1..22: note = chemically synthesized
  source 1..22: mol_type = other DNA
cttaaacaaaacaattatcagc

SEQ ID NO: 95229 - DNA, 22 bp, synthetic construct
  misc_feature 1..22: note = chemically synthesized
  source 1..22: mol_type = other DNA
ttaaacaaaacaattatcagcc

SEQ ID NO: 95230 - DNA, 22 bp, synthetic construct
  misc_feature 1..22: note = chemically synthesized
  source 1..22: mol_type = other DNA
aaacaaaacaattatcagccaa

SEQ ID NO: 95231 - DNA, 22 bp, synthetic construct
  misc_feature 1..22: note = chemically synthesized
  source 1..22: mol_type = other DNA
aacaaaacaattatcagccaag

SEQ ID NO: 95232 - DNA, 22 bp, synthetic construct
  misc_feature 1..22: note = chemically synthesized
  source 1..22: mol_type = other DNA
tcagccaagaattttatatcca

SEQ ID NO: 95233 - DNA, 22 bp, synthetic construct
  misc_feature 1..22: note = chemically synthesized
  source 1..22: mol_type = other DNA
tatatccagtgaaactaagctt

SEQ ID NO: 95234 - DNA, 22 bp, synthetic construct
  misc_feature 1..22: note = chemically synthesized
  source 1..22: mol_type = other DNA
atatccagtgaaactaagcttc

SEQ ID NO: 95235 - DNA, 22 bp, synthetic construct
  misc_feature 1..22: note = chemically synthesized
  source 1..22: mol_type = other DNA
tatccagtgaaactaagcttca

SEQ ID NO: 95236 - DNA, 22 bp, synthetic construct
  misc_feature 1..22: note = chemically synthesized
  source 1..22: mol_type = other DNA
agcttcacaaatgaagaaaata

SEQ ID NO: 95237 - DNA, 22 bp, synthetic construct
  misc_feature 1..22: note = chemically synthesized
  source 1..22: mol_type = other DNA
cacaaatgaagaaaatacacag

SEQ ID NO: 95238 - DNA, 22 bp, synthetic construct
  misc_feature 1..22: note = chemically synthesized
  source 1..22: mol_type = other DNA
acaaatgaagaaaatacacagt

SEQ ID NO: 95239 - DNA, 22 bp, synthetic construct
  misc_feature 1..22: note = chemically synthesized
  source 1..22: mol_type = other DNA
ttcagaaaaacaaatgctgaga

SEQ ID NO: 95240 - DNA, 22 bp, synthetic construct
  misc_feature 1..22: note = chemically synthesized
  source 1..22: mol_type = other DNA
tcagaaaaacaaatgctgagag

SEQ ID NO: 95241 - DNA, 22 bp, synthetic construct
  misc_feature 1..22: note = chemically synthesized
  source 1..22: mol_type = other DNA
cagaaaaacaaatgctgagaga

SEQ ID NO: 95242 - DNA, 22 bp, synthetic construct
  misc_feature 1..22: note = chemically synthesized
  source 1..22: mol_type = other DNA
agaaaaacaaatgctgagagaa

SEQ ID NO: 95243 - DNA, 22 bp, synthetic construct
  misc_feature 1..22: note = chemically synthesized
  source 1..22: mol_type = other DNA
agagaattcggcactaccaagc

SEQ ID NO: 95244 - DNA, 22 bp, synthetic construct
  misc_feature 1..22: note = chemically synthesized
  source 1..22: mol_type = other DNA
ggcactaccaagccaacactac

SEQ ID NO: 95245 - DNA, 22 bp, synthetic construct
  misc_feature 1..22: note = chemically synthesized
  source 1..22: mol_type = other DNA
ccaagccaacactacaagaact

SEQ ID NO: 95246 - DNA, 22 bp, synthetic construct
  misc_feature 1..22: note = chemically synthesized
  source 1..22: mol_type = other DNA
caagaactgataaaaggagctc

SEQ ID NO: 95247 - DNA, 22 bp, synthetic construct
  misc_feature 1..22: note = chemically synthesized
  source 1..22: mol_type = other DNA
ataaaaggagctctaaatcttg

SEQ ID NO: 95248 - DNA, 22 bp, synthetic construct
  misc_feature 1..22: note = chemically synthesized
  source 1..22: mol_type = other DNA
taaatcttgaaataaaccctgg

SEQ ID NO: 95249 - DNA, 22 bp, synthetic construct
  misc_feature 1..22: note = chemically synthesized
  source 1..22: mol_type = other DNA
aatcttgaaataaaccctggaa

SEQ ID NO: 95250 - DNA, 22 bp, synthetic construct
  misc_feature 1..22: note = chemically synthesized
  source 1..22: mol_type = other DNA
gaaataaaccctggaagcacat

SEQ ID NO: 95251 - DNA, 22 bp, synthetic construct
  misc_feature 1..22: note = chemically synthesized
  source 1..22: mol_type = other DNA
aaataaaccctggaagcacatc

SEQ ID NO: 95252 - DNA, 22 bp, synthetic construct
  misc_feature 1..22: note = chemically synthesized
  source 1..22: mol_type = other DNA
gaagcacatcaaaacagaacct

SEQ ID NO: 95253 - DNA, 22 bp, synthetic construct
  misc_feature 1..22: note = chemically synthesized
  source 1..22: mol_type = other DNA
tttaaagcataaatcccatagg

SEQ ID NO: 95254 - DNA, 22 bp, synthetic construct
  misc_feature 1..22: note = chemically synthesized
  source 1..22: mol_type = other DNA
taaagcataaatcccataggac

SEQ ID NO: 95255 - DNA, 22 bp, synthetic construct
  misc_feature 1..22: note = chemically synthesized
  source 1..22: mol_type = other DNA
aaagcataaatcccataggaca

SEQ ID NO: 95256 - DNA, 22 bp, synthetic construct
  misc_feature 1..22: note = chemically synthesized
  source 1..22: mol_type = other DNA
aagcataaatcccataggacat

SEQ ID NO: 95257 - DNA, 22 bp, synthetic construct
  misc_feature 1..22: note = chemically synthesized
  source 1..22: mol_type = other DNA
acacctcaatactgatgttgaa

SEQ ID NO: 95258 - DNA, 22 bp, synthetic construct
  misc_feature 1..22: note = chemically synthesized
  source 1..22: mol_type = other DNA
aatactgatgttgaatgtaaat

SEQ ID NO: 95259 - DNA, 22 bp, synthetic construct
  misc_feature 1..22: note = chemically synthesized
  source 1..22: mol_type = other DNA
atgttgaatgtaaatggactaa

SEQ ID NO: 95260 - DNA, 22 bp, synthetic construct
  misc_feature 1..22: note = chemically synthesized
  source 1..22: mol_type = other DNA
aatgtaaatggactaaatgctc

SEQ ID NO: 95261 - DNA, 22 bp, synthetic construct
  misc_feature 1..22: note = chemically synthesized
  source 1..22: mol_type = other DNA
aatgctccacttaaaagataca

SEQ ID NO: 95262 - DNA, 22 bp, synthetic construct
  misc_feature 1..22: note = chemically synthesized
  source 1..22: mol_type = other DNA
cacttaaaagatacagaattgc

SEQ ID NO: 95263 - DNA, 22 bp, synthetic construct
  misc_feature 1..22: note = chemically synthesized
  source 1..22: mol_type = other DNA
aaaagatacagaattgcagaat

SEQ ID NO: 95264 - DNA, 22 bp, synthetic construct
  misc_feature 1..22: note = chemically synthesized
  source 1..22: mol_type = other DNA
aaagatacagaattgcagaatg

SEQ ID NO: 95265 - DNA, 22 bp, synthetic construct
  misc_feature 1..22: note = chemically synthesized
  source 1..22: mol_type = other DNA
cagaatgaataagaattcacca

SEQ ID NO: 95266 - DNA, 22 bp, synthetic construct
  misc_feature 1..22: note = chemically synthesized
  source 1..22: mol_type = other DNA
accaaccagttatctgccgcct

SEQ ID NO: 95267 - DNA, 22 bp, synthetic construct
  misc_feature 1..22: note = chemically synthesized
  source 1..22: mol_type = other DNA
tctgccgccttcaggagactca

SEQ ID NO: 95268 - DNA, 22 bp, synthetic construct
  misc_feature 1..22: note = chemically synthesized
  source 1..22: mol_type = other DNA
ccgccttcaggagactcaccta

SEQ ID NO: 95269 - DNA, 22 bp, synthetic construct
  misc_feature 1..22: note = chemically synthesized
  source 1..22: mol_type = other DNA
caggagactcacctaacacata

SEQ ID NO: 95270 - DNA, 22 bp, synthetic construct
  misc_feature 1..22: note = chemically synthesized
  source 1..22: mol_type = other DNA
aggagactcacctaacacataa

SEQ ID NO: 95271 - DNA, 22 bp, synthetic construct
  misc_feature 1..22: note = chemically synthesized
  source 1..22: mol_type = other DNA
acctaacacataaggactcaca

SEQ ID NO: 95272 - DNA, 22 bp, synthetic construct
  misc_feature 1..22: note = chemically synthesized
  source 1..22: mol_type = other DNA
acacataaggactcacataaac

SEQ ID NO: 95273 - DNA, 22 bp, synthetic construct
  misc_feature 1..22: note = chemically synthesized
  source 1..22: mol_type = other DNA
acataaacttaaggtaaagggg

SEQ ID NO: 95274 - DNA, 22 bp, synthetic construct
  misc_feature 1..22: note = chemically synthesized
  source 1..22: mol_type = other DNA
aaggtaaaggggtggaaaatga

SEQ ID NO: 95275 - DNA, 22 bp, synthetic construct
  misc_feature 1..22: note = chemically synthesized
  source 1..22: mol_type = other DNA
aggtaaaggggtggaaaatgac

SEQ ID NO: 95276 - DNA, 22 bp, synthetic construct
  misc_feature 1..22: note = chemically synthesized
  source 1..22: mol_type = other DNA
cacacaaatggacaccaaaagc

SEQ ID NO: 95277 - DNA, 22 bp, synthetic construct
  misc_feature 1..22: note = chemically synthesized
  source 1..22: mol_type = other DNA
ttcttatgtcagacaaaacaaa

SEQ ID NO: 95278 - DNA, 22 bp, synthetic construct
  misc_feature 1..22: note = chemically synthesized
  source 1..22: mol_type = other DNA
ttatgtcagacaaaacaaactt

SEQ ID NO: 95279 - DNA, 22 bp, synthetic construct
  misc_feature 1..22: note = chemically synthesized
  source 1..22: mol_type = other DNA
atgtcagacaaaacaaacttta

SEQ ID NO: 95280 - DNA, 22 bp, synthetic construct
  misc_feature 1..22: note = chemically synthesized
  source 1..22: mol_type = other DNA
tgtcagacaaaacaaactttaa

SEQ ID NO: 95281 - DNA, 22 bp, synthetic construct
  misc_feature 1..22: note = chemically synthesized
  source 1..22: mol_type = other DNA
taaagaaacagcagttaaaaaa

SEQ ID NO: 95282 - DNA, 22 bp, synthetic construct
  misc_feature 1..22: note = chemically synthesized
  source 1..22: mol_type = other DNA
aaagaaacagcagttaaaaaag

SEQ ID NO: 95283 - DNA, 22 bp, synthetic construct
  misc_feature 1..22: note = chemically synthesized
  source 1..22: mol_type = other DNA
aagaaacagcagttaaaaaaga

SEQ ID NO: 95284 - DNA, 22 bp, synthetic construct
  misc_feature 1..22: note = chemically synthesized
  source 1..22: mol_type = other DNA
aaaaagacaaagagggacatca

SEQ ID NO: 95285 - DNA, 22 bp, synthetic construct
  misc_feature 1..22: note = chemically synthesized
  source 1..22: mol_type = other DNA
gtccaatgggagaatattacaa

SEQ ID NO: 95286 - DNA, 22 bp, synthetic construct
  misc_feature 1..22: note = chemically synthesized
  source 1..22: mol_type = other DNA
tccaatgggagaatattacaat

SEQ ID NO: 95287 - DNA, 22 bp, synthetic construct
  misc_feature 1..22: note = chemically synthesized
  source 1..22: mol_type = other DNA
caattcttaatatatatgcatc

SEQ ID NO: 95288 - DNA, 22 bp, synthetic construct
  misc_feature 1..22: note = chemically synthesized
  source 1..22: mol_type = other DNA
ttaatatatatgcatctaatac

SEQ ID NO: 95289 - DNA, 22 bp, synthetic construct
  misc_feature 1..22: note = chemically synthesized
  source 1..22: mol_type = other DNA
aatatatatgcatctaatactg

SEQ ID NO: 95290 - DNA, 22 bp, synthetic construct
  misc_feature 1..22: note = chemically synthesized
  source 1..22: mol_type = other DNA
atatatatgcatctaatactgg

SEQ ID NO: 95291 - DNA, 22 bp, synthetic construct
  misc_feature 1..22: note = chemically synthesized
  source 1..22: mol_type = other DNA
atactggagatcccaaatttat

SEQ ID NO: 95292 - DNA, 22 bp, synthetic construct
  misc_feature 1..22: note = chemically synthesized
  source 1..22: mol_type = other DNA
gagatcccaaatttataaaaca

SEQ ID NO: 95293 - DNA, 22 bp, synthetic construct
  misc_feature 1..22: note = chemically synthesized
  source 1..22: mol_type = other DNA
ataaaacaattactactagact

SEQ ID NO: 95294 - DNA, 22 bp, synthetic construct
  misc_feature 1..22: note = chemically synthesized
  source 1..22: mol_type = other DNA
taaaacaattactactagacta

SEQ ID NO: 95295 - DNA, 22 bp, synthetic construct
  misc_feature 1..22: note = chemically synthesized
  source 1..22: mol_type = other DNA
ctactagactagacagcaacat

SEQ ID NO: 95296 - DNA, 22 bp, synthetic construct
  misc_feature 1..22: note = chemically synthesized
  source 1..22: mol_type = other DNA
ctagactagacagcaacataat

SEQ ID NO: 95297 - DNA, 22 bp, synthetic construct
  misc_feature 1..22: note = chemically synthesized
  source 1..22: mol_type = other DNA
gactagacagcaacataataat

SEQ ID NO: 95298 - DNA, 22 bp, synthetic construct
  misc_feature 1..22: note = chemically synthesized
  source 1..22: mol_type = other DNA
gacagcaacataataatagtgg

SEQ ID NO: 95299 - DNA, 22 bp, synthetic construct
  misc_feature 1..22: note = chemically synthesized
  source 1..22: mol_type = other DNA
caatactccactgactgcacta

SEQ ID NO: 95300 - DNA, 22 bp, synthetic construct
  misc_feature 1..22: note = chemically synthesized
  source 1..22: mol_type = other DNA
aatactccactgactgcactag

SEQ ID NO: 95301 - DNA, 22 bp, synthetic construct
  misc_feature 1..22: note = chemically synthesized
  source 1..22: mol_type = other DNA
cactgactgcactaggcaggtc

SEQ ID NO: 95302 - DNA, 22 bp, synthetic construct
  misc_feature 1..22: note = chemically synthesized
  source 1..22: mol_type = other DNA
actgcactaggcaggtcatcaa

SEQ ID NO: 95303 - DNA, 22 bp, synthetic construct
  misc_feature 1..22: note = chemically synthesized
  source 1..22: mol_type = other DNA
cactaggcaggtcatcaagaca

SEQ ID NO: 95304 - DNA, 22 bp, synthetic construct
  misc_feature 1..22: note = chemically synthesized
  source 1..22: mol_type = other DNA
ggcaggtcatcaagacagtcta

SEQ ID NO: 95305 - DNA, 22 bp, synthetic construct
  misc_feature 1..22: note = chemically synthesized
  source 1..22: mol_type = other DNA
caaagaaacaatggatttaaag

SEQ ID NO: 95306 - DNA, 22 bp, synthetic construct
  misc_feature 1..22: note = chemically synthesized
  source 1..22: mol_type = other DNA
aaagaacaaatggacttaacag

SEQ ID NO: 95307 - DNA, 22 bp, synthetic construct
  misc_feature 1..22: note = chemically synthesized
  source 1..22: mol_type = other DNA
aagaacaaatggacttaacaga

SEQ ID NO: 95308 - DNA, 22 bp, synthetic construct
  misc_feature 1..22: note = chemically synthesized
  source 1..22: mol_type = other DNA
aacagatatttacaggacattc

SEQ ID NO: 95309 - DNA, 22 bp, synthetic construct
  misc_feature 1..22: note = chemically synthesized
  source 1..22: mol_type = other DNA
acagatatttacaggacattct

SEQ ID NO: 95310 - DNA, 22 bp, synthetic construct
  misc_feature 1..22: note = chemically synthesized
  source 1..22: mol_type = other DNA
acaggacattctacccaacaac

SEQ ID NO: 95311 - DNA, 22 bp, synthetic construct
  misc_feature 1..22: note = chemically synthesized
  source 1..22: mol_type = other DNA
caggacattctacccaacaact

SEQ ID NO: 95312 - DNA, 22 bp, synthetic construct
  misc_feature 1..22: note = chemically synthesized
  source 1..22: mol_type = other DNA
tacccaacaactgcagaataca

SEQ ID NO: 95313 - DNA, 22 bp, synthetic construct
  misc_feature 1..22: note = chemically synthesized
  source 1..22: mol_type = other DNA
cccaacaactgcagaatacaca

SEQ ID NO: 95314 - DNA, 22 bp, synthetic construct
  misc_feature 1..22: note = chemically synthesized
  source 1..22: mol_type = other DNA
cagaatacacattctattcatc

SEQ ID NO: 95315 - DNA, 22 bp, synthetic construct
  misc_feature 1..22: note = chemically synthesized
  source 1..22: mol_type = other DNA
tattcatcagcacatggaactt

SEQ ID NO: 95316 - DNA, 22 bp, synthetic construct
  misc_feature 1..22: note = chemically synthesized
  source 1..22: mol_type = other DNA
ttcatcagcacatggaactttc

SEQ ID NO: 95317 - DNA, 22 bp, synthetic construct
  misc_feature 1..22: note = chemically synthesized
  source 1..22: mol_type = other DNA
atcagcacatggaactttctcc

SEQ ID NO: 95318 - DNA, 22 bp, synthetic construct
  misc_feature 1..22: note = chemically synthesized
  source 1..22: mol_type = other DNA
tctccaagataggccatatgat

SEQ ID NO: 95319 - DNA, 22 bp, synthetic construct
  misc_feature 1..22: note = chemically synthesized
  source 1..22: mol_type = other DNA
ctccaagataggccatatgata

SEQ ID NO: 95320 - DNA, 22 bp, synthetic construct
  misc_feature 1..22: note = chemically synthesized
  source 1..22: mol_type = other DNA
tccaagataggccatatgatat

SEQ ID NO: 95321 - DNA, 22 bp, synthetic construct
  misc_feature 1..22: note = chemically synthesized
  source 1..22: mol_type = other DNA
caagataggccatatgatatgc

SEQ ID NO: 95322 - DNA, 22 bp, synthetic construct
  misc_feature 1..22: note = chemically synthesized
  source 1..22: mol_type = other DNA
aataaatttttaaaaattgaaa

SEQ ID NO: 95323 - DNA, 22 bp, synthetic construct
  misc_feature 1..22: note = chemically synthesized
  source 1..22: mol_type = other DNA
ttaaaaattgaaattatatcaa

SEQ ID NO: 95324 - DNA, 22 bp, synthetic construct
  misc_feature 1..22: note = chemically synthesized
  source 1..22: mol_type = other DNA
taaaaattgaaattatatcaag

SEQ ID NO: 95325 - DNA, 22 bp, synthetic construct
  misc_feature 1..22: note = chemically synthesized
  source 1..22: mol_type = other DNA
aaaaattgaaattatatcaagc

SEQ ID NO: 95326 - DNA, 22 bp, synthetic construct
  misc_feature 1..22: note = chemically synthesized
  source 1..22: mol_type = other DNA
aaaattgaaattatatcaagca

SEQ ID NO: 95327 - DNA, 22 bp, synthetic construct
  misc_feature 1..22: note = chemically synthesized
  source 1..22: mol_type = other DNA
aaattatatcaagcactctctc

SEQ ID NO: 95328 - DNA, 22 bp, synthetic construct
  misc_feature 1..22: note = chemically synthesized
  source 1..22: mol_type = other DNA
tatcaagcactctctcagacca

SEQ ID NO: 95329 - DNA, 22 bp, synthetic construct
  misc_feature 1..22: note = chemically synthesized
  source 1..22: mol_type = other DNA
tctcagaccacagtagaataaa

SEQ ID NO: 95330 - DNA, 22 bp, synthetic construct
  misc_feature 1..22: note = chemically synthesized
  source 1..22: mol_type = other DNA
tcagaccacagtagaataaaat

SEQ ID NO: 95331 - DNA, 22 bp, synthetic construct
  misc_feature 1..22: note = chemically synthesized
  source 1..22: mol_type = other DNA
agaccacagtagaataaaattg

SEQ ID NO: 95332 - DNA, 22 bp, synthetic construct
  misc_feature 1..22: note = chemically synthesized
  source 1..22: mol_type = other DNA
gaaatcaactacaaaaggaacc

SEQ ID NO: 95333 - DNA, 22 bp, synthetic construct
  misc_feature 1..22: note = chemically synthesized
  source 1..22: mol_type = other DNA
caaaaggaaccttcaaaaccat

SEQ ID NO: 95334 - DNA, 22 bp, synthetic construct
  misc_feature 1..22: note = chemically synthesized
  source 1..22: mol_type = other DNA
caaaaccatgcaaatacaggga

SEQ ID NO: 95335 - DNA, 22 bp, synthetic construct
  misc_feature 1..22: note = chemically synthesized
  source 1..22: mol_type = other DNA
aaaaccatgcaaatacagggaa

SEQ ID NO: 95336 - DNA, 22 bp, synthetic construct
  misc_feature 1..22: note = chemically synthesized
  source 1..22: mol_type = other DNA
aataacctgctcctgaatgatc

SEQ ID NO: 95337 - DNA, 22 bp, synthetic construct
  misc_feature 1..22: note = chemically synthesized
  source 1..22: mol_type = other DNA
ctcctgaatgatcattgggtca

SEQ ID NO: 95338 - DNA, 22 bp, synthetic construct
  misc_feature 1..22: note = chemically synthesized
  source 1..22: mol_type = other DNA
ctgaatgatcattgggtcaaca

SEQ ID NO: 95339 - DNA, 22 bp, synthetic construct
  misc_feature 1..22: note = chemically synthesized
  source 1..22: mol_type = other DNA
aatgatcattgggtcaacaatg

SEQ ID NO: 95340 - DNA, 22 bp, synthetic construct
  misc_feature 1..22: note = chemically synthesized
  source 1..22: mol_type = other DNA
ggtcaacaatgaaatcaagatg

SEQ ID NO: 95341 - DNA, 22 bp, synthetic construct
  misc_feature 1..22: note = chemically synthesized
  source 1..22: mol_type = other DNA
aaaaatcatttgctttgaaaac

SEQ ID NO: 95342 - DNA, 22 bp, synthetic construct
  misc_feature 1..22: note = chemically synthesized
  source 1..22: mol_type = other DNA
aaaatcatttgctttgaaaacc

SEQ ID NO: 95343 - DNA, 22 bp, synthetic construct
  misc_feature 1..22: note = chemically synthesized
  source 1..22: mol_type = other DNA
gctttgaaaaccggcacaagac

SEQ ID NO: 95344 - DNA, 22 bp, synthetic construct
  misc_feature 1..22: note = chemically synthesized
  source 1..22: mol_type = other DNA
ctttgaaaaccggcacaagaca

SEQ ID NO: 95345 - DNA, 22 bp, synthetic construct
  misc_feature 1..22: note = chemically synthesized
  source 1..22: mol_type = other DNA
tgaaaaccggcacaagacaagg

SEQ ID NO: 95346 - DNA, 22 bp, synthetic construct
  misc_feature 1..22: note = chemically synthesized
  source 1..22: mol_type = other DNA
gaaaaccggcacaagacaagga

SEQ ID NO: 95347 - DNA, 22 bp, synthetic construct
  misc_feature 1..22: note = chemically synthesized
  source 1..22: mol_type = other DNA
aaaaccggcacaagacaaggat

SEQ ID NO: 95348 - DNA, 22 bp, synthetic construct
  misc_feature 1..22: note = chemically synthesized
  source 1..22: mol_type = other DNA
tcgccactcttactcaacatag

SEQ ID NO: 95349 - DNA, 22 bp, synthetic construct
  misc_feature 1..22: note = chemically synthesized
  source 1..22: mol_type = other DNA
gccactcttactcaacatagta

SEQ ID NO: 95350 - DNA, 22 bp, synthetic construct
  misc_feature 1..22: note = chemically synthesized
  source 1..22: mol_type = other DNA
ttactcaacatagtattggaag

SEQ ID NO: 95351 - DNA, 22 bp, synthetic construct
  misc_feature 1..22: note = chemically synthesized
  source 1..22: mol_type = other DNA
actcaacatagtattggaagtt

SEQ ID NO: 95352 - DNA, 22 bp, synthetic construct
  misc_feature 1..22: note = chemically synthesized
  source 1..22: mol_type = other DNA
ctcaacatagtattggaagttc

SEQ ID NO: 95353 - DNA, 22 bp, synthetic construct
  misc_feature 1..22: note = chemically synthesized
  source 1..22: mol_type = other DNA
aacatagtattggaagttctcg

SEQ ID NO: 95354 - DNA, 22 bp, synthetic construct
  misc_feature 1..22: note = chemically synthesized
  source 1..22: mol_type = other DNA
gaagttctcgccaggacaatca

SEQ ID NO: 95355 - DNA, 22 bp, synthetic construct
  misc_feature 1..22: note = chemically synthesized
  source 1..22: mol_type = other DNA
tcgccaggacaatcaggcaaga

SEQ ID NO: 95356 - DNA, 22 bp, synthetic construct
  misc_feature 1..22: note = chemically synthesized
  source 1..22: mol_type = other DNA
gccaggacaatcaggcaagaga

SEQ ID NO: 95357 - DNA, 22 bp, synthetic construct
  misc_feature 1..22: note = chemically synthesized
  source 1..22: mol_type = other DNA
aaataggaagagaggaagtcaa

SEQ ID NO: 95358 - DNA, 22 bp, synthetic construct
  misc_feature 1..22: note = chemically synthesized
  source 1..22: mol_type = other DNA
tctctgtttgcagatgacatga

SEQ ID NO: 95359 - DNA, 22 bp, synthetic construct
  misc_feature 1..22: note = chemically synthesized
  source 1..22: mol_type = other DNA
tgtttgcagatgacatgattgt

SEQ ID NO: 95360 - DNA, 22 bp, synthetic construct
  misc_feature 1..22: note = chemically synthesized
  source 1..22: mol_type = other DNA
tttgcagatgacatgattgtat

SEQ ID NO: 95361 - DNA, 22 bp, synthetic construct
  misc_feature 1..22: note = chemically synthesized
  source 1..22: mol_type = other DNA
gcagatgacatgattgtatatt

SEQ ID NO: 95362 - DNA, 22 bp, synthetic construct
  misc_feature 1..22: note = chemically synthesized
  source 1..22: mol_type = other DNA
cagatgacatgattgtatattt

SEQ ID NO: 95363 - DNA, 22 bp, synthetic construct
  misc_feature 1..22: note = chemically synthesized
  source 1..22: mol_type = other DNA
tatatttagaagaccctgtcat

SEQ ID NO: 95364 - DNA, 22 bp, synthetic construct
  misc_feature 1..22: note = chemically synthesized
  source 1..22: mol_type = other DNA
agaagaccctgtcatctcagcc

SEQ ID NO: 95365 - DNA, 22 bp, synthetic construct
  misc_feature 1..22: note = chemically synthesized
  source 1..22: mol_type = other DNA
gaagaccctgtcatctcagccc

SEQ ID NO: 95366 - DNA, 22 bp, synthetic construct
  misc_feature 1..22: note = chemically synthesized
  source 1..22: mol_type = other DNA
tcatctcagcccaaaatcttaa

SEQ ID NO: 95367 - DNA, 22 bp, synthetic construct
  misc_feature 1..22: note = chemically synthesized
  source 1..22: mol_type = other DNA
agcccaaaatcttaagctgata

SEQ ID NO: 95368 - DNA, 22 bp, synthetic construct
  misc_feature 1..22: note = chemically synthesized
  source 1..22: mol_type = other DNA
aagctgataaacagcttcagca

SEQ ID NO: 95369 - DNA, 22 bp, synthetic construct
  misc_feature 1..22: note = chemically synthesized
  source 1..22: mol_type = other DNA
agctgataaacagcttcagcaa

SEQ ID NO: 95370 - DNA, 22 bp, synthetic construct
  misc_feature 1..22: note = chemically synthesized
  source 1..22: mol_type = other DNA
ataaacagcttcagcaaagtct

SEQ ID NO: 95371 - DNA, 22 bp, synthetic construct
  misc_feature 1..22: note = chemically synthesized
  source 1..22: mol_type = other DNA
cagcaaagtctcaagatacaaa

SEQ ID NO: 95372 - DNA, 22 bp, synthetic construct
  misc_feature 1..22: note = chemically synthesized
  source 1..22: mol_type = other DNA
agcaaagtctcaagatacaaaa

SEQ ID NO: 95373 - DNA, 22 bp, synthetic construct
  misc_feature 1..22: note = chemically synthesized
  source 1..22: mol_type = other DNA
aagatacaaaatcagtgtgcag

SEQ ID NO: 95374 - DNA, 22 bp, synthetic construct
  misc_feature 1..22: note = chemically synthesized
  source 1..22: mol_type = other DNA
ctatacaccaataatagacaag

SEQ ID NO: 95375 - DNA, 22 bp, synthetic construct
  misc_feature 1..22: note = chemically synthesized
  source 1..22: mol_type = other DNA
tacaccaataatagacaagcag

SEQ ID NO: 95376 - DNA, 22 bp, synthetic construct
  misc_feature 1..22: note = chemically synthesized
  source 1..22: mol_type = other DNA
ccattcacaattgctgcaaaga

SEQ ID NO: 95377 - DNA, 22 bp, synthetic construct
  misc_feature 1..22: note = chemically synthesized
  source 1..22: mol_type = other DNA
acaattgctgcaaagagaataa

SEQ ID NO: 95378 - DNA, 22 bp, synthetic construct
  misc_feature 1..22: note = chemically synthesized
  source 1..22: mol_type = other DNA
ctgcaaagagaataaaataaaa

SEQ ID NO: 95379 - DNA, 22 bp, synthetic construct
  misc_feature 1..22: note = chemically synthesized
  source 1..22: mol_type = other DNA
caaagagaataaaataaaatac

SEQ ID NO: 95380 - DNA, 22 bp, synthetic construct
  misc_feature 1..22: note = chemically synthesized
  source 1..22: mol_type = other DNA
gaaatacaacttctaagggatg

SEQ ID NO: 95381 - DNA, 22 bp, synthetic construct
  misc_feature 1..22: note = chemically synthesized
  source 1..22: mol_type = other DNA
ctaagggatgtgaagaacctct

SEQ ID NO: 95382 - DNA, 22 bp, synthetic construct
  misc_feature 1..22: note = chemically synthesized
  source 1..22: mol_type = other DNA
taagggatgtgaagaacctctt

SEQ ID NO: 95383 - DNA, 22 bp, synthetic construct
  misc_feature 1..22: note = chemically synthesized
  source 1..22: mol_type = other DNA
agggatgtgaagaacctcttca

SEQ ID NO: 95384 - DNA, 22 bp, synthetic construct
  misc_feature 1..22: note = chemically synthesized
  source 1..22: mol_type = other DNA
ttcaaggagagctacaaaccac

SEQ ID NO: 95385 - DNA, 22 bp, synthetic construct
  misc_feature 1..22: note = chemically synthesized
  source 1..22: mol_type = other DNA
caaggagagctacaaaccactc

SEQ ID NO: 95386 - DNA, 22 bp, synthetic construct
  misc_feature 1..22: note = chemically synthesized
  source 1..22: mol_type = other DNA
aaggagagctacaaaccactca

SEQ ID NO: 95387 - DNA, 22 bp, synthetic construct
  misc_feature 1..22: note = chemically synthesized
  source 1..22: mol_type = other DNA
caaaccactcactgctcaagga

SEQ ID NO: 95388 - DNA, 22 bp, synthetic construct
  misc_feature 1..22: note = chemically synthesized
  source 1..22: mol_type = other DNA
actgctcaaggaaataagagag

SEQ ID NO: 95389 - DNA, 22 bp, synthetic construct
  misc_feature 1..22: note = chemically synthesized
  source 1..22: mol_type = other DNA
ctcaaggaaataagagaggaca

SEQ ID NO: 95390 - DNA, 22 bp, synthetic construct
  misc_feature 1..22: note = chemically synthesized
  source 1..22: mol_type = other DNA
aaggaaataagagaggacacaa

SEQ ID NO: 95391 - DNA, 22 bp, synthetic construct
  misc_feature 1..22: note = chemically synthesized
  source 1..22: mol_type = other DNA
catgctcatagatagaaagaat

SEQ ID NO: 95392 - DNA, 22 bp, synthetic construct
  misc_feature 1..22: note = chemically synthesized
  source 1..22: mol_type = other DNA
atagatagaaagaatcaatatc

SEQ ID NO: 95393 - DNA, 22 bp, synthetic construct
  misc_feature 1..22: note = chemically synthesized
  source 1..22: mol_type = other DNA
taaaatggccatactgcccaaa

SEQ ID NO: 95394 - DNA, 22 bp, synthetic construct
  misc_feature 1..22: note = chemically synthesized
  source 1..22: mol_type = other DNA
aaaatggccatactgcccaaag

SEQ ID NO: 95395 - DNA, 22 bp, synthetic construct
  misc_feature 1..22: note = chemically synthesized
  source 1..22: mol_type = other DNA
aaatggccatactgcccaaagt

SEQ ID NO: 95396 - DNA, 22 bp, synthetic construct
  misc_feature 1..22: note = chemically synthesized
  source 1..22: mol_type = other DNA
cccaaagtaatttatagattca

SEQ ID NO: 95397 - DNA, 22 bp, synthetic construct
  misc_feature 1..22: note = chemically synthesized
  source 1..22: mol_type = other DNA
atagattcaatgctatccccat

SEQ ID NO: 95398 - DNA, 22 bp, synthetic construct
  misc_feature 1..22: note = chemically synthesized
  source 1..22: mol_type = other DNA
tagattcaatgctatccccatc

SEQ ID NO: 95399 - DNA, 22 bp, synthetic construct
  misc_feature 1..22: note = chemically synthesized
  source 1..22: mol_type = other DNA
aatgctatccccatcaagctac

SEQ ID NO: 95400 - DNA, 22 bp, synthetic construct
  misc_feature 1..22: note = chemically synthesized
  source 1..22: mol_type = other DNA
tccccatcaagctaccactgac

SEQ ID NO: 95401 - DNA, 22 bp, synthetic construct
  misc_feature 1..22: note = chemically synthesized
  source 1..22: mol_type = other DNA
ccactgacttttttcaaagaat

SEQ ID NO: 95402 - DNA, 22 bp, synthetic construct
  misc_feature 1..22: note = chemically synthesized
  source 1..22: mol_type = other DNA
acttttttcaaagaattagaaa

SEQ ID NO: 95403 - DNA, 22 bp, synthetic construct
  misc_feature 1..22: note = chemically synthesized
  source 1..22: mol_type = other DNA
ttttcaaagaattagaaaaaac

SEQ ID NO: 95404 - DNA, 22 bp, synthetic construct
  misc_feature 1..22: note = chemically synthesized
  source 1..22: mol_type = other DNA
tttcaaagaattagaaaaaact

SEQ ID NO: 95405 - DNA, 22 bp, synthetic construct
  misc_feature 1..22: note = chemically synthesized
  source 1..22: mol_type = other DNA
ttcaaagaattagaaaaaacta

SEQ ID NO: 95406 - DNA, 22 bp, synthetic construct
  misc_feature 1..22: note = chemically synthesized
  source 1..22: mol_type = other DNA
tcaaagaattagaaaaaactac

SEQ ID NO: 95407 - DNA, 22 bp, synthetic construct
  misc_feature 1..22: note = chemically synthesized
  source 1..22: mol_type = other DNA
caaagaattagaaaaaactact

SEQ ID NO: 95408 - DNA, 22 bp, synthetic construct
  misc_feature 1..22: note = chemically synthesized
  source 1..22: mol_type = other DNA
aaagaattagaaaaaactactt

SEQ ID NO: 95409 - DNA, 22 bp, synthetic construct
  misc_feature 1..22: note = chemically synthesized
  source 1..22: mol_type = other DNA
gaaaaaactactttaaatgtca

SEQ ID NO: 95410 - DNA, 22 bp, synthetic construct
  misc_feature 1..22: note = chemically synthesized
  source 1..22: mol_type = other DNA
ctttaaatgtcatatggaatca

SEQ ID NO: 95411 - DNA, 22 bp, synthetic construct
  misc_feature 1..22: note = chemically synthesized
  source 1..22: mol_type = other DNA
taaatgtcatatggaatcaaaa

SEQ ID NO: 95412 - DNA, 22 bp, synthetic construct
  misc_feature 1..22: note = chemically synthesized
  source 1..22: mol_type = other DNA
aaatgtcatatggaatcaaaaa

SEQ ID NO: 95413 - DNA, 22 bp, synthetic construct
  misc_feature 1..22: note = chemically synthesized
  source 1..22: mol_type = other DNA
aatgtcatatggaatcaaaaaa

SEQ ID NO: 95414 - DNA, 22 bp, synthetic construct
  misc_feature 1..22: note = chemically synthesized
  source 1..22: mol_type = other DNA
aacaaaaagaacaaagctggag

SEQ ID NO: 95415 - DNA, 22 bp, synthetic construct
  misc_feature 1..22: note = chemically synthesized
  source 1..22: mol_type = other DNA
gaggcatgatgctacctgactt

SEQ ID NO: 95416 - DNA, 22 bp, synthetic construct
  misc_feature 1..22: note = chemically synthesized
  source 1..22: mol_type = other DNA
cctgacttcaaactatactaca

SEQ ID NO: 95417 - DNA, 22 bp, synthetic construct
  misc_feature 1..22: note = chemically synthesized
  source 1..22: mol_type = other DNA
acttcaaactatactacaaggc

SEQ ID NO: 95418 - DNA, 22 bp, synthetic construct
  misc_feature 1..22: note = chemically synthesized
  source 1..22: mol_type = other DNA
caaactatactacaaggctaca

SEQ ID NO: 95419 - DNA, 22 bp, synthetic construct
  misc_feature 1..22: note = chemically synthesized
  source 1..22: mol_type = other DNA
aaactatactacaaggctacag

SEQ ID NO: 95420 - DNA, 22 bp, synthetic construct
  misc_feature 1..22: note = chemically synthesized
  source 1..22: mol_type = other DNA
tactacaaggctacagtaacaa

SEQ ID NO: 95421 - DNA, 22 bp, synthetic construct
  misc_feature 1..22: note = chemically synthesized
  source 1..22: mol_type = other DNA
caaggctacagtaacaaaaaca

SEQ ID NO: 95422 - DNA, 22 bp, synthetic construct
  misc_feature 1..22: note = chemically synthesized
  source 1..22: mol_type = other DNA
cagtaacaaaaacagcatggta

SEQ ID NO: 95423 - DNA, 22 bp, synthetic construct
  misc_feature 1..22: note = chemically synthesized
  source 1..22: mol_type = other DNA
gtaccaaaacagatatatagac

SEQ ID NO: 95424 - DNA, 22 bp, synthetic construct
  misc_feature 1..22: note = chemically synthesized
  source 1..22: mol_type = other DNA
agaaataatgccacacatctac

SEQ ID NO: 95425 - DNA, 22 bp, synthetic construct
  misc_feature 1..22: note = chemically synthesized
  source 1..22: mol_type = other DNA
cgaccatctgatctttgacaaa

SEQ ID NO: 95426 - DNA, 22 bp, synthetic construct
  misc_feature 1..22: note = chemically synthesized
  source 1..22: mol_type = other DNA
atctttgacaaacatcacaaaa

SEQ ID NO: 95427 - DNA, 22 bp, synthetic construct
  misc_feature 1..22: note = chemically synthesized
  source 1..22: mol_type = other DNA
tgacaaacatcacaaaagcaat

SEQ ID NO: 95428 - DNA, 22 bp, synthetic construct
  misc_feature 1..22: note = chemically synthesized
  source 1..22: mol_type = other DNA
gacaaacatcacaaaagcaatg

SEQ ID NO: 95429 - DNA, 22 bp, synthetic construct
  misc_feature 1..22: note = chemically synthesized
  source 1..22: mol_type = other DNA
acaaacatcacaaaagcaatgg

SEQ ID NO: 95430 - DNA, 22 bp, synthetic construct
  misc_feature 1..22: note = chemically synthesized
  source 1..22: mol_type = other DNA
cctatttaataaatggtgctgg

SEQ ID NO: 95431 - DNA, 22 bp, synthetic construct
  misc_feature 1..22: note = chemically synthesized
  source 1..22: mol_type = other DNA
tttaataaatggtgctggaaaa

SEQ ID NO: 95432 - DNA, 22 bp, synthetic construct
  misc_feature 1..22: note = chemically synthesized
  source 1..22: mol_type = other DNA
aataaatggtgctggaaaaact

SEQ ID NO: 95433 - DNA, 22 bp, synthetic construct
  misc_feature 1..22: note = chemically synthesized
  source 1..22: mol_type = other DNA
ataaatggtgctggaaaaactg

SEQ ID NO: 95434 - DNA, 22 bp, synthetic construct
  misc_feature 1..22: note = chemically synthesized
  source 1..22: mol_type = other DNA
gaaaaactggctagcaatatgc

SEQ ID NO: 95435 - DNA, 22 bp, synthetic construct
  misc_feature 1..22: note = chemically synthesized
  source 1..22: mol_type = other DNA
gctagcaatatgcataaaactg

SEQ ID NO: 95436 - DNA, 22 bp, synthetic construct
  misc_feature 1..22: note = chemically synthesized
  source 1..22: mol_type = other DNA
gcaatatgcataaaactgaaac

SEQ ID NO: 95437 - DNA, 22 bp, synthetic construct
  misc_feature 1..22: note = chemically synthesized
  source 1..22: mol_type = other DNA
aaactgtaccccttccttacac

SEQ ID NO: 95438 - DNA, 22 bp, synthetic construct
  misc_feature 1..22: note = chemically synthesized
  source 1..22: mol_type = other DNA
taccccttccttacaccttata

SEQ ID NO: 95439 - DNA, 22 bp, synthetic construct
  misc_feature 1..22: note = chemically synthesized
  source 1..22: mol_type = other DNA
ccttacaccttatacaaaaatt

SEQ ID NO: 95440 - DNA, 22 bp, synthetic construct
  misc_feature 1..22: note = chemically synthesized
  source 1..22: mol_type = other DNA
cttacaccttatacaaaaatta

SEQ ID NO: 95441 - DNA, 22 bp, synthetic construct
  misc_feature 1..22: note = chemically synthesized
  source 1..22: mol_type = other DNA
acaccttatacaaaaattaact

SEQ ID NO: 95442 - DNA, 22 bp, synthetic construct
  misc_feature 1..22: note = chemically synthesized
  source 1..22: mol_type = other DNA
caccttatacaaaaattaactc

SEQ ID NO: 95443 - DNA, 22 bp, synthetic construct
  misc_feature 1..22: note = chemically synthesized
  source 1..22: mol_type = other DNA
atacaaaaattaactcaaggtg

SEQ ID NO: 95444 - DNA, 22 bp, synthetic construct
  misc_feature 1..22: note = chemically synthesized
  source 1..22: mol_type = other DNA
tacaaaaattaactcaaggtgg

SEQ ID NO: 95445 - DNA, 22 bp, synthetic construct
  misc_feature 1..22: note = chemically synthesized
  source 1..22: mol_type = other DNA
actcaaggtggattaaagactt

SEQ ID NO: 95446 - DNA, 22 bp, synthetic construct
  misc_feature 1..22: note = chemically synthesized
  source 1..22: mol_type = other DNA
aaggtggattaaagacttaaat

SEQ ID NO: 95447 - DNA, 22 bp, synthetic construct
  misc_feature 1..22: note = chemically synthesized
  source 1..22: mol_type = other DNA
aagacttaaatgtgcaacctaa

SEQ ID NO: 95448 - DNA, 22 bp, synthetic construct
  misc_feature 1..22: note = chemically synthesized
  source 1..22: mol_type = other DNA
aaatgtgcaacctaaaaccata

SEQ ID NO: 95449 - DNA, 22 bp, synthetic construct
  misc_feature 1..22: note = chemically synthesized
  source 1..22: mol_type = other DNA
aatgtgcaacctaaaaccataa

SEQ ID NO: 95450 - DNA, 22 bp, synthetic construct
  misc_feature 1..22: note = chemically synthesized
  source 1..22: mol_type = other DNA
aaaccataaaaatcctagaaga

SEQ ID NO: 95451 - DNA, 22 bp, synthetic construct
  misc_feature 1..22: note = chemically synthesized
  source 1..22: mol_type = other DNA
gaagataacctaggcaatacca

SEQ ID NO: 95452 - DNA, 22 bp, synthetic construct
  misc_feature 1..22: note = chemically synthesized
  source 1..22: mol_type = other DNA
ggcaataccattcaggacatag

SEQ ID NO: 95453 - DNA, 22 bp, synthetic construct
  misc_feature 1..22: note = chemically synthesized
  source 1..22: mol_type = other DNA
aggacataggcatgggcaaaaa

SEQ ID NO: 95454 - DNA, 22 bp, synthetic construct
  misc_feature 1..22: note = chemically synthesized
  source 1..22: mol_type = other DNA
acgactaaaacatcaaaagcaa

SEQ ID NO: 95455 - DNA, 22 bp, synthetic construct
  misc_feature 1..22: note = chemically synthesized
  source 1..22: mol_type = other DNA
aaacatcaaaagcaatgacaac

SEQ ID NO: 95456 - DNA, 22 bp, synthetic construct
  misc_feature 1..22: note = chemically synthesized
  source 1..22: mol_type = other DNA
acatatgggatctaattaaact

SEQ ID NO: 95457 - DNA, 22 bp, synthetic construct
  misc_feature 1..22: note = chemically synthesized
  source 1..22: mol_type = other DNA
attaaactaaagagcttctgca

SEQ ID NO: 95458 - DNA, 22 bp, synthetic construct
  misc_feature 1..22: note = chemically synthesized
  source 1..22: mol_type = other DNA
aactaaagagcttctgcacagc

SEQ ID NO: 95459 - DNA, 22 bp, synthetic construct
  misc_feature 1..22: note = chemically synthesized
  source 1..22: mol_type = other DNA
aagagcttctgcacagcaaaag

SEQ ID NO: 95460 - DNA, 22 bp, synthetic construct
  misc_feature 1..22: note = chemically synthesized
  source 1..22: mol_type = other DNA
ctgcacagcaaaagactatcat

SEQ ID NO: 95461 - DNA, 22 bp, synthetic construct
  misc_feature 1..22: note = chemically synthesized
  source 1..22: mol_type = other DNA
tgcacagcaaaagactatcatc

SEQ ID NO: 95462 - DNA, 22 bp, synthetic construct
  misc_feature 1..22: note = chemically synthesized
  source 1..22: mol_type = other DNA
cacagcaaaagactatcatcag

SEQ ID NO: 95463 - DNA, 22 bp, synthetic construct
  misc_feature 1..22: note = chemically synthesized
  source 1..22: mol_type = other DNA
tcatcagagtgaacaggcaacc

SEQ ID NO: 95464 - DNA, 22 bp, synthetic construct
  misc_feature 1..22: note = chemically synthesized
  source 1..22: mol_type = other DNA
cagaatgggagaaaatttttgc

SEQ ID NO: 95465 - DNA, 22 bp, synthetic construct
  misc_feature 1..22: note = chemically synthesized
  source 1..22: mol_type = other DNA
ttgcaatctatccatctgacaa

SEQ ID NO: 95466 - DNA, 22 bp, synthetic construct
  misc_feature 1..22: note = chemically synthesized
  source 1..22: mol_type = other DNA
tgcaatctatccatctgacaaa

SEQ ID NO: 95467 - DNA, 22 bp, synthetic construct
  misc_feature 1..22: note = chemically synthesized
  source 1..22: mol_type = other DNA
gcaatctatccatctgacaaag

SEQ ID NO: 95468 - DNA, 22 bp, synthetic construct
  misc_feature 1..22: note = chemically synthesized
  source 1..22: mol_type = other DNA
caatctatccatctgacaaagg

SEQ ID NO: 95469 - DNA, 22 bp, synthetic construct
  misc_feature 1..22: note = chemically synthesized
  source 1..22: mol_type = other DNA
tccatctgacaaagggctaaca

SEQ ID NO: 95470 - DNA, 22 bp, synthetic construct
  misc_feature 1..22: note = chemically synthesized
  source 1..22: mol_type = other DNA
acaaagggctaacatccaaaat

SEQ ID NO: 95471 - DNA, 22 bp, synthetic construct
  misc_feature 1..22: note = chemically synthesized
  source 1..22: mol_type = other DNA
acatccaaaatctacaaagaac

SEQ ID NO: 95472 - DNA, 22 bp, synthetic construct
  misc_feature 1..22: note = chemically synthesized
  source 1..22: mol_type = other DNA
caaagaacttcaacaaatttac

SEQ ID NO: 95473 - DNA, 22 bp, synthetic construct
  misc_feature 1..22: note = chemically synthesized
  source 1..22: mol_type = other DNA
caacaaatttacaagaaaaaac

SEQ ID NO: 95474 - DNA, 22 bp, synthetic construct
  misc_feature 1..22: note = chemically synthesized
  source 1..22: mol_type = other DNA
aacaaatttacaagaaaaaacc

SEQ ID NO: 95475 - DNA, 22 bp, synthetic construct
  misc_feature 1..22: note = chemically synthesized
  source 1..22: mol_type = other DNA
acaagaaaaaacctaacgaccc

SEQ ID NO: 95476 - DNA, 22 bp, synthetic construct
  misc_feature 1..22: note = chemically synthesized
  source 1..22: mol_type = other DNA
caagaaaaaacctaacgacccc

SEQ ID NO: 95477 - DNA, 22 bp, synthetic construct
  misc_feature 1..22: note = chemically synthesized
  source 1..22: mol_type = other DNA
acgaccccatcaaaaagtggac

SEQ ID NO: 95478 - DNA, 22 bp, synthetic construct
  misc_feature 1..22: note = chemically synthesized
  source 1..22: mol_type = other DNA
ctctaaagaagtcatttatgtg

SEQ ID NO: 95479 - DNA, 22 bp, synthetic construct
  misc_feature 1..22: note = chemically synthesized
  source 1..22: mol_type = other DNA
tctaaagaagtcatttatgtgg

SEQ ID NO: 95480 - DNA, 22 bp, synthetic construct
  misc_feature 1..22: note = chemically synthesized
  source 1..22: mol_type = other DNA
taaagaagtcatttatgtggcc

SEQ ID NO: 95481 - DNA, 22 bp, synthetic construct
  misc_feature 1..22: note = chemically synthesized
  source 1..22: mol_type = other DNA
aagaagtcatttatgtggccaa

SEQ ID NO: 95482 - DNA, 22 bp, synthetic construct
  misc_feature 1..22: note = chemically synthesized
  source 1..22: mol_type = other DNA
atgtggccaagaaacacatgaa

SEQ ID NO: 95483 - DNA, 22 bp, synthetic construct
  misc_feature 1..22: note = chemically synthesized
  source 1..22: mol_type = other DNA
tgtggccaagaaacacatgaaa

SEQ ID NO: 95484 - DNA, 22 bp, synthetic construct
  misc_feature 1..22: note = chemically synthesized
  source 1..22: mol_type = other DNA
atcatcactggtcattagagaa

SEQ ID NO: 95485 - DNA, 22 bp, synthetic construct
  misc_feature 1..22: note = chemically synthesized
  source 1..22: mol_type = other DNA
gtcattagagaaatgcaaatca

SEQ ID NO: 95486 - DNA, 22 bp, synthetic construct
  misc_feature 1..22: note = chemically synthesized
  source 1..22: mol_type = other DNA
gagaaatgcaaatcaaaaccac

SEQ ID NO: 95487 - DNA, 22 bp, synthetic construct
  misc_feature 1..22: note = chemically synthesized
  source 1..22: mol_type = other DNA
atgccagttagaatggcaatta

SEQ ID NO: 95488 - DNA, 22 bp, synthetic construct
  misc_feature 1..22: note = chemically synthesized
  source 1..22: mol_type = other DNA
gaatggcaattattaaaaagtc

SEQ ID NO: 95489 - DNA, 22 bp, synthetic construct
  misc_feature 1..22: note = chemically synthesized
  source 1..22: mol_type = other DNA
ttaaaaagtcaggaaacaaaag

SEQ ID NO: 95490 - DNA, 22 bp, synthetic construct
  misc_feature 1..22: note = chemically synthesized
  source 1..22: mol_type = other DNA
aaaagtcaggaaacaaaaggtg

SEQ ID NO: 95491 - DNA, 22 bp, synthetic construct
  misc_feature 1..22: note = chemically synthesized
  source 1..22: mol_type = other DNA
gagaggatgtggaagaatagga

SEQ ID NO: 95492 - DNA, 22 bp, synthetic construct
  misc_feature 1..22: note = chemically synthesized
  source 1..22: mol_type = other DNA
tacactgttgatgggtgtgtaa

SEQ ID NO: 95493 - DNA, 22 bp, synthetic construct
  misc_feature 1..22: note = chemically synthesized
  source 1..22: mol_type = other DNA
acactgttgatgggtgtgtaaa

SEQ ID NO: 95494 - DNA, 22 bp, synthetic construct
  misc_feature 1..22: note = chemically synthesized
  source 1..22: mol_type = other DNA
cactgttgatgggtgtgtaaat

SEQ ID NO: 95495 - DNA, 22 bp, synthetic construct
  misc_feature 1..22: note = chemically synthesized
  source 1..22: mol_type = other DNA
ttgatgggtgtgtaaattagtt

SEQ ID NO: 95496 - DNA, 22 bp, synthetic construct
  misc_feature 1..22: note = chemically synthesized
  source 1..22: mol_type = other DNA
atgggtgtgtaaattagttcaa

SEQ ID NO: 95497 - DNA, 22 bp, synthetic construct
  misc_feature 1..22: note = chemically synthesized
  source 1..22: mol_type = other DNA
gttcaaccattgtggaagacag

SEQ ID NO: 95498 - DNA, 22 bp, synthetic construct
  misc_feature 1..22: note = chemically synthesized
  source 1..22: mol_type = other DNA
aaccattgtggaagacagtgtg

SEQ ID NO: 95499 - DNA, 22 bp, synthetic construct
  misc_feature 1..22: note = chemically synthesized
  source 1..22: mol_type = other DNA
tggaagacagtgtggcgattcc

SEQ ID NO: 95500 - DNA, 22 bp, synthetic construct
  misc_feature 1..22: note = chemically synthesized
  source 1..22: mol_type = other DNA
ctcaaggatctagaaccagaaa

SEQ ID NO: 95501 - DNA, 22 bp, synthetic construct
  misc_feature 1..22: note = chemically synthesized
  source 1..22: mol_type = other DNA
aaggatctagaaccagaaatac

SEQ ID NO: 95502 - DNA, 22 bp, synthetic construct
  misc_feature 1..22: note = chemically synthesized
  source 1..22: mol_type = other DNA
gaaccagaaatactgtttgacc

SEQ ID NO: 95503 - DNA, 22 bp, synthetic construct
  misc_feature 1..22: note = chemically synthesized
  source 1..22: mol_type = other DNA
tttgacccagcaatcccattac

SEQ ID NO: 95504 - DNA, 22 bp, synthetic construct
  misc_feature 1..22: note = chemically synthesized
  source 1..22: mol_type = other DNA
gacccagcaatcccattactgg

SEQ ID NO: 95505 - DNA, 22 bp, synthetic construct
  misc_feature 1..22: note = chemically synthesized
  source 1..22: mol_type = other DNA
acccagcaatcccattactggg

SEQ ID NO: 95506 - DNA, 22 bp, synthetic construct
  misc_feature 1..22: note = chemically synthesized
  source 1..22: mol_type = other DNA
ctgggtatatacccaaagaatt

SEQ ID NO: 95507 - DNA, 22 bp, synthetic construct
  misc_feature 1..22: note = chemically synthesized
  source 1..22: mol_type = other DNA
ggtatatacccaaagaattaga

SEQ ID NO: 95508 - DNA, 22 bp, synthetic construct
  misc_feature 1..22: note = chemically synthesized
  source 1..22: mol_type = other DNA
gaaatcattctactataaagac

SEQ ID NO: 95509 - DNA, 22 bp, synthetic construct
  misc_feature 1..22: note = chemically synthesized
  source 1..22: mol_type = other DNA
tactataaagacacgtgcacac

SEQ ID NO: 95510 - DNA, 22 bp, synthetic construct
  misc_feature 1..22: note = chemically synthesized
  source 1..22: mol_type = other DNA
ctataaagacacgtgcacacgt

SEQ ID NO: 95511 - DNA, 22 bp, synthetic construct
  misc_feature 1..22: note = chemically synthesized
  source 1..22: mol_type = other DNA
taaagacacgtgcacacgtatg

SEQ ID NO: 95512 - DNA, 22 bp, synthetic construct
  misc_feature 1..22: note = chemically synthesized
  source 1..22: mol_type = other DNA
attgtggcactattcacaatag

SEQ ID NO: 95513 - DNA, 22 bp, synthetic construct
  misc_feature 1..22: note = chemically synthesized
  source 1..22: mol_type = other DNA
ttgtggcactattcacaatagc

SEQ ID NO: 95514 - DNA, 22 bp, synthetic construct
  misc_feature 1..22: note = chemically synthesized
  source 1..22: mol_type = other DNA
tggcactattcacaatagcaaa

SEQ ID NO: 95515 - DNA, 22 bp, synthetic construct
  misc_feature 1..22: note = chemically synthesized
  source 1..22: mol_type = other DNA
ttcacaatagcaaagacttgga

SEQ ID NO: 95516 - DNA, 22 bp, synthetic construct
  misc_feature 1..22: note = chemically synthesized
  source 1..22: mol_type = other DNA
acaatagcaaagacttggaacc

SEQ ID NO: 95517 - DNA, 22 bp, synthetic construct
  misc_feature 1..22: note = chemically synthesized
  source 1..22: mol_type = other DNA
ggaaccaacccaaatggccatc

SEQ ID NO: 95518 - DNA, 22 bp, synthetic construct
  misc_feature 1..22: note = chemically synthesized
  source 1..22: mol_type = other DNA
gaaccaacccaaatggccatca

SEQ ID NO: 95519 - DNA, 22 bp, synthetic construct
  misc_feature 1..22: note = chemically synthesized
  source 1..22: mol_type = other DNA
tgcagccataaaaatgatgagt

SEQ ID NO: 95520 - DNA, 22 bp, synthetic construct
  misc_feature 1..22: note = chemically synthesized
  source 1..22: mol_type = other DNA
atgtctttgcagggacatggat

SEQ ID NO: 95521 - DNA, 22 bp, synthetic construct
  misc_feature 1..22: note = chemically synthesized
  source 1..22: mol_type = other DNA
tgcagggacatggatgaaggtg

SEQ ID NO: 95522 - DNA, 22 bp, synthetic construct
  misc_feature 1..22: note = chemically synthesized
  source 1..22: mol_type = other DNA
gcagggacatggatgaaggtgg

SEQ ID NO: 95523 - DNA, 22 bp, synthetic construct
  misc_feature 1..22: note = chemically synthesized
  source 1..22: mol_type = other DNA
cagggacatggatgaaggtgga

SEQ ID NO: 95524 - DNA, 22 bp, synthetic construct
  misc_feature 1..22: note = chemically synthesized
  source 1..22: mol_type = other DNA
tgagcaaactaacacaggaaca

SEQ ID NO: 95525 - DNA, 22 bp, synthetic construct
  misc_feature 1..22: note = chemically synthesized
  source 1..22: mol_type = other DNA
agcaaactaacacaggaacaga

SEQ ID NO: 95526 - DNA, 22 bp, synthetic construct
  misc_feature 1..22: note = chemically synthesized
  source 1..22: mol_type = other DNA
acacaggaacagagaaaccaaa

SEQ ID NO: 95527 - DNA, 22 bp, synthetic construct
  misc_feature 1..22: note = chemically synthesized
  source 1..22: mol_type = other DNA
tcactcataagtgggagttgaa

SEQ ID NO: 95528 - DNA, 22 bp, synthetic construct
  misc_feature 1..22: note = chemically synthesized
  source 1..22: mol_type = other DNA
actcataagtgggagttgaaca

SEQ ID NO: 95529 - DNA, 22 bp, synthetic construct
  misc_feature 1..22: note = chemically synthesized
  source 1..22: mol_type = other DNA
ataagtgggagttgaacaatga

SEQ ID NO: 95530 - DNA, 22 bp, synthetic construct
  misc_feature 1..22: note = chemically synthesized
  source 1..22: mol_type = other DNA
aacaatgagaacacatggacac

SEQ ID NO: 95531 - DNA, 22 bp, synthetic construct
  misc_feature 1..22: note = chemically synthesized
  source 1..22: mol_type = other DNA
tcggggggtgagggggttagga

SEQ ID NO: 95532 - DNA, 22 bp, synthetic construct
  misc_feature 1..22: note = chemically synthesized
  source 1..22: mol_type = other DNA
ggagagggataacattaaaaga

SEQ ID NO: 95533 - DNA, 22 bp, synthetic construct
  misc_feature 1..22: note = chemically synthesized
  source 1..22: mol_type = other DNA
aaagaaatacctaatgtagatg

SEQ ID NO: 95534 - DNA, 22 bp, synthetic construct
  misc_feature 1..22: note = chemically synthesized
  source 1..22: mol_type = other DNA
atgtagatgacaggttgatggg

SEQ ID NO: 95535 - DNA, 22 bp, synthetic construct
  misc_feature 1..22: note = chemically synthesized
  source 1..22: mol_type = other DNA
atgggtgcagcaaaccaccatg

SEQ ID NO: 95536 - DNA, 22 bp, synthetic construct
  misc_feature 1..22: note = chemically synthesized
  source 1..22: mol_type = other DNA
tacctatgtaacaaacctgcac

SEQ ID NO: 95537 - DNA, 22 bp, synthetic construct
  misc_feature 1..22: note = chemically synthesized
  source 1..22: mol_type = other DNA
tgtaacaaacctgcacattctg

SEQ ID NO: 95538 - DNA, 22 bp, synthetic construct
  misc_feature 1..22: note = chemically synthesized
  source 1..22: mol_type = other DNA
cacattctgcacatgtatccca

SEQ ID NO: 95539 - DNA, 22 bp, synthetic construct
  misc_feature 1..22: note = chemically synthesized
  source 1..22: mol_type = other DNA
tgcacatgtatcccagaactta

SEQ ID NO: 95540 - DNA, 22 bp, synthetic construct
  misc_feature 1..22: note = chemically synthesized
  source 1..22: mol_type = other DNA
cacatgtatcccagaacttaaa

SEQ ID NO: 95541 - DNA, 22 bp, synthetic construct
  misc_feature 1..22: note = chemically synthesized
  source 1..22: mol_type = other DNA
aaagtataataagaacaacaaa

SEQ ID NO: 95542 - DNA, 22 bp, synthetic construct
  misc_feature 1..22: note = chemically synthesized
  source 1..22: mol_type = other DNA
aagtataataagaacaacaaaa

SEQ ID NO: 95543 - DNA, 22 bp, synthetic construct
  misc_feature 1..22: note = chemically synthesized
  source 1..22: mol_type = other DNA
cttgaactgaccgacaatagtg

SEQ ID NO: 95544 - DNA, 22 bp, synthetic construct
  misc_feature 1..22: note = chemically synthesized
  source 1..22: mol_type = other DNA
gaactgaccgacaatagtgaca

SEQ ID NO: 95545 - DNA, 22 bp, synthetic construct
  misc_feature 1..22: note = chemically synthesized
  source 1..22: mol_type = other DNA
aactgaccgacaatagtgacac

SEQ ID NO: 95546 - DNA, 22 bp, synthetic construct
  misc_feature 1..22: note = chemically synthesized
  source 1..22: mol_type = other DNA
accgacaatagtgacacaacct

SEQ ID NO: 95547 - DNA, 22 bp, synthetic construct
  misc_feature 1..22: note = chemically synthesized
  source 1..22: mol_type = other DNA
tcaaaacctctaggatacagca

SEQ ID NO: 95548 - DNA, 22 bp, synthetic construct
  misc_feature 1..22: note = chemically synthesized
  source 1..22: mol_type = other DNA
taggatacagcaaagatggtgc

SEQ ID NO: 95549 - DNA, 22 bp, synthetic construct
  misc_feature 1..22: note = chemically synthesized
  source 1..22: mol_type = other DNA
ggatacagcaaagatggtgcta

SEQ ID NO: 95550 - DNA, 22 bp, synthetic construct
  misc_feature 1..22: note = chemically synthesized
  source 1..22: mol_type = other DNA
aaaggaaagttcacagccctaa

SEQ ID NO: 95551 - DNA, 22 bp, synthetic construct
  misc_feature 1..22: note = chemically synthesized
  source 1..22: mol_type = other DNA
acagccctaaatgtcgatgtca

SEQ ID NO: 95552 - DNA, 22 bp, synthetic construct
  misc_feature 1..22: note = chemically synthesized
  source 1..22: mol_type = other DNA
aatgtcgatgtcaaagagtctg

SEQ ID NO: 95553 - DNA, 22 bp, synthetic construct
  misc_feature 1..22: note = chemically synthesized
  source 1..22: mol_type = other DNA
aaagaggacagacagacaatat

SEQ ID NO: 95554 - DNA, 22 bp, synthetic construct
  misc_feature 1..22: note = chemically synthesized
  source 1..22: mol_type = other DNA
gagaaacaaaaacaaacagaac

SEQ ID NO: 95555 - DNA, 22 bp, synthetic construct
  misc_feature 1..22: note = chemically synthesized
  source 1..22: mol_type = other DNA
agataagaggagaactaaatga

SEQ ID NO: 95556 - DNA, 22 bp, synthetic construct
  misc_feature 1..22: note = chemically synthesized
  source 1..22: mol_type = other DNA
aatgaaattaaaacaactgcaa

SEQ ID NO: 95557 - DNA, 22 bp, synthetic construct
  misc_feature 1..22: note = chemically synthesized
  source 1..22: mol_type = other DNA
aaacaactgcaaaaaaatacaa

SEQ ID NO: 95558 - DNA, 22 bp, synthetic construct
  misc_feature 1..22: note = chemically synthesized
  source 1..22: mol_type = other DNA
caaaaaaatacaaaagctaaat

SEQ ID NO: 95559 - DNA, 22 bp, synthetic construct
  misc_feature 1..22: note = chemically synthesized
  source 1..22: mol_type = other DNA
aatgaaataaaaagctggttct

SEQ ID NO: 95560 - DNA, 22 bp, synthetic construct
  misc_feature 1..22: note = chemically synthesized
  source 1..22: mol_type = other DNA
gttctttgaaaagataaataaa

SEQ ID NO: 95561 - DNA, 22 bp, synthetic construct
  misc_feature 1..22: note = chemically synthesized
  source 1..22: mol_type = other DNA
tttgaaaagataaataaaactg

SEQ ID NO: 95562 - DNA, 22 bp, synthetic construct
  misc_feature 1..22: note = chemically synthesized
  source 1..22: mol_type = other DNA
tgaaaagataaataaaactgat

SEQ ID NO: 95563 - DNA, 22 bp, synthetic construct
  misc_feature 1..22: note = chemically synthesized
  source 1..22: mol_type = other DNA
gaaaagataaataaaactgata

SEQ ID NO: 95564 - DNA, 22 bp, synthetic construct
  misc_feature 1..22: note = chemically synthesized
  source 1..22: mol_type = other DNA
aaaagataaataaaactgatag

SEQ ID NO: 95565 - DNA, 22 bp, synthetic construct
  misc_feature 1..22: note = chemically synthesized
  source 1..22: mol_type = other DNA
atagaccattagcaagattaac

SEQ ID NO: 95566 - DNA, 22 bp, synthetic construct
  misc_feature 1..22: note = chemically synthesized
  source 1..22: mol_type = other DNA
gcaagattaaccaagaaaagag

SEQ ID NO: 95567 - DNA, 22 bp, synthetic construct
  misc_feature 1..22: note = chemically synthesized
  source 1..22: mol_type = other DNA
accaagaaaagaggagagaagt

SEQ ID NO: 95568 - DNA, 22 bp, synthetic construct
  misc_feature 1..22: note = chemically synthesized
  source 1..22: mol_type = other DNA
aattagaaacaaaacaggagat

SEQ ID NO: 95569 - DNA, 22 bp, synthetic construct
  misc_feature 1..22: note = chemically synthesized
  source 1..22: mol_type = other DNA
gaaacaaaacaggagatactat

SEQ ID NO: 95570 - DNA, 22 bp, synthetic construct
  misc_feature 1..22: note = chemically synthesized
  source 1..22: mol_type = other DNA
ttactgataccacagaaataca

SEQ ID NO: 95571 - DNA, 22 bp, synthetic construct
  misc_feature 1..22: note = chemically synthesized
  source 1..22: mol_type = other DNA
ctgataccacagaaatacaaaa

SEQ ID NO: 95572 - DNA, 22 bp, synthetic construct
  misc_feature 1..22: note = chemically synthesized
  source 1..22: mol_type = other DNA
ataccacagaaatacaaaagat

SEQ ID NO: 95573 - DNA, 22 bp, synthetic construct
  misc_feature 1..22: note = chemically synthesized
  source 1..22: mol_type = other DNA
ttcaaggctactatgaacacct

SEQ ID NO: 95574 - DNA, 22 bp, synthetic construct
  misc_feature 1..22: note = chemically synthesized
  source 1..22: mol_type = other DNA
aaggctactatgaacaccttta

SEQ ID NO: 95575 - DNA, 22 bp, synthetic construct
  misc_feature 1..22: note = chemically synthesized
  source 1..22: mol_type = other DNA
ctatgaacacctttacatgcat

SEQ ID NO: 95576 - DNA, 22 bp, synthetic construct
  misc_feature 1..22: note = chemically synthesized
  source 1..22: mol_type = other DNA
tgaacacctttacatgcataaa

SEQ ID NO: 95577 - DNA, 22 bp, synthetic construct
  misc_feature 1..22: note = chemically synthesized
  source 1..22: mol_type = other DNA
tacatgcataaactagaaaacc

SEQ ID NO: 95578 - DNA, 22 bp, synthetic construct
  misc_feature 1..22: note = chemically synthesized
  source 1..22: mol_type = other DNA
acatgcataaactagaaaacct

SEQ ID NO: 95579 - DNA, 22 bp, synthetic construct
  misc_feature 1..22: note = chemically synthesized
  source 1..22: mol_type = other DNA
catgcataaactagaaaaccta

SEQ ID NO: 95580 - DNA, 22 bp, synthetic construct
  misc_feature 1..22: note = chemically synthesized
  source 1..22: mol_type = other DNA
gaaaacctaaaggagacgttcg

SEQ ID NO: 95581 - DNA, 22 bp, synthetic construct
  misc_feature 1..22: note = chemically synthesized
  source 1..22: mol_type = other DNA
aaggagacgttcgaattcctgg

SEQ ID NO: 95582 - DNA, 22 bp, synthetic construct
  misc_feature 1..22: note = chemically synthesized
  source 1..22: mol_type = other DNA
gaattcctggaaagatacaggg

SEQ ID NO: 95583 - DNA, 22 bp, synthetic construct
  misc_feature 1..22: note = chemically synthesized
  source 1..22: mol_type = other DNA
ctggaaagatacagggctctag

SEQ ID NO: 95584 - DNA, 22 bp, synthetic construct
  misc_feature 1..22: note = chemically synthesized
  source 1..22: mol_type = other DNA
gaaagatacagggctctagctt

SEQ ID NO: 95585 - DNA, 22 bp, synthetic construct
  misc_feature 1..22: note = chemically synthesized
  source 1..22: mol_type = other DNA
tagcttaagtcaggaagaatta

SEQ ID NO: 95586 - DNA, 22 bp, synthetic construct
  misc_feature 1..22: note = chemically synthesized
  source 1..22: mol_type = other DNA
gcttaagtcaggaagaattaga

SEQ ID NO: 95587 - DNA, 22 bp, synthetic construct
  misc_feature 1..22: note = chemically synthesized
  source 1..22: mol_type = other DNA
aagtcaggaagaattagatacc

SEQ ID NO: 95588 - DNA, 22 bp, synthetic construct
  misc_feature 1..22: note = chemically synthesized
  source 1..22: mol_type = other DNA
agtcaggaagaattagataccc

SEQ ID NO: 95589 - DNA, 22 bp, synthetic construct
  misc_feature 1..22: note = chemically synthesized
  source 1..22: mol_type = other DNA
gataccctgaacagaccagtaa

SEQ ID NO: 95590 - DNA, 22 bp, synthetic construct
  misc_feature 1..22: note = chemically synthesized
  source 1..22: mol_type = other DNA
aacagaccagtaataagcagca

SEQ ID NO: 95591 - DNA, 22 bp, synthetic construct
  misc_feature 1..22: note = chemically synthesized
  source 1..22: mol_type = other DNA
aaatgataataaaaatttacca

SEQ ID NO: 95592 - DNA, 22 bp, synthetic construct
  misc_feature 1..22: note = chemically synthesized
  source 1..22: mol_type = other DNA
accaacaacaaaaaagtccagg

SEQ ID NO: 95593 - DNA, 22 bp, synthetic construct
  misc_feature 1..22: note = chemically synthesized
  source 1..22: mol_type = other DNA
ccaacaacaaaaaagtccagga

SEQ ID NO: 95594 - DNA, 22 bp, synthetic construct
  misc_feature 1..22: note = chemically synthesized
  source 1..22: mol_type = other DNA
acagctgaattctaccagacat

SEQ ID NO: 95595 - DNA, 22 bp, synthetic construct
  misc_feature 1..22: note = chemically synthesized
  source 1..22: mol_type = other DNA
aattctaccagacattcaaaga

SEQ ID NO: 95596 - DNA, 22 bp, synthetic construct
  misc_feature 1..22: note = chemically synthesized
  source 1..22: mol_type = other DNA
taccagacattcaaagaagaat

SEQ ID NO: 95597 - DNA, 22 bp, synthetic construct
  misc_feature 1..22: note = chemically synthesized
  source 1..22: mol_type = other DNA
ccagacattcaaagaagaattg

SEQ ID NO: 95598 - DNA, 22 bp, synthetic construct
  misc_feature 1..22: note = chemically synthesized
  source 1..22: mol_type = other DNA
aaagaagaattgataccaatcc

SEQ ID NO: 95599 - DNA, 22 bp, synthetic construct
  misc_feature 1..22: note = chemically synthesized
  source 1..22: mol_type = other DNA
ataccaatcctattgacagtat

SEQ ID NO: 95600 - DNA, 22 bp, synthetic construct
  misc_feature 1..22: note = chemically synthesized
  source 1..22: mol_type = other DNA
ttgacagtattctacaagatag

SEQ ID NO: 95601 - DNA, 22 bp, synthetic construct
  misc_feature 1..22: note = chemically synthesized
  source 1..22: mol_type = other DNA
acagtattctacaagatagaga

SEQ ID NO: 95602 - DNA, 22 bp, synthetic construct
  misc_feature 1..22: note = chemically synthesized
  source 1..22: mol_type = other DNA
tacaagatagagaaagagagaa

SEQ ID NO: 95603 - DNA, 22 bp, synthetic construct
  misc_feature 1..22: note = chemically synthesized
  source 1..22: mol_type = other DNA
caagatagagaaagagagaatc

SEQ ID NO: 95604 - DNA, 22 bp, synthetic construct
  misc_feature 1..22: note = chemically synthesized
  source 1..22: mol_type = other DNA
cctaaatcattctatgaagcca

SEQ ID NO: 95605 - DNA, 22 bp, synthetic construct
  misc_feature 1..22: note = chemically synthesized
  source 1..22: mol_type = other DNA
aatcattctatgaagccagtat

SEQ ID NO: 95606 - DNA, 22 bp, synthetic construct
  misc_feature 1..22: note = chemically synthesized
  source 1..22: mol_type = other DNA
tatgaagccagtatcaccttaa

SEQ ID NO: 95607 - DNA, 22 bp, synthetic construct
  misc_feature 1..22: note = chemically synthesized
  source 1..22: mol_type = other DNA
tgaagccagtatcaccttaata

SEQ ID NO: 95608 - DNA, 22 bp, synthetic construct
  misc_feature 1..22: note = chemically synthesized
  source 1..22: mol_type = other DNA
aataccaaaactgggaaagaac

SEQ ID NO: 95609 - DNA, 22 bp, synthetic construct
  misc_feature 1..22: note = chemically synthesized
  source 1..22: mol_type = other DNA
ataccaaaactgggaaagaaca

SEQ ID NO: 95610 - DNA, 22 bp, synthetic construct
  misc_feature 1..22: note = chemically synthesized
  source 1..22: mol_type = other DNA
ggaaagaacataaccaaaaaaa

SEQ ID NO: 95611 - DNA, 22 bp, synthetic construct
  misc_feature 1..22: note = chemically synthesized
  source 1..22: mol_type = other DNA
cagatcaatatccctgatgaac

SEQ ID NO: 95612 - DNA, 22 bp, synthetic construct
  misc_feature 1..22: note = chemically synthesized
  source 1..22: mol_type = other DNA
atgaacatagatgccaacatcc

SEQ ID NO: 95613 - DNA, 22 bp, synthetic construct
  misc_feature 1..22: note = chemically synthesized
  source 1..22: mol_type = other DNA
gacaaaatactagctaatagca

SEQ ID NO: 95614 - DNA, 22 bp, synthetic construct
  misc_feature 1..22: note = chemically synthesized
  source 1..22: mol_type = other DNA
acaaaatactagctaatagcat

SEQ ID NO: 95615 - DNA, 22 bp, synthetic construct
  misc_feature 1..22: note = chemically synthesized
  source 1..22: mol_type = other DNA
gctaatagcatccgacagcata

SEQ ID NO: 95616 - DNA, 22 bp, synthetic construct
  misc_feature 1..22: note = chemically synthesized
  source 1..22: mol_type = other DNA
atagcatccgacagcatatcaa

SEQ ID NO: 95617 - DNA, 22 bp, synthetic construct
  misc_feature 1..22: note = chemically synthesized
  source 1..22: mol_type = other DNA
catgcgagggatgcacggatgg

SEQ ID NO: 95618 - DNA, 22 bp, synthetic construct
  misc_feature 1..22: note = chemically synthesized
  source 1..22: mol_type = other DNA
atgcgagggatgcacggatggt

SEQ ID NO: 95619 - DNA, 22 bp, synthetic construct
  misc_feature 1..22: note = chemically synthesized
  source 1..22: mol_type = other DNA
aacatacgcaagtcaataagtg

SEQ ID NO: 95620 - DNA, 22 bp, synthetic construct
  misc_feature 1..22: note = chemically synthesized
  source 1..22: mol_type = other DNA
acatacgcaagtcaataagtgt

SEQ ID NO: 95621 - DNA, 22 bp, synthetic construct
  misc_feature 1..22: note = chemically synthesized
  source 1..22: mol_type = other DNA
gaaacaaaaatcatgtgattat

SEQ ID NO: 95622 - DNA, 22 bp, synthetic construct
  misc_feature 1..22: note = chemically synthesized
  source 1..22: mol_type = other DNA
tctcaatagccacagaaactgc

SEQ ID NO: 95623 - DNA, 22 bp, synthetic construct
  misc_feature 1..22: note = chemically synthesized
  source 1..22: mol_type = other DNA
aatagccacagaaactgcattc

SEQ ID NO: 95624 - DNA, 22 bp, synthetic construct
  misc_feature 1..22: note = chemically synthesized
  source 1..22: mol_type = other DNA
cattcaacaaaattcaacatca

SEQ ID NO: 95625 - DNA, 22 bp, synthetic construct
  misc_feature 1..22: note = chemically synthesized
  source 1..22: mol_type = other DNA
aacaaaattcaacatcacttta

SEQ ID NO: 95626 - DNA, 22 bp, synthetic construct
  misc_feature 1..22: note = chemically synthesized
  source 1..22: mol_type = other DNA
aacatcactttatgactaaaac

SEQ ID NO: 95627 - DNA, 22 bp, synthetic construct
  misc_feature 1..22: note = chemically synthesized
  source 1..22: mol_type = other DNA
tatgactaaaactcagcaaaat

SEQ ID NO: 95628 - DNA, 22 bp, synthetic construct
  misc_feature 1..22: note = chemically synthesized
  source 1..22: mol_type = other DNA
atgactaaaactcagcaaaatc

SEQ ID NO: 95629 - DNA, 22 bp, synthetic construct
  misc_feature 1..22: note = chemically synthesized
  source 1..22: mol_type = other DNA
tgactaaaactcagcaaaatcg

SEQ ID NO: 95630 - DNA, 22 bp, synthetic construct
  misc_feature 1..22: note = chemically synthesized
  source 1..22: mol_type = other DNA
aaactcagcaaaatcggtttac

SEQ ID NO: 95631 - DNA, 22 bp, synthetic construct
  misc_feature 1..22: note = chemically synthesized
  source 1..22: mol_type = other DNA
agcaaaatcggtttacaaagga

SEQ ID NO: 95632 - DNA, 22 bp, synthetic construct
  misc_feature 1..22: note = chemically synthesized
  source 1..22: mol_type = other DNA
acaaaggacatacctcaatgta

SEQ ID NO: 95633 - DNA, 22 bp, synthetic construct
  misc_feature 1..22: note = chemically synthesized
  source 1..22: mol_type = other DNA
caaaggacatacctcaatgtaa

SEQ ID NO: 95634 - DNA, 22 bp, synthetic construct
  misc_feature 1..22: note = chemically synthesized
  source 1..22: mol_type = other DNA
aatgtaataaaagccagctatg

SEQ ID NO: 95635 - DNA, 22 bp, synthetic construct
  misc_feature 1..22: note = chemically synthesized
  source 1..22: mol_type = other DNA
tggtaaacacacagccaacatt

SEQ ID NO: 95636 - DNA, 22 bp, synthetic construct
  misc_feature 1..22: note = chemically synthesized
  source 1..22: mol_type = other DNA
tattgaatgggaaaaagttaaa

SEQ ID NO: 95637 - DNA, 22 bp, synthetic construct
  misc_feature 1..22: note = chemically synthesized
  source 1..22: mol_type = other DNA
aatgggaaaaagttaaaagcat

SEQ ID NO: 95638 - DNA, 22 bp, synthetic construct
  misc_feature 1..22: note = chemically synthesized
  source 1..22: mol_type = other DNA
aaagcattctgtctgaaaactg

SEQ ID NO: 95639 - DNA, 22 bp, synthetic construct
  misc_feature 1..22: note = chemically synthesized
  source 1..22: mol_type = other DNA
tgtctgaaaactggaatgagac

SEQ ID NO: 95640 - DNA, 22 bp, synthetic construct
  misc_feature 1..22: note = chemically synthesized
  source 1..22: mol_type = other DNA
tctgaaaactggaatgagacaa

SEQ ID NO: 95641 - DNA, 22 bp, synthetic construct
  misc_feature 1..22: note = chemically synthesized
  source 1..22: mol_type = other DNA
aaaactggaatgagacaaggat

SEQ ID NO: 95642 - DNA, 22 bp, synthetic construct
  misc_feature 1..22: note = chemically synthesized
  source 1..22: mol_type = other DNA
gaatgagacaaggatacccact

SEQ ID NO: 95643 - DNA, 22 bp, synthetic construct
  misc_feature 1..22: note = chemically synthesized
  source 1..22: mol_type = other DNA
tcaccacttctctttaacatat

SEQ ID NO: 95644 - DNA, 22 bp, synthetic construct
  misc_feature 1..22: note = chemically synthesized
  source 1..22: mol_type = other DNA
accacttctctttaacatatta

SEQ ID NO: 95645 - DNA, 22 bp, synthetic construct
  misc_feature 1..22: note = chemically synthesized
  source 1..22: mol_type = other DNA
ctctttaacatattactggaag

SEQ ID NO: 95646 - DNA, 22 bp, synthetic construct
  misc_feature 1..22: note = chemically synthesized
  source 1..22: mol_type = other DNA
tctttaacatattactggaagt

SEQ ID NO: 95647 - DNA, 22 bp, synthetic construct
  misc_feature 1..22: note = chemically synthesized
  source 1..22: mol_type = other DNA
tttaacatattactggaagtcc

SEQ ID NO: 95648 - DNA, 22 bp, synthetic construct
  misc_feature 1..22: note = chemically synthesized
  source 1..22: mol_type = other DNA
taacatattactggaagtccta

SEQ ID NO: 95649 - DNA, 22 bp, synthetic construct
  misc_feature 1..22: note = chemically synthesized
  source 1..22: mol_type = other DNA
aacatattactggaagtcctag

SEQ ID NO: 95650 - DNA, 22 bp, synthetic construct
  misc_feature 1..22: note = chemically synthesized
  source 1..22: mol_type = other DNA
acatattactggaagtcctagc

SEQ ID NO: 95651 - DNA, 22 bp, synthetic construct
  misc_feature 1..22: note = chemically synthesized
  source 1..22: mol_type = other DNA
ctggaagtcctagcaagagcaa

SEQ ID NO: 95652 - DNA, 22 bp, synthetic construct
  misc_feature 1..22: note = chemically synthesized
  source 1..22: mol_type = other DNA
gaagtcctagcaagagcaatca

SEQ ID NO: 95653 - DNA, 22 bp, synthetic construct
  misc_feature 1..22: note = chemically synthesized
  source 1..22: mol_type = other DNA
gcaagagcaatcagacaagaga

SEQ ID NO: 95654 - DNA, 22 bp, synthetic construct
  misc_feature 1..22: note = chemically synthesized
  source 1..22: mol_type = other DNA
ttaaagagaaagtcaaactgtc

SEQ ID NO: 95655 - DNA, 22 bp, synthetic construct
  misc_feature 1..22: note = chemically synthesized
  source 1..22: mol_type = other DNA
aagagaaagtcaaactgtcact

SEQ ID NO: 95656 - DNA, 22 bp, synthetic construct
  misc_feature 1..22: note = chemically synthesized
  source 1..22: mol_type = other DNA
tcactgtttgctgatgatatga

SEQ ID NO: 95657 - DNA, 22 bp, synthetic construct
  misc_feature 1..22: note = chemically synthesized
  source 1..22: mol_type = other DNA
tttgctgatgatatgattgtgt

SEQ ID NO: 95658 - DNA, 22 bp, synthetic construct
  misc_feature 1..22: note = chemically synthesized
  source 1..22: mol_type = other DNA
gctgatgatatgattgtgtatg

SEQ ID NO: 95659 - DNA, 22 bp, synthetic construct
  misc_feature 1..22: note = chemically synthesized
  source 1..22: mol_type = other DNA
ctgatgatatgattgtgtatgt

SEQ ID NO: 95660 - DNA, 22 bp, synthetic construct
  misc_feature 1..22: note = chemically synthesized
  source 1..22: mol_type = other DNA
atgatatgattgtgtatgtaga

SEQ ID NO: 95661 - DNA, 22 bp, synthetic construct
  misc_feature 1..22: note = chemically synthesized
  source 1..22: mol_type = other DNA
tgtatgtagaaaactctaaaga

SEQ ID NO: 95662 - DNA, 22 bp, synthetic construct
  misc_feature 1..22: note = chemically synthesized
  source 1..22: mol_type = other DNA
taaagactcctccaaaaccccc

SEQ ID NO: 95663 - DNA, 22 bp, synthetic construct
  misc_feature 1..22: note = chemically synthesized
  source 1..22: mol_type = other DNA
aagactcctccaaaacccccta

SEQ ID NO: 95664 - DNA, 22 bp, synthetic construct
  misc_feature 1..22: note = chemically synthesized
  source 1..22: mol_type = other DNA
ctccaaaaccccctagaactga

SEQ ID NO: 95665 - DNA, 22 bp, synthetic construct
  misc_feature 1..22: note = chemically synthesized
  source 1..22: mol_type = other DNA
caaaaccccctagaactgataa

SEQ ID NO: 95666 - DNA, 22 bp, synthetic construct
  misc_feature 1..22: note = chemically synthesized
  source 1..22: mol_type = other DNA
gaactgataaaataattcagca

SEQ ID NO: 95667 - DNA, 22 bp, synthetic construct
  misc_feature 1..22: note = chemically synthesized
  source 1..22: mol_type = other DNA
ataaaataattcagcaaagttt

SEQ ID NO: 95668 - DNA, 22 bp, synthetic construct
  misc_feature 1..22: note = chemically synthesized
  source 1..22: mol_type = other DNA
agcaaagtttctggatacaaaa

SEQ ID NO: 95669 - DNA, 22 bp, synthetic construct
  misc_feature 1..22: note = chemically synthesized
  source 1..22: mol_type = other DNA
ctggatacaaaattaacgtaca

SEQ ID NO: 95670 - DNA, 22 bp, synthetic construct
  misc_feature 1..22: note = chemically synthesized
  source 1..22: mol_type = other DNA
tggatacaaaattaacgtacac

SEQ ID NO: 95671 - DNA, 22 bp, synthetic construct
  misc_feature 1..22: note = chemically synthesized
  source 1..22: mol_type = other DNA
gatacaaaattaacgtacacca

SEQ ID NO: 95672 - DNA, 22 bp, synthetic construct
  misc_feature 1..22: note = chemically synthesized
  source 1..22: mol_type = other DNA
acgtacaccaatgagttgcttt

SEQ ID NO: 95673 - DNA, 22 bp, synthetic construct
  misc_feature 1..22: note = chemically synthesized
  source 1..22: mol_type = other DNA
ctttcttacataccagcaatga

SEQ ID NO: 95674 - DNA, 22 bp, synthetic construct
  misc_feature 1..22: note = chemically synthesized
  source 1..22: mol_type = other DNA
tcttacataccagcaatgacca

SEQ ID NO: 95675 - DNA, 22 bp, synthetic construct
  misc_feature 1..22: note = chemically synthesized
  source 1..22: mol_type = other DNA
cttacataccagcaatgaccaa

SEQ ID NO: 95676 - DNA, 22 bp, synthetic construct
  misc_feature 1..22: note = chemically synthesized
  source 1..22: mol_type = other DNA
ttacataccagcaatgaccaag

SEQ ID NO: 95677 - DNA, 22 bp, synthetic construct
  misc_feature 1..22: note = chemically synthesized
  source 1..22: mol_type = other DNA
acataccagcaatgaccaagct

SEQ ID NO: 95678 - DNA, 22 bp, synthetic construct
  misc_feature 1..22: note = chemically synthesized
  source 1..22: mol_type = other DNA
cataccagcaatgaccaagctg

SEQ ID NO: 95679 - DNA, 22 bp, synthetic construct
  misc_feature 1..22: note = chemically synthesized
  source 1..22: mol_type = other DNA
agaataaaatcaagaactcaac

SEQ ID NO: 95680 - DNA, 22 bp, synthetic construct
  misc_feature 1..22: note = chemically synthesized
  source 1..22: mol_type = other DNA
aaccccttttacaatagctgca

SEQ ID NO: 95681 - DNA, 22 bp, synthetic construct
  misc_feature 1..22: note = chemically synthesized
  source 1..22: mol_type = other DNA
ttacaatagctgcaaaaaacaa

SEQ ID NO: 95682 - DNA, 22 bp, synthetic construct
  misc_feature 1..22: note = chemically synthesized
  source 1..22: mol_type = other DNA
tacaatagctgcaaaaaacaaa

SEQ ID NO: 95683 - DNA, 22 bp, synthetic construct
  misc_feature 1..22: note = chemically synthesized
  source 1..22: mol_type = other DNA
acaatagctgcaaaaaacaaaa

SEQ ID NO: 95684 - DNA, 22 bp, synthetic construct
  misc_feature 1..22: note = chemically synthesized
  source 1..22: mol_type = other DNA
caatagctgcaaaaaacaaaac

SEQ ID NO: 95685 - DNA, 22 bp, synthetic construct
  misc_feature 1..22: note = chemically synthesized
  source 1..22: mol_type = other DNA
caaaaaacaaaacaaaacaaaa

SEQ ID NO: 95686 - DNA, 22 bp, synthetic construct
  misc_feature 1..22: note = chemically synthesized
  source 1..22: mol_type = other DNA
aggaatatatacctaaccaagg

SEQ ID NO: 95687 - DNA, 22 bp, synthetic construct
  misc_feature 1..22: note = chemically synthesized
  source 1..22: mol_type = other DNA
ggaatatatacctaaccaagga

SEQ ID NO: 95688 - DNA, 22 bp, synthetic construct
  misc_feature 1..22: note = chemically synthesized
  source 1..22: mol_type = other DNA
accaaggaggtgaaagacatct

SEQ ID NO: 95689 - DNA, 22 bp, synthetic construct
  misc_feature 1..22: note = chemically synthesized
  source 1..22: mol_type = other DNA
caaggaaaactacaaaacacgg

SEQ ID NO: 95690 - DNA, 22 bp, synthetic construct
  misc_feature 1..22: note = chemically synthesized
  source 1..22: mol_type = other DNA
caaaacacggctgaaagtaatc

SEQ ID NO: 95691 - DNA, 22 bp, synthetic construct
  misc_feature 1..22: note = chemically synthesized
  source 1..22: mol_type = other DNA
aaagtaatcatataagacacaa

SEQ ID NO: 95692 - DNA, 22 bp, synthetic construct
  misc_feature 1..22: note = chemically synthesized
  source 1..22: mol_type = other DNA
tcatagatgggtagaatcaata

SEQ ID NO: 95693 - DNA, 22 bp, synthetic construct
  misc_feature 1..22: note = chemically synthesized
  source 1..22: mol_type = other DNA
atagatgggtagaatcaatatt

SEQ ID NO: 95694 - DNA, 22 bp, synthetic construct
  misc_feature 1..22: note = chemically synthesized
  source 1..22: mol_type = other DNA
tgaaaatggccataatgccaga

SEQ ID NO: 95695 - DNA, 22 bp, synthetic construct
  misc_feature 1..22: note = chemically synthesized
  source 1..22: mol_type = other DNA
caaattcattgcaattcccatc

SEQ ID NO: 95696 - DNA, 22 bp, synthetic construct
  misc_feature 1..22: note = chemically synthesized
  source 1..22: mol_type = other DNA
attgcaattcccatcaaaatac

SEQ ID NO: 95697 - DNA, 22 bp, synthetic construct
  misc_feature 1..22: note = chemically synthesized
  source 1..22: mol_type = other DNA
caattcccatcaaaataccacc

SEQ ID NO: 95698 - DNA, 22 bp, synthetic construct
  misc_feature 1..22: note = chemically synthesized
  source 1..22: mol_type = other DNA
ccatcaaaataccaccattagt

SEQ ID NO: 95699 - DNA, 22 bp, synthetic construct
  misc_feature 1..22: note = chemically synthesized
  source 1..22: mol_type = other DNA
gtcttcacagaactagaaaaaa

SEQ ID NO: 95700 - DNA, 22 bp, synthetic construct
  misc_feature 1..22: note = chemically synthesized
  source 1..22: mol_type = other DNA
cacagaactagaaaaaacaatc

SEQ ID NO: 95701 - DNA, 22 bp, synthetic construct
  misc_feature 1..22: note = chemically synthesized
  source 1..22: mol_type = other DNA
acagaactagaaaaaacaatcc

SEQ ID NO: 95702 - DNA, 22 bp, synthetic construct
  misc_feature 1..22: note = chemically synthesized
  source 1..22: mol_type = other DNA
gaaaaaacaatcctaaaattct

SEQ ID NO: 95703 - DNA, 22 bp, synthetic construct
  misc_feature 1..22: note = chemically synthesized
  source 1..22: mol_type = other DNA
aaattcttatggaaccaaaaaa

SEQ ID NO: 95704 - DNA, 22 bp, synthetic construct
  misc_feature 1..22: note = chemically synthesized
  source 1..22: mol_type = other DNA
ttatggaaccaaaaaagagccc

SEQ ID NO: 95705 - DNA, 22 bp, synthetic construct
  misc_feature 1..22: note = chemically synthesized
  source 1..22: mol_type = other DNA
atggaaccaaaaaagagcccaa

SEQ ID NO: 95706 - DNA, 22 bp, synthetic construct
  misc_feature 1..22: note = chemically synthesized
  source 1..22: mol_type = other DNA
tggaaccaaaaaagagcccaat

SEQ ID NO: 95707 - DNA, 22 bp, synthetic construct
  misc_feature 1..22: note = chemically synthesized
  source 1..22: mol_type = other DNA
aaaaaaagaacaaatctgaagg

SEQ ID NO: 95708 - DNA, 22 bp, synthetic construct
  misc_feature 1..22: note = chemically synthesized
  source 1..22: mol_type = other DNA
aaggcattacattacctcattt

SEQ ID NO: 95709 - DNA, 22 bp, synthetic construct
  misc_feature 1..22: note = chemically synthesized
  source 1..22: mol_type = other DNA
cattacctcatttcaaactata

SEQ ID NO: 95710 - DNA, 22 bp, synthetic construct
  misc_feature 1..22: note = chemically synthesized
  source 1..22: mol_type = other DNA
cctcatttcaaactatacaata

SEQ ID NO: 95711 - DNA, 22 bp, synthetic construct
  misc_feature 1..22: note = chemically synthesized
  source 1..22: mol_type = other DNA
atttcaaactatacaataaggc

SEQ ID NO: 95712 - DNA, 22 bp, synthetic construct
  misc_feature 1..22: note = chemically synthesized
  source 1..22: mol_type = other DNA
caaactatacaataaggccata

SEQ ID NO: 95713 - DNA, 22 bp, synthetic construct
  misc_feature 1..22: note = chemically synthesized
  source 1..22: mol_type = other DNA
aaactatacaataaggccatag

SEQ ID NO: 95714 - DNA, 22 bp, synthetic construct
  misc_feature 1..22: note = chemically synthesized
  source 1..22: mol_type = other DNA
tacaataaggccatagtcacca

SEQ ID NO: 95715 - DNA, 22 bp, synthetic construct
  misc_feature 1..22: note = chemically synthesized
  source 1..22: mol_type = other DNA
gtgtacaaataggcacatcgac

SEQ ID NO: 95716 - DNA, 22 bp, synthetic construct
  misc_feature 1..22: note = chemically synthesized
  source 1..22: mol_type = other DNA
aaatacttacatccaactgatc

SEQ ID NO: 95717 - DNA, 22 bp, synthetic construct
  misc_feature 1..22: note = chemically synthesized
  source 1..22: mol_type = other DNA
acatccaactgatctttgacaa

SEQ ID NO: 95718 - DNA, 22 bp, synthetic construct
  misc_feature 1..22: note = chemically synthesized
  source 1..22: mol_type = other DNA
catccaactgatctttgacaaa

SEQ ID NO: 95719 - DNA, 22 bp, synthetic construct
  misc_feature 1..22: note = chemically synthesized
  source 1..22: mol_type = other DNA
atctttgacaaagcaaacaaaa

SEQ ID NO: 95720 - DNA, 22 bp, synthetic construct
  misc_feature 1..22: note = chemically synthesized
  source 1..22: mol_type = other DNA
tgacaaagcaaacaaaaacata

SEQ ID NO: 95721 - DNA, 22 bp, synthetic construct
  misc_feature 1..22: note = chemically synthesized
  source 1..22: mol_type = other DNA
gacaaagcaaacaaaaacataa

SEQ ID NO: 95722 - DNA, 22 bp, synthetic construct
  misc_feature 1..22: note = chemically synthesized
  source 1..22: mol_type = other DNA
acaaagcaaacaaaaacataaa

SEQ ID NO: 95723 - DNA, 22 bp, synthetic construct
  misc_feature 1..22: note = chemically synthesized
  source 1..22: mol_type = other DNA
ttcaacaaatggtgcggggata

SEQ ID NO: 95724 - DNA, 22 bp, synthetic construct
  misc_feature 1..22: note = chemically synthesized
  source 1..22: mol_type = other DNA
aacaaatggtgcggggatagct

SEQ ID NO: 95725 - DNA, 22 bp, synthetic construct
  misc_feature 1..22: note = chemically synthesized
  source 1..22: mol_type = other DNA
gcaagctacatgtaggagaatg

SEQ ID NO: 95726 - DNA, 22 bp, synthetic construct
  misc_feature 1..22: note = chemically synthesized
  source 1..22: mol_type = other DNA
catgtaggagaatgaaactgga

SEQ ID NO: 95727 - DNA, 22 bp, synthetic construct
  misc_feature 1..22: note = chemically synthesized
  source 1..22: mol_type = other DNA
gatcttcatctctcaccttata

SEQ ID NO: 95728 - DNA, 22 bp, synthetic construct
  misc_feature 1..22: note = chemically synthesized
  source 1..22: mol_type = other DNA
catctctcaccttatacaaaaa

SEQ ID NO: 95729 - DNA, 22 bp, synthetic construct
  misc_feature 1..22: note = chemically synthesized
  source 1..22: mol_type = other DNA
atctctcaccttatacaaaaat

SEQ ID NO: 95730 - DNA, 22 bp, synthetic construct
  misc_feature 1..22: note = chemically synthesized
  source 1..22: mol_type = other DNA
tcaccttatacaaaaatcaact

SEQ ID NO: 95731 - DNA, 22 bp, synthetic construct
  misc_feature 1..22: note = chemically synthesized
  source 1..22: mol_type = other DNA
accttatacaaaaatcaactca

SEQ ID NO: 95732 - DNA, 22 bp, synthetic construct
  misc_feature 1..22: note = chemically synthesized
  source 1..22: mol_type = other DNA
atacaaaaatcaactcaagatg

SEQ ID NO: 95733 - DNA, 22 bp, synthetic construct
  misc_feature 1..22: note = chemically synthesized
  source 1..22: mol_type = other DNA
tacaaaaatcaactcaagatgg

SEQ ID NO: 95734 - DNA, 22 bp, synthetic construct
  misc_feature 1..22: note = chemically synthesized
  source 1..22: mol_type = other DNA
aagatggatcaaggacttaaat

SEQ ID NO: 95735 - DNA, 22 bp, synthetic construct
  misc_feature 1..22: note = chemically synthesized
  source 1..22: mol_type = other DNA
aaatctaagccctgaaactgta

SEQ ID NO: 95736 - DNA, 22 bp, synthetic construct
  misc_feature 1..22: note = chemically synthesized
  source 1..22: mol_type = other DNA
aatctaagccctgaaactgtaa

SEQ ID NO: 95737 - DNA, 22 bp, synthetic construct
  misc_feature 1..22: note = chemically synthesized
  source 1..22: mol_type = other DNA
agccctgaaactgtaacaattc

SEQ ID NO: 95738 - DNA, 22 bp, synthetic construct
  misc_feature 1..22: note = chemically synthesized
  source 1..22: mol_type = other DNA
aaactgtaacaattctagaaaa

SEQ ID NO: 95739 - DNA, 22 bp, synthetic construct
  misc_feature 1..22: note = chemically synthesized
  source 1..22: mol_type = other DNA
taacaattctagaaaataacat

SEQ ID NO: 95740 - DNA, 22 bp, synthetic construct
  misc_feature 1..22: note = chemically synthesized
  source 1..22: mol_type = other DNA
tagaaaataacatcggaaaaac

SEQ ID NO: 95741 - DNA, 22 bp, synthetic construct
  misc_feature 1..22: note = chemically synthesized
  source 1..22: mol_type = other DNA
gaaaataacatcggaaaaaccc

SEQ ID NO: 95742 - DNA, 22 bp, synthetic construct
  misc_feature 1..22: note = chemically synthesized
  source 1..22: mol_type = other DNA
ctacacattggcttaggaaagg

SEQ ID NO: 95743 - DNA, 22 bp, synthetic construct
  misc_feature 1..22: note = chemically synthesized
  source 1..22: mol_type = other DNA
tacacattggcttaggaaagga

SEQ ID NO: 95744 - DNA, 22 bp, synthetic construct
  misc_feature 1..22: note = chemically synthesized
  source 1..22: mol_type = other DNA
cacattggcttaggaaaggatt

SEQ ID NO: 95745 - DNA, 22 bp, synthetic construct
  misc_feature 1..22: note = chemically synthesized
  source 1..22: mol_type = other DNA
gcttaggaaaggatttcatgac

SEQ ID NO: 95746 - DNA, 22 bp, synthetic construct
  misc_feature 1..22: note = chemically synthesized
  source 1..22: mol_type = other DNA
aggaaaggatttcatgaccaag

SEQ ID NO: 95747 - DNA, 22 bp, synthetic construct
  misc_feature 1..22: note = chemically synthesized
  source 1..22: mol_type = other DNA
ggaaaggatttcatgaccaaga

SEQ ID NO: 95748 - DNA, 22 bp, synthetic construct
  misc_feature 1..22: note = chemically synthesized
  source 1..22: mol_type = other DNA
catgaccaagaacacaaatgca

SEQ ID NO: 95749 - DNA, 22 bp, synthetic construct
  misc_feature 1..22: note = chemically synthesized
  source 1..22: mol_type = other DNA
atgaccaagaacacaaatgcaa

SEQ ID NO: 95750 - DNA, 22 bp, synthetic construct
  misc_feature 1..22: note = chemically synthesized
  source 1..22: mol_type = other DNA
ggactaaattaaactaaagagc

SEQ ID NO: 95751 - DNA, 22 bp, synthetic construct
  misc_feature 1..22: note = chemically synthesized
  source 1..22: mol_type = other DNA
aattaaactaaagagcttttgc

SEQ ID NO: 95752 - DNA, 22 bp, synthetic construct
  misc_feature 1..22: note = chemically synthesized
  source 1..22: mol_type = other DNA
aactaaagagcttttgcatggc

SEQ ID NO: 95753 - DNA, 22 bp, synthetic construct
  misc_feature 1..22: note = chemically synthesized
  source 1..22: mol_type = other DNA
aagagcttttgcatggcaaaag

SEQ ID NO: 95754 - DNA, 22 bp, synthetic construct
  misc_feature 1..22: note = chemically synthesized
  source 1..22: mol_type = other DNA
ttgcatggcaaaaggaagagtc

SEQ ID NO: 95755 - DNA, 22 bp, synthetic construct
  misc_feature 1..22: note = chemically synthesized
  source 1..22: mol_type = other DNA
tgcatggcaaaaggaagagtct

SEQ ID NO: 95756 - DNA, 22 bp, synthetic construct
  misc_feature 1..22: note = chemically synthesized
  source 1..22: mol_type = other DNA
gcatggcaaaaggaagagtctg

SEQ ID NO: 95757 - DNA, 22 bp, synthetic construct
  misc_feature 1..22: note = chemically synthesized
  source 1..22: mol_type = other DNA
catggcaaaaggaagagtctgc

SEQ ID NO: 95758 - DNA, 22 bp, synthetic construct
  misc_feature 1..22: note = chemically synthesized
  source 1..22: mol_type = other DNA
cagaataaacagacaacccaca

SEQ ID NO: 95759 - DNA, 22 bp, synthetic construct
  misc_feature 1..22: note = chemically synthesized
  source 1..22: mol_type = other DNA
cacaatctatacatctgacaaa

SEQ ID NO: 95760 - DNA, 22 bp, synthetic construct
  misc_feature 1..22: note = chemically synthesized
  source 1..22: mol_type = other DNA
acaatctatacatctgacaaaa

SEQ ID NO: 95761 - DNA, 22 bp, synthetic construct
  misc_feature 1..22: note = chemically synthesized
  source 1..22: mol_type = other DNA
tacatctgacaaaagaataata

SEQ ID NO: 95762 - DNA, 22 bp, synthetic construct
  misc_feature 1..22: note = chemically synthesized
  source 1..22: mol_type = other DNA
acaaaagaataatatccaggct

SEQ ID NO: 95763 - DNA, 22 bp, synthetic construct
  misc_feature 1..22: note = chemically synthesized
  source 1..22: mol_type = other DNA
taaaatgaacacaaatagatta

SEQ ID NO: 95764 - DNA, 22 bp, synthetic construct
  misc_feature 1..22: note = chemically synthesized
  source 1..22: mol_type = other DNA
aaatgaacacaaatagattatc

SEQ ID NO: 95765 - DNA, 22 bp, synthetic construct
  misc_feature 1..22: note = chemically synthesized
  source 1..22: mol_type = other DNA
tcaagaaaataacaaacaatcc

SEQ ID NO: 95766 - DNA, 22 bp, synthetic construct
  misc_feature 1..22: note = chemically synthesized
  source 1..22: mol_type = other DNA
aggacatgaacagacaattctc

SEQ ID NO: 95767 - DNA, 22 bp, synthetic construct
  misc_feature 1..22: note = chemically synthesized
  source 1..22: mol_type = other DNA
tcagaaaaagatatacaaatga

SEQ ID NO: 95768 - DNA, 22 bp, synthetic construct
  misc_feature 1..22: note = chemically synthesized
  source 1..22: mol_type = other DNA
agaaaaagatatacaaatgacc

SEQ ID NO: 95769 - DNA, 22 bp, synthetic construct
  misc_feature 1..22: note = chemically synthesized
  source 1..22: mol_type = other DNA
tcaacatcactaatgatcaggg

SEQ ID NO: 95770 - DNA, 22 bp, synthetic construct
  misc_feature 1..22: note = chemically synthesized
  source 1..22: mol_type = other DNA
aacatcactaatgatcagggaa

SEQ ID NO: 95771 - DNA, 22 bp, synthetic construct
  misc_feature 1..22: note = chemically synthesized
  source 1..22: mol_type = other DNA
atgatcagggaaatgcaaatca

SEQ ID NO: 95772 - DNA, 22 bp, synthetic construct
  misc_feature 1..22: note = chemically synthesized
  source 1..22: mol_type = other DNA
caatgagatatctacttactct

SEQ ID NO: 95773 - DNA, 22 bp, synthetic construct
  misc_feature 1..22: note = chemically synthesized
  source 1..22: mol_type = other DNA
cttactctagttaaaacggcta

SEQ ID NO: 95774 - DNA, 22 bp, synthetic construct
  misc_feature 1..22: note = chemically synthesized
  source 1..22: mol_type = other DNA
actctagttaaaacggctatta

SEQ ID NO: 95775 - DNA, 22 bp, synthetic construct
  misc_feature 1..22: note = chemically synthesized
  source 1..22: mol_type = other DNA
ctctagttaaaacggctattaa

SEQ ID NO: 95776 - DNA, 22 bp, synthetic construct
  misc_feature 1..22: note = chemically synthesized
  source 1..22: mol_type = other DNA
tagttaaaacggctattaacaa

SEQ ID NO: 95777 - DNA, 22 bp, synthetic construct
  misc_feature 1..22: note = chemically synthesized
  source 1..22: mol_type = other DNA
gttaaaacggctattaacaaaa

SEQ ID NO: 95778 - DNA, 22 bp, synthetic construct
  misc_feature 1..22: note = chemically synthesized
  source 1..22: mol_type = other DNA
aaacggctattaacaaaaaaga

SEQ ID NO: 95779 - DNA, 22 bp, synthetic construct
  misc_feature 1..22: note = chemically synthesized
  source 1..22: mol_type = other DNA
ttaacaaaaaagacaaaaaata

SEQ ID NO: 95780 - DNA, 22 bp, synthetic construct
  misc_feature 1..22: note = chemically synthesized
  source 1..22: mol_type = other DNA
acaaaaaagacaaaaaataaca

SEQ ID NO: 95781 - DNA, 22 bp, synthetic construct
  misc_feature 1..22: note = chemically synthesized
  source 1..22: mol_type = other DNA
gtgaggatatggagaaaaggga

SEQ ID NO: 95782 - DNA, 22 bp, synthetic construct
  misc_feature 1..22: note = chemically synthesized
  source 1..22: mol_type = other DNA
tgaggatatggagaaaagggaa

SEQ ID NO: 95783 - DNA, 22 bp, synthetic construct
  misc_feature 1..22: note = chemically synthesized
  source 1..22: mol_type = other DNA
tttcttacacactgttggtggg

SEQ ID NO: 95784 - DNA, 22 bp, synthetic construct
  misc_feature 1..22: note = chemically synthesized
  source 1..22: mol_type = other DNA
tcttacacactgttggtgggaa

SEQ ID NO: 95785 - DNA, 22 bp, synthetic construct
  misc_feature 1..22: note = chemically synthesized
  source 1..22: mol_type = other DNA
cttacacactgttggtgggaat

SEQ ID NO: 95786 - DNA, 22 bp, synthetic construct
  misc_feature 1..22: note = chemically synthesized
  source 1..22: mol_type = other DNA
ttacacactgttggtgggaatg

SEQ ID NO: 95787 - DNA, 22 bp, synthetic construct
  misc_feature 1..22: note = chemically synthesized
  source 1..22: mol_type = other DNA
acacactgttggtgggaatgta

SEQ ID NO: 95788 - DNA, 22 bp, synthetic construct
  misc_feature 1..22: note = chemically synthesized
  source 1..22: mol_type = other DNA
cacactgttggtgggaatgtaa

SEQ ID NO: 95789 - DNA, 22 bp, synthetic construct
  misc_feature 1..22: note = chemically synthesized
  source 1..22: mol_type = other DNA
ttggtgggaatgtaaaatagta

SEQ ID NO: 95790 - DNA, 22 bp, synthetic construct
  misc_feature 1..22: note = chemically synthesized
  source 1..22: mol_type = other DNA
gtgggaatgtaaaatagtacaa

SEQ ID NO: 95791 - DNA, 22 bp, synthetic construct
  misc_feature 1..22: note = chemically synthesized
  source 1..22: mol_type = other DNA
tggaaaacagtatgaagatttc

SEQ ID NO: 95792 - DNA, 22 bp, synthetic construct
  misc_feature 1..22: note = chemically synthesized
  source 1..22: mol_type = other DNA
ctcagtaaactaaaaacagaac

SEQ ID NO: 95793 - DNA, 22 bp, synthetic construct
  misc_feature 1..22: note = chemically synthesized
  source 1..22: mol_type = other DNA
tcagtaaactaaaaacagaact

SEQ ID NO: 95794 - DNA, 22 bp, synthetic construct
  misc_feature 1..22: note = chemically synthesized
  source 1..22: mol_type = other DNA
agtaaactaaaaacagaactat

SEQ ID NO: 95795 - DNA, 22 bp, synthetic construct
  misc_feature 1..22: note = chemically synthesized
  source 1..22: mol_type = other DNA
aaaacagaactatcatacaatc

SEQ ID NO: 95796 - DNA, 22 bp, synthetic construct
  misc_feature 1..22: note = chemically synthesized
  source 1..22: mol_type = other DNA
tcatacaatccagcaatctcac

SEQ ID NO: 95797 - DNA, 22 bp, synthetic construct
  misc_feature 1..22: note = chemically synthesized
  source 1..22: mol_type = other DNA
actagtggttatttatccaaaa

SEQ ID NO: 95798 - DNA, 22 bp, synthetic construct
  misc_feature 1..22: note = chemically synthesized
  source 1..22: mol_type = other DNA
gtggttatttatccaaaagaaa

SEQ ID NO: 95799 - DNA, 22 bp, synthetic construct
  misc_feature 1..22: note = chemically synthesized
  source 1..22: mol_type = other DNA
tttatccaaaagaaaggaaatc

SEQ ID NO: 95800 - DNA, 22 bp, synthetic construct
  misc_feature 1..22: note = chemically synthesized
  source 1..22: mol_type = other DNA
atccaaaagaaaggaaatcagt

SEQ ID NO: 95801 - DNA, 22 bp, synthetic construct
  misc_feature 1..22: note = chemically synthesized
  source 1..22: mol_type = other DNA
tccaaaagaaaggaaatcagta

SEQ ID NO: 95802 - DNA, 22 bp, synthetic construct
  misc_feature 1..22: note = chemically synthesized
  source 1..22: mol_type = other DNA
cactcatgtttattgaagcact

SEQ ID NO: 95803 - DNA, 22 bp, synthetic construct
  misc_feature 1..22: note = chemically synthesized
  source 1..22: mol_type = other DNA
atgtttattgaagcactattca

SEQ ID NO: 95804 - DNA, 22 bp, synthetic construct
  misc_feature 1..22: note = chemically synthesized
  source 1..22: mol_type = other DNA
attgaagcactattcacaatag

SEQ ID NO: 95805 - DNA, 22 bp, synthetic construct
  misc_feature 1..22: note = chemically synthesized
  source 1..22: mol_type = other DNA
ttgaagcactattcacaatagt

SEQ ID NO: 95806 - DNA, 22 bp, synthetic construct
  misc_feature 1..22: note = chemically synthesized
  source 1..22: mol_type = other DNA
aagcactattcacaatagttaa

SEQ ID NO: 95807 - DNA, 22 bp, synthetic construct
  misc_feature 1..22: note = chemically synthesized
  source 1..22: mol_type = other DNA
ttcacaatagttaaggtttggg

SEQ ID NO: 95808 - DNA, 22 bp, synthetic construct
  misc_feature 1..22: note = chemically synthesized
  source 1..22: mol_type = other DNA
acaatagttaaggtttgggatc

SEQ ID NO: 95809 - DNA, 22 bp, synthetic construct
  misc_feature 1..22: note = chemically synthesized
  source 1..22: mol_type = other DNA
aggtttgggatcaacctaagtg

SEQ ID NO: 95810 - DNA, 22 bp, synthetic construct
  misc_feature 1..22: note = chemically synthesized
  source 1..22: mol_type = other DNA
gggatcaacctaagtgtctatc

SEQ ID NO: 95811 - DNA, 22 bp, synthetic construct
  misc_feature 1..22: note = chemically synthesized
  source 1..22: mol_type = other DNA
ggatcaacctaagtgtctatca

SEQ ID NO: 95812 - DNA, 22 bp, synthetic construct
  misc_feature 1..22: note = chemically synthesized
  source 1..22: mol_type = other DNA
agtgtctatcaacagatgaacg

SEQ ID NO: 95813 - DNA, 22 bp, synthetic construct
  misc_feature 1..22: note = chemically synthesized
  source 1..22: mol_type = other DNA
tcaacagatgaacggattaaaa

SEQ ID NO: 95814 - DNA, 22 bp, synthetic construct
  misc_feature 1..22: note = chemically synthesized
  source 1..22: mol_type = other DNA
aaaaattgtatttttgcacagt

SEQ ID NO: 95815 - DNA, 22 bp, synthetic construct
  misc_feature 1..22: note = chemically synthesized
  source 1..22: mol_type = other DNA
tatttttgcacagtactatttt

SEQ ID NO: 95816 - DNA, 22 bp, synthetic construct
  misc_feature 1..22: note = chemically synthesized
  source 1..22: mol_type = other DNA
ttgcacagtactattttgccat

SEQ ID NO: 95817 - DNA, 22 bp, synthetic construct
  misc_feature 1..22: note = chemically synthesized
  source 1..22: mol_type = other DNA
tgcacagtactattttgccatg

SEQ ID NO: 95818 - DNA, 22 bp, synthetic construct
  misc_feature 1..22: note = chemically synthesized
  source 1..22: mol_type = other DNA
gcacagtactattttgccatga

SEQ ID NO: 95819 - DNA, 22 bp, synthetic construct
  misc_feature 1..22: note = chemically synthesized
  source 1..22: mol_type = other DNA
cacagtactattttgccatgaa

SEQ ID NO: 95820 - DNA, 22 bp, synthetic construct
  misc_feature 1..22: note = chemically synthesized
  source 1..22: mol_type = other DNA
ttttgccatgaaaaagaatgaa

SEQ ID NO: 95821 - DNA, 22 bp, synthetic construct
  misc_feature 1..22: note = chemically synthesized
  source 1..22: mol_type = other DNA
tgccatgaaaaagaatgaaatc

SEQ ID NO: 95822 - DNA, 22 bp, synthetic construct
  misc_feature 1..22: note = chemically synthesized
  source 1..22: mol_type = other DNA
gccatgaaaaagaatgaaatct

SEQ ID NO: 95823 - DNA, 22 bp, synthetic construct
  misc_feature 1..22: note = chemically synthesized
  source 1..22: mol_type = other DNA
ccatgaaaaagaatgaaatctt

SEQ ID NO: 95824 - DNA, 22 bp, synthetic construct
  misc_feature 1..22: note = chemically synthesized
  source 1..22: mol_type = other DNA
gtcatttgtagcaacatggatg

SEQ ID NO: 95825 - DNA, 22 bp, synthetic construct
  misc_feature 1..22: note = chemically synthesized
  source 1..22: mol_type = other DNA
tcatttgtagcaacatggatgg

SEQ ID NO: 95826 - DNA, 22 bp, synthetic construct
  misc_feature 1..22: note = chemically synthesized
  source 1..22: mol_type = other DNA
gtagcaacatggatggaaccag

SEQ ID NO: 95827 - DNA, 22 bp, synthetic construct
  misc_feature 1..22: note = chemically synthesized
  source 1..22: mol_type = other DNA
tagcaacatggatggaaccaga

SEQ ID NO: 95828 - DNA, 22 bp, synthetic construct
  misc_feature 1..22: note = chemically synthesized
  source 1..22: mol_type = other DNA
tgttaattgaaagccctgaagc

SEQ ID NO: 95829 - DNA, 22 bp, synthetic construct
  misc_feature 1..22: note = chemically synthesized
  source 1..22: mol_type = other DNA
attgaaagccctgaagcagaac

SEQ ID NO: 95830 - DNA, 22 bp, synthetic construct
  misc_feature 1..22: note = chemically synthesized
  source 1..22: mol_type = other DNA
aaagccctgaagcagaacaaaa

SEQ ID NO: 95831 - DNA, 22 bp, synthetic construct
  misc_feature 1..22: note = chemically synthesized
  source 1..22: mol_type = other DNA
aagcagaacaaaaacaaactct

SEQ ID NO: 95832 - DNA, 22 bp, synthetic construct
  misc_feature 1..22: note = chemically synthesized
  source 1..22: mol_type = other DNA
ttggtatgccaaagagatagat

SEQ ID NO: 95833 - DNA, 22 bp, synthetic construct
  misc_feature 1..22: note = chemically synthesized
  source 1..22: mol_type = other DNA
ggtatgccaaagagatagataa

SEQ ID NO: 95834 - DNA, 22 bp, synthetic construct
  misc_feature 1..22: note = chemically synthesized
  source 1..22: mol_type = other DNA
gtatgccaaagagatagataat

SEQ ID NO: 95835 - DNA, 22 bp, synthetic construct
  misc_feature 1..22: note = chemically synthesized
  source 1..22: mol_type = other DNA
ttattcatctgtgggagctaaa

SEQ ID NO: 95836 - DNA, 22 bp, synthetic construct
  misc_feature 1..22: note = chemically synthesized
  source 1..22: mol_type = other DNA
tattcatctgtgggagctaaaa

SEQ ID NO: 95837 - DNA, 22 bp, synthetic construct
  misc_feature 1..22: note = chemically synthesized
  source 1..22: mol_type = other DNA
attcatctgtgggagctaaaaa

SEQ ID NO: 95838 - DNA, 22 bp, synthetic construct
  misc_feature 1..22: note = chemically synthesized
  source 1..22: mol_type = other DNA
ttcatctgtgggagctaaaaaa

SEQ ID NO: 95839 - DNA, 22 bp, synthetic construct
  misc_feature 1..22: note = chemically synthesized
  source 1..22: mol_type = other DNA
atctgtgggagctaaaaaagtg

SEQ ID NO: 95840 - DNA, 22 bp, synthetic construct
  misc_feature 1..22: note = chemically synthesized
  source 1..22: mol_type = other DNA
tgggagctaaaaaagtgggtct

SEQ ID NO: 95841 - DNA, 22 bp, synthetic construct
  misc_feature 1..22: note = chemically synthesized
  source 1..22: mol_type = other DNA
aaaaagtgggtctcatggtggt

SEQ ID NO: 95842 - DNA, 22 bp, synthetic construct
  misc_feature 1..22: note = chemically synthesized
  source 1..22: mol_type = other DNA
atggtggtagagagtagaatga

SEQ ID NO: 95843 - DNA, 22 bp, synthetic construct
  misc_feature 1..22: note = chemically synthesized
  source 1..22: mol_type = other DNA
tcagaggctggaaaaagtgtga

SEQ ID NO: 95844 - DNA, 22 bp, synthetic construct
  misc_feature 1..22: note = chemically synthesized
  source 1..22: mol_type = other DNA
gaaaaagtgtgagtgtgtatgg

SEQ ID NO: 95845 - DNA, 22 bp, synthetic construct
  misc_feature 1..22: note = chemically synthesized
  source 1..22: mol_type = other DNA
aagagatgttggttaataggta

SEQ ID NO: 95846 - DNA, 22 bp, synthetic construct
  misc_feature 1..22: note = chemically synthesized
  source 1..22: mol_type = other DNA
agagatgttggttaataggtac

SEQ ID NO: 95847 - DNA, 22 bp, synthetic construct
  misc_feature 1..22: note = chemically synthesized
  source 1..22: mol_type = other DNA
gttaataggtacaaacacagtt

SEQ ID NO: 95848 - DNA, 22 bp, synthetic construct
  misc_feature 1..22: note = chemically synthesized
  source 1..22: mol_type = other DNA
ataggtacaaacacagttggat

SEQ ID NO: 95849 - DNA, 22 bp, synthetic construct
  misc_feature 1..22: note = chemically synthesized
  source 1..22: mol_type = other DNA
gatagaaggattaagccataat

SEQ ID NO: 95850 - DNA, 22 bp, synthetic construct
  misc_feature 1..22: note = chemically synthesized
  source 1..22: mol_type = other DNA
agccataatgtttgatatttga

SEQ ID NO: 95851 - DNA, 22 bp, synthetic construct
  misc_feature 1..22: note = chemically synthesized
  source 1..22: mol_type = other DNA
gatatttgagtagggtgactat

SEQ ID NO: 95852 - DNA, 22 bp, synthetic construct
  misc_feature 1..22: note = chemically synthesized
  source 1..22: mol_type = other DNA
atatttgagtagggtgactata

SEQ ID NO: 95853 - DNA, 22 bp, synthetic construct
  misc_feature 1..22: note = chemically synthesized
  source 1..22: mol_type = other DNA
gagtagggtgactatagttaat

SEQ ID NO: 95854 - DNA, 22 bp, synthetic construct
  misc_feature 1..22: note = chemically synthesized
  source 1..22: mol_type = other DNA
agtagggtgactatagttaatt

SEQ ID NO: 95855 - DNA, 22 bp, synthetic construct
  misc_feature 1..22: note = chemically synthesized
  source 1..22: mol_type = other DNA
tagttaattactatttattata

SEQ ID NO: 95856 - DNA, 22 bp, synthetic construct
  misc_feature 1..22: note = chemically synthesized
  source 1..22: mol_type = other DNA
attactatttattatatatttc

SEQ ID NO: 95857 - DNA, 22 bp, synthetic construct
  misc_feature 1..22: note = chemically synthesized
  source 1..22: mol_type = other DNA
ctatttattatatatttcaaaa

SEQ ID NO: 95858 - DNA, 22 bp, synthetic construct
  misc_feature 1..22: note = chemically synthesized
  source 1..22: mol_type = other DNA
tttattatatatttcaaaatgg

SEQ ID NO: 95859 - DNA, 22 bp, synthetic construct
  misc_feature 1..22: note = chemically synthesized
  source 1..22: mol_type = other DNA
attatatatttcaaaatggcta

SEQ ID NO: 95860 - DNA, 22 bp, synthetic construct
  misc_feature 1..22: note = chemically synthesized
  source 1..22: mol_type = other DNA
ttatatatttcaaaatggctag

SEQ ID NO: 95861 - DNA, 22 bp, synthetic construct
  misc_feature 1..22: note = chemically synthesized
  source 1..22: mol_type = other DNA
tatatttcaaaatggctagaaa

SEQ ID NO: 95862 - DNA, 22 bp, synthetic construct
  misc_feature 1..22: note = chemically synthesized
  source 1..22: mol_type = other DNA
caaaatggctagaaatgaggat

SEQ ID NO: 95863 - DNA, 22 bp, synthetic construct
  misc_feature 1..22: note = chemically synthesized
  source 1..22: mol_type = other DNA
aaaatggctagaaatgaggatt

SEQ ID NO: 95864 - DNA, 22 bp, synthetic construct
  misc_feature 1..22: note = chemically synthesized
  source 1..22: mol_type = other DNA
gaaatgaggatttgaaattttc

SEQ ID NO: 95865 - DNA, 22 bp, synthetic construct
  misc_feature 1..22: note = chemically synthesized
  source 1..22: mol_type = other DNA
gaaattttctcaatacatagaa

SEQ ID NO: 95866 - DNA, 22 bp, synthetic construct
  misc_feature 1..22: note = chemically synthesized
  source 1..22: mol_type = other DNA
aaattttctcaatacatagaaa

SEQ ID NO: 95867 - DNA, 22 bp, synthetic construct
  misc_feature 1..22: note = chemically synthesized
  source 1..22: mol_type = other DNA
tctcaatacatagaaatgataa

SEQ ID NO: 95868 - DNA, 22 bp, synthetic construct
  misc_feature 1..22: note = chemically synthesized
  source 1..22: mol_type = other DNA
ctcaatacatagaaatgataaa

SEQ ID NO: 95869 - DNA, 22 bp, synthetic construct
  misc_feature 1..22: note = chemically synthesized
  source 1..22: mol_type = other DNA
tcaatacatagaaatgataaat

SEQ ID NO: 95870 - DNA, 22 bp, synthetic construct
  misc_feature 1..22: note = chemically synthesized
  source 1..22: mol_type = other DNA
aatacatagaaatgataaatgc

SEQ ID NO: 95871 - DNA, 22 bp, synthetic construct
  misc_feature 1..22: note = chemically synthesized
  source 1..22: mol_type = other DNA
aaagcaatggatatcctaaata

SEQ ID NO: 95872 - DNA, 22 bp, synthetic construct
  misc_feature 1..22: note = chemically synthesized
  source 1..22: mol_type = other DNA
aatatctagacttaatcatcac

SEQ ID NO: 95873 - DNA, 22 bp, synthetic construct
  misc_feature 1..22: note = chemically synthesized
  source 1..22: mol_type = other DNA
gacttaatcatcacatgttcta

SEQ ID NO: 95874 - DNA, 22 bp, synthetic construct
  misc_feature 1..22: note = chemically synthesized
  source 1..22: mol_type = other DNA
aatcatcacatgttctaggcat

SEQ ID NO: 95875 - DNA, 22 bp, synthetic construct
  misc_feature 1..22: note = chemically synthesized
  source 1..22: mol_type = other DNA
atcatcacatgttctaggcatg

SEQ ID NO: 95876 - DNA, 22 bp, synthetic construct
  misc_feature 1..22: note = chemically synthesized
  source 1..22: mol_type = other DNA
taggcatgtaagtatcacatgt

SEQ ID NO: 95877 - DNA, 22 bp, synthetic construct
  misc_feature 1..22: note = chemically synthesized
  source 1..22: mol_type = other DNA
ggcatgtaagtatcacatgtac

SEQ ID NO: 95878 - DNA, 22 bp, synthetic construct
  misc_feature 1..22: note = chemically synthesized
  source 1..22: mol_type = other DNA
ctcccatttgttgactgactag

SEQ ID NO: 95879 - DNA, 22 bp, synthetic construct
  misc_feature 1..22: note = chemically synthesized
  source 1..22: mol_type = other DNA
ccatttgttgactgactaggtg

SEQ ID NO: 95880 - DNA, 22 bp, synthetic construct
  misc_feature 1..22: note = chemically synthesized
  source 1..22: mol_type = other DNA
gttgactgactaggtgaaaata

SEQ ID NO: 95881 - DNA, 22 bp, synthetic construct
  misc_feature 1..22: note = chemically synthesized
  source 1..22: mol_type = other DNA
ttgactgactaggtgaaaatat

SEQ ID NO: 95882 - DNA, 22 bp, synthetic construct
  misc_feature 1..22: note = chemically synthesized
  source 1..22: mol_type = other DNA
actgactaggtgaaaatattta

SEQ ID NO: 95883 - DNA, 22 bp, synthetic construct
  misc_feature 1..22: note = chemically synthesized
  source 1..22: mol_type = other DNA
actaggtgaaaatatttagtgc

SEQ ID NO: 95884 - DNA, 22 bp, synthetic construct
  misc_feature 1..22: note = chemically synthesized
  source 1..22: mol_type = other DNA
ggtgaaaatatttagtgccatg

SEQ ID NO: 95885 - DNA, 22 bp, synthetic construct
  misc_feature 1..22: note = chemically synthesized
  source 1..22: mol_type = other DNA
agtgccatgaataatccctgtt

SEQ ID NO: 95886 - DNA, 22 bp, synthetic construct
  misc_feature 1..22: note = chemically synthesized
  source 1..22: mol_type = other DNA
gtgccatgaataatccctgttt

SEQ ID NO: 95887 - DNA, 22 bp, synthetic construct
  misc_feature 1..22: note = chemically synthesized
  source 1..22: mol_type = other DNA
tttactctgtttatgggcatat

SEQ ID NO: 95888 - DNA, 22 bp, synthetic construct
  misc_feature 1..22: note = chemically synthesized
  source 1..22: mol_type = other DNA
actctgtttatgggcatattga

SEQ ID NO: 95889 - DNA, 22 bp, synthetic construct
  misc_feature 1..22: note = chemically synthesized
  source 1..22: mol_type = other DNA
ctctgtttatgggcatattgaa

SEQ ID NO: 95890 - DNA, 22 bp, synthetic construct
  misc_feature 1..22: note = chemically synthesized
  source 1..22: mol_type = other DNA
tgtttatgggcatattgaaagg

SEQ ID NO: 95891 - DNA, 22 bp, synthetic construct
  misc_feature 1..22: note = chemically synthesized
  source 1..22: mol_type = other DNA
tttatgggcatattgaaaggtt

SEQ ID NO: 95892 - DNA, 22 bp, synthetic construct
  misc_feature 1..22: note = chemically synthesized
  source 1..22: mol_type = other DNA
atgggcatattgaaaggttata

SEQ ID NO: 95893 - DNA, 22 bp, synthetic construct
  misc_feature 1..22: note = chemically synthesized
  source 1..22: mol_type = other DNA
tgggcatattgaaaggttataa

SEQ ID NO: 95894 - DNA, 22 bp, synthetic construct
  misc_feature 1..22: note = chemically synthesized
  source 1..22: mol_type = other DNA
aaaggttataaggctcagagag

SEQ ID NO: 95895 - DNA, 22 bp, synthetic construct
  misc_feature 1..22: note = chemically synthesized
  source 1..22: mol_type = other DNA
taaggctcagagagaccagtat

SEQ ID NO: 95896 - DNA, 22 bp, synthetic construct
  misc_feature 1..22: note = chemically synthesized
  source 1..22: mol_type = other DNA
agagagaccagtattgttgata

SEQ ID NO: 95897 - DNA, 22 bp, synthetic construct
  misc_feature 1..22: note = chemically synthesized
  source 1..22: mol_type = other DNA
ttgatagcctgcaactacaata

SEQ ID NO: 95898 - DNA, 22 bp, synthetic construct
  misc_feature 1..22: note = chemically synthesized
  source 1..22: mol_type = other DNA
atagcctgcaactacaataatt

SEQ ID NO: 95899 - DNA, 22 bp, synthetic construct
  misc_feature 1..22: note = chemically synthesized
  source 1..22: mol_type = other DNA
caactacaataattatttgtct

SEQ ID NO: 95900 - DNA, 22 bp, synthetic construct
  misc_feature 1..22: note = chemically synthesized
  source 1..22: mol_type = other DNA
caataattatttgtctctctcc

SEQ ID NO: 95901 - DNA, 22 bp, synthetic construct
  misc_feature 1..22: note = chemically synthesized
  source 1..22: mol_type = other DNA
tttgtctctctcccatattctg

SEQ ID NO: 95902 - DNA, 22 bp, synthetic construct
  misc_feature 1..22: note = chemically synthesized
  source 1..22: mol_type = other DNA
gtctctctcccatattctggat

SEQ ID NO: 95903 - DNA, 22 bp, synthetic construct
  misc_feature 1..22: note = chemically synthesized
  source 1..22: mol_type = other DNA
tctctctcccatattctggata

SEQ ID NO: 95904 - DNA, 22 bp, synthetic construct
  misc_feature 1..22: note = chemically synthesized
  source 1..22: mol_type = other DNA
tctcccatattctggatatata

SEQ ID NO: 95905 - DNA, 22 bp, synthetic construct
  misc_feature 1..22: note = chemically synthesized
  source 1..22: mol_type = other DNA
tcccatattctggatatataca

SEQ ID NO: 95906 - DNA, 22 bp, synthetic construct
  misc_feature 1..22: note = chemically synthesized
  source 1..22: mol_type = other DNA
ccatattctggatatatacagc

SEQ ID NO: 95907 - DNA, 22 bp, synthetic construct
  misc_feature 1..22: note = chemically synthesized
  source 1..22: mol_type = other DNA
tggatatatacagccaaattca

SEQ ID NO: 95908 - DNA, 22 bp, synthetic construct
  misc_feature 1..22: note = chemically synthesized
  source 1..22: mol_type = other DNA
gatatatacagccaaattcaaa

SEQ ID NO: 95909 - DNA, 22 bp, synthetic construct
  misc_feature 1..22: note = chemically synthesized
  source 1..22: mol_type = other DNA
aaaagtaattcacaggaaaaag

SEQ ID NO: 95910 - DNA, 22 bp, synthetic construct
  misc_feature 1..22: note = chemically synthesized
  source 1..22: mol_type = other DNA
acaggaaaaagtctgatcaatg

SEQ ID NO: 95911 - DNA, 22 bp, synthetic construct
  misc_feature 1..22: note = chemically synthesized
  source 1..22: mol_type = other DNA
atcaatgtgagagcactataaa

SEQ ID NO: 95912 - DNA, 22 bp, synthetic construct
  misc_feature 1..22: note = chemically synthesized
  source 1..22: mol_type = other DNA
taaaattactaataaagttata

SEQ ID NO: 95913 - DNA, 22 bp, synthetic construct
  misc_feature 1..22: note = chemically synthesized
  source 1..22: mol_type = other DNA
ctaataaagttatatttgccaa

SEQ ID NO: 95914 - DNA, 22 bp, synthetic construct
  misc_feature 1..22: note = chemically synthesized
  source 1..22: mol_type = other DNA
ataaagttatatttgccaaaat

SEQ ID NO: 95915 - DNA, 22 bp, synthetic construct
  misc_feature 1..22: note = chemically synthesized
  source 1..22: mol_type = other DNA
tatttgccaaaatatggcactc

SEQ ID NO: 95916 - DNA, 22 bp, synthetic construct
  misc_feature 1..22: note = chemically synthesized
  source 1..22: mol_type = other DNA
gccaaaatatggcactctaact

SEQ ID NO: 95917 - DNA, 22 bp, synthetic construct
  misc_feature 1..22: note = chemically synthesized
  source 1..22: mol_type = other DNA
ccaaaatatggcactctaactt

SEQ ID NO: 95918 - DNA, 22 bp, synthetic construct
  misc_feature 1..22: note = chemically synthesized
  source 1..22: mol_type = other DNA
taacttggaaaatgcaaaggtt

SEQ ID NO: 95919 - DNA, 22 bp, synthetic construct
  misc_feature 1..22: note = chemically synthesized
  source 1..22: mol_type = other DNA
acttggaaaatgcaaaggttcc

SEQ ID NO: 95920 - DNA, 22 bp, synthetic construct
  misc_feature 1..22: note = chemically synthesized
  source 1..22: mol_type = other DNA
ggaaaatgcaaaggttccttga

SEQ ID NO: 95921 - DNA, 22 bp, synthetic construct
  misc_feature 1..22: note = chemically synthesized
  source 1..22: mol_type = other DNA
gaaaatgcaaaggttccttgat

SEQ ID NO: 95922 - DNA, 22 bp, synthetic construct
  misc_feature 1..22: note = chemically synthesized
  source 1..22: mol_type = other DNA
cttgatatgaaagacacaagac

SEQ ID NO: 95923 - DNA, 22 bp, synthetic construct
  misc_feature 1..22: note = chemically synthesized
  source 1..22: mol_type = other DNA
gatatgaaagacacaagacctg

SEQ ID NO: 95924 - DNA, 22 bp, synthetic construct
  misc_feature 1..22: note = chemically synthesized
  source 1..22: mol_type = other DNA
atatgaaagacacaagacctga

SEQ ID NO: 95925 - DNA, 22 bp, synthetic construct
  misc_feature 1..22: note = chemically synthesized
  source 1..22: mol_type = other DNA
aaggtcaaaactccctgaccaa

SEQ ID NO: 95926 - DNA, 22 bp, synthetic construct
  misc_feature 1..22: note = chemically synthesized
  source 1..22: mol_type = other DNA
cctgaccaatctagcacttcct

SEQ ID NO: 95927 - DNA, 22 bp, synthetic construct
  misc_feature 1..22: note = chemically synthesized
  source 1..22: mol_type = other DNA
accaatctagcacttcctaaaa

SEQ ID NO: 95928 - DNA, 22 bp, synthetic construct
  misc_feature 1..22: note = chemically synthesized
  source 1..22: mol_type = other DNA
gcacttcctaaaaagtaaatct

SEQ ID NO: 95929 - DNA, 22 bp, synthetic construct
  misc_feature 1..22: note = chemically synthesized
  source 1..22: mol_type = other DNA
cctaaaaagtaaatctgttaat

SEQ ID NO: 95930 - DNA, 22 bp, synthetic construct
  misc_feature 1..22: note = chemically synthesized
  source 1..22: mol_type = other DNA
ctaaaaagtaaatctgttaata

SEQ ID NO: 95931 - DNA, 22 bp, synthetic construct
  misc_feature 1..22: note = chemically synthesized
  source 1..22: mol_type = other DNA
aaaagtaaatctgttaatatcc

SEQ ID NO: 95932 - DNA, 22 bp, synthetic construct
  misc_feature 1..22: note = chemically synthesized
  source 1..22: mol_type = other DNA
ttaatatccctctacccttcac

SEQ ID NO: 95933 - DNA, 22 bp, synthetic construct
  misc_feature 1..22: note = chemically synthesized
  source 1..22: mol_type = other DNA
atatccctctacccttcacaca

SEQ ID NO: 95934 - DNA, 22 bp, synthetic construct
  misc_feature 1..22: note = chemically synthesized
  source 1..22: mol_type = other DNA
tacccttcacacatgagagtca

SEQ ID NO: 95935 - DNA, 22 bp, synthetic construct
  misc_feature 1..22: note = chemically synthesized
  source 1..22: mol_type = other DNA
cccttcacacatgagagtcacc

SEQ ID NO: 95936 - DNA, 22 bp, synthetic construct
  misc_feature 1..22: note = chemically synthesized
  source 1..22: mol_type = other DNA
cacacatgagagtcaccaggtc

SEQ ID NO: 95937 - DNA, 22 bp, synthetic construct
  misc_feature 1..22: note = chemically synthesized
  source 1..22: mol_type = other DNA
acacatgagagtcaccaggtca

SEQ ID NO: 95938 - DNA, 22 bp, synthetic construct
  misc_feature 1..22: note = chemically synthesized
  source 1..22: mol_type = other DNA
cctcctgttatcttcaccagtc

SEQ ID NO: 95939 - DNA, 22 bp, synthetic construct
  misc_feature 1..22: note = chemically synthesized
  source 1..22: mol_type = other DNA
ctcctgttatcttcaccagtct

SEQ ID NO: 95940 - DNA, 22 bp, synthetic construct
  misc_feature 1..22: note = chemically synthesized
  source 1..22: mol_type = other DNA
ctgttatcttcaccagtctggg

SEQ ID NO: 95941 - DNA, 22 bp, synthetic construct
  misc_feature 1..22: note = chemically synthesized
  source 1..22: mol_type = other DNA
ttatcttcaccagtctgggagc

SEQ ID NO: 95942 - DNA, 22 bp, synthetic construct
  misc_feature 1..22: note = chemically synthesized
  source 1..22: mol_type = other DNA
tcttcaccagtctgggagcttt

SEQ ID NO: 95943 - DNA, 22 bp, synthetic construct
  misc_feature 1..22: note = chemically synthesized
  source 1..22: mol_type = other DNA
caccagtctgggagctttcagt

SEQ ID NO: 95944 - DNA, 22 bp, synthetic construct
  misc_feature 1..22: note = chemically synthesized
  source 1..22: mol_type = other DNA
accagtctgggagctttcagtc

SEQ ID NO: 95945 - DNA, 22 bp, synthetic construct
  misc_feature 1..22: note = chemically synthesized
  source 1..22: mol_type = other DNA
ggagctttcagtcatttatcac

SEQ ID NO: 95946 - DNA, 22 bp, synthetic construct
  misc_feature 1..22: note = chemically synthesized
  source 1..22: mol_type = other DNA
tcagtcatttatcacctccttc

SEQ ID NO: 95947 - DNA, 22 bp, synthetic construct
  misc_feature 1..22: note = chemically synthesized
  source 1..22: mol_type = other DNA
cagtcatttatcacctccttct

SEQ ID NO: 95948 - DNA, 22 bp, synthetic construct
  misc_feature 1..22: note = chemically synthesized
  source 1..22: mol_type = other DNA
agtcatttatcacctccttctt

SEQ ID NO: 95949 - DNA, 22 bp, synthetic construct
  misc_feature 1..22: note = chemically synthesized
  source 1..22: mol_type = other DNA
atcacctccttcttccttctca

SEQ ID NO: 95950 - DNA, 22 bp, synthetic construct
  misc_feature 1..22: note = chemically synthesized
  source 1..22: mol_type = other DNA
tcacctccttcttccttctcat

SEQ ID NO: 95951 - DNA, 22 bp, synthetic construct
  misc_feature 1..22: note = chemically synthesized
  source 1..22: mol_type = other DNA
cttcttccttctcatctcccac

SEQ ID NO: 95952 - DNA, 22 bp, synthetic construct
  misc_feature 1..22: note = chemically synthesized
  source 1..22: mol_type = other DNA
cttccttctcatctcccacagt

SEQ ID NO: 95953 - DNA, 22 bp, synthetic construct
  misc_feature 1..22: note = chemically synthesized
  source 1..22: mol_type = other DNA
ttccttctcatctcccacagtc

SEQ ID NO: 95954 - DNA, 22 bp, synthetic construct
  misc_feature 1..22: note = chemically synthesized
  source 1..22: mol_type = other DNA
ccttctcatctcccacagtcag

SEQ ID NO: 95955 - DNA, 22 bp, synthetic construct
  misc_feature 1..22: note = chemically synthesized
  source 1..22: mol_type = other DNA
cttctcatctcccacagtcagt

SEQ ID NO: 95956 - DNA, 22 bp, synthetic construct
  misc_feature 1..22: note = chemically synthesized
  source 1..22: mol_type = other DNA
ctcatctcccacagtcagtcga

SEQ ID NO: 95957 - DNA, 22 bp, synthetic construct
  misc_feature 1..22: note = chemically synthesized
  source 1..22: mol_type = other DNA
tcatctcccacagtcagtcgaa

SEQ ID NO: 95958 - DNA, 22 bp, synthetic construct
  misc_feature 1..22: note = chemically synthesized
  source 1..22: mol_type = other DNA
atctcccacagtcagtcgaata

SEQ ID NO: 95959 - DNA, 22 bp, synthetic construct
  misc_feature 1..22: note = chemically synthesized
  source 1..22: mol_type = other DNA
ccacagtcagtcgaatactatg

SEQ ID NO: 95960 - DNA, 22 bp, synthetic construct
  misc_feature 1..22: note = chemically synthesized
  source 1..22: mol_type = other DNA
tgtctttctcaccccacctttg

SEQ ID NO: 95961 - DNA, 22 bp, synthetic construct
  misc_feature 1..22: note = chemically synthesized
  source 1..22: mol_type = other DNA
tctcaccccacctttgtccatc

SEQ ID NO: 95962 - DNA, 22 bp, synthetic construct
  misc_feature 1..22: note = chemically synthesized
  source 1..22: mol_type = other DNA
ctcaccccacctttgtccatcc

SEQ ID NO: 95963 - DNA, 22 bp, synthetic construct
  misc_feature 1..22: note = chemically synthesized
  source 1..22: mol_type = other DNA
tcaccccacctttgtccatcct

SEQ ID NO: 95964 - DNA, 22 bp, synthetic construct
  misc_feature 1..22: note = chemically synthesized
  source 1..22: mol_type = other DNA
accccacctttgtccatccttc

SEQ ID NO: 95965 - DNA, 22 bp, synthetic construct
  misc_feature 1..22: note = chemically synthesized
  source 1..22: mol_type = other DNA
tgtccatccttcaaattccaca

SEQ ID NO: 95966 - DNA, 22 bp, synthetic construct
  misc_feature 1..22: note = chemically synthesized
  source 1..22: mol_type = other DNA
gtccatccttcaaattccacag

SEQ ID NO: 95967 - DNA, 22 bp, synthetic construct
  misc_feature 1..22: note = chemically synthesized
  source 1..22: mol_type = other DNA
tccatccttcaaattccacaga

SEQ ID NO: 95968 - DNA, 22 bp, synthetic construct
  misc_feature 1..22: note = chemically synthesized
  source 1..22: mol_type = other DNA
caaattccacagactcactgct

SEQ ID NO: 95969 - DNA, 22 bp, synthetic construct
  misc_feature 1..22: note = chemically synthesized
  source 1..22: mol_type = other DNA
aaattccacagactcactgctc

SEQ ID NO: 95970 - DNA, 22 bp, synthetic construct
  misc_feature 1..22: note = chemically synthesized
  source 1..22: mol_type = other DNA
cacagactcactgctcctcttg

SEQ ID NO: 95971 - DNA, 22 bp, synthetic construct
  misc_feature 1..22: note = chemically synthesized
  source 1..22: mol_type = other DNA
actgctcctcttgggtttgaac

SEQ ID NO: 95972 - DNA, 22 bp, synthetic construct
  misc_feature 1..22: note = chemically synthesized
  source 1..22: mol_type = other DNA
ctcctcttgggtttgaaccatt

SEQ ID NO: 95973 - DNA, 22 bp, synthetic construct
  misc_feature 1..22: note = chemically synthesized
  source 1..22: mol_type = other DNA
ctcttgggtttgaaccattgta

SEQ ID NO: 95974 - DNA, 22 bp, synthetic construct
  misc_feature 1..22: note = chemically synthesized
  source 1..22: mol_type = other DNA
ttgggtttgaaccattgtatct

SEQ ID NO: 95975 - DNA, 22 bp, synthetic construct
  misc_feature 1..22: note = chemically synthesized
  source 1..22: mol_type = other DNA
gggtttgaaccattgtatctgt

SEQ ID NO: 95976 - DNA, 22 bp, synthetic construct
  misc_feature 1..22: note = chemically synthesized
  source 1..22: mol_type = other DNA
ggtttgaaccattgtatctgtc

SEQ ID NO: 95977 - DNA, 22 bp, synthetic construct
  misc_feature 1..22: note = chemically synthesized
  source 1..22: mol_type = other DNA
gaaccattgtatctgtcccctt

SEQ ID NO: 95978 - DNA, 22 bp, synthetic construct
  misc_feature 1..22: note = chemically synthesized
  source 1..22: mol_type = other DNA
aaccattgtatctgtccccttg

SEQ ID NO: 95979 - DNA, 22 bp, synthetic construct
  misc_feature 1..22: note = chemically synthesized
  source 1..22: mol_type = other DNA
tatctgtccccttgaatcatca

SEQ ID NO: 95980 - DNA, 22 bp, synthetic construct
  misc_feature 1..22: note = chemically synthesized
  source 1..22: mol_type = other DNA
tccccttgaatcatcatccata

SEQ ID NO: 95981 - DNA, 22 bp, synthetic construct
  misc_feature 1..22: note = chemically synthesized
  source 1..22: mol_type = other DNA
gaatcatcatccatattttatt

SEQ ID NO: 95982 - DNA, 22 bp, synthetic construct
  misc_feature 1..22: note = chemically synthesized
  source 1..22: mol_type = other DNA
aatcatcatccatattttattt

SEQ ID NO: 95983 - DNA, 22 bp, synthetic construct
  misc_feature 1..22: note = chemically synthesized
  source 1..22: mol_type = other DNA
tattttatctgcaaacttgaat

SEQ ID NO: 95984 - DNA, 22 bp, synthetic construct
  misc_feature 1..22: note = chemically synthesized
  source 1..22: mol_type = other DNA
attttatctgcaaacttgaatc

SEQ ID NO: 95985 - DNA, 22 bp, synthetic construct
  misc_feature 1..22: note = chemically synthesized
  source 1..22: mol_type = other DNA
ttttatctgcaaacttgaatcc

SEQ ID NO: 95986 - DNA, 22 bp, synthetic construct
  misc_feature 1..22: note = chemically synthesized
  source 1..22: mol_type = other DNA
tatctgcaaacttgaatccatt

SEQ ID NO: 95987 - DNA, 22 bp, synthetic construct
  misc_feature 1..22: note = chemically synthesized
  source 1..22: mol_type = other DNA
atctgcaaacttgaatccattt

SEQ ID NO: 95988 - DNA, 22 bp, synthetic construct
  misc_feature 1..22: note = chemically synthesized
  source 1..22: mol_type = other DNA
tctgcaaacttgaatccatttt

SEQ ID NO: 95989 - DNA, 22 bp, synthetic construct
  misc_feature 1..22: note = chemically synthesized
  source 1..22: mol_type = other DNA
caaacttgaatccattttgtgc

SEQ ID NO: 95990 - DNA, 22 bp, synthetic construct
  misc_feature 1..22: note = chemically synthesized
  source 1..22: mol_type = other DNA
gaatccattttgtgcacataag

SEQ ID NO: 95991 - DNA, 22 bp, synthetic construct
  misc_feature 1..22: note = chemically synthesized
  source 1..22: mol_type = other DNA
aatccattttgtgcacataagc

SEQ ID NO: 95992 - DNA, 22 bp, synthetic construct
  misc_feature 1..22: note = chemically synthesized
  source 1..22: mol_type = other DNA
tgtgcacataagcagattactt

SEQ ID NO: 95993 - DNA, 22 bp, synthetic construct
  misc_feature 1..22: note = chemically synthesized
  source 1..22: mol_type = other DNA
gtgcacataagcagattacttt

SEQ ID NO: 95994 - DNA, 22 bp, synthetic construct
  misc_feature 1..22: note = chemically synthesized
  source 1..22: mol_type = other DNA
tgcacataagcagattactttt

SEQ ID NO: 95995 - DNA, 22 bp, synthetic construct
  misc_feature 1..22: note = chemically synthesized
  source 1..22: mol_type = other DNA
ctttttcccaaaatcttatttc

SEQ ID NO: 95996 - DNA, 22 bp, synthetic construct
  misc_feature 1..22: note = chemically synthesized
  source 1..22: mol_type = other DNA
tttcccaaaatcttatttcctg

SEQ ID NO: 95997 - DNA, 22 bp, synthetic construct
  misc_feature 1..22: note = chemically synthesized
  source 1..22: mol_type = other DNA
ttcccaaaatcttatttcctga

SEQ ID NO: 95998 - DNA, 22 bp, synthetic construct
  misc_feature 1..22: note = chemically synthesized
  source 1..22: mol_type = other DNA
tcccaaaatcttatttcctgag

SEQ ID NO: 95999 - DNA, 22 bp, synthetic construct
  misc_feature 1..22: note = chemically synthesized
  source 1..22: mol_type = other DNA
cccaaaatcttatttcctgagt

SEQ ID NO: 96000 - DNA, 22 bp, synthetic construct
  misc_feature 1..22: note = chemically synthesized
  source 1..22: mol_type = other DNA
ccaaaatcttatttcctgagtc

SEQ ID NO: 96001 - DNA, 22 bp, synthetic construct
  misc_feature 1..22: note = chemically synthesized
  source 1..22: mol_type = other DNA
atttcctgagtcacttaacatc

SEQ ID NO: 96002 - DNA, 22 bp, synthetic construct
  misc_feature 1..22: note = chemically synthesized
  source 1..22: mol_type = other DNA
tttcctgagtcacttaacatcc

SEQ ID NO: 96003 - DNA, 22 bp, synthetic construct
  misc_feature 1..22: note = chemically synthesized
  source 1..22: mol_type = other DNA
cctgagtcacttaacatcctaa

SEQ ID NO: 96004 - DNA, 22 bp, synthetic construct
  misc_feature 1..22: note = chemically synthesized
  source 1..22: mol_type = other DNA
ctgagtcacttaacatcctaat

SEQ ID NO: 96005 - DNA, 22 bp, synthetic construct
  misc_feature 1..22: note = chemically synthesized
  source 1..22: mol_type = other DNA
agtcacttaacatcctaatgct

SEQ ID NO: 96006 - DNA, 22 bp, synthetic construct
  misc_feature 1..22: note = chemically synthesized
  source 1..22: mol_type = other DNA
aacatcctaatgcttatcgttt

SEQ ID NO: 96007 - DNA, 22 bp, synthetic construct
  misc_feature 1..22: note = chemically synthesized
  source 1..22: mol_type = other DNA
acatcctaatgcttatcgttta

SEQ ID NO: 96008 - DNA, 22 bp, synthetic construct
  misc_feature 1..22: note = chemically synthesized
  source 1..22: mol_type = other DNA
atgcttatcgtttagtattgca

SEQ ID NO: 96009 - DNA, 22 bp, synthetic construct
  misc_feature 1..22: note = chemically synthesized
  source 1..22: mol_type = other DNA
atcgtttagtattgcaatagca

SEQ ID NO: 96010 - DNA, 22 bp, synthetic construct
  misc_feature 1..22: note = chemically synthesized
  source 1..22: mol_type = other DNA
tcgtttagtattgcaatagcat

SEQ ID NO: 96011 - DNA, 22 bp, synthetic construct
  misc_feature 1..22: note = chemically synthesized
  source 1..22: mol_type = other DNA
agtattgcaatagcatagtaaa

SEQ ID NO: 96012 - DNA, 22 bp, synthetic construct
  misc_feature 1..22: note = chemically synthesized
  source 1..22: mol_type = other DNA
gtattgcaatagcatagtaaaa

SEQ ID NO: 96013 - DNA, 22 bp, synthetic construct
  misc_feature 1..22: note = chemically synthesized
  source 1..22: mol_type = other DNA
caatagcatagtaaaagcttgt

SEQ ID NO: 96014 - DNA, 22 bp, synthetic construct
  misc_feature 1..22: note = chemically synthesized
  source 1..22: mol_type = other DNA
gtatttttgtagccaggccctg

SEQ ID NO: 96015 - DNA, 22 bp, synthetic construct
  misc_feature 1..22: note = chemically synthesized
  source 1..22: mol_type = other DNA
tatttttgtagccaggccctgt

SEQ ID NO: 96016 - DNA, 22 bp, synthetic construct
  misc_feature 1..22: note = chemically synthesized
  source 1..22: mol_type = other DNA
ttgtagccaggccctgtactat

SEQ ID NO: 96017 - DNA, 22 bp, synthetic construct
  misc_feature 1..22: note = chemically synthesized
  source 1..22: mol_type = other DNA
tgtagccaggccctgtactatc

SEQ ID NO: 96018 - DNA, 22 bp, synthetic construct
  misc_feature 1..22: note = chemically synthesized
  source 1..22: mol_type = other DNA
gtagccaggccctgtactatct

SEQ ID NO: 96019 - DNA, 22 bp, synthetic construct
  misc_feature 1..22: note = chemically synthesized
  source 1..22: mol_type = other DNA
tagccaggccctgtactatctg

SEQ ID NO: 96020 - DNA, 22 bp, synthetic construct
  misc_feature 1..22: note = chemically synthesized
  source 1..22: mol_type = other DNA
tactatctggtctttcctagtc

SEQ ID NO: 96021 - DNA, 22 bp, synthetic construct
  misc_feature 1..22: note = chemically synthesized
  source 1..22: mol_type = other DNA
tctggtctttcctagtcctcta

SEQ ID NO: 96022 - DNA, 22 bp, synthetic construct
  misc_feature 1..22: note = chemically synthesized
  source 1..22: mol_type = other DNA
gtctttcctagtcctctacgta

SEQ ID NO: 96023 - DNA, 22 bp, synthetic construct
  misc_feature 1..22: note = chemically synthesized
  source 1..22: mol_type = other DNA
tcctagtcctctacgtatgtct

SEQ ID NO: 96024 - DNA, 22 bp, synthetic construct
  misc_feature 1..22: note = chemically synthesized
  source 1..22: mol_type = other DNA
cctagtcctctacgtatgtctt

SEQ ID NO: 96025 - DNA, 22 bp, synthetic construct
  misc_feature 1..22: note = chemically synthesized
  source 1..22: mol_type = other DNA
ctagtcctctacgtatgtctta

SEQ ID NO: 96026 - DNA, 22 bp, synthetic construct
  misc_feature 1..22: note = chemically synthesized
  source 1..22: mol_type = other DNA
gtcctctacgtatgtcttactc

SEQ ID NO: 96027 - DNA, 22 bp, synthetic construct
  misc_feature 1..22: note = chemically synthesized
  source 1..22: mol_type = other DNA
tacgtatgtcttactctccctt

SEQ ID NO: 96028 - DNA, 22 bp, synthetic construct
  misc_feature 1..22: note = chemically synthesized
  source 1..22: mol_type = other DNA
cgtatgtcttactctcccttct

SEQ ID NO: 96029 - DNA, 22 bp, synthetic construct
  misc_feature 1..22: note = chemically synthesized
  source 1..22: mol_type = other DNA
actctcccttctacttccagag

SEQ ID NO: 96030 - DNA, 22 bp, synthetic construct
  misc_feature 1..22: note = chemically synthesized
  source 1..22: mol_type = other DNA
ctctcccttctacttccagaga

SEQ ID NO: 96031 - DNA, 22 bp, synthetic construct
  misc_feature 1..22: note = chemically synthesized
  source 1..22: mol_type = other DNA
tcccttctacttccagagagcc

SEQ ID NO: 96032 - DNA, 22 bp, synthetic construct
  misc_feature 1..22: note = chemically synthesized
  source 1..22: mol_type = other DNA
ccttctacttccagagagccag

SEQ ID NO: 96033 - DNA, 22 bp, synthetic construct
  misc_feature 1..22: note = chemically synthesized
  source 1..22: mol_type = other DNA
ctacttccagagagccagtttc

SEQ ID NO: 96034 - DNA, 22 bp, synthetic construct
  misc_feature 1..22: note = chemically synthesized
  source 1..22: mol_type = other DNA
tacttccagagagccagtttca

SEQ ID NO: 96035 - DNA, 22 bp, synthetic construct
  misc_feature 1..22: note = chemically synthesized
  source 1..22: mol_type = other DNA
cttccagagagccagtttcatg

SEQ ID NO: 96036 - DNA, 22 bp, synthetic construct
  misc_feature 1..22: note = chemically synthesized
  source 1..22: mol_type = other DNA
ccagagagccagtttcatgcaa

SEQ ID NO: 96037 - DNA, 22 bp, synthetic construct
  misc_feature 1..22: note = chemically synthesized
  source 1..22: mol_type = other DNA
cagagagccagtttcatgcaag

SEQ ID NO: 96038 - DNA, 22 bp, synthetic construct
  misc_feature 1..22: note = chemically synthesized
  source 1..22: mol_type = other DNA
catgcaagtcacgaagccctag

SEQ ID NO: 96039 - DNA, 22 bp, synthetic construct
  misc_feature 1..22: note = chemically synthesized
  source 1..22: mol_type = other DNA
atgcaagtcacgaagccctagc

SEQ ID NO: 96040 - DNA, 22 bp, synthetic construct
  misc_feature 1..22: note = chemically synthesized
  source 1..22: mol_type = other DNA
gcttgctggttttagaatttaa

SEQ ID NO: 96041 - DNA, 22 bp, synthetic construct
  misc_feature 1..22: note = chemically synthesized
  source 1..22: mol_type = other DNA
gctggttttagaatttaagcct

SEQ ID NO: 96042 - DNA, 22 bp, synthetic construct
  misc_feature 1..22: note = chemically synthesized
  source 1..22: mol_type = other DNA
ctggttttagaatttaagcctt

SEQ ID NO: 96043 - DNA, 22 bp, synthetic construct
  misc_feature 1..22: note = chemically synthesized
  source 1..22: mol_type = other DNA
gttttagaatttaagcctttat

SEQ ID NO: 96044 - DNA, 22 bp, synthetic construct
  misc_feature 1..22: note = chemically synthesized
  source 1..22: mol_type = other DNA
tagaatttaagcctttattagt

SEQ ID NO: 96045 - DNA, 22 bp, synthetic construct
  misc_feature 1..22: note = chemically synthesized
  source 1..22: mol_type = other DNA
agaatttaagcctttattagta

SEQ ID NO: 96046 - DNA, 22 bp, synthetic construct
  misc_feature 1..22: note = chemically synthesized
  source 1..22: mol_type = other DNA
gaatttaagcctttattagtat

SEQ ID NO: 96047 - DNA, 22 bp, synthetic construct
  misc_feature 1..22: note = chemically synthesized
  source 1..22: mol_type = other DNA
aagcctttattagtattctatc

SEQ ID NO: 96048 - DNA, 22 bp, synthetic construct
  misc_feature 1..22: note = chemically synthesized
  source 1..22: mol_type = other DNA
agcctttattagtattctatct

SEQ ID NO: 96049 - DNA, 22 bp, synthetic construct
  misc_feature 1..22: note = chemically synthesized
  source 1..22: mol_type = other DNA
tattagtattctatctcccacg

SEQ ID NO: 96050 - DNA, 22 bp, synthetic construct
  misc_feature 1..22: note = chemically synthesized
  source 1..22: mol_type = other DNA
attagtattctatctcccacgg

SEQ ID NO: 96051 - DNA, 22 bp, synthetic construct
  misc_feature 1..22: note = chemically synthesized
  source 1..22: mol_type = other DNA
ttagtattctatctcccacgga

SEQ ID NO: 96052 - DNA, 22 bp, synthetic construct
  misc_feature 1..22: note = chemically synthesized
  source 1..22: mol_type = other DNA
gtattctatctcccacggaaag

SEQ ID NO: 96053 - DNA, 22 bp, synthetic construct
  misc_feature 1..22: note = chemically synthesized
  source 1..22: mol_type = other DNA
tatctcccacggaaagtcttca

SEQ ID NO: 96054 - DNA, 22 bp, synthetic construct
  misc_feature 1..22: note = chemically synthesized
  source 1..22: mol_type = other DNA
tctcccacggaaagtcttcatc

SEQ ID NO: 96055 - DNA, 22 bp, synthetic construct
  misc_feature 1..22: note = chemically synthesized
  source 1..22: mol_type = other DNA
ccacggaaagtcttcatcacac

SEQ ID NO: 96056 - DNA, 22 bp, synthetic construct
  misc_feature 1..22: note = chemically synthesized
  source 1..22: mol_type = other DNA
catcacactctccaaaaacttt

SEQ ID NO: 96057 - DNA, 22 bp, synthetic construct
  misc_feature 1..22: note = chemically synthesized
  source 1..22: mol_type = other DNA
atcacactctccaaaaactttc

SEQ ID NO: 96058 - DNA, 22 bp, synthetic construct
  misc_feature 1..22: note = chemically synthesized
  source 1..22: mol_type = other DNA
tccaaaaactttcccactcagg

SEQ ID NO: 96059 - DNA, 22 bp, synthetic construct
  misc_feature 1..22: note = chemically synthesized
  source 1..22: mol_type = other DNA
caaaaactttcccactcaggtc

SEQ ID NO: 96060 - DNA, 22 bp, synthetic construct
  misc_feature 1..22: note = chemically synthesized
  source 1..22: mol_type = other DNA
tcccactcaggtcctaactcta

SEQ ID NO: 96061 - DNA, 22 bp, synthetic construct
  misc_feature 1..22: note = chemically synthesized
  source 1..22: mol_type = other DNA
cccactcaggtcctaactctaa

SEQ ID NO: 96062 - DNA, 22 bp, synthetic construct
  misc_feature 1..22: note = chemically synthesized
  source 1..22: mol_type = other DNA
ccactcaggtcctaactctaac

SEQ ID NO: 96063 - DNA, 22 bp, synthetic construct
  misc_feature 1..22: note = chemically synthesized
  source 1..22: mol_type = other DNA
aggtcctaactctaactttatt

SEQ ID NO: 96064 - DNA, 22 bp, synthetic construct
  misc_feature 1..22: note = chemically synthesized
  source 1..22: mol_type = other DNA
actctaactttattttagtgca

SEQ ID NO: 96065 - DNA, 22 bp, synthetic construct
  misc_feature 1..22: note = chemically synthesized
  source 1..22: mol_type = other DNA
taactttattttagtgcatgtt

SEQ ID NO: 96066 - DNA, 22 bp, synthetic construct
  misc_feature 1..22: note = chemically synthesized
  source 1..22: mol_type = other DNA
actttattttagtgcatgttac

SEQ ID NO: 96067 - DNA, 22 bp, synthetic construct
  misc_feature 1..22: note = chemically synthesized
  source 1..22: mol_type = other DNA
tattttagtgcatgttacattc

SEQ ID NO: 96068 - DNA, 22 bp, synthetic construct
  misc_feature 1..22: note = chemically synthesized
  source 1..22: mol_type = other DNA
attttagtgcatgttacattct

SEQ ID NO: 96069 - DNA, 22 bp, synthetic construct
  misc_feature 1..22: note = chemically synthesized
  source 1..22: mol_type = other DNA
ttttagtgcatgttacattcta

SEQ ID NO: 96070 - DNA, 22 bp, synthetic construct
  misc_feature 1..22: note = chemically synthesized
  source 1..22: mol_type = other DNA
tagtgcatgttacattctatca

SEQ ID NO: 96071 - DNA, 22 bp, synthetic construct
  misc_feature 1..22: note = chemically synthesized
  source 1..22: mol_type = other DNA
agtgcatgttacattctatcag

SEQ ID NO: 96072 - DNA, 22 bp, synthetic construct
  misc_feature 1..22: note = chemically synthesized
  source 1..22: mol_type = other DNA
gtgcatgttacattctatcaga

SEQ ID NO: 96073 - DNA, 22 bp, synthetic construct
  misc_feature 1..22: note = chemically synthesized
  source 1..22: mol_type = other DNA
cattctatcagaagataatgca

SEQ ID NO: 96074 - DNA, 22 bp, synthetic construct
  misc_feature 1..22: note = chemically synthesized
  source 1..22: mol_type = other DNA
tatcagaagataatgcacaatg

SEQ ID NO: 96075 - DNA, 22 bp, synthetic construct
  misc_feature 1..22: note = chemically synthesized
  source 1..22: mol_type = other DNA
tcagaagataatgcacaatgat

SEQ ID NO: 96076 - DNA, 22 bp, synthetic construct
  misc_feature 1..22: note = chemically synthesized
  source 1..22: mol_type = other DNA
agcttcagctaacccatgaaat

SEQ ID NO: 96077 - DNA, 22 bp, synthetic construct
  misc_feature 1..22: note = chemically synthesized
  source 1..22: mol_type = other DNA
gcttcagctaacccatgaaata

SEQ ID NO: 96078 - DNA, 22 bp, synthetic construct
  misc_feature 1..22: note = chemically synthesized
  source 1..22: mol_type = other DNA
cagctaacccatgaaataatgg

SEQ ID NO: 96079 - DNA, 22 bp, synthetic construct
  misc_feature 1..22: note = chemically synthesized
  source 1..22: mol_type = other DNA
agctaacccatgaaataatgga

SEQ ID NO: 96080 - DNA, 22 bp, synthetic construct
  misc_feature 1..22: note = chemically synthesized
  source 1..22: mol_type = other DNA
acccatgaaataatggaatcct

SEQ ID NO: 96081 - DNA, 22 bp, synthetic construct
  misc_feature 1..22: note = chemically synthesized
  source 1..22: mol_type = other DNA
catggaaagagcaggctattgt

SEQ ID NO: 96082 - DNA, 22 bp, synthetic construct
  misc_feature 1..22: note = chemically synthesized
  source 1..22: mol_type = other DNA
atggaaagagcaggctattgtt

SEQ ID NO: 96083 - DNA, 22 bp, synthetic construct
  misc_feature 1..22: note = chemically synthesized
  source 1..22: mol_type = other DNA
ttgttgatacacactcatctta

SEQ ID NO: 96084 - DNA, 22 bp, synthetic construct
  misc_feature 1..22: note = chemically synthesized
  source 1..22: mol_type = other DNA
ttgatacacactcatcttatct

SEQ ID NO: 96085 - DNA, 22 bp, synthetic construct
  misc_feature 1..22: note = chemically synthesized
  source 1..22: mol_type = other DNA
atacacactcatcttatctcca

SEQ ID NO: 96086 - DNA, 22 bp, synthetic construct
  misc_feature 1..22: note = chemically synthesized
  source 1..22: mol_type = other DNA
atcttatctccaaatcaatttc

SEQ ID NO: 96087 - DNA, 22 bp, synthetic construct
  misc_feature 1..22: note = chemically synthesized
  source 1..22: mol_type = other DNA
atctccaaatcaatttcataaa

SEQ ID NO: 96088 - DNA, 22 bp, synthetic construct
  misc_feature 1..22: note = chemically synthesized
  source 1..22: mol_type = other DNA
tctccaaatcaatttcataaaa

SEQ ID NO: 96089 - DNA, 22 bp, synthetic construct
  misc_feature 1..22: note = chemically synthesized
  source 1..22: mol_type = other DNA
caaatcaatttcataaaacatg

SEQ ID NO: 96090 - DNA, 22 bp, synthetic construct
  misc_feature 1..22: note = chemically synthesized
  source 1..22: mol_type = other DNA
cataaaacatgtgacaagctag

SEQ ID NO: 96091 - DNA, 22 bp, synthetic construct
  misc_feature 1..22: note = chemically synthesized
  source 1..22: mol_type = other DNA
ataaaacatgtgacaagctagc

SEQ ID NO: 96092 - DNA, 22 bp, synthetic construct
  misc_feature 1..22: note = chemically synthesized
  source 1..22: mol_type = other DNA
gctacttcaaaatgtaaataag

SEQ ID NO: 96093 - DNA, 22 bp, synthetic construct
  misc_feature 1..22: note = chemically synthesized
  source 1..22: mol_type = other DNA
cttcaaaatgtaaataagagta

SEQ ID NO: 96094 - DNA, 22 bp, synthetic construct
  misc_feature 1..22: note = chemically synthesized
  source 1..22: mol_type = other DNA
caaaatgtaaataagagtaaat

SEQ ID NO: 96095 - DNA, 22 bp, synthetic construct
  misc_feature 1..22: note = chemically synthesized
  source 1..22: mol_type = other DNA
aaaatgtaaataagagtaaatt

SEQ ID NO: 96096 - DNA, 22 bp, synthetic construct
  misc_feature 1..22: note = chemically synthesized
  source 1..22: mol_type = other DNA
aaatagtaattctagcctatat

SEQ ID NO: 96097 - DNA, 22 bp, synthetic construct
  misc_feature 1..22: note = chemically synthesized
  source 1..22: mol_type = other DNA
tagcctatatcttggatatcta

SEQ ID NO: 96098 - DNA, 22 bp, synthetic construct
  misc_feature 1..22: note = chemically synthesized
  source 1..22: mol_type = other DNA
gcctatatcttggatatctatg

SEQ ID NO: 96099 - DNA, 22 bp, synthetic construct
  misc_feature 1..22: note = chemically synthesized
  source 1..22: mol_type = other DNA
tatcttggatatctatgaagtt

SEQ ID NO: 96100 - DNA, 22 bp, synthetic construct
  misc_feature 1..22: note = chemically synthesized
  source 1..22: mol_type = other DNA
ggatatctatgaagttttgttt

SEQ ID NO: 96101 - DNA, 22 bp, synthetic construct
  misc_feature 1..22: note = chemically synthesized
  source 1..22: mol_type = other DNA
gatatctatgaagttttgtttt

SEQ ID NO: 96102 - DNA, 22 bp, synthetic construct
  misc_feature 1..22: note = chemically synthesized
  source 1..22: mol_type = other DNA
tgaagttttgttttgttttgtt

SEQ ID NO: 96103 - DNA, 22 bp, synthetic construct
  misc_feature 1..22: note = chemically synthesized
  source 1..22: mol_type = other DNA
tgttttgttttgtttttgtttt

SEQ ID NO: 96104 - DNA, 22 bp, synthetic construct
  misc_feature 1..22: note = chemically synthesized
  source 1..22: mol_type = other DNA
gttttgttttgtttttgttttt

SEQ ID NO: 96105 - DNA, 22 bp, synthetic construct
  misc_feature 1..22: note = chemically synthesized
  source 1..22: mol_type = other DNA
ttttgttttgtttttgttttta

SEQ ID NO: 96106 - DNA, 22 bp, synthetic construct
  misc_feature 1..22: note = chemically synthesized
  source 1..22: mol_type = other DNA
tgttttgtttttgtttttaatg

SEQ ID NO: 96107 - DNA, 22 bp, synthetic construct
  misc_feature 1..22: note = chemically synthesized
  source 1..22: mol_type = other DNA
gttttgtttttgtttttaatga

SEQ ID NO: 96108 - DNA, 22 bp, synthetic construct
  misc_feature 1..22: note = chemically synthesized
  source 1..22: mol_type = other DNA
ttttgtttttgtttttaatgaa

SEQ ID NO: 96109 - DNA, 22 bp, synthetic construct
  misc_feature 1..22: note = chemically synthesized
  source 1..22: mol_type = other DNA
tgtttttgtttttaatgaaaag

SEQ ID NO: 96110 - DNA, 22 bp, synthetic construct
  misc_feature 1..22: note = chemically synthesized
  source 1..22: mol_type = other DNA
gtttttgtttttaatgaaaagt

SEQ ID NO: 96111 - DNA, 22 bp, synthetic construct
  misc_feature 1..22: note = chemically synthesized
  source 1..22: mol_type = other DNA
tttttgtttttaatgaaaagtg

SEQ ID NO: 96112 - DNA, 22 bp, synthetic construct
  misc_feature 1..22: note = chemically synthesized
  source 1..22: mol_type = other DNA
ttgtttttaatgaaaagtgaca

SEQ ID NO: 96113 - DNA, 22 bp, synthetic construct
  misc_feature 1..22: note = chemically synthesized
  source 1..22: mol_type = other DNA
tgtttttaatgaaaagtgacat

SEQ ID NO: 96114 - DNA, 22 bp, synthetic construct
  misc_feature 1..22: note = chemically synthesized
  source 1..22: mol_type = other DNA
gtttttaatgaaaagtgacatg

SEQ ID NO: 96115 - DNA, 22 bp, synthetic construct
  misc_feature 1..22: note = chemically synthesized
  source 1..22: mol_type = other DNA
tttttaatgaaaagtgacatgt

SEQ ID NO: 96116 - DNA, 22 bp, synthetic construct
  misc_feature 1..22: note = chemically synthesized
  source 1..22: mol_type = other DNA
ttaatgaaaagtgacatgtacc

SEQ ID NO: 96117 - DNA, 22 bp, synthetic construct
  misc_feature 1..22: note = chemically synthesized
  source 1..22: mol_type = other DNA
taatgaaaagtgacatgtacca

SEQ ID NO: 96118 - DNA, 22 bp, synthetic construct
  misc_feature 1..22: note = chemically synthesized
  source 1..22: mol_type = other DNA
aatgaaaagtgacatgtaccac

SEQ ID NO: 96119 - DNA, 22 bp, synthetic construct
  misc_feature 1..22: note = chemically synthesized
  source 1..22: mol_type = other DNA
atgaaaagtgacatgtaccaca

SEQ ID NO: 96120 - DNA, 22 bp, synthetic construct
  misc_feature 1..22: note = chemically synthesized
  source 1..22: mol_type = other DNA
ctttctcaggtaccactaacag

SEQ ID NO: 96121 - DNA, 22 bp, synthetic construct
  misc_feature 1..22: note = chemically synthesized
  source 1..22: mol_type = other DNA
tctcaggtaccactaacagctc

SEQ ID NO: 96122 - DNA, 22 bp, synthetic construct
  misc_feature 1..22: note = chemically synthesized
  source 1..22: mol_type = other DNA
ctcaggtaccactaacagctcc

SEQ ID NO: 96123 - DNA, 22 bp, synthetic construct
  misc_feature 1..22: note = chemically synthesized
  source 1..22: mol_type = other DNA
tcaggtaccactaacagctcct

SEQ ID NO: 96124 - DNA, 22 bp, synthetic construct
  misc_feature 1..22: note = chemically synthesized
  source 1..22: mol_type = other DNA
aggtaccactaacagctccttc

SEQ ID NO: 96125 - DNA, 22 bp, synthetic construct
  misc_feature 1..22: note = chemically synthesized
  source 1..22: mol_type = other DNA
acagctccttctttccccggtg

SEQ ID NO: 96126 - DNA, 22 bp, synthetic construct
  misc_feature 1..22: note = chemically synthesized
  source 1..22: mol_type = other DNA
cttctttccccggtgcagtaaa

SEQ ID NO: 96127 - DNA, 22 bp, synthetic construct
  misc_feature 1..22: note = chemically synthesized
  source 1..22: mol_type = other DNA
ctttccccggtgcagtaaaaac

SEQ ID NO: 96128 - DNA, 22 bp, synthetic construct
  misc_feature 1..22: note = chemically synthesized
  source 1..22: mol_type = other DNA
tttccccggtgcagtaaaaact

SEQ ID NO: 96129 - DNA, 22 bp, synthetic construct
  misc_feature 1..22: note = chemically synthesized
  source 1..22: mol_type = other DNA
tccccggtgcagtaaaaactgc

SEQ ID NO: 96130 - DNA, 22 bp, synthetic construct
  misc_feature 1..22: note = chemically synthesized
  source 1..22: mol_type = other DNA
ccccggtgcagtaaaaactgcc

SEQ ID NO: 96131 - DNA, 22 bp, synthetic construct
  misc_feature 1..22: note = chemically synthesized
  source 1..22: mol_type = other DNA
cccggtgcagtaaaaactgcct

SEQ ID NO: 96132 - DNA, 22 bp, synthetic construct
  misc_feature 1..22: note = chemically synthesized
  source 1..22: mol_type = other DNA
cctaggagtctctgtccactta

SEQ ID NO: 96133 - DNA, 22 bp, synthetic construct
  misc_feature 1..22: note = chemically synthesized
  source 1..22: mol_type = other DNA
ggagtctctgtccacttaatta

SEQ ID NO: 96134 - DNA, 22 bp, synthetic construct
  misc_feature 1..22: note = chemically synthesized
  source 1..22: mol_type = other DNA
tgtccacttaattaaccatttt

SEQ ID NO: 96135 - DNA, 22 bp, synthetic construct
  misc_feature 1..22: note = chemically synthesized
  source 1..22: mol_type = other DNA
tccacttaattaaccattttcc

SEQ ID NO: 96136 - DNA, 22 bp, synthetic construct
  misc_feature 1..22: note = chemically synthesized
  source 1..22: mol_type = other DNA
aattaaccattttcccaccccg

SEQ ID NO: 96137 - DNA, 22 bp, synthetic construct
  misc_feature 1..22: note = chemically synthesized
  source 1..22: mol_type = other DNA
attaaccattttcccaccccga

SEQ ID NO: 96138 - DNA, 22 bp, synthetic construct
  misc_feature 1..22: note = chemically synthesized
  source 1..22: mol_type = other DNA
accattttcccaccccgataaa

SEQ ID NO: 96139 - DNA, 22 bp, synthetic construct
  misc_feature 1..22: note = chemically synthesized
  source 1..22: mol_type = other DNA
tcccaccccgataaagattttt

SEQ ID NO: 96140 - DNA, 22 bp, synthetic construct
  misc_feature 1..22: note = chemically synthesized
  source 1..22: mol_type = other DNA
cccaccccgataaagatttttc

SEQ ID NO: 96141 - DNA, 22 bp, synthetic construct
  misc_feature 1..22: note = chemically synthesized
  source 1..22: mol_type = other DNA
ccaccccgataaagatttttct

SEQ ID NO: 96142 - DNA, 22 bp, synthetic construct
  misc_feature 1..22: note = chemically synthesized
  source 1..22: mol_type = other DNA
ttctccatcatatcatcctcct

SEQ ID NO: 96143 - DNA, 22 bp, synthetic construct
  misc_feature 1..22: note = chemically synthesized
  source 1..22: mol_type = other DNA
tctccatcatatcatcctcctt

SEQ ID NO: 96144 - DNA, 22 bp, synthetic construct
  misc_feature 1..22: note = chemically synthesized
  source 1..22: mol_type = other DNA
ctccatcatatcatcctccttg

SEQ ID NO: 96145 - DNA, 22 bp, synthetic construct
  misc_feature 1..22: note = chemically synthesized
  source 1..22: mol_type = other DNA
tccatcatatcatcctccttgg

SEQ ID NO: 96146 - DNA, 22 bp, synthetic construct
  misc_feature 1..22: note = chemically synthesized
  source 1..22: mol_type = other DNA
catcatatcatcctccttggaa

SEQ ID NO: 96147 - DNA, 22 bp, synthetic construct
  misc_feature 1..22: note = chemically synthesized
  source 1..22: mol_type = other DNA
cttggaatcctggaattctccc

SEQ ID NO: 96148 - DNA, 22 bp, synthetic construct
  misc_feature 1..22: note = chemically synthesized
  source 1..22: mol_type = other DNA
ggaatcctggaattctcccata

SEQ ID NO: 96149 - DNA, 22 bp, synthetic construct
  misc_feature 1..22: note = chemically synthesized
  source 1..22: mol_type = other DNA
gaatcctggaattctcccataa

SEQ ID NO: 96150 - DNA, 22 bp, synthetic construct
  misc_feature 1..22: note = chemically synthesized
  source 1..22: mol_type = other DNA
gaattctcccataacatccaca

SEQ ID NO: 96151 - DNA, 22 bp, synthetic construct
  misc_feature 1..22: note = chemically synthesized
  source 1..22: mol_type = other DNA
tcccataacatccacattaatt

SEQ ID NO: 96152 - DNA, 22 bp, synthetic construct
  misc_feature 1..22: note = chemically synthesized
  source 1..22: mol_type = other DNA
ccataacatccacattaatttt

SEQ ID NO: 96153 - DNA, 22 bp, synthetic construct
  misc_feature 1..22: note = chemically synthesized
  source 1..22: mol_type = other DNA
attttacaagcccccatacatt

SEQ ID NO: 96154 - DNA, 22 bp, synthetic construct
  misc_feature 1..22: note = chemically synthesized
  source 1..22: mol_type = other DNA
tacaagcccccatacatttctt

SEQ ID NO: 96155 - DNA, 22 bp, synthetic construct
  misc_feature 1..22: note = chemically synthesized
  source 1..22: mol_type = other DNA
acaagcccccatacatttctta

SEQ ID NO: 96156 - DNA, 22 bp, synthetic construct
  misc_feature 1..22: note = chemically synthesized
  source 1..22: mol_type = other DNA
caagcccccatacatttcttaa

SEQ ID NO: 96157 - DNA, 22 bp, synthetic construct
  misc_feature 1..22: note = chemically synthesized
  source 1..22: mol_type = other DNA
cttaaggaagctcttggttctt

SEQ ID NO: 96158 - DNA, 22 bp, synthetic construct
  misc_feature 1..22: note = chemically synthesized
  source 1..22: mol_type = other DNA
ttaaggaagctcttggttcttc

SEQ ID NO: 96159 - DNA, 22 bp, synthetic construct
  misc_feature 1..22: note = chemically synthesized
  source 1..22: mol_type = other DNA
aaggaagctcttggttcttcct

SEQ ID NO: 96160 - DNA, 22 bp, synthetic construct
  misc_feature 1..22: note = chemically synthesized
  source 1..22: mol_type = other DNA
aggaagctcttggttcttccta

SEQ ID NO: 96161 - DNA, 22 bp, synthetic construct
  misc_feature 1..22: note = chemically synthesized
  source 1..22: mol_type = other DNA
ttggttcttcctatgtttctct

SEQ ID NO: 96162 - DNA, 22 bp, synthetic construct
  misc_feature 1..22: note = chemically synthesized
  source 1..22: mol_type = other DNA
ggttcttcctatgtttctctcc

SEQ ID NO: 96163 - DNA, 22 bp, synthetic construct
  misc_feature 1..22: note = chemically synthesized
  source 1..22: mol_type = other DNA
gttcttcctatgtttctctcca

SEQ ID NO: 96164 - DNA, 22 bp, synthetic construct
  misc_feature 1..22: note = chemically synthesized
  source 1..22: mol_type = other DNA
ttcctatgtttctctccatccc

SEQ ID NO: 96165 - DNA, 22 bp, synthetic construct
  misc_feature 1..22: note = chemically synthesized
  source 1..22: mol_type = other DNA
cctatgtttctctccatccctc

SEQ ID NO: 96166 - DNA, 22 bp, synthetic construct
  misc_feature 1..22: note = chemically synthesized
  source 1..22: mol_type = other DNA
ctatgtttctctccatccctca

SEQ ID NO: 96167 - DNA, 22 bp, synthetic construct
  misc_feature 1..22: note = chemically synthesized
  source 1..22: mol_type = other DNA
tgtttctctccatccctcagcc

SEQ ID NO: 96168 - DNA, 22 bp, synthetic construct
  misc_feature 1..22: note = chemically synthesized
  source 1..22: mol_type = other DNA
ctctccatccctcagcccatga

SEQ ID NO: 96169 - DNA, 22 bp, synthetic construct
  misc_feature 1..22: note = chemically synthesized
  source 1..22: mol_type = other DNA
tctccatccctcagcccatgaa

SEQ ID NO: 96170 - DNA, 22 bp, synthetic construct
  misc_feature 1..22: note = chemically synthesized
  source 1..22: mol_type = other DNA
tccatccctcagcccatgaaca

SEQ ID NO: 96171 - DNA, 22 bp, synthetic construct
  misc_feature 1..22: note = chemically synthesized
  source 1..22: mol_type = other DNA
catccctcagcccatgaacact

SEQ ID NO: 96172 - DNA, 22 bp, synthetic construct
  misc_feature 1..22: note = chemically synthesized
  source 1..22: mol_type = other DNA
agcccatgaacactttttcctt

SEQ ID NO: 96173 - DNA, 22 bp, synthetic construct
  misc_feature 1..22: note = chemically synthesized
  source 1..22: mol_type = other DNA
tttccttttaacacaagagtaa

SEQ ID NO: 96174 - DNA, 22 bp, synthetic construct
  misc_feature 1..22: note = chemically synthesized
  source 1..22: mol_type = other DNA
ttccttttaacacaagagtaaa

SEQ ID NO: 96175 - DNA, 22 bp, synthetic construct
  misc_feature 1..22: note = chemically synthesized
  source 1..22: mol_type = other DNA
tccttttaacacaagagtaaaa

SEQ ID NO: 96176 - DNA, 22 bp, synthetic construct
  misc_feature 1..22: note = chemically synthesized
  source 1..22: mol_type = other DNA
ccttttaacacaagagtaaaag

SEQ ID NO: 96177 - DNA, 22 bp, synthetic construct
  misc_feature 1..22: note = chemically synthesized
  source 1..22: mol_type = other DNA
cttttaacacaagagtaaaaga

SEQ ID NO: 96178 - DNA, 22 bp, synthetic construct
  misc_feature 1..22: note = chemically synthesized
  source 1..22: mol_type = other DNA
ttaacacaagagtaaaagatgg

SEQ ID NO: 96179 - DNA, 22 bp, synthetic construct
  misc_feature 1..22: note = chemically synthesized
  source 1..22: mol_type = other DNA
taacacaagagtaaaagatgga

SEQ ID NO: 96180 - DNA, 22 bp, synthetic construct
  misc_feature 1..22: note = chemically synthesized
  source 1..22: mol_type = other DNA
aacacaagagtaaaagatggag

SEQ ID NO: 96181 - DNA, 22 bp, synthetic construct
  misc_feature 1..22: note = chemically synthesized
  source 1..22: mol_type = other DNA
acacaagagtaaaagatggaga

SEQ ID NO: 96182 - DNA, 22 bp, synthetic construct
  misc_feature 1..22: note = chemically synthesized
  source 1..22: mol_type = other DNA
caatttttgattactgaagaaa

SEQ ID NO: 96183 - DNA, 22 bp, synthetic construct
  misc_feature 1..22: note = chemically synthesized
  source 1..22: mol_type = other DNA
ttgattactgaagaaaatgtac

SEQ ID NO: 96184 - DNA, 22 bp, synthetic construct
  misc_feature 1..22: note = chemically synthesized
  source 1..22: mol_type = other DNA
tgattactgaagaaaatgtact

SEQ ID NO: 96185 - DNA, 22 bp, synthetic construct
  misc_feature 1..22: note = chemically synthesized
  source 1..22: mol_type = other DNA
gattactgaagaaaatgtactt

SEQ ID NO: 96186 - DNA, 22 bp, synthetic construct
  misc_feature 1..22: note = chemically synthesized
  source 1..22: mol_type = other DNA
attactgaagaaaatgtacttt

SEQ ID NO: 96187 - DNA, 22 bp, synthetic construct
  misc_feature 1..22: note = chemically synthesized
  source 1..22: mol_type = other DNA
ctgaagaaaatgtactttatta

SEQ ID NO: 96188 - DNA, 22 bp, synthetic construct
  misc_feature 1..22: note = chemically synthesized
  source 1..22: mol_type = other DNA
aagaaaatgtactttattaaac

SEQ ID NO: 96189 - DNA, 22 bp, synthetic construct
  misc_feature 1..22: note = chemically synthesized
  source 1..22: mol_type = other DNA
tattaaacagaaggctttctct

SEQ ID NO: 96190 - DNA, 22 bp, synthetic construct
  misc_feature 1..22: note = chemically synthesized
  source 1..22: mol_type = other DNA
attaaacagaaggctttctctc

SEQ ID NO: 96191 - DNA, 22 bp, synthetic construct
  misc_feature 1..22: note = chemically synthesized
  source 1..22: mol_type = other DNA
ttaaacagaaggctttctctca

SEQ ID NO: 96192 - DNA, 22 bp, synthetic construct
  misc_feature 1..22: note = chemically synthesized
  source 1..22: mol_type = other DNA
aacagaaggctttctctcaagg

SEQ ID NO: 96193 - DNA, 22 bp, synthetic construct
  misc_feature 1..22: note = chemically synthesized
  source 1..22: mol_type = other DNA
tctctcaaggccaagcccagtc

SEQ ID NO: 96194 - DNA, 22 bp, synthetic construct
  misc_feature 1..22: note = chemically synthesized
  source 1..22: mol_type = other DNA
ctctcaaggccaagcccagtcc

SEQ ID NO: 96195 - DNA, 22 bp, synthetic construct
  misc_feature 1..22: note = chemically synthesized
  source 1..22: mol_type = other DNA
tctcaaggccaagcccagtccc

SEQ ID NO: 96196 - DNA, 22 bp, synthetic construct
  misc_feature 1..22: note = chemically synthesized
  source 1..22: mol_type = other DNA
tcaaggccaagcccagtcccca

SEQ ID NO: 96197 - DNA, 22 bp, synthetic construct
  misc_feature 1..22: note = chemically synthesized
  source 1..22: mol_type = other DNA
aaggccaagcccagtccccatg

SEQ ID NO: 96198 - DNA, 22 bp, synthetic construct
  misc_feature 1..22: note = chemically synthesized
  source 1..22: mol_type = other DNA
caaactggaagagaactcagtg

SEQ ID NO: 96199 - DNA, 22 bp, synthetic construct
  misc_feature 1..22: note = chemically synthesized
  source 1..22: mol_type = other DNA
gaagagaactcagtggtactta

SEQ ID NO: 96200 - DNA, 22 bp, synthetic construct
  misc_feature 1..22: note = chemically synthesized
  source 1..22: mol_type = other DNA
agtggtacttatgggccagggc

SEQ ID NO: 96201 - DNA, 22 bp, synthetic construct
  misc_feature 1..22: note = chemically synthesized
  source 1..22: mol_type = other DNA
atgggccagggcaatggcgaca

SEQ ID NO: 96202 - DNA, 22 bp, synthetic construct
  misc_feature 1..22: note = chemically synthesized
  source 1..22: mol_type = other DNA
tgggccagggcaatggcgacag

SEQ ID NO: 96203 - DNA, 22 bp, synthetic construct
  misc_feature 1..22: note = chemically synthesized
  source 1..22: mol_type = other DNA
ctgccaggcagcctgcacttca

SEQ ID NO: 96204 - DNA, 22 bp, synthetic construct
  misc_feature 1..22: note = chemically synthesized
  source 1..22: mol_type = other DNA
tgccaggcagcctgcacttcag

SEQ ID NO: 96205 - DNA, 22 bp, synthetic construct
  misc_feature 1..22: note = chemically synthesized
  source 1..22: mol_type = other DNA
ccaggcagcctgcacttcaggg

SEQ ID NO: 96206 - DNA, 22 bp, synthetic construct
  misc_feature 1..22: note = chemically synthesized
  source 1..22: mol_type = other DNA
cacttcaggggtgaactccttg

SEQ ID NO: 96207 - DNA, 22 bp, synthetic construct
  misc_feature 1..22: note = chemically synthesized
  source 1..22: mol_type = other DNA
caggggtgaactccttgccaaa

SEQ ID NO: 96208 - DNA, 22 bp, synthetic construct
  misc_feature 1..22: note = chemically synthesized
  source 1..22: mol_type = other DNA
aggggtgaactccttgccaaag

SEQ ID NO: 96209 - DNA, 22 bp, synthetic construct
  misc_feature 1..22: note = chemically synthesized
  source 1..22: mol_type = other DNA
cttgccaaagtgagtagccaga

SEQ ID NO: 96210 - DNA, 22 bp, synthetic construct
  misc_feature 1..22: note = chemically synthesized
  source 1..22: mol_type = other DNA
gccaaagtgagtagccagaata

SEQ ID NO: 96211 - DNA, 22 bp, synthetic construct
  misc_feature 1..22: note = chemically synthesized
  source 1..22: mol_type = other DNA
ccaaagtgagtagccagaataa

SEQ ID NO: 96212 - DNA, 22 bp, synthetic construct
  misc_feature 1..22: note = chemically synthesized
  source 1..22: mol_type = other DNA
cccaggagctgttaggcaaaag

SEQ ID NO: 96213 - DNA, 22 bp, synthetic construct
  misc_feature 1..22: note = chemically synthesized
  source 1..22: mol_type = other DNA
ttaggcaaaagacaaaataaca

SEQ ID NO: 96214 - DNA, 22 bp, synthetic construct
  misc_feature 1..22: note = chemically synthesized
  source 1..22: mol_type = other DNA
ggcaaaagacaaaataacacac

SEQ ID NO: 96215 - DNA, 22 bp, synthetic construct
  misc_feature 1..22: note = chemically synthesized
  source 1..22: mol_type = other DNA
agtagaagtttccgaaaacaac

SEQ ID NO: 96216 - DNA, 22 bp, synthetic construct
  misc_feature 1..22: note = chemically synthesized
  source 1..22: mol_type = other DNA
ccgaaaacaacttgatgaaaaa

SEQ ID NO: 96217 - DNA, 22 bp, synthetic construct
  misc_feature 1..22: note = chemically synthesized
  source 1..22: mol_type = other DNA
cgaaaacaacttgatgaaaaaa

SEQ ID NO: 96218 - DNA, 22 bp, synthetic construct
  misc_feature 1..22: note = chemically synthesized
  source 1..22: mol_type = other DNA
gatgaaaaaacaaacaaacaaa

SEQ ID NO: 96219 - DNA, 22 bp, synthetic construct
  misc_feature 1..22: note = chemically synthesized
  source 1..22: mol_type = other DNA
atgaaaaaacaaacaaacaaac

SEQ ID NO: 96220 - DNA, 22 bp, synthetic construct
  misc_feature 1..22: note = chemically synthesized
  source 1..22: mol_type = other DNA
tatacctacattcctagacaac

SEQ ID NO: 96221 - DNA, 22 bp, synthetic construct
  misc_feature 1..22: note = chemically synthesized
  source 1..22: mol_type = other DNA
atacctacattcctagacaacc

SEQ ID NO: 96222 - DNA, 22 bp, synthetic construct
  misc_feature 1..22: note = chemically synthesized
  source 1..22: mol_type = other DNA
tacctacattcctagacaaccc

SEQ ID NO: 96223 - DNA, 22 bp, synthetic construct
  misc_feature 1..22: note = chemically synthesized
  source 1..22: mol_type = other DNA
cattcctagacaaccctgacct

SEQ ID NO: 96224 - DNA, 22 bp, synthetic construct
  misc_feature 1..22: note = chemically synthesized
  source 1..22: mol_type = other DNA
ctagacaaccctgacctcaaac

SEQ ID NO: 96225 - DNA, 22 bp, synthetic construct
  misc_feature 1..22: note = chemically synthesized
  source 1..22: mol_type = other DNA
gacaaccctgacctcaaactgt

SEQ ID NO: 96226 - DNA, 22 bp, synthetic construct
  misc_feature 1..22: note = chemically synthesized
  source 1..22: mol_type = other DNA
acctcaaactgttccaaggttt

SEQ ID NO: 96227 - DNA, 22 bp, synthetic construct
  misc_feature 1..22: note = chemically synthesized
  source 1..22: mol_type = other DNA
aaactgttccaaggtttgtgcc

SEQ ID NO: 96228 - DNA, 22 bp, synthetic construct
  misc_feature 1..22: note = chemically synthesized
  source 1..22: mol_type = other DNA
ttccaaggtttgtgcccaccca

SEQ ID NO: 96229 - DNA, 22 bp, synthetic construct
  misc_feature 1..22: note = chemically synthesized
  source 1..22: mol_type = other DNA
caaggtttgtgcccacccaaaa

SEQ ID NO: 96230 - DNA, 22 bp, synthetic construct
  misc_feature 1..22: note = chemically synthesized
  source 1..22: mol_type = other DNA
gtgcccacccaaaaaattcaga

SEQ ID NO: 96231 - DNA, 22 bp, synthetic construct
  misc_feature 1..22: note = chemically synthesized
  source 1..22: mol_type = other DNA
tgcccacccaaaaaattcagat

SEQ ID NO: 96232 - DNA, 22 bp, synthetic construct
  misc_feature 1..22: note = chemically synthesized
  source 1..22: mol_type = other DNA
agatgagcttaggttcaatttt

SEQ ID NO: 96233 - DNA, 22 bp, synthetic construct
  misc_feature 1..22: note = chemically synthesized
  source 1..22: mol_type = other DNA
aggttcaattttattctatgag

SEQ ID NO: 96234 - DNA, 22 bp, synthetic construct
  misc_feature 1..22: note = chemically synthesized
  source 1..22: mol_type = other DNA
ggttcaattttattctatgagc

SEQ ID NO: 96235 - DNA, 22 bp, synthetic construct
  misc_feature 1..22: note = chemically synthesized
  source 1..22: mol_type = other DNA
aattttattctatgagccctac

SEQ ID NO: 96236 - DNA, 22 bp, synthetic construct
  misc_feature 1..22: note = chemically synthesized
  source 1..22: mol_type = other DNA
tattctatgagccctacattca

SEQ ID NO: 96237 - DNA, 22 bp, synthetic construct
  misc_feature 1..22: note = chemically synthesized
  source 1..22: mol_type = other DNA
attctatgagccctacattcaa

SEQ ID NO: 96238 - DNA, 22 bp, synthetic construct
  misc_feature 1..22: note = chemically synthesized
  source 1..22: mol_type = other DNA
ttctatgagccctacattcaac

SEQ ID NO: 96239 - DNA, 22 bp, synthetic construct
  misc_feature 1..22: note = chemically synthesized
  source 1..22: mol_type = other DNA
tatgagccctacattcaacatt

SEQ ID NO: 96240 - DNA, 22 bp, synthetic construct
  misc_feature 1..22: note = chemically synthesized
  source 1..22: mol_type = other DNA
tgagccctacattcaacattct

SEQ ID NO: 96241 - DNA, 22 bp, synthetic construct
  misc_feature 1..22: note = chemically synthesized
  source 1..22: mol_type = other DNA
cattcaacattctacctaccta

SEQ ID NO: 96242 - DNA, 22 bp, synthetic construct
  misc_feature 1..22: note = chemically synthesized
  source 1..22: mol_type = other DNA
aacattctacctacctacaccc

SEQ ID NO: 96243 - DNA, 22 bp, synthetic construct
  misc_feature 1..22: note = chemically synthesized
  source 1..22: mol_type = other DNA
tacctacctacaccctcacccc

SEQ ID NO: 96244 - DNA, 22 bp, synthetic construct
  misc_feature 1..22: note = chemically synthesized
  source 1..22: mol_type = other DNA
cctacctacaccctcaccccct

SEQ ID NO: 96245 - DNA, 22 bp, synthetic construct
  misc_feature 1..22: note = chemically synthesized
  source 1..22: mol_type = other DNA
cctacaccctcacccccttccc

SEQ ID NO: 96246 - DNA, 22 bp, synthetic construct
  misc_feature 1..22: note = chemically synthesized
  source 1..22: mol_type = other DNA
caccctcacccccttccccatt

SEQ ID NO: 96247 - DNA, 22 bp, synthetic construct
  misc_feature 1..22: note = chemically synthesized
  source 1..22: mol_type = other DNA
acccccttccccattttaccag

SEQ ID NO: 96248 - DNA, 22 bp, synthetic construct
  misc_feature 1..22: note = chemically synthesized
  source 1..22: mol_type = other DNA
ccccattttaccagtattattg

SEQ ID NO: 96249 - DNA, 22 bp, synthetic construct
  misc_feature 1..22: note = chemically synthesized
  source 1..22: mol_type = other DNA
cccattttaccagtattattgg

SEQ ID NO: 96250 - DNA, 22 bp, synthetic construct
  misc_feature 1..22: note = chemically synthesized
  source 1..22: mol_type = other DNA
taccagtattattgggttccct

SEQ ID NO: 96251 - DNA, 22 bp, synthetic construct
  misc_feature 1..22: note = chemically synthesized
  source 1..22: mol_type = other DNA
accagtattattgggttccctc

SEQ ID NO: 96252 - DNA, 22 bp, synthetic construct
  misc_feature 1..22: note = chemically synthesized
  source 1..22: mol_type = other DNA
ccagtattattgggttccctct

SEQ ID NO: 96253 - DNA, 22 bp, synthetic construct
  misc_feature 1..22: note = chemically synthesized
  source 1..22: mol_type = other DNA
ttgggttccctctctccctgtt

SEQ ID NO: 96254 - DNA, 22 bp, synthetic construct
  misc_feature 1..22: note = chemically synthesized
  source 1..22: mol_type = other DNA
ggttccctctctccctgttttt

SEQ ID NO: 96255 - DNA, 22 bp, synthetic construct
  misc_feature 1..22: note = chemically synthesized
  source 1..22: mol_type = other DNA
cctctctccctgtttttcttta

SEQ ID NO: 96256 - DNA, 22 bp, synthetic construct
  misc_feature 1..22: note = chemically synthesized
  source 1..22: mol_type = other DNA
tctccctgtttttctttaagca

SEQ ID NO: 96257 - DNA, 22 bp, synthetic construct
  misc_feature 1..22: note = chemically synthesized
  source 1..22: mol_type = other DNA
tccctgtttttctttaagcaat

SEQ ID NO: 96258 - DNA, 22 bp, synthetic construct
  misc_feature 1..22: note = chemically synthesized
  source 1..22: mol_type = other DNA
cctgtttttctttaagcaattg

SEQ ID NO: 96259 - DNA, 22 bp, synthetic construct
  misc_feature 1..22: note = chemically synthesized
  source 1..22: mol_type = other DNA
tttttctttaagcaattgtcta

SEQ ID NO: 96260 - DNA, 22 bp, synthetic construct
  misc_feature 1..22: note = chemically synthesized
  source 1..22: mol_type = other DNA
ttctttaagcaattgtctaatt

SEQ ID NO: 96261 - DNA, 22 bp, synthetic construct
  misc_feature 1..22: note = chemically synthesized
  source 1..22: mol_type = other DNA
tctttaagcaattgtctaattt

SEQ ID NO: 96262 - DNA, 22 bp, synthetic construct
  misc_feature 1..22: note = chemically synthesized
  source 1..22: mol_type = other DNA
ctttaagcaattgtctaatttt

SEQ ID NO: 96263 - DNA, 22 bp, synthetic construct
  misc_feature 1..22: note = chemically synthesized
  source 1..22: mol_type = other DNA
tttaagcaattgtctaattttt

SEQ ID NO: 96264 - DNA, 22 bp, synthetic construct
  misc_feature 1..22: note = chemically synthesized
  source 1..22: mol_type = other DNA
taagcaattgtctaatttttgt

SEQ ID NO: 96265 - DNA, 22 bp, synthetic construct
  misc_feature 1..22: note = chemically synthesized
  source 1..22: mol_type = other DNA
aagcaattgtctaatttttgta

SEQ ID NO: 96266 - DNA, 22 bp, synthetic construct
  misc_feature 1..22: note = chemically synthesized
  source 1..22: mol_type = other DNA
agcaattgtctaatttttgtaa

SEQ ID NO: 96267 - DNA, 22 bp, synthetic construct
  misc_feature 1..22: note = chemically synthesized
  source 1..22: mol_type = other DNA
tctaatttttgtaaatgtagaa

SEQ ID NO: 96268 - DNA, 22 bp, synthetic construct
  misc_feature 1..22: note = chemically synthesized
  source 1..22: mol_type = other DNA
atttttgtaaatgtagaatgtg

SEQ ID NO: 96269 - DNA, 22 bp, synthetic construct
  misc_feature 1..22: note = chemically synthesized
  source 1..22: mol_type = other DNA
ttgtaaatgtagaatgtgagtg

SEQ ID NO: 96270 - DNA, 22 bp, synthetic construct
  misc_feature 1..22: note = chemically synthesized
  source 1..22: mol_type = other DNA
tgtaaatgtagaatgtgagtgc

SEQ ID NO: 96271 - DNA, 22 bp, synthetic construct
  misc_feature 1..22: note = chemically synthesized
  source 1..22: mol_type = other DNA
gtaaatgtagaatgtgagtgct

SEQ ID NO: 96272 - DNA, 22 bp, synthetic construct
  misc_feature 1..22: note = chemically synthesized
  source 1..22: mol_type = other DNA
taaatgtagaatgtgagtgctg

SEQ ID NO: 96273 - DNA, 22 bp, synthetic construct
  misc_feature 1..22: note = chemically synthesized
  source 1..22: mol_type = other DNA
caagagttctcagcgggagttt

SEQ ID NO: 96274 - DNA, 22 bp, synthetic construct
  misc_feature 1..22: note = chemically synthesized
  source 1..22: mol_type = other DNA
tcagcgggagtttaaaatcccc

SEQ ID NO: 96275 - DNA, 22 bp, synthetic construct
  misc_feature 1..22: note = chemically synthesized
  source 1..22: mol_type = other DNA
agcgggagtttaaaatccccaa

SEQ ID NO: 96276 - DNA, 22 bp, synthetic construct
  misc_feature 1..22: note = chemically synthesized
  source 1..22: mol_type = other DNA
aaaatccccaacaaattcggaa

SEQ ID NO: 96277 - DNA, 22 bp, synthetic construct
  misc_feature 1..22: note = chemically synthesized
  source 1..22: mol_type = other DNA
aaatccccaacaaattcggaaa

SEQ ID NO: 96278 - DNA, 22 bp, synthetic construct
  misc_feature 1..22: note = chemically synthesized
  source 1..22: mol_type = other DNA
ggaaacaagccttcacttggtc

SEQ ID NO: 96279 - DNA, 22 bp, synthetic construct
  misc_feature 1..22: note = chemically synthesized
  source 1..22: mol_type = other DNA
cacttggtcacaatactgatgg

SEQ ID NO: 96280 - DNA, 22 bp, synthetic construct
  misc_feature 1..22: note = chemically synthesized
  source 1..22: mol_type = other DNA
acttggtcacaatactgatggg

SEQ ID NO: 96281 - DNA, 22 bp, synthetic construct
  misc_feature 1..22: note = chemically synthesized
  source 1..22: mol_type = other DNA
ggtcacaatactgatgggaaat

SEQ ID NO: 96282 - DNA, 22 bp, synthetic construct
  misc_feature 1..22: note = chemically synthesized
  source 1..22: mol_type = other DNA
gtcacaatactgatgggaaatt

SEQ ID NO: 96283 - DNA, 22 bp, synthetic construct
  misc_feature 1..22: note = chemically synthesized
  source 1..22: mol_type = other DNA
atgggaaatttaacatatttta

SEQ ID NO: 96284 - DNA, 22 bp, synthetic construct
  misc_feature 1..22: note = chemically synthesized
  source 1..22: mol_type = other DNA
aacatattttagaaaatgtgtc

SEQ ID NO: 96285 - DNA, 22 bp, synthetic construct
  misc_feature 1..22: note = chemically synthesized
  source 1..22: mol_type = other DNA
acatattttagaaaatgtgtct

SEQ ID NO: 96286 - DNA, 22 bp, synthetic construct
  misc_feature 1..22: note = chemically synthesized
  source 1..22: mol_type = other DNA
tagaaaatgtgtcttatttttc

SEQ ID NO: 96287 - DNA, 22 bp, synthetic construct
  misc_feature 1..22: note = chemically synthesized
  source 1..22: mol_type = other DNA
agaaaatgtgtcttatttttct

SEQ ID NO: 96288 - DNA, 22 bp, synthetic construct
  misc_feature 1..22: note = chemically synthesized
  source 1..22: mol_type = other DNA
gaaaatgtgtcttatttttctt

SEQ ID NO: 96289 - DNA, 22 bp, synthetic construct
  misc_feature 1..22: note = chemically synthesized
  source 1..22: mol_type = other DNA
atttttctttgagcaaatcttt

SEQ ID NO: 96290 - DNA, 22 bp, synthetic construct
  misc_feature 1..22: note = chemically synthesized
  source 1..22: mol_type = other DNA
tttttctttgagcaaatctttt

SEQ ID NO: 96291 - DNA, 22 bp, synthetic construct
  misc_feature 1..22: note = chemically synthesized
  source 1..22: mol_type = other DNA
ttctttgagcaaatcttttatt

SEQ ID NO: 96292 - DNA, 22 bp, synthetic construct
  misc_feature 1..22: note = chemically synthesized
  source 1..22: mol_type = other DNA
tctttgagcaaatcttttattt

SEQ ID NO: 96293 - DNA, 22 bp, synthetic construct
  misc_feature 1..22: note = chemically synthesized
  source 1..22: mol_type = other DNA
ctttgagcaaatcttttatttt

SEQ ID NO: 96294 - DNA, 22 bp, synthetic construct
  misc_feature 1..22: note = chemically synthesized
  source 1..22: mol_type = other DNA
tttgagcaaatcttttattttt

SEQ ID NO: 96295 - DNA, 22 bp, synthetic construct
  misc_feature 1..22: note = chemically synthesized
  source 1..22: mol_type = other DNA
tgagcaaatcttttattttttt

SEQ ID NO: 96296 - DNA, 22 bp, synthetic construct
  misc_feature 1..22: note = chemically synthesized
  source 1..22: mol_type = other DNA
gagcaaatcttttatttttttt

SEQ ID NO: 96297 - DNA, 22 bp, synthetic construct
  misc_feature 1..22: note = chemically synthesized
  source 1..22: mol_type = other DNA
agcaaatcttttattttttttg

SEQ ID NO: 96298 - DNA, 22 bp, synthetic construct
  misc_feature 1..22: note = chemically synthesized
  source 1..22: mol_type = other DNA
ttattttttttgcaaaaatctc

SEQ ID NO: 96299 - DNA, 22 bp, synthetic construct
  misc_feature 1..22: note = chemically synthesized
  source 1..22: mol_type = other DNA
tattttttttgcaaaaatctct

SEQ ID NO: 96300 - DNA, 22 bp, synthetic construct
  misc_feature 1..22: note = chemically synthesized
  source 1..22: mol_type = other DNA
attttttttgcaaaaatctctt

SEQ ID NO: 96301 - DNA, 22 bp, synthetic construct
  misc_feature 1..22: note = chemically synthesized
  source 1..22: mol_type = other DNA
ttttttttgcaaaaatctcttt

SEQ ID NO: 96302 - DNA, 22 bp, synthetic construct
  misc_feature 1..22: note = chemically synthesized
  source 1..22: mol_type = other DNA
tttttgcaaaaatctctttcta

SEQ ID NO: 96303 - DNA, 22 bp, synthetic construct
  misc_feature 1..22: note = chemically synthesized
  source 1..22: mol_type = other DNA
ttttgcaaaaatctctttctaa

SEQ ID NO: 96304 - DNA, 22 bp, synthetic construct
  misc_feature 1..22: note = chemically synthesized
  source 1..22: mol_type = other DNA
tttgcaaaaatctctttctaaa

SEQ ID NO: 96305 - DNA, 22 bp, synthetic construct
  misc_feature 1..22: note = chemically synthesized
  source 1..22: mol_type = other DNA
ttgcaaaaatctctttctaaac

SEQ ID NO: 96306 - DNA, 22 bp, synthetic construct
  misc_feature 1..22: note = chemically synthesized
  source 1..22: mol_type = other DNA
tgcaaaaatctctttctaaacc

SEQ ID NO: 96307 - DNA, 22 bp, synthetic construct
  misc_feature 1..22: note = chemically synthesized
  source 1..22: mol_type = other DNA
gcaaaaatctctttctaaacct

SEQ ID NO: 96308 - DNA, 22 bp, synthetic construct
  misc_feature 1..22: note = chemically synthesized
  source 1..22: mol_type = other DNA
caaaaatctctttctaaacctc

SEQ ID NO: 96309 - DNA, 22 bp, synthetic construct
  misc_feature 1..22: note = chemically synthesized
  source 1..22: mol_type = other DNA
tttctaaacctcaattatcatg

SEQ ID NO: 96310 - DNA, 22 bp, synthetic construct
  misc_feature 1..22: note = chemically synthesized
  source 1..22: mol_type = other DNA
tctaaacctcaattatcatgac

SEQ ID NO: 96311 - DNA, 22 bp, synthetic construct
  misc_feature 1..22: note = chemically synthesized
  source 1..22: mol_type = other DNA
ctaaacctcaattatcatgacc

SEQ ID NO: 96312 - DNA, 22 bp, synthetic construct
  misc_feature 1..22: note = chemically synthesized
  source 1..22: mol_type = other DNA
taaacctcaattatcatgaccc

SEQ ID NO: 96313 - DNA, 22 bp, synthetic construct
  misc_feature 1..22: note = chemically synthesized
  source 1..22: mol_type = other DNA
aacctcaattatcatgacccac

SEQ ID NO: 96314 - DNA, 22 bp, synthetic construct
  misc_feature 1..22: note = chemically synthesized
  source 1..22: mol_type = other DNA
aattatcatgacccacataaaa

SEQ ID NO: 96315 - DNA, 22 bp, synthetic construct
  misc_feature 1..22: note = chemically synthesized
  source 1..22: mol_type = other DNA
tcatgacccacataaaataagg

SEQ ID NO: 96316 - DNA, 22 bp, synthetic construct
  misc_feature 1..22: note = chemically synthesized
  source 1..22: mol_type = other DNA
ctatttccttgaaatggacttt

SEQ ID NO: 96317 - DNA, 22 bp, synthetic construct
  misc_feature 1..22: note = chemically synthesized
  source 1..22: mol_type = other DNA
tatttccttgaaatggactttc

SEQ ID NO: 96318 - DNA, 22 bp, synthetic construct
  misc_feature 1..22: note = chemically synthesized
  source 1..22: mol_type = other DNA
tttccttgaaatggactttcat

SEQ ID NO: 96319 - DNA, 22 bp, synthetic construct
  misc_feature 1..22: note = chemically synthesized
  source 1..22: mol_type = other DNA
ccttgaaatggactttcatcta

SEQ ID NO: 96320 - DNA, 22 bp, synthetic construct
  misc_feature 1..22: note = chemically synthesized
  source 1..22: mol_type = other DNA
cttgaaatggactttcatctac

SEQ ID NO: 96321 - DNA, 22 bp, synthetic construct
  misc_feature 1..22: note = chemically synthesized
  source 1..22: mol_type = other DNA
gaaatggactttcatctaccaa

SEQ ID NO: 96322 - DNA, 22 bp, synthetic construct
  misc_feature 1..22: note = chemically synthesized
  source 1..22: mol_type = other DNA
aaatggactttcatctaccaaa

SEQ ID NO: 96323 - DNA, 22 bp, synthetic construct
  misc_feature 1..22: note = chemically synthesized
  source 1..22: mol_type = other DNA
tcatctaccaaaagccaaattt

SEQ ID NO: 96324 - DNA, 22 bp, synthetic construct
  misc_feature 1..22: note = chemically synthesized
  source 1..22: mol_type = other DNA
catctaccaaaagccaaatttc

SEQ ID NO: 96325 - DNA, 22 bp, synthetic construct
  misc_feature 1..22: note = chemically synthesized
  source 1..22: mol_type = other DNA
atctaccaaaagccaaatttca

SEQ ID NO: 96326 - DNA, 22 bp, synthetic construct
  misc_feature 1..22: note = chemically synthesized
  source 1..22: mol_type = other DNA
ccaaaagccaaatttcattctt

SEQ ID NO: 96327 - DNA, 22 bp, synthetic construct
  misc_feature 1..22: note = chemically synthesized
  source 1..22: mol_type = other DNA
cattcttctttcacaagtctac

SEQ ID NO: 96328 - DNA, 22 bp, synthetic construct
  misc_feature 1..22: note = chemically synthesized
  source 1..22: mol_type = other DNA
attcttctttcacaagtctaca

SEQ ID NO: 96329 - DNA, 22 bp, synthetic construct
  misc_feature 1..22: note = chemically synthesized
  source 1..22: mol_type = other DNA
ttctttcacaagtctacaattc

SEQ ID NO: 96330 - DNA, 22 bp, synthetic construct
  misc_feature 1..22: note = chemically synthesized
  source 1..22: mol_type = other DNA
ctttcacaagtctacaattcta

SEQ ID NO: 96331 - DNA, 22 bp, synthetic construct
  misc_feature 1..22: note = chemically synthesized
  source 1..22: mol_type = other DNA
tttcacaagtctacaattctat

SEQ ID NO: 96332 - DNA, 22 bp, synthetic construct
  misc_feature 1..22: note = chemically synthesized
  source 1..22: mol_type = other DNA
tcacaagtctacaattctataa

SEQ ID NO: 96333 - DNA, 22 bp, synthetic construct
  misc_feature 1..22: note = chemically synthesized
  source 1..22: mol_type = other DNA
cacaagtctacaattctataat

SEQ ID NO: 96334 - DNA, 22 bp, synthetic construct
  misc_feature 1..22: note = chemically synthesized
  source 1..22: mol_type = other DNA
acaagtctacaattctataata

SEQ ID NO: 96335 - DNA, 22 bp, synthetic construct
  misc_feature 1..22: note = chemically synthesized
  source 1..22: mol_type = other DNA
caattctataatacaattctct

SEQ ID NO: 96336 - DNA, 22 bp, synthetic construct
  misc_feature 1..22: note = chemically synthesized
  source 1..22: mol_type = other DNA
tataatacaattctctgggata

SEQ ID NO: 96337 - DNA, 22 bp, synthetic construct
  misc_feature 1..22: note = chemically synthesized
  source 1..22: mol_type = other DNA
taatacaattctctgggataaa

SEQ ID NO: 96338 - DNA, 22 bp, synthetic construct
  misc_feature 1..22: note = chemically synthesized
  source 1..22: mol_type = other DNA
tctgggataaacacatcaagtt

SEQ ID NO: 96339 - DNA, 22 bp, synthetic construct
  misc_feature 1..22: note = chemically synthesized
  source 1..22: mol_type = other DNA
tgggataaacacatcaagttct

SEQ ID NO: 96340 - DNA, 22 bp, synthetic construct
  misc_feature 1..22: note = chemically synthesized
  source 1..22: mol_type = other DNA
ggataaacacatcaagttctgg

SEQ ID NO: 96341 - DNA, 22 bp, synthetic construct
  misc_feature 1..22: note = chemically synthesized
  source 1..22: mol_type = other DNA
tggcaagatttcctgaaaagtt

SEQ ID NO: 96342 - DNA, 22 bp, synthetic construct
  misc_feature 1..22: note = chemically synthesized
  source 1..22: mol_type = other DNA
gcaagatttcctgaaaagttaa

SEQ ID NO: 96343 - DNA, 22 bp, synthetic construct
  misc_feature 1..22: note = chemically synthesized
  source 1..22: mol_type = other DNA
cctgaaaagttaagccaattca

SEQ ID NO: 96344 - DNA, 22 bp, synthetic construct
  misc_feature 1..22: note = chemically synthesized
  source 1..22: mol_type = other DNA
ctgaaaagttaagccaattcag

SEQ ID NO: 96345 - DNA, 22 bp, synthetic construct
  misc_feature 1..22: note = chemically synthesized
  source 1..22: mol_type = other DNA
aaaagttaagccaattcaggct

SEQ ID NO: 96346 - DNA, 22 bp, synthetic construct
  misc_feature 1..22: note = chemically synthesized
  source 1..22: mol_type = other DNA
agccaattcaggctgttagtag

SEQ ID NO: 96347 - DNA, 22 bp, synthetic construct
  misc_feature 1..22: note = chemically synthesized
  source 1..22: mol_type = other DNA
aggctgttagtagtcctttact

SEQ ID NO: 96348 - DNA, 22 bp, synthetic construct
  misc_feature 1..22: note = chemically synthesized
  source 1..22: mol_type = other DNA
ttagtagtcctttactgtcact

SEQ ID NO: 96349 - DNA, 22 bp, synthetic construct
  misc_feature 1..22: note = chemically synthesized
  source 1..22: mol_type = other DNA
gtagtcctttactgtcactagt

SEQ ID NO: 96350 - DNA, 22 bp, synthetic construct
  misc_feature 1..22: note = chemically synthesized
  source 1..22: mol_type = other DNA
tactgtcactagttctgaatca

SEQ ID NO: 96351 - DNA, 22 bp, synthetic construct
  misc_feature 1..22: note = chemically synthesized
  source 1..22: mol_type = other DNA
actgtcactagttctgaatcat

SEQ ID NO: 96352 - DNA, 22 bp, synthetic construct
  misc_feature 1..22: note = chemically synthesized
  source 1..22: mol_type = other DNA
ctgtcactagttctgaatcatg

SEQ ID NO: 96353 - DNA, 22 bp, synthetic construct
  misc_feature 1..22: note = chemically synthesized
  source 1..22: mol_type = other DNA
tcactagttctgaatcatgtaa

SEQ ID NO: 96354 - DNA, 22 bp, synthetic construct
  misc_feature 1..22: note = chemically synthesized
  source 1..22: mol_type = other DNA
gttctgaatcatgtaagttttg

SEQ ID NO: 96355 - DNA, 22 bp, synthetic construct
  misc_feature 1..22: note = chemically synthesized
  source 1..22: mol_type = other DNA
tgaatcatgtaagttttggtta

SEQ ID NO: 96356 - DNA, 22 bp, synthetic construct
  misc_feature 1..22: note = chemically synthesized
  source 1..22: mol_type = other DNA
aatcatgtaagttttggttatg

SEQ ID NO: 96357 - DNA, 22 bp, synthetic construct
  misc_feature 1..22: note = chemically synthesized
  source 1..22: mol_type = other DNA
tggttatgctcactagaagtct

SEQ ID NO: 96358 - DNA, 22 bp, synthetic construct
  misc_feature 1..22: note = chemically synthesized
  source 1..22: mol_type = other DNA
ggttatgctcactagaagtctg

SEQ ID NO: 96359 - DNA, 22 bp, synthetic construct
  misc_feature 1..22: note = chemically synthesized
  source 1..22: mol_type = other DNA
gttatgctcactagaagtctgc

SEQ ID NO: 96360 - DNA, 22 bp, synthetic construct
  misc_feature 1..22: note = chemically synthesized
  source 1..22: mol_type = other DNA
tgctcactagaagtctgctgtt

SEQ ID NO: 96361 - DNA, 22 bp, synthetic construct
  misc_feature 1..22: note = chemically synthesized
  source 1..22: mol_type = other DNA
actagaagtctgctgttctaac

SEQ ID NO: 96362 - DNA, 22 bp, synthetic construct
  misc_feature 1..22: note = chemically synthesized
  source 1..22: mol_type = other DNA
gaagtctgctgttctaacatca

SEQ ID NO: 96363 - DNA, 22 bp, synthetic construct
  misc_feature 1..22: note = chemically synthesized
  source 1..22: mol_type = other DNA
ctgttctaacatcaagctcgac

SEQ ID NO: 96364 - DNA, 22 bp, synthetic construct
  misc_feature 1..22: note = chemically synthesized
  source 1..22: mol_type = other DNA
ttctaacatcaagctcgaccca

SEQ ID NO: 96365 - DNA, 22 bp, synthetic construct
  misc_feature 1..22: note = chemically synthesized
  source 1..22: mol_type = other DNA
taacatcaagctcgacccatga

SEQ ID NO: 96366 - DNA, 22 bp, synthetic construct
  misc_feature 1..22: note = chemically synthesized
  source 1..22: mol_type = other DNA
acatcaagctcgacccatgatt

SEQ ID NO: 96367 - DNA, 22 bp, synthetic construct
  misc_feature 1..22: note = chemically synthesized
  source 1..22: mol_type = other DNA
gacccatgatttctgagatctt

SEQ ID NO: 96368 - DNA, 22 bp, synthetic construct
  misc_feature 1..22: note = chemically synthesized
  source 1..22: mol_type = other DNA
ctgagatctttgttggtctttc

SEQ ID NO: 96369 - DNA, 22 bp, synthetic construct
  misc_feature 1..22: note = chemically synthesized
  source 1..22: mol_type = other DNA
tgagatctttgttggtctttcc

SEQ ID NO: 96370 - DNA, 22 bp, synthetic construct
  misc_feature 1..22: note = chemically synthesized
  source 1..22: mol_type = other DNA
agatctttgttggtctttccaa

SEQ ID NO: 96371 - DNA, 22 bp, synthetic construct
  misc_feature 1..22: note = chemically synthesized
  source 1..22: mol_type = other DNA
tgttggtctttccaataagatt

SEQ ID NO: 96372 - DNA, 22 bp, synthetic construct
  misc_feature 1..22: note = chemically synthesized
  source 1..22: mol_type = other DNA
gttggtctttccaataagatta

SEQ ID NO: 96373 - DNA, 22 bp, synthetic construct
  misc_feature 1..22: note = chemically synthesized
  source 1..22: mol_type = other DNA
ttggtctttccaataagattat

SEQ ID NO: 96374 - DNA, 22 bp, synthetic construct
  misc_feature 1..22: note = chemically synthesized
  source 1..22: mol_type = other DNA
gtctttccaataagattatgag

SEQ ID NO: 96375 - DNA, 22 bp, synthetic construct
  misc_feature 1..22: note = chemically synthesized
  source 1..22: mol_type = other DNA
tccaataagattatgagcttca

SEQ ID NO: 96376 - DNA, 22 bp, synthetic construct
  misc_feature 1..22: note = chemically synthesized
  source 1..22: mol_type = other DNA
ccaataagattatgagcttcaa

SEQ ID NO: 96377 - DNA, 22 bp, synthetic construct
  misc_feature 1..22: note = chemically synthesized
  source 1..22: mol_type = other DNA
caataagattatgagcttcaat

SEQ ID NO: 96378 - DNA, 22 bp, synthetic construct
  misc_feature 1..22: note = chemically synthesized
  source 1..22: mol_type = other DNA
tgagcttcaattaatgtcaaaa

SEQ ID NO: 96379 - DNA, 22 bp, synthetic construct
  misc_feature 1..22: note = chemically synthesized
  source 1..22: mol_type = other DNA
caattaatgtcaaaatataaag

SEQ ID NO: 96380 - DNA, 22 bp, synthetic construct
  misc_feature 1..22: note = chemically synthesized
  source 1..22: mol_type = other DNA
aattaatgtcaaaatataaagc

SEQ ID NO: 96381 - DNA, 22 bp, synthetic construct
  misc_feature 1..22: note = chemically synthesized
  source 1..22: mol_type = other DNA
atgtcaaaatataaagccaaaa

SEQ ID NO: 96382 - DNA, 22 bp, synthetic construct
  misc_feature 1..22: note = chemically synthesized
  source 1..22: mol_type = other DNA
aactcaccttgaagttctcagg

SEQ ID NO: 96383 - DNA, 22 bp, synthetic construct
  misc_feature 1..22: note = chemically synthesized
  source 1..22: mol_type = other DNA
accttgaagttctcaggatcca

SEQ ID NO: 96384 - DNA, 22 bp, synthetic construct
  misc_feature 1..22: note = chemically synthesized
  source 1..22: mol_type = other DNA
gaagttctcaggatccacatgc

SEQ ID NO: 96385 - DNA, 22 bp, synthetic construct
  misc_feature 1..22: note = chemically synthesized
  source 1..22: mol_type = other DNA
aagttctcaggatccacatgca

SEQ ID NO: 96386 - DNA, 22 bp, synthetic construct
  misc_feature 1..22: note = chemically synthesized
  source 1..22: mol_type = other DNA
tcaggatccacatgcagcttgt

SEQ ID NO: 96387 - DNA, 22 bp, synthetic construct
  misc_feature 1..22: note = chemically synthesized
  source 1..22: mol_type = other DNA
aggatccacatgcagcttgtca

SEQ ID NO: 96388 - DNA, 22 bp, synthetic construct
  misc_feature 1..22: note = chemically synthesized
  source 1..22: mol_type = other DNA
gtcacagtgcagctcactcagc

SEQ ID NO: 96389 - DNA, 22 bp, synthetic construct
  misc_feature 1..22: note = chemically synthesized
  source 1..22: mol_type = other DNA
tcacagtgcagctcactcagct

SEQ ID NO: 96390 - DNA, 22 bp, synthetic construct
  misc_feature 1..22: note = chemically synthesized
  source 1..22: mol_type = other DNA
actcagcttagcaaaggcgggc

SEQ ID NO: 96391 - DNA, 22 bp, synthetic construct
  misc_feature 1..22: note = chemically synthesized
  source 1..22: mol_type = other DNA
agcttagcaaaggcgggcttga

SEQ ID NO: 96392 - DNA, 22 bp, synthetic construct
  misc_feature 1..22: note = chemically synthesized
  source 1..22: mol_type = other DNA
agcaaaggcgggcttgaggttg

SEQ ID NO: 96393 - DNA, 22 bp, synthetic construct
  misc_feature 1..22: note = chemically synthesized
  source 1..22: mol_type = other DNA
gcaaaggcgggcttgaggttgt

SEQ ID NO: 96394 - DNA, 22 bp, synthetic construct
  misc_feature 1..22: note = chemically synthesized
  source 1..22: mol_type = other DNA
gaggttgtccatgtttttaata

SEQ ID NO: 96395 - DNA, 22 bp, synthetic construct
  misc_feature 1..22: note = chemically synthesized
  source 1..22: mol_type = other DNA
aggttgtccatgtttttaatag

SEQ ID NO: 96396 - DNA, 22 bp, synthetic construct
  misc_feature 1..22: note = chemically synthesized
  source 1..22: mol_type = other DNA
tccatgtttttaatagcatctc

SEQ ID NO: 96397 - DNA, 22 bp, synthetic construct
  misc_feature 1..22: note = chemically synthesized
  source 1..22: mol_type = other DNA
ttaatagcatctccaaaggaag

SEQ ID NO: 96398 - DNA, 22 bp, synthetic construct
  misc_feature 1..22: note = chemically synthesized
  source 1..22: mol_type = other DNA
taatagcatctccaaaggaagt

SEQ ID NO: 96399 - DNA, 22 bp, synthetic construct
  misc_feature 1..22: note = chemically synthesized
  source 1..22: mol_type = other DNA
aatagcatctccaaaggaagtc

SEQ ID NO: 96400 - DNA, 22 bp, synthetic construct
  misc_feature 1..22: note = chemically synthesized
  source 1..22: mol_type = other DNA
atagcatctccaaaggaagtca

SEQ ID NO: 96401 - DNA, 22 bp, synthetic construct
  misc_feature 1..22: note = chemically synthesized
  source 1..22: mol_type = other DNA
caaaggaagtcagcaccttctt

SEQ ID NO: 96402 - DNA, 22 bp, synthetic construct
  misc_feature 1..22: note = chemically synthesized
  source 1..22: mol_type = other DNA
cttgccatgggccttgaccttg

SEQ ID NO: 96403 - DNA, 22 bp, synthetic construct
  misc_feature 1..22: note = chemically synthesized
  source 1..22: mol_type = other DNA
ttgccatgggccttgaccttgg

SEQ ID NO: 96404 - DNA, 22 bp, synthetic construct
  misc_feature 1..22: note = chemically synthesized
  source 1..22: mol_type = other DNA
gccatgggccttgaccttgggg

SEQ ID NO: 96405 - DNA, 22 bp, synthetic construct
  misc_feature 1..22: note = chemically synthesized
  source 1..22: mol_type = other DNA
ccatgggccttgaccttggggt

SEQ ID NO: 96406 - DNA, 22 bp, synthetic construct
  misc_feature 1..22: note = chemically synthesized
  source 1..22: mol_type = other DNA
gaccttggggttgcccaggatg

SEQ ID NO: 96407 - DNA, 22 bp, synthetic construct
  misc_feature 1..22: note = chemically synthesized
  source 1..22: mol_type = other DNA
accttggggttgcccaggatgg

SEQ ID NO: 96408 - DNA, 22 bp, synthetic construct
  misc_feature 1..22: note = chemically synthesized
  source 1..22: mol_type = other DNA
ggggttgcccaggatggcagag

SEQ ID NO: 96409 - DNA, 22 bp, synthetic construct
  misc_feature 1..22: note = chemically synthesized
  source 1..22: mol_type = other DNA
gggttgcccaggatggcagagg

SEQ ID NO: 96410 - DNA, 22 bp, synthetic construct
  misc_feature 1..22: note = chemically synthesized
  source 1..22: mol_type = other DNA
cccaggatggcagagggagacg

SEQ ID NO: 96411 - DNA, 22 bp, synthetic construct
  misc_feature 1..22: note = chemically synthesized
  source 1..22: mol_type = other DNA
ccaaagctgtcaaaaaatctct

SEQ ID NO: 96412 - DNA, 22 bp, synthetic construct
  misc_feature 1..22: note = chemically synthesized
  source 1..22: mol_type = other DNA
caaagctgtcaaaaaatctctg

SEQ ID NO: 96413 - DNA, 22 bp, synthetic construct
  misc_feature 1..22: note = chemically synthesized
  source 1..22: mol_type = other DNA
tcaaaaaatctctgggtccagg

SEQ ID NO: 96414 - DNA, 22 bp, synthetic construct
  misc_feature 1..22: note = chemically synthesized
  source 1..22: mol_type = other DNA
tgggtccaggggtaaacaacga

SEQ ID NO: 96415 - DNA, 22 bp, synthetic construct
  misc_feature 1..22: note = chemically synthesized
  source 1..22: mol_type = other DNA
ggtccaggggtaaacaacgagg

SEQ ID NO: 96416 - DNA, 22 bp, synthetic construct
  misc_feature 1..22: note = chemically synthesized
  source 1..22: mol_type = other DNA
tgaaatgacaccatatcagata

SEQ ID NO: 96417 - DNA, 22 bp, synthetic construct
  misc_feature 1..22: note = chemically synthesized
  source 1..22: mol_type = other DNA
gagatgcaaaaaatcttgagga

SEQ ID NO: 96418 - DNA, 22 bp, synthetic construct
  misc_feature 1..22: note = chemically synthesized
  source 1..22: mol_type = other DNA
gaggactttcccaatcaacttg

SEQ ID NO: 96419 - DNA, 22 bp, synthetic construct
  misc_feature 1..22: note = chemically synthesized
  source 1..22: mol_type = other DNA
aggactttcccaatcaacttgc

SEQ ID NO: 96420 - DNA, 22 bp, synthetic construct
  misc_feature 1..22: note = chemically synthesized
  source 1..22: mol_type = other DNA
tcccaatcaacttgctagggta

SEQ ID NO: 96421 - DNA, 22 bp, synthetic construct
  misc_feature 1..22: note = chemically synthesized
  source 1..22: mol_type = other DNA
cccaatcaacttgctagggtaa

SEQ ID NO: 96422 - DNA, 22 bp, synthetic construct
  misc_feature 1..22: note = chemically synthesized
  source 1..22: mol_type = other DNA
ccaatcaacttgctagggtaat

SEQ ID NO: 96423 - DNA, 22 bp, synthetic construct
  misc_feature 1..22: note = chemically synthesized
  source 1..22: mol_type = other DNA
gctagggtaatattcacccttc

SEQ ID NO: 96424 - DNA, 22 bp, synthetic construct
  misc_feature 1..22: note = chemically synthesized
  source 1..22: mol_type = other DNA
ctagggtaatattcacccttca

SEQ ID NO: 96425 - DNA, 22 bp, synthetic construct
  misc_feature 1..22: note = chemically synthesized
  source 1..22: mol_type = other DNA
gggtaatattcacccttcattc

SEQ ID NO: 96426 - DNA, 22 bp, synthetic construct
  misc_feature 1..22: note = chemically synthesized
  source 1..22: mol_type = other DNA
acccttcattcccatgcattga

SEQ ID NO: 96427 - DNA, 22 bp, synthetic construct
  misc_feature 1..22: note = chemically synthesized
  source 1..22: mol_type = other DNA
cattcccatgcattgagaacca

SEQ ID NO: 96428 - DNA, 22 bp, synthetic construct
  misc_feature 1..22: note = chemically synthesized
  source 1..22: mol_type = other DNA
attcccatgcattgagaaccaa

SEQ ID NO: 96429 - DNA, 22 bp, synthetic construct
  misc_feature 1..22: note = chemically synthesized
  source 1..22: mol_type = other DNA
ccatgcattgagaaccaatgct

SEQ ID NO: 96430 - DNA, 22 bp, synthetic construct
  misc_feature 1..22: note = chemically synthesized
  source 1..22: mol_type = other DNA
agaaccaatgcttacctgccca

SEQ ID NO: 96431 - DNA, 22 bp, synthetic construct
  misc_feature 1..22: note = chemically synthesized
  source 1..22: mol_type = other DNA
acctgcccaaggcttcacctcc

SEQ ID NO: 96432 - DNA, 22 bp, synthetic construct
  misc_feature 1..22: note = chemically synthesized
  source 1..22: mol_type = other DNA
cctgcccaaggcttcacctcca

SEQ ID NO: 96433 - DNA, 22 bp, synthetic construct
  misc_feature 1..22: note = chemically synthesized
  source 1..22: mol_type = other DNA
cccaaggcttcacctccagcct

SEQ ID NO: 96434 - DNA, 22 bp, synthetic construct
  misc_feature 1..22: note = chemically synthesized
  source 1..22: mol_type = other DNA
cacctccagcctcttccacatt

SEQ ID NO: 96435 - DNA, 22 bp, synthetic construct
  misc_feature 1..22: note = chemically synthesized
  source 1..22: mol_type = other DNA
acctccagcctcttccacattc

SEQ ID NO: 96436 - DNA, 22 bp, synthetic construct
  misc_feature 1..22: note = chemically synthesized
  source 1..22: mol_type = other DNA
cagcctcttccacattcatctt

SEQ ID NO: 96437 - DNA, 22 bp, synthetic construct
  misc_feature 1..22: note = chemically synthesized
  source 1..22: mol_type = other DNA
ttccacattcatcttgctccac

SEQ ID NO: 96438 - DNA, 22 bp, synthetic construct
  misc_feature 1..22: note = chemically synthesized
  source 1..22: mol_type = other DNA
ccacattcatcttgctccacag

SEQ ID NO: 96439 - DNA, 22 bp, synthetic construct
  misc_feature 1..22: note = chemically synthesized
  source 1..22: mol_type = other DNA
cacattcatcttgctccacagg

SEQ ID NO: 96440 - DNA, 22 bp, synthetic construct
  misc_feature 1..22: note = chemically synthesized
  source 1..22: mol_type = other DNA
atcttgctccacaggctagtga

SEQ ID NO: 96441 - DNA, 22 bp, synthetic construct
  misc_feature 1..22: note = chemically synthesized
  source 1..22: mol_type = other DNA
gctccacaggctagtgacggca

SEQ ID NO: 96442 - DNA, 22 bp, synthetic construct
  misc_feature 1..22: note = chemically synthesized
  source 1..22: mol_type = other DNA
ctccacaggctagtgacggcag

SEQ ID NO: 96443 - DNA, 22 bp, synthetic construct
  misc_feature 1..22: note = chemically synthesized
  source 1..22: mol_type = other DNA
cacaggctagtgacggcagcct

SEQ ID NO: 96444 - DNA, 22 bp, synthetic construct
  misc_feature 1..22: note = chemically synthesized
  source 1..22: mol_type = other DNA
gtgacggcagccttctcctcag

SEQ ID NO: 96445 - DNA, 22 bp, synthetic construct
  misc_feature 1..22: note = chemically synthesized
  source 1..22: mol_type = other DNA
ctcctcagcagtaaaatgcacc

SEQ ID NO: 96446 - DNA, 22 bp, synthetic construct
  misc_feature 1..22: note = chemically synthesized
  source 1..22: mol_type = other DNA
tcctcagcagtaaaatgcacca

SEQ ID NO: 96447 - DNA, 22 bp, synthetic construct
  misc_feature 1..22: note = chemically synthesized
  source 1..22: mol_type = other DNA
ctcagcagtaaaatgcaccatg

SEQ ID NO: 96448 - DNA, 22 bp, synthetic construct
  misc_feature 1..22: note = chemically synthesized
  source 1..22: mol_type = other DNA
agcagtaaaatgcaccatgatg

SEQ ID NO: 96449 - DNA, 22 bp, synthetic construct
  misc_feature 1..22: note = chemically synthesized
  source 1..22: mol_type = other DNA
agagcttgctagtgattgcagc

SEQ ID NO: 96450 - DNA, 22 bp, synthetic construct
  misc_feature 1..22: note = chemically synthesized
  source 1..22: mol_type = other DNA
gctagtgattgcagctgtgtcg

SEQ ID NO: 96451 - DNA, 22 bp, synthetic construct
  misc_feature 1..22: note = chemically synthesized
  source 1..22: mol_type = other DNA
ctagtgattgcagctgtgtcgg

SEQ ID NO: 96452 - DNA, 22 bp, synthetic construct
  misc_feature 1..22: note = chemically synthesized
  source 1..22: mol_type = other DNA
gtgattgcagctgtgtcggaag

SEQ ID NO: 96453 - DNA, 22 bp, synthetic construct
  misc_feature 1..22: note = chemically synthesized
  source 1..22: mol_type = other DNA
cagctgtgtcggaagcagatat

SEQ ID NO: 96454 - DNA, 22 bp, synthetic construct
  misc_feature 1..22: note = chemically synthesized
  source 1..22: mol_type = other DNA
tgtcggaagcagatatgtgctg

SEQ ID NO: 96455 - DNA, 22 bp, synthetic construct
  misc_feature 1..22: note = chemically synthesized
  source 1..22: mol_type = other DNA
ctgcctctctgtctggcctttt

SEQ ID NO: 96456 - DNA, 22 bp, synthetic construct
  misc_feature 1..22: note = chemically synthesized
  source 1..22: mol_type = other DNA
cctctctgtctggccttttatt

SEQ ID NO: 96457 - DNA, 22 bp, synthetic construct
  misc_feature 1..22: note = chemically synthesized
  source 1..22: mol_type = other DNA
tctgtctggccttttattcttt

SEQ ID NO: 96458 - DNA, 22 bp, synthetic construct
  misc_feature 1..22: note = chemically synthesized
  source 1..22: mol_type = other DNA
tgtctggccttttattctttac

SEQ ID NO: 96459 - DNA, 22 bp, synthetic construct
  misc_feature 1..22: note = chemically synthesized
  source 1..22: mol_type = other DNA
tctggccttttattctttactg

SEQ ID NO: 96460 - DNA, 22 bp, synthetic construct
  misc_feature 1..22: note = chemically synthesized
  source 1..22: mol_type = other DNA
gccttttattctttactgccga

SEQ ID NO: 96461 - DNA, 22 bp, synthetic construct
  misc_feature 1..22: note = chemically synthesized
  source 1..22: mol_type = other DNA
ttattctttactgccgaagttc

SEQ ID NO: 96462 - DNA, 22 bp, synthetic construct
  misc_feature 1..22: note = chemically synthesized
  source 1..22: mol_type = other DNA
tattctttactgccgaagttct

SEQ ID NO: 96463 - DNA, 22 bp, synthetic construct
  misc_feature 1..22: note = chemically synthesized
  source 1..22: mol_type = other DNA
attctttactgccgaagttctg

SEQ ID NO: 96464 - DNA, 22 bp, synthetic construct
  misc_feature 1..22: note = chemically synthesized
  source 1..22: mol_type = other DNA
ttctttactgccgaagttctgg

SEQ ID NO: 96465 - DNA, 22 bp, synthetic construct
  misc_feature 1..22: note = chemically synthesized
  source 1..22: mol_type = other DNA
tttactgccgaagttctggccc

SEQ ID NO: 96466 - DNA, 22 bp, synthetic construct
  misc_feature 1..22: note = chemically synthesized
  source 1..22: mol_type = other DNA
tactgccgaagttctggccccc

SEQ ID NO: 96467 - DNA, 22 bp, synthetic construct
  misc_feature 1..22: note = chemically synthesized
  source 1..22: mol_type = other DNA
actgccgaagttctggccccct

SEQ ID NO: 96468 - DNA, 22 bp, synthetic construct
  misc_feature 1..22: note = chemically synthesized
  source 1..22: mol_type = other DNA
ctgccgaagttctggccccctg

SEQ ID NO: 96469 - DNA, 22 bp, synthetic construct
  misc_feature 1..22: note = chemically synthesized
  source 1..22: mol_type = other DNA
ccgaagttctggccccctgttc

SEQ ID NO: 96470 - DNA, 22 bp, synthetic construct
  misc_feature 1..22: note = chemically synthesized
  source 1..22: mol_type = other DNA
tggccccctgttctccatggta

SEQ ID NO: 96471 - DNA, 22 bp, synthetic construct
  misc_feature 1..22: note = chemically synthesized
  source 1..22: mol_type = other DNA
gccccctgttctccatggtact

SEQ ID NO: 96472 - DNA, 22 bp, synthetic construct
  misc_feature 1..22: note = chemically synthesized
  source 1..22: mol_type = other DNA
ttctccatggtacttaaaagtc

SEQ ID NO: 96473 - DNA, 22 bp, synthetic construct
  misc_feature 1..22: note = chemically synthesized
  source 1..22: mol_type = other DNA
tccatggtacttaaaagtcatt

SEQ ID NO: 96474 - DNA, 22 bp, synthetic construct
  misc_feature 1..22: note = chemically synthesized
  source 1..22: mol_type = other DNA
catggtacttaaaagtcattgg

SEQ ID NO: 96475 - DNA, 22 bp, synthetic construct
  misc_feature 1..22: note = chemically synthesized
  source 1..22: mol_type = other DNA
aaaagtcattggtcaaggctga

SEQ ID NO: 96476 - DNA, 22 bp, synthetic construct
  misc_feature 1..22: note = chemically synthesized
  source 1..22: mol_type = other DNA
aaagtcattggtcaaggctgac

SEQ ID NO: 96477 - DNA, 22 bp, synthetic construct
  misc_feature 1..22: note = chemically synthesized
  source 1..22: mol_type = other DNA
gtcaaggctgacctgtgtccct

SEQ ID NO: 96478 - DNA, 22 bp, synthetic construct
  misc_feature 1..22: note = chemically synthesized
  source 1..22: mol_type = other DNA
acctgtgtccctcaggggtgga

SEQ ID NO: 96479 - DNA, 22 bp, synthetic construct
  misc_feature 1..22: note = chemically synthesized
  source 1..22: mol_type = other DNA
tgtccctcaggggtggagtcag

SEQ ID NO: 96480 - DNA, 22 bp, synthetic construct
  misc_feature 1..22: note = chemically synthesized
  source 1..22: mol_type = other DNA
aggggtggagtcaggtccggag

SEQ ID NO: 96481 - DNA, 22 bp, synthetic construct
  misc_feature 1..22: note = chemically synthesized
  source 1..22: mol_type = other DNA
agtttgtgataatgtgtgctgg

SEQ ID NO: 96482 - DNA, 22 bp, synthetic construct
  misc_feature 1..22: note = chemically synthesized
  source 1..22: mol_type = other DNA
gtgataatgtgtgctggatcct

SEQ ID NO: 96483 - DNA, 22 bp, synthetic construct
  misc_feature 1..22: note = chemically synthesized
  source 1..22: mol_type = other DNA
tgataatgtgtgctggatcctg

SEQ ID NO: 96484 - DNA, 22 bp, synthetic construct
  misc_feature 1..22: note = chemically synthesized
  source 1..22: mol_type = other DNA
gatcctgaggctcttttttgtt

SEQ ID NO: 96485 - DNA, 22 bp, synthetic construct
  misc_feature 1..22: note = chemically synthesized
  source 1..22: mol_type = other DNA
aggctcttttttgttggctcct

SEQ ID NO: 96486 - DNA, 22 bp, synthetic construct
  misc_feature 1..22: note = chemically synthesized
  source 1..22: mol_type = other DNA
ttttttgttggctcctcatcta

SEQ ID NO: 96487 - DNA, 22 bp, synthetic construct
  misc_feature 1..22: note = chemically synthesized
  source 1..22: mol_type = other DNA
ttttgttggctcctcatctatc

SEQ ID NO: 96488 - DNA, 22 bp, synthetic construct
  misc_feature 1..22: note = chemically synthesized
  source 1..22: mol_type = other DNA
tttgttggctcctcatctatct

SEQ ID NO: 96489 - DNA, 22 bp, synthetic construct
  misc_feature 1..22: note = chemically synthesized
  source 1..22: mol_type = other DNA
ttgttggctcctcatctatctg

SEQ ID NO: 96490 - DNA, 22 bp, synthetic construct
  misc_feature 1..22: note = chemically synthesized
  source 1..22: mol_type = other DNA
tgttggctcctcatctatctgc

SEQ ID NO: 96491 - DNA, 22 bp, synthetic construct
  misc_feature 1..22: note = chemically synthesized
  source 1..22: mol_type = other DNA
gttggctcctcatctatctgca

SEQ ID NO: 96492 - DNA, 22 bp, synthetic construct
  misc_feature 1..22: note = chemically synthesized
  source 1..22: mol_type = other DNA
ttggctcctcatctatctgcaa

SEQ ID NO: 96493 - DNA, 22 bp, synthetic construct
  misc_feature 1..22: note = chemically synthesized
  source 1..22: mol_type = other DNA
gctcctcatctatctgcaacac

SEQ ID NO: 96494 - DNA, 22 bp, synthetic construct
  misc_feature 1..22: note = chemically synthesized
  source 1..22: mol_type = other DNA
ctcatctatctgcaacacaaat

SEQ ID NO: 96495 - DNA, 22 bp, synthetic construct
  misc_feature 1..22: note = chemically synthesized
  source 1..22: mol_type = other DNA
atctatctgcaacacaaatttc

SEQ ID NO: 96496 - DNA, 22 bp, synthetic construct
  misc_feature 1..22: note = chemically synthesized
  source 1..22: mol_type = other DNA
tctgcaacacaaatttccattt

SEQ ID NO: 96497 - DNA, 22 bp, synthetic construct
  misc_feature 1..22: note = chemically synthesized
  source 1..22: mol_type = other DNA
caacacaaatttccatttgtcc

SEQ ID NO: 96498 - DNA, 22 bp, synthetic construct
  misc_feature 1..22: note = chemically synthesized
  source 1..22: mol_type = other DNA
ccatttgtccccttttttaccc

SEQ ID NO: 96499 - DNA, 22 bp, synthetic construct
  misc_feature 1..22: note = chemically synthesized
  source 1..22: mol_type = other DNA
catttgtccccttttttaccct

SEQ ID NO: 96500 - DNA, 22 bp, synthetic construct
  misc_feature 1..22: note = chemically synthesized
  source 1..22: mol_type = other DNA
gtccccttttttaccctcttca

SEQ ID NO: 96501 - DNA, 22 bp, synthetic construct
  misc_feature 1..22: note = chemically synthesized
  source 1..22: mol_type = other DNA
tccccttttttaccctcttcat

SEQ ID NO: 96502 - DNA, 22 bp, synthetic construct
  misc_feature 1..22: note = chemically synthesized
  source 1..22: mol_type = other DNA
ttttaccctcttcatcatcttc

SEQ ID NO: 96503 - DNA, 22 bp, synthetic construct
  misc_feature 1..22: note = chemically synthesized
  source 1..22: mol_type = other DNA
tttaccctcttcatcatcttcc

SEQ ID NO: 96504 - DNA, 22 bp, synthetic construct
  misc_feature 1..22: note = chemically synthesized
  source 1..22: mol_type = other DNA
ttaccctcttcatcatcttcca

SEQ ID NO: 96505 - DNA, 22 bp, synthetic construct
  misc_feature 1..22: note = chemically synthesized
  source 1..22: mol_type = other DNA
taccctcttcatcatcttccaa

SEQ ID NO: 96506 - DNA, 22 bp, synthetic construct
  misc_feature 1..22: note = chemically synthesized
  source 1..22: mol_type = other DNA
accctcttcatcatcttccaaa

SEQ ID NO: 96507 - DNA, 22 bp, synthetic construct
  misc_feature 1..22: note = chemically synthesized
  source 1..22: mol_type = other DNA
ccctcttcatcatcttccaaaa

SEQ ID NO: 96508 - DNA, 22 bp, synthetic construct
  misc_feature 1..22: note = chemically synthesized
  source 1..22: mol_type = other DNA
ttcatcatcttccaaaatgata

SEQ ID NO: 96509 - DNA, 22 bp, synthetic construct
  misc_feature 1..22: note = chemically synthesized
  source 1..22: mol_type = other DNA
catcatcttccaaaatgatatc

SEQ ID NO: 96510 - DNA, 22 bp, synthetic construct
  misc_feature 1..22: note = chemically synthesized
  source 1..22: mol_type = other DNA
atcatcttccaaaatgatatcc

SEQ ID NO: 96511 - DNA, 22 bp, synthetic construct
  misc_feature 1..22: note = chemically synthesized
  source 1..22: mol_type = other DNA
ccaaaatgatatccatctctcc

SEQ ID NO: 96512 - DNA, 22 bp, synthetic construct
  misc_feature 1..22: note = chemically synthesized
  source 1..22: mol_type = other DNA
caaaatgatatccatctctccc

SEQ ID NO: 96513 - DNA, 22 bp, synthetic construct
  misc_feature 1..22: note = chemically synthesized
  source 1..22: mol_type = other DNA
tcccattctccttttccaagaa

SEQ ID NO: 96514 - DNA, 22 bp, synthetic construct
  misc_feature 1..22: note = chemically synthesized
  source 1..22: mol_type = other DNA
ccattctccttttccaagaaag

SEQ ID NO: 96515 - DNA, 22 bp, synthetic construct
  misc_feature 1..22: note = chemically synthesized
  source 1..22: mol_type = other DNA
tccttttccaagaaagcctcat

SEQ ID NO: 96516 - DNA, 22 bp, synthetic construct
  misc_feature 1..22: note = chemically synthesized
  source 1..22: mol_type = other DNA
cttttccaagaaagcctcatat

SEQ ID NO: 96517 - DNA, 22 bp, synthetic construct
  misc_feature 1..22: note = chemically synthesized
  source 1..22: mol_type = other DNA
ttccaagaaagcctcatataaa

SEQ ID NO: 96518 - DNA, 22 bp, synthetic construct
  misc_feature 1..22: note = chemically synthesized
  source 1..22: mol_type = other DNA
tccaagaaagcctcatataaag

SEQ ID NO: 96519 - DNA, 22 bp, synthetic construct
  misc_feature 1..22: note = chemically synthesized
  source 1..22: mol_type = other DNA
ccaagaaagcctcatataaagg

SEQ ID NO: 96520 - DNA, 22 bp, synthetic construct
  misc_feature 1..22: note = chemically synthesized
  source 1..22: mol_type = other DNA
caagaaagcctcatataaagga

SEQ ID NO: 96521 - DNA, 22 bp, synthetic construct
  misc_feature 1..22: note = chemically synthesized
  source 1..22: mol_type = other DNA
atataaaggagcaaatctcaaa

SEQ ID NO: 96522 - DNA, 22 bp, synthetic construct
  misc_feature 1..22: note = chemically synthesized
  source 1..22: mol_type = other DNA
aaaataggaaaaaaagtttcag

SEQ ID NO: 96523 - DNA, 22 bp, synthetic construct
  misc_feature 1..22: note = chemically synthesized
  source 1..22: mol_type = other DNA
cagccaaagcgcatttaacatt

SEQ ID NO: 96524 - DNA, 22 bp, synthetic construct
  misc_feature 1..22: note = chemically synthesized
  source 1..22: mol_type = other DNA
agccaaagcgcatttaacattt

SEQ ID NO: 96525 - DNA, 22 bp, synthetic construct
  misc_feature 1..22: note = chemically synthesized
  source 1..22: mol_type = other DNA
aacatttgccttaaaggtggtg

SEQ ID NO: 96526 - DNA, 22 bp, synthetic construct
  misc_feature 1..22: note = chemically synthesized
  source 1..22: mol_type = other DNA
acatttgccttaaaggtggtga

SEQ ID NO: 96527 - DNA, 22 bp, synthetic construct
  misc_feature 1..22: note = chemically synthesized
  source 1..22: mol_type = other DNA
gccttaaaggtggtgacagtga

SEQ ID NO: 96528 - DNA, 22 bp, synthetic construct
  misc_feature 1..22: note = chemically synthesized
  source 1..22: mol_type = other DNA
ccttaaaggtggtgacagtgac

SEQ ID NO: 96529 - DNA, 22 bp, synthetic construct
  misc_feature 1..22: note = chemically synthesized
  source 1..22: mol_type = other DNA
aaaggtggtgacagtgacaaaa

SEQ ID NO: 96530 - DNA, 22 bp, synthetic construct
  misc_feature 1..22: note = chemically synthesized
  source 1..22: mol_type = other DNA
aaggtggtgacagtgacaaaaa

SEQ ID NO: 96531 - DNA, 22 bp, synthetic construct
  misc_feature 1..22: note = chemically synthesized
  source 1..22: mol_type = other DNA
ttaaaacagaatctcacccagt

SEQ ID NO: 96532 - DNA, 22 bp, synthetic construct
  misc_feature 1..22: note = chemically synthesized
  source 1..22: mol_type = other DNA
aaacagaatctcacccagttct

SEQ ID NO: 96533 - DNA, 22 bp, synthetic construct
  misc_feature 1..22: note = chemically synthesized
  source 1..22: mol_type = other DNA
acccagttctagctctcttaag

SEQ ID NO: 96534 - DNA, 22 bp, synthetic construct
  misc_feature 1..22: note = chemically synthesized
  source 1..22: mol_type = other DNA
tagctctcttaaggagtgcatt

SEQ ID NO: 96535 - DNA, 22 bp, synthetic construct
  misc_feature 1..22: note = chemically synthesized
  source 1..22: mol_type = other DNA
gctctcttaaggagtgcattgt

SEQ ID NO: 96536 - DNA, 22 bp, synthetic construct
  misc_feature 1..22: note = chemically synthesized
  source 1..22: mol_type = other DNA
tcttaaggagtgcattgtaaac

SEQ ID NO: 96537 - DNA, 22 bp, synthetic construct
  misc_feature 1..22: note = chemically synthesized
  source 1..22: mol_type = other DNA
ttaaggagtgcattgtaaacaa

SEQ ID NO: 96538 - DNA, 22 bp, synthetic construct
  misc_feature 1..22: note = chemically synthesized
  source 1..22: mol_type = other DNA
aaggagtgcattgtaaacaaaa

SEQ ID NO: 96539 - DNA, 22 bp, synthetic construct
  misc_feature 1..22: note = chemically synthesized
  source 1..22: mol_type = other DNA
aggagtgcattgtaaacaaaac

SEQ ID NO: 96540 - DNA, 22 bp, synthetic construct
  misc_feature 1..22: note = chemically synthesized
  source 1..22: mol_type = other DNA
taaacaaaacttctgtacctta

SEQ ID NO: 96541 - DNA, 22 bp, synthetic construct
  misc_feature 1..22: note = chemically synthesized
  source 1..22: mol_type = other DNA
ctgtaccttagtttctctaggg

SEQ ID NO: 96542 - DNA, 22 bp, synthetic construct
  misc_feature 1..22: note = chemically synthesized
  source 1..22: mol_type = other DNA
tgtaccttagtttctctaggga

SEQ ID NO: 96543 - DNA, 22 bp, synthetic construct
  misc_feature 1..22: note = chemically synthesized
  source 1..22: mol_type = other DNA
taccttagtttctctagggaga

SEQ ID NO: 96544 - DNA, 22 bp, synthetic construct
  misc_feature 1..22: note = chemically synthesized
  source 1..22: mol_type = other DNA
agtttctctagggagacaaaaa

SEQ ID NO: 96545 - DNA, 22 bp, synthetic construct
  misc_feature 1..22: note = chemically synthesized
  source 1..22: mol_type = other DNA
gtttctctagggagacaaaaac

SEQ ID NO: 96546 - DNA, 22 bp, synthetic construct
  misc_feature 1..22: note = chemically synthesized
  source 1..22: mol_type = other DNA
ctctagggagacaaaaaccgta

SEQ ID NO: 96547 - DNA, 22 bp, synthetic construct
  misc_feature 1..22: note = chemically synthesized
  source 1..22: mol_type = other DNA
tctagggagacaaaaaccgtac

SEQ ID NO: 96548 - DNA, 22 bp, synthetic construct
  misc_feature 1..22: note = chemically synthesized
  source 1..22: mol_type = other DNA
tagggagacaaaaaccgtacat

SEQ ID NO: 96549 - DNA, 22 bp, synthetic construct
  misc_feature 1..22: note = chemically synthesized
  source 1..22: mol_type = other DNA
gggagacaaaaaccgtacatag

SEQ ID NO: 96550 - DNA, 22 bp, synthetic construct
  misc_feature 1..22: note = chemically synthesized
  source 1..22: mol_type = other DNA
cttctagaaactgaacagaata

SEQ ID NO: 96551 - DNA, 22 bp, synthetic construct
  misc_feature 1..22: note = chemically synthesized
  source 1..22: mol_type = other DNA
ctagaaactgaacagaatagca

SEQ ID NO: 96552 - DNA, 22 bp, synthetic construct
  misc_feature 1..22: note = chemically synthesized
  source 1..22: mol_type = other DNA
tagaaactgaacagaatagcaa

SEQ ID NO: 96553 - DNA, 22 bp, synthetic construct
  misc_feature 1..22: note = chemically synthesized
  source 1..22: mol_type = other DNA
gaaactgaacagaatagcaagt

SEQ ID NO: 96554 - DNA, 22 bp, synthetic construct
  misc_feature 1..22: note = chemically synthesized
  source 1..22: mol_type = other DNA
aacagaatagcaagtagtccac

SEQ ID NO: 96555 - DNA, 22 bp, synthetic construct
  misc_feature 1..22: note = chemically synthesized
  source 1..22: mol_type = other DNA
aagccttaatcccaaagtacag

SEQ ID NO: 96556 - DNA, 22 bp, synthetic construct
  misc_feature 1..22: note = chemically synthesized
  source 1..22: mol_type = other DNA
aatcccaaagtacagtaccttg

SEQ ID NO: 96557 - DNA, 22 bp, synthetic construct
  misc_feature 1..22: note = chemically synthesized
  source 1..22: mol_type = other DNA
atcccaaagtacagtaccttgg

SEQ ID NO: 96558 - DNA, 22 bp, synthetic construct
  misc_feature 1..22: note = chemically synthesized
  source 1..22: mol_type = other DNA
ggggtgattccctagagaggac

SEQ ID NO: 96559 - DNA, 22 bp, synthetic construct
  misc_feature 1..22: note = chemically synthesized
  source 1..22: mol_type = other DNA
gggtgattccctagagaggaca

SEQ ID NO: 96560 - DNA, 22 bp, synthetic construct
  misc_feature 1..22: note = chemically synthesized
  source 1..22: mol_type = other DNA
cctagagaggacagacagaaaa

SEQ ID NO: 96561 - DNA, 22 bp, synthetic construct
  misc_feature 1..22: note = chemically synthesized
  source 1..22: mol_type = other DNA
gagaggacagacagaaaagatt

SEQ ID NO: 96562 - DNA, 22 bp, synthetic construct
  misc_feature 1..22: note = chemically synthesized
  source 1..22: mol_type = other DNA
catccagtgcttccagagaatc

SEQ ID NO: 96563 - DNA, 22 bp, synthetic construct
  misc_feature 1..22: note = chemically synthesized
  source 1..22: mol_type = other DNA
ccagagaatcctctctcttttc

SEQ ID NO: 96564 - DNA, 22 bp, synthetic construct
  misc_feature 1..22: note = chemically synthesized
  source 1..22: mol_type = other DNA
cagagaatcctctctcttttca

SEQ ID NO: 96565 - DNA, 22 bp, synthetic construct
  misc_feature 1..22: note = chemically synthesized
  source 1..22: mol_type = other DNA
tctcttttcatttctctatgac

SEQ ID NO: 96566 - DNA, 22 bp, synthetic construct
  misc_feature 1..22: note = chemically synthesized
  source 1..22: mol_type = other DNA
tcttttcatttctctatgacca

SEQ ID NO: 96567 - DNA, 22 bp, synthetic construct
  misc_feature 1..22: note = chemically synthesized
  source 1..22: mol_type = other DNA
ttttcatttctctatgaccaca

SEQ ID NO: 96568 - DNA, 22 bp, synthetic construct
  misc_feature 1..22: note = chemically synthesized
  source 1..22: mol_type = other DNA
ttcatttctctatgaccacagg

SEQ ID NO: 96569 - DNA, 22 bp, synthetic construct
  misc_feature 1..22: note = chemically synthesized
  source 1..22: mol_type = other DNA
tcatttctctatgaccacaggg

SEQ ID NO: 96570 - DNA, 22 bp, synthetic construct
  misc_feature 1..22: note = chemically synthesized
  source 1..22: mol_type = other DNA
catttctctatgaccacagggg

SEQ ID NO: 96571 - DNA, 22 bp, synthetic construct
  misc_feature 1..22: note = chemically synthesized
  source 1..22: mol_type = other DNA
atttctctatgaccacagggga

SEQ ID NO: 96572 - DNA, 22 bp, synthetic construct
  misc_feature 1..22: note = chemically synthesized
  source 1..22: mol_type = other DNA
ctctatgaccacaggggacatt

SEQ ID NO: 96573 - DNA, 22 bp, synthetic construct
  misc_feature 1..22: note = chemically synthesized
  source 1..22: mol_type = other DNA
tctatgaccacaggggacattg

SEQ ID NO: 96574 - DNA, 22 bp, synthetic construct
  misc_feature 1..22: note = chemically synthesized
  source 1..22: mol_type = other DNA
tatgaccacaggggacattggc

SEQ ID NO: 96575 - DNA, 22 bp, synthetic construct
  misc_feature 1..22: note = chemically synthesized
  source 1..22: mol_type = other DNA
tgaccacaggggacattggcta

SEQ ID NO: 96576 - DNA, 22 bp, synthetic construct
  misc_feature 1..22: note = chemically synthesized
  source 1..22: mol_type = other DNA
gctactttgtgagtattgcctg

SEQ ID NO: 96577 - DNA, 22 bp, synthetic construct
  misc_feature 1..22: note = chemically synthesized
  source 1..22: mol_type = other DNA
ctttgtgagtattgcctggggc

SEQ ID NO: 96578 - DNA, 22 bp, synthetic construct
  misc_feature 1..22: note = chemically synthesized
  source 1..22: mol_type = other DNA
tgtgagtattgcctggggctct

SEQ ID NO: 96579 - DNA, 22 bp, synthetic construct
  misc_feature 1..22: note = chemically synthesized
  source 1..22: mol_type = other DNA
gtgagtattgcctggggctctc

SEQ ID NO: 96580 - DNA, 22 bp, synthetic construct
  misc_feature 1..22: note = chemically synthesized
  source 1..22: mol_type = other DNA
tgagtattgcctggggctctct

SEQ ID NO: 96581 - DNA, 22 bp, synthetic construct
  misc_feature 1..22: note = chemically synthesized
  source 1..22: mol_type = other DNA
cctggggctctcttcttgcttg

SEQ ID NO: 96582 - DNA, 22 bp, synthetic construct
  misc_feature 1..22: note = chemically synthesized
  source 1..22: mol_type = other DNA
gggctctcttcttgcttgcctg

SEQ ID NO: 96583 - DNA, 22 bp, synthetic construct
  misc_feature 1..22: note = chemically synthesized
  source 1..22: mol_type = other DNA
tcttcttgcttgcctgtctgtc

SEQ ID NO: 96584 - DNA, 22 bp, synthetic construct
  misc_feature 1..22: note = chemically synthesized
  source 1..22: mol_type = other DNA
ttcttgcttgcctgtctgtcct

SEQ ID NO: 96585 - DNA, 22 bp, synthetic construct
  misc_feature 1..22: note = chemically synthesized
  source 1..22: mol_type = other DNA
cttgcttgcctgtctgtcctgc

SEQ ID NO: 96586 - DNA, 22 bp, synthetic construct
  misc_feature 1..22: note = chemically synthesized
  source 1..22: mol_type = other DNA
ttgcttgcctgtctgtcctgct

SEQ ID NO: 96587 - DNA, 22 bp, synthetic construct
  misc_feature 1..22: note = chemically synthesized
  source 1..22: mol_type = other DNA
gcttgcctgtctgtcctgctta

SEQ ID NO: 96588 - DNA, 22 bp, synthetic construct
  misc_feature 1..22: note = chemically synthesized
  source 1..22: mol_type = other DNA
cttgcctgtctgtcctgcttat

SEQ ID NO: 96589 - DNA, 22 bp, synthetic construct
  misc_feature 1..22: note = chemically synthesized
  source 1..22: mol_type = other DNA
gcctgtctgtcctgcttatact

SEQ ID NO: 96590 - DNA, 22 bp, synthetic construct
  misc_feature 1..22: note = chemically synthesized
  source 1..22: mol_type = other DNA
cctgtctgtcctgcttatactt

SEQ ID NO: 96591 - DNA, 22 bp, synthetic construct
  misc_feature 1..22: note = chemically synthesized
  source 1..22: mol_type = other DNA
tctgtcctgcttatacttctca

SEQ ID NO: 96592 - DNA, 22 bp, synthetic construct
  misc_feature 1..22: note = chemically synthesized
  source 1..22: mol_type = other DNA
tcctgcttatacttctcactgg

SEQ ID NO: 96593 - DNA, 22 bp, synthetic construct
  misc_feature 1..22: note = chemically synthesized
  source 1..22: mol_type = other DNA
cttatacttctcactgggaagg

SEQ ID NO: 96594 - DNA, 22 bp, synthetic construct
  misc_feature 1..22: note = chemically synthesized
  source 1..22: mol_type = other DNA
atacttctcactgggaagggag

SEQ ID NO: 96595 - DNA, 22 bp, synthetic construct
  misc_feature 1..22: note = chemically synthesized
  source 1..22: mol_type = other DNA
tacttctcactgggaagggagc

SEQ ID NO: 96596 - DNA, 22 bp, synthetic construct
  misc_feature 1..22: note = chemically synthesized
  source 1..22: mol_type = other DNA
ctcactgggaagggagctgaga

SEQ ID NO: 96597 - DNA, 22 bp, synthetic construct
  misc_feature 1..22: note = chemically synthesized
  source 1..22: mol_type = other DNA
tcactgggaagggagctgagaa

SEQ ID NO: 96598 - DNA, 22 bp, synthetic construct
  misc_feature 1..22: note = chemically synthesized
  source 1..22: mol_type = other DNA
actgggaagggagctgagaagc

SEQ ID NO: 96599 - DNA, 22 bp, synthetic construct
  misc_feature 1..22: note = chemically synthesized
  source 1..22: mol_type = other DNA
ggaagggagctgagaagcctaa

SEQ ID NO: 96600 - DNA, 22 bp, synthetic construct
  misc_feature 1..22: note = chemically synthesized
  source 1..22: mol_type = other DNA
agaagcctaaaatcctaaaatt

SEQ ID NO: 96601 - DNA, 22 bp, synthetic construct
  misc_feature 1..22: note = chemically synthesized
  source 1..22: mol_type = other DNA
aaatcctaaaattatttaaagc

SEQ ID NO: 96602 - DNA, 22 bp, synthetic construct
  misc_feature 1..22: note = chemically synthesized
  source 1..22: mol_type = other DNA
aaattatttaaagccagaattt

SEQ ID NO: 96603 - DNA, 22 bp, synthetic construct
  misc_feature 1..22: note = chemically synthesized
  source 1..22: mol_type = other DNA
tttaaagccagaatttgtcatc

SEQ ID NO: 96604 - DNA, 22 bp, synthetic construct
  misc_feature 1..22: note = chemically synthesized
  source 1..22: mol_type = other DNA
aaagccagaatttgtcatcaaa

SEQ ID NO: 96605 - DNA, 22 bp, synthetic construct
  misc_feature 1..22: note = chemically synthesized
  source 1..22: mol_type = other DNA
aagccagaatttgtcatcaaac

SEQ ID NO: 96606 - DNA, 22 bp, synthetic construct
  misc_feature 1..22: note = chemically synthesized
  source 1..22: mol_type = other DNA
gtcatcaaacagagaaaaaagt

SEQ ID NO: 96607 - DNA, 22 bp, synthetic construct
  misc_feature 1..22: note = chemically synthesized
  source 1..22: mol_type = other DNA
tcatcaaacagagaaaaaagtg

SEQ ID NO: 96608 - DNA, 22 bp, synthetic construct
  misc_feature 1..22: note = chemically synthesized
  source 1..22: mol_type = other DNA
atcaggctaggagtcagggtat

SEQ ID NO: 96609 - DNA, 22 bp, synthetic construct
  misc_feature 1..22: note = chemically synthesized
  source 1..22: mol_type = other DNA
ggagtcagggtatattattcct

SEQ ID NO: 96610 - DNA, 22 bp, synthetic construct
  misc_feature 1..22: note = chemically synthesized
  source 1..22: mol_type = other DNA
ttcctctagtgtcctttttttt

SEQ ID NO: 96611 - DNA, 22 bp, synthetic construct
  misc_feature 1..22: note = chemically synthesized
  source 1..22: mol_type = other DNA
ctctagtgtccttttttttttc

SEQ ID NO: 96612 - DNA, 22 bp, synthetic construct
  misc_feature 1..22: note = chemically synthesized
  source 1..22: mol_type = other DNA
tagtgtccttttttttttctgt

SEQ ID NO: 96613 - DNA, 22 bp, synthetic construct
  misc_feature 1..22: note = chemically synthesized
  source 1..22: mol_type = other DNA
gtgtccttttttttttctgtat

SEQ ID NO: 96614 - DNA, 22 bp, synthetic construct
  misc_feature 1..22: note = chemically synthesized
  source 1..22: mol_type = other DNA
ttttttttctgtatgtccccat

SEQ ID NO: 96615 - DNA, 22 bp, synthetic construct
  misc_feature 1..22: note = chemically synthesized
  source 1..22: mol_type = other DNA
tttttttctgtatgtccccatt

SEQ ID NO: 96616 - DNA, 22 bp, synthetic construct
  misc_feature 1..22: note = chemically synthesized
  source 1..22: mol_type = other DNA
ttttttctgtatgtccccattt

SEQ ID NO: 96617 - DNA, 22 bp, synthetic construct
  misc_feature 1..22: note = chemically synthesized
  source 1..22: mol_type = other DNA
tttttctgtatgtccccatttt

SEQ ID NO: 96618 - DNA, 22 bp, synthetic construct
  misc_feature 1..22: note = chemically synthesized
  source 1..22: mol_type = other DNA
ttttctgtatgtccccattttg

SEQ ID NO: 96619 - DNA, 22 bp, synthetic construct
  misc_feature 1..22: note = chemically synthesized
  source 1..22: mol_type = other DNA
tttctgtatgtccccattttga

SEQ ID NO: 96620 - DNA, 22 bp, synthetic construct
  misc_feature 1..22: note = chemically synthesized
  source 1..22: mol_type = other DNA
ttctgtatgtccccattttgat

SEQ ID NO: 96621 - DNA, 22 bp, synthetic construct
  misc_feature 1..22: note = chemically synthesized
  source 1..22: mol_type = other DNA
tctgtatgtccccattttgatg

SEQ ID NO: 96622 - DNA, 22 bp, synthetic construct
  misc_feature 1..22: note = chemically synthesized
  source 1..22: mol_type = other DNA
ctgtatgtccccattttgatga

SEQ ID NO: 96623 - DNA, 22 bp, synthetic construct
  misc_feature 1..22: note = chemically synthesized
  source 1..22: mol_type = other DNA
tgtatgtccccattttgatgac

SEQ ID NO: 96624 - DNA, 22 bp, synthetic construct
  misc_feature 1..22: note = chemically synthesized
  source 1..22: mol_type = other DNA
tatgtccccattttgatgactt

SEQ ID NO: 96625 - DNA, 22 bp, synthetic construct
  misc_feature 1..22: note = chemically synthesized
  source 1..22: mol_type = other DNA
tgatgacttgctagctctttac

SEQ ID NO: 96626 - DNA, 22 bp, synthetic construct
  misc_feature 1..22: note = chemically synthesized
  source 1..22: mol_type = other DNA
gatgacttgctagctctttact

SEQ ID NO: 96627 - DNA, 22 bp, synthetic construct
  misc_feature 1..22: note = chemically synthesized
  source 1..22: mol_type = other DNA
atgacttgctagctctttactt

SEQ ID NO: 96628 - DNA, 22 bp, synthetic construct
  misc_feature 1..22: note = chemically synthesized
  source 1..22: mol_type = other DNA
gctagctctttacttggtagag

SEQ ID NO: 96629 - DNA, 22 bp, synthetic construct
  misc_feature 1..22: note = chemically synthesized
  source 1..22: mol_type = other DNA
ctagctctttacttggtagagc

SEQ ID NO: 96630 - DNA, 22 bp, synthetic construct
  misc_feature 1..22: note = chemically synthesized
  source 1..22: mol_type = other DNA
gctctttacttggtagagctga

SEQ ID NO: 96631 - DNA, 22 bp, synthetic construct
  misc_feature 1..22: note = chemically synthesized
  source 1..22: mol_type = other DNA
tttacttggtagagctgaaact

SEQ ID NO: 96632 - DNA, 22 bp, synthetic construct
  misc_feature 1..22: note = chemically synthesized
  source 1..22: mol_type = other DNA
tacttggtagagctgaaactgg

SEQ ID NO: 96633 - DNA, 22 bp, synthetic construct
  misc_feature 1..22: note = chemically synthesized
  source 1..22: mol_type = other DNA
acttggtagagctgaaactgga

SEQ ID NO: 96634 - DNA, 22 bp, synthetic construct
  misc_feature 1..22: note = chemically synthesized
  source 1..22: mol_type = other DNA
cttggtagagctgaaactggaa

SEQ ID NO: 96635 - DNA, 22 bp, synthetic construct
  misc_feature 1..22: note = chemically synthesized
  source 1..22: mol_type = other DNA
ggtagagctgaaactggaagtt

SEQ ID NO: 96636 - DNA, 22 bp, synthetic construct
  misc_feature 1..22: note = chemically synthesized
  source 1..22: mol_type = other DNA
gtagagctgaaactggaagttg

SEQ ID NO: 96637 - DNA, 22 bp, synthetic construct
  misc_feature 1..22: note = chemically synthesized
  source 1..22: mol_type = other DNA
aaactggaagttgggatttaca

SEQ ID NO: 96638 - DNA, 22 bp, synthetic construct
  misc_feature 1..22: note = chemically synthesized
  source 1..22: mol_type = other DNA
gaagttgggatttacagtgtat

SEQ ID NO: 96639 - DNA, 22 bp, synthetic construct
  misc_feature 1..22: note = chemically synthesized
  source 1..22: mol_type = other DNA
ggatttacagtgtattcaattc

SEQ ID NO: 96640 - DNA, 22 bp, synthetic construct
  misc_feature 1..22: note = chemically synthesized
  source 1..22: mol_type = other DNA
acagtgtattcaattcgatcca

SEQ ID NO: 96641 - DNA, 22 bp, synthetic construct
  misc_feature 1..22: note = chemically synthesized
  source 1..22: mol_type = other DNA
cagtgtattcaattcgatccat

SEQ ID NO: 96642 - DNA, 22 bp, synthetic construct
  misc_feature 1..22: note = chemically synthesized
  source 1..22: mol_type = other DNA
aattcgatccatgtgcctgaag

SEQ ID NO: 96643 - DNA, 22 bp, synthetic construct
  misc_feature 1..22: note = chemically synthesized
  source 1..22: mol_type = other DNA
gatccatgtgcctgaagaatat

SEQ ID NO: 96644 - DNA, 22 bp, synthetic construct
  misc_feature 1..22: note = chemically synthesized
  source 1..22: mol_type = other DNA
aagaatattgctcatgctatat

SEQ ID NO: 96645 - DNA, 22 bp, synthetic construct
  misc_feature 1..22: note = chemically synthesized
  source 1..22: mol_type = other DNA
ctcatgctatatcacttaatct

SEQ ID NO: 96646 - DNA, 22 bp, synthetic construct
  misc_feature 1..22: note = chemically synthesized
  source 1..22: mol_type = other DNA
atgctatatcacttaatctgcc

SEQ ID NO: 96647 - DNA, 22 bp, synthetic construct
  misc_feature 1..22: note = chemically synthesized
  source 1..22: mol_type = other DNA
tatcacttaatctgcccttata

SEQ ID NO: 96648 - DNA, 22 bp, synthetic construct
  misc_feature 1..22: note = chemically synthesized
  source 1..22: mol_type = other DNA
aatctgcccttataataccatt

SEQ ID NO: 96649 - DNA, 22 bp, synthetic construct
  misc_feature 1..22: note = chemically synthesized
  source 1..22: mol_type = other DNA
atctgcccttataataccattg

SEQ ID NO: 96650 - DNA, 22 bp, synthetic construct
  misc_feature 1..22: note = chemically synthesized
  source 1..22: mol_type = other DNA
cccttataataccattgtcatt

SEQ ID NO: 96651 - DNA, 22 bp, synthetic construct
  misc_feature 1..22: note = chemically synthesized
  source 1..22: mol_type = other DNA
ataataccattgtcattatcct

SEQ ID NO: 96652 - DNA, 22 bp, synthetic construct
  misc_feature 1..22: note = chemically synthesized
  source 1..22: mol_type = other DNA
taataccattgtcattatcctc

SEQ ID NO: 96653 - DNA, 22 bp, synthetic construct
  misc_feature 1..22: note = chemically synthesized
  source 1..22: mol_type = other DNA
tcattatcctcatattttagaa

SEQ ID NO: 96654 - DNA, 22 bp, synthetic construct
  misc_feature 1..22: note = chemically synthesized
  source 1..22: mol_type = other DNA
tcctcatattttagaatcaagg

SEQ ID NO: 96655 - DNA, 22 bp, synthetic construct
  misc_feature 1..22: note = chemically synthesized
  source 1..22: mol_type = other DNA
atattttagaatcaaggaataa

SEQ ID NO: 96656 - DNA, 22 bp, synthetic construct
  misc_feature 1..22: note = chemically synthesized
  source 1..22: mol_type = other DNA
tagaatcaaggaataaattcac

SEQ ID NO: 96657 - DNA, 22 bp, synthetic construct
  misc_feature 1..22: note = chemically synthesized
  source 1..22: mol_type = other DNA
agaatcaaggaataaattcaca

SEQ ID NO: 96658 - DNA, 22 bp, synthetic construct
  misc_feature 1..22: note = chemically synthesized
  source 1..22: mol_type = other DNA
gaatcaaggaataaattcacag

SEQ ID NO: 96659 - DNA, 22 bp, synthetic construct
  misc_feature 1..22: note = chemically synthesized
  source 1..22: mol_type = other DNA
acagaaattatttaactatcaa

SEQ ID NO: 96660 - DNA, 22 bp, synthetic construct
  misc_feature 1..22: note = chemically synthesized
  source 1..22: mol_type = other DNA
tttaactatcaatgtgacagaa

SEQ ID NO: 96661 - DNA, 22 bp, synthetic construct
  misc_feature 1..22: note = chemically synthesized
  source 1..22: mol_type = other DNA
aactatcaatgtgacagaagta

SEQ ID NO: 96662 - DNA, 22 bp, synthetic construct
  misc_feature 1..22: note = chemically synthesized
  source 1..22: mol_type = other DNA
actatcaatgtgacagaagtaa

SEQ ID NO: 96663 - DNA, 22 bp, synthetic construct
  misc_feature 1..22: note = chemically synthesized
  source 1..22: mol_type = other DNA
tcaatgtgacagaagtaatgat

SEQ ID NO: 96664 - DNA, 22 bp, synthetic construct
  misc_feature 1..22: note = chemically synthesized
  source 1..22: mol_type = other DNA
ggggaataatagaagcagagtt

SEQ ID NO: 96665 - DNA, 22 bp, synthetic construct
  misc_feature 1..22: note = chemically synthesized
  source 1..22: mol_type = other DNA
cacaaattccagcattgttaat

SEQ ID NO: 96666 - DNA, 22 bp, synthetic construct
  misc_feature 1..22: note = chemically synthesized
  source 1..22: mol_type = other DNA
cagcattgttaattctataaaa

SEQ ID NO: 96667 - DNA, 22 bp, synthetic construct
  misc_feature 1..22: note = chemically synthesized
  source 1..22: mol_type = other DNA
ttaattctataaaagtccctta

SEQ ID NO: 96668 - DNA, 22 bp, synthetic construct
  misc_feature 1..22: note = chemically synthesized
  source 1..22: mol_type = other DNA
attctataaaagtcccttacat

SEQ ID NO: 96669 - DNA, 22 bp, synthetic construct
  misc_feature 1..22: note = chemically synthesized
  source 1..22: mol_type = other DNA
tataaaagtcccttacatcacc

SEQ ID NO: 96670 - DNA, 22 bp, synthetic construct
  misc_feature 1..22: note = chemically synthesized
  source 1..22: mol_type = other DNA
taaaagtcccttacatcaccat

SEQ ID NO: 96671 - DNA, 22 bp, synthetic construct
  misc_feature 1..22: note = chemically synthesized
  source 1..22: mol_type = other DNA
acatcaccataatctcattgcc

SEQ ID NO: 96672 - DNA, 22 bp, synthetic construct
  misc_feature 1..22: note = chemically synthesized
  source 1..22: mol_type = other DNA
catcaccataatctcattgccc

SEQ ID NO: 96673 - DNA, 22 bp, synthetic construct
  misc_feature 1..22: note = chemically synthesized
  source 1..22: mol_type = other DNA
attgccccagcccagttcctcc

SEQ ID NO: 96674 - DNA, 22 bp, synthetic construct
  misc_feature 1..22: note = chemically synthesized
  source 1..22: mol_type = other DNA
ccccagcccagttcctccttct

SEQ ID NO: 96675 - DNA, 22 bp, synthetic construct
  misc_feature 1..22: note = chemically synthesized
  source 1..22: mol_type = other DNA
ctccttctggcttgttctacat

SEQ ID NO: 96676 - DNA, 22 bp, synthetic construct
  misc_feature 1..22: note = chemically synthesized
  source 1..22: mol_type = other DNA
cttctggcttgttctacatcca

SEQ ID NO: 96677 - DNA, 22 bp, synthetic construct
  misc_feature 1..22: note = chemically synthesized
  source 1..22: mol_type = other DNA
ctggcttgttctacatccattt

SEQ ID NO: 96678 - DNA, 22 bp, synthetic construct
  misc_feature 1..22: note = chemically synthesized
  source 1..22: mol_type = other DNA
tggcttgttctacatccattta

SEQ ID NO: 96679 - DNA, 22 bp, synthetic construct
  misc_feature 1..22: note = chemically synthesized
  source 1..22: mol_type = other DNA
gcttgttctacatccatttatt

SEQ ID NO: 96680 - DNA, 22 bp, synthetic construct
  misc_feature 1..22: note = chemically synthesized
  source 1..22: mol_type = other DNA
gttctacatccatttatttttt

SEQ ID NO: 96681 - DNA, 22 bp, synthetic construct
  misc_feature 1..22: note = chemically synthesized
  source 1..22: mol_type = other DNA
ttctacatccatttattttttc

SEQ ID NO: 96682 - DNA, 22 bp, synthetic construct
  misc_feature 1..22: note = chemically synthesized
  source 1..22: mol_type = other DNA
tacatccatttattttttcttt

SEQ ID NO: 96683 - DNA, 22 bp, synthetic construct
  misc_feature 1..22: note = chemically synthesized
  source 1..22: mol_type = other DNA
catccatttattttttcttttt

SEQ ID NO: 96684 - DNA, 22 bp, synthetic construct
  misc_feature 1..22: note = chemically synthesized
  source 1..22: mol_type = other DNA
attttttcttttttctttttct

SEQ ID NO: 96685 - DNA, 22 bp, synthetic construct
  misc_feature 1..22: note = chemically synthesized
  source 1..22: mol_type = other DNA
ttttttcttttttctttttctt

SEQ ID NO: 96686 - DNA, 22 bp, synthetic construct
  misc_feature 1..22: note = chemically synthesized
  source 1..22: mol_type = other DNA
tttcttttttctttttcttttc

SEQ ID NO: 96687 - DNA, 22 bp, synthetic construct
  misc_feature 1..22: note = chemically synthesized
  source 1..22: mol_type = other DNA
ttcttttttctttttcttttct

SEQ ID NO: 96688 - DNA, 22 bp, synthetic construct
  misc_feature 1..22: note = chemically synthesized
  source 1..22: mol_type = other DNA
tcttttttctttttcttttctt

SEQ ID NO: 96689 - DNA, 22 bp, synthetic construct
  misc_feature 1..22: note = chemically synthesized
  source 1..22: mol_type = other DNA
cttttttctttttcttttcttt

SEQ ID NO: 96690 - DNA, 22 bp, synthetic construct
  misc_feature 1..22: note = chemically synthesized
  source 1..22: mol_type = other DNA
ttttttctttttcttttctttc

SEQ ID NO: 96691 - DNA, 22 bp, synthetic construct
  misc_feature 1..22: note = chemically synthesized
  source 1..22: mol_type = other DNA
ttttctttttcttttctttctt

SEQ ID NO: 96692 - DNA, 22 bp, synthetic construct
  misc_feature 1..22: note = chemically synthesized
  source 1..22: mol_type = other DNA
tttctttttcttttctttcttt

SEQ ID NO: 96693 - DNA, 22 bp, synthetic construct
  misc_feature 1..22: note = chemically synthesized
  source 1..22: mol_type = other DNA
ttctttttcttttctttctttc

SEQ ID NO: 96694 - DNA, 22 bp, synthetic construct
  misc_feature 1..22: note = chemically synthesized
  source 1..22: mol_type = other DNA
tctttttcttttctttctttct

SEQ ID NO: 96695 - DNA, 22 bp, synthetic construct
  misc_feature 1..22: note = chemically synthesized
  source 1..22: mol_type = other DNA
ctttttcttttctttctttctt

SEQ ID NO: 96696 - DNA, 22 bp, synthetic construct
  misc_feature 1..22: note = chemically synthesized
  source 1..22: mol_type = other DNA
tttttcttttctttctttcttt

SEQ ID NO: 96697 - DNA, 22 bp, synthetic construct
  misc_feature 1..22: note = chemically synthesized
  source 1..22: mol_type = other DNA
tttcttttctttctttcttttt

SEQ ID NO: 96698 - DNA, 22 bp, synthetic construct
  misc_feature 1..22: note = chemically synthesized
  source 1..22: mol_type = other DNA
ttcttttctttctttctttttt

SEQ ID NO: 96699 - DNA, 22 bp, synthetic construct
  misc_feature 1..22: note = chemically synthesized
  source 1..22: mol_type = other DNA
tcttttctttctttcttttttt

SEQ ID NO: 96700 - DNA, 22 bp, synthetic construct
  misc_feature 1..22: note = chemically synthesized
  source 1..22: mol_type = other DNA
cttttctttctttctttttttt

SEQ ID NO: 96701 - DNA, 22 bp, synthetic construct
  misc_feature 1..22: note = chemically synthesized
  source 1..22: mol_type = other DNA
ttttctttctttcttttttttt

SEQ ID NO: 96702 - DNA, 22 bp, synthetic construct
  misc_feature 1..22: note = chemically synthesized
  source 1..22: mol_type = other DNA
ttctttctttcttttttttttt

SEQ ID NO: 96703 - DNA, 22 bp, synthetic construct
  misc_feature 1..22: note = chemically synthesized
  source 1..22: mol_type = other DNA
tctttctttctttttttttttt

SEQ ID NO: 96704 - DNA, 22 bp, synthetic construct
  misc_feature 1..22: note = chemically synthesized
  source 1..22: mol_type = other DNA
ctttctttcttttttttttttt

SEQ ID NO: 96705 - DNA, 22 bp, synthetic construct
  misc_feature 1..22: note = chemically synthesized
  source 1..22: mol_type = other DNA
tttctttctttttttttttttt

SEQ ID NO: 96706 - DNA, 22 bp, synthetic construct
  misc_feature 1..22: note = chemically synthesized
  source 1..22: mol_type = other DNA
tctttctttttttttttttttt

SEQ ID NO: 96707 - DNA, 22 bp, synthetic construct
  misc_feature 1..22: note = chemically synthesized
  source 1..22: mol_type = other DNA
ctttcttttttttttttttttg

SEQ ID NO: 96708 - DNA, 22 bp, synthetic construct
  misc_feature 1..22: note = chemically synthesized
  source 1..22: mol_type = other DNA
tttcttttttttttttttttga

SEQ ID NO: 96709 - DNA, 22 bp, synthetic construct
  misc_feature 1..22: note = chemically synthesized
  source 1..22: mol_type = other DNA
tcttttttttttttttttgaga

SEQ ID NO: 96710 - DNA, 22 bp, synthetic construct
  misc_feature 1..22: note = chemically synthesized
  source 1..22: mol_type = other DNA
cttttttttttttttttgagac

SEQ ID NO: 96711 - DNA, 22 bp, synthetic construct
  misc_feature 1..22: note = chemically synthesized
  source 1..22: mol_type = other DNA
ttttttttttttttttgagacg

SEQ ID NO: 96712 - DNA, 22 bp, synthetic construct
  misc_feature 1..22: note = chemically synthesized
  source 1..22: mol_type = other DNA
ttttttttttttttgagacgga

SEQ ID NO: 96713 - DNA, 22 bp, synthetic construct
  misc_feature 1..22: note = chemically synthesized
  source 1..22: mol_type = other DNA
tttttttttttttgagacggag

SEQ ID NO: 96714 - DNA, 22 bp, synthetic construct
  misc_feature 1..22: note = chemically synthesized
  source 1..22: mol_type = other DNA
ttttttttttttgagacggagt

SEQ ID NO: 96715 - DNA, 22 bp, synthetic construct
  misc_feature 1..22: note = chemically synthesized
  source 1..22: mol_type = other DNA
tttttttttttgagacggagtc

SEQ ID NO: 96716 - DNA, 22 bp, synthetic construct
  misc_feature 1..22: note = chemically synthesized
  source 1..22: mol_type = other DNA
ttttttttttgagacggagtct

SEQ ID NO: 96717 - DNA, 22 bp, synthetic construct
  misc_feature 1..22: note = chemically synthesized
  source 1..22: mol_type = other DNA
tttttttttgagacggagtctc

SEQ ID NO: 96718 - DNA, 22 bp, synthetic construct
  misc_feature 1..22: note = chemically synthesized
  source 1..22: mol_type = other DNA
ttttttttgagacggagtctca

SEQ ID NO: 96719 - DNA, 22 bp, synthetic construct
  misc_feature 1..22: note = chemically synthesized
  source 1..22: mol_type = other DNA
tttttttgagacggagtctcac

SEQ ID NO: 96720 - DNA, 22 bp, synthetic construct
  misc_feature 1..22: note = chemically synthesized
  source 1..22: mol_type = other DNA
ttttttgagacggagtctcact

SEQ ID NO: 96721 - DNA, 22 bp, synthetic construct
  misc_feature 1..22: note = chemically synthesized
  source 1..22: mol_type = other DNA
tttttgagacggagtctcactc

SEQ ID NO: 96722 - DNA, 22 bp, synthetic construct
  misc_feature 1..22: note = chemically synthesized
  source 1..22: mol_type = other DNA
ttttgagacggagtctcactct

SEQ ID NO: 96723 - DNA, 22 bp, synthetic construct
  misc_feature 1..22: note = chemically synthesized
  source 1..22: mol_type = other DNA
tttgagacggagtctcactctg

SEQ ID NO: 96724 - DNA, 22 bp, synthetic construct
  misc_feature 1..22: note = chemically synthesized
  source 1..22: mol_type = other DNA
ttgagacggagtctcactctgt

SEQ ID NO: 96725 - DNA, 22 bp, synthetic construct
  misc_feature 1..22: note = chemically synthesized
  source 1..22: mol_type = other DNA
tgagacggagtctcactctgtt

SEQ ID NO: 96726 - DNA, 22 bp, synthetic construct
  misc_feature 1..22: note = chemically synthesized
  source 1..22: mol_type = other DNA
gagacggagtctcactctgttg

SEQ ID NO: 96727 - DNA, 22 bp, synthetic construct
  misc_feature 1..22: note = chemically synthesized
  source 1..22: mol_type = other DNA
agacggagtctcactctgttgc

SEQ ID NO: 96728 - DNA, 22 bp, synthetic construct
  misc_feature 1..22: note = chemically synthesized
  source 1..22: mol_type = other DNA
actctgttgccagactggagtg

SEQ ID NO: 96729 - DNA, 22 bp, synthetic construct
  misc_feature 1..22: note = chemically synthesized
  source 1..22: mol_type = other DNA
tgttgccagactggagtgcaat

SEQ ID NO: 96730 - DNA, 22 bp, synthetic construct
  misc_feature 1..22: note = chemically synthesized
  source 1..22: mol_type = other DNA
ttgccagactggagtgcaatgg

SEQ ID NO: 96731 - DNA, 22 bp, synthetic construct
  misc_feature 1..22: note = chemically synthesized
  source 1..22: mol_type = other DNA
ccagactggagtgcaatggcac

SEQ ID NO: 96732 - DNA, 22 bp, synthetic construct
  misc_feature 1..22: note = chemically synthesized
  source 1..22: mol_type = other DNA
gagtgcaatggcactatctcag

SEQ ID NO: 96733 - DNA, 22 bp, synthetic construct
  misc_feature 1..22: note = chemically synthesized
  source 1..22: mol_type = other DNA
tctcagctcactgcaaccttcg

SEQ ID NO: 96734 - DNA, 22 bp, synthetic construct
  misc_feature 1..22: note = chemically synthesized
  source 1..22: mol_type = other DNA
agctcactgcaaccttcgcctc

SEQ ID NO: 96735 - DNA, 22 bp, synthetic construct
  misc_feature 1..22: note = chemically synthesized
  source 1..22: mol_type = other DNA
actgcaaccttcgcctcctggg

SEQ ID NO: 96736 - DNA, 22 bp, synthetic construct
  misc_feature 1..22: note = chemically synthesized
  source 1..22: mol_type = other DNA
caaccttcgcctcctgggttca

SEQ ID NO: 96737 - DNA, 22 bp, synthetic construct
  misc_feature 1..22: note = chemically synthesized
  source 1..22: mol_type = other DNA
cgcctcctgggttcaaacgatt

SEQ ID NO: 96738 - DNA, 22 bp, synthetic construct
  misc_feature 1..22: note = chemically synthesized
  source 1..22: mol_type = other DNA
gcctcctgggttcaaacgattc

SEQ ID NO: 96739 - DNA, 22 bp, synthetic construct
  misc_feature 1..22: note = chemically synthesized
  source 1..22: mol_type = other DNA
ctgggttcaaacgattctcctg

SEQ ID NO: 96740 - DNA, 22 bp, synthetic construct
  misc_feature 1..22: note = chemically synthesized
  source 1..22: mol_type = other DNA
ggttcaaacgattctcctgcct

SEQ ID NO: 96741 - DNA, 22 bp, synthetic construct
  misc_feature 1..22: note = chemically synthesized
  source 1..22: mol_type = other DNA
aaacgattctcctgcctcagcc

SEQ ID NO: 96742 - DNA, 22 bp, synthetic construct
  misc_feature 1..22: note = chemically synthesized
  source 1..22: mol_type = other DNA
tcctgcctcagcctcccgagca

SEQ ID NO: 96743 - DNA, 22 bp, synthetic construct
  misc_feature 1..22: note = chemically synthesized
  source 1..22: mol_type = other DNA
ctgcctcagcctcccgagcagc

SEQ ID NO: 96744 - DNA, 22 bp, synthetic construct
  misc_feature 1..22: note = chemically synthesized
  source 1..22: mol_type = other DNA
cctcagcctcccgagcagctgg

SEQ ID NO: 96745 - DNA, 22 bp, synthetic construct
  misc_feature 1..22: note = chemically synthesized
  source 1..22: mol_type = other DNA
agcctcccgagcagctgggact

SEQ ID NO: 96746 - DNA, 22 bp, synthetic construct
  misc_feature 1..22: note = chemically synthesized
  source 1..22: mol_type = other DNA
ccgagcagctgggactacaggc

SEQ ID NO: 96747 - DNA, 22 bp, synthetic construct
  misc_feature 1..22: note = chemically synthesized
  source 1..22: mol_type = other DNA
ggactacaggcgcatgccacca

SEQ ID NO: 96748 - DNA, 22 bp, synthetic construct
  misc_feature 1..22: note = chemically synthesized
  source 1..22: mol_type = other DNA
caggcgcatgccaccatgccca

SEQ ID NO: 96749 - DNA, 22 bp, synthetic construct
  misc_feature 1..22: note = chemically synthesized
  source 1..22: mol_type = other DNA
atttttttatttttagtagaga

SEQ ID NO: 96750 - DNA, 22 bp, synthetic construct
  misc_feature 1..22: note = chemically synthesized
  source 1..22: mol_type = other DNA
ttttatttttagtagagacggg

SEQ ID NO: 96751 - DNA, 22 bp, synthetic construct
  misc_feature 1..22: note = chemically synthesized
  source 1..22: mol_type = other DNA
tttatttttagtagagacggga

SEQ ID NO: 96752 - DNA, 22 bp, synthetic construct
  misc_feature 1..22: note = chemically synthesized
  source 1..22: mol_type = other DNA
ttatttttagtagagacgggat

SEQ ID NO: 96753 - DNA, 22 bp, synthetic construct
  misc_feature 1..22: note = chemically synthesized
  source 1..22: mol_type = other DNA
tatttttagtagagacgggatt

SEQ ID NO: 96754 - DNA, 22 bp, synthetic construct
  misc_feature 1..22: note = chemically synthesized
  source 1..22: mol_type = other DNA
atttttagtagagacgggattt

SEQ ID NO: 96755 - DNA, 22 bp, synthetic construct
  misc_feature 1..22: note = chemically synthesized
  source 1..22: mol_type = other DNA
tttttagtagagacgggatttc

SEQ ID NO: 96756 - DNA, 22 bp, synthetic construct
  misc_feature 1..22: note = chemically synthesized
  source 1..22: mol_type = other DNA
ttagtagagacgggatttcacc

SEQ ID NO: 96757 - DNA, 22 bp, synthetic construct
  misc_feature 1..22: note = chemically synthesized
  source 1..22: mol_type = other DNA
tagtagagacgggatttcacca

SEQ ID NO: 96758 - DNA, 22 bp, synthetic construct
  misc_feature 1..22: note = chemically synthesized
  source 1..22: mol_type = other DNA
agtagagacgggatttcaccat

SEQ ID NO: 96759 - DNA, 22 bp, synthetic construct
  misc_feature 1..22: note = chemically synthesized
  source 1..22: mol_type = other DNA
gtagagacgggatttcaccatg

SEQ ID NO: 96760 - DNA, 22 bp, synthetic construct
  misc_feature 1..22: note = chemically synthesized
  source 1..22: mol_type = other DNA
caccatgtttgccaggatggtc

SEQ ID NO: 96761 - DNA, 22 bp, synthetic construct
  misc_feature 1..22: note = chemically synthesized
  source 1..22: mol_type = other DNA
accatgtttgccaggatggtct

SEQ ID NO: 96762 - DNA, 22 bp, synthetic construct
  misc_feature 1..22: note = chemically synthesized
  source 1..22: mol_type = other DNA
gccaggatggtctcgatctctt

SEQ ID NO: 96763 - DNA, 22 bp, synthetic construct
  misc_feature 1..22: note = chemically synthesized
  source 1..22: mol_type = other DNA
ccaggatggtctcgatctcttg

SEQ ID NO: 96764 - DNA, 22 bp, synthetic construct
  misc_feature 1..22: note = chemically synthesized
  source 1..22: mol_type = other DNA
gatctcttgacctcatgatctg

SEQ ID NO: 96765 - DNA, 22 bp, synthetic construct
  misc_feature 1..22: note = chemically synthesized
  source 1..22: mol_type = other DNA
ttgacctcatgatctgcccacc

SEQ ID NO: 96766 - DNA, 22 bp, synthetic construct
  misc_feature 1..22: note = chemically synthesized
  source 1..22: mol_type = other DNA
gacctcatgatctgcccacctc

SEQ ID NO: 96767 - DNA, 22 bp, synthetic construct
  misc_feature 1..22: note = chemically synthesized
  source 1..22: mol_type = other DNA
acctcatgatctgcccacctct

SEQ ID NO: 96768 - DNA, 22 bp, synthetic construct
  misc_feature 1..22: note = chemically synthesized
  source 1..22: mol_type = other DNA
atgatctgcccacctctgcctc

SEQ ID NO: 96769 - DNA, 22 bp, synthetic construct
  misc_feature 1..22: note = chemically synthesized
  source 1..22: mol_type = other DNA
cccacctctgcctccgtctcca

SEQ ID NO: 96770 - DNA, 22 bp, synthetic construct
  misc_feature 1..22: note = chemically synthesized
  source 1..22: mol_type = other DNA
tgcctccgtctccatccatttc

SEQ ID NO: 96771 - DNA, 22 bp, synthetic construct
  misc_feature 1..22: note = chemically synthesized
  source 1..22: mol_type = other DNA
cctccgtctccatccatttcta

SEQ ID NO: 96772 - DNA, 22 bp, synthetic construct
  misc_feature 1..22: note = chemically synthesized
  source 1..22: mol_type = other DNA
cgtctccatccatttctaccat

SEQ ID NO: 96773 - DNA, 22 bp, synthetic construct
  misc_feature 1..22: note = chemically synthesized
  source 1..22: mol_type = other DNA
catccatttctaccatttcttt

SEQ ID NO: 96774 - DNA, 22 bp, synthetic construct
  misc_feature 1..22: note = chemically synthesized
  source 1..22: mol_type = other DNA
ctaccatttctttctcctatgg

SEQ ID NO: 96775 - DNA, 22 bp, synthetic construct
  misc_feature 1..22: note = chemically synthesized
  source 1..22: mol_type = other DNA
taccatttctttctcctatggc

SEQ ID NO: 96776 - DNA, 22 bp, synthetic construct
  misc_feature 1..22: note = chemically synthesized
  source 1..22: mol_type = other DNA
ccatttctttctcctatggctc

SEQ ID NO: 96777 - DNA, 22 bp, synthetic construct
  misc_feature 1..22: note = chemically synthesized
  source 1..22: mol_type = other DNA
ctttctcctatggctccccttg

SEQ ID NO: 96778 - DNA, 22 bp, synthetic construct
  misc_feature 1..22: note = chemically synthesized
  source 1..22: mol_type = other DNA
tttctcctatggctccccttgc

SEQ ID NO: 96779 - DNA, 22 bp, synthetic construct
  misc_feature 1..22: note = chemically synthesized
  source 1..22: mol_type = other DNA
tctcctatggctccccttgccc

SEQ ID NO: 96780 - DNA, 22 bp, synthetic construct
  misc_feature 1..22: note = chemically synthesized
  source 1..22: mol_type = other DNA
ctcctatggctccccttgcccc

SEQ ID NO: 96781 - DNA, 22 bp, synthetic construct
  misc_feature 1..22: note = chemically synthesized
  source 1..22: mol_type = other DNA
tcctatggctccccttgcccca

SEQ ID NO: 96782 - DNA, 22 bp, synthetic construct
  misc_feature 1..22: note = chemically synthesized
  source 1..22: mol_type = other DNA
ctatggctccccttgccccacc

SEQ ID NO: 96783 - DNA, 22 bp, synthetic construct
  misc_feature 1..22: note = chemically synthesized
  source 1..22: mol_type = other DNA
tggctccccttgccccaccaga

SEQ ID NO: 96784 - DNA, 22 bp, synthetic construct
  misc_feature 1..22: note = chemically synthesized
  source 1..22: mol_type = other DNA
cccttgccccaccagatctagg

SEQ ID NO: 96785 - DNA, 22 bp, synthetic construct
  misc_feature 1..22: note = chemically synthesized
  source 1..22: mol_type = other DNA
gccccaccagatctaggaattt

SEQ ID NO: 96786 - DNA, 22 bp, synthetic construct
  misc_feature 1..22: note = chemically synthesized
  source 1..22: mol_type = other DNA
ccccaccagatctaggaatttc

SEQ ID NO: 96787 - DNA, 22 bp, synthetic construct
  misc_feature 1..22: note = chemically synthesized
  source 1..22: mol_type = other DNA
ggaatttctgttcctacaattt

SEQ ID NO: 96788 - DNA, 22 bp, synthetic construct
  misc_feature 1..22: note = chemically synthesized
  source 1..22: mol_type = other DNA
ctgttcctacaatttcctgtat

SEQ ID NO: 96789 - DNA, 22 bp, synthetic construct
  misc_feature 1..22: note = chemically synthesized
  source 1..22: mol_type = other DNA
tgttcctacaatttcctgtatg

SEQ ID NO: 96790 - DNA, 22 bp, synthetic construct
  misc_feature 1..22: note = chemically synthesized
  source 1..22: mol_type = other DNA
ttcctacaatttcctgtatgtt

SEQ ID NO: 96791 - DNA, 22 bp, synthetic construct
  misc_feature 1..22: note = chemically synthesized
  source 1..22: mol_type = other DNA
ctacaatttcctgtatgttcag

SEQ ID NO: 96792 - DNA, 22 bp, synthetic construct
  misc_feature 1..22: note = chemically synthesized
  source 1..22: mol_type = other DNA
caatttcctgtatgttcaggcc

SEQ ID NO: 96793 - DNA, 22 bp, synthetic construct
  misc_feature 1..22: note = chemically synthesized
  source 1..22: mol_type = other DNA
cctgtatgttcaggccctagag

SEQ ID NO: 96794 - DNA, 22 bp, synthetic construct
  misc_feature 1..22: note = chemically synthesized
  source 1..22: mol_type = other DNA
ctgtatgttcaggccctagagg

SEQ ID NO: 96795 - DNA, 22 bp, synthetic construct
  misc_feature 1..22: note = chemically synthesized
  source 1..22: mol_type = other DNA
tatgttcaggccctagaggttc

SEQ ID NO: 96796 - DNA, 22 bp, synthetic construct
  misc_feature 1..22: note = chemically synthesized
  source 1..22: mol_type = other DNA
aggccctagaggttcttcgtct

SEQ ID NO: 96797 - DNA, 22 bp, synthetic construct
  misc_feature 1..22: note = chemically synthesized
  source 1..22: mol_type = other DNA
gaggttcttcgtctttttcact

SEQ ID NO: 96798 - DNA, 22 bp, synthetic construct
  misc_feature 1..22: note = chemically synthesized
  source 1..22: mol_type = other DNA
ttcgtctttttcacttagcagt

SEQ ID NO: 96799 - DNA, 22 bp, synthetic construct
  misc_feature 1..22: note = chemically synthesized
  source 1..22: mol_type = other DNA
cgtctttttcacttagcagtat

SEQ ID NO: 96800 - DNA, 22 bp, synthetic construct
  misc_feature 1..22: note = chemically synthesized
  source 1..22: mol_type = other DNA
gtctttttcacttagcagtatg

SEQ ID NO: 96801 - DNA, 22 bp, synthetic construct
  misc_feature 1..22: note = chemically synthesized
  source 1..22: mol_type = other DNA
tttcacttagcagtatggctcc

SEQ ID NO: 96802 - DNA, 22 bp, synthetic construct
  misc_feature 1..22: note = chemically synthesized
  source 1..22: mol_type = other DNA
ttcacttagcagtatggctcct

SEQ ID NO: 96803 - DNA, 22 bp, synthetic construct
  misc_feature 1..22: note = chemically synthesized
  source 1..22: mol_type = other DNA
tcacttagcagtatggctcctg

SEQ ID NO: 96804 - DNA, 22 bp, synthetic construct
  misc_feature 1..22: note = chemically synthesized
  source 1..22: mol_type = other DNA
cacttagcagtatggctcctgt

SEQ ID NO: 96805 - DNA, 22 bp, synthetic construct
  misc_feature 1..22: note = chemically synthesized
  source 1..22: mol_type = other DNA
acttagcagtatggctcctgtc

SEQ ID NO: 96806 - DNA, 22 bp, synthetic construct
  misc_feature 1..22: note = chemically synthesized
  source 1..22: mol_type = other DNA
agcagtatggctcctgtctccc

SEQ ID NO: 96807 - DNA, 22 bp, synthetic construct
  misc_feature 1..22: note = chemically synthesized
  source 1..22: mol_type = other DNA
gcagtatggctcctgtctccca

SEQ ID NO: 96808 - DNA, 22 bp, synthetic construct
  misc_feature 1..22: note = chemically synthesized
  source 1..22: mol_type = other DNA
ctgtctcccaagtcaagtgcct

SEQ ID NO: 96809 - DNA, 22 bp, synthetic construct
  misc_feature 1..22: note = chemically synthesized
  source 1..22: mol_type = other DNA
tctcccaagtcaagtgcctttg

SEQ ID NO: 96810 - DNA, 22 bp, synthetic construct
  misc_feature 1..22: note = chemically synthesized
  source 1..22: mol_type = other DNA
ccaagtcaagtgcctttgggga

SEQ ID NO: 96811 - DNA, 22 bp, synthetic construct
  misc_feature 1..22: note = chemically synthesized
  source 1..22: mol_type = other DNA
tggggattccatattccaagtt

SEQ ID NO: 96812 - DNA, 22 bp, synthetic construct
  misc_feature 1..22: note = chemically synthesized
  source 1..22: mol_type = other DNA
ggggattccatattccaagttt

SEQ ID NO: 96813 - DNA, 22 bp, synthetic construct
  misc_feature 1..22: note = chemically synthesized
  source 1..22: mol_type = other DNA
gggattccatattccaagttta

SEQ ID NO: 96814 - DNA, 22 bp, synthetic construct
  misc_feature 1..22: note = chemically synthesized
  source 1..22: mol_type = other DNA
catattccaagtttactaagag

SEQ ID NO: 96815 - DNA, 22 bp, synthetic construct
  misc_feature 1..22: note = chemically synthesized
  source 1..22: mol_type = other DNA
caagtttactaagagcgtttct

SEQ ID NO: 96816 - DNA, 22 bp, synthetic construct
  misc_feature 1..22: note = chemically synthesized
  source 1..22: mol_type = other DNA
actaagagcgtttctctcttct

SEQ ID NO: 96817 - DNA, 22 bp, synthetic construct
  misc_feature 1..22: note = chemically synthesized
  source 1..22: mol_type = other DNA
ctaagagcgtttctctcttcta

SEQ ID NO: 96818 - DNA, 22 bp, synthetic construct
  misc_feature 1..22: note = chemically synthesized
  source 1..22: mol_type = other DNA
agagcgtttctctcttctataa

SEQ ID NO: 96819 - DNA, 22 bp, synthetic construct
  misc_feature 1..22: note = chemically synthesized
  source 1..22: mol_type = other DNA
ctctcttctataacctgacttt

SEQ ID NO: 96820 - DNA, 22 bp, synthetic construct
  misc_feature 1..22: note = chemically synthesized
  source 1..22: mol_type = other DNA
tctcttctataacctgactttg

SEQ ID NO: 96821 - DNA, 22 bp, synthetic construct
  misc_feature 1..22: note = chemically synthesized
  source 1..22: mol_type = other DNA
tcttctataacctgactttgtt

SEQ ID NO: 96822 - DNA, 22 bp, synthetic construct
  misc_feature 1..22: note = chemically synthesized
  source 1..22: mol_type = other DNA
ttctataacctgactttgttat

SEQ ID NO: 96823 - DNA, 22 bp, synthetic construct
  misc_feature 1..22: note = chemically synthesized
  source 1..22: mol_type = other DNA
ctataacctgactttgttattt

SEQ ID NO: 96824 - DNA, 22 bp, synthetic construct
  misc_feature 1..22: note = chemically synthesized
  source 1..22: mol_type = other DNA
tataacctgactttgttattta

SEQ ID NO: 96825 - DNA, 22 bp, synthetic construct
  misc_feature 1..22: note = chemically synthesized
  source 1..22: mol_type = other DNA
taacctgactttgttatttatt

SEQ ID NO: 96826 - DNA, 22 bp, synthetic construct
  misc_feature 1..22: note = chemically synthesized
  source 1..22: mol_type = other DNA
actttgttatttattatatttt

SEQ ID NO: 96827 - DNA, 22 bp, synthetic construct
  misc_feature 1..22: note = chemically synthesized
  source 1..22: mol_type = other DNA
tgttatttattatattttctta

SEQ ID NO: 96828 - DNA, 22 bp, synthetic construct
  misc_feature 1..22: note = chemically synthesized
  source 1..22: mol_type = other DNA
gttatttattatattttcttat

SEQ ID NO: 96829 - DNA, 22 bp, synthetic construct
  misc_feature 1..22: note = chemically synthesized
  source 1..22: mol_type = other DNA
ttatttattatattttcttatg

SEQ ID NO: 96830 - DNA, 22 bp, synthetic construct
  misc_feature 1..22: note = chemically synthesized
  source 1..22: mol_type = other DNA
tttattatattttcttatgttt

SEQ ID NO: 96831 - DNA, 22 bp, synthetic construct
  misc_feature 1..22: note = chemically synthesized
  source 1..22: mol_type = other DNA
attatattttcttatgtttgtg

SEQ ID NO: 96832 - DNA, 22 bp, synthetic construct
  misc_feature 1..22: note = chemically synthesized
  source 1..22: mol_type = other DNA
ttatattttcttatgtttgtga

SEQ ID NO: 96833 - DNA, 22 bp, synthetic construct
  misc_feature 1..22: note = chemically synthesized
  source 1..22: mol_type = other DNA
tattttcttatgtttgtgataa

SEQ ID NO: 96834 - DNA, 22 bp, synthetic construct
  misc_feature 1..22: note = chemically synthesized
  source 1..22: mol_type = other DNA
tcttatgtttgtgataaaaaaa

SEQ ID NO: 96835 - DNA, 22 bp, synthetic construct
  misc_feature 1..22: note = chemically synthesized
  source 1..22: mol_type = other DNA
cttatgtttgtgataaaaaaaa

SEQ ID NO: 96836 - DNA, 22 bp, synthetic construct
  misc_feature 1..22: note = chemically synthesized
  source 1..22: mol_type = other DNA
ttatgtttgtgataaaaaaaaa

SEQ ID NO: 96837 - DNA, 22 bp, synthetic construct
  misc_feature 1..22: note = chemically synthesized
  source 1..22: mol_type = other DNA
atgtttgtgataaaaaaaaaaa

SEQ ID NO: 96838 - DNA, 22 bp, synthetic construct
  misc_feature 1..22: note = chemically synthesized
  source 1..22: mol_type = other DNA
tgtttgtgataaaaaaaaaaaa

SEQ ID NO: 96839 - DNA, 22 bp, synthetic construct
  misc_feature 1..22: note = chemically synthesized
  source 1..22: mol_type = other DNA
gtgataaaaaaaaaaaaaaaaa

SEQ ID NO: 96840 - DNA, 22 bp, synthetic construct
  misc_feature 1..22: note = chemically synthesized
  source 1..22: mol_type = other DNA
tgataaaaaaaaaaaaaaaaaa

SEQ ID NO: 96841 - DNA, 22 bp, synthetic construct
  misc_feature 1..22: note = chemically synthesized
  source 1..22: mol_type = other DNA
gtggcaagtaagaatgtctccc

SEQ ID NO: 96842 - DNA, 22 bp, synthetic construct
  misc_feature 1..22: note = chemically synthesized
  source 1..22: mol_type = other DNA
tggcaagtaagaatgtctccct

SEQ ID NO: 96843 - DNA, 22 bp, synthetic construct
  misc_feature 1..22: note = chemically synthesized
  source 1..22: mol_type = other DNA
ccttgcttttctcccatgattc

SEQ ID NO: 96844 - DNA, 22 bp, synthetic construct
  misc_feature 1..22: note = chemically synthesized
  source 1..22: mol_type = other DNA
gcttttctcccatgattccaga

SEQ ID NO: 96845 - DNA, 22 bp, synthetic construct
  misc_feature 1..22: note = chemically synthesized
  source 1..22: mol_type = other DNA
cttttctcccatgattccagaa

SEQ ID NO: 96846 - DNA, 22 bp, synthetic construct
  misc_feature 1..22: note = chemically synthesized
  source 1..22: mol_type = other DNA
ttctcccatgattccagaagtc

SEQ ID NO: 96847 - DNA, 22 bp, synthetic construct
  misc_feature 1..22: note = chemically synthesized
  source 1..22: mol_type = other DNA
tctcccatgattccagaagtct

SEQ ID NO: 96848 - DNA, 22 bp, synthetic construct
  misc_feature 1..22: note = chemically synthesized
  source 1..22: mol_type = other DNA
ctcccatgattccagaagtctt

SEQ ID NO: 96849 - DNA, 22 bp, synthetic construct
  misc_feature 1..22: note = chemically synthesized
  source 1..22: mol_type = other DNA
tcccatgattccagaagtcttc

SEQ ID NO: 96850 - DNA, 22 bp, synthetic construct
  misc_feature 1..22: note = chemically synthesized
  source 1..22: mol_type = other DNA
ccatgattccagaagtcttcac

SEQ ID NO: 96851 - DNA, 22 bp, synthetic construct
  misc_feature 1..22: note = chemically synthesized
  source 1..22: mol_type = other DNA
cagaagtcttcacctgacttaa

SEQ ID NO: 96852 - DNA, 22 bp, synthetic construct
  misc_feature 1..22: note = chemically synthesized
  source 1..22: mol_type = other DNA
cacctgacttaatgactgccca

SEQ ID NO: 96853 - DNA, 22 bp, synthetic construct
  misc_feature 1..22: note = chemically synthesized
  source 1..22: mol_type = other DNA
acctgacttaatgactgcccaa

SEQ ID NO: 96854 - DNA, 22 bp, synthetic construct
  misc_feature 1..22: note = chemically synthesized
  source 1..22: mol_type = other DNA
acttaatgactgcccaaattgt

SEQ ID NO: 96855 - DNA, 22 bp, synthetic construct
  misc_feature 1..22: note = chemically synthesized
  source 1..22: mol_type = other DNA
aatgactgcccaaattgttatt

SEQ ID NO: 96856 - DNA, 22 bp, synthetic construct
  misc_feature 1..22: note = chemically synthesized
  source 1..22: mol_type = other DNA
atgactgcccaaattgttatta

SEQ ID NO: 96857 - DNA, 22 bp, synthetic construct
  misc_feature 1..22: note = chemically synthesized
  source 1..22: mol_type = other DNA
cccaaattgttattattccagg

SEQ ID NO: 96858 - DNA, 22 bp, synthetic construct
  misc_feature 1..22: note = chemically synthesized
  source 1..22: mol_type = other DNA
ttattattccaggccactgaat

SEQ ID NO: 96859 - DNA, 22 bp, synthetic construct
  misc_feature 1..22: note = chemically synthesized
  source 1..22: mol_type = other DNA
ttattccaggccactgaatttc

SEQ ID NO: 96860 - DNA, 22 bp, synthetic construct
  misc_feature 1..22: note = chemically synthesized
  source 1..22: mol_type = other DNA
ttccaggccactgaatttctac

SEQ ID NO: 96861 - DNA, 22 bp, synthetic construct
  misc_feature 1..22: note = chemically synthesized
  source 1..22: mol_type = other DNA
caggccactgaatttctactcc

SEQ ID NO: 96862 - DNA, 22 bp, synthetic construct
  misc_feature 1..22: note = chemically synthesized
  source 1..22: mol_type = other DNA
aatttctactccattttctttt

SEQ ID NO: 96863 - DNA, 22 bp, synthetic construct
  misc_feature 1..22: note = chemically synthesized
  source 1..22: mol_type = other DNA
ctactccattttcttttagcta

SEQ ID NO: 96864 - DNA, 22 bp, synthetic construct
  misc_feature 1..22: note = chemically synthesized
  source 1..22: mol_type = other DNA
tactccattttcttttagctat

SEQ ID NO: 96865 - DNA, 22 bp, synthetic construct
  misc_feature 1..22: note = chemically synthesized
  source 1..22: mol_type = other DNA
ctccattttcttttagctatta

SEQ ID NO: 96866 - DNA, 22 bp, synthetic construct
  misc_feature 1..22: note = chemically synthesized
  source 1..22: mol_type = other DNA
cattttcttttagctattaacc

SEQ ID NO: 96867 - DNA, 22 bp, synthetic construct
  misc_feature 1..22: note = chemically synthesized
  source 1..22: mol_type = other DNA
tcttttagctattaaccaatgg

SEQ ID NO: 96868 - DNA, 22 bp, synthetic construct
  misc_feature 1..22: note = chemically synthesized
  source 1..22: mol_type = other DNA
cttttagctattaaccaatggt

SEQ ID NO: 96869 - DNA, 22 bp, synthetic construct
  misc_feature 1..22: note = chemically synthesized
  source 1..22: mol_type = other DNA
ttttagctattaaccaatggta

SEQ ID NO: 96870 - DNA, 22 bp, synthetic construct
  misc_feature 1..22: note = chemically synthesized
  source 1..22: mol_type = other DNA
ttagctattaaccaatggtatc

SEQ ID NO: 96871 - DNA, 22 bp, synthetic construct
  misc_feature 1..22: note = chemically synthesized
  source 1..22: mol_type = other DNA
tagctattaaccaatggtatct

SEQ ID NO: 96872 - DNA, 22 bp, synthetic construct
  misc_feature 1..22: note = chemically synthesized
  source 1..22: mol_type = other DNA
agctattaaccaatggtatctt

SEQ ID NO: 96873 - DNA, 22 bp, synthetic construct
  misc_feature 1..22: note = chemically synthesized
  source 1..22: mol_type = other DNA
gctattaaccaatggtatcttt

SEQ ID NO: 96874 - DNA, 22 bp, synthetic construct
  misc_feature 1..22: note = chemically synthesized
  source 1..22: mol_type = other DNA
ttaaccaatggtatctttctga

SEQ ID NO: 96875 - DNA, 22 bp, synthetic construct
  misc_feature 1..22: note = chemically synthesized
  source 1..22: mol_type = other DNA
accaatggtatctttctgagca

SEQ ID NO: 96876 - DNA, 22 bp, synthetic construct
  misc_feature 1..22: note = chemically synthesized
  source 1..22: mol_type = other DNA
tctgagcatatattctaaccat

SEQ ID NO: 96877 - DNA, 22 bp, synthetic construct
  misc_feature 1..22: note = chemically synthesized
  source 1..22: mol_type = other DNA
ctgagcatatattctaaccatt

SEQ ID NO: 96878 - DNA, 22 bp, synthetic construct
  misc_feature 1..22: note = chemically synthesized
  source 1..22: mol_type = other DNA
tgagcatatattctaaccattg

SEQ ID NO: 96879 - DNA, 22 bp, synthetic construct
  misc_feature 1..22: note = chemically synthesized
  source 1..22: mol_type = other DNA
agcatatattctaaccattggc

SEQ ID NO: 96880 - DNA, 22 bp, synthetic construct
  misc_feature 1..22: note = chemically synthesized
  source 1..22: mol_type = other DNA
taaccattggctaacacagaca

SEQ ID NO: 96881 - DNA, 22 bp, synthetic construct
  misc_feature 1..22: note = chemically synthesized
  source 1..22: mol_type = other DNA
accattggctaacacagacaaa

SEQ ID NO: 96882 - DNA, 22 bp, synthetic construct
  misc_feature 1..22: note = chemically synthesized
  source 1..22: mol_type = other DNA
gctaacacagacaaaaccagga

SEQ ID NO: 96883 - DNA, 22 bp, synthetic construct
  misc_feature 1..22: note = chemically synthesized
  source 1..22: mol_type = other DNA
acacagacaaaaccaggaattc

SEQ ID NO: 96884 - DNA, 22 bp, synthetic construct
  misc_feature 1..22: note = chemically synthesized
  source 1..22: mol_type = other DNA
ctaaactttttttgtgtcacag

SEQ ID NO: 96885 - DNA, 22 bp, synthetic construct
  misc_feature 1..22: note = chemically synthesized
  source 1..22: mol_type = other DNA
aactttttttgtgtcacaggcc

SEQ ID NO: 96886 - DNA, 22 bp, synthetic construct
  misc_feature 1..22: note = chemically synthesized
  source 1..22: mol_type = other DNA
tttttgtgtcacaggccagttt

SEQ ID NO: 96887 - DNA, 22 bp, synthetic construct
  misc_feature 1..22: note = chemically synthesized
  source 1..22: mol_type = other DNA
ttttgtgtcacaggccagtttg

SEQ ID NO: 96888 - DNA, 22 bp, synthetic construct
  misc_feature 1..22: note = chemically synthesized
  source 1..22: mol_type = other DNA
tttgtgtcacaggccagtttgg

SEQ ID NO: 96889 - DNA, 22 bp, synthetic construct
  misc_feature 1..22: note = chemically synthesized
  source 1..22: mol_type = other DNA
ttgtgtcacaggccagtttggc

SEQ ID NO: 96890 - DNA, 22 bp, synthetic construct
  misc_feature 1..22: note = chemically synthesized
  source 1..22: mol_type = other DNA
tgtgtcacaggccagtttggca

SEQ ID NO: 96891 - DNA, 22 bp, synthetic construct
  misc_feature 1..22: note = chemically synthesized
  source 1..22: mol_type = other DNA
gtgtcacaggccagtttggcag

SEQ ID NO: 96892 - DNA, 22 bp, synthetic construct
  misc_feature 1..22: note = chemically synthesized
  source 1..22: mol_type = other DNA
tgtcacaggccagtttggcaga

SEQ ID NO: 96893 - DNA, 22 bp, synthetic construct
  misc_feature 1..22: note = chemically synthesized
  source 1..22: mol_type = other DNA
ggcagactgtaagtgctaaaaa

SEQ ID NO: 96894 - DNA, 22 bp, synthetic construct
  misc_feature 1..22: note = chemically synthesized
  source 1..22: mol_type = other DNA
gcagactgtaagtgctaaaaaa

SEQ ID NO: 96895 - DNA, 22 bp, synthetic construct
  misc_feature 1..22: note = chemically synthesized
  source 1..22: mol_type = other DNA
taagtgctaaaaaaatatgttt

SEQ ID NO: 96896 - DNA, 22 bp, synthetic construct
  misc_feature 1..22: note = chemically synthesized
  source 1..22: mol_type = other DNA
aaaaaatatgtttttattgcat

SEQ ID NO: 96897 - DNA, 22 bp, synthetic construct
  misc_feature 1..22: note = chemically synthesized
  source 1..22: mol_type = other DNA
ttattgcatcaaataatataca

SEQ ID NO: 96898 - DNA, 22 bp, synthetic construct
  misc_feature 1..22: note = chemically synthesized
  source 1..22: mol_type = other DNA
tattgcatcaaataatatacat

SEQ ID NO: 96899 - DNA, 22 bp, synthetic construct
  misc_feature 1..22: note = chemically synthesized
  source 1..22: mol_type = other DNA
attgcatcaaataatatacata

SEQ ID NO: 96900 - DNA, 22 bp, synthetic construct
  misc_feature 1..22: note = chemically synthesized
  source 1..22: mol_type = other DNA
ttgcatcaaataatatacatag

SEQ ID NO: 96901 - DNA, 22 bp, synthetic construct
  misc_feature 1..22: note = chemically synthesized
  source 1..22: mol_type = other DNA
catcaaataatatacataggag

SEQ ID NO: 96902 - DNA, 22 bp, synthetic construct
  misc_feature 1..22: note = chemically synthesized
  source 1..22: mol_type = other DNA
agtttaattacactgaaatatc

SEQ ID NO: 96903 - DNA, 22 bp, synthetic construct
  misc_feature 1..22: note = chemically synthesized
  source 1..22: mol_type = other DNA
aattacactgaaatatcattat

SEQ ID NO: 96904 - DNA, 22 bp, synthetic construct
  misc_feature 1..22: note = chemically synthesized
  source 1..22: mol_type = other DNA
attacactgaaatatcattatc

SEQ ID NO: 96905 - DNA, 22 bp, synthetic construct
  misc_feature 1..22: note = chemically synthesized
  source 1..22: mol_type = other DNA
cactgaaatatcattatcagac

SEQ ID NO: 96906 - DNA, 22 bp, synthetic construct
  misc_feature 1..22: note = chemically synthesized
  source 1..22: mol_type = other DNA
aaatatcattatcagacatcaa

SEQ ID NO: 96907 - DNA, 22 bp, synthetic construct
  misc_feature 1..22: note = chemically synthesized
  source 1..22: mol_type = other DNA
tcagacatcaaacattacattt

SEQ ID NO: 96908 - DNA, 22 bp, synthetic construct
  misc_feature 1..22: note = chemically synthesized
  source 1..22: mol_type = other DNA
catttgtggtatagtatttatt

SEQ ID NO: 96909 - DNA, 22 bp, synthetic construct
  misc_feature 1..22: note = chemically synthesized
  source 1..22: mol_type = other DNA
gtggtatagtatttattatatt

SEQ ID NO: 96910 - DNA, 22 bp, synthetic construct
  misc_feature 1..22: note = chemically synthesized
  source 1..22: mol_type = other DNA
tggtatagtatttattatattt

SEQ ID NO: 96911 - DNA, 22 bp, synthetic construct
  misc_feature 1..22: note = chemically synthesized
  source 1..22: mol_type = other DNA
attatatttgcttctttatgaa

SEQ ID NO: 96912 - DNA, 22 bp, synthetic construct
  misc_feature 1..22: note = chemically synthesized
  source 1..22: mol_type = other DNA
ttatatttgcttctttatgaaa

SEQ ID NO: 96913 - DNA, 22 bp, synthetic construct
  misc_feature 1..22: note = chemically synthesized
  source 1..22: mol_type = other DNA
tatttgcttctttatgaaagca

SEQ ID NO: 96914 - DNA, 22 bp, synthetic construct
  misc_feature 1..22: note = chemically synthesized
  source 1..22: mol_type = other DNA
gcttctttatgaaagcattaga

SEQ ID NO: 96915 - DNA, 22 bp, synthetic construct
  misc_feature 1..22: note = chemically synthesized
  source 1..22: mol_type = other DNA
cttctttatgaaagcattagat

SEQ ID NO: 96916 - DNA, 22 bp, synthetic construct
  misc_feature 1..22: note = chemically synthesized
  source 1..22: mol_type = other DNA
ctttatgaaagcattagatcta

SEQ ID NO: 96917 - DNA, 22 bp, synthetic construct
  misc_feature 1..22: note = chemically synthesized
  source 1..22: mol_type = other DNA
tttatgaaagcattagatctag

SEQ ID NO: 96918 - DNA, 22 bp, synthetic construct
  misc_feature 1..22: note = chemically synthesized
  source 1..22: mol_type = other DNA
tatgaaagcattagatctagga

SEQ ID NO: 96919 - DNA, 22 bp, synthetic construct
  misc_feature 1..22: note = chemically synthesized
  source 1..22: mol_type = other DNA
atgaaagcattagatctaggat

SEQ ID NO: 96920 - DNA, 22 bp, synthetic construct
  misc_feature 1..22: note = chemically synthesized
  source 1..22: mol_type = other DNA
tgaaagcattagatctaggatt

SEQ ID NO: 96921 - DNA, 22 bp, synthetic construct
  misc_feature 1..22: note = chemically synthesized
  source 1..22: mol_type = other DNA
gatctaggattgggtctacagc

SEQ ID NO: 96922 - DNA, 22 bp, synthetic construct
  misc_feature 1..22: note = chemically synthesized
  source 1..22: mol_type = other DNA
ggattgggtctacagctacctt

SEQ ID NO: 96923 - DNA, 22 bp, synthetic construct
  misc_feature 1..22: note = chemically synthesized
  source 1..22: mol_type = other DNA
ggtctacagctaccttaagatc

SEQ ID NO: 96924 - DNA, 22 bp, synthetic construct
  misc_feature 1..22: note = chemically synthesized
  source 1..22: mol_type = other DNA
cagctaccttaagatccaagta

SEQ ID NO: 96925 - DNA, 22 bp, synthetic construct
  misc_feature 1..22: note = chemically synthesized
  source 1..22: mol_type = other DNA
ccttaagatccaagtagtgatg

SEQ ID NO: 96926 - DNA, 22 bp, synthetic construct
  misc_feature 1..22: note = chemically synthesized
  source 1..22: mol_type = other DNA
aagatccaagtagtgatgcaga

SEQ ID NO: 96927 - DNA, 22 bp, synthetic construct
  misc_feature 1..22: note = chemically synthesized
  source 1..22: mol_type = other DNA
agatccaagtagtgatgcagat

SEQ ID NO: 96928 - DNA, 22 bp, synthetic construct
  misc_feature 1..22: note = chemically synthesized
  source 1..22: mol_type = other DNA
aaaatatctgcaatgggccagg

SEQ ID NO: 96929 - DNA, 22 bp, synthetic construct
  misc_feature 1..22: note = chemically synthesized
  source 1..22: mol_type = other DNA
caatgggccaggcgtggtggct

SEQ ID NO: 96930 - DNA, 22 bp, synthetic construct
  misc_feature 1..22: note = chemically synthesized
  source 1..22: mol_type = other DNA
acacctataatcccagcacttc

SEQ ID NO: 96931 - DNA, 22 bp, synthetic construct
  misc_feature 1..22: note = chemically synthesized
  source 1..22: mol_type = other DNA
taatcccagcacttcaggaggc

SEQ ID NO: 96932 - DNA, 22 bp, synthetic construct
  misc_feature 1..22: note = chemically synthesized
  source 1..22: mol_type = other DNA
caggaggccaaggcgggcagat

SEQ ID NO: 96933 - DNA, 22 bp, synthetic construct
  misc_feature 1..22: note = chemically synthesized
  source 1..22: mol_type = other DNA
aggaggccaaggcgggcagatc

SEQ ID NO: 96934 - DNA, 22 bp, synthetic construct
  misc_feature 1..22: note = chemically synthesized
  source 1..22: mol_type = other DNA
aggtcaggagttcaagaccagc

SEQ ID NO: 96935 - DNA, 22 bp, synthetic construct
  misc_feature 1..22: note = chemically synthesized
  source 1..22: mol_type = other DNA
aagaccagcctggccaacatgg

SEQ ID NO: 96936 - DNA, 22 bp, synthetic construct
  misc_feature 1..22: note = chemically synthesized
  source 1..22: mol_type = other DNA
gccaacatggcgaaaccccatc

SEQ ID NO: 96937 - DNA, 22 bp, synthetic construct
  misc_feature 1..22: note = chemically synthesized
  source 1..22: mol_type = other DNA
tactaaaaatacaaaaattaga

SEQ ID NO: 96938 - DNA, 22 bp, synthetic construct
  misc_feature 1..22: note = chemically synthesized
  source 1..22: mol_type = other DNA
ctaaaaatacaaaaattagact

SEQ ID NO: 96939 - DNA, 22 bp, synthetic construct
  misc_feature 1..22: note = chemically synthesized
  source 1..22: mol_type = other DNA
aaaatacaaaaattagactggc

SEQ ID NO: 96940 - DNA, 22 bp, synthetic construct
  misc_feature 1..22: note = chemically synthesized
  source 1..22: mol_type = other DNA
gactggcatggtggcaggtgcc

SEQ ID NO: 96941 - DNA, 22 bp, synthetic construct
  misc_feature 1..22: note = chemically synthesized
  source 1..22: mol_type = other DNA
gcatggtggcaggtgcctgtaa

SEQ ID NO: 96942 - DNA, 22 bp, synthetic construct
  misc_feature 1..22: note = chemically synthesized
  source 1..22: mol_type = other DNA
taatccccagctactcaggagg

SEQ ID NO: 96943 - DNA, 22 bp, synthetic construct
  misc_feature 1..22: note = chemically synthesized
  source 1..22: mol_type = other DNA
ctcaggaggccaaggcaggaga

SEQ ID NO: 96944 - DNA, 22 bp, synthetic construct
  misc_feature 1..22: note = chemically synthesized
  source 1..22: mol_type = other DNA
aggaggccaaggcaggagaatt

SEQ ID NO: 96945 - DNA, 22 bp, synthetic construct
  misc_feature 1..22: note = chemically synthesized
  source 1..22: mol_type = other DNA
cttgaatgcaggaaggggaggt

SEQ ID NO: 96946 - DNA, 22 bp, synthetic construct
  misc_feature 1..22: note = chemically synthesized
  source 1..22: mol_type = other DNA
gaatgcaggaaggggaggttgc

SEQ ID NO: 96947 - DNA, 22 bp, synthetic construct
  misc_feature 1..22: note = chemically synthesized
  source 1..22: mol_type = other DNA
aatgcaggaaggggaggttgca

SEQ ID NO: 96948 - DNA, 22 bp, synthetic construct
  misc_feature 1..22: note = chemically synthesized
  source 1..22: mol_type = other DNA
cagtgagccgaaatcatgccac

SEQ ID NO: 96949 - DNA, 22 bp, synthetic construct
  misc_feature 1..22: note = chemically synthesized
  source 1..22: mol_type = other DNA
cactccagcctgggcaataaga

SEQ ID NO: 96950 - DNA, 22 bp, synthetic construct
  misc_feature 1..22: note = chemically synthesized
  source 1..22: mol_type = other DNA
cagcctgggcaataagagcgaa

SEQ ID NO: 96951 - DNA, 22 bp, synthetic construct
  misc_feature 1..22: note = chemically synthesized
  source 1..22: mol_type = other DNA
ggcaataagagcgaaactccat

SEQ ID NO: 96952 - DNA, 22 bp, synthetic construct
  misc_feature 1..22: note = chemically synthesized
  source 1..22: mol_type = other DNA
catctcaaacaaaaacaaaaac

SEQ ID NO: 96953 - DNA, 22 bp, synthetic construct
  misc_feature 1..22: note = chemically synthesized
  source 1..22: mol_type = other DNA
aaacaaaaacaaaaacaaaaag

SEQ ID NO: 96954 - DNA, 22 bp, synthetic construct
  misc_feature 1..22: note = chemically synthesized
  source 1..22: mol_type = other DNA
caatacctatggtgtagtatga

SEQ ID NO: 96955 - DNA, 22 bp, synthetic construct
  misc_feature 1..22: note = chemically synthesized
  source 1..22: mol_type = other DNA
tggtgtagtatgaaaatatctg

SEQ ID NO: 96956 - DNA, 22 bp, synthetic construct
  misc_feature 1..22: note = chemically synthesized
  source 1..22: mol_type = other DNA
tggtttctctttataactatgc

SEQ ID NO: 96957 - DNA, 22 bp, synthetic construct
  misc_feature 1..22: note = chemically synthesized
  source 1..22: mol_type = other DNA
ctctttataactatgcaatagg

SEQ ID NO: 96958 - DNA, 22 bp, synthetic construct
  misc_feature 1..22: note = chemically synthesized
  source 1..22: mol_type = other DNA
tctttataactatgcaataggt

SEQ ID NO: 96959 - DNA, 22 bp, synthetic construct
  misc_feature 1..22: note = chemically synthesized
  source 1..22: mol_type = other DNA
tttataactatgcaataggtac

SEQ ID NO: 96960 - DNA, 22 bp, synthetic construct
  misc_feature 1..22: note = chemically synthesized
  source 1..22: mol_type = other DNA
tataactatgcaataggtactg

SEQ ID NO: 96961 - DNA, 22 bp, synthetic construct
  misc_feature 1..22: note = chemically synthesized
  source 1..22: mol_type = other DNA
ataactatgcaataggtactga

SEQ ID NO: 96962 - DNA, 22 bp, synthetic construct
  misc_feature 1..22: note = chemically synthesized
  source 1..22: mol_type = other DNA
taactatgcaataggtactgat

SEQ ID NO: 96963 - DNA, 22 bp, synthetic construct
  misc_feature 1..22: note = chemically synthesized
  source 1..22: mol_type = other DNA
tgcaataggtactgatgatgtc

SEQ ID NO: 96964 - DNA, 22 bp, synthetic construct
  misc_feature 1..22: note = chemically synthesized
  source 1..22: mol_type = other DNA
atgatgtcattctagtttgtcc

SEQ ID NO: 96965 - DNA, 22 bp, synthetic construct
  misc_feature 1..22: note = chemically synthesized
  source 1..22: mol_type = other DNA
tagtttgtcctttgcattcaaa

SEQ ID NO: 96966 - DNA, 22 bp, synthetic construct
  misc_feature 1..22: note = chemically synthesized
  source 1..22: mol_type = other DNA
gtttgtcctttgcattcaaagt

SEQ ID NO: 96967 - DNA, 22 bp, synthetic construct
  misc_feature 1..22: note = chemically synthesized
  source 1..22: mol_type = other DNA
gtcctttgcattcaaagtagaa

SEQ ID NO: 96968 - DNA, 22 bp, synthetic construct
  misc_feature 1..22: note = chemically synthesized
  source 1..22: mol_type = other DNA
tcctttgcattcaaagtagaag

SEQ ID NO: 96969 - DNA, 22 bp, synthetic construct
  misc_feature 1..22: note = chemically synthesized
  source 1..22: mol_type = other DNA
tgcattcaaagtagaagaaaat

SEQ ID NO: 96970 - DNA, 22 bp, synthetic construct
  misc_feature 1..22: note = chemically synthesized
  source 1..22: mol_type = other DNA
gcattcaaagtagaagaaaatg

SEQ ID NO: 96971 - DNA, 22 bp, synthetic construct
  misc_feature 1..22: note = chemically synthesized
  source 1..22: mol_type = other DNA
cattcaaagtagaagaaaatgc

SEQ ID NO: 96972 - DNA, 22 bp, synthetic construct
  misc_feature 1..22: note = chemically synthesized
  source 1..22: mol_type = other DNA
aaagtagaagaaaatgctaaat

SEQ ID NO: 96973 - DNA, 22 bp, synthetic construct
  misc_feature 1..22: note = chemically synthesized
  source 1..22: mol_type = other DNA
aatttcagttacatgtaagtaa

SEQ ID NO: 96974 - DNA, 22 bp, synthetic construct
  misc_feature 1..22: note = chemically synthesized
  source 1..22: mol_type = other DNA
cagttacatgtaagtaaaaata

SEQ ID NO: 96975 - DNA, 22 bp, synthetic construct
  misc_feature 1..22: note = chemically synthesized
  source 1..22: mol_type = other DNA
agttacatgtaagtaaaaatac

SEQ ID NO: 96976 - DNA, 22 bp, synthetic construct
  misc_feature 1..22: note = chemically synthesized
  source 1..22: mol_type = other DNA
catgtaagtaaaaatacagatt

SEQ ID NO: 96977 - DNA, 22 bp, synthetic construct
  misc_feature 1..22: note = chemically synthesized
  source 1..22: mol_type = other DNA
tttttctataaacttcaccagc

SEQ ID NO: 96978 - DNA, 22 bp, synthetic construct
  misc_feature 1..22: note = chemically synthesized
  source 1..22: mol_type = other DNA
ttttctataaacttcaccagcc

SEQ ID NO: 96979 - DNA, 22 bp, synthetic construct
  misc_feature 1..22: note = chemically synthesized
  source 1..22: mol_type = other DNA
tttctataaacttcaccagccc

SEQ ID NO: 96980 - DNA, 22 bp, synthetic construct
  misc_feature 1..22: note = chemically synthesized
  source 1..22: mol_type = other DNA
ttctataaacttcaccagcccc

SEQ ID NO: 96981 - DNA, 22 bp, synthetic construct
  misc_feature 1..22: note = chemically synthesized
  source 1..22: mol_type = other DNA
tctataaacttcaccagccccc

SEQ ID NO: 96982 - DNA, 22 bp, synthetic construct
  misc_feature 1..22: note = chemically synthesized
  source 1..22: mol_type = other DNA
ctataaacttcaccagccccct

SEQ ID NO: 96983 - DNA, 22 bp, synthetic construct
  misc_feature 1..22: note = chemically synthesized
  source 1..22: mol_type = other DNA
tataaacttcaccagcccccta

SEQ ID NO: 96984 - DNA, 22 bp, synthetic construct
  misc_feature 1..22: note = chemically synthesized
  source 1..22: mol_type = other DNA
taaacttcaccagccccctagt

SEQ ID NO: 96985 - DNA, 22 bp, synthetic construct
  misc_feature 1..22: note = chemically synthesized
  source 1..22: mol_type = other DNA
caccagccccctagtgttctgt

SEQ ID NO: 96986 - DNA, 22 bp, synthetic construct
  misc_feature 1..22: note = chemically synthesized
  source 1..22: mol_type = other DNA
accagccccctagtgttctgtg

SEQ ID NO: 96987 - DNA, 22 bp, synthetic construct
  misc_feature 1..22: note = chemically synthesized
  source 1..22: mol_type = other DNA
gtgttctgtggaccccagatta

SEQ ID NO: 96988 - DNA, 22 bp, synthetic construct
  misc_feature 1..22: note = chemically synthesized
  source 1..22: mol_type = other DNA
tgtggaccccagattaagactt

SEQ ID NO: 96989 - DNA, 22 bp, synthetic construct
  misc_feature 1..22: note = chemically synthesized
  source 1..22: mol_type = other DNA
tggaccccagattaagacttcc

SEQ ID NO: 96990 - DNA, 22 bp, synthetic construct
  misc_feature 1..22: note = chemically synthesized
  source 1..22: mol_type = other DNA
agacttcctgggacaaaatata

SEQ ID NO: 96991 - DNA, 22 bp, synthetic construct
  misc_feature 1..22: note = chemically synthesized
  source 1..22: mol_type = other DNA
cctgggacaaaatatatagcct

SEQ ID NO: 96992 - DNA, 22 bp, synthetic construct
  misc_feature 1..22: note = chemically synthesized
  source 1..22: mol_type = other DNA
ctgggacaaaatatatagccta

SEQ ID NO: 96993 - DNA, 22 bp, synthetic construct
  misc_feature 1..22: note = chemically synthesized
  source 1..22: mol_type = other DNA
ggacaaaatatatagcctagga

SEQ ID NO: 96994 - DNA, 22 bp, synthetic construct
  misc_feature 1..22: note = chemically synthesized
  source 1..22: mol_type = other DNA
ggaagacaagatcctaggtttg

SEQ ID NO: 96995 - DNA, 22 bp, synthetic construct
  misc_feature 1..22: note = chemically synthesized
  source 1..22: mol_type = other DNA
ggtttggaaagaacgtatttga

SEQ ID NO: 96996 - DNA, 22 bp, synthetic construct
  misc_feature 1..22: note = chemically synthesized
  source 1..22: mol_type = other DNA
ggaaagaacgtatttgatccac

SEQ ID NO: 96997 - DNA, 22 bp, synthetic construct
  misc_feature 1..22: note = chemically synthesized
  source 1..22: mol_type = other DNA
gaaagaacgtatttgatccact

SEQ ID NO: 96998 - DNA, 22 bp, synthetic construct
  misc_feature 1..22: note = chemically synthesized
  source 1..22: mol_type = other DNA
gatccactgaaataaaagaaca

SEQ ID NO: 96999 - DNA, 22 bp, synthetic construct
  misc_feature 1..22: note = chemically synthesized
  source 1..22: mol_type = other DNA
atccactgaaataaaagaacaa

SEQ ID NO: 97000 - DNA, 22 bp, synthetic construct
  misc_feature 1..22: note = chemically synthesized
  source 1..22: mol_type = other DNA
aaataaaagaacaatgactaga

SEQ ID NO: 97001 - DNA, 22 bp, synthetic construct
  misc_feature 1..22: note = chemically synthesized
  source 1..22: mol_type = other DNA
gacaaaaagcagctcagctgct

SEQ ID NO: 97002 - DNA, 22 bp, synthetic construct
  misc_feature 1..22: note = chemically synthesized
  source 1..22: mol_type = other DNA
agctgcttgtagcttgaaccaa

SEQ ID NO: 97003 - DNA, 22 bp, synthetic construct
  misc_feature 1..22: note = chemically synthesized
  source 1..22: mol_type = other DNA
cttgtagcttgaaccaagctga

SEQ ID NO: 97004 - DNA, 22 bp, synthetic construct
  misc_feature 1..22: note = chemically synthesized
  source 1..22: mol_type = other DNA
gtagcttgaaccaagctgagct

SEQ ID NO: 97005 - DNA, 22 bp, synthetic construct
  misc_feature 1..22: note = chemically synthesized
  source 1..22: mol_type = other DNA
tagcttgaaccaagctgagctt

SEQ ID NO: 97006 - DNA, 22 bp, synthetic construct
  misc_feature 1..22: note = chemically synthesized
  source 1..22: mol_type = other DNA
gaaccaagctgagcttggctac

SEQ ID NO: 97007 - DNA, 22 bp, synthetic construct
  misc_feature 1..22: note = chemically synthesized
  source 1..22: mol_type = other DNA
aaccaagctgagcttggctact

SEQ ID NO: 97008 - DNA, 22 bp, synthetic construct
  misc_feature 1..22: note = chemically synthesized
  source 1..22: mol_type = other DNA
agcttggctactcagagaagaa

SEQ ID NO: 97009 - DNA, 22 bp, synthetic construct
  misc_feature 1..22: note = chemically synthesized
  source 1..22: mol_type = other DNA
ggctactcagagaagaacagtc

SEQ ID NO: 97010 - DNA, 22 bp, synthetic construct
  misc_feature 1..22: note = chemically synthesized
  source 1..22: mol_type = other DNA
gctactcagagaagaacagtcg

SEQ ID NO: 97011 - DNA, 22 bp, synthetic construct
  misc_feature 1..22: note = chemically synthesized
  source 1..22: mol_type = other DNA
ctcagagaagaacagtcgttga

SEQ ID NO: 97012 - DNA, 22 bp, synthetic construct
  misc_feature 1..22: note = chemically synthesized
  source 1..22: mol_type = other DNA
agagaagaacagtcgttgagat

SEQ ID NO: 97013 - DNA, 22 bp, synthetic construct
  misc_feature 1..22: note = chemically synthesized
  source 1..22: mol_type = other DNA
agataatataattttttttaac

SEQ ID NO: 97014 - DNA, 22 bp, synthetic construct
  misc_feature 1..22: note = chemically synthesized
  source 1..22: mol_type = other DNA
tttttaaccaattaagatacag

SEQ ID NO: 97015 - DNA, 22 bp, synthetic construct
  misc_feature 1..22: note = chemically synthesized
  source 1..22: mol_type = other DNA
ttttaaccaattaagatacagc

SEQ ID NO: 97016 - DNA, 22 bp, synthetic construct
  misc_feature 1..22: note = chemically synthesized
  source 1..22: mol_type = other DNA
tttaaccaattaagatacagct

SEQ ID NO: 97017 - DNA, 22 bp, synthetic construct
  misc_feature 1..22: note = chemically synthesized
  source 1..22: mol_type = other DNA
ttaaccaattaagatacagctc

SEQ ID NO: 97018 - DNA, 22 bp, synthetic construct
  misc_feature 1..22: note = chemically synthesized
  source 1..22: mol_type = other DNA
taaccaattaagatacagctct

SEQ ID NO: 97019 - DNA, 22 bp, synthetic construct
  misc_feature 1..22: note = chemically synthesized
  source 1..22: mol_type = other DNA
aaccaattaagatacagctctg

SEQ ID NO: 97020 - DNA, 22 bp, synthetic construct
  misc_feature 1..22: note = chemically synthesized
  source 1..22: mol_type = other DNA
accaattaagatacagctctgg

SEQ ID NO: 97021 - DNA, 22 bp, synthetic construct
  misc_feature 1..22: note = chemically synthesized
  source 1..22: mol_type = other DNA
agatacagctctgggttttcag

SEQ ID NO: 97022 - DNA, 22 bp, synthetic construct
  misc_feature 1..22: note = chemically synthesized
  source 1..22: mol_type = other DNA
tgggttttcagggggaatttgc

SEQ ID NO: 97023 - DNA, 22 bp, synthetic construct
  misc_feature 1..22: note = chemically synthesized
  source 1..22: mol_type = other DNA
ggttttcagggggaatttgcta

SEQ ID NO: 97024 - DNA, 22 bp, synthetic construct
  misc_feature 1..22: note = chemically synthesized
  source 1..22: mol_type = other DNA
tcagggggaatttgctacagat

SEQ ID NO: 97025 - DNA, 22 bp, synthetic construct
  misc_feature 1..22: note = chemically synthesized
  source 1..22: mol_type = other DNA
cagggggaatttgctacagatc

SEQ ID NO: 97026 - DNA, 22 bp, synthetic construct
  misc_feature 1..22: note = chemically synthesized
  source 1..22: mol_type = other DNA
agggggaatttgctacagatcc

SEQ ID NO: 97027 - DNA, 22 bp, synthetic construct
  misc_feature 1..22: note = chemically synthesized
  source 1..22: mol_type = other DNA
gctacagatccacagtatgaag

SEQ ID NO: 97028 - DNA, 22 bp, synthetic construct
  misc_feature 1..22: note = chemically synthesized
  source 1..22: mol_type = other DNA
ctacagatccacagtatgaagg

SEQ ID NO: 97029 - DNA, 22 bp, synthetic construct
  misc_feature 1..22: note = chemically synthesized
  source 1..22: mol_type = other DNA
cagatccacagtatgaaggcag

SEQ ID NO: 97030 - DNA, 22 bp, synthetic construct
  misc_feature 1..22: note = chemically synthesized
  source 1..22: mol_type = other DNA
cctcagaacttgaatgtgaggg

SEQ ID NO: 97031 - DNA, 22 bp, synthetic construct
  misc_feature 1..22: note = chemically synthesized
  source 1..22: mol_type = other DNA
ctcagaacttgaatgtgagggt

SEQ ID NO: 97032 - DNA, 22 bp, synthetic construct
  misc_feature 1..22: note = chemically synthesized
  source 1..22: mol_type = other DNA
agaacttgaatgtgagggtcag

SEQ ID NO: 97033 - DNA, 22 bp, synthetic construct
  misc_feature 1..22: note = chemically synthesized
  source 1..22: mol_type = other DNA
gaatgtgagggtcagacattgc

SEQ ID NO: 97034 - DNA, 22 bp, synthetic construct
  misc_feature 1..22: note = chemically synthesized
  source 1..22: mol_type = other DNA
aatgtgagggtcagacattgcc

SEQ ID NO: 97035 - DNA, 22 bp, synthetic construct
  misc_feature 1..22: note = chemically synthesized
  source 1..22: mol_type = other DNA
ccaaagtccaaggaataaggac

SEQ ID NO: 97036 - DNA, 22 bp, synthetic construct
  misc_feature 1..22: note = chemically synthesized
  source 1..22: mol_type = other DNA
aaggccaagagtttggagaaca

SEQ ID NO: 97037 - DNA, 22 bp, synthetic construct
  misc_feature 1..22: note = chemically synthesized
  source 1..22: mol_type = other DNA
ggagaacaggtttctccctaaa

SEQ ID NO: 97038 - DNA, 22 bp, synthetic construct
  misc_feature 1..22: note = chemically synthesized
  source 1..22: mol_type = other DNA
gagaacaggtttctccctaaaa

SEQ ID NO: 97039 - DNA, 22 bp, synthetic construct
  misc_feature 1..22: note = chemically synthesized
  source 1..22: mol_type = other DNA
ctccctaaaacaagccctatgg

SEQ ID NO: 97040 - DNA, 22 bp, synthetic construct
  misc_feature 1..22: note = chemically synthesized
  source 1..22: mol_type = other DNA
tccctaaaacaagccctatggg

SEQ ID NO: 97041 - DNA, 22 bp, synthetic construct
  misc_feature 1..22: note = chemically synthesized
  source 1..22: mol_type = other DNA
cctaaaacaagccctatgggta

SEQ ID NO: 97042 - DNA, 22 bp, synthetic construct
  misc_feature 1..22: note = chemically synthesized
  source 1..22: mol_type = other DNA
aaacaagccctatgggtaatcc

SEQ ID NO: 97043 - DNA, 22 bp, synthetic construct
  misc_feature 1..22: note = chemically synthesized
  source 1..22: mol_type = other DNA
tgggtaatcccatcattcttcc

SEQ ID NO: 97044 - DNA, 22 bp, synthetic construct
  misc_feature 1..22: note = chemically synthesized
  source 1..22: mol_type = other DNA
ttcccattcagagtatggacac

SEQ ID NO: 97045 - DNA, 22 bp, synthetic construct
  misc_feature 1..22: note = chemically synthesized
  source 1..22: mol_type = other DNA
cccattcagagtatggacacca

SEQ ID NO: 97046 - DNA, 22 bp, synthetic construct
  misc_feature 1..22: note = chemically synthesized
  source 1..22: mol_type = other DNA
ccattcagagtatggacaccag

SEQ ID NO: 97047 - DNA, 22 bp, synthetic construct
  misc_feature 1..22: note = chemically synthesized
  source 1..22: mol_type = other DNA
agagtatggacaccagtcttct

SEQ ID NO: 97048 - DNA, 22 bp, synthetic construct
  misc_feature 1..22: note = chemically synthesized
  source 1..22: mol_type = other DNA
ctcttagattcagagtatgggg

SEQ ID NO: 97049 - DNA, 22 bp, synthetic construct
  misc_feature 1..22: note = chemically synthesized
  source 1..22: mol_type = other DNA
tcttagattcagagtatggggt

SEQ ID NO: 97050 - DNA, 22 bp, synthetic construct
  misc_feature 1..22: note = chemically synthesized
  source 1..22: mol_type = other DNA
ttagattcagagtatggggttg

SEQ ID NO: 97051 - DNA, 22 bp, synthetic construct
  misc_feature 1..22: note = chemically synthesized
  source 1..22: mol_type = other DNA
agattcagagtatggggttgat

SEQ ID NO: 97052 - DNA, 22 bp, synthetic construct
  misc_feature 1..22: note = chemically synthesized
  source 1..22: mol_type = other DNA
gattcagagtatggggttgatc

SEQ ID NO: 97053 - DNA, 22 bp, synthetic construct
  misc_feature 1..22: note = chemically synthesized
  source 1..22: mol_type = other DNA
agagtatggggttgatcctctc

SEQ ID NO: 97054 - DNA, 22 bp, synthetic construct
  misc_feature 1..22: note = chemically synthesized
  source 1..22: mol_type = other DNA
atcctctcctgctccctcggag

SEQ ID NO: 97055 - DNA, 22 bp, synthetic construct
  misc_feature 1..22: note = chemically synthesized
  source 1..22: mol_type = other DNA
tcctgctccctcggagccagtt

SEQ ID NO: 97056 - DNA, 22 bp, synthetic construct
  misc_feature 1..22: note = chemically synthesized
  source 1..22: mol_type = other DNA
ctgctccctcggagccagttgc

SEQ ID NO: 97057 - DNA, 22 bp, synthetic construct
  misc_feature 1..22: note = chemically synthesized
  source 1..22: mol_type = other DNA
ctccctcggagccagttgcaga

SEQ ID NO: 97058 - DNA, 22 bp, synthetic construct
  misc_feature 1..22: note = chemically synthesized
  source 1..22: mol_type = other DNA
cctcggagccagttgcagagcc

SEQ ID NO: 97059 - DNA, 22 bp, synthetic construct
  misc_feature 1..22: note = chemically synthesized
  source 1..22: mol_type = other DNA
ggagccagttgcagagcccaca

SEQ ID NO: 97060 - DNA, 22 bp, synthetic construct
  misc_feature 1..22: note = chemically synthesized
  source 1..22: mol_type = other DNA
cagagcccacattttcttctct

SEQ ID NO: 97061 - DNA, 22 bp, synthetic construct
  misc_feature 1..22: note = chemically synthesized
  source 1..22: mol_type = other DNA
tcttctctccttactgcctatg

SEQ ID NO: 97062 - DNA, 22 bp, synthetic construct
  misc_feature 1..22: note = chemically synthesized
  source 1..22: mol_type = other DNA
cttctctccttactgcctatgg

SEQ ID NO: 97063 - DNA, 22 bp, synthetic construct
  misc_feature 1..22: note = chemically synthesized
  source 1..22: mol_type = other DNA
ttctctccttactgcctatggt

SEQ ID NO: 97064 - DNA, 22 bp, synthetic construct
  misc_feature 1..22: note = chemically synthesized
  source 1..22: mol_type = other DNA
ctctccttactgcctatggttc

SEQ ID NO: 97065 - DNA, 22 bp, synthetic construct
  misc_feature 1..22: note = chemically synthesized
  source 1..22: mol_type = other DNA
tctccttactgcctatggttcc

SEQ ID NO: 97066 - DNA, 22 bp, synthetic construct
  misc_feature 1..22: note = chemically synthesized
  source 1..22: mol_type = other DNA
tccttactgcctatggttccag

SEQ ID NO: 97067 - DNA, 22 bp, synthetic construct
  misc_feature 1..22: note = chemically synthesized
  source 1..22: mol_type = other DNA
cttactgcctatggttccagac

SEQ ID NO: 97068 - DNA, 22 bp, synthetic construct
  misc_feature 1..22: note = chemically synthesized
  source 1..22: mol_type = other DNA
actgcctatggttccagacctg

SEQ ID NO: 97069 - DNA, 22 bp, synthetic construct
  misc_feature 1..22: note = chemically synthesized
  source 1..22: mol_type = other DNA
ctgcctatggttccagacctgg

SEQ ID NO: 97070 - DNA, 22 bp, synthetic construct
  misc_feature 1..22: note = chemically synthesized
  source 1..22: mol_type = other DNA
cctatggttccagacctggctt

SEQ ID NO: 97071 - DNA, 22 bp, synthetic construct
  misc_feature 1..22: note = chemically synthesized
  source 1..22: mol_type = other DNA
tggttccagacctggcttgcat

SEQ ID NO: 97072 - DNA, 22 bp, synthetic construct
  misc_feature 1..22: note = chemically synthesized
  source 1..22: mol_type = other DNA
cagacctggcttgcatccaggg

SEQ ID NO: 97073 - DNA, 22 bp, synthetic construct
  misc_feature 1..22: note = chemically synthesized
  source 1..22: mol_type = other DNA
gcttgcatccagggatctgacc

SEQ ID NO: 97074 - DNA, 22 bp, synthetic construct
  misc_feature 1..22: note = chemically synthesized
  source 1..22: mol_type = other DNA
gcatccagggatctgacccatt

SEQ ID NO: 97075 - DNA, 22 bp, synthetic construct
  misc_feature 1..22: note = chemically synthesized
  source 1..22: mol_type = other DNA
catccagggatctgacccattc

SEQ ID NO: 97076 - DNA, 22 bp, synthetic construct
  misc_feature 1..22: note = chemically synthesized
  source 1..22: mol_type = other DNA
acccattccatgtttccttatg

SEQ ID NO: 97077 - DNA, 22 bp, synthetic construct
  misc_feature 1..22: note = chemically synthesized
  source 1..22: mol_type = other DNA
catgtttccttatggctaaagg

SEQ ID NO: 97078 - DNA, 22 bp, synthetic construct
  misc_feature 1..22: note = chemically synthesized
  source 1..22: mol_type = other DNA
ccttatggctaaaggtggtagg

SEQ ID NO: 97079 - DNA, 22 bp, synthetic construct
  misc_feature 1..22: note = chemically synthesized
  source 1..22: mol_type = other DNA
cttatggctaaaggtggtaggg

SEQ ID NO: 97080 - DNA, 22 bp, synthetic construct
  misc_feature 1..22: note = chemically synthesized
  source 1..22: mol_type = other DNA
atggctaaaggtggtagggagg

SEQ ID NO: 97081 - DNA, 22 bp, synthetic construct
  misc_feature 1..22: note = chemically synthesized
  source 1..22: mol_type = other DNA
tggctaaaggtggtagggagga

SEQ ID NO: 97082 - DNA, 22 bp, synthetic construct
  misc_feature 1..22: note = chemically synthesized
  source 1..22: mol_type = other DNA
aaggtggtagggaggagcttca

SEQ ID NO: 97083 - DNA, 22 bp, synthetic construct
  misc_feature 1..22: note = chemically synthesized
  source 1..22: mol_type = other DNA
caagaaaggttatagcattgaa

SEQ ID NO: 97084 - DNA, 22 bp, synthetic construct
  misc_feature 1..22: note = chemically synthesized
  source 1..22: mol_type = other DNA
aagaaaggttatagcattgaaa

SEQ ID NO: 97085 - DNA, 22 bp, synthetic construct
  misc_feature 1..22: note = chemically synthesized
  source 1..22: mol_type = other DNA
tagcattgaaaggcccaggttt

SEQ ID NO: 97086 - DNA, 22 bp, synthetic construct
  misc_feature 1..22: note = chemically synthesized
  source 1..22: mol_type = other DNA
aaaggcccaggtttgtgtctca

SEQ ID NO: 97087 - DNA, 22 bp, synthetic construct
  misc_feature 1..22: note = chemically synthesized
  source 1..22: mol_type = other DNA
gtgtctcagtaacaaggcttat

SEQ ID NO: 97088 - DNA, 22 bp, synthetic construct
  misc_feature 1..22: note = chemically synthesized
  source 1..22: mol_type = other DNA
tgtctcagtaacaaggcttata

SEQ ID NO: 97089 - DNA, 22 bp, synthetic construct
  misc_feature 1..22: note = chemically synthesized
  source 1..22: mol_type = other DNA
agtaacaaggcttataaatcct

SEQ ID NO: 97090 - DNA, 22 bp, synthetic construct
  misc_feature 1..22: note = chemically synthesized
  source 1..22: mol_type = other DNA
ataaatcctgactcagaagtca

SEQ ID NO: 97091 - DNA, 22 bp, synthetic construct
  misc_feature 1..22: note = chemically synthesized
  source 1..22: mol_type = other DNA
taaatcctgactcagaagtcag

SEQ ID NO: 97092 - DNA, 22 bp, synthetic construct
  misc_feature 1..22: note = chemically synthesized
  source 1..22: mol_type = other DNA
actcagaagtcaggtaggctgc

SEQ ID NO: 97093 - DNA, 22 bp, synthetic construct
  misc_feature 1..22: note = chemically synthesized
  source 1..22: mol_type = other DNA
agaagtcaggtaggctgcgggc

SEQ ID NO: 97094 - DNA, 22 bp, synthetic construct
  misc_feature 1..22: note = chemically synthesized
  source 1..22: mol_type = other DNA
cgggcagtctcattattgcttc

SEQ ID NO: 97095 - DNA, 22 bp, synthetic construct
  misc_feature 1..22: note = chemically synthesized
  source 1..22: mol_type = other DNA
attattgcttcgatgcttgttg

SEQ ID NO: 97096 - DNA, 22 bp, synthetic construct
  misc_feature 1..22: note = chemically synthesized
  source 1..22: mol_type = other DNA
ttgcttcgatgcttgttggttc

SEQ ID NO: 97097 - DNA, 22 bp, synthetic construct
  misc_feature 1..22: note = chemically synthesized
  source 1..22: mol_type = other DNA
cttcgatgcttgttggttcaag

SEQ ID NO: 97098 - DNA, 22 bp, synthetic construct
  misc_feature 1..22: note = chemically synthesized
  source 1..22: mol_type = other DNA
cgatgcttgttggttcaagata

SEQ ID NO: 97099 - DNA, 22 bp, synthetic construct
  misc_feature 1..22: note = chemically synthesized
  source 1..22: mol_type = other DNA
gatgcttgttggttcaagataa

SEQ ID NO: 97100 - DNA, 22 bp, synthetic construct
  misc_feature 1..22: note = chemically synthesized
  source 1..22: mol_type = other DNA
gttggttcaagataaattgctt

SEQ ID NO: 97101 - DNA, 22 bp, synthetic construct
  misc_feature 1..22: note = chemically synthesized
  source 1..22: mol_type = other DNA
ttggttcaagataaattgcttc

SEQ ID NO: 97102 - DNA, 22 bp, synthetic construct
  misc_feature 1..22: note = chemically synthesized
  source 1..22: mol_type = other DNA
gttcaagataaattgcttcacc

SEQ ID NO: 97103 - DNA, 22 bp, synthetic construct
  misc_feature 1..22: note = chemically synthesized
  source 1..22: mol_type = other DNA
aagataaattgcttcacctgct

SEQ ID NO: 97104 - DNA, 22 bp, synthetic construct
  misc_feature 1..22: note = chemically synthesized
  source 1..22: mol_type = other DNA
cttcacctgctcatttttaagc

SEQ ID NO: 97105 - DNA, 22 bp, synthetic construct
  misc_feature 1..22: note = chemically synthesized
  source 1..22: mol_type = other DNA
cacctgctcatttttaagcatt

SEQ ID NO: 97106 - DNA, 22 bp, synthetic construct
  misc_feature 1..22: note = chemically synthesized
  source 1..22: mol_type = other DNA
acctgctcatttttaagcattt

SEQ ID NO: 97107 - DNA, 22 bp, synthetic construct
  misc_feature 1..22: note = chemically synthesized
  source 1..22: mol_type = other DNA
ctcatttttaagcattttattt

SEQ ID NO: 97108 - DNA, 22 bp, synthetic construct
  misc_feature 1..22: note = chemically synthesized
  source 1..22: mol_type = other DNA
atttttaagcattttatttgtt

SEQ ID NO: 97109 - DNA, 22 bp, synthetic construct
  misc_feature 1..22: note = chemically synthesized
  source 1..22: mol_type = other DNA
ttaagcattttatttgtttatc

SEQ ID NO: 97110 - DNA, 22 bp, synthetic construct
  misc_feature 1..22: note = chemically synthesized
  source 1..22: mol_type = other DNA
taagcattttatttgtttatca

SEQ ID NO: 97111 - DNA, 22 bp, synthetic construct
  misc_feature 1..22: note = chemically synthesized
  source 1..22: mol_type = other DNA
aagcattttatttgtttatcat

SEQ ID NO: 97112 - DNA, 22 bp, synthetic construct
  misc_feature 1..22: note = chemically synthesized
  source 1..22: mol_type = other DNA
agcattttatttgtttatcata

SEQ ID NO: 97113 - DNA, 22 bp, synthetic construct
  misc_feature 1..22: note = chemically synthesized
  source 1..22: mol_type = other DNA
tatttgtttatcatatgagata

SEQ ID NO: 97114 - DNA, 22 bp, synthetic construct
  misc_feature 1..22: note = chemically synthesized
  source 1..22: mol_type = other DNA
atttgtttatcatatgagatac

SEQ ID NO: 97115 - DNA, 22 bp, synthetic construct
  misc_feature 1..22: note = chemically synthesized
  source 1..22: mol_type = other DNA
tttgtttatcatatgagatacc

SEQ ID NO: 97116 - DNA, 22 bp, synthetic construct
  misc_feature 1..22: note = chemically synthesized
  source 1..22: mol_type = other DNA
gtttatcatatgagataccatg

SEQ ID NO: 97117 - DNA, 22 bp, synthetic construct
  misc_feature 1..22: note = chemically synthesized
  source 1..22: mol_type = other DNA
tttatcatatgagataccatga

SEQ ID NO: 97118 - DNA, 22 bp, synthetic construct
  misc_feature 1..22: note = chemically synthesized
  source 1..22: mol_type = other DNA
atcatatgagataccatgaaaa

SEQ ID NO: 97119 - DNA, 22 bp, synthetic construct
  misc_feature 1..22: note = chemically synthesized
  source 1..22: mol_type = other DNA
tcatatgagataccatgaaaaa

SEQ ID NO: 97120 - DNA, 22 bp, synthetic construct
  misc_feature 1..22: note = chemically synthesized
  source 1..22: mol_type = other DNA
ttgcttttctttcctatattaa

SEQ ID NO: 97121 - DNA, 22 bp, synthetic construct
  misc_feature 1..22: note = chemically synthesized
  source 1..22: mol_type = other DNA
cttttctttcctatattaaaag

SEQ ID NO: 97122 - DNA, 22 bp, synthetic construct
  misc_feature 1..22: note = chemically synthesized
  source 1..22: mol_type = other DNA
ttctttcctatattaaaagccc

SEQ ID NO: 97123 - DNA, 22 bp, synthetic construct
  misc_feature 1..22: note = chemically synthesized
  source 1..22: mol_type = other DNA
tctttcctatattaaaagccca

SEQ ID NO: 97124 - DNA, 22 bp, synthetic construct
  misc_feature 1..22: note = chemically synthesized
  source 1..22: mol_type = other DNA
ctttcctatattaaaagcccaa

SEQ ID NO: 97125 - DNA, 22 bp, synthetic construct
  misc_feature 1..22: note = chemically synthesized
  source 1..22: mol_type = other DNA
tttcctatattaaaagcccaaa

SEQ ID NO: 97126 - DNA, 22 bp, synthetic construct
  misc_feature 1..22: note = chemically synthesized
  source 1..22: mol_type = other DNA
tcctatattaaaagcccaaagt

SEQ ID NO: 97127 - DNA, 22 bp, synthetic construct
  misc_feature 1..22: note = chemically synthesized
  source 1..22: mol_type = other DNA
cctatattaaaagcccaaagtt

SEQ ID NO: 97128 - DNA, 22 bp, synthetic construct
  misc_feature 1..22: note = chemically synthesized
  source 1..22: mol_type = other DNA
ctatattaaaagcccaaagttc

SEQ ID NO: 97129 - DNA, 22 bp, synthetic construct
  misc_feature 1..22: note = chemically synthesized
  source 1..22: mol_type = other DNA
tattaaaagcccaaagttcaga

SEQ ID NO: 97130 - DNA, 22 bp, synthetic construct
  misc_feature 1..22: note = chemically synthesized
  source 1..22: mol_type = other DNA
aaagcccaaagttcagagagat

SEQ ID NO: 97131 - DNA, 22 bp, synthetic construct
  misc_feature 1..22: note = chemically synthesized
  source 1..22: mol_type = other DNA
agagagataagtgttatggcca

SEQ ID NO: 97132 - DNA, 22 bp, synthetic construct
  misc_feature 1..22: note = chemically synthesized
  source 1..22: mol_type = other DNA
tggccatccaggatagatcaga

SEQ ID NO: 97133 - DNA, 22 bp, synthetic construct
  misc_feature 1..22: note = chemically synthesized
  source 1..22: mol_type = other DNA
gacagtcagaaaaagtaatcag

SEQ ID NO: 97134 - DNA, 22 bp, synthetic construct
  misc_feature 1..22: note = chemically synthesized
  source 1..22: mol_type = other DNA
atttattgtctatataattaaa

SEQ ID NO: 97135 - DNA, 22 bp, synthetic construct
  misc_feature 1..22: note = chemically synthesized
  source 1..22: mol_type = other DNA
attgtctatataattaaaatta

SEQ ID NO: 97136 - DNA, 22 bp, synthetic construct
  misc_feature 1..22: note = chemically synthesized
  source 1..22: mol_type = other DNA
ttgtctatataattaaaattag

SEQ ID NO: 97137 - DNA, 22 bp, synthetic construct
  misc_feature 1..22: note = chemically synthesized
  source 1..22: mol_type = other DNA
tctatataattaaaattagtaa

SEQ ID NO: 97138 - DNA, 22 bp, synthetic construct
  misc_feature 1..22: note = chemically synthesized
  source 1..22: mol_type = other DNA
tataattaaaattagtaaaata

SEQ ID NO: 97139 - DNA, 22 bp, synthetic construct
  misc_feature 1..22: note = chemically synthesized
  source 1..22: mol_type = other DNA
aaattagtaaaataaaatctat

SEQ ID NO: 97140 - DNA, 22 bp, synthetic construct
  misc_feature 1..22: note = chemically synthesized
  source 1..22: mol_type = other DNA
gtaaaataaaatctatgtatgt

SEQ ID NO: 97141 - DNA, 22 bp, synthetic construct
  misc_feature 1..22: note = chemically synthesized
  source 1..22: mol_type = other DNA
tgtatgtcttaagacatttaag

SEQ ID NO: 97142 - DNA, 22 bp, synthetic construct
  misc_feature 1..22: note = chemically synthesized
  source 1..22: mol_type = other DNA
aagacatttaagtataaaggac

SEQ ID NO: 97143 - DNA, 22 bp, synthetic construct
  misc_feature 1..22: note = chemically synthesized
  source 1..22: mol_type = other DNA
agacatttaagtataaaggact

SEQ ID NO: 97144 - DNA, 22 bp, synthetic construct
  misc_feature 1..22: note = chemically synthesized
  source 1..22: mol_type = other DNA
aagtataaaggacttttagaaa

SEQ ID NO: 97145 - DNA, 22 bp, synthetic construct
  misc_feature 1..22: note = chemically synthesized
  source 1..22: mol_type = other DNA
agtataaaggacttttagaaag

SEQ ID NO: 97146 - DNA, 22 bp, synthetic construct
  misc_feature 1..22: note = chemically synthesized
  source 1..22: mol_type = other DNA
ttagaaagaaacacccaaattc

SEQ ID NO: 97147 - DNA, 22 bp, synthetic construct
  misc_feature 1..22: note = chemically synthesized
  source 1..22: mol_type = other DNA
tagaaagaaacacccaaattcg

SEQ ID NO: 97148 - DNA, 22 bp, synthetic construct
  misc_feature 1..22: note = chemically synthesized
  source 1..22: mol_type = other DNA
agaaagaaacacccaaattcga

SEQ ID NO: 97149 - DNA, 22 bp, synthetic construct
  misc_feature 1..22: note = chemically synthesized
  source 1..22: mol_type = other DNA
gaaagaaacacccaaattcgat

SEQ ID NO: 97150 - DNA, 22 bp, synthetic construct
  misc_feature 1..22: note = chemically synthesized
  source 1..22: mol_type = other DNA
gatgaagattaattcctgcctg

SEQ ID NO: 97151 - DNA, 22 bp, synthetic construct
  misc_feature 1..22: note = chemically synthesized
  source 1..22: mol_type = other DNA
attcctgcctgtttgggtttgc

SEQ ID NO: 97152 - DNA, 22 bp, synthetic construct
  misc_feature 1..22: note = chemically synthesized
  source 1..22: mol_type = other DNA
ctgcctgtttgggtttgcttta

SEQ ID NO: 97153 - DNA, 22 bp, synthetic construct
  misc_feature 1..22: note = chemically synthesized
  source 1..22: mol_type = other DNA
cctgtttgggtttgctttagca

SEQ ID NO: 97154 - DNA, 22 bp, synthetic construct
  misc_feature 1..22: note = chemically synthesized
  source 1..22: mol_type = other DNA
tttgggtttgctttagcatttg

SEQ ID NO: 97155 - DNA, 22 bp, synthetic construct
  misc_feature 1..22: note = chemically synthesized
  source 1..22: mol_type = other DNA
gggtttgctttagcatttgtaa

SEQ ID NO: 97156 - DNA, 22 bp, synthetic construct
  misc_feature 1..22: note = chemically synthesized
  source 1..22: mol_type = other DNA
ggtttgctttagcatttgtaat

SEQ ID NO: 97157 - DNA, 22 bp, synthetic construct
  misc_feature 1..22: note = chemically synthesized
  source 1..22: mol_type = other DNA
gctttagcatttgtaatttctt

SEQ ID NO: 97158 - DNA, 22 bp, synthetic construct
  misc_feature 1..22: note = chemically synthesized
  source 1..22: mol_type = other DNA
ctttagcatttgtaatttctta

SEQ ID NO: 97159 - DNA, 22 bp, synthetic construct
  misc_feature 1..22: note = chemically synthesized
  source 1..22: mol_type = other DNA
tagcatttgtaatttcttaagt

SEQ ID NO: 97160 - DNA, 22 bp, synthetic construct
  misc_feature 1..22: note = chemically synthesized
  source 1..22: mol_type = other DNA
agcatttgtaatttcttaagtt

SEQ ID NO: 97161 - DNA, 22 bp, synthetic construct
  misc_feature 1..22: note = chemically synthesized
  source 1..22: mol_type = other DNA
gcatttgtaatttcttaagttc

SEQ ID NO: 97162 - DNA, 22 bp, synthetic construct
  misc_feature 1..22: note = chemically synthesized
  source 1..22: mol_type = other DNA
gtaatttcttaagttctatgca

SEQ ID NO: 97163 - DNA, 22 bp, synthetic construct
  misc_feature 1..22: note = chemically synthesized
  source 1..22: mol_type = other DNA
taatttcttaagttctatgcag

SEQ ID NO: 97164 - DNA, 22 bp, synthetic construct
  misc_feature 1..22: note = chemically synthesized
  source 1..22: mol_type = other DNA
cttaagttctatgcaggattct

SEQ ID NO: 97165 - DNA, 22 bp, synthetic construct
  misc_feature 1..22: note = chemically synthesized
  source 1..22: mol_type = other DNA
ttaagttctatgcaggattcta

SEQ ID NO: 97166 - DNA, 22 bp, synthetic construct
  misc_feature 1..22: note = chemically synthesized
  source 1..22: mol_type = other DNA
aagttctatgcaggattctaaa

SEQ ID NO: 97167 - DNA, 22 bp, synthetic construct
  misc_feature 1..22: note = chemically synthesized
  source 1..22: mol_type = other DNA
agttctatgcaggattctaaaa

SEQ ID NO: 97168 - DNA, 22 bp, synthetic construct
  misc_feature 1..22: note = chemically synthesized
  source 1..22: mol_type = other DNA
tatgcaggattctaaaaactgt

SEQ ID NO: 97169 - DNA, 22 bp, synthetic construct
  misc_feature 1..22: note = chemically synthesized
  source 1..22: mol_type = other DNA
tgcaggattctaaaaactgtaa

SEQ ID NO: 97170 - DNA, 22 bp, synthetic construct
  misc_feature 1..22: note = chemically synthesized
  source 1..22: mol_type = other DNA
taaaaactgtaagatgcctaat

SEQ ID NO: 97171 - DNA, 22 bp, synthetic construct
  misc_feature 1..22: note = chemically synthesized
  source 1..22: mol_type = other DNA
aaaactgtaagatgcctaattt

SEQ ID NO: 97172 - DNA, 22 bp, synthetic construct
  misc_feature 1..22: note = chemically synthesized
  source 1..22: mol_type = other DNA
taagatgcctaatttaaacaag

SEQ ID NO: 97173 - DNA, 22 bp, synthetic construct
  misc_feature 1..22: note = chemically synthesized
  source 1..22: mol_type = other DNA
atttaaacaaggaaacatccaa

SEQ ID NO: 97174 - DNA, 22 bp, synthetic construct
  misc_feature 1..22: note = chemically synthesized
  source 1..22: mol_type = other DNA
aaacaaggaaacatccaatatt

SEQ ID NO: 97175 - DNA, 22 bp, synthetic construct
  misc_feature 1..22: note = chemically synthesized
  source 1..22: mol_type = other DNA
aacaaggaaacatccaatattt

SEQ ID NO: 97176 - DNA, 22 bp, synthetic construct
  misc_feature 1..22: note = chemically synthesized
  source 1..22: mol_type = other DNA
tcttaaatctttctggctaatt

SEQ ID NO: 97177 - DNA, 22 bp, synthetic construct
  misc_feature 1..22: note = chemically synthesized
  source 1..22: mol_type = other DNA
cttaaatctttctggctaattt

SEQ ID NO: 97178 - DNA, 22 bp, synthetic construct
  misc_feature 1..22: note = chemically synthesized
  source 1..22: mol_type = other DNA
ttaaatctttctggctaattta

SEQ ID NO: 97179 - DNA, 22 bp, synthetic construct
  misc_feature 1..22: note = chemically synthesized
  source 1..22: mol_type = other DNA
aaatctttctggctaatttatg

SEQ ID NO: 97180 - DNA, 22 bp, synthetic construct
  misc_feature 1..22: note = chemically synthesized
  source 1..22: mol_type = other DNA
aatctttctggctaatttatga

SEQ ID NO: 97181 - DNA, 22 bp, synthetic construct
  misc_feature 1..22: note = chemically synthesized
  source 1..22: mol_type = other DNA
tctggctaatttatgacatatg

SEQ ID NO: 97182 - DNA, 22 bp, synthetic construct
  misc_feature 1..22: note = chemically synthesized
  source 1..22: mol_type = other DNA
ctggctaatttatgacatatgt

SEQ ID NO: 97183 - DNA, 22 bp, synthetic construct
  misc_feature 1..22: note = chemically synthesized
  source 1..22: mol_type = other DNA
tggctaatttatgacatatgtt

SEQ ID NO: 97184 - DNA, 22 bp, synthetic construct
  misc_feature 1..22: note = chemically synthesized
  source 1..22: mol_type = other DNA
gctaatttatgacatatgttta

SEQ ID NO: 97185 - DNA, 22 bp, synthetic construct
  misc_feature 1..22: note = chemically synthesized
  source 1..22: mol_type = other DNA
atttatgacatatgtttaacct

SEQ ID NO: 97186 - DNA, 22 bp, synthetic construct
  misc_feature 1..22: note = chemically synthesized
  source 1..22: mol_type = other DNA
atgacatatgtttaacctgaag

SEQ ID NO: 97187 - DNA, 22 bp, synthetic construct
  misc_feature 1..22: note = chemically synthesized
  source 1..22: mol_type = other DNA
tgacatatgtttaacctgaaga

SEQ ID NO: 97188 - DNA, 22 bp, synthetic construct
  misc_feature 1..22: note = chemically synthesized
  source 1..22: mol_type = other DNA
aacctgaagagtcaaatattgt

SEQ ID NO: 97189 - DNA, 22 bp, synthetic construct
  misc_feature 1..22: note = chemically synthesized
  source 1..22: mol_type = other DNA
acctgaagagtcaaatattgta

SEQ ID NO: 97190 - DNA, 22 bp, synthetic construct
  misc_feature 1..22: note = chemically synthesized
  source 1..22: mol_type = other DNA
aagagtcaaatattgtactgtt

SEQ ID NO: 97191 - DNA, 22 bp, synthetic construct
  misc_feature 1..22: note = chemically synthesized
  source 1..22: mol_type = other DNA
tactgttcttagatgctattag

SEQ ID NO: 97192 - DNA, 22 bp, synthetic construct
  misc_feature 1..22: note = chemically synthesized
  source 1..22: mol_type = other DNA
ttcttagatgctattagtatga

SEQ ID NO: 97193 - DNA, 22 bp, synthetic construct
  misc_feature 1..22: note = chemically synthesized
  source 1..22: mol_type = other DNA
ttagatgctattagtatgaaaa

SEQ ID NO: 97194 - DNA, 22 bp, synthetic construct
  misc_feature 1..22: note = chemically synthesized
  source 1..22: mol_type = other DNA
agatgctattagtatgaaaaat

SEQ ID NO: 97195 - DNA, 22 bp, synthetic construct
  misc_feature 1..22: note = chemically synthesized
  source 1..22: mol_type = other DNA
gatgctattagtatgaaaaatt

SEQ ID NO: 97196 - DNA, 22 bp, synthetic construct
  misc_feature 1..22: note = chemically synthesized
  source 1..22: mol_type = other DNA
ttagtatgaaaaattatataaa

SEQ ID NO: 97197 - DNA, 22 bp, synthetic construct
  misc_feature 1..22: note = chemically synthesized
  source 1..22: mol_type = other DNA
gtatgaaaaattatataaatta

SEQ ID NO: 97198 - DNA, 22 bp, synthetic construct
  misc_feature 1..22: note = chemically synthesized
  source 1..22: mol_type = other DNA
tataaattagattcttgttaag

SEQ ID NO: 97199 - DNA, 22 bp, synthetic construct
  misc_feature 1..22: note = chemically synthesized
  source 1..22: mol_type = other DNA
gattcttgttaagtaaagtagg

SEQ ID NO: 97200 - DNA, 22 bp, synthetic construct
  misc_feature 1..22: note = chemically synthesized
  source 1..22: mol_type = other DNA
ttgttaagtaaagtaggccctt

SEQ ID NO: 97201 - DNA, 22 bp, synthetic construct
  misc_feature 1..22: note = chemically synthesized
  source 1..22: mol_type = other DNA
gttaagtaaagtaggcccttca

SEQ ID NO: 97202 - DNA, 22 bp, synthetic construct
  misc_feature 1..22: note = chemically synthesized
  source 1..22: mol_type = other DNA
ttaagtaaagtaggcccttcac

SEQ ID NO: 97203 - DNA, 22 bp, synthetic construct
  misc_feature 1..22: note = chemically synthesized
  source 1..22: mol_type = other DNA
agtaaagtaggcccttcacttc

SEQ ID NO: 97204 - DNA, 22 bp, synthetic construct
  misc_feature 1..22: note = chemically synthesized
  source 1..22: mol_type = other DNA
cacttcactgaatgtttttcat

SEQ ID NO: 97205 - DNA, 22 bp, synthetic construct
  misc_feature 1..22: note = chemically synthesized
  source 1..22: mol_type = other DNA
acttcactgaatgtttttcatg

SEQ ID NO: 97206 - DNA, 22 bp, synthetic construct
  misc_feature 1..22: note = chemically synthesized
  source 1..22: mol_type = other DNA
cactgaatgtttttcatggtat

SEQ ID NO: 97207 - DNA, 22 bp, synthetic construct
  misc_feature 1..22: note = chemically synthesized
  source 1..22: mol_type = other DNA
actgaatgtttttcatggtatt

SEQ ID NO: 97208 - DNA, 22 bp, synthetic construct
  misc_feature 1..22: note = chemically synthesized
  source 1..22: mol_type = other DNA
aatgtttttcatggtattatct

SEQ ID NO: 97209 - DNA, 22 bp, synthetic construct
  misc_feature 1..22: note = chemically synthesized
  source 1..22: mol_type = other DNA
ttcatggtattatctaagaaat

SEQ ID NO: 97210 - DNA, 22 bp, synthetic construct
  misc_feature 1..22: note = chemically synthesized
  source 1..22: mol_type = other DNA
tcatggtattatctaagaaata

SEQ ID NO: 97211 - DNA, 22 bp, synthetic construct
  misc_feature 1..22: note = chemically synthesized
  source 1..22: mol_type = other DNA
catggtattatctaagaaataa

SEQ ID NO: 97212 - DNA, 22 bp, synthetic construct
  misc_feature 1..22: note = chemically synthesized
  source 1..22: mol_type = other DNA
atggtattatctaagaaataaa

SEQ ID NO: 97213 - DNA, 22 bp, synthetic construct
  misc_feature 1..22: note = chemically synthesized
  source 1..22: mol_type = other DNA
tctaagaaataaatactttaat

SEQ ID NO: 97214 - DNA, 22 bp, synthetic construct
  misc_feature 1..22: note = chemically synthesized
  source 1..22: mol_type = other DNA
agaaataaatactttaatgaat

SEQ ID NO: 97215 - DNA, 22 bp, synthetic construct
  misc_feature 1..22: note = chemically synthesized
  source 1..22: mol_type = other DNA
taatgaatattctttaccacaa

SEQ ID NO: 97216 - DNA, 22 bp, synthetic construct
  misc_feature 1..22: note = chemically synthesized
  source 1..22: mol_type = other DNA
aatgaatattctttaccacaaa

SEQ ID NO: 97217 - DNA, 22 bp, synthetic construct
  misc_feature 1..22: note = chemically synthesized
  source 1..22: mol_type = other DNA
atgaatattctttaccacaaat

SEQ ID NO: 97218 - DNA, 22 bp, synthetic construct
  misc_feature 1..22: note = chemically synthesized
  source 1..22: mol_type = other DNA
tttaccacaaataacttacttt

SEQ ID NO: 97219 - DNA, 22 bp, synthetic construct
  misc_feature 1..22: note = chemically synthesized
  source 1..22: mol_type = other DNA
taccacaaataacttactttat

SEQ ID NO: 97220 - DNA, 22 bp, synthetic construct
  misc_feature 1..22: note = chemically synthesized
  source 1..22: mol_type = other DNA
accacaaataacttactttatt

SEQ ID NO: 97221 - DNA, 22 bp, synthetic construct
  misc_feature 1..22: note = chemically synthesized
  source 1..22: mol_type = other DNA
ccacaaataacttactttattt

SEQ ID NO: 97222 - DNA, 22 bp, synthetic construct
  misc_feature 1..22: note = chemically synthesized
  source 1..22: mol_type = other DNA
actttatttttatttttaaaat

SEQ ID NO: 97223 - DNA, 22 bp, synthetic construct
  misc_feature 1..22: note = chemically synthesized
  source 1..22: mol_type = other DNA
ctttatttttatttttaaaata

SEQ ID NO: 97224 - DNA, 22 bp, synthetic construct
  misc_feature 1..22: note = chemically synthesized
  source 1..22: mol_type = other DNA
tatttttatttttaaaatagga

SEQ ID NO: 97225 - DNA, 22 bp, synthetic construct
  misc_feature 1..22: note = chemically synthesized
  source 1..22: mol_type = other DNA
atttttatttttaaaataggaa

SEQ ID NO: 97226 - DNA, 22 bp, synthetic construct
  misc_feature 1..22: note = chemically synthesized
  source 1..22: mol_type = other DNA
tttttatttttaaaataggaaa

SEQ ID NO: 97227 - DNA, 22 bp, synthetic construct
  misc_feature 1..22: note = chemically synthesized
  source 1..22: mol_type = other DNA
ttatttttaaaataggaaaaat

SEQ ID NO: 97228 - DNA, 22 bp, synthetic construct
  misc_feature 1..22: note = chemically synthesized
  source 1..22: mol_type = other DNA
tatttttaaaataggaaaaata

SEQ ID NO: 97229 - DNA, 22 bp, synthetic construct
  misc_feature 1..22: note = chemically synthesized
  source 1..22: mol_type = other DNA
atttttaaaataggaaaaatat

SEQ ID NO: 97230 - DNA, 22 bp, synthetic construct
  misc_feature 1..22: note = chemically synthesized
  source 1..22: mol_type = other DNA
tttttaaaataggaaaaatata

SEQ ID NO: 97231 - DNA, 22 bp, synthetic construct
  misc_feature 1..22: note = chemically synthesized
  source 1..22: mol_type = other DNA
ttaaaataggaaaaatataaac

SEQ ID NO: 97232 - DNA, 22 bp, synthetic construct
  misc_feature 1..22: note = chemically synthesized
  source 1..22: mol_type = other DNA
taaaataggaaaaatataaaca

SEQ ID NO: 97233 - DNA, 22 bp, synthetic construct
  misc_feature 1..22: note = chemically synthesized
  source 1..22: mol_type = other DNA
aaaataggaaaaatataaacaa

SEQ ID NO: 97234 - DNA, 22 bp, synthetic construct
  misc_feature 1..22: note = chemically synthesized
  source 1..22: mol_type = other DNA
aaataggaaaaatataaacaag

SEQ ID NO: 97235 - DNA, 22 bp, synthetic construct
  misc_feature 1..22: note = chemically synthesized
  source 1..22: mol_type = other DNA
gtaaaccactgataggaaaaga

SEQ ID NO: 97236 - DNA, 22 bp, synthetic construct
  misc_feature 1..22: note = chemically synthesized
  source 1..22: mol_type = other DNA
taaaccactgataggaaaagag

SEQ ID NO: 97237 - DNA, 22 bp, synthetic construct
  misc_feature 1..22: note = chemically synthesized
  source 1..22: mol_type = other DNA
ataggaaaagagctgcttagga

SEQ ID NO: 97238 - DNA, 22 bp, synthetic construct
  misc_feature 1..22: note = chemically synthesized
  source 1..22: mol_type = other DNA
cttaggattctaaattagccag

SEQ ID NO: 97239 - DNA, 22 bp, synthetic construct
  misc_feature 1..22: note = chemically synthesized
  source 1..22: mol_type = other DNA
aggattctaaattagccagatt

SEQ ID NO: 97240 - DNA, 22 bp, synthetic construct
  misc_feature 1..22: note = chemically synthesized
  source 1..22: mol_type = other DNA
ggattctaaattagccagattt

SEQ ID NO: 97241 - DNA, 22 bp, synthetic construct
  misc_feature 1..22: note = chemically synthesized
  source 1..22: mol_type = other DNA
taaattagccagattttaaatt

SEQ ID NO: 97242 - DNA, 22 bp, synthetic construct
  misc_feature 1..22: note = chemically synthesized
  source 1..22: mol_type = other DNA
aattagccagattttaaattat

SEQ ID NO: 97243 - DNA, 22 bp, synthetic construct
  misc_feature 1..22: note = chemically synthesized
  source 1..22: mol_type = other DNA
gccagattttaaattattctgc

SEQ ID NO: 97244 - DNA, 22 bp, synthetic construct
  misc_feature 1..22: note = chemically synthesized
  source 1..22: mol_type = other DNA
taaattattctgcttccattat

SEQ ID NO: 97245 - DNA, 22 bp, synthetic construct
  misc_feature 1..22: note = chemically synthesized
  source 1..22: mol_type = other DNA
aaattattctgcttccattatg

SEQ ID NO: 97246 - DNA, 22 bp, synthetic construct
  misc_feature 1..22: note = chemically synthesized
  source 1..22: mol_type = other DNA
aattattctgcttccattatgt

SEQ ID NO: 97247 - DNA, 22 bp, synthetic construct
  misc_feature 1..22: note = chemically synthesized
  source 1..22: mol_type = other DNA
ttctgcttccattatgtatcta

SEQ ID NO: 97248 - DNA, 22 bp, synthetic construct
  misc_feature 1..22: note = chemically synthesized
  source 1..22: mol_type = other DNA
tgcttccattatgtatctaaat

SEQ ID NO: 97249 - DNA, 22 bp, synthetic construct
  misc_feature 1..22: note = chemically synthesized
  source 1..22: mol_type = other DNA
cttccattatgtatctaaatct

SEQ ID NO: 97250 - DNA, 22 bp, synthetic construct
  misc_feature 1..22: note = chemically synthesized
  source 1..22: mol_type = other DNA
ccattatgtatctaaatctata

SEQ ID NO: 97251 - DNA, 22 bp, synthetic construct
  misc_feature 1..22: note = chemically synthesized
  source 1..22: mol_type = other DNA
cattatgtatctaaatctatat

SEQ ID NO: 97252 - DNA, 22 bp, synthetic construct
  misc_feature 1..22: note = chemically synthesized
  source 1..22: mol_type = other DNA
tgtatctaaatctatattctca

SEQ ID NO: 97253 - DNA, 22 bp, synthetic construct
  misc_feature 1..22: note = chemically synthesized
  source 1..22: mol_type = other DNA
aatctatattctcagaacaaaa

SEQ ID NO: 97254 - DNA, 22 bp, synthetic construct
  misc_feature 1..22: note = chemically synthesized
  source 1..22: mol_type = other DNA
tattctcagaacaaaaatagat

SEQ ID NO: 97255 - DNA, 22 bp, synthetic construct
  misc_feature 1..22: note = chemically synthesized
  source 1..22: mol_type = other DNA
tcagaacaaaaatagatgtaag

SEQ ID NO: 97256 - DNA, 22 bp, synthetic construct
  misc_feature 1..22: note = chemically synthesized
  source 1..22: mol_type = other DNA
agaacaaaaatagatgtaagca

SEQ ID NO: 97257 - DNA, 22 bp, synthetic construct
  misc_feature 1..22: note = chemically synthesized
  source 1..22: mol_type = other DNA
tactagattttgtgttagattt

SEQ ID NO: 97258 - DNA, 22 bp, synthetic construct
  misc_feature 1..22: note = chemically synthesized
  source 1..22: mol_type = other DNA
ctagattttgtgttagattttg

SEQ ID NO: 97259 - DNA, 22 bp, synthetic construct
  misc_feature 1..22: note = chemically synthesized
  source 1..22: mol_type = other DNA
gattttgtgttagattttgcat

SEQ ID NO: 97260 - DNA, 22 bp, synthetic construct
  misc_feature 1..22: note = chemically synthesized
  source 1..22: mol_type = other DNA
tgtgttagattttgcattatcc

SEQ ID NO: 97261 - DNA, 22 bp, synthetic construct
  misc_feature 1..22: note = chemically synthesized
  source 1..22: mol_type = other DNA
gtgttagattttgcattatcca

SEQ ID NO: 97262 - DNA, 22 bp, synthetic construct
  misc_feature 1..22: note = chemically synthesized
  source 1..22: mol_type = other DNA
tgttagattttgcattatccag

SEQ ID NO: 97263 - DNA, 22 bp, synthetic construct
  misc_feature 1..22: note = chemically synthesized
  source 1..22: mol_type = other DNA
gattttgcattatccaggaatg

SEQ ID NO: 97264 - DNA, 22 bp, synthetic construct
  misc_feature 1..22: note = chemically synthesized
  source 1..22: mol_type = other DNA
tgcattatccaggaatgacttg

SEQ ID NO: 97265 - DNA, 22 bp, synthetic construct
  misc_feature 1..22: note = chemically synthesized
  source 1..22: mol_type = other DNA
gcattatccaggaatgacttgg

SEQ ID NO: 97266 - DNA, 22 bp, synthetic construct
  misc_feature 1..22: note = chemically synthesized
  source 1..22: mol_type = other DNA
cattatccaggaatgacttgga

SEQ ID NO: 97267 - DNA, 22 bp, synthetic construct
  misc_feature 1..22: note = chemically synthesized
  source 1..22: mol_type = other DNA
tccaggaatgacttggatatca

SEQ ID NO: 97268 - DNA, 22 bp, synthetic construct
  misc_feature 1..22: note = chemically synthesized
  source 1..22: mol_type = other DNA
ggatatcacaagtcataaattc

SEQ ID NO: 97269 - DNA, 22 bp, synthetic construct
  misc_feature 1..22: note = chemically synthesized
  source 1..22: mol_type = other DNA
gatatcacaagtcataaattct

SEQ ID NO: 97270 - DNA, 22 bp, synthetic construct
  misc_feature 1..22: note = chemically synthesized
  source 1..22: mol_type = other DNA
tgtggctgccttgcaggaagcc

SEQ ID NO: 97271 - DNA, 22 bp, synthetic construct
  misc_feature 1..22: note = chemically synthesized
  source 1..22: mol_type = other DNA
tggctgccttgcaggaagcctg

SEQ ID NO: 97272 - DNA, 22 bp, synthetic construct
  misc_feature 1..22: note = chemically synthesized
  source 1..22: mol_type = other DNA
ccttgcaggaagcctgtggcta

SEQ ID NO: 97273 - DNA, 22 bp, synthetic construct
  misc_feature 1..22: note = chemically synthesized
  source 1..22: mol_type = other DNA
gcaggaagcctgtggctatttt

SEQ ID NO: 97274 - DNA, 22 bp, synthetic construct
  misc_feature 1..22: note = chemically synthesized
  source 1..22: mol_type = other DNA
caggaagcctgtggctattttc

SEQ ID NO: 97275 - DNA, 22 bp, synthetic construct
  misc_feature 1..22: note = chemically synthesized
  source 1..22: mol_type = other DNA
tggctattttctagtgtaattg

SEQ ID NO: 97276 - DNA, 22 bp, synthetic construct
  misc_feature 1..22: note = chemically synthesized
  source 1..22: mol_type = other DNA
ttttctagtgtaattgtaaaga

SEQ ID NO: 97277 - DNA, 22 bp, synthetic construct
  misc_feature 1..22: note = chemically synthesized
  source 1..22: mol_type = other DNA
tctagtgtaattgtaaagaatg

SEQ ID NO: 97278 - DNA, 22 bp, synthetic construct
  misc_feature 1..22: note = chemically synthesized
  source 1..22: mol_type = other DNA
ctagtgtaattgtaaagaatga

SEQ ID NO: 97279 - DNA, 22 bp, synthetic construct
  misc_feature 1..22: note = chemically synthesized
  source 1..22: mol_type = other DNA
tagtgtaattgtaaagaatgag

SEQ ID NO: 97280 - DNA, 22 bp, synthetic construct
  misc_feature 1..22: note = chemically synthesized
  source 1..22: mol_type = other DNA
gtgtaattgtaaagaatgagag

SEQ ID NO: 97281 - DNA, 22 bp, synthetic construct
  misc_feature 1..22: note = chemically synthesized
  source 1..22: mol_type = other DNA
taaagaatgagagaatagacca

SEQ ID NO: 97282 - DNA, 22 bp, synthetic construct
  misc_feature 1..22: note = chemically synthesized
  source 1..22: mol_type = other DNA
aaactgttgctttcttgttttc

SEQ ID NO: 97283 - DNA, 22 bp, synthetic construct
  misc_feature 1..22: note = chemically synthesized
  source 1..22: mol_type = other DNA
ttgctttcttgttttcaacttt

SEQ ID NO: 97284 - DNA, 22 bp, synthetic construct
  misc_feature 1..22: note = chemically synthesized
  source 1..22: mol_type = other DNA
ctttcttgttttcaacttttat

SEQ ID NO: 97285 - DNA, 22 bp, synthetic construct
  misc_feature 1..22: note = chemically synthesized
  source 1..22: mol_type = other DNA
tcttgttttcaacttttatttt

SEQ ID NO: 97286 - DNA, 22 bp, synthetic construct
  misc_feature 1..22: note = chemically synthesized
  source 1..22: mol_type = other DNA
cttgttttcaacttttatttta

SEQ ID NO: 97287 - DNA, 22 bp, synthetic construct
  misc_feature 1..22: note = chemically synthesized
  source 1..22: mol_type = other DNA
ttgttttcaacttttattttaa

SEQ ID NO: 97288 - DNA, 22 bp, synthetic construct
  misc_feature 1..22: note = chemically synthesized
  source 1..22: mol_type = other DNA
gttttcaacttttattttaagt

SEQ ID NO: 97289 - DNA, 22 bp, synthetic construct
  misc_feature 1..22: note = chemically synthesized
  source 1..22: mol_type = other DNA
ttttcaacttttattttaagtt

SEQ ID NO: 97290 - DNA, 22 bp, synthetic construct
  misc_feature 1..22: note = chemically synthesized
  source 1..22: mol_type = other DNA
tcaacttttattttaagttcag

SEQ ID NO: 97291 - DNA, 22 bp, synthetic construct
  misc_feature 1..22: note = chemically synthesized
  source 1..22: mol_type = other DNA
caacttttattttaagttcagg

SEQ ID NO: 97292 - DNA, 22 bp, synthetic construct
  misc_feature 1..22: note = chemically synthesized
  source 1..22: mol_type = other DNA
aacttttattttaagttcaggg

SEQ ID NO: 97293 - DNA, 22 bp, synthetic construct
  misc_feature 1..22: note = chemically synthesized
  source 1..22: mol_type = other DNA
ttattttaagttcaggggtaca

SEQ ID NO: 97294 - DNA, 22 bp, synthetic construct
  misc_feature 1..22: note = chemically synthesized
  source 1..22: mol_type = other DNA
tattttaagttcaggggtacat

SEQ ID NO: 97295 - DNA, 22 bp, synthetic construct
  misc_feature 1..22: note = chemically synthesized
  source 1..22: mol_type = other DNA
attttaagttcaggggtacatg

SEQ ID NO: 97296 - DNA, 22 bp, synthetic construct
  misc_feature 1..22: note = chemically synthesized
  source 1..22: mol_type = other DNA
ttttaagttcaggggtacatgt

SEQ ID NO: 97297 - DNA, 22 bp, synthetic construct
  misc_feature 1..22: note = chemically synthesized
  source 1..22: mol_type = other DNA
taagttcaggggtacatgtaca

SEQ ID NO: 97298 - DNA, 22 bp, synthetic construct
  misc_feature 1..22: note = chemically synthesized
  source 1..22: mol_type = other DNA
aagttcaggggtacatgtacag

SEQ ID NO: 97299 - DNA, 22 bp, synthetic construct
  misc_feature 1..22: note = chemically synthesized
  source 1..22: mol_type = other DNA
agttcaggggtacatgtacagg

SEQ ID NO: 97300 - DNA, 22 bp, synthetic construct
  misc_feature 1..22: note = chemically synthesized
  source 1..22: mol_type = other DNA
aggggtacatgtacaggatgtg

SEQ ID NO: 97301 - DNA, 22 bp, synthetic construct
  misc_feature 1..22: note = chemically synthesized
  source 1..22: mol_type = other DNA
gttacatagataaatgaatgtc

SEQ ID NO: 97302 - DNA, 22 bp, synthetic construct
  misc_feature 1..22: note = chemically synthesized
  source 1..22: mol_type = other DNA
ttacatagataaatgaatgtca

SEQ ID NO: 97303 - DNA, 22 bp, synthetic construct
  misc_feature 1..22: note = chemically synthesized
  source 1..22: mol_type = other DNA
catagataaatgaatgtcaagg

SEQ ID NO: 97304 - DNA, 22 bp, synthetic construct
  misc_feature 1..22: note = chemically synthesized
  source 1..22: mol_type = other DNA
gttgtatagatgatctcatcac

SEQ ID NO: 97305 - DNA, 22 bp, synthetic construct
  misc_feature 1..22: note = chemically synthesized
  source 1..22: mol_type = other DNA
ttgtatagatgatctcatcact

SEQ ID NO: 97306 - DNA, 22 bp, synthetic construct
  misc_feature 1..22: note = chemically synthesized
  source 1..22: mol_type = other DNA
tatagatgatctcatcactcag

SEQ ID NO: 97307 - DNA, 22 bp, synthetic construct
  misc_feature 1..22: note = chemically synthesized
  source 1..22: mol_type = other DNA
atcactcaggtattacgcttag

SEQ ID NO: 97308 - DNA, 22 bp, synthetic construct
  misc_feature 1..22: note = chemically synthesized
  source 1..22: mol_type = other DNA
aggtattacgcttagcatccat

SEQ ID NO: 97309 - DNA, 22 bp, synthetic construct
  misc_feature 1..22: note = chemically synthesized
  source 1..22: mol_type = other DNA
cgcttagcatccattagtgatt

SEQ ID NO: 97310 - DNA, 22 bp, synthetic construct
  misc_feature 1..22: note = chemically synthesized
  source 1..22: mol_type = other DNA
agcatccattagtgatttttcc

SEQ ID NO: 97311 - DNA, 22 bp, synthetic construct
  misc_feature 1..22: note = chemically synthesized
  source 1..22: mol_type = other DNA
gcatccattagtgatttttcct

SEQ ID NO: 97312 - DNA, 22 bp, synthetic construct
  misc_feature 1..22: note = chemically synthesized
  source 1..22: mol_type = other DNA
gtgatttttcctgatcctctcc

SEQ ID NO: 97313 - DNA, 22 bp, synthetic construct
  misc_feature 1..22: note = chemically synthesized
  source 1..22: mol_type = other DNA
ttcctgatcctctccttctctc

SEQ ID NO: 97314 - DNA, 22 bp, synthetic construct
  misc_feature 1..22: note = chemically synthesized
  source 1..22: mol_type = other DNA
tcctgatcctctccttctctca

SEQ ID NO: 97315 - DNA, 22 bp, synthetic construct
  misc_feature 1..22: note = chemically synthesized
  source 1..22: mol_type = other DNA
cctgatcctctccttctctcac

SEQ ID NO: 97316 - DNA, 22 bp, synthetic construct
  misc_feature 1..22: note = chemically synthesized
  source 1..22: mol_type = other DNA
ctgatcctctccttctctcacc

SEQ ID NO: 97317 - DNA, 22 bp, synthetic construct
  misc_feature 1..22: note = chemically synthesized
  source 1..22: mol_type = other DNA
atcctctccttctctcaccctc

SEQ ID NO: 97318 - DNA, 22 bp, synthetic construct
  misc_feature 1..22: note = chemically synthesized
  source 1..22: mol_type = other DNA
tccttctctcaccctccaccct

SEQ ID NO: 97319 - DNA, 22 bp, synthetic construct
  misc_feature 1..22: note = chemically synthesized
  source 1..22: mol_type = other DNA
cttctctcaccctccaccctct

SEQ ID NO: 97320 - DNA, 22 bp, synthetic construct
  misc_feature 1..22: note = chemically synthesized
  source 1..22: mol_type = other DNA
ctctcaccctccaccctctgat

SEQ ID NO: 97321 - DNA, 22 bp, synthetic construct
  misc_feature 1..22: note = chemically synthesized
  source 1..22: mol_type = other DNA
tctcaccctccaccctctgata

SEQ ID NO: 97322 - DNA, 22 bp, synthetic construct
  misc_feature 1..22: note = chemically synthesized
  source 1..22: mol_type = other DNA
tcaccctccaccctctgatagg

SEQ ID NO: 97323 - DNA, 22 bp, synthetic construct
  misc_feature 1..22: note = chemically synthesized
  source 1..22: mol_type = other DNA
accctccaccctctgataggcc

SEQ ID NO: 97324 - DNA, 22 bp, synthetic construct
  misc_feature 1..22: note = chemically synthesized
  source 1..22: mol_type = other DNA
caccctctgataggccccagta

SEQ ID NO: 97325 - DNA, 22 bp, synthetic construct
  misc_feature 1..22: note = chemically synthesized
  source 1..22: mol_type = other DNA
tgataggccccagtatgcgttg

SEQ ID NO: 97326 - DNA, 22 bp, synthetic construct
  misc_feature 1..22: note = chemically synthesized
  source 1..22: mol_type = other DNA
ataggccccagtatgcgttgtt

SEQ ID NO: 97327 - DNA, 22 bp, synthetic construct
  misc_feature 1..22: note = chemically synthesized
  source 1..22: mol_type = other DNA
tttccctctatgagtccatgtg

SEQ ID NO: 97328 - DNA, 22 bp, synthetic construct
  misc_feature 1..22: note = chemically synthesized
  source 1..22: mol_type = other DNA
ccctctatgagtccatgtgttc

SEQ ID NO: 97329 - DNA, 22 bp, synthetic construct
  misc_feature 1..22: note = chemically synthesized
  source 1..22: mol_type = other DNA
cctctatgagtccatgtgttct

SEQ ID NO: 97330 - DNA, 22 bp, synthetic construct
  misc_feature 1..22: note = chemically synthesized
  source 1..22: mol_type = other DNA
tatgagtccatgtgttctcatc

SEQ ID NO: 97331 - DNA, 22 bp, synthetic construct
  misc_feature 1..22: note = chemically synthesized
  source 1..22: mol_type = other DNA
tgagtccatgtgttctcatcat

SEQ ID NO: 97332 - DNA, 22 bp, synthetic construct
  misc_feature 1..22: note = chemically synthesized
  source 1..22: mol_type = other DNA
tcatcatttagcttctaactgt

SEQ ID NO: 97333 - DNA, 22 bp, synthetic construct
  misc_feature 1..22: note = chemically synthesized
  source 1..22: mol_type = other DNA
atcatttagcttctaactgttg

SEQ ID NO: 97334 - DNA, 22 bp, synthetic construct
  misc_feature 1..22: note = chemically synthesized
  source 1..22: mol_type = other DNA
agcttctaactgttgctttcgt

SEQ ID NO: 97335 - DNA, 22 bp, synthetic construct
  misc_feature 1..22: note = chemically synthesized
  source 1..22: mol_type = other DNA
gcttctaactgttgctttcgta

SEQ ID NO: 97336 - DNA, 22 bp, synthetic construct
  misc_feature 1..22: note = chemically synthesized
  source 1..22: mol_type = other DNA
ctaactgttgctttcgtagtgt

SEQ ID NO: 97337 - DNA, 22 bp, synthetic construct
  misc_feature 1..22: note = chemically synthesized
  source 1..22: mol_type = other DNA
taactgttgctttcgtagtgta

SEQ ID NO: 97338 - DNA, 22 bp, synthetic construct
  misc_feature 1..22: note = chemically synthesized
  source 1..22: mol_type = other DNA
actgttgctttcgtagtgtacc

SEQ ID NO: 97339 - DNA, 22 bp, synthetic construct
  misc_feature 1..22: note = chemically synthesized
  source 1..22: mol_type = other DNA
ttgctttcgtagtgtacctctg

SEQ ID NO: 97340 - DNA, 22 bp, synthetic construct
  misc_feature 1..22: note = chemically synthesized
  source 1..22: mol_type = other DNA
ctttcgtagtgtacctctgcct

SEQ ID NO: 97341 - DNA, 22 bp, synthetic construct
  misc_feature 1..22: note = chemically synthesized
  source 1..22: mol_type = other DNA
tcgtagtgtacctctgcctcat

SEQ ID NO: 97342 - DNA, 22 bp, synthetic construct
  misc_feature 1..22: note = chemically synthesized
  source 1..22: mol_type = other DNA
cgtagtgtacctctgcctcatc

SEQ ID NO: 97343 - DNA, 22 bp, synthetic construct
  misc_feature 1..22: note = chemically synthesized
  source 1..22: mol_type = other DNA
gtagtgtacctctgcctcatct

SEQ ID NO: 97344 - DNA, 22 bp, synthetic construct
  misc_feature 1..22: note = chemically synthesized
  source 1..22: mol_type = other DNA
tgcctcatctctcacgaagttt

SEQ ID NO: 97345 - DNA, 22 bp, synthetic construct
  misc_feature 1..22: note = chemically synthesized
  source 1..22: mol_type = other DNA
cctcatctctcacgaagtttgc

SEQ ID NO: 97346 - DNA, 22 bp, synthetic construct
  misc_feature 1..22: note = chemically synthesized
  source 1..22: mol_type = other DNA
atctctcacgaagtttgcaggt

SEQ ID NO: 97347 - DNA, 22 bp, synthetic construct
  misc_feature 1..22: note = chemically synthesized
  source 1..22: mol_type = other DNA
tcacgaagtttgcaggtgagtt

SEQ ID NO: 97348 - DNA, 22 bp, synthetic construct
  misc_feature 1..22: note = chemically synthesized
  source 1..22: mol_type = other DNA
acgaagtttgcaggtgagtttg

SEQ ID NO: 97349 - DNA, 22 bp, synthetic construct
  misc_feature 1..22: note = chemically synthesized
  source 1..22: mol_type = other DNA
gcaggtgagtttgagccagggc

SEQ ID NO: 97350 - DNA, 22 bp, synthetic construct
  misc_feature 1..22: note = chemically synthesized
  source 1..22: mol_type = other DNA
caggtgagtttgagccagggct

SEQ ID NO: 97351 - DNA, 22 bp, synthetic construct
  misc_feature 1..22: note = chemically synthesized
  source 1..22: mol_type = other DNA
gagccagggctgaggctcattc

SEQ ID NO: 97352 - DNA, 22 bp, synthetic construct
  misc_feature 1..22: note = chemically synthesized
  source 1..22: mol_type = other DNA
agccagggctgaggctcattct

SEQ ID NO: 97353 - DNA, 22 bp, synthetic construct
  misc_feature 1..22: note = chemically synthesized
  source 1..22: mol_type = other DNA
aggctcattctcaagagtaatc

SEQ ID NO: 97354 - DNA, 22 bp, synthetic construct
  misc_feature 1..22: note = chemically synthesized
  source 1..22: mol_type = other DNA
attctcaagagtaatctctctc

SEQ ID NO: 97355 - DNA, 22 bp, synthetic construct
  misc_feature 1..22: note = chemically synthesized
  source 1..22: mol_type = other DNA
tcaagagtaatctctctctctg

SEQ ID NO: 97356 - DNA, 22 bp, synthetic construct
  misc_feature 1..22: note = chemically synthesized
  source 1..22: mol_type = other DNA
aagagtaatctctctctctggc

SEQ ID NO: 97357 - DNA, 22 bp, synthetic construct
  misc_feature 1..22: note = chemically synthesized
  source 1..22: mol_type = other DNA
tctctctggcaacttggagcac

SEQ ID NO: 97358 - DNA, 22 bp, synthetic construct
  misc_feature 1..22: note = chemically synthesized
  source 1..22: mol_type = other DNA
tctctggcaacttggagcacag

SEQ ID NO: 97359 - DNA, 22 bp, synthetic construct
  misc_feature 1..22: note = chemically synthesized
  source 1..22: mol_type = other DNA
tctggcaacttggagcacagac

SEQ ID NO: 97360 - DNA, 22 bp, synthetic construct
  misc_feature 1..22: note = chemically synthesized
  source 1..22: mol_type = other DNA
tggcaacttggagcacagacat

SEQ ID NO: 97361 - DNA, 22 bp, synthetic construct
  misc_feature 1..22: note = chemically synthesized
  source 1..22: mol_type = other DNA
gcaacttggagcacagacatcc

SEQ ID NO: 97362 - DNA, 22 bp, synthetic construct
  misc_feature 1..22: note = chemically synthesized
  source 1..22: mol_type = other DNA
ggagcacagacatcctattgtg

SEQ ID NO: 97363 - DNA, 22 bp, synthetic construct
  misc_feature 1..22: note = chemically synthesized
  source 1..22: mol_type = other DNA
gagcacagacatcctattgtgt

SEQ ID NO: 97364 - DNA, 22 bp, synthetic construct
  misc_feature 1..22: note = chemically synthesized
  source 1..22: mol_type = other DNA
ttgtgtgactgacctcgggagc

SEQ ID NO: 97365 - DNA, 22 bp, synthetic construct
  misc_feature 1..22: note = chemically synthesized
  source 1..22: mol_type = other DNA
tgtgactgacctcgggagccac

SEQ ID NO: 97366 - DNA, 22 bp, synthetic construct
  misc_feature 1..22: note = chemically synthesized
  source 1..22: mol_type = other DNA
acctcgggagccactgtgccta

SEQ ID NO: 97367 - DNA, 22 bp, synthetic construct
  misc_feature 1..22: note = chemically synthesized
  source 1..22: mol_type = other DNA
gggagccactgtgcctaaagta

SEQ ID NO: 97368 - DNA, 22 bp, synthetic construct
  misc_feature 1..22: note = chemically synthesized
  source 1..22: mol_type = other DNA
tgcctaaagtacaaccagagtt

SEQ ID NO: 97369 - DNA, 22 bp, synthetic construct
  misc_feature 1..22: note = chemically synthesized
  source 1..22: mol_type = other DNA
aagtacaaccagagttacttgt

SEQ ID NO: 97370 - DNA, 22 bp, synthetic construct
  misc_feature 1..22: note = chemically synthesized
  source 1..22: mol_type = other DNA
cttgtgaatgttaattaagcag

SEQ ID NO: 97371 - DNA, 22 bp, synthetic construct
  misc_feature 1..22: note = chemically synthesized
  source 1..22: mol_type = other DNA
gtgaatgttaattaagcaggag

SEQ ID NO: 97372 - DNA, 22 bp, synthetic construct
  misc_feature 1..22: note = chemically synthesized
  source 1..22: mol_type = other DNA
tgaatgttaattaagcaggagg

SEQ ID NO: 97373 - DNA, 22 bp, synthetic construct
  misc_feature 1..22: note = chemically synthesized
  source 1..22: mol_type = other DNA
attaagcaggagggatctttaa

SEQ ID NO: 97374 - DNA, 22 bp, synthetic construct
  misc_feature 1..22: note = chemically synthesized
  source 1..22: mol_type = other DNA
agcaggagggatctttaatggg

SEQ ID NO: 97375 - DNA, 22 bp, synthetic construct
  misc_feature 1..22: note = chemically synthesized
  source 1..22: mol_type = other DNA
taatgggaaaaaggagtagaaa

SEQ ID NO: 97376 - DNA, 22 bp, synthetic construct
  misc_feature 1..22: note = chemically synthesized
  source 1..22: mol_type = other DNA
aatgggaaaaaggagtagaaag

SEQ ID NO: 97377 - DNA, 22 bp, synthetic construct
  misc_feature 1..22: note = chemically synthesized
  source 1..22: mol_type = other DNA
atgggaaaaaggagtagaaagc

SEQ ID NO: 97378 - DNA, 22 bp, synthetic construct
  misc_feature 1..22: note = chemically synthesized
  source 1..22: mol_type = other DNA
tgccacactttcctacatgatg

SEQ ID NO: 97379 - DNA, 22 bp, synthetic construct
  misc_feature 1..22: note = chemically synthesized
  source 1..22: mol_type = other DNA
tcctacatgatgggcactgaag

SEQ ID NO: 97380 - DNA, 22 bp, synthetic construct
  misc_feature 1..22: note = chemically synthesized
  source 1..22: mol_type = other DNA
cctacatgatgggcactgaagg

SEQ ID NO: 97381 - DNA, 22 bp, synthetic construct
  misc_feature 1..22: note = chemically synthesized
  source 1..22: mol_type = other DNA
ctacatgatgggcactgaaggt

SEQ ID NO: 97382 - DNA, 22 bp, synthetic construct
  misc_feature 1..22: note = chemically synthesized
  source 1..22: mol_type = other DNA
catgatgggcactgaaggttaa

SEQ ID NO: 97383 - DNA, 22 bp, synthetic construct
  misc_feature 1..22: note = chemically synthesized
  source 1..22: mol_type = other DNA
aaggttaaaacttgagtctgtc

SEQ ID NO: 97384 - DNA, 22 bp, synthetic construct
  misc_feature 1..22: note = chemically synthesized
  source 1..22: mol_type = other DNA
aaacttgagtctgtcaacttag

SEQ ID NO: 97385 - DNA, 22 bp, synthetic construct
  misc_feature 1..22: note = chemically synthesized
  source 1..22: mol_type = other DNA
gagtctgtcaacttagaaaact

SEQ ID NO: 97386 - DNA, 22 bp, synthetic construct
  misc_feature 1..22: note = chemically synthesized
  source 1..22: mol_type = other DNA
agtctgtcaacttagaaaactc

SEQ ID NO: 97387 - DNA, 22 bp, synthetic construct
  misc_feature 1..22: note = chemically synthesized
  source 1..22: mol_type = other DNA
tcaacttagaaaactcataaat

SEQ ID NO: 97388 - DNA, 22 bp, synthetic construct
  misc_feature 1..22: note = chemically synthesized
  source 1..22: mol_type = other DNA
agaaaactcataaatatcccat

SEQ ID NO: 97389 - DNA, 22 bp, synthetic construct
  misc_feature 1..22: note = chemically synthesized
  source 1..22: mol_type = other DNA
gaaaactcataaatatcccatt

SEQ ID NO: 97390 - DNA, 22 bp, synthetic construct
  misc_feature 1..22: note = chemically synthesized
  source 1..22: mol_type = other DNA
ataaatatcccattttccgctg

SEQ ID NO: 97391 - DNA, 22 bp, synthetic construct
  misc_feature 1..22: note = chemically synthesized
  source 1..22: mol_type = other DNA
tccgctgaaatatagctttact

SEQ ID NO: 97392 - DNA, 22 bp, synthetic construct
  misc_feature 1..22: note = chemically synthesized
  source 1..22: mol_type = other DNA
ccgctgaaatatagctttactt

SEQ ID NO: 97393 - DNA, 22 bp, synthetic construct
  misc_feature 1..22: note = chemically synthesized
  source 1..22: mol_type = other DNA
cgctgaaatatagctttacttt

SEQ ID NO: 97394 - DNA, 22 bp, synthetic construct
  misc_feature 1..22: note = chemically synthesized
  source 1..22: mol_type = other DNA
aaatatagctttactttcctgg

SEQ ID NO: 97395 - DNA, 22 bp, synthetic construct
  misc_feature 1..22: note = chemically synthesized
  source 1..22: mol_type = other DNA
tactttcctggtttctttgacc

SEQ ID NO: 97396 - DNA, 22 bp, synthetic construct
  misc_feature 1..22: note = chemically synthesized
  source 1..22: mol_type = other DNA
actttcctggtttctttgacct

SEQ ID NO: 97397 - DNA, 22 bp, synthetic construct
  misc_feature 1..22: note = chemically synthesized
  source 1..22: mol_type = other DNA
ctttcctggtttctttgacctt

SEQ ID NO: 97398 - DNA, 22 bp, synthetic construct
  misc_feature 1..22: note = chemically synthesized
  source 1..22: mol_type = other DNA
tcctggtttctttgaccttttg

SEQ ID NO: 97399 - DNA, 22 bp, synthetic construct
  misc_feature 1..22: note = chemically synthesized
  source 1..22: mol_type = other DNA
cctggtttctttgaccttttgg

SEQ ID NO: 97400 - DNA, 22 bp, synthetic construct
  misc_feature 1..22: note = chemically synthesized
  source 1..22: mol_type = other DNA
ctggtttctttgaccttttggg

SEQ ID NO: 97401 - DNA, 22 bp, synthetic construct
  misc_feature 1..22: note = chemically synthesized
  source 1..22: mol_type = other DNA
gtttctttgaccttttgggacc

SEQ ID NO: 97402 - DNA, 22 bp, synthetic construct
  misc_feature 1..22: note = chemically synthesized
  source 1..22: mol_type = other DNA
ctttgaccttttgggaccttga

SEQ ID NO: 97403 - DNA, 22 bp, synthetic construct
  misc_feature 1..22: note = chemically synthesized
  source 1..22: mol_type = other DNA
tttgaccttttgggaccttgag

SEQ ID NO: 97404 - DNA, 22 bp, synthetic construct
  misc_feature 1..22: note = chemically synthesized
  source 1..22: mol_type = other DNA
tgaccttttgggaccttgagta

SEQ ID NO: 97405 - DNA, 22 bp, synthetic construct
  misc_feature 1..22: note = chemically synthesized
  source 1..22: mol_type = other DNA
gaccttttgggaccttgagtaa

SEQ ID NO: 97406 - DNA, 22 bp, synthetic construct
  misc_feature 1..22: note = chemically synthesized
  source 1..22: mol_type = other DNA
accttttgggaccttgagtaag

SEQ ID NO: 97407 - DNA, 22 bp, synthetic construct
  misc_feature 1..22: note = chemically synthesized
  source 1..22: mol_type = other DNA
ttgggaccttgagtaagtaaag

SEQ ID NO: 97408 - DNA, 22 bp, synthetic construct
  misc_feature 1..22: note = chemically synthesized
  source 1..22: mol_type = other DNA
tgggaccttgagtaagtaaaga

SEQ ID NO: 97409 - DNA, 22 bp, synthetic construct
  misc_feature 1..22: note = chemically synthesized
  source 1..22: mol_type = other DNA
gggaccttgagtaagtaaagat

SEQ ID NO: 97410 - DNA, 22 bp, synthetic construct
  misc_feature 1..22: note = chemically synthesized
  source 1..22: mol_type = other DNA
ggaccttgagtaagtaaagatg

SEQ ID NO: 97411 - DNA, 22 bp, synthetic construct
  misc_feature 1..22: note = chemically synthesized
  source 1..22: mol_type = other DNA
gagtaagtaaagatgccttcat

SEQ ID NO: 97412 - DNA, 22 bp, synthetic construct
  misc_feature 1..22: note = chemically synthesized
  source 1..22: mol_type = other DNA
agtaagtaaagatgccttcatt

SEQ ID NO: 97413 - DNA, 22 bp, synthetic construct
  misc_feature 1..22: note = chemically synthesized
  source 1..22: mol_type = other DNA
catttattttcatgattaaaat

SEQ ID NO: 97414 - DNA, 22 bp, synthetic construct
  misc_feature 1..22: note = chemically synthesized
  source 1..22: mol_type = other DNA
atttattttcatgattaaaatt

SEQ ID NO: 97415 - DNA, 22 bp, synthetic construct
  misc_feature 1..22: note = chemically synthesized
  source 1..22: mol_type = other DNA
attttcatgattaaaattctaa

SEQ ID NO: 97416 - DNA, 22 bp, synthetic construct
  misc_feature 1..22: note = chemically synthesized
  source 1..22: mol_type = other DNA
ttttcatgattaaaattctaag

SEQ ID NO: 97417 - DNA, 22 bp, synthetic construct
  misc_feature 1..22: note = chemically synthesized
  source 1..22: mol_type = other DNA
tcatgattaaaattctaagaaa

SEQ ID NO: 97418 - DNA, 22 bp, synthetic construct
  misc_feature 1..22: note = chemically synthesized
  source 1..22: mol_type = other DNA
catgattaaaattctaagaaat

SEQ ID NO: 97419 - DNA, 22 bp, synthetic construct
  misc_feature 1..22: note = chemically synthesized
  source 1..22: mol_type = other DNA
atgattaaaattctaagaaatt

SEQ ID NO: 97420 - DNA, 22 bp, synthetic construct
  misc_feature 1..22: note = chemically synthesized
  source 1..22: mol_type = other DNA
aaattctaagaaattcttgggt

SEQ ID NO: 97421 - DNA, 22 bp, synthetic construct
  misc_feature 1..22: note = chemically synthesized
  source 1..22: mol_type = other DNA
taagaaattcttgggttttttt

SEQ ID NO: 97422 - DNA, 22 bp, synthetic construct
  misc_feature 1..22: note = chemically synthesized
  source 1..22: mol_type = other DNA
agaaattcttgggtttttttaa

SEQ ID NO: 97423 - DNA, 22 bp, synthetic construct
  misc_feature 1..22: note = chemically synthesized
  source 1..22: mol_type = other DNA
ttgggtttttttaattaaattg

SEQ ID NO: 97424 - DNA, 22 bp, synthetic construct
  misc_feature 1..22: note = chemically synthesized
  source 1..22: mol_type = other DNA
gggtttttttaattaaattgca

SEQ ID NO: 97425 - DNA, 22 bp, synthetic construct
  misc_feature 1..22: note = chemically synthesized
  source 1..22: mol_type = other DNA
ggtttttttaattaaattgcat

SEQ ID NO: 97426 - DNA, 22 bp, synthetic construct
  misc_feature 1..22: note = chemically synthesized
  source 1..22: mol_type = other DNA
ttttaattaaattgcattgcct

SEQ ID NO: 97427 - DNA, 22 bp, synthetic construct
  misc_feature 1..22: note = chemically synthesized
  source 1..22: mol_type = other DNA
tttaattaaattgcattgccta

SEQ ID NO: 97428 - DNA, 22 bp, synthetic construct
  misc_feature 1..22: note = chemically synthesized
  source 1..22: mol_type = other DNA
ttaattaaattgcattgcctaa

SEQ ID NO: 97429 - DNA, 22 bp, synthetic construct
  misc_feature 1..22: note = chemically synthesized
  source 1..22: mol_type = other DNA
taattaaattgcattgcctaat

SEQ ID NO: 97430 - DNA, 22 bp, synthetic construct
  misc_feature 1..22: note = chemically synthesized
  source 1..22: mol_type = other DNA
aattaaattgcattgcctaatg

SEQ ID NO: 97431 - DNA, 22 bp, synthetic construct
  misc_feature 1..22: note = chemically synthesized
  source 1..22: mol_type = other DNA
attaaattgcattgcctaatgt

SEQ ID NO: 97432 - DNA, 22 bp, synthetic construct
  misc_feature 1..22: note = chemically synthesized
  source 1..22: mol_type = other DNA
aattgcattgcctaatgtattt

SEQ ID NO: 97433 - DNA, 22 bp, synthetic construct
  misc_feature 1..22: note = chemically synthesized
  source 1..22: mol_type = other DNA
cattgcctaatgtatttatgaa

SEQ ID NO: 97434 - DNA, 22 bp, synthetic construct
  misc_feature 1..22: note = chemically synthesized
  source 1..22: mol_type = other DNA
cctaatgtatttatgaactaag

SEQ ID NO: 97435 - DNA, 22 bp, synthetic construct
  misc_feature 1..22: note = chemically synthesized
  source 1..22: mol_type = other DNA
atgtatttatgaactaagaaca

SEQ ID NO: 97436 - DNA, 22 bp, synthetic construct
  misc_feature 1..22: note = chemically synthesized
  source 1..22: mol_type = other DNA
atgaactaagaacatagaaata

SEQ ID NO: 97437 - DNA, 22 bp, synthetic construct
  misc_feature 1..22: note = chemically synthesized
  source 1..22: mol_type = other DNA
tgaactaagaacatagaaataa

SEQ ID NO: 97438 - DNA, 22 bp, synthetic construct
  misc_feature 1..22: note = chemically synthesized
  source 1..22: mol_type = other DNA
agaacatagaaataaaacaata

SEQ ID NO: 97439 - DNA, 22 bp, synthetic construct
  misc_feature 1..22: note = chemically synthesized
  source 1..22: mol_type = other DNA
tgaagtagttcagaatgtgctt

SEQ ID NO: 97440 - DNA, 22 bp, synthetic construct
  misc_feature 1..22: note = chemically synthesized
  source 1..22: mol_type = other DNA
aagtagttcagaatgtgctttc

SEQ ID NO: 97441 - DNA, 22 bp, synthetic construct
  misc_feature 1..22: note = chemically synthesized
  source 1..22: mol_type = other DNA
agaatgtgctttcaatttatat

SEQ ID NO: 97442 - DNA, 22 bp, synthetic construct
  misc_feature 1..22: note = chemically synthesized
  source 1..22: mol_type = other DNA
tcaatttatataaagagttaat

SEQ ID NO: 97443 - DNA, 22 bp, synthetic construct
  misc_feature 1..22: note = chemically synthesized
  source 1..22: mol_type = other DNA
caatttatataaagagttaatt

SEQ ID NO: 97444 - DNA, 22 bp, synthetic construct
  misc_feature 1..22: note = chemically synthesized
  source 1..22: mol_type = other DNA
aatttatataaagagttaattc

SEQ ID NO: 97445 - DNA, 22 bp, synthetic construct
  misc_feature 1..22: note = chemically synthesized
  source 1..22: mol_type = other DNA
atataaagagttaattcaaatg

SEQ ID NO: 97446 - DNA, 22 bp, synthetic construct
  misc_feature 1..22: note = chemically synthesized
  source 1..22: mol_type = other DNA
tataaagagttaattcaaatga

SEQ ID NO: 97447 - DNA, 22 bp, synthetic construct
  misc_feature 1..22: note = chemically synthesized
  source 1..22: mol_type = other DNA
attcaaatgagactattttaag

SEQ ID NO: 97448 - DNA, 22 bp, synthetic construct
  misc_feature 1..22: note = chemically synthesized
  source 1..22: mol_type = other DNA
aaatgagactattttaagtgca

SEQ ID NO: 97449 - DNA, 22 bp, synthetic construct
  misc_feature 1..22: note = chemically synthesized
  source 1..22: mol_type = other DNA
ttttaagtgcagggctttgaat

SEQ ID NO: 97450 - DNA, 22 bp, synthetic construct
  misc_feature 1..22: note = chemically synthesized
  source 1..22: mol_type = other DNA
taagtgcagggctttgaatctt

SEQ ID NO: 97451 - DNA, 22 bp, synthetic construct
  misc_feature 1..22: note = chemically synthesized
  source 1..22: mol_type = other DNA
aagtgcagggctttgaatctta

SEQ ID NO: 97452 - DNA, 22 bp, synthetic construct
  misc_feature 1..22: note = chemically synthesized
  source 1..22: mol_type = other DNA
agtgcagggctttgaatcttat

SEQ ID NO: 97453 - DNA, 22 bp, synthetic construct
  misc_feature 1..22: note = chemically synthesized
  source 1..22: mol_type = other DNA
tgaatcttatgtctagaaattt

SEQ ID NO: 97454 - DNA, 22 bp, synthetic construct
  misc_feature 1..22: note = chemically synthesized
  source 1..22: mol_type = other DNA
gaatcttatgtctagaaatttt

SEQ ID NO: 97455 - DNA, 22 bp, synthetic construct
  misc_feature 1..22: note = chemically synthesized
  source 1..22: mol_type = other DNA
aatcttatgtctagaaattttg

SEQ ID NO: 97456 - DNA, 22 bp, synthetic construct
  misc_feature 1..22: note = chemically synthesized
  source 1..22: mol_type = other DNA
atgtctagaaattttgaaaaac

SEQ ID NO: 97457 - DNA, 22 bp, synthetic construct
  misc_feature 1..22: note = chemically synthesized
  source 1..22: mol_type = other DNA
tgtctagaaattttgaaaaacc

SEQ ID NO: 97458 - DNA, 22 bp, synthetic construct
  misc_feature 1..22: note = chemically synthesized
  source 1..22: mol_type = other DNA
gaaattttgaaaaacctctgat

SEQ ID NO: 97459 - DNA, 22 bp, synthetic construct
  misc_feature 1..22: note = chemically synthesized
  source 1..22: mol_type = other DNA
tgaaaaacctctgattatatgc

SEQ ID NO: 97460 - DNA, 22 bp, synthetic construct
  misc_feature 1..22: note = chemically synthesized
  source 1..22: mol_type = other DNA
gaaaaacctctgattatatgct

SEQ ID NO: 97461 - DNA, 22 bp, synthetic construct
  misc_feature 1..22: note = chemically synthesized
  source 1..22: mol_type = other DNA
aaaaacctctgattatatgcta

SEQ ID NO: 97462 - DNA, 22 bp, synthetic construct
  misc_feature 1..22: note = chemically synthesized
  source 1..22: mol_type = other DNA
tgattatatgctaagattccac

SEQ ID NO: 97463 - DNA, 22 bp, synthetic construct
  misc_feature 1..22: note = chemically synthesized
  source 1..22: mol_type = other DNA
attatatgctaagattccacct

SEQ ID NO: 97464 - DNA, 22 bp, synthetic construct
  misc_feature 1..22: note = chemically synthesized
  source 1..22: mol_type = other DNA
tatgctaagattccacctctag

SEQ ID NO: 97465 - DNA, 22 bp, synthetic construct
  misc_feature 1..22: note = chemically synthesized
  source 1..22: mol_type = other DNA
agattccacctctagtgctaga

SEQ ID NO: 97466 - DNA, 22 bp, synthetic construct
  misc_feature 1..22: note = chemically synthesized
  source 1..22: mol_type = other DNA
cacctctagtgctagaactgag

SEQ ID NO: 97467 - DNA, 22 bp, synthetic construct
  misc_feature 1..22: note = chemically synthesized
  source 1..22: mol_type = other DNA
tagtgctagaactgagaagtcc

SEQ ID NO: 97468 - DNA, 22 bp, synthetic construct
  misc_feature 1..22: note = chemically synthesized
  source 1..22: mol_type = other DNA
gtgctagaactgagaagtcctt

SEQ ID NO: 97469 - DNA, 22 bp, synthetic construct
  misc_feature 1..22: note = chemically synthesized
  source 1..22: mol_type = other DNA
gaactgagaagtccttgacttg

SEQ ID NO: 97470 - DNA, 22 bp, synthetic construct
  misc_feature 1..22: note = chemically synthesized
  source 1..22: mol_type = other DNA
agaagtccttgacttggtgatc

SEQ ID NO: 97471 - DNA, 22 bp, synthetic construct
  misc_feature 1..22: note = chemically synthesized
  source 1..22: mol_type = other DNA
gacttggtgatcttttttaaat

SEQ ID NO: 97472 - DNA, 22 bp, synthetic construct
  misc_feature 1..22: note = chemically synthesized
  source 1..22: mol_type = other DNA
acttggtgatcttttttaaatt

SEQ ID NO: 97473 - DNA, 22 bp, synthetic construct
  misc_feature 1..22: note = chemically synthesized
  source 1..22: mol_type = other DNA
ggtgatcttttttaaattctga

SEQ ID NO: 97474 - DNA, 22 bp, synthetic construct
  misc_feature 1..22: note = chemically synthesized
  source 1..22: mol_type = other DNA
gtgatcttttttaaattctgaa

SEQ ID NO: 97475 - DNA, 22 bp, synthetic construct
  misc_feature 1..22: note = chemically synthesized
  source 1..22: mol_type = other DNA
ttttaaattctgaaacaacagc

SEQ ID NO: 97476 - DNA, 22 bp, synthetic construct
  misc_feature 1..22: note = chemically synthesized
  source 1..22: mol_type = other DNA
tttaaattctgaaacaacagca

SEQ ID NO: 97477 - DNA, 22 bp, synthetic construct
  misc_feature 1..22: note = chemically synthesized
  source 1..22: mol_type = other DNA
ttaaattctgaaacaacagcaa

SEQ ID NO: 97478 - DNA, 22 bp, synthetic construct
  misc_feature 1..22: note = chemically synthesized
  source 1..22: mol_type = other DNA
taaattctgaaacaacagcaac

SEQ ID NO: 97479 - DNA, 22 bp, synthetic construct
  misc_feature 1..22: note = chemically synthesized
  source 1..22: mol_type = other DNA
aaattctgaaacaacagcaaca

SEQ ID NO: 97480 - DNA, 22 bp, synthetic construct
  misc_feature 1..22: note = chemically synthesized
  source 1..22: mol_type = other DNA
aattctgaaacaacagcaacat

SEQ ID NO: 97481 - DNA, 22 bp, synthetic construct
  misc_feature 1..22: note = chemically synthesized
  source 1..22: mol_type = other DNA
tgaaacaacagcaacataaagc

SEQ ID NO: 97482 - DNA, 22 bp, synthetic construct
  misc_feature 1..22: note = chemically synthesized
  source 1..22: mol_type = other DNA
aaacaacagcaacataaagcta

SEQ ID NO: 97483 - DNA, 22 bp, synthetic construct
  misc_feature 1..22: note = chemically synthesized
  source 1..22: mol_type = other DNA
aggactttttcttgcctatgca

SEQ ID NO: 97484 - DNA, 22 bp, synthetic construct
  misc_feature 1..22: note = chemically synthesized
  source 1..22: mol_type = other DNA
tttcttgcctatgcatgctatc

SEQ ID NO: 97485 - DNA, 22 bp, synthetic construct
  misc_feature 1..22: note = chemically synthesized
  source 1..22: mol_type = other DNA
ttcttgcctatgcatgctatct

SEQ ID NO: 97486 - DNA, 22 bp, synthetic construct
  misc_feature 1..22: note = chemically synthesized
  source 1..22: mol_type = other DNA
tcttgcctatgcatgctatctt

SEQ ID NO: 97487 - DNA, 22 bp, synthetic construct
  misc_feature 1..22: note = chemically synthesized
  source 1..22: mol_type = other DNA
cttgcctatgcatgctatcttc

SEQ ID NO: 97488 - DNA, 22 bp, synthetic construct
  misc_feature 1..22: note = chemically synthesized
  source 1..22: mol_type = other DNA
ttgcctatgcatgctatcttca

SEQ ID NO: 97489 - DNA, 22 bp, synthetic construct
  misc_feature 1..22: note = chemically synthesized
  source 1..22: mol_type = other DNA
gcctatgcatgctatcttcagt

SEQ ID NO: 97490 - DNA, 22 bp, synthetic construct
  misc_feature 1..22: note = chemically synthesized
  source 1..22: mol_type = other DNA
cctatgcatgctatcttcagta

SEQ ID NO: 97491 - DNA, 22 bp, synthetic construct
  misc_feature 1..22: note = chemically synthesized
  source 1..22: mol_type = other DNA
tgcatgctatcttcagtacttt

SEQ ID NO: 97492 - DNA, 22 bp, synthetic construct
  misc_feature 1..22: note = chemically synthesized
  source 1..22: mol_type = other DNA
tcttcagtactttgattattta

SEQ ID NO: 97493 - DNA, 22 bp, synthetic construct
  misc_feature 1..22: note = chemically synthesized
  source 1..22: mol_type = other DNA
cagtactttgattatttagtat

SEQ ID NO: 97494 - DNA, 22 bp, synthetic construct
  misc_feature 1..22: note = chemically synthesized
  source 1..22: mol_type = other DNA
agtactttgattatttagtatt

SEQ ID NO: 97495 - DNA, 22 bp, synthetic construct
  misc_feature 1..22: note = chemically synthesized
  source 1..22: mol_type = other DNA
tgattatttagtattgaaacta

SEQ ID NO: 97496 - DNA, 22 bp, synthetic construct
  misc_feature 1..22: note = chemically synthesized
  source 1..22: mol_type = other DNA
gattatttagtattgaaactat

SEQ ID NO: 97497 - DNA, 22 bp, synthetic construct
  misc_feature 1..22: note = chemically synthesized
  source 1..22: mol_type = other DNA
attatttagtattgaaactata

SEQ ID NO: 97498 - DNA, 22 bp, synthetic construct
  misc_feature 1..22: note = chemically synthesized
  source 1..22: mol_type = other DNA
tttagtattgaaactataacat

SEQ ID NO: 97499 - DNA, 22 bp, synthetic construct
  misc_feature 1..22: note = chemically synthesized
  source 1..22: mol_type = other DNA
agtattgaaactataacatagt

SEQ ID NO: 97500 - DNA, 22 bp, synthetic construct
  misc_feature 1..22: note = chemically synthesized
  source 1..22: mol_type = other DNA
gtattgaaactataacatagta

SEQ ID NO: 97501 - DNA, 22 bp, synthetic construct
  misc_feature 1..22: note = chemically synthesized
  source 1..22: mol_type = other DNA
aaactataacatagtatgtttc

SEQ ID NO: 97502 - DNA, 22 bp, synthetic construct
  misc_feature 1..22: note = chemically synthesized
  source 1..22: mol_type = other DNA
taacatagtatgtttcctgaat

SEQ ID NO: 97503 - DNA, 22 bp, synthetic construct
  misc_feature 1..22: note = chemically synthesized
  source 1..22: mol_type = other DNA
cctgaataaaaaatgtgtattt

SEQ ID NO: 97504 - DNA, 22 bp, synthetic construct
  misc_feature 1..22: note = chemically synthesized
  source 1..22: mol_type = other DNA
ctgaataaaaaatgtgtatttc

SEQ ID NO: 97505 - DNA, 22 bp, synthetic construct
  misc_feature 1..22: note = chemically synthesized
  source 1..22: mol_type = other DNA
aataaaaaatgtgtatttctct

SEQ ID NO: 97506 - DNA, 22 bp, synthetic construct
  misc_feature 1..22: note = chemically synthesized
  source 1..22: mol_type = other DNA
ctctggagaaggttaaaactga

SEQ ID NO: 97507 - DNA, 22 bp, synthetic construct
  misc_feature 1..22: note = chemically synthesized
  source 1..22: mol_type = other DNA
tctggagaaggttaaaactgag

SEQ ID NO: 97508 - DNA, 22 bp, synthetic construct
  misc_feature 1..22: note = chemically synthesized
  source 1..22: mol_type = other DNA
tggagaaggttaaaactgagga

SEQ ID NO: 97509 - DNA, 22 bp, synthetic construct
  misc_feature 1..22: note = chemically synthesized
  source 1..22: mol_type = other DNA
gagaaggttaaaactgaggatt

SEQ ID NO: 97510 - DNA, 22 bp, synthetic construct
  misc_feature 1..22: note = chemically synthesized
  source 1..22: mol_type = other DNA
aaactgaggattggcaagtgag

SEQ ID NO: 97511 - DNA, 22 bp, synthetic construct
  misc_feature 1..22: note = chemically synthesized
  source 1..22: mol_type = other DNA
aggattggcaagtgagcaaggc

SEQ ID NO: 97512 - DNA, 22 bp, synthetic construct
  misc_feature 1..22: note = chemically synthesized
  source 1..22: mol_type = other DNA
gcaagtgagcaaggcttaaatg

SEQ ID NO: 97513 - DNA, 22 bp, synthetic construct
  misc_feature 1..22: note = chemically synthesized
  source 1..22: mol_type = other DNA
aaatggaagaagcaatgatctc

SEQ ID NO: 97514 - DNA, 22 bp, synthetic construct
  misc_feature 1..22: note = chemically synthesized
  source 1..22: mol_type = other DNA
aatggaagaagcaatgatctcg

SEQ ID NO: 97515 - DNA, 22 bp, synthetic construct
  misc_feature 1..22: note = chemically synthesized
  source 1..22: mol_type = other DNA
gtcagaccaccttcattaacga

SEQ ID NO: 97516 - DNA, 22 bp, synthetic construct
  misc_feature 1..22: note = chemically synthesized
  source 1..22: mol_type = other DNA
cattaacgagatcatccatcat

SEQ ID NO: 97517 - DNA, 22 bp, synthetic construct
  misc_feature 1..22: note = chemically synthesized
  source 1..22: mol_type = other DNA
attaacgagatcatccatcatg

SEQ ID NO: 97518 - DNA, 22 bp, synthetic construct
  misc_feature 1..22: note = chemically synthesized
  source 1..22: mol_type = other DNA
acgagatcatccatcatgagga

SEQ ID NO: 97519 - DNA, 22 bp, synthetic construct
  misc_feature 1..22: note = chemically synthesized
  source 1..22: mol_type = other DNA
tgttttgtgtcactaagggtga

SEQ ID NO: 97520 - DNA, 22 bp, synthetic construct
  misc_feature 1..22: note = chemically synthesized
  source 1..22: mol_type = other DNA
ttttgtgtcactaagggtgagg

SEQ ID NO: 97521 - DNA, 22 bp, synthetic construct
  misc_feature 1..22: note = chemically synthesized
  source 1..22: mol_type = other DNA
tgtgtcactaagggtgaggatg

SEQ ID NO: 97522 - DNA, 22 bp, synthetic construct
  misc_feature 1..22: note = chemically synthesized
  source 1..22: mol_type = other DNA
gtgtcactaagggtgaggatgc

SEQ ID NO: 97523 - DNA, 22 bp, synthetic construct
  misc_feature 1..22: note = chemically synthesized
  source 1..22: mol_type = other DNA
tgtcactaagggtgaggatgct

SEQ ID NO: 97524 - DNA, 22 bp, synthetic construct
  misc_feature 1..22: note = chemically synthesized
  source 1..22: mol_type = other DNA
agggtgaggatgctgaatgatt

SEQ ID NO: 97525 - DNA, 22 bp, synthetic construct
  misc_feature 1..22: note = chemically synthesized
  source 1..22: mol_type = other DNA
aatgatttttccctcccccggg

SEQ ID NO: 97526 - DNA, 22 bp, synthetic construct
  misc_feature 1..22: note = chemically synthesized
  source 1..22: mol_type = other DNA
ttccctcccccgggcttctttt

SEQ ID NO: 97527 - DNA, 22 bp, synthetic construct
  misc_feature 1..22: note = chemically synthesized
  source 1..22: mol_type = other DNA
tccctcccccgggcttctttta

SEQ ID NO: 97528 - DNA, 22 bp, synthetic construct
  misc_feature 1..22: note = chemically synthesized
  source 1..22: mol_type = other DNA
ccctcccccgggcttcttttag

SEQ ID NO: 97529 - DNA, 22 bp, synthetic construct
  misc_feature 1..22: note = chemically synthesized
  source 1..22: mol_type = other DNA
cctcccccgggcttcttttagc

SEQ ID NO: 97530 - DNA, 22 bp, synthetic construct
  misc_feature 1..22: note = chemically synthesized
  source 1..22: mol_type = other DNA
ccccgggcttcttttagccatc

SEQ ID NO: 97531 - DNA, 22 bp, synthetic construct
  misc_feature 1..22: note = chemically synthesized
  source 1..22: mol_type = other DNA
cttttagccatcaataattcta

SEQ ID NO: 97532 - DNA, 22 bp, synthetic construct
  misc_feature 1..22: note = chemically synthesized
  source 1..22: mol_type = other DNA
ttttagccatcaataattctag

SEQ ID NO: 97533 - DNA, 22 bp, synthetic construct
  misc_feature 1..22: note = chemically synthesized
  source 1..22: mol_type = other DNA
ttagccatcaataattctagcc

SEQ ID NO: 97534 - DNA, 22 bp, synthetic construct
  misc_feature 1..22: note = chemically synthesized
  source 1..22: mol_type = other DNA
tagccatcaataattctagccc

SEQ ID NO: 97535 - DNA, 22 bp, synthetic construct
  misc_feature 1..22: note = chemically synthesized
  source 1..22: mol_type = other DNA
agccatcaataattctagcccc

SEQ ID NO: 97536 - DNA, 22 bp, synthetic construct
  misc_feature 1..22: note = chemically synthesized
  source 1..22: mol_type = other DNA
gccatcaataattctagcccca

SEQ ID NO: 97537 - DNA, 22 bp, synthetic construct
  misc_feature 1..22: note = chemically synthesized
  source 1..22: mol_type = other DNA
tagccccacaggagtttgttct

SEQ ID NO: 97538 - DNA, 22 bp, synthetic construct
  misc_feature 1..22: note = chemically synthesized
  source 1..22: mol_type = other DNA
gccccacaggagtttgttctga

SEQ ID NO: 97539 - DNA, 22 bp, synthetic construct
  misc_feature 1..22: note = chemically synthesized
  source 1..22: mol_type = other DNA
gttctgaaagtaaacttccaca

SEQ ID NO: 97540 - DNA, 22 bp, synthetic construct
  misc_feature 1..22: note = chemically synthesized
  source 1..22: mol_type = other DNA
ttctgaaagtaaacttccacaa

SEQ ID NO: 97541 - DNA, 22 bp, synthetic construct
  misc_feature 1..22: note = chemically synthesized
  source 1..22: mol_type = other DNA
tgaaagtaaacttccacaaccg

SEQ ID NO: 97542 - DNA, 22 bp, synthetic construct
  misc_feature 1..22: note = chemically synthesized
  source 1..22: mol_type = other DNA
aaagtaaacttccacaaccgca

SEQ ID NO: 97543 - DNA, 22 bp, synthetic construct
  misc_feature 1..22: note = chemically synthesized
  source 1..22: mol_type = other DNA
ccacaaccgcaagcttattgag

SEQ ID NO: 97544 - DNA, 22 bp, synthetic construct
  misc_feature 1..22: note = chemically synthesized
  source 1..22: mol_type = other DNA
cacaaccgcaagcttattgagg

SEQ ID NO: 97545 - DNA, 22 bp, synthetic construct
  misc_feature 1..22: note = chemically synthesized
  source 1..22: mol_type = other DNA
attgaggctaaggcatctgtga

SEQ ID NO: 97546 - DNA, 22 bp, synthetic construct
  misc_feature 1..22: note = chemically synthesized
  source 1..22: mol_type = other DNA
ttgaggctaaggcatctgtgaa

SEQ ID NO: 97547 - DNA, 22 bp, synthetic construct
  misc_feature 1..22: note = chemically synthesized
  source 1..22: mol_type = other DNA
aggctaaggcatctgtgaagga

SEQ ID NO: 97548 - DNA, 22 bp, synthetic construct
  misc_feature 1..22: note = chemically synthesized
  source 1..22: mol_type = other DNA
aggcatctgtgaaggaaagaaa

SEQ ID NO: 97549 - DNA, 22 bp, synthetic construct
  misc_feature 1..22: note = chemically synthesized
  source 1..22: mol_type = other DNA
tgaaggaaagaaacatctcctc

SEQ ID NO: 97550 - DNA, 22 bp, synthetic construct
  misc_feature 1..22: note = chemically synthesized
  source 1..22: mol_type = other DNA
ctctaaaccactatgctgctag

SEQ ID NO: 97551 - DNA, 22 bp, synthetic construct
  misc_feature 1..22: note = chemically synthesized
  source 1..22: mol_type = other DNA
taaaccactatgctgctagagc

SEQ ID NO: 97552 - DNA, 22 bp, synthetic construct
  misc_feature 1..22: note = chemically synthesized
  source 1..22: mol_type = other DNA
aaccactatgctgctagagcct

SEQ ID NO: 97553 - DNA, 22 bp, synthetic construct
  misc_feature 1..22: note = chemically synthesized
  source 1..22: mol_type = other DNA
tgctgctagagcctcttttctg

SEQ ID NO: 97554 - DNA, 22 bp, synthetic construct
  misc_feature 1..22: note = chemically synthesized
  source 1..22: mol_type = other DNA
ctagagcctcttttctgtactc

SEQ ID NO: 97555 - DNA, 22 bp, synthetic construct
  misc_feature 1..22: note = chemically synthesized
  source 1..22: mol_type = other DNA
gagcctcttttctgtactcaag

SEQ ID NO: 97556 - DNA, 22 bp, synthetic construct
  misc_feature 1..22: note = chemically synthesized
  source 1..22: mol_type = other DNA
ttttctgtactcaagcctcatt

SEQ ID NO: 97557 - DNA, 22 bp, synthetic construct
  misc_feature 1..22: note = chemically synthesized
  source 1..22: mol_type = other DNA
ttctgtactcaagcctcattca

SEQ ID NO: 97558 - DNA, 22 bp, synthetic construct
  misc_feature 1..22: note = chemically synthesized
  source 1..22: mol_type = other DNA
tctgtactcaagcctcattcag

SEQ ID NO: 97559 - DNA, 22 bp, synthetic construct
  misc_feature 1..22: note = chemically synthesized
  source 1..22: mol_type = other DNA
ctgtactcaagcctcattcaga

SEQ ID NO: 97560 - DNA, 22 bp, synthetic construct
  misc_feature 1..22: note = chemically synthesized
  source 1..22: mol_type = other DNA
tgtactcaagcctcattcagac

SEQ ID NO: 97561 - DNA, 22 bp, synthetic construct
  misc_feature 1..22: note = chemically synthesized
  source 1..22: mol_type = other DNA
tactcaagcctcattcagacac

SEQ ID NO: 97562 - DNA, 22 bp, synthetic construct
  misc_feature 1..22: note = chemically synthesized
  source 1..22: mol_type = other DNA
aagcctcattcagacactagtg

SEQ ID NO: 97563 - DNA, 22 bp, synthetic construct
  misc_feature 1..22: note = chemically synthesized
  source 1..22: mol_type = other DNA
attcagacactagtgtcaccag

SEQ ID NO: 97564 - DNA, 22 bp, synthetic construct
  misc_feature 1..22: note = chemically synthesized
  source 1..22: mol_type = other DNA
agacactagtgtcaccagtctc

SEQ ID NO: 97565 - DNA, 22 bp, synthetic construct
  misc_feature 1..22: note = chemically synthesized
  source 1..22: mol_type = other DNA
gtgtcaccagtctcctcatata

SEQ ID NO: 97566 - DNA, 22 bp, synthetic construct
  misc_feature 1..22: note = chemically synthesized
  source 1..22: mol_type = other DNA
ctcatatacctattgtattttc

SEQ ID NO: 97567 - DNA, 22 bp, synthetic construct
  misc_feature 1..22: note = chemically synthesized
  source 1..22: mol_type = other DNA
atatacctattgtattttcttc

SEQ ID NO: 97568 - DNA, 22 bp, synthetic construct
  misc_feature 1..22: note = chemically synthesized
  source 1..22: mol_type = other DNA
ttgtattttcttcttcttgctg

SEQ ID NO: 97569 - DNA, 22 bp, synthetic construct
  misc_feature 1..22: note = chemically synthesized
  source 1..22: mol_type = other DNA
tattttcttcttcttgctggtt

SEQ ID NO: 97570 - DNA, 22 bp, synthetic construct
  misc_feature 1..22: note = chemically synthesized
  source 1..22: mol_type = other DNA
tcttcttcttgctggtttagtc

SEQ ID NO: 97571 - DNA, 22 bp, synthetic construct
  misc_feature 1..22: note = chemically synthesized
  source 1..22: mol_type = other DNA
cttcttcttgctggtttagtca

SEQ ID NO: 97572 - DNA, 22 bp, synthetic construct
  misc_feature 1..22: note = chemically synthesized
  source 1..22: mol_type = other DNA
ttcttcttgctggtttagtcat

SEQ ID NO: 97573 - DNA, 22 bp, synthetic construct
  misc_feature 1..22: note = chemically synthesized
  source 1..22: mol_type = other DNA
cttcttgctggtttagtcatgt

SEQ ID NO: 97574 - DNA, 22 bp, synthetic construct
  misc_feature 1..22: note = chemically synthesized
  source 1..22: mol_type = other DNA
ttcttgctggtttagtcatgtt

SEQ ID NO: 97575 - DNA, 22 bp, synthetic construct
  misc_feature 1..22: note = chemically synthesized
  source 1..22: mol_type = other DNA
cttgctggtttagtcatgtttt

SEQ ID NO: 97576 - DNA, 22 bp, synthetic construct
  misc_feature 1..22: note = chemically synthesized
  source 1..22: mol_type = other DNA
ttgctggtttagtcatgttttc

SEQ ID NO: 97577 - DNA, 22 bp, synthetic construct
  misc_feature 1..22: note = chemically synthesized
  source 1..22: mol_type = other DNA
gctggtttagtcatgttttctg

SEQ ID NO: 97578 - DNA, 22 bp, synthetic construct
  misc_feature 1..22: note = chemically synthesized
  source 1..22: mol_type = other DNA
ctggtttagtcatgttttctgg

SEQ ID NO: 97579 - DNA, 22 bp, synthetic construct
  misc_feature 1..22: note = chemically synthesized
  source 1..22: mol_type = other DNA
gtttagtcatgttttctgggag

SEQ ID NO: 97580 - DNA, 22 bp, synthetic construct
  misc_feature 1..22: note = chemically synthesized
  source 1..22: mol_type = other DNA
agtcatgttttctgggagctta

SEQ ID NO: 97581 - DNA, 22 bp, synthetic construct
  misc_feature 1..22: note = chemically synthesized
  source 1..22: mol_type = other DNA
gtcatgttttctgggagcttag

SEQ ID NO: 97582 - DNA, 22 bp, synthetic construct
  misc_feature 1..22: note = chemically synthesized
  source 1..22: mol_type = other DNA
tctgggagcttaggggcttatt

SEQ ID NO: 97583 - DNA, 22 bp, synthetic construct
  misc_feature 1..22: note = chemically synthesized
  source 1..22: mol_type = other DNA
ctgggagcttaggggcttattt

SEQ ID NO: 97584 - DNA, 22 bp, synthetic construct
  misc_feature 1..22: note = chemically synthesized
  source 1..22: mol_type = other DNA
tgggagcttaggggcttatttt

SEQ ID NO: 97585 - DNA, 22 bp, synthetic construct
  misc_feature 1..22: note = chemically synthesized
  source 1..22: mol_type = other DNA
ggagcttaggggcttattttat

SEQ ID NO: 97586 - DNA, 22 bp, synthetic construct
  misc_feature 1..22: note = chemically synthesized
  source 1..22: mol_type = other DNA
aggggcttattttattttgttt

SEQ ID NO: 97587 - DNA, 22 bp, synthetic construct
  misc_feature 1..22: note = chemically synthesized
  source 1..22: mol_type = other DNA
ggggcttattttattttgtttt

SEQ ID NO: 97588 - DNA, 22 bp, synthetic construct
  misc_feature 1..22: note = chemically synthesized
  source 1..22: mol_type = other DNA
attttattttgttttgttttct

SEQ ID NO: 97589 - DNA, 22 bp, synthetic construct
  misc_feature 1..22: note = chemically synthesized
  source 1..22: mol_type = other DNA
ttttattttgttttgttttcta

SEQ ID NO: 97590 - DNA, 22 bp, synthetic construct
  misc_feature 1..22: note = chemically synthesized
  source 1..22: mol_type = other DNA
tattttgttttgttttctaatc

SEQ ID NO: 97591 - DNA, 22 bp, synthetic construct
  misc_feature 1..22: note = chemically synthesized
  source 1..22: mol_type = other DNA
attttgttttgttttctaatca

SEQ ID NO: 97592 - DNA, 22 bp, synthetic construct
  misc_feature 1..22: note = chemically synthesized
  source 1..22: mol_type = other DNA
ttttgttttgttttctaatcaa

SEQ ID NO: 97593 - DNA, 22 bp, synthetic construct
  misc_feature 1..22: note = chemically synthesized
  source 1..22: mol_type = other DNA
tgttttgttttctaatcaacag

SEQ ID NO: 97594 - DNA, 22 bp, synthetic construct
  misc_feature 1..22: note = chemically synthesized
  source 1..22: mol_type = other DNA
gttttgttttctaatcaacaga

SEQ ID NO: 97595 - DNA, 22 bp, synthetic construct
  misc_feature 1..22: note = chemically synthesized
  source 1..22: mol_type = other DNA
ttttgttttctaatcaacagag

SEQ ID NO: 97596 - DNA, 22 bp, synthetic construct
  misc_feature 1..22: note = chemically synthesized
  source 1..22: mol_type = other DNA
tgttttctaatcaacagagatg

SEQ ID NO: 97597 - DNA, 22 bp, synthetic construct
  misc_feature 1..22: note = chemically synthesized
  source 1..22: mol_type = other DNA
gttttctaatcaacagagatgg

SEQ ID NO: 97598 - DNA, 22 bp, synthetic construct
  misc_feature 1..22: note = chemically synthesized
  source 1..22: mol_type = other DNA
ttttctaatcaacagagatggg

SEQ ID NO: 97599 - DNA, 22 bp, synthetic construct
  misc_feature 1..22: note = chemically synthesized
  source 1..22: mol_type = other DNA
tctaatcaacagagatgggcaa

SEQ ID NO: 97600 - DNA, 22 bp, synthetic construct
  misc_feature 1..22: note = chemically synthesized
  source 1..22: mol_type = other DNA
ctaatcaacagagatgggcaaa

SEQ ID NO: 97601 - DNA, 22 bp, synthetic construct
  misc_feature 1..22: note = chemically synthesized
  source 1..22: mol_type = other DNA
taatcaacagagatgggcaaac

SEQ ID NO: 97602 - DNA, 22 bp, synthetic construct
  misc_feature 1..22: note = chemically synthesized
  source 1..22: mol_type = other DNA
atcaacagagatgggcaaaccc

SEQ ID NO: 97603 - DNA, 22 bp, synthetic construct
  misc_feature 1..22: note = chemically synthesized
  source 1..22: mol_type = other DNA
tttttttctttagacttgggat

SEQ ID NO: 97604 - DNA, 22 bp, synthetic construct
  misc_feature 1..22: note = chemically synthesized
  source 1..22: mol_type = other DNA
ttttctttagacttgggatggt

SEQ ID NO: 97605 - DNA, 22 bp, synthetic construct
  misc_feature 1..22: note = chemically synthesized
  source 1..22: mol_type = other DNA
tttctttagacttgggatggtg

SEQ ID NO: 97606 - DNA, 22 bp, synthetic construct
  misc_feature 1..22: note = chemically synthesized
  source 1..22: mol_type = other DNA
ttctttagacttgggatggtga

SEQ ID NO: 97607 - DNA, 22 bp, synthetic construct
  misc_feature 1..22: note = chemically synthesized
  source 1..22: mol_type = other DNA
tctttagacttgggatggtgat

SEQ ID NO: 97608 - DNA, 22 bp, synthetic construct
  misc_feature 1..22: note = chemically synthesized
  source 1..22: mol_type = other DNA
ctttagacttgggatggtgata

SEQ ID NO: 97609 - DNA, 22 bp, synthetic construct
  misc_feature 1..22: note = chemically synthesized
  source 1..22: mol_type = other DNA
tttagacttgggatggtgatag

SEQ ID NO: 97610 - DNA, 22 bp, synthetic construct
  misc_feature 1..22: note = chemically synthesized
  source 1..22: mol_type = other DNA
tagacttgggatggtgatagct

SEQ ID NO: 97611 - DNA, 22 bp, synthetic construct
  misc_feature 1..22: note = chemically synthesized
  source 1..22: mol_type = other DNA
agacttgggatggtgatagctg

SEQ ID NO: 97612 - DNA, 22 bp, synthetic construct
  misc_feature 1..22: note = chemically synthesized
  source 1..22: mol_type = other DNA
gacttgggatggtgatagctgg

SEQ ID NO: 97613 - DNA, 22 bp, synthetic construct
  misc_feature 1..22: note = chemically synthesized
  source 1..22: mol_type = other DNA
gggatggtgatagctgggcagc

SEQ ID NO: 97614 - DNA, 22 bp, synthetic construct
  misc_feature 1..22: note = chemically synthesized
  source 1..22: mol_type = other DNA
ggatggtgatagctgggcagcg

SEQ ID NO: 97615 - DNA, 22 bp, synthetic construct
  misc_feature 1..22: note = chemically synthesized
  source 1..22: mol_type = other DNA
ggcagcgtcagaaactgtgtgt

SEQ ID NO: 97616 - DNA, 22 bp, synthetic construct
  misc_feature 1..22: note = chemically synthesized
  source 1..22: mol_type = other DNA
tgtgtggatatagataagagct

SEQ ID NO: 97617 - DNA, 22 bp, synthetic construct
  misc_feature 1..22: note = chemically synthesized
  source 1..22: mol_type = other DNA
aggactatgctgagctgtgatg

SEQ ID NO: 97618 - DNA, 22 bp, synthetic construct
  misc_feature 1..22: note = chemically synthesized
  source 1..22: mol_type = other DNA
tgctgagctgtgatgagggagg

SEQ ID NO: 97619 - DNA, 22 bp, synthetic construct
  misc_feature 1..22: note = chemically synthesized
  source 1..22: mol_type = other DNA
agctgtgatgagggaggggcct

SEQ ID NO: 97620 - DNA, 22 bp, synthetic construct
  misc_feature 1..22: note = chemically synthesized
  source 1..22: mol_type = other DNA
tgatgagggaggggcctagcta

SEQ ID NO: 97621 - DNA, 22 bp, synthetic construct
  misc_feature 1..22: note = chemically synthesized
  source 1..22: mol_type = other DNA
gctaaaggcagtgagagtcaga

SEQ ID NO: 97622 - DNA, 22 bp, synthetic construct
  misc_feature 1..22: note = chemically synthesized
  source 1..22: mol_type = other DNA
aaggcagtgagagtcagaatgc

SEQ ID NO: 97623 - DNA, 22 bp, synthetic construct
  misc_feature 1..22: note = chemically synthesized
  source 1..22: mol_type = other DNA
ctgctattgccttctcagtccc

SEQ ID NO: 97624 - DNA, 22 bp, synthetic construct
  misc_feature 1..22: note = chemically synthesized
  source 1..22: mol_type = other DNA
ctattgccttctcagtccccac

SEQ ID NO: 97625 - DNA, 22 bp, synthetic construct
  misc_feature 1..22: note = chemically synthesized
  source 1..22: mol_type = other DNA
ttgccttctcagtccccacgct

SEQ ID NO: 97626 - DNA, 22 bp, synthetic construct
  misc_feature 1..22: note = chemically synthesized
  source 1..22: mol_type = other DNA
ccttctcagtccccacgcttgg

SEQ ID NO: 97627 - DNA, 22 bp, synthetic construct
  misc_feature 1..22: note = chemically synthesized
  source 1..22: mol_type = other DNA
ctcagtccccacgcttggtttc

SEQ ID NO: 97628 - DNA, 22 bp, synthetic construct
  misc_feature 1..22: note = chemically synthesized
  source 1..22: mol_type = other DNA
tcagtccccacgcttggtttct

SEQ ID NO: 97629 - DNA, 22 bp, synthetic construct
  misc_feature 1..22: note = chemically synthesized
  source 1..22: mol_type = other DNA
agtccccacgcttggtttctac

SEQ ID NO: 97630 - DNA, 22 bp, synthetic construct
  misc_feature 1..22: note = chemically synthesized
  source 1..22: mol_type = other DNA
ggtttctacacaagtagataca

SEQ ID NO: 97631 - DNA, 22 bp, synthetic construct
  misc_feature 1..22: note = chemically synthesized
  source 1..22: mol_type = other DNA
gtttctacacaagtagatacat

SEQ ID NO: 97632 - DNA, 22 bp, synthetic construct
  misc_feature 1..22: note = chemically synthesized
  source 1..22: mol_type = other DNA
ctacacaagtagatacatagaa

SEQ ID NO: 97633 - DNA, 22 bp, synthetic construct
  misc_feature 1..22: note = chemically synthesized
  source 1..22: mol_type = other DNA
tacacaagtagatacatagaaa

SEQ ID NO: 97634 - DNA, 22 bp, synthetic construct
  misc_feature 1..22: note = chemically synthesized
  source 1..22: mol_type = other DNA
cacaagtagatacatagaaaag

SEQ ID NO: 97635 - DNA, 22 bp, synthetic construct
  misc_feature 1..22: note = chemically synthesized
  source 1..22: mol_type = other DNA
taggttagtgtttgagagtcct

SEQ ID NO: 97636 - DNA, 22 bp, synthetic construct
  misc_feature 1..22: note = chemically synthesized
  source 1..22: mol_type = other DNA
gtgtttgagagtcctgcatgat

SEQ ID NO: 97637 - DNA, 22 bp, synthetic construct
  misc_feature 1..22: note = chemically synthesized
  source 1..22: mol_type = other DNA
gagagtcctgcatgattagttg

SEQ ID NO: 97638 - DNA, 22 bp, synthetic construct
  misc_feature 1..22: note = chemically synthesized
  source 1..22: mol_type = other DNA
agagtcctgcatgattagttgc

SEQ ID NO: 97639 - DNA, 22 bp, synthetic construct
  misc_feature 1..22: note = chemically synthesized
  source 1..22: mol_type = other DNA
catgattagttgctcagaaatg

SEQ ID NO: 97640 - DNA, 22 bp, synthetic construct
  misc_feature 1..22: note = chemically synthesized
  source 1..22: mol_type = other DNA
gttgctcagaaatgcccgataa

SEQ ID NO: 97641 - DNA, 22 bp, synthetic construct
  misc_feature 1..22: note = chemically synthesized
  source 1..22: mol_type = other DNA
ctcagaaatgcccgataaatat

SEQ ID NO: 97642 - DNA, 22 bp, synthetic construct
  misc_feature 1..22: note = chemically synthesized
  source 1..22: mol_type = other DNA
agaaatgcccgataaatatgtt

SEQ ID NO: 97643 - DNA, 22 bp, synthetic construct
  misc_feature 1..22: note = chemically synthesized
  source 1..22: mol_type = other DNA
tgtgtgtttatgtatatatatg

SEQ ID NO: 97644 - DNA, 22 bp, synthetic construct
  misc_feature 1..22: note = chemically synthesized
  source 1..22: mol_type = other DNA
atgtatatatatgttttatata

SEQ ID NO: 97645 - DNA, 22 bp, synthetic construct
  misc_feature 1..22: note = chemically synthesized
  source 1..22: mol_type = other DNA
tgtatatatatgttttatatat

SEQ ID NO: 97646 - DNA, 22 bp, synthetic construct
  misc_feature 1..22: note = chemically synthesized
  source 1..22: mol_type = other DNA
tatatatatatatatgtgtgtg

SEQ ID NO: 97647 - DNA, 22 bp, synthetic construct
  misc_feature 1..22: note = chemically synthesized
  source 1..22: mol_type = other DNA
atatatatatatatgtgtgtgt

SEQ ID NO: 97648 - DNA, 22 bp, synthetic construct
  misc_feature 1..22: note = chemically synthesized
  source 1..22: mol_type = other DNA
tatatatatatatgtgtgtgtg

SEQ ID NO: 97649 - DNA, 22 bp, synthetic construct
  misc_feature 1..22: note = chemically synthesized
  source 1..22: mol_type = other DNA
tgtttacaaatatgtgattatc

SEQ ID NO: 97650 - DNA, 22 bp, synthetic construct
  misc_feature 1..22: note = chemically synthesized
  source 1..22: mol_type = other DNA
acaaatatgtgattatcatcaa

SEQ ID NO: 97651 - DNA, 22 bp, synthetic construct
  misc_feature 1..22: note = chemically synthesized
  source 1..22: mol_type = other DNA
caaatatgtgattatcatcaaa

SEQ ID NO: 97652 - DNA, 22 bp, synthetic construct
  misc_feature 1..22: note = chemically synthesized
  source 1..22: mol_type = other DNA
tcatcaaaacgtgagggctaaa

SEQ ID NO: 97653 - DNA, 22 bp, synthetic construct
  misc_feature 1..22: note = chemically synthesized
  source 1..22: mol_type = other DNA
aagtgaccagataacttgcaag

SEQ ID NO: 97654 - DNA, 22 bp, synthetic construct
  misc_feature 1..22: note = chemically synthesized
  source 1..22: mol_type = other DNA
gcaagtcctaggataccaggaa

SEQ ID NO: 97655 - DNA, 22 bp, synthetic construct
  misc_feature 1..22: note = chemically synthesized
  source 1..22: mol_type = other DNA
caagtcctaggataccaggaaa

SEQ ID NO: 97656 - DNA, 22 bp, synthetic construct
  misc_feature 1..22: note = chemically synthesized
  source 1..22: mol_type = other DNA
ggataccaggaaaataaattac

SEQ ID NO: 97657 - DNA, 22 bp, synthetic construct
  misc_feature 1..22: note = chemically synthesized
  source 1..22: mol_type = other DNA
cattccaaaaatttaactgaga

SEQ ID NO: 97658 - DNA, 22 bp, synthetic construct
  misc_feature 1..22: note = chemically synthesized
  source 1..22: mol_type = other DNA
caaaaatttaactgagacttta

SEQ ID NO: 97659 - DNA, 22 bp, synthetic construct
  misc_feature 1..22: note = chemically synthesized
  source 1..22: mol_type = other DNA
aactgagactttaaaaaaaaaa

SEQ ID NO: 97660 - DNA, 22 bp, synthetic construct
  misc_feature 1..22: note = chemically synthesized
  source 1..22: mol_type = other DNA
actgagactttaaaaaaaaaaa

SEQ ID NO: 97661 - DNA, 22 bp, synthetic construct
  misc_feature 1..22: note = chemically synthesized
  source 1..22: mol_type = other DNA
agactttaaaaaaaaaaaaaaa

SEQ ID NO: 97662 - DNA, 22 bp, synthetic construct
  misc_feature 1..22: note = chemically synthesized
  source 1..22: mol_type = other DNA
taaaaaaaaaaaaaaaacaaaa

SEQ ID NO: 97663 - DNA, 22 bp, synthetic construct
  misc_feature 1..22: note = chemically synthesized
  source 1..22: mol_type = other DNA
aaaaaaaaaaaaaaaacaaaaa

SEQ ID NO: 97664 - DNA, 22 bp, synthetic construct
  misc_feature 1..22: note = chemically synthesized
  source 1..22: mol_type = other DNA
aaaaaaaaaaaaaaacaaaaaa

SEQ ID NO: 97665 - DNA, 22 bp, synthetic construct
  misc_feature 1..22: note = chemically synthesized
  source 1..22: mol_type = other DNA
gggcctgttgggggtggggggc

SEQ ID NO: 97666 - DNA, 22 bp, synthetic construct
  misc_feature 1..22: note = chemically synthesized
  source 1..22: mol_type = other DNA
ttgggggtggggggctagggga

SEQ ID NO: 97667 - DNA, 22 bp, synthetic construct
  misc_feature 1..22: note = chemically synthesized
  source 1..22: mol_type = other DNA
ggggtggggggctaggggaagg

SEQ ID NO: 97668 - DNA, 22 bp, synthetic construct
  misc_feature 1..22: note = chemically synthesized
  source 1..22: mol_type = other DNA
ggggaaggatagcattaggaga

SEQ ID NO: 97669 - DNA, 22 bp, synthetic construct
  misc_feature 1..22: note = chemically synthesized
  source 1..22: mol_type = other DNA
ggagaaatacctaatgtagatg

SEQ ID NO: 97670 - DNA, 22 bp, synthetic construct
  misc_feature 1..22: note = chemically synthesized
  source 1..22: mol_type = other DNA
atgtagatgacgggttgatggg

SEQ ID NO: 97671 - DNA, 22 bp, synthetic construct
  misc_feature 1..22: note = chemically synthesized
  source 1..22: mol_type = other DNA
atgggtgcagcaaaccaccatg

SEQ ID NO: 97672 - DNA, 22 bp, synthetic construct
  misc_feature 1..22: note = chemically synthesized
  source 1..22: mol_type = other DNA
aaagcatattaaaaaaacagtg

SEQ ID NO: 97673 - DNA, 22 bp, synthetic construct
  misc_feature 1..22: note = chemically synthesized
  source 1..22: mol_type = other DNA
aagcatattaaaaaaacagtga

SEQ ID NO: 97674 - DNA, 22 bp, synthetic construct
  misc_feature 1..22: note = chemically synthesized
  source 1..22: mol_type = other DNA
aaaaaacagtgatcataaaaga

SEQ ID NO: 97675 - DNA, 22 bp, synthetic construct
  misc_feature 1..22: note = chemically synthesized
  source 1..22: mol_type = other DNA
aaatttaactataagagacgga

SEQ ID NO: 97676 - DNA, 22 bp, synthetic construct
  misc_feature 1..22: note = chemically synthesized
  source 1..22: mol_type = other DNA
aactataagagacggaatggct

SEQ ID NO: 97677 - DNA, 22 bp, synthetic construct
  misc_feature 1..22: note = chemically synthesized
  source 1..22: mol_type = other DNA
actataagagacggaatggctc

SEQ ID NO: 97678 - DNA, 22 bp, synthetic construct
  misc_feature 1..22: note = chemically synthesized
  source 1..22: mol_type = other DNA
taagagacggaatggctcccac

SEQ ID NO: 97679 - DNA, 22 bp, synthetic construct
  misc_feature 1..22: note = chemically synthesized
  source 1..22: mol_type = other DNA
ccacaattcttaactataatct

SEQ ID NO: 97680 - DNA, 22 bp, synthetic construct
  misc_feature 1..22: note = chemically synthesized
  source 1..22: mol_type = other DNA
ttaactataatcttacagaata

SEQ ID NO: 97681 - DNA, 22 bp, synthetic construct
  misc_feature 1..22: note = chemically synthesized
  source 1..22: mol_type = other DNA
aactataatcttacagaatatt

SEQ ID NO: 97682 - DNA, 22 bp, synthetic construct
  misc_feature 1..22: note = chemically synthesized
  source 1..22: mol_type = other DNA
actataatcttacagaatattc

SEQ ID NO: 97683 - DNA, 22 bp, synthetic construct
  misc_feature 1..22: note = chemically synthesized
  source 1..22: mol_type = other DNA
taatcttacagaatattctcat

SEQ ID NO: 97684 - DNA, 22 bp, synthetic construct
  misc_feature 1..22: note = chemically synthesized
  source 1..22: mol_type = other DNA
acagaatattctcattgaatag

SEQ ID NO: 97685 - DNA, 22 bp, synthetic construct
  misc_feature 1..22: note = chemically synthesized
  source 1..22: mol_type = other DNA
cagaatattctcattgaataga

SEQ ID NO: 97686 - DNA, 22 bp, synthetic construct
  misc_feature 1..22: note = chemically synthesized
  source 1..22: mol_type = other DNA
tcattgaatagaagtatgctta

SEQ ID NO: 97687 - DNA, 22 bp, synthetic construct
  misc_feature 1..22: note = chemically synthesized
  source 1..22: mol_type = other DNA
attgaatagaagtatgcttatc

SEQ ID NO: 97688 - DNA, 22 bp, synthetic construct
  misc_feature 1..22: note = chemically synthesized
  source 1..22: mol_type = other DNA
aatagaagtatgcttatcatta

SEQ ID NO: 97689 - DNA, 22 bp, synthetic construct
  misc_feature 1..22: note = chemically synthesized
  source 1..22: mol_type = other DNA
atcattagagatttggacagcc

SEQ ID NO: 97690 - DNA, 22 bp, synthetic construct
  misc_feature 1..22: note = chemically synthesized
  source 1..22: mol_type = other DNA
tcattagagatttggacagcca

SEQ ID NO: 97691 - DNA, 22 bp, synthetic construct
  misc_feature 1..22: note = chemically synthesized
  source 1..22: mol_type = other DNA
gagatttggacagccaggaaag

SEQ ID NO: 97692 - DNA, 22 bp, synthetic construct
  misc_feature 1..22: note = chemically synthesized
  source 1..22: mol_type = other DNA
ggacagccaggaaagcacagaa

SEQ ID NO: 97693 - DNA, 22 bp, synthetic construct
  misc_feature 1..22: note = chemically synthesized
  source 1..22: mol_type = other DNA
gacagccaggaaagcacagaaa

SEQ ID NO: 97694 - DNA, 22 bp, synthetic construct
  misc_feature 1..22: note = chemically synthesized
  source 1..22: mol_type = other DNA
tgttgccttatagcctagaggt

SEQ ID NO: 97695 - DNA, 22 bp, synthetic construct
  misc_feature 1..22: note = chemically synthesized
  source 1..22: mol_type = other DNA
ttgccttatagcctagaggtgt

SEQ ID NO: 97696 - DNA, 22 bp, synthetic construct
  misc_feature 1..22: note = chemically synthesized
  source 1..22: mol_type = other DNA
ccttatagcctagaggtgtttt

SEQ ID NO: 97697 - DNA, 22 bp, synthetic construct
  misc_feature 1..22: note = chemically synthesized
  source 1..22: mol_type = other DNA
atagcctagaggtgttttgaac

SEQ ID NO: 97698 - DNA, 22 bp, synthetic construct
  misc_feature 1..22: note = chemically synthesized
  source 1..22: mol_type = other DNA
tagcctagaggtgttttgaacc

SEQ ID NO: 97699 - DNA, 22 bp, synthetic construct
  misc_feature 1..22: note = chemically synthesized
  source 1..22: mol_type = other DNA
gaggtgttttgaacctcacata

SEQ ID NO: 97700 - DNA, 22 bp, synthetic construct
  misc_feature 1..22: note = chemically synthesized
  source 1..22: mol_type = other DNA
tgaacctcacataacactgatg

SEQ ID NO: 97701 - DNA, 22 bp, synthetic construct
  misc_feature 1..22: note = chemically synthesized
  source 1..22: mol_type = other DNA
gaacctcacataacactgatgt

SEQ ID NO: 97702 - DNA, 22 bp, synthetic construct
  misc_feature 1..22: note = chemically synthesized
  source 1..22: mol_type = other DNA
aacctcacataacactgatgtc

SEQ ID NO: 97703 - DNA, 22 bp, synthetic construct
  misc_feature 1..22: note = chemically synthesized
  source 1..22: mol_type = other DNA
acataacactgatgtccaggcc

SEQ ID NO: 97704 - DNA, 22 bp, synthetic construct
  misc_feature 1..22: note = chemically synthesized
  source 1..22: mol_type = other DNA
atgtccaggccaaggccatcct

SEQ ID NO: 97705 - DNA, 22 bp, synthetic construct
  misc_feature 1..22: note = chemically synthesized
  source 1..22: mol_type = other DNA
cccatgaagatggatgaataag

SEQ ID NO: 97706 - DNA, 22 bp, synthetic construct
  misc_feature 1..22: note = chemically synthesized
  source 1..22: mol_type = other DNA
ccatgaagatggatgaataagc

SEQ ID NO: 97707 - DNA, 22 bp, synthetic construct
  misc_feature 1..22: note = chemically synthesized
  source 1..22: mol_type = other DNA
acacctatgaaataatgtttac

SEQ ID NO: 97708 - DNA, 22 bp, synthetic construct
  misc_feature 1..22: note = chemically synthesized
  source 1..22: mol_type = other DNA
tgaaataatgtttactttagtg

SEQ ID NO: 97709 - DNA, 22 bp, synthetic construct
  misc_feature 1..22: note = chemically synthesized
  source 1..22: mol_type = other DNA
actttagtggcatattgcatta

SEQ ID NO: 97710 - DNA, 22 bp, synthetic construct
  misc_feature 1..22: note = chemically synthesized
  source 1..22: mol_type = other DNA
ctttagtggcatattgcattag

SEQ ID NO: 97711 - DNA, 22 bp, synthetic construct
  misc_feature 1..22: note = chemically synthesized
  source 1..22: mol_type = other DNA
tagtggcatattgcattaggct

SEQ ID NO: 97712 - DNA, 22 bp, synthetic construct
  misc_feature 1..22: note = chemically synthesized
  source 1..22: mol_type = other DNA
agtggcatattgcattaggcta

SEQ ID NO: 97713 - DNA, 22 bp, synthetic construct
  misc_feature 1..22: note = chemically synthesized
  source 1..22: mol_type = other DNA
gtggcatattgcattaggctac

SEQ ID NO: 97714 - DNA, 22 bp, synthetic construct
  misc_feature 1..22: note = chemically synthesized
  source 1..22: mol_type = other DNA
cattaggctacctgccttggca

SEQ ID NO: 97715 - DNA, 22 bp, synthetic construct
  misc_feature 1..22: note = chemically synthesized
  source 1..22: mol_type = other DNA
ggctacctgccttggcacagtt

SEQ ID NO: 97716 - DNA, 22 bp, synthetic construct
  misc_feature 1..22: note = chemically synthesized
  source 1..22: mol_type = other DNA
cctgccttggcacagtttttct

SEQ ID NO: 97717 - DNA, 22 bp, synthetic construct
  misc_feature 1..22: note = chemically synthesized
  source 1..22: mol_type = other DNA
ccttggcacagtttttctttac

SEQ ID NO: 97718 - DNA, 22 bp, synthetic construct
  misc_feature 1..22: note = chemically synthesized
  source 1..22: mol_type = other DNA
ggcacagtttttctttactttt

SEQ ID NO: 97719 - DNA, 22 bp, synthetic construct
  misc_feature 1..22: note = chemically synthesized
  source 1..22: mol_type = other DNA
gcacagtttttctttactttta

SEQ ID NO: 97720 - DNA, 22 bp, synthetic construct
  misc_feature 1..22: note = chemically synthesized
  source 1..22: mol_type = other DNA
ttctttacttttacctgactga

SEQ ID NO: 97721 - DNA, 22 bp, synthetic construct
  misc_feature 1..22: note = chemically synthesized
  source 1..22: mol_type = other DNA
tctttacttttacctgactgat

SEQ ID NO: 97722 - DNA, 22 bp, synthetic construct
  misc_feature 1..22: note = chemically synthesized
  source 1..22: mol_type = other DNA
ctttacttttacctgactgatg

SEQ ID NO: 97723 - DNA, 22 bp, synthetic construct
  misc_feature 1..22: note = chemically synthesized
  source 1..22: mol_type = other DNA
tttacttttacctgactgatga

SEQ ID NO: 97724 - DNA, 22 bp, synthetic construct
  misc_feature 1..22: note = chemically synthesized
  source 1..22: mol_type = other DNA
tacttttacctgactgatgaaa

SEQ ID NO: 97725 - DNA, 22 bp, synthetic construct
  misc_feature 1..22: note = chemically synthesized
  source 1..22: mol_type = other DNA
acttttacctgactgatgaaac

SEQ ID NO: 97726 - DNA, 22 bp, synthetic construct
  misc_feature 1..22: note = chemically synthesized
  source 1..22: mol_type = other DNA
cttttacctgactgatgaaaca

SEQ ID NO: 97727 - DNA, 22 bp, synthetic construct
  misc_feature 1..22: note = chemically synthesized
  source 1..22: mol_type = other DNA
ttacctgactgatgaaacaatt

SEQ ID NO: 97728 - DNA, 22 bp, synthetic construct
  misc_feature 1..22: note = chemically synthesized
  source 1..22: mol_type = other DNA
tacctgactgatgaaacaatta

SEQ ID NO: 97729 - DNA, 22 bp, synthetic construct
  misc_feature 1..22: note = chemically synthesized
  source 1..22: mol_type = other DNA
acctgactgatgaaacaattaa

SEQ ID NO: 97730 - DNA, 22 bp, synthetic construct
  misc_feature 1..22: note = chemically synthesized
  source 1..22: mol_type = other DNA
cctgactgatgaaacaattaat

SEQ ID NO: 97731 - DNA, 22 bp, synthetic construct
  misc_feature 1..22: note = chemically synthesized
  source 1..22: mol_type = other DNA
actgatgaaacaattaattgct

SEQ ID NO: 97732 - DNA, 22 bp, synthetic construct
  misc_feature 1..22: note = chemically synthesized
  source 1..22: mol_type = other DNA
atgaaacaattaattgcttaca

SEQ ID NO: 97733 - DNA, 22 bp, synthetic construct
  misc_feature 1..22: note = chemically synthesized
  source 1..22: mol_type = other DNA
attgcttacataaacatgagtg

SEQ ID NO: 97734 - DNA, 22 bp, synthetic construct
  misc_feature 1..22: note = chemically synthesized
  source 1..22: mol_type = other DNA
cttacataaacatgagtgctct

SEQ ID NO: 97735 - DNA, 22 bp, synthetic construct
  misc_feature 1..22: note = chemically synthesized
  source 1..22: mol_type = other DNA
acataaacatgagtgctctagt

SEQ ID NO: 97736 - DNA, 22 bp, synthetic construct
  misc_feature 1..22: note = chemically synthesized
  source 1..22: mol_type = other DNA
cataaacatgagtgctctagtt

SEQ ID NO: 97737 - DNA, 22 bp, synthetic construct
  misc_feature 1..22: note = chemically synthesized
  source 1..22: mol_type = other DNA
tagttataaattccagtgtaaa

SEQ ID NO: 97738 - DNA, 22 bp, synthetic construct
  misc_feature 1..22: note = chemically synthesized
  source 1..22: mol_type = other DNA
gttataaattccagtgtaaaaa

SEQ ID NO: 97739 - DNA, 22 bp, synthetic construct
  misc_feature 1..22: note = chemically synthesized
  source 1..22: mol_type = other DNA
taaattccagtgtaaaaaacac

SEQ ID NO: 97740 - DNA, 22 bp, synthetic construct
  misc_feature 1..22: note = chemically synthesized
  source 1..22: mol_type = other DNA
cagtgtaaaaaacaccctggtt

SEQ ID NO: 97741 - DNA, 22 bp, synthetic construct
  misc_feature 1..22: note = chemically synthesized
  source 1..22: mol_type = other DNA
gtttcgatattcatcttttgag

SEQ ID NO: 97742 - DNA, 22 bp, synthetic construct
  misc_feature 1..22: note = chemically synthesized
  source 1..22: mol_type = other DNA
cgatattcatcttttgagcctt

SEQ ID NO: 97743 - DNA, 22 bp, synthetic construct
  misc_feature 1..22: note = chemically synthesized
  source 1..22: mol_type = other DNA
gatattcatcttttgagccttt

SEQ ID NO: 97744 - DNA, 22 bp, synthetic construct
  misc_feature 1..22: note = chemically synthesized
  source 1..22: mol_type = other DNA
atcttttgagccttttattttg

SEQ ID NO: 97745 - DNA, 22 bp, synthetic construct
  misc_feature 1..22: note = chemically synthesized
  source 1..22: mol_type = other DNA
ttgagccttttattttggtcag

SEQ ID NO: 97746 - DNA, 22 bp, synthetic construct
  misc_feature 1..22: note = chemically synthesized
  source 1..22: mol_type = other DNA
tgagccttttattttggtcaga

SEQ ID NO: 97747 - DNA, 22 bp, synthetic construct
  misc_feature 1..22: note = chemically synthesized
  source 1..22: mol_type = other DNA
gagccttttattttggtcagaa

SEQ ID NO: 97748 - DNA, 22 bp, synthetic construct
  misc_feature 1..22: note = chemically synthesized
  source 1..22: mol_type = other DNA
agccttttattttggtcagaac

SEQ ID NO: 97749 - DNA, 22 bp, synthetic construct
  misc_feature 1..22: note = chemically synthesized
  source 1..22: mol_type = other DNA
ttattttggtcagaacaagttt

SEQ ID NO: 97750 - DNA, 22 bp, synthetic construct
  misc_feature 1..22: note = chemically synthesized
  source 1..22: mol_type = other DNA
tattttggtcagaacaagtttt

SEQ ID NO: 97751 - DNA, 22 bp, synthetic construct
  misc_feature 1..22: note = chemically synthesized
  source 1..22: mol_type = other DNA
attttggtcagaacaagttttc

SEQ ID NO: 97752 - DNA, 22 bp, synthetic construct
  misc_feature 1..22: note = chemically synthesized
  source 1..22: mol_type = other DNA
ttttggtcagaacaagttttca

SEQ ID NO: 97753 - DNA, 22 bp, synthetic construct
  misc_feature 1..22: note = chemically synthesized
  source 1..22: mol_type = other DNA
tggtcagaacaagttttcaaga

SEQ ID NO: 97754 - DNA, 22 bp, synthetic construct
  misc_feature 1..22: note = chemically synthesized
  source 1..22: mol_type = other DNA
ggtcagaacaagttttcaagag

SEQ ID NO: 97755 - DNA, 22 bp, synthetic construct
  misc_feature 1..22: note = chemically synthesized
  source 1..22: mol_type = other DNA
gtcagaacaagttttcaagagc

SEQ ID NO: 97756 - DNA, 22 bp, synthetic construct
  misc_feature 1..22: note = chemically synthesized
  source 1..22: mol_type = other DNA
tcaagagcaaatctcagcctac

SEQ ID NO: 97757 - DNA, 22 bp, synthetic construct
  misc_feature 1..22: note = chemically synthesized
  source 1..22: mol_type = other DNA
caagagcaaatctcagcctaca

SEQ ID NO: 97758 - DNA, 22 bp, synthetic construct
  misc_feature 1..22: note = chemically synthesized
  source 1..22: mol_type = other DNA
aagagcaaatctcagcctacaa

SEQ ID NO: 97759 - DNA, 22 bp, synthetic construct
  misc_feature 1..22: note = chemically synthesized
  source 1..22: mol_type = other DNA
agcctacaaaacaaatgagtcc

SEQ ID NO: 97760 - DNA, 22 bp, synthetic construct
  misc_feature 1..22: note = chemically synthesized
  source 1..22: mol_type = other DNA
caaaacaaatgagtccaattct

SEQ ID NO: 97761 - DNA, 22 bp, synthetic construct
  misc_feature 1..22: note = chemically synthesized
  source 1..22: mol_type = other DNA
tagaactcagtaatcccatcaa

SEQ ID NO: 97762 - DNA, 22 bp, synthetic construct
  misc_feature 1..22: note = chemically synthesized
  source 1..22: mol_type = other DNA
gaactcagtaatcccatcaagg

SEQ ID NO: 97763 - DNA, 22 bp, synthetic construct
  misc_feature 1..22: note = chemically synthesized
  source 1..22: mol_type = other DNA
agtaatcccatcaaggctctgc

SEQ ID NO: 97764 - DNA, 22 bp, synthetic construct
  misc_feature 1..22: note = chemically synthesized
  source 1..22: mol_type = other DNA
tgcctgcggagggctaactagc

SEQ ID NO: 97765 - DNA, 22 bp, synthetic construct
  misc_feature 1..22: note = chemically synthesized
  source 1..22: mol_type = other DNA
cctgcggagggctaactagctc

SEQ ID NO: 97766 - DNA, 22 bp, synthetic construct
  misc_feature 1..22: note = chemically synthesized
  source 1..22: mol_type = other DNA
cggagggctaactagctctatg

SEQ ID NO: 97767 - DNA, 22 bp, synthetic construct
  misc_feature 1..22: note = chemically synthesized
  source 1..22: mol_type = other DNA
actagctctatgcaggcttagc

SEQ ID NO: 97768 - DNA, 22 bp, synthetic construct
  misc_feature 1..22: note = chemically synthesized
  source 1..22: mol_type = other DNA
gctctatgcaggcttagcactt

SEQ ID NO: 97769 - DNA, 22 bp, synthetic construct
  misc_feature 1..22: note = chemically synthesized
  source 1..22: mol_type = other DNA
tatgcaggcttagcacttccag

SEQ ID NO: 97770 - DNA, 22 bp, synthetic construct
  misc_feature 1..22: note = chemically synthesized
  source 1..22: mol_type = other DNA
tgcaggcttagcacttccagct

SEQ ID NO: 97771 - DNA, 22 bp, synthetic construct
  misc_feature 1..22: note = chemically synthesized
  source 1..22: mol_type = other DNA
agcacttccagctctactccac

SEQ ID NO: 97772 - DNA, 22 bp, synthetic construct
  misc_feature 1..22: note = chemically synthesized
  source 1..22: mol_type = other DNA
gcacttccagctctactccact

SEQ ID NO: 97773 - DNA, 22 bp, synthetic construct
  misc_feature 1..22: note = chemically synthesized
  source 1..22: mol_type = other DNA
ccagctctactccactgatttc

SEQ ID NO: 97774 - DNA, 22 bp, synthetic construct
  misc_feature 1..22: note = chemically synthesized
  source 1..22: mol_type = other DNA
cagctctactccactgatttct

SEQ ID NO: 97775 - DNA, 22 bp, synthetic construct
  misc_feature 1..22: note = chemically synthesized
  source 1..22: mol_type = other DNA
tactccactgatttctttgtgt

SEQ ID NO: 97776 - DNA, 22 bp, synthetic construct
  misc_feature 1..22: note = chemically synthesized
  source 1..22: mol_type = other DNA
ctccactgatttctttgtgtgt

SEQ ID NO: 97777 - DNA, 22 bp, synthetic construct
  misc_feature 1..22: note = chemically synthesized
  source 1..22: mol_type = other DNA
cactgatttctttgtgtgtgca

SEQ ID NO: 97778 - DNA, 22 bp, synthetic construct
  misc_feature 1..22: note = chemically synthesized
  source 1..22: mol_type = other DNA
atttctttgtgtgtgcatagca

SEQ ID NO: 97779 - DNA, 22 bp, synthetic construct
  misc_feature 1..22: note = chemically synthesized
  source 1..22: mol_type = other DNA
ctttgtgtgtgcatagcagtgg

SEQ ID NO: 97780 - DNA, 22 bp, synthetic construct
  misc_feature 1..22: note = chemically synthesized
  source 1..22: mol_type = other DNA
tttgtgtgtgcatagcagtgga

SEQ ID NO: 97781 - DNA, 22 bp, synthetic construct
  misc_feature 1..22: note = chemically synthesized
  source 1..22: mol_type = other DNA
tgtgtgtgcatagcagtggatg

SEQ ID NO: 97782 - DNA, 22 bp, synthetic construct
  misc_feature 1..22: note = chemically synthesized
  source 1..22: mol_type = other DNA
gtgtgtgcatagcagtggatgt

SEQ ID NO: 97783 - DNA, 22 bp, synthetic construct
  misc_feature 1..22: note = chemically synthesized
  source 1..22: mol_type = other DNA
tgtgtgcatagcagtggatgtg

SEQ ID NO: 97784 - DNA, 22 bp, synthetic construct
  misc_feature 1..22: note = chemically synthesized
  source 1..22: mol_type = other DNA
ttaattatagttgtatatgtgt

SEQ ID NO: 97785 - DNA, 22 bp, synthetic construct
  misc_feature 1..22: note = chemically synthesized
  source 1..22: mol_type = other DNA
taattatagttgtatatgtgtt

SEQ ID NO: 97786 - DNA, 22 bp, synthetic construct
  misc_feature 1..22: note = chemically synthesized
  source 1..22: mol_type = other DNA
aattatagttgtatatgtgttt

SEQ ID NO: 97787 - DNA, 22 bp, synthetic construct
  misc_feature 1..22: note = chemically synthesized
  source 1..22: mol_type = other DNA
attatagttgtatatgtgtttg

SEQ ID NO: 97788 - DNA, 22 bp, synthetic construct
  misc_feature 1..22: note = chemically synthesized
  source 1..22: mol_type = other DNA
tagttgtatatgtgtttgactg

SEQ ID NO: 97789 - DNA, 22 bp, synthetic construct
  misc_feature 1..22: note = chemically synthesized
  source 1..22: mol_type = other DNA
tatatgtgtttgactgctcatt

SEQ ID NO: 97790 - DNA, 22 bp, synthetic construct
  misc_feature 1..22: note = chemically synthesized
  source 1..22: mol_type = other DNA
gactgctcattcattcattcaa

SEQ ID NO: 97791 - DNA, 22 bp, synthetic construct
  misc_feature 1..22: note = chemically synthesized
  source 1..22: mol_type = other DNA
actgctcattcattcattcaaa

SEQ ID NO: 97792 - DNA, 22 bp, synthetic construct
  misc_feature 1..22: note = chemically synthesized
  source 1..22: mol_type = other DNA
ctcattcattcattcaaaattg

SEQ ID NO: 97793 - DNA, 22 bp, synthetic construct
  misc_feature 1..22: note = chemically synthesized
  source 1..22: mol_type = other DNA
attcattcattcaaaattgtaa

SEQ ID NO: 97794 - DNA, 22 bp, synthetic construct
  misc_feature 1..22: note = chemically synthesized
  source 1..22: mol_type = other DNA
attcattcaaaattgtaaaatt

SEQ ID NO: 97795 - DNA, 22 bp, synthetic construct
  misc_feature 1..22: note = chemically synthesized
  source 1..22: mol_type = other DNA
attcaaaattgtaaaattgcta

SEQ ID NO: 97796 - DNA, 22 bp, synthetic construct
  misc_feature 1..22: note = chemically synthesized
  source 1..22: mol_type = other DNA
aaaattgtaaaattgctaagaa

SEQ ID NO: 97797 - DNA, 22 bp, synthetic construct
  misc_feature 1..22: note = chemically synthesized
  source 1..22: mol_type = other DNA
taaaattgctaagaatacagca

SEQ ID NO: 97798 - DNA, 22 bp, synthetic construct
  misc_feature 1..22: note = chemically synthesized
  source 1..22: mol_type = other DNA
ctaagaatacagcacaaaaaca

SEQ ID NO: 97799 - DNA, 22 bp, synthetic construct
  misc_feature 1..22: note = chemically synthesized
  source 1..22: mol_type = other DNA
agaatacagcacaaaaacagaa

SEQ ID NO: 97800 - DNA, 22 bp, synthetic construct
  misc_feature 1..22: note = chemically synthesized
  source 1..22: mol_type = other DNA
ctgttttcatggacttgatagt

SEQ ID NO: 97801 - DNA, 22 bp, synthetic construct
  misc_feature 1..22: note = chemically synthesized
  source 1..22: mol_type = other DNA
ttttcatggacttgatagtgga

SEQ ID NO: 97802 - DNA, 22 bp, synthetic construct
  misc_feature 1..22: note = chemically synthesized
  source 1..22: mol_type = other DNA
tcatggacttgatagtggaaag

SEQ ID NO: 97803 - DNA, 22 bp, synthetic construct
  misc_feature 1..22: note = chemically synthesized
  source 1..22: mol_type = other DNA
catggacttgatagtggaaaga

SEQ ID NO: 97804 - DNA, 22 bp, synthetic construct
  misc_feature 1..22: note = chemically synthesized
  source 1..22: mol_type = other DNA
atggacttgatagtggaaagag

SEQ ID NO: 97805 - DNA, 22 bp, synthetic construct
  misc_feature 1..22: note = chemically synthesized
  source 1..22: mol_type = other DNA
gatagtggaaagagcttgacat

SEQ ID NO: 97806 - DNA, 22 bp, synthetic construct
  misc_feature 1..22: note = chemically synthesized
  source 1..22: mol_type = other DNA
atagtggaaagagcttgacatt

SEQ ID NO: 97807 - DNA, 22 bp, synthetic construct
  misc_feature 1..22: note = chemically synthesized
  source 1..22: mol_type = other DNA
gacattaaataagcaaatgaaa

SEQ ID NO: 97808 - DNA, 22 bp, synthetic construct
  misc_feature 1..22: note = chemically synthesized
  source 1..22: mol_type = other DNA
acattaaataagcaaatgaaac

SEQ ID NO: 97809 - DNA, 22 bp, synthetic construct
  misc_feature 1..22: note = chemically synthesized
  source 1..22: mol_type = other DNA
aataagcaaatgaaacatgtta

SEQ ID NO: 97810 - DNA, 22 bp, synthetic construct
  misc_feature 1..22: note = chemically synthesized
  source 1..22: mol_type = other DNA
tataccaatgagattaggtgct

SEQ ID NO: 97811 - DNA, 22 bp, synthetic construct
  misc_feature 1..22: note = chemically synthesized
  source 1..22: mol_type = other DNA
ggtgctatggagaaaaaaaaaa

SEQ ID NO: 97812 - DNA, 22 bp, synthetic construct
  misc_feature 1..22: note = chemically synthesized
  source 1..22: mol_type = other DNA
tggagaaaaaaaaaaaactgaa

SEQ ID NO: 97813 - DNA, 22 bp, synthetic construct
  misc_feature 1..22: note = chemically synthesized
  source 1..22: mol_type = other DNA
aaatgaaggccagagtgtgatt

SEQ ID NO: 97814 - DNA, 22 bp, synthetic construct
  misc_feature 1..22: note = chemically synthesized
  source 1..22: mol_type = other DNA
ggacagggtgaaagggtatcgc

SEQ ID NO: 97815 - DNA, 22 bp, synthetic construct
  misc_feature 1..22: note = chemically synthesized
  source 1..22: mol_type = other DNA
ctttaagtagtatggcaggaaa

SEQ ID NO: 97816 - DNA, 22 bp, synthetic construct
  misc_feature 1..22: note = chemically synthesized
  source 1..22: mol_type = other DNA
taagtagtatggcaggaaagtc

SEQ ID NO: 97817 - DNA, 22 bp, synthetic construct
  misc_feature 1..22: note = chemically synthesized
  source 1..22: mol_type = other DNA
aagtagtatggcaggaaagtcc

SEQ ID NO: 97818 - DNA, 22 bp, synthetic construct
  misc_feature 1..22: note = chemically synthesized
  source 1..22: mol_type = other DNA
agtagtatggcaggaaagtcct

SEQ ID NO: 97819 - DNA, 22 bp, synthetic construct
  misc_feature 1..22: note = chemically synthesized
  source 1..22: mol_type = other DNA
actataaagttaacacctgaga

SEQ ID NO: 97820 - DNA, 22 bp, synthetic construct
  misc_feature 1..22: note = chemically synthesized
  source 1..22: mol_type = other DNA
taaagttaacacctgagagagt

SEQ ID NO: 97821 - DNA, 22 bp, synthetic construct
  misc_feature 1..22: note = chemically synthesized
  source 1..22: mol_type = other DNA
acacctgagagagtacccatag

SEQ ID NO: 97822 - DNA, 22 bp, synthetic construct
  misc_feature 1..22: note = chemically synthesized
  source 1..22: mol_type = other DNA
agagagtacccatagatgatga

SEQ ID NO: 97823 - DNA, 22 bp, synthetic construct
  misc_feature 1..22: note = chemically synthesized
  source 1..22: mol_type = other DNA
atatgaaactatgattaaatat

SEQ ID NO: 97824 - DNA, 22 bp, synthetic construct
  misc_feature 1..22: note = chemically synthesized
  source 1..22: mol_type = other DNA
tatgaaactatgattaaatatt

SEQ ID NO: 97825 - DNA, 22 bp, synthetic construct
  misc_feature 1..22: note = chemically synthesized
  source 1..22: mol_type = other DNA
tgattaaatatttagggcatag

SEQ ID NO: 97826 - DNA, 22 bp, synthetic construct
  misc_feature 1..22: note = chemically synthesized
  source 1..22: mol_type = other DNA
aatatttagggcatagggaatg

SEQ ID NO: 97827 - DNA, 22 bp, synthetic construct
  misc_feature 1..22: note = chemically synthesized
  source 1..22: mol_type = other DNA
agggcatagggaatggcaaatg

SEQ ID NO: 97828 - DNA, 22 bp, synthetic construct
  misc_feature 1..22: note = chemically synthesized
  source 1..22: mol_type = other DNA
gggcatagggaatggcaaatgt

SEQ ID NO: 97829 - DNA, 22 bp, synthetic construct
  misc_feature 1..22: note = chemically synthesized
  source 1..22: mol_type = other DNA
aagatgtaagatgcttagaatt

SEQ ID NO: 97830 - DNA, 22 bp, synthetic construct
  misc_feature 1..22: note = chemically synthesized
  source 1..22: mol_type = other DNA
agaattttcaaggaatatcaat

SEQ ID NO: 97831 - DNA, 22 bp, synthetic construct
  misc_feature 1..22: note = chemically synthesized
  source 1..22: mol_type = other DNA
gaattttcaaggaatatcaata

SEQ ID NO: 97832 - DNA, 22 bp, synthetic construct
  misc_feature 1..22: note = chemically synthesized
  source 1..22: mol_type = other DNA
tcaaggaatatcaataaggcca

SEQ ID NO: 97833 - DNA, 22 bp, synthetic construct
  misc_feature 1..22: note = chemically synthesized
  source 1..22: mol_type = other DNA
caaggaatatcaataaggccaa

SEQ ID NO: 97834 - DNA, 22 bp, synthetic construct
  misc_feature 1..22: note = chemically synthesized
  source 1..22: mol_type = other DNA
aaggaatatcaataaggccaat

SEQ ID NO: 97835 - DNA, 22 bp, synthetic construct
  misc_feature 1..22: note = chemically synthesized
  source 1..22: mol_type = other DNA
ggtgaaggggagaataaaagat

SEQ ID NO: 97836 - DNA, 22 bp, synthetic construct
  misc_feature 1..22: note = chemically synthesized
  source 1..22: mol_type = other DNA
aattataaaatttgggacacta

SEQ ID NO: 97837 - DNA, 22 bp, synthetic construct
  misc_feature 1..22: note = chemically synthesized
  source 1..22: mol_type = other DNA
taaaatttgggacactaataat

SEQ ID NO: 97838 - DNA, 22 bp, synthetic construct
  misc_feature 1..22: note = chemically synthesized
  source 1..22: mol_type = other DNA
gggacactaataatacctacat

SEQ ID NO: 97839 - DNA, 22 bp, synthetic construct
  misc_feature 1..22: note = chemically synthesized
  source 1..22: mol_type = other DNA
ggacactaataatacctacatc

SEQ ID NO: 97840 - DNA, 22 bp, synthetic construct
  misc_feature 1..22: note = chemically synthesized
  source 1..22: mol_type = other DNA
ataatacctacatcatagagtt

SEQ ID NO: 97841 - DNA, 22 bp, synthetic construct
  misc_feature 1..22: note = chemically synthesized
  source 1..22: mol_type = other DNA
catcatagagttgtaagaaaaa

SEQ ID NO: 97842 - DNA, 22 bp, synthetic construct
  misc_feature 1..22: note = chemically synthesized
  source 1..22: mol_type = other DNA
taagaaaaaacactctacacac

SEQ ID NO: 97843 - DNA, 22 bp, synthetic construct
  misc_feature 1..22: note = chemically synthesized
  source 1..22: mol_type = other DNA
tacacacatacacataaatata

SEQ ID NO: 97844 - DNA, 22 bp, synthetic construct
  misc_feature 1..22: note = chemically synthesized
  source 1..22: mol_type = other DNA
cacacatacacataaatatata

SEQ ID NO: 97845 - DNA, 22 bp, synthetic construct
  misc_feature 1..22: note = chemically synthesized
  source 1..22: mol_type = other DNA
atttatatgagagctatatata

SEQ ID NO: 97846 - DNA, 22 bp, synthetic construct
  misc_feature 1..22: note = chemically synthesized
  source 1..22: mol_type = other DNA
tttatatgagagctatatatat

SEQ ID NO: 97847 - DNA, 22 bp, synthetic construct
  misc_feature 1..22: note = chemically synthesized
  source 1..22: mol_type = other DNA
atatgagagctatatatatgta

SEQ ID NO: 97848 - DNA, 22 bp, synthetic construct
  misc_feature 1..22: note = chemically synthesized
  source 1..22: mol_type = other DNA
tatgagagctatatatatgtat

SEQ ID NO: 97849 - DNA, 22 bp, synthetic construct
  misc_feature 1..22: note = chemically synthesized
  source 1..22: mol_type = other DNA
tatatatgtatctgtaataaac

SEQ ID NO: 97850 - DNA, 22 bp, synthetic construct
  misc_feature 1..22: note = chemically synthesized
  source 1..22: mol_type = other DNA
taataaacataatatatgcatg

SEQ ID NO: 97851 - DNA, 22 bp, synthetic construct
  misc_feature 1..22: note = chemically synthesized
  source 1..22: mol_type = other DNA
ttgtagagaattgtaaggattt

SEQ ID NO: 97852 - DNA, 22 bp, synthetic construct
  misc_feature 1..22: note = chemically synthesized
  source 1..22: mol_type = other DNA
tagagaattgtaaggatttggt

SEQ ID NO: 97853 - DNA, 22 bp, synthetic construct
  misc_feature 1..22: note = chemically synthesized
  source 1..22: mol_type = other DNA
taaggatttggttttattataa

SEQ ID NO: 97854 - DNA, 22 bp, synthetic construct
  misc_feature 1..22: note = chemically synthesized
  source 1..22: mol_type = other DNA
ggttttattataaatgatatag

SEQ ID NO: 97855 - DNA, 22 bp, synthetic construct
  misc_feature 1..22: note = chemically synthesized
  source 1..22: mol_type = other DNA
gttttattataaatgatatagg

SEQ ID NO: 97856 - DNA, 22 bp, synthetic construct
  misc_feature 1..22: note = chemically synthesized
  source 1..22: mol_type = other DNA
tattataaatgatataggaaac

SEQ ID NO: 97857 - DNA, 22 bp, synthetic construct
  misc_feature 1..22: note = chemically synthesized
  source 1..22: mol_type = other DNA
attataaatgatataggaaact

SEQ ID NO: 97858 - DNA, 22 bp, synthetic construct
  misc_feature 1..22: note = chemically synthesized
  source 1..22: mol_type = other DNA
ttataaatgatataggaaacta

SEQ ID NO: 97859 - DNA, 22 bp, synthetic construct
  misc_feature 1..22: note = chemically synthesized
  source 1..22: mol_type = other DNA
taaatgatataggaaactatca

SEQ ID NO: 97860 - DNA, 22 bp, synthetic construct
  misc_feature 1..22: note = chemically synthesized
  source 1..22: mol_type = other DNA
tcagaagactttgaacaaagag

SEQ ID NO: 97861 - DNA, 22 bp, synthetic construct
  misc_feature 1..22: note = chemically synthesized
  source 1..22: mol_type = other DNA
tgaacaaagaggtgaccatata

SEQ ID NO: 97862 - DNA, 22 bp, synthetic construct
  misc_feature 1..22: note = chemically synthesized
  source 1..22: mol_type = other DNA
gaacaaagaggtgaccatatat

SEQ ID NO: 97863 - DNA, 22 bp, synthetic construct
  misc_feature 1..22: note = chemically synthesized
  source 1..22: mol_type = other DNA
aacaaagaggtgaccatatatg

SEQ ID NO: 97864 - DNA, 22 bp, synthetic construct
  misc_feature 1..22: note = chemically synthesized
  source 1..22: mol_type = other DNA
acattttgaaaagactaatttg

SEQ ID NO: 97865 - DNA, 22 bp, synthetic construct
  misc_feature 1..22: note = chemically synthesized
  source 1..22: mol_type = other DNA
cattttgaaaagactaatttgg

SEQ ID NO: 97866 - DNA, 22 bp, synthetic construct
  misc_feature 1..22: note = chemically synthesized
  source 1..22: mol_type = other DNA
tgaaaagactaatttggatagt

SEQ ID NO: 97867 - DNA, 22 bp, synthetic construct
  misc_feature 1..22: note = chemically synthesized
  source 1..22: mol_type = other DNA
gaaaagactaatttggatagta

SEQ ID NO: 97868 - DNA, 22 bp, synthetic construct
  misc_feature 1..22: note = chemically synthesized
  source 1..22: mol_type = other DNA
aaaagactaatttggatagtat

SEQ ID NO: 97869 - DNA, 22 bp, synthetic construct
  misc_feature 1..22: note = chemically synthesized
  source 1..22: mol_type = other DNA
atttggatagtatattgggaag

SEQ ID NO: 97870 - DNA, 22 bp, synthetic construct
  misc_feature 1..22: note = chemically synthesized
  source 1..22: mol_type = other DNA
ggatagtatattgggaagaaat

SEQ ID NO: 97871 - DNA, 22 bp, synthetic construct
  misc_feature 1..22: note = chemically synthesized
  source 1..22: mol_type = other DNA
gatagtatattgggaagaaatt

SEQ ID NO: 97872 - DNA, 22 bp, synthetic construct
  misc_feature 1..22: note = chemically synthesized
  source 1..22: mol_type = other DNA
ggaagaaattgtagtggggcag

SEQ ID NO: 97873 - DNA, 22 bp, synthetic construct
  misc_feature 1..22: note = chemically synthesized
  source 1..22: mol_type = other DNA
tagtggggcagtggtagaagca

SEQ ID NO: 97874 - DNA, 22 bp, synthetic construct
  misc_feature 1..22: note = chemically synthesized
  source 1..22: mol_type = other DNA
ttatgagtcaacagctataatt

SEQ ID NO: 97875 - DNA, 22 bp, synthetic construct
  misc_feature 1..22: note = chemically synthesized
  source 1..22: mol_type = other DNA
tgagtcaacagctataatttag

SEQ ID NO: 97876 - DNA, 22 bp, synthetic construct
  misc_feature 1..22: note = chemically synthesized
  source 1..22: mol_type = other DNA
taatttaggtggtggtgacagt

SEQ ID NO: 97877 - DNA, 22 bp, synthetic construct
  misc_feature 1..22: note = chemically synthesized
  source 1..22: mol_type = other DNA
aggtggtggtgacagtgactta

SEQ ID NO: 97878 - DNA, 22 bp, synthetic construct
  misc_feature 1..22: note = chemically synthesized
  source 1..22: mol_type = other DNA
ggtggtggtgacagtgacttag

SEQ ID NO: 97879 - DNA, 22 bp, synthetic construct
  misc_feature 1..22: note = chemically synthesized
  source 1..22: mol_type = other DNA
agaccagagtggtagcattgga

SEQ ID NO: 97880 - DNA, 22 bp, synthetic construct
  misc_feature 1..22: note = chemically synthesized
  source 1..22: mol_type = other DNA
gaccagagtggtagcattggag

SEQ ID NO: 97881 - DNA, 22 bp, synthetic construct
  misc_feature 1..22: note = chemically synthesized
  source 1..22: mol_type = other DNA
gaggtgaaggcaaggggtcagc

SEQ ID NO: 97882 - DNA, 22 bp, synthetic construct
  misc_feature 1..22: note = chemically synthesized
  source 1..22: mol_type = other DNA
tgaaaacatcctttcacgaaaa

SEQ ID NO: 97883 - DNA, 22 bp, synthetic construct
  misc_feature 1..22: note = chemically synthesized
  source 1..22: mol_type = other DNA
aaaacatcctttcacgaaaaac

SEQ ID NO: 97884 - DNA, 22 bp, synthetic construct
  misc_feature 1..22: note = chemically synthesized
  source 1..22: mol_type = other DNA
tcacgaaaaaccaacaggattt

SEQ ID NO: 97885 - DNA, 22 bp, synthetic construct
  misc_feature 1..22: note = chemically synthesized
  source 1..22: mol_type = other DNA
cacgaaaaaccaacaggatttt

SEQ ID NO: 97886 - DNA, 22 bp, synthetic construct
  misc_feature 1..22: note = chemically synthesized
  source 1..22: mol_type = other DNA
acgaaaaaccaacaggattttc

SEQ ID NO: 97887 - DNA, 22 bp, synthetic construct
  misc_feature 1..22: note = chemically synthesized
  source 1..22: mol_type = other DNA
tctgacagagaatatggaattg

SEQ ID NO: 97888 - DNA, 22 bp, synthetic construct
  misc_feature 1..22: note = chemically synthesized
  source 1..22: mol_type = other DNA
ctgacagagaatatggaattgg

SEQ ID NO: 97889 - DNA, 22 bp, synthetic construct
  misc_feature 1..22: note = chemically synthesized
  source 1..22: mol_type = other DNA
tgacagagaatatggaattggt

SEQ ID NO: 97890 - DNA, 22 bp, synthetic construct
  misc_feature 1..22: note = chemically synthesized
  source 1..22: mol_type = other DNA
acagagaatatggaattggtgt

SEQ ID NO: 97891 - DNA, 22 bp, synthetic construct
  misc_feature 1..22: note = chemically synthesized
  source 1..22: mol_type = other DNA
gtgtgtgtgtgtgttgcactca

SEQ ID NO: 97892 - DNA, 22 bp, synthetic construct
  misc_feature 1..22: note = chemically synthesized
  source 1..22: mol_type = other DNA
cactcatgcacactctagtgca

SEQ ID NO: 97893 - DNA, 22 bp, synthetic construct
  misc_feature 1..22: note = chemically synthesized
  source 1..22: mol_type = other DNA
atgcacactctagtgcatgcta

SEQ ID NO: 97894 - DNA, 22 bp, synthetic construct
  misc_feature 1..22: note = chemically synthesized
  source 1..22: mol_type = other DNA
tagtgcatgctaatttctggct

SEQ ID NO: 97895 - DNA, 22 bp, synthetic construct
  misc_feature 1..22: note = chemically synthesized
  source 1..22: mol_type = other DNA
gtgcatgctaatttctggctgt

SEQ ID NO: 97896 - DNA, 22 bp, synthetic construct
  misc_feature 1..22: note = chemically synthesized
  source 1..22: mol_type = other DNA
atttctggctgtgagtatatgt

SEQ ID NO: 97897 - DNA, 22 bp, synthetic construct
  misc_feature 1..22: note = chemically synthesized
  source 1..22: mol_type = other DNA
ctggctgtgagtatatgtcaga

SEQ ID NO: 97898 - DNA, 22 bp, synthetic construct
  misc_feature 1..22: note = chemically synthesized
  source 1..22: mol_type = other DNA
tggctgtgagtatatgtcagag

SEQ ID NO: 97899 - DNA, 22 bp, synthetic construct
  misc_feature 1..22: note = chemically synthesized
  source 1..22: mol_type = other DNA
gctgtgagtatatgtcagagta

SEQ ID NO: 97900 - DNA, 22 bp, synthetic construct
  misc_feature 1..22: note = chemically synthesized
  source 1..22: mol_type = other DNA
tgagtatatgtcagagtaagga

SEQ ID NO: 97901 - DNA, 22 bp, synthetic construct
  misc_feature 1..22: note = chemically synthesized
  source 1..22: mol_type = other DNA
tgaagctaggcaaagtgagtct

SEQ ID NO: 97902 - DNA, 22 bp, synthetic construct
  misc_feature 1..22: note = chemically synthesized
  source 1..22: mol_type = other DNA
gaagctaggcaaagtgagtctt

SEQ ID NO: 97903 - DNA, 22 bp, synthetic construct
  misc_feature 1..22: note = chemically synthesized
  source 1..22: mol_type = other DNA
aagctaggcaaagtgagtcttt

SEQ ID NO: 97904 - DNA, 22 bp, synthetic construct
  misc_feature 1..22: note = chemically synthesized
  source 1..22: mol_type = other DNA
ggcaaagtgagtctttgggttg

SEQ ID NO: 97905 - DNA, 22 bp, synthetic construct
  misc_feature 1..22: note = chemically synthesized
  source 1..22: mol_type = other DNA
tgggttgaattttgtcaaggtg

SEQ ID NO: 97906 - DNA, 22 bp, synthetic construct
  misc_feature 1..22: note = chemically synthesized
  source 1..22: mol_type = other DNA
gggttgaattttgtcaaggtgt

SEQ ID NO: 97907 - DNA, 22 bp, synthetic construct
  misc_feature 1..22: note = chemically synthesized
  source 1..22: mol_type = other DNA
ggttgaattttgtcaaggtgtt

SEQ ID NO: 97908 - DNA, 22 bp, synthetic construct
  misc_feature 1..22: note = chemically synthesized
  source 1..22: mol_type = other DNA
aattttgtcaaggtgtttgttc

SEQ ID NO: 97909 - DNA, 22 bp, synthetic construct
  misc_feature 1..22: note = chemically synthesized
  source 1..22: mol_type = other DNA
tgtcaaggtgtttgttcatcac

SEQ ID NO: 97910 - DNA, 22 bp, synthetic construct
  misc_feature 1..22: note = chemically synthesized
  source 1..22: mol_type = other DNA
gtcaaggtgtttgttcatcaca

SEQ ID NO: 97911 - DNA, 22 bp, synthetic construct
  misc_feature 1..22: note = chemically synthesized
  source 1..22: mol_type = other DNA
tcaaggtgtttgttcatcacag

SEQ ID NO: 97912 - DNA, 22 bp, synthetic construct
  misc_feature 1..22: note = chemically synthesized
  source 1..22: mol_type = other DNA
gttcatcacagtctctacctca

SEQ ID NO: 97913 - DNA, 22 bp, synthetic construct
  misc_feature 1..22: note = chemically synthesized
  source 1..22: mol_type = other DNA
ttcatcacagtctctacctcag

SEQ ID NO: 97914 - DNA, 22 bp, synthetic construct
  misc_feature 1..22: note = chemically synthesized
  source 1..22: mol_type = other DNA
atcacagtctctacctcagaat

SEQ ID NO: 97915 - DNA, 22 bp, synthetic construct
  misc_feature 1..22: note = chemically synthesized
  source 1..22: mol_type = other DNA
tacctcagaattggctttaaaa

SEQ ID NO: 97916 - DNA, 22 bp, synthetic construct
  misc_feature 1..22: note = chemically synthesized
  source 1..22: mol_type = other DNA
cctcagaattggctttaaaatt

SEQ ID NO: 97917 - DNA, 22 bp, synthetic construct
  misc_feature 1..22: note = chemically synthesized
  source 1..22: mol_type = other DNA
agaattggctttaaaattggaa

SEQ ID NO: 97918 - DNA, 22 bp, synthetic construct
  misc_feature 1..22: note = chemically synthesized
  source 1..22: mol_type = other DNA
gctttaaaattggaaagctggg

SEQ ID NO: 97919 - DNA, 22 bp, synthetic construct
  misc_feature 1..22: note = chemically synthesized
  source 1..22: mol_type = other DNA
taaaattggaaagctgggtggg

SEQ ID NO: 97920 - DNA, 22 bp, synthetic construct
  misc_feature 1..22: note = chemically synthesized
  source 1..22: mol_type = other DNA
aaaattggaaagctgggtgggt

SEQ ID NO: 97921 - DNA, 22 bp, synthetic construct
  misc_feature 1..22: note = chemically synthesized
  source 1..22: mol_type = other DNA
aaattggaaagctgggtgggtg

SEQ ID NO: 97922 - DNA, 22 bp, synthetic construct
  misc_feature 1..22: note = chemically synthesized
  source 1..22: mol_type = other DNA
gaaagctgggtgggtggatatg

SEQ ID NO: 97923 - DNA, 22 bp, synthetic construct
  misc_feature 1..22: note = chemically synthesized
  source 1..22: mol_type = other DNA
ggtgggtggatatggaaatgag

SEQ ID NO: 97924 - DNA, 22 bp, synthetic construct
  misc_feature 1..22: note = chemically synthesized
  source 1..22: mol_type = other DNA
tggagcttgtctacacatcata

SEQ ID NO: 97925 - DNA, 22 bp, synthetic construct
  misc_feature 1..22: note = chemically synthesized
  source 1..22: mol_type = other DNA
gagcttgtctacacatcatacc

SEQ ID NO: 97926 - DNA, 22 bp, synthetic construct
  misc_feature 1..22: note = chemically synthesized
  source 1..22: mol_type = other DNA
gtctacacatcatacctttagc

SEQ ID NO: 97927 - DNA, 22 bp, synthetic construct
  misc_feature 1..22: note = chemically synthesized
  source 1..22: mol_type = other DNA
tctacacatcatacctttagcc

SEQ ID NO: 97928 - DNA, 22 bp, synthetic construct
  misc_feature 1..22: note = chemically synthesized
  source 1..22: mol_type = other DNA
cacatcatacctttagccaaag

SEQ ID NO: 97929 - DNA, 22 bp, synthetic construct
  misc_feature 1..22: note = chemically synthesized
  source 1..22: mol_type = other DNA
tagccaaagtgacatcaagtat

SEQ ID NO: 97930 - DNA, 22 bp, synthetic construct
  misc_feature 1..22: note = chemically synthesized
  source 1..22: mol_type = other DNA
agccaaagtgacatcaagtatt

SEQ ID NO: 97931 - DNA, 22 bp, synthetic construct
  misc_feature 1..22: note = chemically synthesized
  source 1..22: mol_type = other DNA
gccaaagtgacatcaagtattt

SEQ ID NO: 97932 - DNA, 22 bp, synthetic construct
  misc_feature 1..22: note = chemically synthesized
  source 1..22: mol_type = other DNA
cttggatgctgaccagaggctt

SEQ ID NO: 97933 - DNA, 22 bp, synthetic construct
  misc_feature 1..22: note = chemically synthesized
  source 1..22: mol_type = other DNA
ttggatgctgaccagaggcttc

SEQ ID NO: 97934 - DNA, 22 bp, synthetic construct
  misc_feature 1..22: note = chemically synthesized
  source 1..22: mol_type = other DNA
ggatgctgaccagaggcttctg

SEQ ID NO: 97935 - DNA, 22 bp, synthetic construct
  misc_feature 1..22: note = chemically synthesized
  source 1..22: mol_type = other DNA
gatgctgaccagaggcttctga

SEQ ID NO: 97936 - DNA, 22 bp, synthetic construct
  misc_feature 1..22: note = chemically synthesized
  source 1..22: mol_type = other DNA
accagaggcttctgagccaggc

SEQ ID NO: 97937 - DNA, 22 bp, synthetic construct
  misc_feature 1..22: note = chemically synthesized
  source 1..22: mol_type = other DNA
ctgagccaggcccctctagctg

SEQ ID NO: 97938 - DNA, 22 bp, synthetic construct
  misc_feature 1..22: note = chemically synthesized
  source 1..22: mol_type = other DNA
tgagccaggcccctctagctga

SEQ ID NO: 97939 - DNA, 22 bp, synthetic construct
  misc_feature 1..22: note = chemically synthesized
  source 1..22: mol_type = other DNA
agccaggcccctctagctgaag

SEQ ID NO: 97940 - DNA, 22 bp, synthetic construct
  misc_feature 1..22: note = chemically synthesized
  source 1..22: mol_type = other DNA
tagctgaaggaagttcacagtt

SEQ ID NO: 97941 - DNA, 22 bp, synthetic construct
  misc_feature 1..22: note = chemically synthesized
  source 1..22: mol_type = other DNA
gctgaaggaagttcacagtttc

SEQ ID NO: 97942 - DNA, 22 bp, synthetic construct
  misc_feature 1..22: note = chemically synthesized
  source 1..22: mol_type = other DNA
aaggaagttcacagtttcttta

SEQ ID NO: 97943 - DNA, 22 bp, synthetic construct
  misc_feature 1..22: note = chemically synthesized
  source 1..22: mol_type = other DNA
acagtttctttaaggagggaaa

SEQ ID NO: 97944 - DNA, 22 bp, synthetic construct
  misc_feature 1..22: note = chemically synthesized
  source 1..22: mol_type = other DNA
ctttaaggagggaaaatggtag

SEQ ID NO: 97945 - DNA, 22 bp, synthetic construct
  misc_feature 1..22: note = chemically synthesized
  source 1..22: mol_type = other DNA
tttaaggagggaaaatggtaga

SEQ ID NO: 97946 - DNA, 22 bp, synthetic construct
  misc_feature 1..22: note = chemically synthesized
  source 1..22: mol_type = other DNA
taaggagggaaaatggtagata

SEQ ID NO: 97947 - DNA, 22 bp, synthetic construct
  misc_feature 1..22: note = chemically synthesized
  source 1..22: mol_type = other DNA
aaggagggaaaatggtagataa

SEQ ID NO: 97948 - DNA, 22 bp, synthetic construct
  misc_feature 1..22: note = chemically synthesized
  source 1..22: mol_type = other DNA
aggagggaaaatggtagataag

SEQ ID NO: 97949 - DNA, 22 bp, synthetic construct
  misc_feature 1..22: note = chemically synthesized
  source 1..22: mol_type = other DNA
tgttcggtcagggaatttgatg

SEQ ID NO: 97950 - DNA, 22 bp, synthetic construct
  misc_feature 1..22: note = chemically synthesized
  source 1..22: mol_type = other DNA
ttcggtcagggaatttgatggg

SEQ ID NO: 97951 - DNA, 22 bp, synthetic construct
  misc_feature 1..22: note = chemically synthesized
  source 1..22: mol_type = other DNA
ggtcagggaatttgatgggttt

SEQ ID NO: 97952 - DNA, 22 bp, synthetic construct
  misc_feature 1..22: note = chemically synthesized
  source 1..22: mol_type = other DNA
gatgggttttgtttgtttgttt

SEQ ID NO: 97953 - DNA, 22 bp, synthetic construct
  misc_feature 1..22: note = chemically synthesized
  source 1..22: mol_type = other DNA
atgggttttgtttgtttgtttg

SEQ ID NO: 97954 - DNA, 22 bp, synthetic construct
  misc_feature 1..22: note = chemically synthesized
  source 1..22: mol_type = other DNA
tgtttgtttgtttgtttgtttg

SEQ ID NO: 97955 - DNA, 22 bp, synthetic construct
  misc_feature 1..22: note = chemically synthesized
  source 1..22: mol_type = other DNA
gtttgtttgtttgtttgtttgt

SEQ ID NO: 97956 - DNA, 22 bp, synthetic construct
  misc_feature 1..22: note = chemically synthesized
  source 1..22: mol_type = other DNA
tttgtttgtttgtttgtttgtt

SEQ ID NO: 97957 - DNA, 22 bp, synthetic construct
  misc_feature 1..22: note = chemically synthesized
  source 1..22: mol_type = other DNA
gtttgtttgtttgtttgttttc

SEQ ID NO: 97958 - DNA, 22 bp, synthetic construct
  misc_feature 1..22: note = chemically synthesized
  source 1..22: mol_type = other DNA
tttgtttgtttgtttgttttcg

SEQ ID NO: 97959 - DNA, 22 bp, synthetic construct
  misc_feature 1..22: note = chemically synthesized
  source 1..22: mol_type = other DNA
gtttgtttgtttgttttcgttt

SEQ ID NO: 97960 - DNA, 22 bp, synthetic construct
  misc_feature 1..22: note = chemically synthesized
  source 1..22: mol_type = other DNA
tttgtttgtttgttttcgtttt

SEQ ID NO: 97961 - DNA, 22 bp, synthetic construct
  misc_feature 1..22: note = chemically synthesized
  source 1..22: mol_type = other DNA
gtttgtttgttttcgtttttct

SEQ ID NO: 97962 - DNA, 22 bp, synthetic construct
  misc_feature 1..22: note = chemically synthesized
  source 1..22: mol_type = other DNA
tttgtttgttttcgtttttctt

SEQ ID NO: 97963 - DNA, 22 bp, synthetic construct
  misc_feature 1..22: note = chemically synthesized
  source 1..22: mol_type = other DNA
gtttgttttcgtttttctttag

SEQ ID NO: 97964 - DNA, 22 bp, synthetic construct
  misc_feature 1..22: note = chemically synthesized
  source 1..22: mol_type = other DNA
tttgttttcgtttttctttaga

SEQ ID NO: 97965 - DNA, 22 bp, synthetic construct
  misc_feature 1..22: note = chemically synthesized
  source 1..22: mol_type = other DNA
gttttcgtttttctttagacag

SEQ ID NO: 97966 - DNA, 22 bp, synthetic construct
  misc_feature 1..22: note = chemically synthesized
  source 1..22: mol_type = other DNA
ttttcgtttttctttagacaga

SEQ ID NO: 97967 - DNA, 22 bp, synthetic construct
  misc_feature 1..22: note = chemically synthesized
  source 1..22: mol_type = other DNA
tcgtttttctttagacagagtc

SEQ ID NO: 97968 - DNA, 22 bp, synthetic construct
  misc_feature 1..22: note = chemically synthesized
  source 1..22: mol_type = other DNA
cgtttttctttagacagagtct

SEQ ID NO: 97969 - DNA, 22 bp, synthetic construct
  misc_feature 1..22: note = chemically synthesized
  source 1..22: mol_type = other DNA
gtttttctttagacagagtctc

SEQ ID NO: 97970 - DNA, 22 bp, synthetic construct
  misc_feature 1..22: note = chemically synthesized
  source 1..22: mol_type = other DNA
ttctttagacagagtctcgctc

SEQ ID NO: 97971 - DNA, 22 bp, synthetic construct
  misc_feature 1..22: note = chemically synthesized
  source 1..22: mol_type = other DNA
tctttagacagagtctcgctct

SEQ ID NO: 97972 - DNA, 22 bp, synthetic construct
  misc_feature 1..22: note = chemically synthesized
  source 1..22: mol_type = other DNA
ctttagacagagtctcgctctg

SEQ ID NO: 97973 - DNA, 22 bp, synthetic construct
  misc_feature 1..22: note = chemically synthesized
  source 1..22: mol_type = other DNA
tttagacagagtctcgctctgg

SEQ ID NO: 97974 - DNA, 22 bp, synthetic construct
  misc_feature 1..22: note = chemically synthesized
  source 1..22: mol_type = other DNA
tagacagagtctcgctctggag

SEQ ID NO: 97975 - DNA, 22 bp, synthetic construct
  misc_feature 1..22: note = chemically synthesized
  source 1..22: mol_type = other DNA
agacagagtctcgctctggagg

SEQ ID NO: 97976 - DNA, 22 bp, synthetic construct
  misc_feature 1..22: note = chemically synthesized
  source 1..22: mol_type = other DNA
gacagagtctcgctctggaggc

SEQ ID NO: 97977 - DNA, 22 bp, synthetic construct
  misc_feature 1..22: note = chemically synthesized
  source 1..22: mol_type = other DNA
gctctggaggctggagtgcaat

SEQ ID NO: 97978 - DNA, 22 bp, synthetic construct
  misc_feature 1..22: note = chemically synthesized
  source 1..22: mol_type = other DNA
tggaggctggagtgcaatggca

SEQ ID NO: 97979 - DNA, 22 bp, synthetic construct
  misc_feature 1..22: note = chemically synthesized
  source 1..22: mol_type = other DNA
gaggctggagtgcaatggcatg

SEQ ID NO: 97980 - DNA, 22 bp, synthetic construct
  misc_feature 1..22: note = chemically synthesized
  source 1..22: mol_type = other DNA
gagtgcaatggcatgatctctg

SEQ ID NO: 97981 - DNA, 22 bp, synthetic construct
  misc_feature 1..22: note = chemically synthesized
  source 1..22: mol_type = other DNA
tgctcagtgcaaactccacctc

SEQ ID NO: 97982 - DNA, 22 bp, synthetic construct
  misc_feature 1..22: note = chemically synthesized
  source 1..22: mol_type = other DNA
ctcagtgcaaactccacctccc

SEQ ID NO: 97983 - DNA, 22 bp, synthetic construct
  misc_feature 1..22: note = chemically synthesized
  source 1..22: mol_type = other DNA
agtgcaaactccacctccccgg

SEQ ID NO: 97984 - DNA, 22 bp, synthetic construct
  misc_feature 1..22: note = chemically synthesized
  source 1..22: mol_type = other DNA
cacctccccggttcaagcgatt

SEQ ID NO: 97985 - DNA, 22 bp, synthetic construct
  misc_feature 1..22: note = chemically synthesized
  source 1..22: mol_type = other DNA
cccggttcaagcgattctcctg

SEQ ID NO: 97986 - DNA, 22 bp, synthetic construct
  misc_feature 1..22: note = chemically synthesized
  source 1..22: mol_type = other DNA
aagcgattctcctgcctcagcc

SEQ ID NO: 97987 - DNA, 22 bp, synthetic construct
  misc_feature 1..22: note = chemically synthesized
  source 1..22: mol_type = other DNA
tcctgcctcagcctcccaagta

SEQ ID NO: 97988 - DNA, 22 bp, synthetic construct
  misc_feature 1..22: note = chemically synthesized
  source 1..22: mol_type = other DNA
ctgcctcagcctcccaagtagt

SEQ ID NO: 97989 - DNA, 22 bp, synthetic construct
  misc_feature 1..22: note = chemically synthesized
  source 1..22: mol_type = other DNA
cctcagcctcccaagtagttgg

SEQ ID NO: 97990 - DNA, 22 bp, synthetic construct
  misc_feature 1..22: note = chemically synthesized
  source 1..22: mol_type = other DNA
agcctcccaagtagttggatta

SEQ ID NO: 97991 - DNA, 22 bp, synthetic construct
  misc_feature 1..22: note = chemically synthesized
  source 1..22: mol_type = other DNA
ccaagtagttggattacaggct

SEQ ID NO: 97992 - DNA, 22 bp, synthetic construct
  misc_feature 1..22: note = chemically synthesized
  source 1..22: mol_type = other DNA
gattacaggctcccgtcaccac

SEQ ID NO: 97993 - DNA, 22 bp, synthetic construct
  misc_feature 1..22: note = chemically synthesized
  source 1..22: mol_type = other DNA
caggctcccgtcaccacgtcca

SEQ ID NO: 97994 - DNA, 22 bp, synthetic construct
  misc_feature 1..22: note = chemically synthesized
  source 1..22: mol_type = other DNA
ccgtcaccacgtccagctaatt

SEQ ID NO: 97995 - DNA, 22 bp, synthetic construct
  misc_feature 1..22: note = chemically synthesized
  source 1..22: mol_type = other DNA
atttttatatttttaagcagag

SEQ ID NO: 97996 - DNA, 22 bp, synthetic construct
  misc_feature 1..22: note = chemically synthesized
  source 1..22: mol_type = other DNA
ttatatttttaagcagagacca

SEQ ID NO: 97997 - DNA, 22 bp, synthetic construct
  misc_feature 1..22: note = chemically synthesized
  source 1..22: mol_type = other DNA
tatatttttaagcagagaccag

SEQ ID NO: 97998 - DNA, 22 bp, synthetic construct
  misc_feature 1..22: note = chemically synthesized
  source 1..22: mol_type = other DNA
atatttttaagcagagaccagg

SEQ ID NO: 97999 - DNA, 22 bp, synthetic construct
  misc_feature 1..22: note = chemically synthesized
  source 1..22: mol_type = other DNA
tatttttaagcagagaccaggt

SEQ ID NO: 98000 - DNA, 22 bp, synthetic construct
  misc_feature 1..22: note = chemically synthesized
  source 1..22: mol_type = other DNA
ttaagcagagaccaggtttcac

SEQ ID NO: 98001 - DNA, 22 bp, synthetic construct
  misc_feature 1..22: note = chemically synthesized
  source 1..22: mol_type = other DNA
taagcagagaccaggtttcact

SEQ ID NO: 98002 - DNA, 22 bp, synthetic construct
  misc_feature 1..22: note = chemically synthesized
  source 1..22: mol_type = other DNA
aagcagagaccaggtttcacta

SEQ ID NO: 98003 - DNA, 22 bp, synthetic construct
  misc_feature 1..22: note = chemically synthesized
  source 1..22: mol_type = other DNA
agcagagaccaggtttcactat

SEQ ID NO: 98004 - DNA, 22 bp, synthetic construct
  misc_feature 1..22: note = chemically synthesized
  source 1..22: mol_type = other DNA
cactatgttggctgggctggtg

SEQ ID NO: 98005 - DNA, 22 bp, synthetic construct
  misc_feature 1..22: note = chemically synthesized
  source 1..22: mol_type = other DNA
actatgttggctgggctggtgt

SEQ ID NO: 98006 - DNA, 22 bp, synthetic construct
  misc_feature 1..22: note = chemically synthesized
  source 1..22: mol_type = other DNA
tgttggctgggctggtgtccaa

SEQ ID NO: 98007 - DNA, 22 bp, synthetic construct
  misc_feature 1..22: note = chemically synthesized
  source 1..22: mol_type = other DNA
gctgggctggtgtccaactcct

SEQ ID NO: 98008 - DNA, 22 bp, synthetic construct
  misc_feature 1..22: note = chemically synthesized
  source 1..22: mol_type = other DNA
ggctggtgtccaactcctgacc

SEQ ID NO: 98009 - DNA, 22 bp, synthetic construct
  misc_feature 1..22: note = chemically synthesized
  source 1..22: mol_type = other DNA
gtgtccaactcctgacctcaag

SEQ ID NO: 98010 - DNA, 22 bp, synthetic construct
  misc_feature 1..22: note = chemically synthesized
  source 1..22: mol_type = other DNA
ctgacctcaagtgatctgccca

SEQ ID NO: 98011 - DNA, 22 bp, synthetic construct
  misc_feature 1..22: note = chemically synthesized
  source 1..22: mol_type = other DNA
acctcaagtgatctgcccacct

SEQ ID NO: 98012 - DNA, 22 bp, synthetic construct
  misc_feature 1..22: note = chemically synthesized
  source 1..22: mol_type = other DNA
aagtgatctgcccaccttggcg

SEQ ID NO: 98013 - DNA, 22 bp, synthetic construct
  misc_feature 1..22: note = chemically synthesized
  source 1..22: mol_type = other DNA
cccaccttggcgtcccaaactg

SEQ ID NO: 98014 - DNA, 22 bp, synthetic construct
  misc_feature 1..22: note = chemically synthesized
  source 1..22: mol_type = other DNA
ggcgtcccaaactgctgtgatt

SEQ ID NO: 98015 - DNA, 22 bp, synthetic construct
  misc_feature 1..22: note = chemically synthesized
  source 1..22: mol_type = other DNA
gcgtcccaaactgctgtgatta

SEQ ID NO: 98016 - DNA, 22 bp, synthetic construct
  misc_feature 1..22: note = chemically synthesized
  source 1..22: mol_type = other DNA
ctgtgattacaggagtgagcca

SEQ ID NO: 98017 - DNA, 22 bp, synthetic construct
  misc_feature 1..22: note = chemically synthesized
  source 1..22: mol_type = other DNA
tgattacaggagtgagccaccg

SEQ ID NO: 98018 - DNA, 22 bp, synthetic construct
  misc_feature 1..22: note = chemically synthesized
  source 1..22: mol_type = other DNA
caggagtgagccaccgcacctc

SEQ ID NO: 98019 - DNA, 22 bp, synthetic construct
  misc_feature 1..22: note = chemically synthesized
  source 1..22: mol_type = other DNA
aaggaatttgatgtttaggctg

SEQ ID NO: 98020 - DNA, 22 bp, synthetic construct
  misc_feature 1..22: note = chemically synthesized
  source 1..22: mol_type = other DNA
gatgtttaggctgtgacctctg

SEQ ID NO: 98021 - DNA, 22 bp, synthetic construct
  misc_feature 1..22: note = chemically synthesized
  source 1..22: mol_type = other DNA
atgtttaggctgtgacctctgc

SEQ ID NO: 98022 - DNA, 22 bp, synthetic construct
  misc_feature 1..22: note = chemically synthesized
  source 1..22: mol_type = other DNA
aggctgtgacctctgcactagg

SEQ ID NO: 98023 - DNA, 22 bp, synthetic construct
  misc_feature 1..22: note = chemically synthesized
  source 1..22: mol_type = other DNA
ggctgtgacctctgcactagga

SEQ ID NO: 98024 - DNA, 22 bp, synthetic construct
  misc_feature 1..22: note = chemically synthesized
  source 1..22: mol_type = other DNA
tgacctctgcactaggaatgga

SEQ ID NO: 98025 - DNA, 22 bp, synthetic construct
  misc_feature 1..22: note = chemically synthesized
  source 1..22: mol_type = other DNA
tgcactaggaatggaaggttag

SEQ ID NO: 98026 - DNA, 22 bp, synthetic construct
  misc_feature 1..22: note = chemically synthesized
  source 1..22: mol_type = other DNA
cactaggaatggaaggttagcc

SEQ ID NO: 98027 - DNA, 22 bp, synthetic construct
  misc_feature 1..22: note = chemically synthesized
  source 1..22: mol_type = other DNA
ggaatggaaggttagccactcc

SEQ ID NO: 98028 - DNA, 22 bp, synthetic construct
  misc_feature 1..22: note = chemically synthesized
  source 1..22: mol_type = other DNA
gccactcccaccccacccttcg

SEQ ID NO: 98029 - DNA, 22 bp, synthetic construct
  misc_feature 1..22: note = chemically synthesized
  source 1..22: mol_type = other DNA
ccaccccacccttcgtcctgca

SEQ ID NO: 98030 - DNA, 22 bp, synthetic construct
  misc_feature 1..22: note = chemically synthesized
  source 1..22: mol_type = other DNA
cgtcctgcaagtacccaatcac

SEQ ID NO: 98031 - DNA, 22 bp, synthetic construct
  misc_feature 1..22: note = chemically synthesized
  source 1..22: mol_type = other DNA
gtcctgcaagtacccaatcaca

SEQ ID NO: 98032 - DNA, 22 bp, synthetic construct
  misc_feature 1..22: note = chemically synthesized
  source 1..22: mol_type = other DNA
caagtacccaatcacactgcag

SEQ ID NO: 98033 - DNA, 22 bp, synthetic construct
  misc_feature 1..22: note = chemically synthesized
  source 1..22: mol_type = other DNA
cagagccacacctgccttcctt

SEQ ID NO: 98034 - DNA, 22 bp, synthetic construct
  misc_feature 1..22: note = chemically synthesized
  source 1..22: mol_type = other DNA
ccttccttagaggcgtgcctcc

SEQ ID NO: 98035 - DNA, 22 bp, synthetic construct
  misc_feature 1..22: note = chemically synthesized
  source 1..22: mol_type = other DNA
ccttagaggcgtgcctccatcc

SEQ ID NO: 98036 - DNA, 22 bp, synthetic construct
  misc_feature 1..22: note = chemically synthesized
  source 1..22: mol_type = other DNA
cttagaggcgtgcctccatccc

SEQ ID NO: 98037 - DNA, 22 bp, synthetic construct
  misc_feature 1..22: note = chemically synthesized
  source 1..22: mol_type = other DNA
agaggcgtgcctccatccctga

SEQ ID NO: 98038 - DNA, 22 bp, synthetic construct
  misc_feature 1..22: note = chemically synthesized
  source 1..22: mol_type = other DNA
gaggcgtgcctccatccctgat

SEQ ID NO: 98039 - DNA, 22 bp, synthetic construct
  misc_feature 1..22: note = chemically synthesized
  source 1..22: mol_type = other DNA
catccctgatgagtttttcctc

SEQ ID NO: 98040 - DNA, 22 bp, synthetic construct
  misc_feature 1..22: note = chemically synthesized
  source 1..22: mol_type = other DNA
atgagtttttcctccatgtgta

SEQ ID NO: 98041 - DNA, 22 bp, synthetic construct
  misc_feature 1..22: note = chemically synthesized
  source 1..22: mol_type = other DNA
ttcctccatgtgtagaattgaa

SEQ ID NO: 98042 - DNA, 22 bp, synthetic construct
  misc_feature 1..22: note = chemically synthesized
  source 1..22: mol_type = other DNA
tcctccatgtgtagaattgaat

SEQ ID NO: 98043 - DNA, 22 bp, synthetic construct
  misc_feature 1..22: note = chemically synthesized
  source 1..22: mol_type = other DNA
cctccatgtgtagaattgaata

SEQ ID NO: 98044 - DNA, 22 bp, synthetic construct
  misc_feature 1..22: note = chemically synthesized
  source 1..22: mol_type = other DNA
ctccatgtgtagaattgaataa

SEQ ID NO: 98045 - DNA, 22 bp, synthetic construct
  misc_feature 1..22: note = chemically synthesized
  source 1..22: mol_type = other DNA
catgtgtagaattgaataagaa

SEQ ID NO: 98046 - DNA, 22 bp, synthetic construct
  misc_feature 1..22: note = chemically synthesized
  source 1..22: mol_type = other DNA
aataagaaggatagaattcaat

SEQ ID NO: 98047 - DNA, 22 bp, synthetic construct
  misc_feature 1..22: note = chemically synthesized
  source 1..22: mol_type = other DNA
aatttaacaagctttgagtact

SEQ ID NO: 98048 - DNA, 22 bp, synthetic construct
  misc_feature 1..22: note = chemically synthesized
  source 1..22: mol_type = other DNA
aacaagctttgagtacttccta

SEQ ID NO: 98049 - DNA, 22 bp, synthetic construct
  misc_feature 1..22: note = chemically synthesized
  source 1..22: mol_type = other DNA
acaagctttgagtacttcctat

SEQ ID NO: 98050 - DNA, 22 bp, synthetic construct
  misc_feature 1..22: note = chemically synthesized
  source 1..22: mol_type = other DNA
tgagtacttcctatagcctagg

SEQ ID NO: 98051 - DNA, 22 bp, synthetic construct
  misc_feature 1..22: note = chemically synthesized
  source 1..22: mol_type = other DNA
gagtacttcctatagcctaggc

SEQ ID NO: 98052 - DNA, 22 bp, synthetic construct
  misc_feature 1..22: note = chemically synthesized
  source 1..22: mol_type = other DNA
agtacttcctatagcctaggca

SEQ ID NO: 98053 - DNA, 22 bp, synthetic construct
  misc_feature 1..22: note = chemically synthesized
  source 1..22: mol_type = other DNA
cctatagcctaggcattgtgct

SEQ ID NO: 98054 - DNA, 22 bp, synthetic construct
  misc_feature 1..22: note = chemically synthesized
  source 1..22: mol_type = other DNA
ctatagcctaggcattgtgctg

SEQ ID NO: 98055 - DNA, 22 bp, synthetic construct
  misc_feature 1..22: note = chemically synthesized
  source 1..22: mol_type = other DNA
tagcctaggcattgtgctgaca

SEQ ID NO: 98056 - DNA, 22 bp, synthetic construct
  misc_feature 1..22: note = chemically synthesized
  source 1..22: mol_type = other DNA
ggcattgtgctgacaactatgt

SEQ ID NO: 98057 - DNA, 22 bp, synthetic construct
  misc_feature 1..22: note = chemically synthesized
  source 1..22: mol_type = other DNA
tgctgacaactatgttagagag

SEQ ID NO: 98058 - DNA, 22 bp, synthetic construct
  misc_feature 1..22: note = chemically synthesized
  source 1..22: mol_type = other DNA
acaactatgttagagagagaaa

SEQ ID NO: 98059 - DNA, 22 bp, synthetic construct
  misc_feature 1..22: note = chemically synthesized
  source 1..22: mol_type = other DNA
tgttagagagagaaatagacaa

SEQ ID NO: 98060 - DNA, 22 bp, synthetic construct
  misc_feature 1..22: note = chemically synthesized
  source 1..22: mol_type = other DNA
gagagagaaatagacaagctat

SEQ ID NO: 98061 - DNA, 22 bp, synthetic construct
  misc_feature 1..22: note = chemically synthesized
  source 1..22: mol_type = other DNA
taaacttttcctcaggaccatc

SEQ ID NO: 98062 - DNA, 22 bp, synthetic construct
  misc_feature 1..22: note = chemically synthesized
  source 1..22: mol_type = other DNA
ttcctcaggaccatctacataa

SEQ ID NO: 98063 - DNA, 22 bp, synthetic construct
  misc_feature 1..22: note = chemically synthesized
  source 1..22: mol_type = other DNA
tcctcaggaccatctacataat

SEQ ID NO: 98064 - DNA, 22 bp, synthetic construct
  misc_feature 1..22: note = chemically synthesized
  source 1..22: mol_type = other DNA
cctcaggaccatctacataatt

SEQ ID NO: 98065 - DNA, 22 bp, synthetic construct
  misc_feature 1..22: note = chemically synthesized
  source 1..22: mol_type = other DNA
ctcaggaccatctacataattt

SEQ ID NO: 98066 - DNA, 22 bp, synthetic construct
  misc_feature 1..22: note = chemically synthesized
  source 1..22: mol_type = other DNA
aggaccatctacataatttcta

SEQ ID NO: 98067 - DNA, 22 bp, synthetic construct
  misc_feature 1..22: note = chemically synthesized
  source 1..22: mol_type = other DNA
cataatttctaggcccaatata

SEQ ID NO: 98068 - DNA, 22 bp, synthetic construct
  misc_feature 1..22: note = chemically synthesized
  source 1..22: mol_type = other DNA
ctaggcccaatataaaatgaaa

SEQ ID NO: 98069 - DNA, 22 bp, synthetic construct
  misc_feature 1..22: note = chemically synthesized
  source 1..22: mol_type = other DNA
taggcccaatataaaatgaaaa

SEQ ID NO: 98070 - DNA, 22 bp, synthetic construct
  misc_feature 1..22: note = chemically synthesized
  source 1..22: mol_type = other DNA
ggcccaatataaaatgaaaatg

SEQ ID NO: 98071 - DNA, 22 bp, synthetic construct
  misc_feature 1..22: note = chemically synthesized
  source 1..22: mol_type = other DNA
tgtcaaaaattaaggatttcat

SEQ ID NO: 98072 - DNA, 22 bp, synthetic construct
  misc_feature 1..22: note = chemically synthesized
  source 1..22: mol_type = other DNA
gtcaaaaattaaggatttcatg

SEQ ID NO: 98073 - DNA, 22 bp, synthetic construct
  misc_feature 1..22: note = chemically synthesized
  source 1..22: mol_type = other DNA
tcaaaaattaaggatttcatgt

SEQ ID NO: 98074 - DNA, 22 bp, synthetic construct
  misc_feature 1..22: note = chemically synthesized
  source 1..22: mol_type = other DNA
aggatttcatgtcaggaacagc

SEQ ID NO: 98075 - DNA, 22 bp, synthetic construct
  misc_feature 1..22: note = chemically synthesized
  source 1..22: mol_type = other DNA
catgtcaggaacagcaaggatg

SEQ ID NO: 98076 - DNA, 22 bp, synthetic construct
  misc_feature 1..22: note = chemically synthesized
  source 1..22: mol_type = other DNA
atgtcaggaacagcaaggatgt

SEQ ID NO: 98077 - DNA, 22 bp, synthetic construct
  misc_feature 1..22: note = chemically synthesized
  source 1..22: mol_type = other DNA
aaccaagcatggggccatcaag

SEQ ID NO: 98078 - DNA, 22 bp, synthetic construct
  misc_feature 1..22: note = chemically synthesized
  source 1..22: mol_type = other DNA
tatctgctattcatgatacgaa

SEQ ID NO: 98079 - DNA, 22 bp, synthetic construct
  misc_feature 1..22: note = chemically synthesized
  source 1..22: mol_type = other DNA
ctattcatgatacgaaaaaata

SEQ ID NO: 98080 - DNA, 22 bp, synthetic construct
  misc_feature 1..22: note = chemically synthesized
  source 1..22: mol_type = other DNA
ttcatgatacgaaaaaataaag

SEQ ID NO: 98081 - DNA, 22 bp, synthetic construct
  misc_feature 1..22: note = chemically synthesized
  source 1..22: mol_type = other DNA
atgatacgaaaaaataaagagt

SEQ ID NO: 98082 - DNA, 22 bp, synthetic construct
  misc_feature 1..22: note = chemically synthesized
  source 1..22: mol_type = other DNA
tagttatttagccacatatttc

SEQ ID NO: 98083 - DNA, 22 bp, synthetic construct
  misc_feature 1..22: note = chemically synthesized
  source 1..22: mol_type = other DNA
gttatttagccacatatttcaa

SEQ ID NO: 98084 - DNA, 22 bp, synthetic construct
  misc_feature 1..22: note = chemically synthesized
  source 1..22: mol_type = other DNA
tttagccacatatttcaagttt

SEQ ID NO: 98085 - DNA, 22 bp, synthetic construct
  misc_feature 1..22: note = chemically synthesized
  source 1..22: mol_type = other DNA
agccacatatttcaagtttagt

SEQ ID NO: 98086 - DNA, 22 bp, synthetic construct
  misc_feature 1..22: note = chemically synthesized
  source 1..22: mol_type = other DNA
gccacatatttcaagtttagtc

SEQ ID NO: 98087 - DNA, 22 bp, synthetic construct
  misc_feature 1..22: note = chemically synthesized
  source 1..22: mol_type = other DNA
caagtttagtctgatatcaccc

SEQ ID NO: 98088 - DNA, 22 bp, synthetic construct
  misc_feature 1..22: note = chemically synthesized
  source 1..22: mol_type = other DNA
aagtttagtctgatatcaccct

SEQ ID NO: 98089 - DNA, 22 bp, synthetic construct
  misc_feature 1..22: note = chemically synthesized
  source 1..22: mol_type = other DNA
agtctgatatcaccctttaaac

SEQ ID NO: 98090 - DNA, 22 bp, synthetic construct
  misc_feature 1..22: note = chemically synthesized
  source 1..22: mol_type = other DNA
gtctgatatcaccctttaaaca

SEQ ID NO: 98091 - DNA, 22 bp, synthetic construct
  misc_feature 1..22: note = chemically synthesized
  source 1..22: mol_type = other DNA
atatcaccctttaaacactgcc

SEQ ID NO: 98092 - DNA, 22 bp, synthetic construct
  misc_feature 1..22: note = chemically synthesized
  source 1..22: mol_type = other DNA
taaacactgccactcaacctaa

SEQ ID NO: 98093 - DNA, 22 bp, synthetic construct
  misc_feature 1..22: note = chemically synthesized
  source 1..22: mol_type = other DNA
aaacactgccactcaacctaaa

SEQ ID NO: 98094 - DNA, 22 bp, synthetic construct
  misc_feature 1..22: note = chemically synthesized
  source 1..22: mol_type = other DNA
aacactgccactcaacctaaaa

SEQ ID NO: 98095 - DNA, 22 bp, synthetic construct
  misc_feature 1..22: note = chemically synthesized
  source 1..22: mol_type = other DNA
ccactcaacctaaaacaatgct

SEQ ID NO: 98096 - DNA, 22 bp, synthetic construct
  misc_feature 1..22: note = chemically synthesized
  source 1..22: mol_type = other DNA
aacctaaaacaatgctagtctt

SEQ ID NO: 98097 - DNA, 22 bp, synthetic construct
  misc_feature 1..22: note = chemically synthesized
  source 1..22: mol_type = other DNA
aaacaatgctagtctttctaga

SEQ ID NO: 98098 - DNA, 22 bp, synthetic construct
  misc_feature 1..22: note = chemically synthesized
  source 1..22: mol_type = other DNA
gtctttctagacccatccatgg

SEQ ID NO: 98099 - DNA, 22 bp, synthetic construct
  misc_feature 1..22: note = chemically synthesized
  source 1..22: mol_type = other DNA
tctagacccatccatggaattt

SEQ ID NO: 98100 - DNA, 22 bp, synthetic construct
  misc_feature 1..22: note = chemically synthesized
  source 1..22: mol_type = other DNA
ctagacccatccatggaatttt

SEQ ID NO: 98101 - DNA, 22 bp, synthetic construct
  misc_feature 1..22: note = chemically synthesized
  source 1..22: mol_type = other DNA
tagacccatccatggaattttt

SEQ ID NO: 98102 - DNA, 22 bp, synthetic construct
  misc_feature 1..22: note = chemically synthesized
  source 1..22: mol_type = other DNA
gacccatccatggaattttttc

SEQ ID NO: 98103 - DNA, 22 bp, synthetic construct
  misc_feature 1..22: note = chemically synthesized
  source 1..22: mol_type = other DNA
tttccccactgttttttttcta

SEQ ID NO: 98104 - DNA, 22 bp, synthetic construct
  misc_feature 1..22: note = chemically synthesized
  source 1..22: mol_type = other DNA
ttccccactgttttttttctaa

SEQ ID NO: 98105 - DNA, 22 bp, synthetic construct
  misc_feature 1..22: note = chemically synthesized
  source 1..22: mol_type = other DNA
tccccactgttttttttctaat

SEQ ID NO: 98106 - DNA, 22 bp, synthetic construct
  misc_feature 1..22: note = chemically synthesized
  source 1..22: mol_type = other DNA
ccccactgttttttttctaatt

SEQ ID NO: 98107 - DNA, 22 bp, synthetic construct
  misc_feature 1..22: note = chemically synthesized
  source 1..22: mol_type = other DNA
cccactgttttttttctaatta

SEQ ID NO: 98108 - DNA, 22 bp, synthetic construct
  misc_feature 1..22: note = chemically synthesized
  source 1..22: mol_type = other DNA
ttttttttctaattaatttgtg

SEQ ID NO: 98109 - DNA, 22 bp, synthetic construct
  misc_feature 1..22: note = chemically synthesized
  source 1..22: mol_type = other DNA
tttttctaattaatttgtgatt

SEQ ID NO: 98110 - DNA, 22 bp, synthetic construct
  misc_feature 1..22: note = chemically synthesized
  source 1..22: mol_type = other DNA
ttttctaattaatttgtgattt

SEQ ID NO: 98111 - DNA, 22 bp, synthetic construct
  misc_feature 1..22: note = chemically synthesized
  source 1..22: mol_type = other DNA
tttctaattaatttgtgattta

SEQ ID NO: 98112 - DNA, 22 bp, synthetic construct
  misc_feature 1..22: note = chemically synthesized
  source 1..22: mol_type = other DNA
ttctaattaatttgtgatttaa

SEQ ID NO: 98113 - DNA, 22 bp, synthetic construct
  misc_feature 1..22: note = chemically synthesized
  source 1..22: mol_type = other DNA
tctaattaatttgtgatttaaa

SEQ ID NO: 98114 - DNA, 22 bp, synthetic construct
  misc_feature 1..22: note = chemically synthesized
  source 1..22: mol_type = other DNA
ctaattaatttgtgatttaaat

SEQ ID NO: 98115 - DNA, 22 bp, synthetic construct
  misc_feature 1..22: note = chemically synthesized
  source 1..22: mol_type = other DNA
taattaatttgtgatttaaatg

SEQ ID NO: 98116 - DNA, 22 bp, synthetic construct
  misc_feature 1..22: note = chemically synthesized
  source 1..22: mol_type = other DNA
attaatttgtgatttaaatggc

SEQ ID NO: 98117 - DNA, 22 bp, synthetic construct
  misc_feature 1..22: note = chemically synthesized
  source 1..22: mol_type = other DNA
atttgtgatttaaatggctcat

SEQ ID NO: 98118 - DNA, 22 bp, synthetic construct
  misc_feature 1..22: note = chemically synthesized
  source 1..22: mol_type = other DNA
gtgatttaaatggctcatattc

SEQ ID NO: 98119 - DNA, 22 bp, synthetic construct
  misc_feature 1..22: note = chemically synthesized
  source 1..22: mol_type = other DNA
tgatttaaatggctcatattcc

SEQ ID NO: 98120 - DNA, 22 bp, synthetic construct
  misc_feature 1..22: note = chemically synthesized
  source 1..22: mol_type = other DNA
aaatggctcatattccagcctg

SEQ ID NO: 98121 - DNA, 22 bp, synthetic construct
  misc_feature 1..22: note = chemically synthesized
  source 1..22: mol_type = other DNA
aatggctcatattccagcctgt

SEQ ID NO: 98122 - DNA, 22 bp, synthetic construct
  misc_feature 1..22: note = chemically synthesized
  source 1..22: mol_type = other DNA
atattccagcctgtgccacagt

SEQ ID NO: 98123 - DNA, 22 bp, synthetic construct
  misc_feature 1..22: note = chemically synthesized
  source 1..22: mol_type = other DNA
cagcctgtgccacagttattac

SEQ ID NO: 98124 - DNA, 22 bp, synthetic construct
  misc_feature 1..22: note = chemically synthesized
  source 1..22: mol_type = other DNA
tgccacagttattacacattta

SEQ ID NO: 98125 - DNA, 22 bp, synthetic construct
  misc_feature 1..22: note = chemically synthesized
  source 1..22: mol_type = other DNA
ttacacatttaactcactctct

SEQ ID NO: 98126 - DNA, 22 bp, synthetic construct
  misc_feature 1..22: note = chemically synthesized
  source 1..22: mol_type = other DNA
cacatttaactcactctctgta

SEQ ID NO: 98127 - DNA, 22 bp, synthetic construct
  misc_feature 1..22: note = chemically synthesized
  source 1..22: mol_type = other DNA
aactcactctctgtattttgtt

SEQ ID NO: 98128 - DNA, 22 bp, synthetic construct
  misc_feature 1..22: note = chemically synthesized
  source 1..22: mol_type = other DNA
actcactctctgtattttgtta

SEQ ID NO: 98129 - DNA, 22 bp, synthetic construct
  misc_feature 1..22: note = chemically synthesized
  source 1..22: mol_type = other DNA
actctctgtattttgttatctg

SEQ ID NO: 98130 - DNA, 22 bp, synthetic construct
  misc_feature 1..22: note = chemically synthesized
  source 1..22: mol_type = other DNA
tctgtattttgttatctgtata

SEQ ID NO: 98131 - DNA, 22 bp, synthetic construct
  misc_feature 1..22: note = chemically synthesized
  source 1..22: mol_type = other DNA
tgtattttgttatctgtataaa

SEQ ID NO: 98132 - DNA, 22 bp, synthetic construct
  misc_feature 1..22: note = chemically synthesized
  source 1..22: mol_type = other DNA
tattttgttatctgtataaata

SEQ ID NO: 98133 - DNA, 22 bp, synthetic construct
  misc_feature 1..22: note = chemically synthesized
  source 1..22: mol_type = other DNA
tgttatctgtataaatactctt

SEQ ID NO: 98134 - DNA, 22 bp, synthetic construct
  misc_feature 1..22: note = chemically synthesized
  source 1..22: mol_type = other DNA
gttatctgtataaatactcttc

SEQ ID NO: 98135 - DNA, 22 bp, synthetic construct
  misc_feature 1..22: note = chemically synthesized
  source 1..22: mol_type = other DNA
ttatctgtataaatactcttca

SEQ ID NO: 98136 - DNA, 22 bp, synthetic construct
  misc_feature 1..22: note = chemically synthesized
  source 1..22: mol_type = other DNA
tctgtataaatactcttcaggt

SEQ ID NO: 98137 - DNA, 22 bp, synthetic construct
  misc_feature 1..22: note = chemically synthesized
  source 1..22: mol_type = other DNA
tataaatactcttcaggttgat

SEQ ID NO: 98138 - DNA, 22 bp, synthetic construct
  misc_feature 1..22: note = chemically synthesized
  source 1..22: mol_type = other DNA
ttcaggttgatttcctttctta

SEQ ID NO: 98139 - DNA, 22 bp, synthetic construct
  misc_feature 1..22: note = chemically synthesized
  source 1..22: mol_type = other DNA
caggttgatttcctttcttaat

SEQ ID NO: 98140 - DNA, 22 bp, synthetic construct
  misc_feature 1..22: note = chemically synthesized
  source 1..22: mol_type = other DNA
aggttgatttcctttcttaatg

SEQ ID NO: 98141 - DNA, 22 bp, synthetic construct
  misc_feature 1..22: note = chemically synthesized
  source 1..22: mol_type = other DNA
atttcctttcttaatgtttgtg

SEQ ID NO: 98142 - DNA, 22 bp, synthetic construct
  misc_feature 1..22: note = chemically synthesized
  source 1..22: mol_type = other DNA
cctttcttaatgtttgtgttta

SEQ ID NO: 98143 - DNA, 22 bp, synthetic construct
  misc_feature 1..22: note = chemically synthesized
  source 1..22: mol_type = other DNA
ctttcttaatgtttgtgtttat

SEQ ID NO: 98144 - DNA, 22 bp, synthetic construct
  misc_feature 1..22: note = chemically synthesized
  source 1..22: mol_type = other DNA
tcttaatgtttgtgtttatgtt

SEQ ID NO: 98145 - DNA, 22 bp, synthetic construct
  misc_feature 1..22: note = chemically synthesized
  source 1..22: mol_type = other DNA
cttaatgtttgtgtttatgtta

SEQ ID NO: 98146 - DNA, 22 bp, synthetic construct
  misc_feature 1..22: note = chemically synthesized
  source 1..22: mol_type = other DNA
ttaatgtttgtgtttatgttag

SEQ ID NO: 98147 - DNA, 22 bp, synthetic construct
  misc_feature 1..22: note = chemically synthesized
  source 1..22: mol_type = other DNA
aatgtttgtgtttatgttagat

SEQ ID NO: 98148 - DNA, 22 bp, synthetic construct
  misc_feature 1..22: note = chemically synthesized
  source 1..22: mol_type = other DNA
atgtttgtgtttatgttagata

SEQ ID NO: 98149 - DNA, 22 bp, synthetic construct
  misc_feature 1..22: note = chemically synthesized
  source 1..22: mol_type = other DNA
gtgtttatgttagatatgcatc

SEQ ID NO: 98150 - DNA, 22 bp, synthetic construct
  misc_feature 1..22: note = chemically synthesized
  source 1..22: mol_type = other DNA
tgtttatgttagatatgcatca

SEQ ID NO: 98151 - DNA, 22 bp, synthetic construct
  misc_feature 1..22: note = chemically synthesized
  source 1..22: mol_type = other DNA
atgttagatatgcatcatgtag

SEQ ID NO: 98152 - DNA, 22 bp, synthetic construct
  misc_feature 1..22: note = chemically synthesized
  source 1..22: mol_type = other DNA
tgttagatatgcatcatgtagc

SEQ ID NO: 98153 - DNA, 22 bp, synthetic construct
  misc_feature 1..22: note = chemically synthesized
  source 1..22: mol_type = other DNA
gatatgcatcatgtagcctgtc

SEQ ID NO: 98154 - DNA, 22 bp, synthetic construct
  misc_feature 1..22: note = chemically synthesized
  source 1..22: mol_type = other DNA
tcttcatttctatcacaaacat

SEQ ID NO: 98155 - DNA, 22 bp, synthetic construct
  misc_feature 1..22: note = chemically synthesized
  source 1..22: mol_type = other DNA
catttctatcacaaacatacac

SEQ ID NO: 98156 - DNA, 22 bp, synthetic construct
  misc_feature 1..22: note = chemically synthesized
  source 1..22: mol_type = other DNA
atttctatcacaaacatacact

SEQ ID NO: 98157 - DNA, 22 bp, synthetic construct
  misc_feature 1..22: note = chemically synthesized
  source 1..22: mol_type = other DNA
ctatcacaaacatacacttgaa

SEQ ID NO: 98158 - DNA, 22 bp, synthetic construct
  misc_feature 1..22: note = chemically synthesized
  source 1..22: mol_type = other DNA
tatcacaaacatacacttgaac

SEQ ID NO: 98159 - DNA, 22 bp, synthetic construct
  misc_feature 1..22: note = chemically synthesized
  source 1..22: mol_type = other DNA
tcacaaacatacacttgaacca

SEQ ID NO: 98160 - DNA, 22 bp, synthetic construct
  misc_feature 1..22: note = chemically synthesized
  source 1..22: mol_type = other DNA
gaaccaaaaaggaagtttttac

SEQ ID NO: 98161 - DNA, 22 bp, synthetic construct
  misc_feature 1..22: note = chemically synthesized
  source 1..22: mol_type = other DNA
aaccaaaaaggaagtttttaca

SEQ ID NO: 98162 - DNA, 22 bp, synthetic construct
  misc_feature 1..22: note = chemically synthesized
  source 1..22: mol_type = other DNA
ttacatagcatcactaaatctt

SEQ ID NO: 98163 - DNA, 22 bp, synthetic construct
  misc_feature 1..22: note = chemically synthesized
  source 1..22: mol_type = other DNA
tacatagcatcactaaatcttc

SEQ ID NO: 98164 - DNA, 22 bp, synthetic construct
  misc_feature 1..22: note = chemically synthesized
  source 1..22: mol_type = other DNA
acatagcatcactaaatcttct

SEQ ID NO: 98165 - DNA, 22 bp, synthetic construct
  misc_feature 1..22: note = chemically synthesized
  source 1..22: mol_type = other DNA
catagcatcactaaatcttctc

SEQ ID NO: 98166 - DNA, 22 bp, synthetic construct
  misc_feature 1..22: note = chemically synthesized
  source 1..22: mol_type = other DNA
aatcttctctctgtgctcttag

SEQ ID NO: 98167 - DNA, 22 bp, synthetic construct
  misc_feature 1..22: note = chemically synthesized
  source 1..22: mol_type = other DNA
ctctctgtgctcttagcgaaac

SEQ ID NO: 98168 - DNA, 22 bp, synthetic construct
  misc_feature 1..22: note = chemically synthesized
  source 1..22: mol_type = other DNA
tctctgtgctcttagcgaaacc

SEQ ID NO: 98169 - DNA, 22 bp, synthetic construct
  misc_feature 1..22: note = chemically synthesized
  source 1..22: mol_type = other DNA
tctgtgctcttagcgaaaccaa

SEQ ID NO: 98170 - DNA, 22 bp, synthetic construct
  misc_feature 1..22: note = chemically synthesized
  source 1..22: mol_type = other DNA
tgtgctcttagcgaaaccaagt

SEQ ID NO: 98171 - DNA, 22 bp, synthetic construct
  misc_feature 1..22: note = chemically synthesized
  source 1..22: mol_type = other DNA
tgctcttagcgaaaccaagtag

SEQ ID NO: 98172 - DNA, 22 bp, synthetic construct
  misc_feature 1..22: note = chemically synthesized
  source 1..22: mol_type = other DNA
ttagcgaaaccaagtaggctga

SEQ ID NO: 98173 - DNA, 22 bp, synthetic construct
  misc_feature 1..22: note = chemically synthesized
  source 1..22: mol_type = other DNA
agcgaaaccaagtaggctgaca

SEQ ID NO: 98174 - DNA, 22 bp, synthetic construct
  misc_feature 1..22: note = chemically synthesized
  source 1..22: mol_type = other DNA
gcgaaaccaagtaggctgacaa

SEQ ID NO: 98175 - DNA, 22 bp, synthetic construct
  misc_feature 1..22: note = chemically synthesized
  source 1..22: mol_type = other DNA
acaagacatcattcattcacag

SEQ ID NO: 98176 - DNA, 22 bp, synthetic construct
  misc_feature 1..22: note = chemically synthesized
  source 1..22: mol_type = other DNA
attcacagcgaaaccgagtaga

SEQ ID NO: 98177 - DNA, 22 bp, synthetic construct
  misc_feature 1..22: note = chemically synthesized
  source 1..22: mol_type = other DNA
acagcgaaaccgagtagactga

SEQ ID NO: 98178 - DNA, 22 bp, synthetic construct
  misc_feature 1..22: note = chemically synthesized
  source 1..22: mol_type = other DNA
acaagaggtcattcattcacaa

SEQ ID NO: 98179 - DNA, 22 bp, synthetic construct
  misc_feature 1..22: note = chemically synthesized
  source 1..22: mol_type = other DNA
attcacaaatgaatacaaaaaa

SEQ ID NO: 98180 - DNA, 22 bp, synthetic construct
  misc_feature 1..22: note = chemically synthesized
  source 1..22: mol_type = other DNA
acaaatgaatacaaaaaacagt

SEQ ID NO: 98181 - DNA, 22 bp, synthetic construct
  misc_feature 1..22: note = chemically synthesized
  source 1..22: mol_type = other DNA
taatgggtcctgggcctgcaaa

SEQ ID NO: 98182 - DNA, 22 bp, synthetic construct
  misc_feature 1..22: note = chemically synthesized
  source 1..22: mol_type = other DNA
ggcctgcaaaaccctcacagct

SEQ ID NO: 98183 - DNA, 22 bp, synthetic construct
  misc_feature 1..22: note = chemically synthesized
  source 1..22: mol_type = other DNA
caaaaccctcacagctgctaac

SEQ ID NO: 98184 - DNA, 22 bp, synthetic construct
  misc_feature 1..22: note = chemically synthesized
  source 1..22: mol_type = other DNA
acagctgctaacctcaagaagc

SEQ ID NO: 98185 - DNA, 22 bp, synthetic construct
  misc_feature 1..22: note = chemically synthesized
  source 1..22: mol_type = other DNA
ctaacctcaagaagctcagtgg

SEQ ID NO: 98186 - DNA, 22 bp, synthetic construct
  misc_feature 1..22: note = chemically synthesized
  source 1..22: mol_type = other DNA
acctcaagaagctcagtggaga

SEQ ID NO: 98187 - DNA, 22 bp, synthetic construct
  misc_feature 1..22: note = chemically synthesized
  source 1..22: mol_type = other DNA
aagaagctcagtggagacataa

SEQ ID NO: 98188 - DNA, 22 bp, synthetic construct
  misc_feature 1..22: note = chemically synthesized
  source 1..22: mol_type = other DNA
agtggagacataacattcatct

SEQ ID NO: 98189 - DNA, 22 bp, synthetic construct
  misc_feature 1..22: note = chemically synthesized
  source 1..22: mol_type = other DNA
atctgaaaattccttgcatgtc

SEQ ID NO: 98190 - DNA, 22 bp, synthetic construct
  misc_feature 1..22: note = chemically synthesized
  source 1..22: mol_type = other DNA
aaaattccttgcatgtctgttg

SEQ ID NO: 98191 - DNA, 22 bp, synthetic construct
  misc_feature 1..22: note = chemically synthesized
  source 1..22: mol_type = other DNA
cttgcatgtctgttgaactaat

SEQ ID NO: 98192 - DNA, 22 bp, synthetic construct
  misc_feature 1..22: note = chemically synthesized
  source 1..22: mol_type = other DNA
gcatgtctgttgaactaattta

SEQ ID NO: 98193 - DNA, 22 bp, synthetic construct
  misc_feature 1..22: note = chemically synthesized
  source 1..22: mol_type = other DNA
catgtctgttgaactaatttat

SEQ ID NO: 98194 - DNA, 22 bp, synthetic construct
  misc_feature 1..22: note = chemically synthesized
  source 1..22: mol_type = other DNA
ttgaactaatttatctgcctct

SEQ ID NO: 98195 - DNA, 22 bp, synthetic construct
  misc_feature 1..22: note = chemically synthesized
  source 1..22: mol_type = other DNA
aactaatttatctgcctctcct

SEQ ID NO: 98196 - DNA, 22 bp, synthetic construct
  misc_feature 1..22: note = chemically synthesized
  source 1..22: mol_type = other DNA
atttatctgcctctccttaaat

SEQ ID NO: 98197 - DNA, 22 bp, synthetic construct
  misc_feature 1..22: note = chemically synthesized
  source 1..22: mol_type = other DNA
atctgcctctccttaaatttgt

SEQ ID NO: 98198 - DNA, 22 bp, synthetic construct
  misc_feature 1..22: note = chemically synthesized
  source 1..22: mol_type = other DNA
tctgcctctccttaaatttgtt

SEQ ID NO: 98199 - DNA, 22 bp, synthetic construct
  misc_feature 1..22: note = chemically synthesized
  source 1..22: mol_type = other DNA
cctctccttaaatttgttcctt

SEQ ID NO: 98200 - DNA, 22 bp, synthetic construct
  misc_feature 1..22: note = chemically synthesized
  source 1..22: mol_type = other DNA
tccttaaatttgttcctttttg

SEQ ID NO: 98201 - DNA, 22 bp, synthetic construct
  misc_feature 1..22: note = chemically synthesized
  source 1..22: mol_type = other DNA
cttaaatttgttcctttttgta

SEQ ID NO: 98202 - DNA, 22 bp, synthetic construct
  misc_feature 1..22: note = chemically synthesized
  source 1..22: mol_type = other DNA
aaatttgttcctttttgtatag

SEQ ID NO: 98203 - DNA, 22 bp, synthetic construct
  misc_feature 1..22: note = chemically synthesized
  source 1..22: mol_type = other DNA
aatttgttcctttttgtatagt

SEQ ID NO: 98204 - DNA, 22 bp, synthetic construct
  misc_feature 1..22: note = chemically synthesized
  source 1..22: mol_type = other DNA
gttcctttttgtatagttcctt

SEQ ID NO: 98205 - DNA, 22 bp, synthetic construct
  misc_feature 1..22: note = chemically synthesized
  source 1..22: mol_type = other DNA
ttcctttttgtatagttcctta

SEQ ID NO: 98206 - DNA, 22 bp, synthetic construct
  misc_feature 1..22: note = chemically synthesized
  source 1..22: mol_type = other DNA
ctttttgtatagttccttaagt

SEQ ID NO: 98207 - DNA, 22 bp, synthetic construct
  misc_feature 1..22: note = chemically synthesized
  source 1..22: mol_type = other DNA
tttgtatagttccttaagtcat

SEQ ID NO: 98208 - DNA, 22 bp, synthetic construct
  misc_feature 1..22: note = chemically synthesized
  source 1..22: mol_type = other DNA
ttgtatagttccttaagtcatg

SEQ ID NO: 98209 - DNA, 22 bp, synthetic construct
  misc_feature 1..22: note = chemically synthesized
  source 1..22: mol_type = other DNA
tgtatagttccttaagtcatgt

SEQ ID NO: 98210 - DNA, 22 bp, synthetic construct
  misc_feature 1..22: note = chemically synthesized
  source 1..22: mol_type = other DNA
gtatagttccttaagtcatgtc

SEQ ID NO: 98211 - DNA, 22 bp, synthetic construct
  misc_feature 1..22: note = chemically synthesized
  source 1..22: mol_type = other DNA
tatagttccttaagtcatgtca

SEQ ID NO: 98212 - DNA, 22 bp, synthetic construct
  misc_feature 1..22: note = chemically synthesized
  source 1..22: mol_type = other DNA
cttaagtcatgtcacatttctg

SEQ ID NO: 98213 - DNA, 22 bp, synthetic construct
  misc_feature 1..22: note = chemically synthesized
  source 1..22: mol_type = other DNA
aagtcatgtcacatttctgaaa

SEQ ID NO: 98214 - DNA, 22 bp, synthetic construct
  misc_feature 1..22: note = chemically synthesized
  source 1..22: mol_type = other DNA
agtcatgtcacatttctgaaac

SEQ ID NO: 98215 - DNA, 22 bp, synthetic construct
  misc_feature 1..22: note = chemically synthesized
  source 1..22: mol_type = other DNA
ctgaaacatctttgccactgtg

SEQ ID NO: 98216 - DNA, 22 bp, synthetic construct
  misc_feature 1..22: note = chemically synthesized
  source 1..22: mol_type = other DNA
tgaaacatctttgccactgtga

SEQ ID NO: 98217 - DNA, 22 bp, synthetic construct
  misc_feature 1..22: note = chemically synthesized
  source 1..22: mol_type = other DNA
aaacatctttgccactgtgaac

SEQ ID NO: 98218 - DNA, 22 bp, synthetic construct
  misc_feature 1..22: note = chemically synthesized
  source 1..22: mol_type = other DNA
tgccactgtgaactcctacaga

SEQ ID NO: 98219 - DNA, 22 bp, synthetic construct
  misc_feature 1..22: note = chemically synthesized
  source 1..22: mol_type = other DNA
gccactgtgaactcctacagaa

SEQ ID NO: 98220 - DNA, 22 bp, synthetic construct
  misc_feature 1..22: note = chemically synthesized
  source 1..22: mol_type = other DNA
ccactgtgaactcctacagaag

SEQ ID NO: 98221 - DNA, 22 bp, synthetic construct
  misc_feature 1..22: note = chemically synthesized
  source 1..22: mol_type = other DNA
tgaactcctacagaagccagct

SEQ ID NO: 98222 - DNA, 22 bp, synthetic construct
  misc_feature 1..22: note = chemically synthesized
  source 1..22: mol_type = other DNA
ctacagaagccagcttcaaagc

SEQ ID NO: 98223 - DNA, 22 bp, synthetic construct
  misc_feature 1..22: note = chemically synthesized
  source 1..22: mol_type = other DNA
cagaagccagcttcaaagccat

SEQ ID NO: 98224 - DNA, 22 bp, synthetic construct
  misc_feature 1..22: note = chemically synthesized
  source 1..22: mol_type = other DNA
caaagccattcttctggaagcc

SEQ ID NO: 98225 - DNA, 22 bp, synthetic construct
  misc_feature 1..22: note = chemically synthesized
  source 1..22: mol_type = other DNA
aaagccattcttctggaagcct

SEQ ID NO: 98226 - DNA, 22 bp, synthetic construct
  misc_feature 1..22: note = chemically synthesized
  source 1..22: mol_type = other DNA
ttctggaagccttctctatccc

SEQ ID NO: 98227 - DNA, 22 bp, synthetic construct
  misc_feature 1..22: note = chemically synthesized
  source 1..22: mol_type = other DNA
ctggaagccttctctatcccct

SEQ ID NO: 98228 - DNA, 22 bp, synthetic construct
  misc_feature 1..22: note = chemically synthesized
  source 1..22: mol_type = other DNA
tggaagccttctctatcccctt

SEQ ID NO: 98229 - DNA, 22 bp, synthetic construct
  misc_feature 1..22: note = chemically synthesized
  source 1..22: mol_type = other DNA
gaagccttctctatccccttga

SEQ ID NO: 98230 - DNA, 22 bp, synthetic construct
  misc_feature 1..22: note = chemically synthesized
  source 1..22: mol_type = other DNA
ctctatccccttgacctcctgt

SEQ ID NO: 98231 - DNA, 22 bp, synthetic construct
  misc_feature 1..22: note = chemically synthesized
  source 1..22: mol_type = other DNA
tctatccccttgacctcctgtt

SEQ ID NO: 98232 - DNA, 22 bp, synthetic construct
  misc_feature 1..22: note = chemically synthesized
  source 1..22: mol_type = other DNA
tatccccttgacctcctgtttt

SEQ ID NO: 98233 - DNA, 22 bp, synthetic construct
  misc_feature 1..22: note = chemically synthesized
  source 1..22: mol_type = other DNA
tccccttgacctcctgtttttt

SEQ ID NO: 98234 - DNA, 22 bp, synthetic construct
  misc_feature 1..22: note = chemically synthesized
  source 1..22: mol_type = other DNA
gacctcctgttttttctcccac

SEQ ID NO: 98235 - DNA, 22 bp, synthetic construct
  misc_feature 1..22: note = chemically synthesized
  source 1..22: mol_type = other DNA
acctcctgttttttctcccaca

SEQ ID NO: 98236 - DNA, 22 bp, synthetic construct
  misc_feature 1..22: note = chemically synthesized
  source 1..22: mol_type = other DNA
ctgttttttctcccacaagcat

SEQ ID NO: 98237 - DNA, 22 bp, synthetic construct
  misc_feature 1..22: note = chemically synthesized
  source 1..22: mol_type = other DNA
ttttttctcccacaagcattat

SEQ ID NO: 98238 - DNA, 22 bp, synthetic construct
  misc_feature 1..22: note = chemically synthesized
  source 1..22: mol_type = other DNA
tttctcccacaagcattatgtc

SEQ ID NO: 98239 - DNA, 22 bp, synthetic construct
  misc_feature 1..22: note = chemically synthesized
  source 1..22: mol_type = other DNA
ttctcccacaagcattatgtct

SEQ ID NO: 98240 - DNA, 22 bp, synthetic construct
  misc_feature 1..22: note = chemically synthesized
  source 1..22: mol_type = other DNA
tctcccacaagcattatgtctg

SEQ ID NO: 98241 - DNA, 22 bp, synthetic construct
  misc_feature 1..22: note = chemically synthesized
  source 1..22: mol_type = other DNA
ctcccacaagcattatgtctgt

SEQ ID NO: 98242 - DNA, 22 bp, synthetic construct
  misc_feature 1..22: note = chemically synthesized
  source 1..22: mol_type = other DNA
tcccacaagcattatgtctgtc

SEQ ID NO: 98243 - DNA, 22 bp, synthetic construct
  misc_feature 1..22: note = chemically synthesized
  source 1..22: mol_type = other DNA
ccacaagcattatgtctgtctg

SEQ ID NO: 98244 - DNA, 22 bp, synthetic construct
  misc_feature 1..22: note = chemically synthesized
  source 1..22: mol_type = other DNA
tgtctgtctgtcattgtttttc

SEQ ID NO: 98245 - DNA, 22 bp, synthetic construct
  misc_feature 1..22: note = chemically synthesized
  source 1..22: mol_type = other DNA
tctgtcattgtttttcatcctc

SEQ ID NO: 98246 - DNA, 22 bp, synthetic construct
  misc_feature 1..22: note = chemically synthesized
  source 1..22: mol_type = other DNA
tcattgtttttcatcctcttgt

SEQ ID NO: 98247 - DNA, 22 bp, synthetic construct
  misc_feature 1..22: note = chemically synthesized
  source 1..22: mol_type = other DNA
tttttcatcctcttgtagtcct

SEQ ID NO: 98248 - DNA, 22 bp, synthetic construct
  misc_feature 1..22: note = chemically synthesized
  source 1..22: mol_type = other DNA
ttcatcctcttgtagtccttca

SEQ ID NO: 98249 - DNA, 22 bp, synthetic construct
  misc_feature 1..22: note = chemically synthesized
  source 1..22: mol_type = other DNA
tcatcctcttgtagtccttcac

SEQ ID NO: 98250 - DNA, 22 bp, synthetic construct
  misc_feature 1..22: note = chemically synthesized
  source 1..22: mol_type = other DNA
catcctcttgtagtccttcaca

SEQ ID NO: 98251 - DNA, 22 bp, synthetic construct
  misc_feature 1..22: note = chemically synthesized
  source 1..22: mol_type = other DNA
atcctcttgtagtccttcacag

SEQ ID NO: 98252 - DNA, 22 bp, synthetic construct
  misc_feature 1..22: note = chemically synthesized
  source 1..22: mol_type = other DNA
ttgtagtccttcacagttaccc

SEQ ID NO: 98253 - DNA, 22 bp, synthetic construct
  misc_feature 1..22: note = chemically synthesized
  source 1..22: mol_type = other DNA
gtagtccttcacagttacccac

SEQ ID NO: 98254 - DNA, 22 bp, synthetic construct
  misc_feature 1..22: note = chemically synthesized
  source 1..22: mol_type = other DNA
tagtccttcacagttacccaca

SEQ ID NO: 98255 - DNA, 22 bp, synthetic construct
  misc_feature 1..22: note = chemically synthesized
  source 1..22: mol_type = other DNA
cacagttacccacacaggtgaa

SEQ ID NO: 98256 - DNA, 22 bp, synthetic construct
  misc_feature 1..22: note = chemically synthesized
  source 1..22: mol_type = other DNA
acagttacccacacaggtgaac

SEQ ID NO: 98257 - DNA, 22 bp, synthetic construct
  misc_feature 1..22: note = chemically synthesized
  source 1..22: mol_type = other DNA
cccacacaggtgaaccctttta

SEQ ID NO: 98258 - DNA, 22 bp, synthetic construct
  misc_feature 1..22: note = chemically synthesized
  source 1..22: mol_type = other DNA
ttagctctcctggaggaatgtt

SEQ ID NO: 98259 - DNA, 22 bp, synthetic construct
  misc_feature 1..22: note = chemically synthesized
  source 1..22: mol_type = other DNA
tagctctcctggaggaatgttt

SEQ ID NO: 98260 - DNA, 22 bp, synthetic construct
  misc_feature 1..22: note = chemically synthesized
  source 1..22: mol_type = other DNA
agctctcctggaggaatgtttc

SEQ ID NO: 98261 - DNA, 22 bp, synthetic construct
  misc_feature 1..22: note = chemically synthesized
  source 1..22: mol_type = other DNA
gctctcctggaggaatgtttct

SEQ ID NO: 98262 - DNA, 22 bp, synthetic construct
  misc_feature 1..22: note = chemically synthesized
  source 1..22: mol_type = other DNA
tcctggaggaatgtttctttcc

SEQ ID NO: 98263 - DNA, 22 bp, synthetic construct
  misc_feature 1..22: note = chemically synthesized
  source 1..22: mol_type = other DNA
ctggaggaatgtttctttcctc

SEQ ID NO: 98264 - DNA, 22 bp, synthetic construct
  misc_feature 1..22: note = chemically synthesized
  source 1..22: mol_type = other DNA
gaggaatgtttctttcctctca

SEQ ID NO: 98265 - DNA, 22 bp, synthetic construct
  misc_feature 1..22: note = chemically synthesized
  source 1..22: mol_type = other DNA
ctttcctctcaggatcagagtt

SEQ ID NO: 98266 - DNA, 22 bp, synthetic construct
  misc_feature 1..22: note = chemically synthesized
  source 1..22: mol_type = other DNA
tttcctctcaggatcagagttg

SEQ ID NO: 98267 - DNA, 22 bp, synthetic construct
  misc_feature 1..22: note = chemically synthesized
  source 1..22: mol_type = other DNA
tcctctcaggatcagagttgcc

SEQ ID NO: 98268 - DNA, 22 bp, synthetic construct
  misc_feature 1..22: note = chemically synthesized
  source 1..22: mol_type = other DNA
cctctcaggatcagagttgcct

SEQ ID NO: 98269 - DNA, 22 bp, synthetic construct
  misc_feature 1..22: note = chemically synthesized
  source 1..22: mol_type = other DNA
ctctcaggatcagagttgccta

SEQ ID NO: 98270 - DNA, 22 bp, synthetic construct
  misc_feature 1..22: note = chemically synthesized
  source 1..22: mol_type = other DNA
tcaggatcagagttgcctacat

SEQ ID NO: 98271 - DNA, 22 bp, synthetic construct
  misc_feature 1..22: note = chemically synthesized
  source 1..22: mol_type = other DNA
aggatcagagttgcctacatct

SEQ ID NO: 98272 - DNA, 22 bp, synthetic construct
  misc_feature 1..22: note = chemically synthesized
  source 1..22: mol_type = other DNA
cctacatcttcctaatgcacca

SEQ ID NO: 98273 - DNA, 22 bp, synthetic construct
  misc_feature 1..22: note = chemically synthesized
  source 1..22: mol_type = other DNA
catcttcctaatgcaccaagac

SEQ ID NO: 98274 - DNA, 22 bp, synthetic construct
  misc_feature 1..22: note = chemically synthesized
  source 1..22: mol_type = other DNA
cctaatgcaccaagactggcct

SEQ ID NO: 98275 - DNA, 22 bp, synthetic construct
  misc_feature 1..22: note = chemically synthesized
  source 1..22: mol_type = other DNA
ctaatgcaccaagactggcctg

SEQ ID NO: 98276 - DNA, 22 bp, synthetic construct
  misc_feature 1..22: note = chemically synthesized
  source 1..22: mol_type = other DNA
atgcaccaagactggcctgaga

SEQ ID NO: 98277 - DNA, 22 bp, synthetic construct
  misc_feature 1..22: note = chemically synthesized
  source 1..22: mol_type = other DNA
gcctgagatgtatccttaagat

SEQ ID NO: 98278 - DNA, 22 bp, synthetic construct
  misc_feature 1..22: note = chemically synthesized
  source 1..22: mol_type = other DNA
agatgtatccttaagatgagag

SEQ ID NO: 98279 - DNA, 22 bp, synthetic construct
  misc_feature 1..22: note = chemically synthesized
  source 1..22: mol_type = other DNA
aagatgagagcttcccagtagc

SEQ ID NO: 98280 - DNA, 22 bp, synthetic construct
  misc_feature 1..22: note = chemically synthesized
  source 1..22: mol_type = other DNA
agatgagagcttcccagtagca

SEQ ID NO: 98281 - DNA, 22 bp, synthetic construct
  misc_feature 1..22: note = chemically synthesized
  source 1..22: mol_type = other DNA
cccagtagcaccccaagtcaga

SEQ ID NO: 98282 - DNA, 22 bp, synthetic construct
  misc_feature 1..22: note = chemically synthesized
  source 1..22: mol_type = other DNA
ccagtagcaccccaagtcagat

SEQ ID NO: 98283 - DNA, 22 bp, synthetic construct
  misc_feature 1..22: note = chemically synthesized
  source 1..22: mol_type = other DNA
accccgtatgtgagcatgtgtc

SEQ ID NO: 98284 - DNA, 22 bp, synthetic construct
  misc_feature 1..22: note = chemically synthesized
  source 1..22: mol_type = other DNA
taacagcacaggccttttgcca

SEQ ID NO: 98285 - DNA, 22 bp, synthetic construct
  misc_feature 1..22: note = chemically synthesized
  source 1..22: mol_type = other DNA
acagcacaggccttttgccacc

SEQ ID NO: 98286 - DNA, 22 bp, synthetic construct
  misc_feature 1..22: note = chemically synthesized
  source 1..22: mol_type = other DNA
ttgccacctagctgtccagggg

SEQ ID NO: 98287 - DNA, 22 bp, synthetic construct
  misc_feature 1..22: note = chemically synthesized
  source 1..22: mol_type = other DNA
tgccacctagctgtccaggggt

SEQ ID NO: 98288 - DNA, 22 bp, synthetic construct
  misc_feature 1..22: note = chemically synthesized
  source 1..22: mol_type = other DNA
gccacctagctgtccaggggtg

SEQ ID NO: 98289 - DNA, 22 bp, synthetic construct
  misc_feature 1..22: note = chemically synthesized
  source 1..22: mol_type = other DNA
ccacctagctgtccaggggtgc

SEQ ID NO: 98290 - DNA, 22 bp, synthetic construct
  misc_feature 1..22: note = chemically synthesized
  source 1..22: mol_type = other DNA
gctgtccaggggtgccttaaaa

SEQ ID NO: 98291 - DNA, 22 bp, synthetic construct
  misc_feature 1..22: note = chemically synthesized
  source 1..22: mol_type = other DNA
tccaggggtgccttaaaatggc

SEQ ID NO: 98292 - DNA, 22 bp, synthetic construct
  misc_feature 1..22: note = chemically synthesized
  source 1..22: mol_type = other DNA
aaaatggcaaacaaggtttgtt

SEQ ID NO: 98293 - DNA, 22 bp, synthetic construct
  misc_feature 1..22: note = chemically synthesized
  source 1..22: mol_type = other DNA
aaatggcaaacaaggtttgttt

SEQ ID NO: 98294 - DNA, 22 bp, synthetic construct
  misc_feature 1..22: note = chemically synthesized
  source 1..22: mol_type = other DNA
gttttcttttcctgttttcatg

SEQ ID NO: 98295 - DNA, 22 bp, synthetic construct
  misc_feature 1..22: note = chemically synthesized
  source 1..22: mol_type = other DNA
ttttcttttcctgttttcatgc

SEQ ID NO: 98296 - DNA, 22 bp, synthetic construct
  misc_feature 1..22: note = chemically synthesized
  source 1..22: mol_type = other DNA
tcttttcctgttttcatgcctt

SEQ ID NO: 98297 - DNA, 22 bp, synthetic construct
  misc_feature 1..22: note = chemically synthesized
  source 1..22: mol_type = other DNA
cttttcctgttttcatgccttc

SEQ ID NO: 98298 - DNA, 22 bp, synthetic construct
  misc_feature 1..22: note = chemically synthesized
  source 1..22: mol_type = other DNA
ttttcctgttttcatgccttcc

SEQ ID NO: 98299 - DNA, 22 bp, synthetic construct
  misc_feature 1..22: note = chemically synthesized
  source 1..22: mol_type = other DNA
ttcctgttttcatgccttcctc

SEQ ID NO: 98300 - DNA, 22 bp, synthetic construct
  misc_feature 1..22: note = chemically synthesized
  source 1..22: mol_type = other DNA
tcctgttttcatgccttcctct

SEQ ID NO: 98301 - DNA, 22 bp, synthetic construct
  misc_feature 1..22: note = chemically synthesized
  source 1..22: mol_type = other DNA
cctgttttcatgccttcctctt

SEQ ID NO: 98302 - DNA, 22 bp, synthetic construct
  misc_feature 1..22: note = chemically synthesized
  source 1..22: mol_type = other DNA
ctgttttcatgccttcctcttc

SEQ ID NO: 98303 - DNA, 22 bp, synthetic construct
  misc_feature 1..22: note = chemically synthesized
  source 1..22: mol_type = other DNA
ttttcatgccttcctcttccat

SEQ ID NO: 98304 - DNA, 22 bp, synthetic construct
  misc_feature 1..22: note = chemically synthesized
  source 1..22: mol_type = other DNA
tcatgccttcctcttccatatc

SEQ ID NO: 98305 - DNA, 22 bp, synthetic construct
  misc_feature 1..22: note = chemically synthesized
  source 1..22: mol_type = other DNA
catgccttcctcttccatatcc

SEQ ID NO: 98306 - DNA, 22 bp, synthetic construct
  misc_feature 1..22: note = chemically synthesized
  source 1..22: mol_type = other DNA
atgccttcctcttccatatcct

SEQ ID NO: 98307 - DNA, 22 bp, synthetic construct
  misc_feature 1..22: note = chemically synthesized
  source 1..22: mol_type = other DNA
cctcttccatatccttgtttca

SEQ ID NO: 98308 - DNA, 22 bp, synthetic construct
  misc_feature 1..22: note = chemically synthesized
  source 1..22: mol_type = other DNA
ctcttccatatccttgtttcat

SEQ ID NO: 98309 - DNA, 22 bp, synthetic construct
  misc_feature 1..22: note = chemically synthesized
  source 1..22: mol_type = other DNA
ttccatatccttgtttcatatt

SEQ ID NO: 98310 - DNA, 22 bp, synthetic construct
  misc_feature 1..22: note = chemically synthesized
  source 1..22: mol_type = other DNA
ccatatccttgtttcatattaa

SEQ ID NO: 98311 - DNA, 22 bp, synthetic construct
  misc_feature 1..22: note = chemically synthesized
  source 1..22: mol_type = other DNA
catatccttgtttcatattaat

SEQ ID NO: 98312 - DNA, 22 bp, synthetic construct
  misc_feature 1..22: note = chemically synthesized
  source 1..22: mol_type = other DNA
gtttcatattaatacatgtgta

SEQ ID NO: 98313 - DNA, 22 bp, synthetic construct
  misc_feature 1..22: note = chemically synthesized
  source 1..22: mol_type = other DNA
tttcatattaatacatgtgtat

SEQ ID NO: 98314 - DNA, 22 bp, synthetic construct
  misc_feature 1..22: note = chemically synthesized
  source 1..22: mol_type = other DNA
catattaatacatgtgtataga

SEQ ID NO: 98315 - DNA, 22 bp, synthetic construct
  misc_feature 1..22: note = chemically synthesized
  source 1..22: mol_type = other DNA
atattaatacatgtgtatagat

SEQ ID NO: 98316 - DNA, 22 bp, synthetic construct
  misc_feature 1..22: note = chemically synthesized
  source 1..22: mol_type = other DNA
atacatgtgtatagatcctaaa

SEQ ID NO: 98317 - DNA, 22 bp, synthetic construct
  misc_feature 1..22: note = chemically synthesized
  source 1..22: mol_type = other DNA
aaaatctatacacatgtattaa

SEQ ID NO: 98318 - DNA, 22 bp, synthetic construct
  misc_feature 1..22: note = chemically synthesized
  source 1..22: mol_type = other DNA
tacacatgtattaataaagcct

SEQ ID NO: 98319 - DNA, 22 bp, synthetic construct
  misc_feature 1..22: note = chemically synthesized
  source 1..22: mol_type = other DNA
ataaagcctgattctgccgctt

SEQ ID NO: 98320 - DNA, 22 bp, synthetic construct
  misc_feature 1..22: note = chemically synthesized
  source 1..22: mol_type = other DNA
attctgccgcttctaggtatag

SEQ ID NO: 98321 - DNA, 22 bp, synthetic construct
  misc_feature 1..22: note = chemically synthesized
  source 1..22: mol_type = other DNA
tgccgcttctaggtatagaggc

SEQ ID NO: 98322 - DNA, 22 bp, synthetic construct
  misc_feature 1..22: note = chemically synthesized
  source 1..22: mol_type = other DNA
ccgcttctaggtatagaggcca

SEQ ID NO: 98323 - DNA, 22 bp, synthetic construct
  misc_feature 1..22: note = chemically synthesized
  source 1..22: mol_type = other DNA
ctaggtatagaggccacctgca

SEQ ID NO: 98324 - DNA, 22 bp, synthetic construct
  misc_feature 1..22: note = chemically synthesized
  source 1..22: mol_type = other DNA
taggtatagaggccacctgcaa

SEQ ID NO: 98325 - DNA, 22 bp, synthetic construct
  misc_feature 1..22: note = chemically synthesized
  source 1..22: mol_type = other DNA
ggtatagaggccacctgcaaga

SEQ ID NO: 98326 - DNA, 22 bp, synthetic construct
  misc_feature 1..22: note = chemically synthesized
  source 1..22: mol_type = other DNA
caagataaatatttgattcaca

SEQ ID NO: 98327 - DNA, 22 bp, synthetic construct
  misc_feature 1..22: note = chemically synthesized
  source 1..22: mol_type = other DNA
gattcacaataactaatcattc

SEQ ID NO: 98328 - DNA, 22 bp, synthetic construct
  misc_feature 1..22: note = chemically synthesized
  source 1..22: mol_type = other DNA
attcacaataactaatcattct

SEQ ID NO: 98329 - DNA, 22 bp, synthetic construct
  misc_feature 1..22: note = chemically synthesized
  source 1..22: mol_type = other DNA
acaataactaatcattctatgg

SEQ ID NO: 98330 - DNA, 22 bp, synthetic construct
  misc_feature 1..22: note = chemically synthesized
  source 1..22: mol_type = other DNA
atcattctatggcaattgataa

SEQ ID NO: 98331 - DNA, 22 bp, synthetic construct
  misc_feature 1..22: note = chemically synthesized
  source 1..22: mol_type = other DNA
tatggcaattgataacaacaaa

SEQ ID NO: 98332 - DNA, 22 bp, synthetic construct
  misc_feature 1..22: note = chemically synthesized
  source 1..22: mol_type = other DNA
tggcaattgataacaacaaata

SEQ ID NO: 98333 - DNA, 22 bp, synthetic construct
  misc_feature 1..22: note = chemically synthesized
  source 1..22: mol_type = other DNA
ataacaacaaatatatatatat

SEQ ID NO: 98334 - DNA, 22 bp, synthetic construct
  misc_feature 1..22: note = chemically synthesized
  source 1..22: mol_type = other DNA
aggaaataatatattctagaat

SEQ ID NO: 98335 - DNA, 22 bp, synthetic construct
  misc_feature 1..22: note = chemically synthesized
  source 1..22: mol_type = other DNA
tagaatatgtcacattctgtct

SEQ ID NO: 98336 - DNA, 22 bp, synthetic construct
  misc_feature 1..22: note = chemically synthesized
  source 1..22: mol_type = other DNA
gaatatgtcacattctgtctca

SEQ ID NO: 98337 - DNA, 22 bp, synthetic construct
  misc_feature 1..22: note = chemically synthesized
  source 1..22: mol_type = other DNA
tgtctcaggcatccattttctt

SEQ ID NO: 98338 - DNA, 22 bp, synthetic construct
  misc_feature 1..22: note = chemically synthesized
  source 1..22: mol_type = other DNA
tctcaggcatccattttcttta

SEQ ID NO: 98339 - DNA, 22 bp, synthetic construct
  misc_feature 1..22: note = chemically synthesized
  source 1..22: mol_type = other DNA
aggcatccattttctttatgat

SEQ ID NO: 98340 - DNA, 22 bp, synthetic construct
  misc_feature 1..22: note = chemically synthesized
  source 1..22: mol_type = other DNA
tctttatgatgccgtttgaggt

SEQ ID NO: 98341 - DNA, 22 bp, synthetic construct
  misc_feature 1..22: note = chemically synthesized
  source 1..22: mol_type = other DNA
ctttatgatgccgtttgaggtg

SEQ ID NO: 98342 - DNA, 22 bp, synthetic construct
  misc_feature 1..22: note = chemically synthesized
  source 1..22: mol_type = other DNA
tttatgatgccgtttgaggtgg

SEQ ID NO: 98343 - DNA, 22 bp, synthetic construct
  misc_feature 1..22: note = chemically synthesized
  source 1..22: mol_type = other DNA
tatgatgccgtttgaggtggag

SEQ ID NO: 98344 - DNA, 22 bp, synthetic construct
  misc_feature 1..22: note = chemically synthesized
  source 1..22: mol_type = other DNA
atgatgccgtttgaggtggagt

SEQ ID NO: 98345 - DNA, 22 bp, synthetic construct
  misc_feature 1..22: note = chemically synthesized
  source 1..22: mol_type = other DNA
tgatgccgtttgaggtggagtt

SEQ ID NO: 98346 - DNA, 22 bp, synthetic construct
  misc_feature 1..22: note = chemically synthesized
  source 1..22: mol_type = other DNA
gaggtggagttttagtcaggtg

SEQ ID NO: 98347 - DNA, 22 bp, synthetic construct
  misc_feature 1..22: note = chemically synthesized
  source 1..22: mol_type = other DNA
aggtggagttttagtcaggtgg

SEQ ID NO: 98348 - DNA, 22 bp, synthetic construct
  misc_feature 1..22: note = chemically synthesized
  source 1..22: mol_type = other DNA
tagtcaggtggtcagcttctcc

SEQ ID NO: 98349 - DNA, 22 bp, synthetic construct
  misc_feature 1..22: note = chemically synthesized
  source 1..22: mol_type = other DNA
agtcaggtggtcagcttctcct

SEQ ID NO: 98350 - DNA, 22 bp, synthetic construct
  misc_feature 1..22: note = chemically synthesized
  source 1..22: mol_type = other DNA
gtcaggtggtcagcttctcctt

SEQ ID NO: 98351 - DNA, 22 bp, synthetic construct
  misc_feature 1..22: note = chemically synthesized
  source 1..22: mol_type = other DNA
ctccttttttttgccatctgcc

SEQ ID NO: 98352 - DNA, 22 bp, synthetic construct
  misc_feature 1..22: note = chemically synthesized
  source 1..22: mol_type = other DNA
tccttttttttgccatctgccc

SEQ ID NO: 98353 - DNA, 22 bp, synthetic construct
  misc_feature 1..22: note = chemically synthesized
  source 1..22: mol_type = other DNA
cttttttttgccatctgccctg

SEQ ID NO: 98354 - DNA, 22 bp, synthetic construct
  misc_feature 1..22: note = chemically synthesized
  source 1..22: mol_type = other DNA
ttttttgccatctgccctgtaa

SEQ ID NO: 98355 - DNA, 22 bp, synthetic construct
  misc_feature 1..22: note = chemically synthesized
  source 1..22: mol_type = other DNA
tttttgccatctgccctgtaag

SEQ ID NO: 98356 - DNA, 22 bp, synthetic construct
  misc_feature 1..22: note = chemically synthesized
  source 1..22: mol_type = other DNA
ttttgccatctgccctgtaagc

SEQ ID NO: 98357 - DNA, 22 bp, synthetic construct
  misc_feature 1..22: note = chemically synthesized
  source 1..22: mol_type = other DNA
tttgccatctgccctgtaagca

SEQ ID NO: 98358 - DNA, 22 bp, synthetic construct
  misc_feature 1..22: note = chemically synthesized
  source 1..22: mol_type = other DNA
ttgccatctgccctgtaagcat

SEQ ID NO: 98359 - DNA, 22 bp, synthetic construct
  misc_feature 1..22: note = chemically synthesized
  source 1..22: mol_type = other DNA
tgccatctgccctgtaagcatc

SEQ ID NO: 98360 - DNA, 22 bp, synthetic construct
  misc_feature 1..22: note = chemically synthesized
  source 1..22: mol_type = other DNA
gccatctgccctgtaagcatcc

SEQ ID NO: 98361 - DNA, 22 bp, synthetic construct
  misc_feature 1..22: note = chemically synthesized
  source 1..22: mol_type = other DNA
ccatctgccctgtaagcatcct

SEQ ID NO: 98362 - DNA, 22 bp, synthetic construct
  misc_feature 1..22: note = chemically synthesized
  source 1..22: mol_type = other DNA
ccctgtaagcatcctgctgggg

SEQ ID NO: 98363 - DNA, 22 bp, synthetic construct
  misc_feature 1..22: note = chemically synthesized
  source 1..22: mol_type = other DNA
taagcatcctgctggggaccca

SEQ ID NO: 98364 - DNA, 22 bp, synthetic construct
  misc_feature 1..22: note = chemically synthesized
  source 1..22: mol_type = other DNA
ctggggacccagataggagtca

SEQ ID NO: 98365 - DNA, 22 bp, synthetic construct
  misc_feature 1..22: note = chemically synthesized
  source 1..22: mol_type = other DNA
gggacccagataggagtcatca

SEQ ID NO: 98366 - DNA, 22 bp, synthetic construct
  misc_feature 1..22: note = chemically synthesized
  source 1..22: mol_type = other DNA
taggctgagaacatctgggcac

SEQ ID NO: 98367 - DNA, 22 bp, synthetic construct
  misc_feature 1..22: note = chemically synthesized
  source 1..22: mol_type = other DNA
ggctgagaacatctgggcacac

SEQ ID NO: 98368 - DNA, 22 bp, synthetic construct
  misc_feature 1..22: note = chemically synthesized
  source 1..22: mol_type = other DNA
agaacatctgggcacacaccct

SEQ ID NO: 98369 - DNA, 22 bp, synthetic construct
  misc_feature 1..22: note = chemically synthesized
  source 1..22: mol_type = other DNA
ggcacacaccctaagcctcagc

SEQ ID NO: 98370 - DNA, 22 bp, synthetic construct
  misc_feature 1..22: note = chemically synthesized
  source 1..22: mol_type = other DNA
agcctcagcatgactcatcatg

SEQ ID NO: 98371 - DNA, 22 bp, synthetic construct
  misc_feature 1..22: note = chemically synthesized
  source 1..22: mol_type = other DNA
agcatgactcatcatgactcag

SEQ ID NO: 98372 - DNA, 22 bp, synthetic construct
  misc_feature 1..22: note = chemically synthesized
  source 1..22: mol_type = other DNA
atcatgactcagcattgctgtg

SEQ ID NO: 98373 - DNA, 22 bp, synthetic construct
  misc_feature 1..22: note = chemically synthesized
  source 1..22: mol_type = other DNA
agcattgctgtgcttgagccag

SEQ ID NO: 98374 - DNA, 22 bp, synthetic construct
  misc_feature 1..22: note = chemically synthesized
  source 1..22: mol_type = other DNA
ctgtgcttgagccagaaggttt

SEQ ID NO: 98375 - DNA, 22 bp, synthetic construct
  misc_feature 1..22: note = chemically synthesized
  source 1..22: mol_type = other DNA
tgcttgagccagaaggtttgct

SEQ ID NO: 98376 - DNA, 22 bp, synthetic construct
  misc_feature 1..22: note = chemically synthesized
  source 1..22: mol_type = other DNA
gagccagaaggtttgcttagaa

SEQ ID NO: 98377 - DNA, 22 bp, synthetic construct
  misc_feature 1..22: note = chemically synthesized
  source 1..22: mol_type = other DNA
agccagaaggtttgcttagaag

SEQ ID NO: 98378 - DNA, 22 bp, synthetic construct
  misc_feature 1..22: note = chemically synthesized
  source 1..22: mol_type = other DNA
gcttagaaggttacacagaacc

SEQ ID NO: 98379 - DNA, 22 bp, synthetic construct
  misc_feature 1..22: note = chemically synthesized
  source 1..22: mol_type = other DNA
cttagaaggttacacagaacca

SEQ ID NO: 98380 - DNA, 22 bp, synthetic construct
  misc_feature 1..22: note = chemically synthesized
  source 1..22: mol_type = other DNA
agaaggttacacagaaccagaa

SEQ ID NO: 98381 - DNA, 22 bp, synthetic construct
  misc_feature 1..22: note = chemically synthesized
  source 1..22: mol_type = other DNA
gaaggttacacagaaccagaag

SEQ ID NO: 98382 - DNA, 22 bp, synthetic construct
  misc_feature 1..22: note = chemically synthesized
  source 1..22: mol_type = other DNA
cacagaaccagaaggcgggggt

SEQ ID NO: 98383 - DNA, 22 bp, synthetic construct
  misc_feature 1..22: note = chemically synthesized
  source 1..22: mol_type = other DNA
accccgacaggggcctggccag

SEQ ID NO: 98384 - DNA, 22 bp, synthetic construct
  misc_feature 1..22: note = chemically synthesized
  source 1..22: mol_type = other DNA
gccagaactgctcatgcttgga

SEQ ID NO: 98385 - DNA, 22 bp, synthetic construct
  misc_feature 1..22: note = chemically synthesized
  source 1..22: mol_type = other DNA
ctcatgcttggactatgggagg

SEQ ID NO: 98386 - DNA, 22 bp, synthetic construct
  misc_feature 1..22: note = chemically synthesized
  source 1..22: mol_type = other DNA
atgcttggactatgggaggtca

SEQ ID NO: 98387 - DNA, 22 bp, synthetic construct
  misc_feature 1..22: note = chemically synthesized
  source 1..22: mol_type = other DNA
ggactatgggaggtcactaatg

SEQ ID NO: 98388 - DNA, 22 bp, synthetic construct
  misc_feature 1..22: note = chemically synthesized
  source 1..22: mol_type = other DNA
gactatgggaggtcactaatgg

SEQ ID NO: 98389 - DNA, 22 bp, synthetic construct
  misc_feature 1..22: note = chemically synthesized
  source 1..22: mol_type = other DNA
tgggaggtcactaatggagaca

SEQ ID NO: 98390 - DNA, 22 bp, synthetic construct
  misc_feature 1..22: note = chemically synthesized
  source 1..22: mol_type = other DNA
atggagacacacagaaatgtaa

SEQ ID NO: 98391 - DNA, 22 bp, synthetic construct
  misc_feature 1..22: note = chemically synthesized
  source 1..22: mol_type = other DNA
aggaaaaactgaagcttattta

SEQ ID NO: 98392 - DNA, 22 bp, synthetic construct
  misc_feature 1..22: note = chemically synthesized
  source 1..22: mol_type = other DNA
aagcttatttaatcagagatga

SEQ ID NO: 98393 - DNA, 22 bp, synthetic construct
  misc_feature 1..22: note = chemically synthesized
  source 1..22: mol_type = other DNA
atttaatcagagatgaggatgc

SEQ ID NO: 98394 - DNA, 22 bp, synthetic construct
  misc_feature 1..22: note = chemically synthesized
  source 1..22: mol_type = other DNA
tttaatcagagatgaggatgct

SEQ ID NO: 98395 - DNA, 22 bp, synthetic construct
  misc_feature 1..22: note = chemically synthesized
  source 1..22: mol_type = other DNA
aatcagagatgaggatgctgga

SEQ ID NO: 98396 - DNA, 22 bp, synthetic construct
  misc_feature 1..22: note = chemically synthesized
  source 1..22: mol_type = other DNA
atcagagatgaggatgctggaa

SEQ ID NO: 98397 - DNA, 22 bp, synthetic construct
  misc_feature 1..22: note = chemically synthesized
  source 1..22: mol_type = other DNA
gaagggatagagggagctgagc

SEQ ID NO: 98398 - DNA, 22 bp, synthetic construct
  misc_feature 1..22: note = chemically synthesized
  source 1..22: mol_type = other DNA
agcttgtaaaaagtatagtaat

SEQ ID NO: 98399 - DNA, 22 bp, synthetic construct
  misc_feature 1..22: note = chemically synthesized
  source 1..22: mol_type = other DNA
gtaaaaagtatagtaatcattc

SEQ ID NO: 98400 - DNA, 22 bp, synthetic construct
  misc_feature 1..22: note = chemically synthesized
  source 1..22: mol_type = other DNA
taaaaagtatagtaatcattca

SEQ ID NO: 98401 - DNA, 22 bp, synthetic construct
  misc_feature 1..22: note = chemically synthesized
  source 1..22: mol_type = other DNA
agcaaatggttttgaagcacct

SEQ ID NO: 98402 - DNA, 22 bp, synthetic construct
  misc_feature 1..22: note = chemically synthesized
  source 1..22: mol_type = other DNA
tgaagcacctgctggatgctaa

SEQ ID NO: 98403 - DNA, 22 bp, synthetic construct
  misc_feature 1..22: note = chemically synthesized
  source 1..22: mol_type = other DNA
gaagcacctgctggatgctaaa

SEQ ID NO: 98404 - DNA, 22 bp, synthetic construct
  misc_feature 1..22: note = chemically synthesized
  source 1..22: mol_type = other DNA
aagcacctgctggatgctaaac

SEQ ID NO: 98405 - DNA, 22 bp, synthetic construct
  misc_feature 1..22: note = chemically synthesized
  source 1..22: mol_type = other DNA
ctggatgctaaacactattttc

SEQ ID NO: 98406 - DNA, 22 bp, synthetic construct
  misc_feature 1..22: note = chemically synthesized
  source 1..22: mol_type = other DNA
gatgctaaacactattttcagt

SEQ ID NO: 98407 - DNA, 22 bp, synthetic construct
  misc_feature 1..22: note = chemically synthesized
  source 1..22: mol_type = other DNA
aacactattttcagtgcttgaa

SEQ ID NO: 98408 - DNA, 22 bp, synthetic construct
  misc_feature 1..22: note = chemically synthesized
  source 1..22: mol_type = other DNA
ttttcagtgcttgaatcataaa

SEQ ID NO: 98409 - DNA, 22 bp, synthetic construct
  misc_feature 1..22: note = chemically synthesized
  source 1..22: mol_type = other DNA
tcagtgcttgaatcataaataa

SEQ ID NO: 98410 - DNA, 22 bp, synthetic construct
  misc_feature 1..22: note = chemically synthesized
  source 1..22: mol_type = other DNA
cagtgcttgaatcataaataag

SEQ ID NO: 98411 - DNA, 22 bp, synthetic construct
  misc_feature 1..22: note = chemically synthesized
  source 1..22: mol_type = other DNA
agtgcttgaatcataaataaga

SEQ ID NO: 98412 - DNA, 22 bp, synthetic construct
  misc_feature 1..22: note = chemically synthesized
  source 1..22: mol_type = other DNA
gaatcataaataagaataaaac

SEQ ID NO: 98413 - DNA, 22 bp, synthetic construct
  misc_feature 1..22: note = chemically synthesized
  source 1..22: mol_type = other DNA
aatcataaataagaataaaaca

SEQ ID NO: 98414 - DNA, 22 bp, synthetic construct
  misc_feature 1..22: note = chemically synthesized
  source 1..22: mol_type = other DNA
attccccacaagagtccaagta

SEQ ID NO: 98415 - DNA, 22 bp, synthetic construct
  misc_feature 1..22: note = chemically synthesized
  source 1..22: mol_type = other DNA
ttccccacaagagtccaagtaa

SEQ ID NO: 98416 - DNA, 22 bp, synthetic construct
  misc_feature 1..22: note = chemically synthesized
  source 1..22: mol_type = other DNA
cccacaagagtccaagtaaaaa

SEQ ID NO: 98417 - DNA, 22 bp, synthetic construct
  misc_feature 1..22: note = chemically synthesized
  source 1..22: mol_type = other DNA
attataatgtgctctgtccccc

SEQ ID NO: 98418 - DNA, 22 bp, synthetic construct
  misc_feature 1..22: note = chemically synthesized
  source 1..22: mol_type = other DNA
taatgtgctctgtcccccaggc

SEQ ID NO: 98419 - DNA, 22 bp, synthetic construct
  misc_feature 1..22: note = chemically synthesized
  source 1..22: mol_type = other DNA
tgtcccccaggctggagtgcag

SEQ ID NO: 98420 - DNA, 22 bp, synthetic construct
  misc_feature 1..22: note = chemically synthesized
  source 1..22: mol_type = other DNA
tcccccaggctggagtgcagtg

SEQ ID NO: 98421 - DNA, 22 bp, synthetic construct
  misc_feature 1..22: note = chemically synthesized
  source 1..22: mol_type = other DNA
gagtgcagtggcacgatctcag

SEQ ID NO: 98422 - DNA, 22 bp, synthetic construct
  misc_feature 1..22: note = chemically synthesized
  source 1..22: mol_type = other DNA
agctcactgcaacctccgcctc

SEQ ID NO: 98423 - DNA, 22 bp, synthetic construct
  misc_feature 1..22: note = chemically synthesized
  source 1..22: mol_type = other DNA
actgcaacctccgcctcccggg

SEQ ID NO: 98424 - DNA, 22 bp, synthetic construct
  misc_feature 1..22: note = chemically synthesized
  source 1..22: mol_type = other DNA
caacctccgcctcccgggttca

SEQ ID NO: 98425 - DNA, 22 bp, synthetic construct
  misc_feature 1..22: note = chemically synthesized
  source 1..22: mol_type = other DNA
cgcctcccgggttcaagcaatt

SEQ ID NO: 98426 - DNA, 22 bp, synthetic construct
  misc_feature 1..22: note = chemically synthesized
  source 1..22: mol_type = other DNA
ccgggttcaagcaattctcctg

SEQ ID NO: 98427 - DNA, 22 bp, synthetic construct
  misc_feature 1..22: note = chemically synthesized
  source 1..22: mol_type = other DNA
aagcaattctcctgcctcagcc

SEQ ID NO: 98428 - DNA, 22 bp, synthetic construct
  misc_feature 1..22: note = chemically synthesized
  source 1..22: mol_type = other DNA
tcctgcctcagccaccctaata

SEQ ID NO: 98429 - DNA, 22 bp, synthetic construct
  misc_feature 1..22: note = chemically synthesized
  source 1..22: mol_type = other DNA
ctgcctcagccaccctaatagc

SEQ ID NO: 98430 - DNA, 22 bp, synthetic construct
  misc_feature 1..22: note = chemically synthesized
  source 1..22: mol_type = other DNA
cctcagccaccctaatagctgg

SEQ ID NO: 98431 - DNA, 22 bp, synthetic construct
  misc_feature 1..22: note = chemically synthesized
  source 1..22: mol_type = other DNA
agccaccctaatagctgggatt

SEQ ID NO: 98432 - DNA, 22 bp, synthetic construct
  misc_feature 1..22: note = chemically synthesized
  source 1..22: mol_type = other DNA
atagctgggattacaggtgcac

SEQ ID NO: 98433 - DNA, 22 bp, synthetic construct
  misc_feature 1..22: note = chemically synthesized
  source 1..22: mol_type = other DNA
ggattacaggtgcacaccacca

SEQ ID NO: 98434 - DNA, 22 bp, synthetic construct
  misc_feature 1..22: note = chemically synthesized
  source 1..22: mol_type = other DNA
caggtgcacaccaccatgccag

SEQ ID NO: 98435 - DNA, 22 bp, synthetic construct
  misc_feature 1..22: note = chemically synthesized
  source 1..22: mol_type = other DNA
atttttgtactttttgtagagg

SEQ ID NO: 98436 - DNA, 22 bp, synthetic construct
  misc_feature 1..22: note = chemically synthesized
  source 1..22: mol_type = other DNA
ttgtactttttgtagaggcagg

SEQ ID NO: 98437 - DNA, 22 bp, synthetic construct
  misc_feature 1..22: note = chemically synthesized
  source 1..22: mol_type = other DNA
tgtactttttgtagaggcaggg

SEQ ID NO: 98438 - DNA, 22 bp, synthetic construct
  misc_feature 1..22: note = chemically synthesized
  source 1..22: mol_type = other DNA
gtactttttgtagaggcagggt

SEQ ID NO: 98439 - DNA, 22 bp, synthetic construct
  misc_feature 1..22: note = chemically synthesized
  source 1..22: mol_type = other DNA
tactttttgtagaggcagggta

SEQ ID NO: 98440 - DNA, 22 bp, synthetic construct
  misc_feature 1..22: note = chemically synthesized
  source 1..22: mol_type = other DNA
tttgtagaggcagggtatcacc

SEQ ID NO: 98441 - DNA, 22 bp, synthetic construct
  misc_feature 1..22: note = chemically synthesized
  source 1..22: mol_type = other DNA
ttgtagaggcagggtatcacca

SEQ ID NO: 98442 - DNA, 22 bp, synthetic construct
  misc_feature 1..22: note = chemically synthesized
  source 1..22: mol_type = other DNA
tgtagaggcagggtatcaccat

SEQ ID NO: 98443 - DNA, 22 bp, synthetic construct
  misc_feature 1..22: note = chemically synthesized
  source 1..22: mol_type = other DNA
gtagaggcagggtatcaccatg

SEQ ID NO: 98444 - DNA, 22 bp, synthetic construct
  misc_feature 1..22: note = chemically synthesized
  source 1..22: mol_type = other DNA
tagaggcagggtatcaccatgt

SEQ ID NO: 98445 - DNA, 22 bp, synthetic construct
  misc_feature 1..22: note = chemically synthesized
  source 1..22: mol_type = other DNA
tccaagatggtcttgaactcct

SEQ ID NO: 98446 - DNA, 22 bp, synthetic construct
  misc_feature 1..22: note = chemically synthesized
  source 1..22: mol_type = other DNA
gaactcctgagctccaagcagt

SEQ ID NO: 98447 - DNA, 22 bp, synthetic construct
  misc_feature 1..22: note = chemically synthesized
  source 1..22: mol_type = other DNA
aactcctgagctccaagcagtc

SEQ ID NO: 98448 - DNA, 22 bp, synthetic construct
  misc_feature 1..22: note = chemically synthesized
  source 1..22: mol_type = other DNA
ctgagctccaagcagtccaccc

SEQ ID NO: 98449 - DNA, 22 bp, synthetic construct
  misc_feature 1..22: note = chemically synthesized
  source 1..22: mol_type = other DNA
agctccaagcagtccacccacc

SEQ ID NO: 98450 - DNA, 22 bp, synthetic construct
  misc_feature 1..22: note = chemically synthesized
  source 1..22: mol_type = other DNA
caagcagtccacccacctcagc

SEQ ID NO: 98451 - DNA, 22 bp, synthetic construct
  misc_feature 1..22: note = chemically synthesized
  source 1..22: mol_type = other DNA
agcctcccaaagtgctgggatt

SEQ ID NO: 98452 - DNA, 22 bp, synthetic construct
  misc_feature 1..22: note = chemically synthesized
  source 1..22: mol_type = other DNA
ccaaagtgctgggattacaggt

SEQ ID NO: 98453 - DNA, 22 bp, synthetic construct
  misc_feature 1..22: note = chemically synthesized
  source 1..22: mol_type = other DNA
ggattacaggtgtgagacacca

SEQ ID NO: 98454 - DNA, 22 bp, synthetic construct
  misc_feature 1..22: note = chemically synthesized
  source 1..22: mol_type = other DNA
caggtgtgagacaccatgccca

SEQ ID NO: 98455 - DNA, 22 bp, synthetic construct
  misc_feature 1..22: note = chemically synthesized
  source 1..22: mol_type = other DNA
tccatatttaatagaggtattt

SEQ ID NO: 98456 - DNA, 22 bp, synthetic construct
  misc_feature 1..22: note = chemically synthesized
  source 1..22: mol_type = other DNA
ccatatttaatagaggtattta

SEQ ID NO: 98457 - DNA, 22 bp, synthetic construct
  misc_feature 1..22: note = chemically synthesized
  source 1..22: mol_type = other DNA
catatttaatagaggtatttat

SEQ ID NO: 98458 - DNA, 22 bp, synthetic construct
  misc_feature 1..22: note = chemically synthesized
  source 1..22: mol_type = other DNA
aatagaggtatttatgggatgg

SEQ ID NO: 98459 - DNA, 22 bp, synthetic construct
  misc_feature 1..22: note = chemically synthesized
  source 1..22: mol_type = other DNA
atagaggtatttatgggatggg

SEQ ID NO: 98460 - DNA, 22 bp, synthetic construct
  misc_feature 1..22: note = chemically synthesized
  source 1..22: mol_type = other DNA
atgggatgggggaaaagaatgt

SEQ ID NO: 98461 - DNA, 22 bp, synthetic construct
  misc_feature 1..22: note = chemically synthesized
  source 1..22: mol_type = other DNA
tgggatgggggaaaagaatgtt

SEQ ID NO: 98462 - DNA, 22 bp, synthetic construct
  misc_feature 1..22: note = chemically synthesized
  source 1..22: mol_type = other DNA
ctctcactgtggattattttag

SEQ ID NO: 98463 - DNA, 22 bp, synthetic construct
  misc_feature 1..22: note = chemically synthesized
  source 1..22: mol_type = other DNA
tctcactgtggattattttaga

SEQ ID NO: 98464 - DNA, 22 bp, synthetic construct
  misc_feature 1..22: note = chemically synthesized
  source 1..22: mol_type = other DNA
tcactgtggattattttagaga

SEQ ID NO: 98465 - DNA, 22 bp, synthetic construct
  misc_feature 1..22: note = chemically synthesized
  source 1..22: mol_type = other DNA
actgtggattattttagagagt

SEQ ID NO: 98466 - DNA, 22 bp, synthetic construct
  misc_feature 1..22: note = chemically synthesized
  source 1..22: mol_type = other DNA
tggattattttagagagtggag

SEQ ID NO: 98467 - DNA, 22 bp, synthetic construct
  misc_feature 1..22: note = chemically synthesized
  source 1..22: mol_type = other DNA
ttttagagagtggagaatggtc

SEQ ID NO: 98468 - DNA, 22 bp, synthetic construct
  misc_feature 1..22: note = chemically synthesized
  source 1..22: mol_type = other DNA
tagagagtggagaatggtcaag

SEQ ID NO: 98469 - DNA, 22 bp, synthetic construct
  misc_feature 1..22: note = chemically synthesized
  source 1..22: mol_type = other DNA
agagagtggagaatggtcaaga

SEQ ID NO: 98470 - DNA, 22 bp, synthetic construct
  misc_feature 1..22: note = chemically synthesized
  source 1..22: mol_type = other DNA
gagagtggagaatggtcaagat

SEQ ID NO: 98471 - DNA, 22 bp, synthetic construct
  misc_feature 1..22: note = chemically synthesized
  source 1..22: mol_type = other DNA
ttttaaaaattaagaaaacata

SEQ ID NO: 98472 - DNA, 22 bp, synthetic construct
  misc_feature 1..22: note = chemically synthesized
  source 1..22: mol_type = other DNA
tttaaaaattaagaaaacataa

SEQ ID NO: 98473 - DNA, 22 bp, synthetic construct
  misc_feature 1..22: note = chemically synthesized
  source 1..22: mol_type = other DNA
ttaaaaattaagaaaacataag

SEQ ID NO: 98474 - DNA, 22 bp, synthetic construct
  misc_feature 1..22: note = chemically synthesized
  source 1..22: mol_type = other DNA
taaaaattaagaaaacataagt

SEQ ID NO: 98475 - DNA, 22 bp, synthetic construct
  misc_feature 1..22: note = chemically synthesized
  source 1..22: mol_type = other DNA
aaaaattaagaaaacataagtt

SEQ ID NO: 98476 - DNA, 22 bp, synthetic construct
  misc_feature 1..22: note = chemically synthesized
  source 1..22: mol_type = other DNA
aaaattaagaaaacataagttg

SEQ ID NO: 98477 - DNA, 22 bp, synthetic construct
  misc_feature 1..22: note = chemically synthesized
  source 1..22: mol_type = other DNA
agaaaacataagttggaccttg

SEQ ID NO: 98478 - DNA, 22 bp, synthetic construct
  misc_feature 1..22: note = chemically synthesized
  source 1..22: mol_type = other DNA
gaccttgagaaatgaaaattta

SEQ ID NO: 98479 - DNA, 22 bp, synthetic construct
  misc_feature 1..22: note = chemically synthesized
  source 1..22: mol_type = other DNA
gagaaatgaaaatttatttttt

SEQ ID NO: 98480 - DNA, 22 bp, synthetic construct
  misc_feature 1..22: note = chemically synthesized
  source 1..22: mol_type = other DNA
agaaatgaaaatttattttttt

SEQ ID NO: 98481 - DNA, 22 bp, synthetic construct
  misc_feature 1..22: note = chemically synthesized
  source 1..22: mol_type = other DNA
atttttttgttggaggataccc

SEQ ID NO: 98482 - DNA, 22 bp, synthetic construct
  misc_feature 1..22: note = chemically synthesized
  source 1..22: mol_type = other DNA
tttttttgttggaggataccca

SEQ ID NO: 98483 - DNA, 22 bp, synthetic construct
  misc_feature 1..22: note = chemically synthesized
  source 1..22: mol_type = other DNA
ttttgttggaggatacccattc

SEQ ID NO: 98484 - DNA, 22 bp, synthetic construct
  misc_feature 1..22: note = chemically synthesized
  source 1..22: mol_type = other DNA
tttgttggaggatacccattct

SEQ ID NO: 98485 - DNA, 22 bp, synthetic construct
  misc_feature 1..22: note = chemically synthesized
  source 1..22: mol_type = other DNA
ttgttggaggatacccattctc

SEQ ID NO: 98486 - DNA, 22 bp, synthetic construct
  misc_feature 1..22: note = chemically synthesized
  source 1..22: mol_type = other DNA
tgttggaggatacccattctct

SEQ ID NO: 98487 - DNA, 22 bp, synthetic construct
  misc_feature 1..22: note = chemically synthesized
  source 1..22: mol_type = other DNA
gttggaggatacccattctcta

SEQ ID NO: 98488 - DNA, 22 bp, synthetic construct
  misc_feature 1..22: note = chemically synthesized
  source 1..22: mol_type = other DNA
ttggaggatacccattctctat

SEQ ID NO: 98489 - DNA, 22 bp, synthetic construct
  misc_feature 1..22: note = chemically synthesized
  source 1..22: mol_type = other DNA
gaggatacccattctctatctc

SEQ ID NO: 98490 - DNA, 22 bp, synthetic construct
  misc_feature 1..22: note = chemically synthesized
  source 1..22: mol_type = other DNA
tctatctcccatcagggcaagc

SEQ ID NO: 98491 - DNA, 22 bp, synthetic construct
  misc_feature 1..22: note = chemically synthesized
  source 1..22: mol_type = other DNA
tatctcccatcagggcaagctg

SEQ ID NO: 98492 - DNA, 22 bp, synthetic construct
  misc_feature 1..22: note = chemically synthesized
  source 1..22: mol_type = other DNA
tctcccatcagggcaagctgta

SEQ ID NO: 98493 - DNA, 22 bp, synthetic construct
  misc_feature 1..22: note = chemically synthesized
  source 1..22: mol_type = other DNA
ccatcagggcaagctgtaagga

SEQ ID NO: 98494 - DNA, 22 bp, synthetic construct
  misc_feature 1..22: note = chemically synthesized
  source 1..22: mol_type = other DNA
taaggaactggctaagacacag

SEQ ID NO: 98495 - DNA, 22 bp, synthetic construct
  misc_feature 1..22: note = chemically synthesized
  source 1..22: mol_type = other DNA
gctaagacacagtgagacagag

SEQ ID NO: 98496 - DNA, 22 bp, synthetic construct
  misc_feature 1..22: note = chemically synthesized
  source 1..22: mol_type = other DNA
agacacagtgagacagagtgac

SEQ ID NO: 98497 - DNA, 22 bp, synthetic construct
  misc_feature 1..22: note = chemically synthesized
  source 1..22: mol_type = other DNA
agtcttagaggccccactggta

SEQ ID NO: 98498 - DNA, 22 bp, synthetic construct
  misc_feature 1..22: note = chemically synthesized
  source 1..22: mol_type = other DNA
gtcttagaggccccactggtac

SEQ ID NO: 98499 - DNA, 22 bp, synthetic construct
  misc_feature 1..22: note = chemically synthesized
  source 1..22: mol_type = other DNA
agaggccccactggtacccaga

SEQ ID NO: 98500 - DNA, 22 bp, synthetic construct
  misc_feature 1..22: note = chemically synthesized
  source 1..22: mol_type = other DNA
gaggccccactggtacccagat

SEQ ID NO: 98501 - DNA, 22 bp, synthetic construct
  misc_feature 1..22: note = chemically synthesized
  source 1..22: mol_type = other DNA
gtacccagatgagaaggcacct

SEQ ID NO: 98502 - DNA, 22 bp, synthetic construct
  misc_feature 1..22: note = chemically synthesized
  source 1..22: mol_type = other DNA
catcactcatcacagtcagctc

SEQ ID NO: 98503 - DNA, 22 bp, synthetic construct
  misc_feature 1..22: note = chemically synthesized
  source 1..22: mol_type = other DNA
atcactcatcacagtcagctct

SEQ ID NO: 98504 - DNA, 22 bp, synthetic construct
  misc_feature 1..22: note = chemically synthesized
  source 1..22: mol_type = other DNA
atcacagtcagctctgcctttc

SEQ ID NO: 98505 - DNA, 22 bp, synthetic construct
  misc_feature 1..22: note = chemically synthesized
  source 1..22: mol_type = other DNA
tgcctttctcctctctcctttc

SEQ ID NO: 98506 - DNA, 22 bp, synthetic construct
  misc_feature 1..22: note = chemically synthesized
  source 1..22: mol_type = other DNA
cctttctcctctctcctttctc

SEQ ID NO: 98507 - DNA, 22 bp, synthetic construct
  misc_feature 1..22: note = chemically synthesized
  source 1..22: mol_type = other DNA
tctcctctctcctttctcatca

SEQ ID NO: 98508 - DNA, 22 bp, synthetic construct
  misc_feature 1..22: note = chemically synthesized
  source 1..22: mol_type = other DNA
ctcctctctcctttctcatcag

SEQ ID NO: 98509 - DNA, 22 bp, synthetic construct
  misc_feature 1..22: note = chemically synthesized
  source 1..22: mol_type = other DNA
tcctctctcctttctcatcaga

SEQ ID NO: 98510 - DNA, 22 bp, synthetic construct
  misc_feature 1..22: note = chemically synthesized
  source 1..22: mol_type = other DNA
ctctctcctttctcatcagaaa

SEQ ID NO: 98511 - DNA, 22 bp, synthetic construct
  misc_feature 1..22: note = chemically synthesized
  source 1..22: mol_type = other DNA
tctcctttctcatcagaaattt

SEQ ID NO: 98512 - DNA, 22 bp, synthetic construct
  misc_feature 1..22: note = chemically synthesized
  source 1..22: mol_type = other DNA
tcctttctcatcagaaatttca

SEQ ID NO: 98513 - DNA, 22 bp, synthetic construct
  misc_feature 1..22: note = chemically synthesized
  source 1..22: mol_type = other DNA
ctttctcatcagaaatttcata

SEQ ID NO: 98514 - DNA, 22 bp, synthetic construct
  misc_feature 1..22: note = chemically synthesized
  source 1..22: mol_type = other DNA
tctcatcagaaatttcataagt

SEQ ID NO: 98515 - DNA, 22 bp, synthetic construct
  misc_feature 1..22: note = chemically synthesized
  source 1..22: mol_type = other DNA
ctcatcagaaatttcataagtc

SEQ ID NO: 98516 - DNA, 22 bp, synthetic construct
  misc_feature 1..22: note = chemically synthesized
  source 1..22: mol_type = other DNA
tcatcagaaatttcataagtct

SEQ ID NO: 98517 - DNA, 22 bp, synthetic construct
  misc_feature 1..22: note = chemically synthesized
  source 1..22: mol_type = other DNA
atcagaaatttcataagtctac

SEQ ID NO: 98518 - DNA, 22 bp, synthetic construct
  misc_feature 1..22: note = chemically synthesized
  source 1..22: mol_type = other DNA
cataagtctactagggtcaggc

SEQ ID NO: 98519 - DNA, 22 bp, synthetic construct
  misc_feature 1..22: note = chemically synthesized
  source 1..22: mol_type = other DNA
ataagtctactagggtcaggca

SEQ ID NO: 98520 - DNA, 22 bp, synthetic construct
  misc_feature 1..22: note = chemically synthesized
  source 1..22: mol_type = other DNA
ctagggtcaggcagatcacata

SEQ ID NO: 98521 - DNA, 22 bp, synthetic construct
  misc_feature 1..22: note = chemically synthesized
  source 1..22: mol_type = other DNA
gggtcaggcagatcacataaga

SEQ ID NO: 98522 - DNA, 22 bp, synthetic construct
  misc_feature 1..22: note = chemically synthesized
  source 1..22: mol_type = other DNA
aggtctgcagtgagtatgagcc

SEQ ID NO: 98523 - DNA, 22 bp, synthetic construct
  misc_feature 1..22: note = chemically synthesized
  source 1..22: mol_type = other DNA
cagtgagtatgagcccatccct

SEQ ID NO: 98524 - DNA, 22 bp, synthetic construct
  misc_feature 1..22: note = chemically synthesized
  source 1..22: mol_type = other DNA
atgaattaaggcaatcaacact

SEQ ID NO: 98525 - DNA, 22 bp, synthetic construct
  misc_feature 1..22: note = chemically synthesized
  source 1..22: mol_type = other DNA
aggcaatcaacactttaggcag

SEQ ID NO: 98526 - DNA, 22 bp, synthetic construct
  misc_feature 1..22: note = chemically synthesized
  source 1..22: mol_type = other DNA
taggcagccatgttgccatgag

SEQ ID NO: 98527 - DNA, 22 bp, synthetic construct
  misc_feature 1..22: note = chemically synthesized
  source 1..22: mol_type = other DNA
aggcagccatgttgccatgaga

SEQ ID NO: 98528 - DNA, 22 bp, synthetic construct
  misc_feature 1..22: note = chemically synthesized
  source 1..22: mol_type = other DNA
ggcagccatgttgccatgagag

SEQ ID NO: 98529 - DNA, 22 bp, synthetic construct
  misc_feature 1..22: note = chemically synthesized
  source 1..22: mol_type = other DNA
ccatgagagattaggaggggcc

SEQ ID NO: 98530 - DNA, 22 bp, synthetic construct
  misc_feature 1..22: note = chemically synthesized
  source 1..22: mol_type = other DNA
ggaggggccaaatgagcccaga

SEQ ID NO: 98531 - DNA, 22 bp, synthetic construct
  misc_feature 1..22: note = chemically synthesized
  source 1..22: mol_type = other DNA
cttcttagatgatcttgagcaa

SEQ ID NO: 98532 - DNA, 22 bp, synthetic construct
  misc_feature 1..22: note = chemically synthesized
  source 1..22: mol_type = other DNA
cttagatgatcttgagcaagtt

SEQ ID NO: 98533 - DNA, 22 bp, synthetic construct
  misc_feature 1..22: note = chemically synthesized
  source 1..22: mol_type = other DNA
ttagatgatcttgagcaagttg

SEQ ID NO: 98534 - DNA, 22 bp, synthetic construct
  misc_feature 1..22: note = chemically synthesized
  source 1..22: mol_type = other DNA
agatgatcttgagcaagttgct

SEQ ID NO: 98535 - DNA, 22 bp, synthetic construct
  misc_feature 1..22: note = chemically synthesized
  source 1..22: mol_type = other DNA
gatgatcttgagcaagttgctt

SEQ ID NO: 98536 - DNA, 22 bp, synthetic construct
  misc_feature 1..22: note = chemically synthesized
  source 1..22: mol_type = other DNA
gagcaagttgcttaacttcttg

SEQ ID NO: 98537 - DNA, 22 bp, synthetic construct
  misc_feature 1..22: note = chemically synthesized
  source 1..22: mol_type = other DNA
agcaagttgcttaacttcttga

SEQ ID NO: 98538 - DNA, 22 bp, synthetic construct
  misc_feature 1..22: note = chemically synthesized
  source 1..22: mol_type = other DNA
cttaacttcttgaagtctctga

SEQ ID NO: 98539 - DNA, 22 bp, synthetic construct
  misc_feature 1..22: note = chemically synthesized
  source 1..22: mol_type = other DNA
aacttcttgaagtctctgaaat

SEQ ID NO: 98540 - DNA, 22 bp, synthetic construct
  misc_feature 1..22: note = chemically synthesized
  source 1..22: mol_type = other DNA
acttcttgaagtctctgaaata

SEQ ID NO: 98541 - DNA, 22 bp, synthetic construct
  misc_feature 1..22: note = chemically synthesized
  source 1..22: mol_type = other DNA
cttgaagtctctgaaatatagg

SEQ ID NO: 98542 - DNA, 22 bp, synthetic construct
  misc_feature 1..22: note = chemically synthesized
  source 1..22: mol_type = other DNA
ttgaagtctctgaaatatagga

SEQ ID NO: 98543 - DNA, 22 bp, synthetic construct
  misc_feature 1..22: note = chemically synthesized
  source 1..22: mol_type = other DNA
gaagtctctgaaatataggatg

SEQ ID NO: 98544 - DNA, 22 bp, synthetic construct
  misc_feature 1..22: note = chemically synthesized
  source 1..22: mol_type = other DNA
aagtctctgaaatataggatga

SEQ ID NO: 98545 - DNA, 22 bp, synthetic construct
  misc_feature 1..22: note = chemically synthesized
  source 1..22: mol_type = other DNA
tgaaatataggatgataatatg

SEQ ID NO: 98546 - DNA, 22 bp, synthetic construct
  misc_feature 1..22: note = chemically synthesized
  source 1..22: mol_type = other DNA
aaatataggatgataatatgta

SEQ ID NO: 98547 - DNA, 22 bp, synthetic construct
  misc_feature 1..22: note = chemically synthesized
  source 1..22: mol_type = other DNA
gctaatagaattatgaggatga

SEQ ID NO: 98548 - DNA, 22 bp, synthetic construct
  misc_feature 1..22: note = chemically synthesized
  source 1..22: mol_type = other DNA
atagaattatgaggatgagatt

SEQ ID NO: 98549 - DNA, 22 bp, synthetic construct
  misc_feature 1..22: note = chemically synthesized
  source 1..22: mol_type = other DNA
tgaggatgagattagtttattg

SEQ ID NO: 98550 - DNA, 22 bp, synthetic construct
  misc_feature 1..22: note = chemically synthesized
  source 1..22: mol_type = other DNA
gtttattgtgtaaagaactagg

SEQ ID NO: 98551 - DNA, 22 bp, synthetic construct
  misc_feature 1..22: note = chemically synthesized
  source 1..22: mol_type = other DNA
attgtgtaaagaactagggaca

SEQ ID NO: 98552 - DNA, 22 bp, synthetic construct
  misc_feature 1..22: note = chemically synthesized
  source 1..22: mol_type = other DNA
ttgtgtaaagaactagggacac

SEQ ID NO: 98553 - DNA, 22 bp, synthetic construct
  misc_feature 1..22: note = chemically synthesized
  source 1..22: mol_type = other DNA
tgtaaagaactagggacacagt

SEQ ID NO: 98554 - DNA, 22 bp, synthetic construct
  misc_feature 1..22: note = chemically synthesized
  source 1..22: mol_type = other DNA
gggacacagtatatattcagta

SEQ ID NO: 98555 - DNA, 22 bp, synthetic construct
  misc_feature 1..22: note = chemically synthesized
  source 1..22: mol_type = other DNA
agtaagtgttttctgttacagt

SEQ ID NO: 98556 - DNA, 22 bp, synthetic construct
  misc_feature 1..22: note = chemically synthesized
  source 1..22: mol_type = other DNA
tctgttacagtattatgataaa

SEQ ID NO: 98557 - DNA, 22 bp, synthetic construct
  misc_feature 1..22: note = chemically synthesized
  source 1..22: mol_type = other DNA
ctgttacagtattatgataaat

SEQ ID NO: 98558 - DNA, 22 bp, synthetic construct
  misc_feature 1..22: note = chemically synthesized
  source 1..22: mol_type = other DNA
tgttacagtattatgataaata

SEQ ID NO: 98559 - DNA, 22 bp, synthetic construct
  misc_feature 1..22: note = chemically synthesized
  source 1..22: mol_type = other DNA
ttacagtattatgataaatata

SEQ ID NO: 98560 - DNA, 22 bp, synthetic construct
  misc_feature 1..22: note = chemically synthesized
  source 1..22: mol_type = other DNA
cagtattatgataaatatatac

SEQ ID NO: 98561 - DNA, 22 bp, synthetic construct
  misc_feature 1..22: note = chemically synthesized
  source 1..22: mol_type = other DNA
tgataaatatatacatgcaact

SEQ ID NO: 98562 - DNA, 22 bp, synthetic construct
  misc_feature 1..22: note = chemically synthesized
  source 1..22: mol_type = other DNA
ttacagttgcatgctaccttaa

SEQ ID NO: 98563 - DNA, 22 bp, synthetic construct
  misc_feature 1..22: note = chemically synthesized
  source 1..22: mol_type = other DNA
cagttgcatgctaccttaaaga

SEQ ID NO: 98564 - DNA, 22 bp, synthetic construct
  misc_feature 1..22: note = chemically synthesized
  source 1..22: mol_type = other DNA
catgctaccttaaagaataatt

SEQ ID NO: 98565 - DNA, 22 bp, synthetic construct
  misc_feature 1..22: note = chemically synthesized
  source 1..22: mol_type = other DNA
ccttaaagaataattggaggta

SEQ ID NO: 98566 - DNA, 22 bp, synthetic construct
  misc_feature 1..22: note = chemically synthesized
  source 1..22: mol_type = other DNA
aaagaataattggaggtacagt

SEQ ID NO: 98567 - DNA, 22 bp, synthetic construct
  misc_feature 1..22: note = chemically synthesized
  source 1..22: mol_type = other DNA
aagaataattggaggtacagtt

SEQ ID NO: 98568 - DNA, 22 bp, synthetic construct
  misc_feature 1..22: note = chemically synthesized
  source 1..22: mol_type = other DNA
gaggtacagttattcggaggta

SEQ ID NO: 98569 - DNA, 22 bp, synthetic construct
  misc_feature 1..22: note = chemically synthesized
  source 1..22: mol_type = other DNA
ttcggaggtatttcttgactgt

SEQ ID NO: 98570 - DNA, 22 bp, synthetic construct
  misc_feature 1..22: note = chemically synthesized
  source 1..22: mol_type = other DNA
ggaggtatttcttgactgttaa

SEQ ID NO: 98571 - DNA, 22 bp, synthetic construct
  misc_feature 1..22: note = chemically synthesized
  source 1..22: mol_type = other DNA
cttgactgttaatgttggcagc

SEQ ID NO: 98572 - DNA, 22 bp, synthetic construct
  misc_feature 1..22: note = chemically synthesized
  source 1..22: mol_type = other DNA
ttgactgttaatgttggcagca

SEQ ID NO: 98573 - DNA, 22 bp, synthetic construct
  misc_feature 1..22: note = chemically synthesized
  source 1..22: mol_type = other DNA
gactgttaatgttggcagcaga

SEQ ID NO: 98574 - DNA, 22 bp, synthetic construct
  misc_feature 1..22: note = chemically synthesized
  source 1..22: mol_type = other DNA
actgttaatgttggcagcagat

SEQ ID NO: 98575 - DNA, 22 bp, synthetic construct
  misc_feature 1..22: note = chemically synthesized
  source 1..22: mol_type = other DNA
ttaatgttggcagcagattcag

SEQ ID NO: 98576 - DNA, 22 bp, synthetic construct
  misc_feature 1..22: note = chemically synthesized
  source 1..22: mol_type = other DNA
atgttggcagcagattcagctt

SEQ ID NO: 98577 - DNA, 22 bp, synthetic construct
  misc_feature 1..22: note = chemically synthesized
  source 1..22: mol_type = other DNA
gcagcagattcagcttatttta

SEQ ID NO: 98578 - DNA, 22 bp, synthetic construct
  misc_feature 1..22: note = chemically synthesized
  source 1..22: mol_type = other DNA
agcttattttacaacactattc

SEQ ID NO: 98579 - DNA, 22 bp, synthetic construct
  misc_feature 1..22: note = chemically synthesized
  source 1..22: mol_type = other DNA
attttacaacactattcagacc

SEQ ID NO: 98580 - DNA, 22 bp, synthetic construct
  misc_feature 1..22: note = chemically synthesized
  source 1..22: mol_type = other DNA
ttttacaacactattcagacct

SEQ ID NO: 98581 - DNA, 22 bp, synthetic construct
  misc_feature 1..22: note = chemically synthesized
  source 1..22: mol_type = other DNA
tacaacactattcagacctctc

SEQ ID NO: 98582 - DNA, 22 bp, synthetic construct
  misc_feature 1..22: note = chemically synthesized
  source 1..22: mol_type = other DNA
acaacactattcagacctctca

SEQ ID NO: 98583 - DNA, 22 bp, synthetic construct
  misc_feature 1..22: note = chemically synthesized
  source 1..22: mol_type = other DNA
caacactattcagacctctcac

SEQ ID NO: 98584 - DNA, 22 bp, synthetic construct
  misc_feature 1..22: note = chemically synthesized
  source 1..22: mol_type = other DNA
ttcagacctctcacaataattc

SEQ ID NO: 98585 - DNA, 22 bp, synthetic construct
  misc_feature 1..22: note = chemically synthesized
  source 1..22: mol_type = other DNA
agacctctcacaataattccct

SEQ ID NO: 98586 - DNA, 22 bp, synthetic construct
  misc_feature 1..22: note = chemically synthesized
  source 1..22: mol_type = other DNA
tcacaataattccctaggagat

SEQ ID NO: 98587 - DNA, 22 bp, synthetic construct
  misc_feature 1..22: note = chemically synthesized
  source 1..22: mol_type = other DNA
acaataattccctaggagatat

SEQ ID NO: 98588 - DNA, 22 bp, synthetic construct
  misc_feature 1..22: note = chemically synthesized
  source 1..22: mol_type = other DNA
cctaggagatatttagacaaca

SEQ ID NO: 98589 - DNA, 22 bp, synthetic construct
  misc_feature 1..22: note = chemically synthesized
  source 1..22: mol_type = other DNA
ggagatatttagacaacaagcc

SEQ ID NO: 98590 - DNA, 22 bp, synthetic construct
  misc_feature 1..22: note = chemically synthesized
  source 1..22: mol_type = other DNA
agacaacaagccatcatgttgt

SEQ ID NO: 98591 - DNA, 22 bp, synthetic construct
  misc_feature 1..22: note = chemically synthesized
  source 1..22: mol_type = other DNA
gacaacaagccatcatgttgta

SEQ ID NO: 98592 - DNA, 22 bp, synthetic construct
  misc_feature 1..22: note = chemically synthesized
  source 1..22: mol_type = other DNA
taacttctcatttgtcttttct

SEQ ID NO: 98593 - DNA, 22 bp, synthetic construct
  misc_feature 1..22: note = chemically synthesized
  source 1..22: mol_type = other DNA
ctcatttgtcttttctcactta

SEQ ID NO: 98594 - DNA, 22 bp, synthetic construct
  misc_feature 1..22: note = chemically synthesized
  source 1..22: mol_type = other DNA
tcatttgtcttttctcacttac

SEQ ID NO: 98595 - DNA, 22 bp, synthetic construct
  misc_feature 1..22: note = chemically synthesized
  source 1..22: mol_type = other DNA
atttgtcttttctcacttaccc

SEQ ID NO: 98596 - DNA, 22 bp, synthetic construct
  misc_feature 1..22: note = chemically synthesized
  source 1..22: mol_type = other DNA
gtcttttctcacttaccctctc

SEQ ID NO: 98597 - DNA, 22 bp, synthetic construct
  misc_feature 1..22: note = chemically synthesized
  source 1..22: mol_type = other DNA
tcttttctcacttaccctctca

SEQ ID NO: 98598 - DNA, 22 bp, synthetic construct
  misc_feature 1..22: note = chemically synthesized
  source 1..22: mol_type = other DNA
ttctcacttaccctctcattca

SEQ ID NO: 98599 - DNA, 22 bp, synthetic construct
  misc_feature 1..22: note = chemically synthesized
  source 1..22: mol_type = other DNA
tctcacttaccctctcattcac

SEQ ID NO: 98600 - DNA, 22 bp, synthetic construct
  misc_feature 1..22: note = chemically synthesized
  source 1..22: mol_type = other DNA
ctcacttaccctctcattcacc

SEQ ID NO: 98601 - DNA, 22 bp, synthetic construct
  misc_feature 1..22: note = chemically synthesized
  source 1..22: mol_type = other DNA
tcacttaccctctcattcaccc

SEQ ID NO: 98602 - DNA, 22 bp, synthetic construct
  misc_feature 1..22: note = chemically synthesized
  source 1..22: mol_type = other DNA
acttaccctctcattcacccac

SEQ ID NO: 98603 - DNA, 22 bp, synthetic construct
  misc_feature 1..22: note = chemically synthesized
  source 1..22: mol_type = other DNA
accctctcattcacccacctct

SEQ ID NO: 98604 - DNA, 22 bp, synthetic construct
  misc_feature 1..22: note = chemically synthesized
  source 1..22: mol_type = other DNA
ccctctcattcacccacctctt

SEQ ID NO: 98605 - DNA, 22 bp, synthetic construct
  misc_feature 1..22: note = chemically synthesized
  source 1..22: mol_type = other DNA
tcattcacccacctcttttgct

SEQ ID NO: 98606 - DNA, 22 bp, synthetic construct
  misc_feature 1..22: note = chemically synthesized
  source 1..22: mol_type = other DNA
attcacccacctcttttgctct

SEQ ID NO: 98607 - DNA, 22 bp, synthetic construct
  misc_feature 1..22: note = chemically synthesized
  source 1..22: mol_type = other DNA
acccacctcttttgctctctgt

SEQ ID NO: 98608 - DNA, 22 bp, synthetic construct
  misc_feature 1..22: note = chemically synthesized
  source 1..22: mol_type = other DNA
ttttgctctctgttcctgtgaa

SEQ ID NO: 98609 - DNA, 22 bp, synthetic construct
  misc_feature 1..22: note = chemically synthesized
  source 1..22: mol_type = other DNA
ttgctctctgttcctgtgaaag

SEQ ID NO: 98610 - DNA, 22 bp, synthetic construct
  misc_feature 1..22: note = chemically synthesized
  source 1..22: mol_type = other DNA
tgctctctgttcctgtgaaagt

SEQ ID NO: 98611 - DNA, 22 bp, synthetic construct
  misc_feature 1..22: note = chemically synthesized
  source 1..22: mol_type = other DNA
gctctctgttcctgtgaaagta

SEQ ID NO: 98612 - DNA, 22 bp, synthetic construct
  misc_feature 1..22: note = chemically synthesized
  source 1..22: mol_type = other DNA
ctctctgttcctgtgaaagtac

SEQ ID NO: 98613 - DNA, 22 bp, synthetic construct
  misc_feature 1..22: note = chemically synthesized
  source 1..22: mol_type = other DNA
tctgttcctgtgaaagtaccct

SEQ ID NO: 98614 - DNA, 22 bp, synthetic construct
  misc_feature 1..22: note = chemically synthesized
  source 1..22: mol_type = other DNA
tgttcctgtgaaagtacccttc

SEQ ID NO: 98615 - DNA, 22 bp, synthetic construct
  misc_feature 1..22: note = chemically synthesized
  source 1..22: mol_type = other DNA
ttcctgtgaaagtacccttcta

SEQ ID NO: 98616 - DNA, 22 bp, synthetic construct
  misc_feature 1..22: note = chemically synthesized
  source 1..22: mol_type = other DNA
ctgtgaaagtacccttctactt

SEQ ID NO: 98617 - DNA, 22 bp, synthetic construct
  misc_feature 1..22: note = chemically synthesized
  source 1..22: mol_type = other DNA
tgaaagtacccttctacttagc

SEQ ID NO: 98618 - DNA, 22 bp, synthetic construct
  misc_feature 1..22: note = chemically synthesized
  source 1..22: mol_type = other DNA
ctacttagcctacttttgacca

SEQ ID NO: 98619 - DNA, 22 bp, synthetic construct
  misc_feature 1..22: note = chemically synthesized
  source 1..22: mol_type = other DNA
tacttagcctacttttgaccag

SEQ ID NO: 98620 - DNA, 22 bp, synthetic construct
  misc_feature 1..22: note = chemically synthesized
  source 1..22: mol_type = other DNA
cttagcctacttttgaccagtg

SEQ ID NO: 98621 - DNA, 22 bp, synthetic construct
  misc_feature 1..22: note = chemically synthesized
  source 1..22: mol_type = other DNA
agcctacttttgaccagtgtgc

SEQ ID NO: 98622 - DNA, 22 bp, synthetic construct
  misc_feature 1..22: note = chemically synthesized
  source 1..22: mol_type = other DNA
gcctacttttgaccagtgtgca

SEQ ID NO: 98623 - DNA, 22 bp, synthetic construct
  misc_feature 1..22: note = chemically synthesized
  source 1..22: mol_type = other DNA
cttttgaccagtgtgcatgtca

SEQ ID NO: 98624 - DNA, 22 bp, synthetic construct
  misc_feature 1..22: note = chemically synthesized
  source 1..22: mol_type = other DNA
ttgaccagtgtgcatgtcactg

SEQ ID NO: 98625 - DNA, 22 bp, synthetic construct
  misc_feature 1..22: note = chemically synthesized
  source 1..22: mol_type = other DNA
tgaccagtgtgcatgtcactgg

SEQ ID NO: 98626 - DNA, 22 bp, synthetic construct
  misc_feature 1..22: note = chemically synthesized
  source 1..22: mol_type = other DNA
gaccagtgtgcatgtcactggg

SEQ ID NO: 98627 - DNA, 22 bp, synthetic construct
  misc_feature 1..22: note = chemically synthesized
  source 1..22: mol_type = other DNA
accagtgtgcatgtcactgggc

SEQ ID NO: 98628 - DNA, 22 bp, synthetic construct
  misc_feature 1..22: note = chemically synthesized
  source 1..22: mol_type = other DNA
ggcaatacaagacctctgagct

SEQ ID NO: 98629 - DNA, 22 bp, synthetic construct
  misc_feature 1..22: note = chemically synthesized
  source 1..22: mol_type = other DNA
tgagctttggcttagaaggaaa

SEQ ID NO: 98630 - DNA, 22 bp, synthetic construct
  misc_feature 1..22: note = chemically synthesized
  source 1..22: mol_type = other DNA
agctttggcttagaaggaaata

SEQ ID NO: 98631 - DNA, 22 bp, synthetic construct
  misc_feature 1..22: note = chemically synthesized
  source 1..22: mol_type = other DNA
tggcttagaaggaaatacaata

SEQ ID NO: 98632 - DNA, 22 bp, synthetic construct
  misc_feature 1..22: note = chemically synthesized
  source 1..22: mol_type = other DNA
ggcttagaaggaaatacaataa

SEQ ID NO: 98633 - DNA, 22 bp, synthetic construct
  misc_feature 1..22: note = chemically synthesized
  source 1..22: mol_type = other DNA
gcttagaaggaaatacaataat

SEQ ID NO: 98634 - DNA, 22 bp, synthetic construct
  misc_feature 1..22: note = chemically synthesized
  source 1..22: mol_type = other DNA
agaaggaaatacaataatggct

SEQ ID NO: 98635 - DNA, 22 bp, synthetic construct
  misc_feature 1..22: note = chemically synthesized
  source 1..22: mol_type = other DNA
gaaggaaatacaataatggcta

SEQ ID NO: 98636 - DNA, 22 bp, synthetic construct
  misc_feature 1..22: note = chemically synthesized
  source 1..22: mol_type = other DNA
atttttgagaaagaggaactct

SEQ ID NO: 98637 - DNA, 22 bp, synthetic construct
  misc_feature 1..22: note = chemically synthesized
  source 1..22: mol_type = other DNA
ttgagaaagaggaactctagcc

SEQ ID NO: 98638 - DNA, 22 bp, synthetic construct
  misc_feature 1..22: note = chemically synthesized
  source 1..22: mol_type = other DNA
tgagaaagaggaactctagccc

SEQ ID NO: 98639 - DNA, 22 bp, synthetic construct
  misc_feature 1..22: note = chemically synthesized
  source 1..22: mol_type = other DNA
gagaaagaggaactctagccca

SEQ ID NO: 98640 - DNA, 22 bp, synthetic construct
  misc_feature 1..22: note = chemically synthesized
  source 1..22: mol_type = other DNA
agaaagaggaactctagcccat

SEQ ID NO: 98641 - DNA, 22 bp, synthetic construct
  misc_feature 1..22: note = chemically synthesized
  source 1..22: mol_type = other DNA
tagcccatcagggaagacatag

SEQ ID NO: 98642 - DNA, 22 bp, synthetic construct
  misc_feature 1..22: note = chemically synthesized
  source 1..22: mol_type = other DNA
gcccatcagggaagacataggg

SEQ ID NO: 98643 - DNA, 22 bp, synthetic construct
  misc_feature 1..22: note = chemically synthesized
  source 1..22: mol_type = other DNA
tgtaggaatgagttcttccatt

SEQ ID NO: 98644 - DNA, 22 bp, synthetic construct
  misc_feature 1..22: note = chemically synthesized
  source 1..22: mol_type = other DNA
taggaatgagttcttccattct

SEQ ID NO: 98645 - DNA, 22 bp, synthetic construct
  misc_feature 1..22: note = chemically synthesized
  source 1..22: mol_type = other DNA
ttccattctttttacagatgag

SEQ ID NO: 98646 - DNA, 22 bp, synthetic construct
  misc_feature 1..22: note = chemically synthesized
  source 1..22: mol_type = other DNA
ccattctttttacagatgagaa

SEQ ID NO: 98647 - DNA, 22 bp, synthetic construct
  misc_feature 1..22: note = chemically synthesized
  source 1..22: mol_type = other DNA
cattctttttacagatgagaaa

SEQ ID NO: 98648 - DNA, 22 bp, synthetic construct
  misc_feature 1..22: note = chemically synthesized
  source 1..22: mol_type = other DNA
tttttacagatgagaaagacaa

SEQ ID NO: 98649 - DNA, 22 bp, synthetic construct
  misc_feature 1..22: note = chemically synthesized
  source 1..22: mol_type = other DNA
tttacagatgagaaagacaatg

SEQ ID NO: 98650 - DNA, 22 bp, synthetic construct
  misc_feature 1..22: note = chemically synthesized
  source 1..22: mol_type = other DNA
ttacagatgagaaagacaatgt

SEQ ID NO: 98651 - DNA, 22 bp, synthetic construct
  misc_feature 1..22: note = chemically synthesized
  source 1..22: mol_type = other DNA
tacagatgagaaagacaatgtg

SEQ ID NO: 98652 - DNA, 22 bp, synthetic construct
  misc_feature 1..22: note = chemically synthesized
  source 1..22: mol_type = other DNA
acagatgagaaagacaatgtga

SEQ ID NO: 98653 - DNA, 22 bp, synthetic construct
  misc_feature 1..22: note = chemically synthesized
  source 1..22: mol_type = other DNA
cagatgagaaagacaatgtgaa

SEQ ID NO: 98654 - DNA, 22 bp, synthetic construct
  misc_feature 1..22: note = chemically synthesized
  source 1..22: mol_type = other DNA
taaagtagttagcatatggaga

SEQ ID NO: 98655 - DNA, 22 bp, synthetic construct
  misc_feature 1..22: note = chemically synthesized
  source 1..22: mol_type = other DNA
aaagtagttagcatatggagaa

SEQ ID NO: 98656 - DNA, 22 bp, synthetic construct
  misc_feature 1..22: note = chemically synthesized
  source 1..22: mol_type = other DNA
aagtagttagcatatggagaaa

SEQ ID NO: 98657 - DNA, 22 bp, synthetic construct
  misc_feature 1..22: note = chemically synthesized
  source 1..22: mol_type = other DNA
gcatatggagaaatggcttgca

SEQ ID NO: 98658 - DNA, 22 bp, synthetic construct
  misc_feature 1..22: note = chemically synthesized
  source 1..22: mol_type = other DNA
gcattggtaaaatttggggaaa

SEQ ID NO: 98659 - DNA, 22 bp, synthetic construct
  misc_feature 1..22: note = chemically synthesized
  source 1..22: mol_type = other DNA
cattggtaaaatttggggaaac

SEQ ID NO: 98660 - DNA, 22 bp, synthetic construct
  misc_feature 1..22: note = chemically synthesized
  source 1..22: mol_type = other DNA
gtaaaatttggggaaactttgt

SEQ ID NO: 98661 - DNA, 22 bp, synthetic construct
  misc_feature 1..22: note = chemically synthesized
  source 1..22: mol_type = other DNA
ggggaaactttgttgtcagacc

SEQ ID NO: 98662 - DNA, 22 bp, synthetic construct
  misc_feature 1..22: note = chemically synthesized
  source 1..22: mol_type = other DNA
gggaaactttgttgtcagaccc

SEQ ID NO: 98663 - DNA, 22 bp, synthetic construct
  misc_feature 1..22: note = chemically synthesized
  source 1..22: mol_type = other DNA
tgttgtcagacccggcaaaggg

SEQ ID NO: 98664 - DNA, 22 bp, synthetic construct
  misc_feature 1..22: note = chemically synthesized
  source 1..22: mol_type = other DNA
gttgtcagacccggcaaaggga

SEQ ID NO: 98665 - DNA, 22 bp, synthetic construct
  misc_feature 1..22: note = chemically synthesized
  source 1..22: mol_type = other DNA
ttgtcagacccggcaaagggag

SEQ ID NO: 98666 - DNA, 22 bp, synthetic construct
  misc_feature 1..22: note = chemically synthesized
  source 1..22: mol_type = other DNA
tcagacccggcaaagggagatg

SEQ ID NO: 98667 - DNA, 22 bp, synthetic construct
  misc_feature 1..22: note = chemically synthesized
  source 1..22: mol_type = other DNA
cagtttcttctcatttcttgtg

SEQ ID NO: 98668 - DNA, 22 bp, synthetic construct
  misc_feature 1..22: note = chemically synthesized
  source 1..22: mol_type = other DNA
cttctcatttcttgtgtaccta

SEQ ID NO: 98669 - DNA, 22 bp, synthetic construct
  misc_feature 1..22: note = chemically synthesized
  source 1..22: mol_type = other DNA
ttctcatttcttgtgtacctat

SEQ ID NO: 98670 - DNA, 22 bp, synthetic construct
  misc_feature 1..22: note = chemically synthesized
  source 1..22: mol_type = other DNA
ctcatttcttgtgtacctatca

SEQ ID NO: 98671 - DNA, 22 bp, synthetic construct
  misc_feature 1..22: note = chemically synthesized
  source 1..22: mol_type = other DNA
tcatttcttgtgtacctatcac

SEQ ID NO: 98672 - DNA, 22 bp, synthetic construct
  misc_feature 1..22: note = chemically synthesized
  source 1..22: mol_type = other DNA
atttcttgtgtacctatcacag

SEQ ID NO: 98673 - DNA, 22 bp, synthetic construct
  misc_feature 1..22: note = chemically synthesized
  source 1..22: mol_type = other DNA
cttgtgtacctatcacagcacc

SEQ ID NO: 98674 - DNA, 22 bp, synthetic construct
  misc_feature 1..22: note = chemically synthesized
  source 1..22: mol_type = other DNA
ttgtgtacctatcacagcacca

SEQ ID NO: 98675 - DNA, 22 bp, synthetic construct
  misc_feature 1..22: note = chemically synthesized
  source 1..22: mol_type = other DNA
gtgtacctatcacagcaccaca

SEQ ID NO: 98676 - DNA, 22 bp, synthetic construct
  misc_feature 1..22: note = chemically synthesized
  source 1..22: mol_type = other DNA
tgtacctatcacagcaccacag

SEQ ID NO: 98677 - DNA, 22 bp, synthetic construct
  misc_feature 1..22: note = chemically synthesized
  source 1..22: mol_type = other DNA
tcacagcaccacagcactattc

SEQ ID NO: 98678 - DNA, 22 bp, synthetic construct
  misc_feature 1..22: note = chemically synthesized
  source 1..22: mol_type = other DNA
ttcctagcatagtttagggccc

SEQ ID NO: 98679 - DNA, 22 bp, synthetic construct
  misc_feature 1..22: note = chemically synthesized
  source 1..22: mol_type = other DNA
ctagcatagtttagggccctca

SEQ ID NO: 98680 - DNA, 22 bp, synthetic construct
  misc_feature 1..22: note = chemically synthesized
  source 1..22: mol_type = other DNA
gcatagtttagggccctcagtt

SEQ ID NO: 98681 - DNA, 22 bp, synthetic construct
  misc_feature 1..22: note = chemically synthesized
  source 1..22: mol_type = other DNA
agggccctcagttcttgacgct

SEQ ID NO: 98682 - DNA, 22 bp, synthetic construct
  misc_feature 1..22: note = chemically synthesized
  source 1..22: mol_type = other DNA
gggccctcagttcttgacgcta

SEQ ID NO: 98683 - DNA, 22 bp, synthetic construct
  misc_feature 1..22: note = chemically synthesized
  source 1..22: mol_type = other DNA
agttcttgacgctagttagaat

SEQ ID NO: 98684 - DNA, 22 bp, synthetic construct
  misc_feature 1..22: note = chemically synthesized
  source 1..22: mol_type = other DNA
ttgacgctagttagaatttcac

SEQ ID NO: 98685 - DNA, 22 bp, synthetic construct
  misc_feature 1..22: note = chemically synthesized
  source 1..22: mol_type = other DNA
gacgctagttagaatttcacac

SEQ ID NO: 98686 - DNA, 22 bp, synthetic construct
  misc_feature 1..22: note = chemically synthesized
  source 1..22: mol_type = other DNA
acgctagttagaatttcacaca

SEQ ID NO: 98687 - DNA, 22 bp, synthetic construct
  misc_feature 1..22: note = chemically synthesized
  source 1..22: mol_type = other DNA
gttagaatttcacacaaactta

SEQ ID NO: 98688 - DNA, 22 bp, synthetic construct
  misc_feature 1..22: note = chemically synthesized
  source 1..22: mol_type = other DNA
gaatttcacacaaacttaaact

SEQ ID NO: 98689 - DNA, 22 bp, synthetic construct
  misc_feature 1..22: note = chemically synthesized
  source 1..22: mol_type = other DNA
cacacaaacttaaactagacaa

SEQ ID NO: 98690 - DNA, 22 bp, synthetic construct
  misc_feature 1..22: note = chemically synthesized
  source 1..22: mol_type = other DNA
acacaaacttaaactagacaaa

SEQ ID NO: 98691 - DNA, 22 bp, synthetic construct
  misc_feature 1..22: note = chemically synthesized
  source 1..22: mol_type = other DNA
aaactagacaaacatatgtatg

SEQ ID NO: 98692 - DNA, 22 bp, synthetic construct
  misc_feature 1..22: note = chemically synthesized
  source 1..22: mol_type = other DNA
aactagacaaacatatgtatgt

SEQ ID NO: 98693 - DNA, 22 bp, synthetic construct
  misc_feature 1..22: note = chemically synthesized
  source 1..22: mol_type = other DNA
gacaaacatatgtatgtttctg

SEQ ID NO: 98694 - DNA, 22 bp, synthetic construct
  misc_feature 1..22: note = chemically synthesized
  source 1..22: mol_type = other DNA
ctgaggcactgaggtcactgca

SEQ ID NO: 98695 - DNA, 22 bp, synthetic construct
  misc_feature 1..22: note = chemically synthesized
  source 1..22: mol_type = other DNA
tgaggcactgaggtcactgcag

SEQ ID NO: 98696 - DNA, 22 bp, synthetic construct
  misc_feature 1..22: note = chemically synthesized
  source 1..22: mol_type = other DNA
aggcactgaggtcactgcagga

SEQ ID NO: 98697 - DNA, 22 bp, synthetic construct
  misc_feature 1..22: note = chemically synthesized
  source 1..22: mol_type = other DNA
aggtcactgcaggatgaagacg

SEQ ID NO: 98698 - DNA, 22 bp, synthetic construct
  misc_feature 1..22: note = chemically synthesized
  source 1..22: mol_type = other DNA
caggatgaagacggagccaatg

SEQ ID NO: 98699 - DNA, 22 bp, synthetic construct
  misc_feature 1..22: note = chemically synthesized
  source 1..22: mol_type = other DNA
gaccagaagagtaaatgaacac

SEQ ID NO: 98700 - DNA, 22 bp, synthetic construct
  misc_feature 1..22: note = chemically synthesized
  source 1..22: mol_type = other DNA
taacacataaacactcccttta

SEQ ID NO: 98701 - DNA, 22 bp, synthetic construct
  misc_feature 1..22: note = chemically synthesized
  source 1..22: mol_type = other DNA
cctttaaccaaagttgcagctt

SEQ ID NO: 98702 - DNA, 22 bp, synthetic construct
  misc_feature 1..22: note = chemically synthesized
  source 1..22: mol_type = other DNA
taaccaaagttgcagcttgacc

SEQ ID NO: 98703 - DNA, 22 bp, synthetic construct
  misc_feature 1..22: note = chemically synthesized
  source 1..22: mol_type = other DNA
aaccaaagttgcagcttgacca

SEQ ID NO: 98704 - DNA, 22 bp, synthetic construct
  misc_feature 1..22: note = chemically synthesized
  source 1..22: mol_type = other DNA
accaaagttgcagcttgaccaa

SEQ ID NO: 98705 - DNA, 22 bp, synthetic construct
  misc_feature 1..22: note = chemically synthesized
  source 1..22: mol_type = other DNA
cagcttgaccaaggggtcaaag

SEQ ID NO: 98706 - DNA, 22 bp, synthetic construct
  misc_feature 1..22: note = chemically synthesized
  source 1..22: mol_type = other DNA
gaccaaggggtcaaagggtaat

SEQ ID NO: 98707 - DNA, 22 bp, synthetic construct
  misc_feature 1..22: note = chemically synthesized
  source 1..22: mol_type = other DNA
accaaggggtcaaagggtaatt

SEQ ID NO: 98708 - DNA, 22 bp, synthetic construct
  misc_feature 1..22: note = chemically synthesized
  source 1..22: mol_type = other DNA
gggcaggcatgggccttcagtt

SEQ ID NO: 98709 - DNA, 22 bp, synthetic construct
  misc_feature 1..22: note = chemically synthesized
  source 1..22: mol_type = other DNA
ggcaggcatgggccttcagttt

SEQ ID NO: 98710 - DNA, 22 bp, synthetic construct
  misc_feature 1..22: note = chemically synthesized
  source 1..22: mol_type = other DNA
cagttttctcaagtgtctgctt

SEQ ID NO: 98711 - DNA, 22 bp, synthetic construct
  misc_feature 1..22: note = chemically synthesized
  source 1..22: mol_type = other DNA
agttttctcaagtgtctgctta

SEQ ID NO: 98712 - DNA, 22 bp, synthetic construct
  misc_feature 1..22: note = chemically synthesized
  source 1..22: mol_type = other DNA
tctcaagtgtctgcttataatt

SEQ ID NO: 98713 - DNA, 22 bp, synthetic construct
  misc_feature 1..22: note = chemically synthesized
  source 1..22: mol_type = other DNA
ctcaagtgtctgcttataattt

SEQ ID NO: 98714 - DNA, 22 bp, synthetic construct
  misc_feature 1..22: note = chemically synthesized
  source 1..22: mol_type = other DNA
tcaagtgtctgcttataatttg

SEQ ID NO: 98715 - DNA, 22 bp, synthetic construct
  misc_feature 1..22: note = chemically synthesized
  source 1..22: mol_type = other DNA
aagtgtctgcttataatttgtc

SEQ ID NO: 98716 - DNA, 22 bp, synthetic construct
  misc_feature 1..22: note = chemically synthesized
  source 1..22: mol_type = other DNA
cttataatttgtcatatgacaa

SEQ ID NO: 98717 - DNA, 22 bp, synthetic construct
  misc_feature 1..22: note = chemically synthesized
  source 1..22: mol_type = other DNA
ataatttgtcatatgacaatct

SEQ ID NO: 98718 - DNA, 22 bp, synthetic construct
  misc_feature 1..22: note = chemically synthesized
  source 1..22: mol_type = other DNA
taatttgtcatatgacaatctc

SEQ ID NO: 98719 - DNA, 22 bp, synthetic construct
  misc_feature 1..22: note = chemically synthesized
  source 1..22: mol_type = other DNA
gtcatatgacaatctctgtaac

SEQ ID NO: 98720 - DNA, 22 bp, synthetic construct
  misc_feature 1..22: note = chemically synthesized
  source 1..22: mol_type = other DNA
tcatatgacaatctctgtaacc

SEQ ID NO: 98721 - DNA, 22 bp, synthetic construct
  misc_feature 1..22: note = chemically synthesized
  source 1..22: mol_type = other DNA
tgtaacccaagagaaaatctct

SEQ ID NO: 98722 - DNA, 22 bp, synthetic construct
  misc_feature 1..22: note = chemically synthesized
  source 1..22: mol_type = other DNA
taacccaagagaaaatctcttt

SEQ ID NO: 98723 - DNA, 22 bp, synthetic construct
  misc_feature 1..22: note = chemically synthesized
  source 1..22: mol_type = other DNA
tttattctgaagttgtttctaa

SEQ ID NO: 98724 - DNA, 22 bp, synthetic construct
  misc_feature 1..22: note = chemically synthesized
  source 1..22: mol_type = other DNA
tattctgaagttgtttctaaat

SEQ ID NO: 98725 - DNA, 22 bp, synthetic construct
  misc_feature 1..22: note = chemically synthesized
  source 1..22: mol_type = other DNA
attctgaagttgtttctaaatt

SEQ ID NO: 98726 - DNA, 22 bp, synthetic construct
  misc_feature 1..22: note = chemically synthesized
  source 1..22: mol_type = other DNA
ttctgaagttgtttctaaattt

SEQ ID NO: 98727 - DNA, 22 bp, synthetic construct
  misc_feature 1..22: note = chemically synthesized
  source 1..22: mol_type = other DNA
tgaagttgtttctaaatttttc

SEQ ID NO: 98728 - DNA, 22 bp, synthetic construct
  misc_feature 1..22: note = chemically synthesized
  source 1..22: mol_type = other DNA
aagttgtttctaaatttttctt

SEQ ID NO: 98729 - DNA, 22 bp, synthetic construct
  misc_feature 1..22: note = chemically synthesized
  source 1..22: mol_type = other DNA
tttctaaatttttctttacctt

SEQ ID NO: 98730 - DNA, 22 bp, synthetic construct
  misc_feature 1..22: note = chemically synthesized
  source 1..22: mol_type = other DNA
ctaaatttttctttaccttttt

SEQ ID NO: 98731 - DNA, 22 bp, synthetic construct
  misc_feature 1..22: note = chemically synthesized
  source 1..22: mol_type = other DNA
taaatttttctttacctttttc

SEQ ID NO: 98732 - DNA, 22 bp, synthetic construct
  misc_feature 1..22: note = chemically synthesized
  source 1..22: mol_type = other DNA
aatttttctttacctttttctc

SEQ ID NO: 98733 - DNA, 22 bp, synthetic construct
  misc_feature 1..22: note = chemically synthesized
  source 1..22: mol_type = other DNA
ttctttacctttttctccctca

SEQ ID NO: 98734 - DNA, 22 bp, synthetic construct
  misc_feature 1..22: note = chemically synthesized
  source 1..22: mol_type = other DNA
tctttacctttttctccctcaa

SEQ ID NO: 98735 - DNA, 22 bp, synthetic construct
  misc_feature 1..22: note = chemically synthesized
  source 1..22: mol_type = other DNA
ctttacctttttctccctcaaa

SEQ ID NO: 98736 - DNA, 22 bp, synthetic construct
  misc_feature 1..22: note = chemically synthesized
  source 1..22: mol_type = other DNA
tttacctttttctccctcaaac

SEQ ID NO: 98737 - DNA, 22 bp, synthetic construct
  misc_feature 1..22: note = chemically synthesized
  source 1..22: mol_type = other DNA
tacctttttctccctcaaactt

SEQ ID NO: 98738 - DNA, 22 bp, synthetic construct
  misc_feature 1..22: note = chemically synthesized
  source 1..22: mol_type = other DNA
acctttttctccctcaaacttt

SEQ ID NO: 98739 - DNA, 22 bp, synthetic construct
  misc_feature 1..22: note = chemically synthesized
  source 1..22: mol_type = other DNA
cctttttctccctcaaactttc

SEQ ID NO: 98740 - DNA, 22 bp, synthetic construct
  misc_feature 1..22: note = chemically synthesized
  source 1..22: mol_type = other DNA
tttctccctcaaactttcctga

SEQ ID NO: 98741 - DNA, 22 bp, synthetic construct
  misc_feature 1..22: note = chemically synthesized
  source 1..22: mol_type = other DNA
ttctccctcaaactttcctgaa

SEQ ID NO: 98742 - DNA, 22 bp, synthetic construct
  misc_feature 1..22: note = chemically synthesized
  source 1..22: mol_type = other DNA
tctccctcaaactttcctgaag

SEQ ID NO: 98743 - DNA, 22 bp, synthetic construct
  misc_feature 1..22: note = chemically synthesized
  source 1..22: mol_type = other DNA
ctccctcaaactttcctgaaga

SEQ ID NO: 98744 - DNA, 22 bp, synthetic construct
  misc_feature 1..22: note = chemically synthesized
  source 1..22: mol_type = other DNA
tccctcaaactttcctgaagaa

SEQ ID NO: 98745 - DNA, 22 bp, synthetic construct
  misc_feature 1..22: note = chemically synthesized
  source 1..22: mol_type = other DNA
cctcaaactttcctgaagaaat

SEQ ID NO: 98746 - DNA, 22 bp, synthetic construct
  misc_feature 1..22: note = chemically synthesized
  source 1..22: mol_type = other DNA
aaactttcctgaagaaatgcaa

SEQ ID NO: 98747 - DNA, 22 bp, synthetic construct
  misc_feature 1..22: note = chemically synthesized
  source 1..22: mol_type = other DNA
tcctgaagaaatgcaattatgg

SEQ ID NO: 98748 - DNA, 22 bp, synthetic construct
  misc_feature 1..22: note = chemically synthesized
  source 1..22: mol_type = other DNA
cctgaagaaatgcaattatggt

SEQ ID NO: 98749 - DNA, 22 bp, synthetic construct
  misc_feature 1..22: note = chemically synthesized
  source 1..22: mol_type = other DNA
ctgaagaaatgcaattatggtt

SEQ ID NO: 98750 - DNA, 22 bp, synthetic construct
  misc_feature 1..22: note = chemically synthesized
  source 1..22: mol_type = other DNA
aagaaatgcaattatggttgag

SEQ ID NO: 98751 - DNA, 22 bp, synthetic construct
  misc_feature 1..22: note = chemically synthesized
  source 1..22: mol_type = other DNA
tggttgaggaagtatggtctgc

SEQ ID NO: 98752 - DNA, 22 bp, synthetic construct
  misc_feature 1..22: note = chemically synthesized
  source 1..22: mol_type = other DNA
aggaagtatggtctgcaactgt

SEQ ID NO: 98753 - DNA, 22 bp, synthetic construct
  misc_feature 1..22: note = chemically synthesized
  source 1..22: mol_type = other DNA
caactgtggcttggaccacaac

SEQ ID NO: 98754 - DNA, 22 bp, synthetic construct
  misc_feature 1..22: note = chemically synthesized
  source 1..22: mol_type = other DNA
tggcttggaccacaacttccaa

SEQ ID NO: 98755 - DNA, 22 bp, synthetic construct
  misc_feature 1..22: note = chemically synthesized
  source 1..22: mol_type = other DNA
ggaccacaacttccaatcgaca

SEQ ID NO: 98756 - DNA, 22 bp, synthetic construct
  misc_feature 1..22: note = chemically synthesized
  source 1..22: mol_type = other DNA
gaccacaacttccaatcgacaa

SEQ ID NO: 98757 - DNA, 22 bp, synthetic construct
  misc_feature 1..22: note = chemically synthesized
  source 1..22: mol_type = other DNA
ccaatcgacaagaagtaaaagt

SEQ ID NO: 98758 - DNA, 22 bp, synthetic construct
  misc_feature 1..22: note = chemically synthesized
  source 1..22: mol_type = other DNA
caatcgacaagaagtaaaagta

SEQ ID NO: 98759 - DNA, 22 bp, synthetic construct
  misc_feature 1..22: note = chemically synthesized
  source 1..22: mol_type = other DNA
cttctaatttctcgcatccaca

SEQ ID NO: 98760 - DNA, 22 bp, synthetic construct
  misc_feature 1..22: note = chemically synthesized
  source 1..22: mol_type = other DNA
ctaatttctcgcatccacaata

SEQ ID NO: 98761 - DNA, 22 bp, synthetic construct
  misc_feature 1..22: note = chemically synthesized
  source 1..22: mol_type = other DNA
taatttctcgcatccacaatat

SEQ ID NO: 98762 - DNA, 22 bp, synthetic construct
  misc_feature 1..22: note = chemically synthesized
  source 1..22: mol_type = other DNA
atttctcgcatccacaatatct

SEQ ID NO: 98763 - DNA, 22 bp, synthetic construct
  misc_feature 1..22: note = chemically synthesized
  source 1..22: mol_type = other DNA
ctcgcatccacaatatctgagt

SEQ ID NO: 98764 - DNA, 22 bp, synthetic construct
  misc_feature 1..22: note = chemically synthesized
  source 1..22: mol_type = other DNA
tcgcatccacaatatctgagtt

SEQ ID NO: 98765 - DNA, 22 bp, synthetic construct
  misc_feature 1..22: note = chemically synthesized
  source 1..22: mol_type = other DNA
gcatccacaatatctgagtttg

SEQ ID NO: 98766 - DNA, 22 bp, synthetic construct
  misc_feature 1..22: note = chemically synthesized
  source 1..22: mol_type = other DNA
agtttgtgttttgctgtggaaa

SEQ ID NO: 98767 - DNA, 22 bp, synthetic construct
  misc_feature 1..22: note = chemically synthesized
  source 1..22: mol_type = other DNA
gtgttttgctgtggaaaaaaca

SEQ ID NO: 98768 - DNA, 22 bp, synthetic construct
  misc_feature 1..22: note = chemically synthesized
  source 1..22: mol_type = other DNA
tgttttgctgtggaaaaaacac

SEQ ID NO: 98769 - DNA, 22 bp, synthetic construct
  misc_feature 1..22: note = chemically synthesized
  source 1..22: mol_type = other DNA
tgctgtggaaaaaacactgtct

SEQ ID NO: 98770 - DNA, 22 bp, synthetic construct
  misc_feature 1..22: note = chemically synthesized
  source 1..22: mol_type = other DNA
gctgtggaaaaaacactgtctt

SEQ ID NO: 98771 - DNA, 22 bp, synthetic construct
  misc_feature 1..22: note = chemically synthesized
  source 1..22: mol_type = other DNA
ctgtggaaaaaacactgtcttc

SEQ ID NO: 98772 - DNA, 22 bp, synthetic construct
  misc_feature 1..22: note = chemically synthesized
  source 1..22: mol_type = other DNA
tggaaaaaacactgtcttcaga

SEQ ID NO: 98773 - DNA, 22 bp, synthetic construct
  misc_feature 1..22: note = chemically synthesized
  source 1..22: mol_type = other DNA
tcttcagaggtagcagaactgg

SEQ ID NO: 98774 - DNA, 22 bp, synthetic construct
  misc_feature 1..22: note = chemically synthesized
  source 1..22: mol_type = other DNA
cagaggtagcagaactgggtct

SEQ ID NO: 98775 - DNA, 22 bp, synthetic construct
  misc_feature 1..22: note = chemically synthesized
  source 1..22: mol_type = other DNA
agaggtagcagaactgggtcta

SEQ ID NO: 98776 - DNA, 22 bp, synthetic construct
  misc_feature 1..22: note = chemically synthesized
  source 1..22: mol_type = other DNA
ggtctacatcctagccttacta

SEQ ID NO: 98777 - DNA, 22 bp, synthetic construct
  misc_feature 1..22: note = chemically synthesized
  source 1..22: mol_type = other DNA
catcctagccttactacttggt

SEQ ID NO: 98778 - DNA, 22 bp, synthetic construct
  misc_feature 1..22: note = chemically synthesized
  source 1..22: mol_type = other DNA
gccttactacttggtggttctg

SEQ ID NO: 98779 - DNA, 22 bp, synthetic construct
  misc_feature 1..22: note = chemically synthesized
  source 1..22: mol_type = other DNA
actacttggtggttctgtaagc

SEQ ID NO: 98780 - DNA, 22 bp, synthetic construct
  misc_feature 1..22: note = chemically synthesized
  source 1..22: mol_type = other DNA
ctacttggtggttctgtaagct

SEQ ID NO: 98781 - DNA, 22 bp, synthetic construct
  misc_feature 1..22: note = chemically synthesized
  source 1..22: mol_type = other DNA
cttggtggttctgtaagcttgg

SEQ ID NO: 98782 - DNA, 22 bp, synthetic construct
  misc_feature 1..22: note = chemically synthesized
  source 1..22: mol_type = other DNA
ggtggttctgtaagcttggaca

SEQ ID NO: 98783 - DNA, 22 bp, synthetic construct
  misc_feature 1..22: note = chemically synthesized
  source 1..22: mol_type = other DNA
gtggttctgtaagcttggacaa

SEQ ID NO: 98784 - DNA, 22 bp, synthetic construct
  misc_feature 1..22: note = chemically synthesized
  source 1..22: mol_type = other DNA
tgtaagcttggacaaattattt

SEQ ID NO: 98785 - DNA, 22 bp, synthetic construct
  misc_feature 1..22: note = chemically synthesized
  source 1..22: mol_type = other DNA
taagcttggacaaattatttca

SEQ ID NO: 98786 - DNA, 22 bp, synthetic construct
  misc_feature 1..22: note = chemically synthesized
  source 1..22: mol_type = other DNA
ggacaaattatttcatgtcttt

SEQ ID NO: 98787 - DNA, 22 bp, synthetic construct
  misc_feature 1..22: note = chemically synthesized
  source 1..22: mol_type = other DNA
gacaaattatttcatgtctttg

SEQ ID NO: 98788 - DNA, 22 bp, synthetic construct
  misc_feature 1..22: note = chemically synthesized
  source 1..22: mol_type = other DNA
tttcatgtctttgattttcgag

SEQ ID NO: 98789 - DNA, 22 bp, synthetic construct
  misc_feature 1..22: note = chemically synthesized
  source 1..22: mol_type = other DNA
catgtctttgattttcgagtcc

SEQ ID NO: 98790 - DNA, 22 bp, synthetic construct
  misc_feature 1..22: note = chemically synthesized
  source 1..22: mol_type = other DNA
atgtctttgattttcgagtccc

SEQ ID NO: 98791 - DNA, 22 bp, synthetic construct
  misc_feature 1..22: note = chemically synthesized
  source 1..22: mol_type = other DNA
tgattttcgagtccccagttaa

SEQ ID NO: 98792 - DNA, 22 bp, synthetic construct
  misc_feature 1..22: note = chemically synthesized
  source 1..22: mol_type = other DNA
gattttcgagtccccagttaat

SEQ ID NO: 98793 - DNA, 22 bp, synthetic construct
  misc_feature 1..22: note = chemically synthesized
  source 1..22: mol_type = other DNA
attttcgagtccccagttaata

SEQ ID NO: 98794 - DNA, 22 bp, synthetic construct
  misc_feature 1..22: note = chemically synthesized
  source 1..22: mol_type = other DNA
tcgagtccccagttaataagag

SEQ ID NO: 98795 - DNA, 22 bp, synthetic construct
  misc_feature 1..22: note = chemically synthesized
  source 1..22: mol_type = other DNA
cgagtccccagttaataagagc

SEQ ID NO: 98796 - DNA, 22 bp, synthetic construct
  misc_feature 1..22: note = chemically synthesized
  source 1..22: mol_type = other DNA
gagtccccagttaataagagct

SEQ ID NO: 98797 - DNA, 22 bp, synthetic construct
  misc_feature 1..22: note = chemically synthesized
  source 1..22: mol_type = other DNA
ataagagctcatgtaatgtaga

SEQ ID NO: 98798 - DNA, 22 bp, synthetic construct
  misc_feature 1..22: note = chemically synthesized
  source 1..22: mol_type = other DNA
atgtaatgtagacagtaggaga

SEQ ID NO: 98799 - DNA, 22 bp, synthetic construct
  misc_feature 1..22: note = chemically synthesized
  source 1..22: mol_type = other DNA
agaccatctgacttctaattac

SEQ ID NO: 98800 - DNA, 22 bp, synthetic construct
  misc_feature 1..22: note = chemically synthesized
  source 1..22: mol_type = other DNA
acttctaattactaattgtcta

SEQ ID NO: 98801 - DNA, 22 bp, synthetic construct
  misc_feature 1..22: note = chemically synthesized
  source 1..22: mol_type = other DNA
ctaattactaattgtctactta

SEQ ID NO: 98802 - DNA, 22 bp, synthetic construct
  misc_feature 1..22: note = chemically synthesized
  source 1..22: mol_type = other DNA
taattactaattgtctacttat

SEQ ID NO: 98803 - DNA, 22 bp, synthetic construct
  misc_feature 1..22: note = chemically synthesized
  source 1..22: mol_type = other DNA
attactaattgtctacttatta

SEQ ID NO: 98804 - DNA, 22 bp, synthetic construct
  misc_feature 1..22: note = chemically synthesized
  source 1..22: mol_type = other DNA
ctaattgtctacttattagctt

SEQ ID NO: 98805 - DNA, 22 bp, synthetic construct
  misc_feature 1..22: note = chemically synthesized
  source 1..22: mol_type = other DNA
attgtctacttattagcttgtg

SEQ ID NO: 98806 - DNA, 22 bp, synthetic construct
  misc_feature 1..22: note = chemically synthesized
  source 1..22: mol_type = other DNA
tctacttattagcttgtgcttt

SEQ ID NO: 98807 - DNA, 22 bp, synthetic construct
  misc_feature 1..22: note = chemically synthesized
  source 1..22: mol_type = other DNA
cttattagcttgtgctttcaat

SEQ ID NO: 98808 - DNA, 22 bp, synthetic construct
  misc_feature 1..22: note = chemically synthesized
  source 1..22: mol_type = other DNA
attagcttgtgctttcaataag

SEQ ID NO: 98809 - DNA, 22 bp, synthetic construct
  misc_feature 1..22: note = chemically synthesized
  source 1..22: mol_type = other DNA
ttagcttgtgctttcaataagt

SEQ ID NO: 98810 - DNA, 22 bp, synthetic construct
  misc_feature 1..22: note = chemically synthesized
  source 1..22: mol_type = other DNA
gcttgtgctttcaataagttga

SEQ ID NO: 98811 - DNA, 22 bp, synthetic construct
  misc_feature 1..22: note = chemically synthesized
  source 1..22: mol_type = other DNA
gtgctttcaataagttgatcta

SEQ ID NO: 98812 - DNA, 22 bp, synthetic construct
  misc_feature 1..22: note = chemically synthesized
  source 1..22: mol_type = other DNA
tgctttcaataagttgatctac

SEQ ID NO: 98813 - DNA, 22 bp, synthetic construct
  misc_feature 1..22: note = chemically synthesized
  source 1..22: mol_type = other DNA
tcaataagttgatctacactac

SEQ ID NO: 98814 - DNA, 22 bp, synthetic construct
  misc_feature 1..22: note = chemically synthesized
  source 1..22: mol_type = other DNA
caataagttgatctacactaca

SEQ ID NO: 98815 - DNA, 22 bp, synthetic construct
  misc_feature 1..22: note = chemically synthesized
  source 1..22: mol_type = other DNA
aataagttgatctacactacaa

SEQ ID NO: 98816 - DNA, 22 bp, synthetic construct
  misc_feature 1..22: note = chemically synthesized
  source 1..22: mol_type = other DNA
atctacactacaagtacattgg

SEQ ID NO: 98817 - DNA, 22 bp, synthetic construct
  misc_feature 1..22: note = chemically synthesized
  source 1..22: mol_type = other DNA
cactacaagtacattgggctcc

SEQ ID NO: 98818 - DNA, 22 bp, synthetic construct
  misc_feature 1..22: note = chemically synthesized
  source 1..22: mol_type = other DNA
caagtacattgggctcctcatc

SEQ ID NO: 98819 - DNA, 22 bp, synthetic construct
  misc_feature 1..22: note = chemically synthesized
  source 1..22: mol_type = other DNA
ggctcctcatcaataaatgagg

SEQ ID NO: 98820 - DNA, 22 bp, synthetic construct
  misc_feature 1..22: note = chemically synthesized
  source 1..22: mol_type = other DNA
ctcatcaataaatgaggtaata

SEQ ID NO: 98821 - DNA, 22 bp, synthetic construct
  misc_feature 1..22: note = chemically synthesized
  source 1..22: mol_type = other DNA
atcaataaatgaggtaataatc

SEQ ID NO: 98822 - DNA, 22 bp, synthetic construct
  misc_feature 1..22: note = chemically synthesized
  source 1..22: mol_type = other DNA
cttctgagtattggtgtgagta

SEQ ID NO: 98823 - DNA, 22 bp, synthetic construct
  misc_feature 1..22: note = chemically synthesized
  source 1..22: mol_type = other DNA
ctgagtattggtgtgagtaaaa

SEQ ID NO: 98824 - DNA, 22 bp, synthetic construct
  misc_feature 1..22: note = chemically synthesized
  source 1..22: mol_type = other DNA
tgagtattggtgtgagtaaaac

SEQ ID NO: 98825 - DNA, 22 bp, synthetic construct
  misc_feature 1..22: note = chemically synthesized
  source 1..22: mol_type = other DNA
agtattggtgtgagtaaaacta

SEQ ID NO: 98826 - DNA, 22 bp, synthetic construct
  misc_feature 1..22: note = chemically synthesized
  source 1..22: mol_type = other DNA
gtgtgagtaaaactaagttaat

SEQ ID NO: 98827 - DNA, 22 bp, synthetic construct
  misc_feature 1..22: note = chemically synthesized
  source 1..22: mol_type = other DNA
agttaattcatataataaactt

SEQ ID NO: 98828 - DNA, 22 bp, synthetic construct
  misc_feature 1..22: note = chemically synthesized
  source 1..22: mol_type = other DNA
attcatataataaacttctttt

SEQ ID NO: 98829 - DNA, 22 bp, synthetic construct
  misc_feature 1..22: note = chemically synthesized
  source 1..22: mol_type = other DNA
atataataaacttctttttttt

SEQ ID NO: 98830 - DNA, 22 bp, synthetic construct
  misc_feature 1..22: note = chemically synthesized
  source 1..22: mol_type = other DNA
ctttttttttttttgagatgga

SEQ ID NO: 98831 - DNA, 22 bp, synthetic construct
  misc_feature 1..22: note = chemically synthesized
  source 1..22: mol_type = other DNA
tttttttttttttgagatggag

SEQ ID NO: 98832 - DNA, 22 bp, synthetic construct
  misc_feature 1..22: note = chemically synthesized
  source 1..22: mol_type = other DNA
tttttttttttgagatggagtc

SEQ ID NO: 98833 - DNA, 22 bp, synthetic construct
  misc_feature 1..22: note = chemically synthesized
  source 1..22: mol_type = other DNA
ttttttttttgagatggagtct

SEQ ID NO: 98834 - DNA, 22 bp, synthetic construct
  misc_feature 1..22: note = chemically synthesized
  source 1..22: mol_type = other DNA
tttttttttgagatggagtctc

SEQ ID NO: 98835 - DNA, 22 bp, synthetic construct
  misc_feature 1..22: note = chemically synthesized
  source 1..22: mol_type = other DNA
ttttttttgagatggagtctca

SEQ ID NO: 98836 - DNA, 22 bp, synthetic construct
  misc_feature 1..22: note = chemically synthesized
  source 1..22: mol_type = other DNA
tttttttgagatggagtctcac

SEQ ID NO: 98837 - DNA, 22 bp, synthetic construct
  misc_feature 1..22: note = chemically synthesized
  source 1..22: mol_type = other DNA
ttttttgagatggagtctcact

SEQ ID NO: 98838 - DNA, 22 bp, synthetic construct
  misc_feature 1..22: note = chemically synthesized
  source 1..22: mol_type = other DNA
tttttgagatggagtctcactc

SEQ ID NO: 98839 - DNA, 22 bp, synthetic construct
  misc_feature 1..22: note = chemically synthesized
  source 1..22: mol_type = other DNA
ttttgagatggagtctcactct

SEQ ID NO: 98840 - DNA, 22 bp, synthetic construct
  misc_feature 1..22: note = chemically synthesized
  source 1..22: mol_type = other DNA
tttgagatggagtctcactctg

SEQ ID NO: 98841 - DNA, 22 bp, synthetic construct
  misc_feature 1..22: note = chemically synthesized
  source 1..22: mol_type = other DNA
ttgagatggagtctcactctgt

SEQ ID NO: 98842 - DNA, 22 bp, synthetic construct
  misc_feature 1..22: note = chemically synthesized
  source 1..22: mol_type = other DNA
tgagatggagtctcactctgtc

SEQ ID NO: 98843 - DNA, 22 bp, synthetic construct
  misc_feature 1..22: note = chemically synthesized
  source 1..22: mol_type = other DNA
gagatggagtctcactctgtcg

SEQ ID NO: 98844 - DNA, 22 bp, synthetic construct
  misc_feature 1..22: note = chemically synthesized
  source 1..22: mol_type = other DNA
agatggagtctcactctgtcgc

SEQ ID NO: 98845 - DNA, 22 bp, synthetic construct
  misc_feature 1..22: note = chemically synthesized
  source 1..22: mol_type = other DNA
actctgtcgcctaggctggagt

SEQ ID NO: 98846 - DNA, 22 bp, synthetic construct
  misc_feature 1..22: note = chemically synthesized
  source 1..22: mol_type = other DNA
tgtcgcctaggctggagtgcag

SEQ ID NO: 98847 - DNA, 22 bp, synthetic construct
  misc_feature 1..22: note = chemically synthesized
  source 1..22: mol_type = other DNA
tcgcctaggctggagtgcagtg

SEQ ID NO: 98848 - DNA, 22 bp, synthetic construct
  misc_feature 1..22: note = chemically synthesized
  source 1..22: mol_type = other DNA
ggctggagtgcagtggtgcaat

SEQ ID NO: 98849 - DNA, 22 bp, synthetic construct
  misc_feature 1..22: note = chemically synthesized
  source 1..22: mol_type = other DNA
gagtgcagtggtgcaatcttag

SEQ ID NO: 98850 - DNA, 22 bp, synthetic construct
  misc_feature 1..22: note = chemically synthesized
  source 1..22: mol_type = other DNA
agctcactgcaacctccacctc

SEQ ID NO: 98851 - DNA, 22 bp, synthetic construct
  misc_feature 1..22: note = chemically synthesized
  source 1..22: mol_type = other DNA
gctcactgcaacctccacctcc

SEQ ID NO: 98852 - DNA, 22 bp, synthetic construct
  misc_feature 1..22: note = chemically synthesized
  source 1..22: mol_type = other DNA
actgcaacctccacctcctggg

SEQ ID NO: 98853 - DNA, 22 bp, synthetic construct
  misc_feature 1..22: note = chemically synthesized
  source 1..22: mol_type = other DNA
caacctccacctcctgggttca

SEQ ID NO: 98854 - DNA, 22 bp, synthetic construct
  misc_feature 1..22: note = chemically synthesized
  source 1..22: mol_type = other DNA
cacctcctgggttcaagtgatt

SEQ ID NO: 98855 - DNA, 22 bp, synthetic construct
  misc_feature 1..22: note = chemically synthesized
  source 1..22: mol_type = other DNA
ctgggttcaagtgattctcctg

SEQ ID NO: 98856 - DNA, 22 bp, synthetic construct
  misc_feature 1..22: note = chemically synthesized
  source 1..22: mol_type = other DNA
ggttcaagtgattctcctgcct

SEQ ID NO: 98857 - DNA, 22 bp, synthetic construct
  misc_feature 1..22: note = chemically synthesized
  source 1..22: mol_type = other DNA
aagtgattctcctgcctcagcc

SEQ ID NO: 98858 - DNA, 22 bp, synthetic construct
  misc_feature 1..22: note = chemically synthesized
  source 1..22: mol_type = other DNA
tcctgcctcagcctcctgagta

SEQ ID NO: 98859 - DNA, 22 bp, synthetic construct
  misc_feature 1..22: note = chemically synthesized
  source 1..22: mol_type = other DNA
ctgcctcagcctcctgagtagc

SEQ ID NO: 98860 - DNA, 22 bp, synthetic construct
  misc_feature 1..22: note = chemically synthesized
  source 1..22: mol_type = other DNA
cctcagcctcctgagtagctgg

SEQ ID NO: 98861 - DNA, 22 bp, synthetic construct
  misc_feature 1..22: note = chemically synthesized
  source 1..22: mol_type = other DNA
agcctcctgagtagctgggatt

SEQ ID NO: 98862 - DNA, 22 bp, synthetic construct
  misc_feature 1..22: note = chemically synthesized
  source 1..22: mol_type = other DNA
ctgagtagctgggattatagac

SEQ ID NO: 98863 - DNA, 22 bp, synthetic construct
  misc_feature 1..22: note = chemically synthesized
  source 1..22: mol_type = other DNA
agtagctgggattatagacgcg

SEQ ID NO: 98864 - DNA, 22 bp, synthetic construct
  misc_feature 1..22: note = chemically synthesized
  source 1..22: mol_type = other DNA
ggattatagacgcgtgccacca

SEQ ID NO: 98865 - DNA, 22 bp, synthetic construct
  misc_feature 1..22: note = chemically synthesized
  source 1..22: mol_type = other DNA
tagacgcgtgccaccacacctg

SEQ ID NO: 98866 - DNA, 22 bp, synthetic construct
  misc_feature 1..22: note = chemically synthesized
  source 1..22: mol_type = other DNA
gctgattttttgtattttttag

SEQ ID NO: 98867 - DNA, 22 bp, synthetic construct
  misc_feature 1..22: note = chemically synthesized
  source 1..22: mol_type = other DNA
attttttgtattttttagtaga

SEQ ID NO: 98868 - DNA, 22 bp, synthetic construct
  misc_feature 1..22: note = chemically synthesized
  source 1..22: mol_type = other DNA
tttgtattttttagtagagaag

SEQ ID NO: 98869 - DNA, 22 bp, synthetic construct
  misc_feature 1..22: note = chemically synthesized
  source 1..22: mol_type = other DNA
ttgtattttttagtagagaagg

SEQ ID NO: 98870 - DNA, 22 bp, synthetic construct
  misc_feature 1..22: note = chemically synthesized
  source 1..22: mol_type = other DNA
tgtattttttagtagagaaggg

SEQ ID NO: 98871 - DNA, 22 bp, synthetic construct
  misc_feature 1..22: note = chemically synthesized
  source 1..22: mol_type = other DNA
gtattttttagtagagaagggg

SEQ ID NO: 98872 - DNA, 22 bp, synthetic construct
  misc_feature 1..22: note = chemically synthesized
  source 1..22: mol_type = other DNA
tattttttagtagagaaggggt

SEQ ID NO: 98873 - DNA, 22 bp, synthetic construct
  misc_feature 1..22: note = chemically synthesized
  source 1..22: mol_type = other DNA
tttagtagagaaggggtttcac

SEQ ID NO: 98874 - DNA, 22 bp, synthetic construct
  misc_feature 1..22: note = chemically synthesized
  source 1..22: mol_type = other DNA
ttagtagagaaggggtttcacc

SEQ ID NO: 98875 - DNA, 22 bp, synthetic construct
  misc_feature 1..22: note = chemically synthesized
  source 1..22: mol_type = other DNA
tagtagagaaggggtttcacca

SEQ ID NO: 98876 - DNA, 22 bp, synthetic construct
  misc_feature 1..22: note = chemically synthesized
  source 1..22: mol_type = other DNA
agtagagaaggggtttcaccat

SEQ ID NO: 98877 - DNA, 22 bp, synthetic construct
  misc_feature 1..22: note = chemically synthesized
  source 1..22: mol_type = other DNA
gtagagaaggggtttcaccatg

SEQ ID NO: 98878 - DNA, 22 bp, synthetic construct
  misc_feature 1..22: note = chemically synthesized
  source 1..22: mol_type = other DNA
caccatgttggccaggctggtc

SEQ ID NO: 98879 - DNA, 22 bp, synthetic construct
  misc_feature 1..22: note = chemically synthesized
  source 1..22: mol_type = other DNA
accatgttggccaggctggtct

SEQ ID NO: 98880 - DNA, 22 bp, synthetic construct
  misc_feature 1..22: note = chemically synthesized
  source 1..22: mol_type = other DNA
gccaggctggtctggaactcct

SEQ ID NO: 98881 - DNA, 22 bp, synthetic construct
  misc_feature 1..22: note = chemically synthesized
  source 1..22: mol_type = other DNA
gtctggaactcctgacctcagg

SEQ ID NO: 98882 - DNA, 22 bp, synthetic construct
  misc_feature 1..22: note = chemically synthesized
  source 1..22: mol_type = other DNA
gaactcctgacctcaggtgatc

SEQ ID NO: 98883 - DNA, 22 bp, synthetic construct
  misc_feature 1..22: note = chemically synthesized
  source 1..22: mol_type = other DNA
ctgacctcaggtgatccaattg

SEQ ID NO: 98884 - DNA, 22 bp, synthetic construct
  misc_feature 1..22: note = chemically synthesized
  source 1..22: mol_type = other DNA
acctcaggtgatccaattgcct

SEQ ID NO: 98885 - DNA, 22 bp, synthetic construct
  misc_feature 1..22: note = chemically synthesized
  source 1..22: mol_type = other DNA
aggtgatccaattgccttggcc

SEQ ID NO: 98886 - DNA, 22 bp, synthetic construct
  misc_feature 1..22: note = chemically synthesized
  source 1..22: mol_type = other DNA
ccttggcctcccaaagtgctgg

SEQ ID NO: 98887 - DNA, 22 bp, synthetic construct
  misc_feature 1..22: note = chemically synthesized
  source 1..22: mol_type = other DNA
ggcctcccaaagtgctgggatt

SEQ ID NO: 98888 - DNA, 22 bp, synthetic construct
  misc_feature 1..22: note = chemically synthesized
  source 1..22: mol_type = other DNA
gcctcccaaagtgctgggatta

SEQ ID NO: 98889 - DNA, 22 bp, synthetic construct
  misc_feature 1..22: note = chemically synthesized
  source 1..22: mol_type = other DNA
ccaaagtgctgggattacaggc

SEQ ID NO: 98890 - DNA, 22 bp, synthetic construct
  misc_feature 1..22: note = chemically synthesized
  source 1..22: mol_type = other DNA
ggattacaggcatgtaatccca

SEQ ID NO: 98891 - DNA, 22 bp, synthetic construct
  misc_feature 1..22: note = chemically synthesized
  source 1..22: mol_type = other DNA
caggcatgtaatcccatatatg

SEQ ID NO: 98892 - DNA, 22 bp, synthetic construct
  misc_feature 1..22: note = chemically synthesized
  source 1..22: mol_type = other DNA
atatgataaacttaaatttgat

SEQ ID NO: 98893 - DNA, 22 bp, synthetic construct
  misc_feature 1..22: note = chemically synthesized
  source 1..22: mol_type = other DNA
aaatttgattctagcatatact

SEQ ID NO: 98894 - DNA, 22 bp, synthetic construct
  misc_feature 1..22: note = chemically synthesized
  source 1..22: mol_type = other DNA
aatttgattctagcatatacta

SEQ ID NO: 98895 - DNA, 22 bp, synthetic construct
  misc_feature 1..22: note = chemically synthesized
  source 1..22: mol_type = other DNA
gattctagcatatactaagtac

SEQ ID NO: 98896 - DNA, 22 bp, synthetic construct
  misc_feature 1..22: note = chemically synthesized
  source 1..22: mol_type = other DNA
attctagcatatactaagtact

SEQ ID NO: 98897 - DNA, 22 bp, synthetic construct
  misc_feature 1..22: note = chemically synthesized
  source 1..22: mol_type = other DNA
tagcatatactaagtactcaag

SEQ ID NO: 98898 - DNA, 22 bp, synthetic construct
  misc_feature 1..22: note = chemically synthesized
  source 1..22: mol_type = other DNA
gcatatactaagtactcaagag

SEQ ID NO: 98899 - DNA, 22 bp, synthetic construct
  misc_feature 1..22: note = chemically synthesized
  source 1..22: mol_type = other DNA
agtactcaagaggtgttactta

SEQ ID NO: 98900 - DNA, 22 bp, synthetic construct
  misc_feature 1..22: note = chemically synthesized
  source 1..22: mol_type = other DNA
aagaggtgttacttatcattag

SEQ ID NO: 98901 - DNA, 22 bp, synthetic construct
  misc_feature 1..22: note = chemically synthesized
  source 1..22: mol_type = other DNA
cttatcattagtattaattata

SEQ ID NO: 98902 - DNA, 22 bp, synthetic construct
  misc_feature 1..22: note = chemically synthesized
  source 1..22: mol_type = other DNA
atcattagtattaattatagta

SEQ ID NO: 98903 - DNA, 22 bp, synthetic construct
  misc_feature 1..22: note = chemically synthesized
  source 1..22: mol_type = other DNA
tcattagtattaattatagtat

SEQ ID NO: 98904 - DNA, 22 bp, synthetic construct
  misc_feature 1..22: note = chemically synthesized
  source 1..22: mol_type = other DNA
gtattaattatagtatgttcaa

SEQ ID NO: 98905 - DNA, 22 bp, synthetic construct
  misc_feature 1..22: note = chemically synthesized
  source 1..22: mol_type = other DNA
attatagtatgttcaataatac

SEQ ID NO: 98906 - DNA, 22 bp, synthetic construct
  misc_feature 1..22: note = chemically synthesized
  source 1..22: mol_type = other DNA
tagtatgttcaataatacatat

SEQ ID NO: 98907 - DNA, 22 bp, synthetic construct
  misc_feature 1..22: note = chemically synthesized
  source 1..22: mol_type = other DNA
aataatacatatctcacagaat

SEQ ID NO: 98908 - DNA, 22 bp, synthetic construct
  misc_feature 1..22: note = chemically synthesized
  source 1..22: mol_type = other DNA
acagaattaccatatgtaatga

SEQ ID NO: 98909 - DNA, 22 bp, synthetic construct
  misc_feature 1..22: note = chemically synthesized
  source 1..22: mol_type = other DNA
ccatatgtaatgagattattaa

SEQ ID NO: 98910 - DNA, 22 bp, synthetic construct
  misc_feature 1..22: note = chemically synthesized
  source 1..22: mol_type = other DNA
ttaaatatcataaaatggcacc

SEQ ID NO: 98911 - DNA, 22 bp, synthetic construct
  misc_feature 1..22: note = chemically synthesized
  source 1..22: mol_type = other DNA
aatatcataaaatggcacctga

SEQ ID NO: 98912 - DNA, 22 bp, synthetic construct
  misc_feature 1..22: note = chemically synthesized
  source 1..22: mol_type = other DNA
acatatagaaagatttcagtaa

SEQ ID NO: 98913 - DNA, 22 bp, synthetic construct
  misc_feature 1..22: note = chemically synthesized
  source 1..22: mol_type = other DNA
cagtaagtattaattcccactt

SEQ ID NO: 98914 - DNA, 22 bp, synthetic construct
  misc_feature 1..22: note = chemically synthesized
  source 1..22: mol_type = other DNA
agtaagtattaattcccacttc

SEQ ID NO: 98915 - DNA, 22 bp, synthetic construct
  misc_feature 1..22: note = chemically synthesized
  source 1..22: mol_type = other DNA
attcccacttctctttcattta

SEQ ID NO: 98916 - DNA, 22 bp, synthetic construct
  misc_feature 1..22: note = chemically synthesized
  source 1..22: mol_type = other DNA
ccacttctctttcatttacctc

SEQ ID NO: 98917 - DNA, 22 bp, synthetic construct
  misc_feature 1..22: note = chemically synthesized
  source 1..22: mol_type = other DNA
ctctttcatttacctccagcct

SEQ ID NO: 98918 - DNA, 22 bp, synthetic construct
  misc_feature 1..22: note = chemically synthesized
  source 1..22: mol_type = other DNA
tctttcatttacctccagccta

SEQ ID NO: 98919 - DNA, 22 bp, synthetic construct
  misc_feature 1..22: note = chemically synthesized
  source 1..22: mol_type = other DNA
tttcatttacctccagcctaaa

SEQ ID NO: 98920 - DNA, 22 bp, synthetic construct
  misc_feature 1..22: note = chemically synthesized
  source 1..22: mol_type = other DNA
tcatttacctccagcctaaatc

SEQ ID NO: 98921 - DNA, 22 bp, synthetic construct
  misc_feature 1..22: note = chemically synthesized
  source 1..22: mol_type = other DNA
catttacctccagcctaaatct

SEQ ID NO: 98922 - DNA, 22 bp, synthetic construct
  misc_feature 1..22: note = chemically synthesized
  source 1..22: mol_type = other DNA
atttacctccagcctaaatcta

SEQ ID NO: 98923 - DNA, 22 bp, synthetic construct
  misc_feature 1..22: note = chemically synthesized
  source 1..22: mol_type = other DNA
acctccagcctaaatctacact

SEQ ID NO: 98924 - DNA, 22 bp, synthetic construct
  misc_feature 1..22: note = chemically synthesized
  source 1..22: mol_type = other DNA
cctccagcctaaatctacacta

SEQ ID NO: 98925 - DNA, 22 bp, synthetic construct
  misc_feature 1..22: note = chemically synthesized
  source 1..22: mol_type = other DNA
cagcctaaatctacactatttc

SEQ ID NO: 98926 - DNA, 22 bp, synthetic construct
  misc_feature 1..22: note = chemically synthesized
  source 1..22: mol_type = other DNA
aatctacactatttcctcgtgt

SEQ ID NO: 98927 - DNA, 22 bp, synthetic construct
  misc_feature 1..22: note = chemically synthesized
  source 1..22: mol_type = other DNA
cactatttcctcgtgtctctca

SEQ ID NO: 98928 - DNA, 22 bp, synthetic construct
  misc_feature 1..22: note = chemically synthesized
  source 1..22: mol_type = other DNA
tttcctcgtgtctctcatgtgg

SEQ ID NO: 98929 - DNA, 22 bp, synthetic construct
  misc_feature 1..22: note = chemically synthesized
  source 1..22: mol_type = other DNA
cctcgtgtctctcatgtggttt

SEQ ID NO: 98930 - DNA, 22 bp, synthetic construct
  misc_feature 1..22: note = chemically synthesized
  source 1..22: mol_type = other DNA
ctcgtgtctctcatgtggtttc

SEQ ID NO: 98931 - DNA, 22 bp, synthetic construct
  misc_feature 1..22: note = chemically synthesized
  source 1..22: mol_type = other DNA
gtgtctctcatgtggtttctag

SEQ ID NO: 98932 - DNA, 22 bp, synthetic construct
  misc_feature 1..22: note = chemically synthesized
  source 1..22: mol_type = other DNA
tcatgtggtttctagtcccttc

SEQ ID NO: 98933 - DNA, 22 bp, synthetic construct
  misc_feature 1..22: note = chemically synthesized
  source 1..22: mol_type = other DNA
atgtggtttctagtcccttcac

SEQ ID NO: 98934 - DNA, 22 bp, synthetic construct
  misc_feature 1..22: note = chemically synthesized
  source 1..22: mol_type = other DNA
ctagtcccttcaccatcttgtt

SEQ ID NO: 98935 - DNA, 22 bp, synthetic construct
  misc_feature 1..22: note = chemically synthesized
  source 1..22: mol_type = other DNA
tagtcccttcaccatcttgttt

SEQ ID NO: 98936 - DNA, 22 bp, synthetic construct
  misc_feature 1..22: note = chemically synthesized
  source 1..22: mol_type = other DNA
gtcccttcaccatcttgtttcc

SEQ ID NO: 98937 - DNA, 22 bp, synthetic construct
  misc_feature 1..22: note = chemically synthesized
  source 1..22: mol_type = other DNA
caccatcttgtttccctctcaa

SEQ ID NO: 98938 - DNA, 22 bp, synthetic construct
  misc_feature 1..22: note = chemically synthesized
  source 1..22: mol_type = other DNA
accatcttgtttccctctcaac

SEQ ID NO: 98939 - DNA, 22 bp, synthetic construct
  misc_feature 1..22: note = chemically synthesized
  source 1..22: mol_type = other DNA
gtttccctctcaactcctgtgc

SEQ ID NO: 98940 - DNA, 22 bp, synthetic construct
  misc_feature 1..22: note = chemically synthesized
  source 1..22: mol_type = other DNA
tttccctctcaactcctgtgca

SEQ ID NO: 98941 - DNA, 22 bp, synthetic construct
  misc_feature 1..22: note = chemically synthesized
  source 1..22: mol_type = other DNA
ccctctcaactcctgtgcagat

SEQ ID NO: 98942 - DNA, 22 bp, synthetic construct
  misc_feature 1..22: note = chemically synthesized
  source 1..22: mol_type = other DNA
cctctcaactcctgtgcagatt

SEQ ID NO: 98943 - DNA, 22 bp, synthetic construct
  misc_feature 1..22: note = chemically synthesized
  source 1..22: mol_type = other DNA
tcaactcctgtgcagattccta

SEQ ID NO: 98944 - DNA, 22 bp, synthetic construct
  misc_feature 1..22: note = chemically synthesized
  source 1..22: mol_type = other DNA
aactcctgtgcagattcctaaa

SEQ ID NO: 98945 - DNA, 22 bp, synthetic construct
  misc_feature 1..22: note = chemically synthesized
  source 1..22: mol_type = other DNA
ctgtgcagattcctaaaaattt

SEQ ID NO: 98946 - DNA, 22 bp, synthetic construct
  misc_feature 1..22: note = chemically synthesized
  source 1..22: mol_type = other DNA
tgcagattcctaaaaatttctc

SEQ ID NO: 98947 - DNA, 22 bp, synthetic construct
  misc_feature 1..22: note = chemically synthesized
  source 1..22: mol_type = other DNA
ctaaaaatttctcatgttcaga

SEQ ID NO: 98948 - DNA, 22 bp, synthetic construct
  misc_feature 1..22: note = chemically synthesized
  source 1..22: mol_type = other DNA
aaaatttctcatgttcagaacc

SEQ ID NO: 98949 - DNA, 22 bp, synthetic construct
  misc_feature 1..22: note = chemically synthesized
  source 1..22: mol_type = other DNA
ctcatgttcagaaccttgggct

SEQ ID NO: 98950 - DNA, 22 bp, synthetic construct
  misc_feature 1..22: note = chemically synthesized
  source 1..22: mol_type = other DNA
tcatgttcagaaccttgggctt

SEQ ID NO: 98951 - DNA, 22 bp, synthetic construct
  misc_feature 1..22: note = chemically synthesized
  source 1..22: mol_type = other DNA
atgttcagaaccttgggcttcc

SEQ ID NO: 98952 - DNA, 22 bp, synthetic construct
  misc_feature 1..22: note = chemically synthesized
  source 1..22: mol_type = other DNA
agaaccttgggcttccatgttt

SEQ ID NO: 98953 - DNA, 22 bp, synthetic construct
  misc_feature 1..22: note = chemically synthesized
  source 1..22: mol_type = other DNA
gggcttccatgtttccagtgaa

SEQ ID NO: 98954 - DNA, 22 bp, synthetic construct
  misc_feature 1..22: note = chemically synthesized
  source 1..22: mol_type = other DNA
ggcttccatgtttccagtgaag

SEQ ID NO: 98955 - DNA, 22 bp, synthetic construct
  misc_feature 1..22: note = chemically synthesized
  source 1..22: mol_type = other DNA
ccatgtttccagtgaagtcaga

SEQ ID NO: 98956 - DNA, 22 bp, synthetic construct
  misc_feature 1..22: note = chemically synthesized
  source 1..22: mol_type = other DNA
catgtttccagtgaagtcagat

SEQ ID NO: 98957 - DNA, 22 bp, synthetic construct
  misc_feature 1..22: note = chemically synthesized
  source 1..22: mol_type = other DNA
ccagtgaagtcagattttttta

SEQ ID NO: 98958 - DNA, 22 bp, synthetic construct
  misc_feature 1..22: note = chemically synthesized
  source 1..22: mol_type = other DNA
cagtgaagtcagatttttttag

SEQ ID NO: 98959 - DNA, 22 bp, synthetic construct
  misc_feature 1..22: note = chemically synthesized
  source 1..22: mol_type = other DNA
ttttagatggcaaagttgctgt

SEQ ID NO: 98960 - DNA, 22 bp, synthetic construct
  misc_feature 1..22: note = chemically synthesized
  source 1..22: mol_type = other DNA
tttagatggcaaagttgctgtt

SEQ ID NO: 98961 - DNA, 22 bp, synthetic construct
  misc_feature 1..22: note = chemically synthesized
  source 1..22: mol_type = other DNA
ttagatggcaaagttgctgtta

SEQ ID NO: 98962 - DNA, 22 bp, synthetic construct
  misc_feature 1..22: note = chemically synthesized
  source 1..22: mol_type = other DNA
tagatggcaaagttgctgttag

SEQ ID NO: 98963 - DNA, 22 bp, synthetic construct
  misc_feature 1..22: note = chemically synthesized
  source 1..22: mol_type = other DNA
agatggcaaagttgctgttaga

SEQ ID NO: 98964 - DNA, 22 bp, synthetic construct
  misc_feature 1..22: note = chemically synthesized
  source 1..22: mol_type = other DNA
gatggcaaagttgctgttagac

SEQ ID NO: 98965 - DNA, 22 bp, synthetic construct
  misc_feature 1..22: note = chemically synthesized
  source 1..22: mol_type = other DNA
ctgttagacaatttcatctgtg

SEQ ID NO: 98966 - DNA, 22 bp, synthetic construct
  misc_feature 1..22: note = chemically synthesized
  source 1..22: mol_type = other DNA
ttagacaatttcatctgtgccc

SEQ ID NO: 98967 - DNA, 22 bp, synthetic construct
  misc_feature 1..22: note = chemically synthesized
  source 1..22: mol_type = other DNA
gacaatttcatctgtgccctgc

SEQ ID NO: 98968 - DNA, 22 bp, synthetic construct
  misc_feature 1..22: note = chemically synthesized
  source 1..22: mol_type = other DNA
catctgtgccctgcttaggagc

SEQ ID NO: 98969 - DNA, 22 bp, synthetic construct
  misc_feature 1..22: note = chemically synthesized
  source 1..22: mol_type = other DNA
atctgtgccctgcttaggagct

SEQ ID NO: 98970 - DNA, 22 bp, synthetic construct
  misc_feature 1..22: note = chemically synthesized
  source 1..22: mol_type = other DNA
tgccctgcttaggagcttaatc

SEQ ID NO: 98971 - DNA, 22 bp, synthetic construct
  misc_feature 1..22: note = chemically synthesized
  source 1..22: mol_type = other DNA
cttaggagcttaatctttaatg

SEQ ID NO: 98972 - DNA, 22 bp, synthetic construct
  misc_feature 1..22: note = chemically synthesized
  source 1..22: mol_type = other DNA
aggagcttaatctttaatgaaa

SEQ ID NO: 98973 - DNA, 22 bp, synthetic construct
  misc_feature 1..22: note = chemically synthesized
  source 1..22: mol_type = other DNA
ggagcttaatctttaatgaaag

SEQ ID NO: 98974 - DNA, 22 bp, synthetic construct
  misc_feature 1..22: note = chemically synthesized
  source 1..22: mol_type = other DNA
aatctttaatgaaagctaagct

SEQ ID NO: 98975 - DNA, 22 bp, synthetic construct
  misc_feature 1..22: note = chemically synthesized
  source 1..22: mol_type = other DNA
atctttaatgaaagctaagctt

SEQ ID NO: 98976 - DNA, 22 bp, synthetic construct
  misc_feature 1..22: note = chemically synthesized
  source 1..22: mol_type = other DNA
taatgaaagctaagctttcatt

SEQ ID NO: 98977 - DNA, 22 bp, synthetic construct
  misc_feature 1..22: note = chemically synthesized
  source 1..22: mol_type = other DNA
aatgaaagctaagctttcatta

SEQ ID NO: 98978 - DNA, 22 bp, synthetic construct
  misc_feature 1..22: note = chemically synthesized
  source 1..22: mol_type = other DNA
atgaaagctaagctttcattaa

SEQ ID NO: 98979 - DNA, 22 bp, synthetic construct
  misc_feature 1..22: note = chemically synthesized
  source 1..22: mol_type = other DNA
agctttcattaaaaaaagtcta

SEQ ID NO: 98980 - DNA, 22 bp, synthetic construct
  misc_feature 1..22: note = chemically synthesized
  source 1..22: mol_type = other DNA
tcattaaaaaaagtctaaccag

SEQ ID NO: 98981 - DNA, 22 bp, synthetic construct
  misc_feature 1..22: note = chemically synthesized
  source 1..22: mol_type = other DNA
cattaaaaaaagtctaaccagc

SEQ ID NO: 98982 - DNA, 22 bp, synthetic construct
  misc_feature 1..22: note = chemically synthesized
  source 1..22: mol_type = other DNA
attaaaaaaagtctaaccagct

SEQ ID NO: 98983 - DNA, 22 bp, synthetic construct
  misc_feature 1..22: note = chemically synthesized
  source 1..22: mol_type = other DNA
aaaaaagtctaaccagctgcat

SEQ ID NO: 98984 - DNA, 22 bp, synthetic construct
  misc_feature 1..22: note = chemically synthesized
  source 1..22: mol_type = other DNA
accagctgcattcgactttgac

SEQ ID NO: 98985 - DNA, 22 bp, synthetic construct
  misc_feature 1..22: note = chemically synthesized
  source 1..22: mol_type = other DNA
cattcgactttgactgcagcag

SEQ ID NO: 98986 - DNA, 22 bp, synthetic construct
  misc_feature 1..22: note = chemically synthesized
  source 1..22: mol_type = other DNA
gactttgactgcagcagctggt

SEQ ID NO: 98987 - DNA, 22 bp, synthetic construct
  misc_feature 1..22: note = chemically synthesized
  source 1..22: mol_type = other DNA
tgactgcagcagctggttagaa

SEQ ID NO: 98988 - DNA, 22 bp, synthetic construct
  misc_feature 1..22: note = chemically synthesized
  source 1..22: mol_type = other DNA
gactgcagcagctggttagaag

SEQ ID NO: 98989 - DNA, 22 bp, synthetic construct
  misc_feature 1..22: note = chemically synthesized
  source 1..22: mol_type = other DNA
actgcagcagctggttagaagg

SEQ ID NO: 98990 - DNA, 22 bp, synthetic construct
  misc_feature 1..22: note = chemically synthesized
  source 1..22: mol_type = other DNA
cagcagctggttagaaggttct

SEQ ID NO: 98991 - DNA, 22 bp, synthetic construct
  misc_feature 1..22: note = chemically synthesized
  source 1..22: mol_type = other DNA
gttagaaggttctactggagga

SEQ ID NO: 98992 - DNA, 22 bp, synthetic construct
  misc_feature 1..22: note = chemically synthesized
  source 1..22: mol_type = other DNA
gaaggttctactggaggagggt

SEQ ID NO: 98993 - DNA, 22 bp, synthetic construct
  misc_feature 1..22: note = chemically synthesized
  source 1..22: mol_type = other DNA
tactggaggagggtcccagccc

SEQ ID NO: 98994 - DNA, 22 bp, synthetic construct
  misc_feature 1..22: note = chemically synthesized
  source 1..22: mol_type = other DNA
ctggaggagggtcccagcccat

SEQ ID NO: 98995 - DNA, 22 bp, synthetic construct
  misc_feature 1..22: note = chemically synthesized
  source 1..22: mol_type = other DNA
gaggagggtcccagcccattgc

SEQ ID NO: 98996 - DNA, 22 bp, synthetic construct
  misc_feature 1..22: note = chemically synthesized
  source 1..22: mol_type = other DNA
ctaaattaacatcaggctctga

SEQ ID NO: 98997 - DNA, 22 bp, synthetic construct
  misc_feature 1..22: note = chemically synthesized
  source 1..22: mol_type = other DNA
aattaacatcaggctctgagac

SEQ ID NO: 98998 - DNA, 22 bp, synthetic construct
  misc_feature 1..22: note = chemically synthesized
  source 1..22: mol_type = other DNA
acatcaggctctgagactggca

SEQ ID NO: 98999 - DNA, 22 bp, synthetic construct
  misc_feature 1..22: note = chemically synthesized
  source 1..22: mol_type = other DNA
tgagactggcagtatatctcta

SEQ ID NO: 99000 - DNA, 22 bp, synthetic construct
  misc_feature 1..22: note = chemically synthesized
  source 1..22: mol_type = other DNA
agactggcagtatatctctaac

SEQ ID NO: 99001 - DNA, 22 bp, synthetic construct
  misc_feature 1..22: note = chemically synthesized
  source 1..22: mol_type = other DNA
gcagtatatctctaacagtggt

SEQ ID NO: 99002 - DNA, 22 bp, synthetic construct
  misc_feature 1..22: note = chemically synthesized
  source 1..22: mol_type = other DNA
taacagtggttgatgctatctt

SEQ ID NO: 99003 - DNA, 22 bp, synthetic construct
  misc_feature 1..22: note = chemically synthesized
  source 1..22: mol_type = other DNA
acagtggttgatgctatcttct

SEQ ID NO: 99004 - DNA, 22 bp, synthetic construct
  misc_feature 1..22: note = chemically synthesized
  source 1..22: mol_type = other DNA
atgctatcttctggaacttgcc

SEQ ID NO: 99005 - DNA, 22 bp, synthetic construct
  misc_feature 1..22: note = chemically synthesized
  source 1..22: mol_type = other DNA
tcttctggaacttgcctgctac

SEQ ID NO: 99006 - DNA, 22 bp, synthetic construct
  misc_feature 1..22: note = chemically synthesized
  source 1..22: mol_type = other DNA
ctggaacttgcctgctacattg

SEQ ID NO: 99007 - DNA, 22 bp, synthetic construct
  misc_feature 1..22: note = chemically synthesized
  source 1..22: mol_type = other DNA
tggaacttgcctgctacattga

SEQ ID NO: 99008 - DNA, 22 bp, synthetic construct
  misc_feature 1..22: note = chemically synthesized
  source 1..22: mol_type = other DNA
gaacttgcctgctacattgaga

SEQ ID NO: 99009 - DNA, 22 bp, synthetic construct
  misc_feature 1..22: note = chemically synthesized
  source 1..22: mol_type = other DNA
gcctgctacattgagaccactg

SEQ ID NO: 99010 - DNA, 22 bp, synthetic construct
  misc_feature 1..22: note = chemically synthesized
  source 1..22: mol_type = other DNA
cctgctacattgagaccactga

SEQ ID NO: 99011 - DNA, 22 bp, synthetic construct
  misc_feature 1..22: note = chemically synthesized
  source 1..22: mol_type = other DNA
ctacattgagaccactgaccca

SEQ ID NO: 99012 - DNA, 22 bp, synthetic construct
  misc_feature 1..22: note = chemically synthesized
  source 1..22: mol_type = other DNA
cattgagaccactgacccatac

SEQ ID NO: 99013 - DNA, 22 bp, synthetic construct
  misc_feature 1..22: note = chemically synthesized
  source 1..22: mol_type = other DNA
agaccactgacccatacatagg

SEQ ID NO: 99014 - DNA, 22 bp, synthetic construct
  misc_feature 1..22: note = chemically synthesized
  source 1..22: mol_type = other DNA
acccatacataggaagcccata

SEQ ID NO: 99015 - DNA, 22 bp, synthetic construct
  misc_feature 1..22: note = chemically synthesized
  source 1..22: mol_type = other DNA
tgtcctgaactgttaggccact

SEQ ID NO: 99016 - DNA, 22 bp, synthetic construct
  misc_feature 1..22: note = chemically synthesized
  source 1..22: mol_type = other DNA
tcctgaactgttaggccactgg

SEQ ID NO: 99017 - DNA, 22 bp, synthetic construct
  misc_feature 1..22: note = chemically synthesized
  source 1..22: mol_type = other DNA
aactgttaggccactggtccag

SEQ ID NO: 99018 - DNA, 22 bp, synthetic construct
  misc_feature 1..22: note = chemically synthesized
  source 1..22: mol_type = other DNA
ttaggccactggtccagagagt

SEQ ID NO: 99019 - DNA, 22 bp, synthetic construct
  misc_feature 1..22: note = chemically synthesized
  source 1..22: mol_type = other DNA
ggccactggtccagagagtgtg

SEQ ID NO: 99020 - DNA, 22 bp, synthetic construct
  misc_feature 1..22: note = chemically synthesized
  source 1..22: mol_type = other DNA
gtccagagagtgtgcatctcct

SEQ ID NO: 99021 - DNA, 22 bp, synthetic construct
  misc_feature 1..22: note = chemically synthesized
  source 1..22: mol_type = other DNA
ctttgatcctcataataaccct

SEQ ID NO: 99022 - DNA, 22 bp, synthetic construct
  misc_feature 1..22: note = chemically synthesized
  source 1..22: mol_type = other DNA
tgatcctcataataaccctatg

SEQ ID NO: 99023 - DNA, 22 bp, synthetic construct
  misc_feature 1..22: note = chemically synthesized
  source 1..22: mol_type = other DNA
gatcctcataataaccctatga

SEQ ID NO: 99024 - DNA, 22 bp, synthetic construct
  misc_feature 1..22: note = chemically synthesized
  source 1..22: mol_type = other DNA
atcctcataataaccctatgag

SEQ ID NO: 99025 - DNA, 22 bp, synthetic construct
  misc_feature 1..22: note = chemically synthesized
  source 1..22: mol_type = other DNA
ataataaccctatgagatagac

SEQ ID NO: 99026 - DNA, 22 bp, synthetic construct
  misc_feature 1..22: note = chemically synthesized
  source 1..22: mol_type = other DNA
tgagatagacacaattattact

SEQ ID NO: 99027 - DNA, 22 bp, synthetic construct
  misc_feature 1..22: note = chemically synthesized
  source 1..22: mol_type = other DNA
ttactcttactttatagatgat

SEQ ID NO: 99028 - DNA, 22 bp, synthetic construct
  misc_feature 1..22: note = chemically synthesized
  source 1..22: mol_type = other DNA
ctcttactttatagatgatgat

SEQ ID NO: 99029 - DNA, 22 bp, synthetic construct
  misc_feature 1..22: note = chemically synthesized
  source 1..22: mol_type = other DNA
ttactttatagatgatgatcct

SEQ ID NO: 99030 - DNA, 22 bp, synthetic construct
  misc_feature 1..22: note = chemically synthesized
  source 1..22: mol_type = other DNA
actttatagatgatgatcctga

SEQ ID NO: 99031 - DNA, 22 bp, synthetic construct
  misc_feature 1..22: note = chemically synthesized
  source 1..22: mol_type = other DNA
ctttatagatgatgatcctgaa

SEQ ID NO: 99032 - DNA, 22 bp, synthetic construct
  misc_feature 1..22: note = chemically synthesized
  source 1..22: mol_type = other DNA
tatagatgatgatcctgaaaac

SEQ ID NO: 99033 - DNA, 22 bp, synthetic construct
  misc_feature 1..22: note = chemically synthesized
  source 1..22: mol_type = other DNA
atagatgatgatcctgaaaaca

SEQ ID NO: 99034 - DNA, 22 bp, synthetic construct
  misc_feature 1..22: note = chemically synthesized
  source 1..22: mol_type = other DNA
tagatgatgatcctgaaaacat

SEQ ID NO: 99035 - DNA, 22 bp, synthetic construct
  misc_feature 1..22: note = chemically synthesized
  source 1..22: mol_type = other DNA
aaaacataggagtcaaggcact

SEQ ID NO: 99036 - DNA, 22 bp, synthetic construct
  misc_feature 1..22: note = chemically synthesized
  source 1..22: mol_type = other DNA
gcccctagctgggggtataggg

SEQ ID NO: 99037 - DNA, 22 bp, synthetic construct
  misc_feature 1..22: note = chemically synthesized
  source 1..22: mol_type = other DNA
cccctagctgggggtatagggg

SEQ ID NO: 99038 - DNA, 22 bp, synthetic construct
  misc_feature 1..22: note = chemically synthesized
  source 1..22: mol_type = other DNA
gctgggggtataggggagcagt

SEQ ID NO: 99039 - DNA, 22 bp, synthetic construct
  misc_feature 1..22: note = chemically synthesized
  source 1..22: mol_type = other DNA
ggggtataggggagcagtccca

SEQ ID NO: 99040 - DNA, 22 bp, synthetic construct
  misc_feature 1..22: note = chemically synthesized
  source 1..22: mol_type = other DNA
ctatgctgtgcctcccccacct

SEQ ID NO: 99041 - DNA, 22 bp, synthetic construct
  misc_feature 1..22: note = chemically synthesized
  source 1..22: mol_type = other DNA
tgctgtgcctcccccacctttc

SEQ ID NO: 99042 - DNA, 22 bp, synthetic construct
  misc_feature 1..22: note = chemically synthesized
  source 1..22: mol_type = other DNA
tgcctcccccacctttcccatg

SEQ ID NO: 99043 - DNA, 22 bp, synthetic construct
  misc_feature 1..22: note = chemically synthesized
  source 1..22: mol_type = other DNA
ccccacctttcccatgtctgcc

SEQ ID NO: 99044 - DNA, 22 bp, synthetic construct
  misc_feature 1..22: note = chemically synthesized
  source 1..22: mol_type = other DNA
tcccatgtctgccctctactca

SEQ ID NO: 99045 - DNA, 22 bp, synthetic construct
  misc_feature 1..22: note = chemically synthesized
  source 1..22: mol_type = other DNA
cccatgtctgccctctactcat

SEQ ID NO: 99046 - DNA, 22 bp, synthetic construct
  misc_feature 1..22: note = chemically synthesized
  source 1..22: mol_type = other DNA
ccatgtctgccctctactcatg

SEQ ID NO: 99047 - DNA, 22 bp, synthetic construct
  misc_feature 1..22: note = chemically synthesized
  source 1..22: mol_type = other DNA
ccctctactcatggtctatctc

SEQ ID NO: 99048 - DNA, 22 bp, synthetic construct
  misc_feature 1..22: note = chemically synthesized
  source 1..22: mol_type = other DNA
tactcatggtctatctctcctg

SEQ ID NO: 99049 - DNA, 22 bp, synthetic construct
  misc_feature 1..22: note = chemically synthesized
  source 1..22: mol_type = other DNA
ctcatggtctatctctcctggc

SEQ ID NO: 99050 - DNA, 22 bp, synthetic construct
  misc_feature 1..22: note = chemically synthesized
  source 1..22: mol_type = other DNA
atggtctatctctcctggctcc

SEQ ID NO: 99051 - DNA, 22 bp, synthetic construct
  misc_feature 1..22: note = chemically synthesized
  source 1..22: mol_type = other DNA
tctctcctggctcctgggagtc

SEQ ID NO: 99052 - DNA, 22 bp, synthetic construct
  misc_feature 1..22: note = chemically synthesized
  source 1..22: mol_type = other DNA
tcctggctcctgggagtcatgg

SEQ ID NO: 99053 - DNA, 22 bp, synthetic construct
  misc_feature 1..22: note = chemically synthesized
  source 1..22: mol_type = other DNA
ctggctcctgggagtcatggac

SEQ ID NO: 99054 - DNA, 22 bp, synthetic construct
  misc_feature 1..22: note = chemically synthesized
  source 1..22: mol_type = other DNA
gctcctgggagtcatggactcc

SEQ ID NO: 99055 - DNA, 22 bp, synthetic construct
  misc_feature 1..22: note = chemically synthesized
  source 1..22: mol_type = other DNA
ctgggagtcatggactccaccc

SEQ ID NO: 99056 - DNA, 22 bp, synthetic construct
  misc_feature 1..22: note = chemically synthesized
  source 1..22: mol_type = other DNA
ggagtcatggactccacccagc

SEQ ID NO: 99057 - DNA, 22 bp, synthetic construct
  misc_feature 1..22: note = chemically synthesized
  source 1..22: mol_type = other DNA
cacccagcaccaccaacctgac

SEQ ID NO: 99058 - DNA, 22 bp, synthetic construct
  misc_feature 1..22: note = chemically synthesized
  source 1..22: mol_type = other DNA
acctaaccacctatctgagcct

SEQ ID NO: 99059 - DNA, 22 bp, synthetic construct
  misc_feature 1..22: note = chemically synthesized
  source 1..22: mol_type = other DNA
accacctatctgagcctgccag

SEQ ID NO: 99060 - DNA, 22 bp, synthetic construct
  misc_feature 1..22: note = chemically synthesized
  source 1..22: mol_type = other DNA
tctgagcctgccagcctataac

SEQ ID NO: 99061 - DNA, 22 bp, synthetic construct
  misc_feature 1..22: note = chemically synthesized
  source 1..22: mol_type = other DNA
agcctgccagcctataacccat

SEQ ID NO: 99062 - DNA, 22 bp, synthetic construct
  misc_feature 1..22: note = chemically synthesized
  source 1..22: mol_type = other DNA
ccagcctataacccatctgggc

SEQ ID NO: 99063 - DNA, 22 bp, synthetic construct
  misc_feature 1..22: note = chemically synthesized
  source 1..22: mol_type = other DNA
taacccatctgggccctgatag

SEQ ID NO: 99064 - DNA, 22 bp, synthetic construct
  misc_feature 1..22: note = chemically synthesized
  source 1..22: mol_type = other DNA
ggccctgatagctggtggccag

SEQ ID NO: 99065 - DNA, 22 bp, synthetic construct
  misc_feature 1..22: note = chemically synthesized
  source 1..22: mol_type = other DNA
atagctggtggccagccctgac

SEQ ID NO: 99066 - DNA, 22 bp, synthetic construct
  misc_feature 1..22: note = chemically synthesized
  source 1..22: mol_type = other DNA
gtggccagccctgaccccaccc

SEQ ID NO: 99067 - DNA, 22 bp, synthetic construct
  misc_feature 1..22: note = chemically synthesized
  source 1..22: mol_type = other DNA
accccaccccaccctccctgga

SEQ ID NO: 99068 - DNA, 22 bp, synthetic construct
  misc_feature 1..22: note = chemically synthesized
  source 1..22: mol_type = other DNA
cctggaacctctgatagacaca

SEQ ID NO: 99069 - DNA, 22 bp, synthetic construct
  misc_feature 1..22: note = chemically synthesized
  source 1..22: mol_type = other DNA
gaacctctgatagacacatctg

SEQ ID NO: 99070 - DNA, 22 bp, synthetic construct
  misc_feature 1..22: note = chemically synthesized
  source 1..22: mol_type = other DNA
tgatagacacatctggcacacc

SEQ ID NO: 99071 - DNA, 22 bp, synthetic construct
  misc_feature 1..22: note = chemically synthesized
  source 1..22: mol_type = other DNA
atagacacatctggcacaccag

SEQ ID NO: 99072 - DNA, 22 bp, synthetic construct
  misc_feature 1..22: note = chemically synthesized
  source 1..22: mol_type = other DNA
gcacaccagctcgcaaagtcac

SEQ ID NO: 99073 - DNA, 22 bp, synthetic construct
  misc_feature 1..22: note = chemically synthesized
  source 1..22: mol_type = other DNA
gcaaagtcaccgtgagggtctt

SEQ ID NO: 99074 - DNA, 22 bp, synthetic construct
  misc_feature 1..22: note = chemically synthesized
  source 1..22: mol_type = other DNA
gtgtttgctgagtcaaaattcc

SEQ ID NO: 99075 - DNA, 22 bp, synthetic construct
  misc_feature 1..22: note = chemically synthesized
  source 1..22: mol_type = other DNA
tgtttgctgagtcaaaattcct

SEQ ID NO: 99076 - DNA, 22 bp, synthetic construct
  misc_feature 1..22: note = chemically synthesized
  source 1..22: mol_type = other DNA
gctgagtcaaaattccttgaaa

SEQ ID NO: 99077 - DNA, 22 bp, synthetic construct
  misc_feature 1..22: note = chemically synthesized
  source 1..22: mol_type = other DNA
ctgagtcaaaattccttgaaat

SEQ ID NO: 99078 - DNA, 22 bp, synthetic construct
  misc_feature 1..22: note = chemically synthesized
  source 1..22: mol_type = other DNA
agtcaaaattccttgaaatcca

SEQ ID NO: 99079 - DNA, 22 bp, synthetic construct
  misc_feature 1..22: note = chemically synthesized
  source 1..22: mol_type = other DNA
cttgaaatccaagtccttagag

SEQ ID NO: 99080 - DNA, 22 bp, synthetic construct
  misc_feature 1..22: note = chemically synthesized
  source 1..22: mol_type = other DNA
gaaatccaagtccttagagact

SEQ ID NO: 99081 - DNA, 22 bp, synthetic construct
  misc_feature 1..22: note = chemically synthesized
  source 1..22: mol_type = other DNA
aaatccaagtccttagagactc

SEQ ID NO: 99082 - DNA, 22 bp, synthetic construct
  misc_feature 1..22: note = chemically synthesized
  source 1..22: mol_type = other DNA
agagactcctgctcccaaattt

SEQ ID NO: 99083 - DNA, 22 bp, synthetic construct
  misc_feature 1..22: note = chemically synthesized
  source 1..22: mol_type = other DNA
gagactcctgctcccaaattta

SEQ ID NO: 99084 - DNA, 22 bp, synthetic construct
  misc_feature 1..22: note = chemically synthesized
  source 1..22: mol_type = other DNA
ctgctcccaaatttacagtcat

SEQ ID NO: 99085 - DNA, 22 bp, synthetic construct
  misc_feature 1..22: note = chemically synthesized
  source 1..22: mol_type = other DNA
ctcccaaatttacagtcataga

SEQ ID NO: 99086 - DNA, 22 bp, synthetic construct
  misc_feature 1..22: note = chemically synthesized
  source 1..22: mol_type = other DNA
ccaaatttacagtcatagactt

SEQ ID NO: 99087 - DNA, 22 bp, synthetic construct
  misc_feature 1..22: note = chemically synthesized
  source 1..22: mol_type = other DNA
acagtcatagacttcttcatgg

SEQ ID NO: 99088 - DNA, 22 bp, synthetic construct
  misc_feature 1..22: note = chemically synthesized
  source 1..22: mol_type = other DNA
cagtcatagacttcttcatggc

SEQ ID NO: 99089 - DNA, 22 bp, synthetic construct
  misc_feature 1..22: note = chemically synthesized
  source 1..22: mol_type = other DNA
cttcatggctgtctcctttatc

SEQ ID NO: 99090 - DNA, 22 bp, synthetic construct
  misc_feature 1..22: note = chemically synthesized
  source 1..22: mol_type = other DNA
ttcatggctgtctcctttatcc

SEQ ID NO: 99091 - DNA, 22 bp, synthetic construct
  misc_feature 1..22: note = chemically synthesized
  source 1..22: mol_type = other DNA
catggctgtctcctttatccac

SEQ ID NO: 99092 - DNA, 22 bp, synthetic construct
  misc_feature 1..22: note = chemically synthesized
  source 1..22: mol_type = other DNA
atggctgtctcctttatccaca

SEQ ID NO: 99093 - DNA, 22 bp, synthetic construct
  misc_feature 1..22: note = chemically synthesized
  source 1..22: mol_type = other DNA
tctcctttatccacagaatgat

SEQ ID NO: 99094 - DNA, 22 bp, synthetic construct
  misc_feature 1..22: note = chemically synthesized
  source 1..22: mol_type = other DNA
ctttatccacagaatgattcct

SEQ ID NO: 99095 - DNA, 22 bp, synthetic construct
  misc_feature 1..22: note = chemically synthesized
  source 1..22: mol_type = other DNA
tatccacagaatgattcctttg

SEQ ID NO: 99096 - DNA, 22 bp, synthetic construct
  misc_feature 1..22: note = chemically synthesized
  source 1..22: mol_type = other DNA
atccacagaatgattcctttgc

SEQ ID NO: 99097 - DNA, 22 bp, synthetic construct
  misc_feature 1..22: note = chemically synthesized
  source 1..22: mol_type = other DNA
tccacagaatgattcctttgct

SEQ ID NO: 99098 - DNA, 22 bp, synthetic construct
  misc_feature 1..22: note = chemically synthesized
  source 1..22: mol_type = other DNA
ctttgcttcattgccccatcca

SEQ ID NO: 99099 - DNA, 22 bp, synthetic construct
  misc_feature 1..22: note = chemically synthesized
  source 1..22: mol_type = other DNA
tgcttcattgccccatccatct

SEQ ID NO: 99100 - DNA, 22 bp, synthetic construct
  misc_feature 1..22: note = chemically synthesized
  source 1..22: mol_type = other DNA
gcttcattgccccatccatctg

SEQ ID NO: 99101 - DNA, 22 bp, synthetic construct
  misc_feature 1..22: note = chemically synthesized
  source 1..22: mol_type = other DNA
cttcattgccccatccatctga

SEQ ID NO: 99102 - DNA, 22 bp, synthetic construct
  misc_feature 1..22: note = chemically synthesized
  source 1..22: mol_type = other DNA
cattgccccatccatctgatcc

SEQ ID NO: 99103 - DNA, 22 bp, synthetic construct
  misc_feature 1..22: note = chemically synthesized
  source 1..22: mol_type = other DNA
attgccccatccatctgatcct

SEQ ID NO: 99104 - DNA, 22 bp, synthetic construct
  misc_feature 1..22: note = chemically synthesized
  source 1..22: mol_type = other DNA
ccccatccatctgatcctcctc

SEQ ID NO: 99105 - DNA, 22 bp, synthetic construct
  misc_feature 1..22: note = chemically synthesized
  source 1..22: mol_type = other DNA
atcctcctcatcagtgcagcac

SEQ ID NO: 99106 - DNA, 22 bp, synthetic construct
  misc_feature 1..22: note = chemically synthesized
  source 1..22: mol_type = other DNA
ctcatcagtgcagcacagggcc

SEQ ID NO: 99107 - DNA, 22 bp, synthetic construct
  misc_feature 1..22: note = chemically synthesized
  source 1..22: mol_type = other DNA
atcagtgcagcacagggcccat

SEQ ID NO: 99108 - DNA, 22 bp, synthetic construct
  misc_feature 1..22: note = chemically synthesized
  source 1..22: mol_type = other DNA
cagagtctcacataggtctggc

SEQ ID NO: 99109 - DNA, 22 bp, synthetic construct
  misc_feature 1..22: note = chemically synthesized
  source 1..22: mol_type = other DNA
acataggtctggcactgcctct

SEQ ID NO: 99110 - DNA, 22 bp, synthetic construct
  misc_feature 1..22: note = chemically synthesized
  source 1..22: mol_type = other DNA
gcactgcctctgacatgtccga

SEQ ID NO: 99111 - DNA, 22 bp, synthetic construct
  misc_feature 1..22: note = chemically synthesized
  source 1..22: mol_type = other DNA
cctctgacatgtccgaccttag

SEQ ID NO: 99112 - DNA, 22 bp, synthetic construct
  misc_feature 1..22: note = chemically synthesized
  source 1..22: mol_type = other DNA
tgacatgtccgaccttaggcaa

SEQ ID NO: 99113 - DNA, 22 bp, synthetic construct
  misc_feature 1..22: note = chemically synthesized
  source 1..22: mol_type = other DNA
acatgtccgaccttaggcaaat

SEQ ID NO: 99114 - DNA, 22 bp, synthetic construct
  misc_feature 1..22: note = chemically synthesized
  source 1..22: mol_type = other DNA
aggcaaatgcttgactcttctg

SEQ ID NO: 99115 - DNA, 22 bp, synthetic construct
  misc_feature 1..22: note = chemically synthesized
  source 1..22: mol_type = other DNA
ggcaaatgcttgactcttctga

SEQ ID NO: 99116 - DNA, 22 bp, synthetic construct
  misc_feature 1..22: note = chemically synthesized
  source 1..22: mol_type = other DNA
gactcttctgagctcagtcttg

SEQ ID NO: 99117 - DNA, 22 bp, synthetic construct
  misc_feature 1..22: note = chemically synthesized
  source 1..22: mol_type = other DNA
actcttctgagctcagtcttgt

SEQ ID NO: 99118 - DNA, 22 bp, synthetic construct
  misc_feature 1..22: note = chemically synthesized
  source 1..22: mol_type = other DNA
ttctgagctcagtcttgtcatg

SEQ ID NO: 99119 - DNA, 22 bp, synthetic construct
  misc_feature 1..22: note = chemically synthesized
  source 1..22: mol_type = other DNA
ctgagctcagtcttgtcatggc

SEQ ID NO: 99120 - DNA, 22 bp, synthetic construct
  misc_feature 1..22: note = chemically synthesized
  source 1..22: mol_type = other DNA
tgagctcagtcttgtcatggca

SEQ ID NO: 99121 - DNA, 22 bp, synthetic construct
  misc_feature 1..22: note = chemically synthesized
  source 1..22: mol_type = other DNA
agctcagtcttgtcatggcaaa

SEQ ID NO: 99122 - DNA, 22 bp, synthetic construct
  misc_feature 1..22: note = chemically synthesized
  source 1..22: mol_type = other DNA
agtcttgtcatggcaaaataaa

SEQ ID NO: 99123 - DNA, 22 bp, synthetic construct
  misc_feature 1..22: note = chemically synthesized
  source 1..22: mol_type = other DNA
gtcatggcaaaataaagataat

SEQ ID NO: 99124 - DNA, 22 bp, synthetic construct
  misc_feature 1..22: note = chemically synthesized
  source 1..22: mol_type = other DNA
tcatggcaaaataaagataata

SEQ ID NO: 99125 - DNA, 22 bp, synthetic construct
  misc_feature 1..22: note = chemically synthesized
  source 1..22: mol_type = other DNA
ttttatggagttagcgtgagga

SEQ ID NO: 99126 - DNA, 22 bp, synthetic construct
  misc_feature 1..22: note = chemically synthesized
  source 1..22: mol_type = other DNA
tttatggagttagcgtgaggat

SEQ ID NO: 99127 - DNA, 22 bp, synthetic construct
  misc_feature 1..22: note = chemically synthesized
  source 1..22: mol_type = other DNA
ttatggagttagcgtgaggatg

SEQ ID NO: 99128 - DNA, 22 bp, synthetic construct
  misc_feature 1..22: note = chemically synthesized
  source 1..22: mol_type = other DNA
tatggagttagcgtgaggatgg

SEQ ID NO: 99129 - DNA, 22 bp, synthetic construct
  misc_feature 1..22: note = chemically synthesized
  source 1..22: mol_type = other DNA
atggagttagcgtgaggatgga

SEQ ID NO: 99130 - DNA, 22 bp, synthetic construct
  misc_feature 1..22: note = chemically synthesized
  source 1..22: mol_type = other DNA
tggagttagcgtgaggatggaa

SEQ ID NO: 99131 - DNA, 22 bp, synthetic construct
  misc_feature 1..22: note = chemically synthesized
  source 1..22: mol_type = other DNA
gcgtgaggatggaaaacaatag

SEQ ID NO: 99132 - DNA, 22 bp, synthetic construct
  misc_feature 1..22: note = chemically synthesized
  source 1..22: mol_type = other DNA
attagactataaaaggtctcaa

SEQ ID NO: 99133 - DNA, 22 bp, synthetic construct
  misc_feature 1..22: note = chemically synthesized
  source 1..22: mol_type = other DNA
gactataaaaggtctcaacaaa

SEQ ID NO: 99134 - DNA, 22 bp, synthetic construct
  misc_feature 1..22: note = chemically synthesized
  source 1..22: mol_type = other DNA
taaaaggtctcaacaaatagta

SEQ ID NO: 99135 - DNA, 22 bp, synthetic construct
  misc_feature 1..22: note = chemically synthesized
  source 1..22: mol_type = other DNA
aacaaatagtagtagattttat

SEQ ID NO: 99136 - DNA, 22 bp, synthetic construct
  misc_feature 1..22: note = chemically synthesized
  source 1..22: mol_type = other DNA
tatcgtccattaatccttccct

SEQ ID NO: 99137 - DNA, 22 bp, synthetic construct
  misc_feature 1..22: note = chemically synthesized
  source 1..22: mol_type = other DNA
atcgtccattaatccttccctc

SEQ ID NO: 99138 - DNA, 22 bp, synthetic construct
  misc_feature 1..22: note = chemically synthesized
  source 1..22: mol_type = other DNA
tcgtccattaatccttccctct

SEQ ID NO: 99139 - DNA, 22 bp, synthetic construct
  misc_feature 1..22: note = chemically synthesized
  source 1..22: mol_type = other DNA
atccttccctctcctctcttac

SEQ ID NO: 99140 - DNA, 22 bp, synthetic construct
  misc_feature 1..22: note = chemically synthesized
  source 1..22: mol_type = other DNA
ccctctcctctcttactcatcc

SEQ ID NO: 99141 - DNA, 22 bp, synthetic construct
  misc_feature 1..22: note = chemically synthesized
  source 1..22: mol_type = other DNA
cctctcctctcttactcatccc

SEQ ID NO: 99142 - DNA, 22 bp, synthetic construct
  misc_feature 1..22: note = chemically synthesized
  source 1..22: mol_type = other DNA
tcctctcttactcatcccatca

SEQ ID NO: 99143 - DNA, 22 bp, synthetic construct
  misc_feature 1..22: note = chemically synthesized
  source 1..22: mol_type = other DNA
ctctcttactcatcccatcacg

SEQ ID NO: 99144 - DNA, 22 bp, synthetic construct
  misc_feature 1..22: note = chemically synthesized
  source 1..22: mol_type = other DNA
tcttactcatcccatcacgtat

SEQ ID NO: 99145 - DNA, 22 bp, synthetic construct
  misc_feature 1..22: note = chemically synthesized
  source 1..22: mol_type = other DNA
ttactcatcccatcacgtatgc

SEQ ID NO: 99146 - DNA, 22 bp, synthetic construct
  misc_feature 1..22: note = chemically synthesized
  source 1..22: mol_type = other DNA
actcatcccatcacgtatgcct

SEQ ID NO: 99147 - DNA, 22 bp, synthetic construct
  misc_feature 1..22: note = chemically synthesized
  source 1..22: mol_type = other DNA
ctcatcccatcacgtatgcctc

SEQ ID NO: 99148 - DNA, 22 bp, synthetic construct
  misc_feature 1..22: note = chemically synthesized
  source 1..22: mol_type = other DNA
atcccatcacgtatgcctctta

SEQ ID NO: 99149 - DNA, 22 bp, synthetic construct
  misc_feature 1..22: note = chemically synthesized
  source 1..22: mol_type = other DNA
ttaattttcccttacctataat

SEQ ID NO: 99150 - DNA, 22 bp, synthetic construct
  misc_feature 1..22: note = chemically synthesized
  source 1..22: mol_type = other DNA
aattttcccttacctataataa

SEQ ID NO: 99151 - DNA, 22 bp, synthetic construct
  misc_feature 1..22: note = chemically synthesized
  source 1..22: mol_type = other DNA
attttcccttacctataataag

SEQ ID NO: 99152 - DNA, 22 bp, synthetic construct
  misc_feature 1..22: note = chemically synthesized
  source 1..22: mol_type = other DNA
tcccttacctataataagagtt

SEQ ID NO: 99153 - DNA, 22 bp, synthetic construct
  misc_feature 1..22: note = chemically synthesized
  source 1..22: mol_type = other DNA
cccttacctataataagagtta

SEQ ID NO: 99154 - DNA, 22 bp, synthetic construct
  misc_feature 1..22: note = chemically synthesized
  source 1..22: mol_type = other DNA
ccttacctataataagagttat

SEQ ID NO: 99155 - DNA, 22 bp, synthetic construct
  misc_feature 1..22: note = chemically synthesized
  source 1..22: mol_type = other DNA
acctataataagagttattcct

SEQ ID NO: 99156 - DNA, 22 bp, synthetic construct
  misc_feature 1..22: note = chemically synthesized
  source 1..22: mol_type = other DNA
cctataataagagttattcctc

SEQ ID NO: 99157 - DNA, 22 bp, synthetic construct
  misc_feature 1..22: note = chemically synthesized
  source 1..22: mol_type = other DNA
taataagagttattcctcttat

SEQ ID NO: 99158 - DNA, 22 bp, synthetic construct
  misc_feature 1..22: note = chemically synthesized
  source 1..22: mol_type = other DNA
ttcctcttattatattcttctt

SEQ ID NO: 99159 - DNA, 22 bp, synthetic construct
  misc_feature 1..22: note = chemically synthesized
  source 1..22: mol_type = other DNA
ctcttattatattcttcttata

SEQ ID NO: 99160 - DNA, 22 bp, synthetic construct
  misc_feature 1..22: note = chemically synthesized
  source 1..22: mol_type = other DNA
ttattatattcttcttatagtg

SEQ ID NO: 99161 - DNA, 22 bp, synthetic construct
  misc_feature 1..22: note = chemically synthesized
  source 1..22: mol_type = other DNA
attatattcttcttatagtgat

SEQ ID NO: 99162 - DNA, 22 bp, synthetic construct
  misc_feature 1..22: note = chemically synthesized
  source 1..22: mol_type = other DNA
ttatattcttcttatagtgatt

SEQ ID NO: 99163 - DNA, 22 bp, synthetic construct
  misc_feature 1..22: note = chemically synthesized
  source 1..22: mol_type = other DNA
tattcttcttatagtgattctg

SEQ ID NO: 99164 - DNA, 22 bp, synthetic construct
  misc_feature 1..22: note = chemically synthesized
  source 1..22: mol_type = other DNA
ttcttatagtgattctggatat

SEQ ID NO: 99165 - DNA, 22 bp, synthetic construct
  misc_feature 1..22: note = chemically synthesized
  source 1..22: mol_type = other DNA
cttatagtgattctggatatta

SEQ ID NO: 99166 - DNA, 22 bp, synthetic construct
  misc_feature 1..22: note = chemically synthesized
  source 1..22: mol_type = other DNA
ttatagtgattctggatattaa

SEQ ID NO: 99167 - DNA, 22 bp, synthetic construct
  misc_feature 1..22: note = chemically synthesized
  source 1..22: mol_type = other DNA
atagtgattctggatattaaag

SEQ ID NO: 99168 - DNA, 22 bp, synthetic construct
  misc_feature 1..22: note = chemically synthesized
  source 1..22: mol_type = other DNA
tagtgattctggatattaaagt

SEQ ID NO: 99169 - DNA, 22 bp, synthetic construct
  misc_feature 1..22: note = chemically synthesized
  source 1..22: mol_type = other DNA
tggatattaaagtgggaatgag

SEQ ID NO: 99170 - DNA, 22 bp, synthetic construct
  misc_feature 1..22: note = chemically synthesized
  source 1..22: mol_type = other DNA
gatattaaagtgggaatgaggg

SEQ ID NO: 99171 - DNA, 22 bp, synthetic construct
  misc_feature 1..22: note = chemically synthesized
  source 1..22: mol_type = other DNA
aagtgggaatgaggggcaggcc

SEQ ID NO: 99172 - DNA, 22 bp, synthetic construct
  misc_feature 1..22: note = chemically synthesized
  source 1..22: mol_type = other DNA
acgaagaagatgtttctcaaag

SEQ ID NO: 99173 - DNA, 22 bp, synthetic construct
  misc_feature 1..22: note = chemically synthesized
  source 1..22: mol_type = other DNA
ctcaaagaagccattctcccca

SEQ ID NO: 99174 - DNA, 22 bp, synthetic construct
  misc_feature 1..22: note = chemically synthesized
  source 1..22: mol_type = other DNA
tcaaagaagccattctccccac

SEQ ID NO: 99175 - DNA, 22 bp, synthetic construct
  misc_feature 1..22: note = chemically synthesized
  source 1..22: mol_type = other DNA
aaagaagccattctccccacat

SEQ ID NO: 99176 - DNA, 22 bp, synthetic construct
  misc_feature 1..22: note = chemically synthesized
  source 1..22: mol_type = other DNA
tccccacatagatcatctcagc

SEQ ID NO: 99177 - DNA, 22 bp, synthetic construct
  misc_feature 1..22: note = chemically synthesized
  source 1..22: mol_type = other DNA
cccacatagatcatctcagcag

SEQ ID NO: 99178 - DNA, 22 bp, synthetic construct
  misc_feature 1..22: note = chemically synthesized
  source 1..22: mol_type = other DNA
agcagggttcaggaagataaag

SEQ ID NO: 99179 - DNA, 22 bp, synthetic construct
  misc_feature 1..22: note = chemically synthesized
  source 1..22: mol_type = other DNA
aggaagataaaggaggatcaag

SEQ ID NO: 99180 - DNA, 22 bp, synthetic construct
  misc_feature 1..22: note = chemically synthesized
  source 1..22: mol_type = other DNA
aggaagaacactgggcaagtgg

SEQ ID NO: 99181 - DNA, 22 bp, synthetic construct
  misc_feature 1..22: note = chemically synthesized
  source 1..22: mol_type = other DNA
ggcaagtggatccaggttgtcc

SEQ ID NO: 99182 - DNA, 22 bp, synthetic construct
  misc_feature 1..22: note = chemically synthesized
  source 1..22: mol_type = other DNA
tccaacgctgaaagtaggaatc

SEQ ID NO: 99183 - DNA, 22 bp, synthetic construct
  misc_feature 1..22: note = chemically synthesized
  source 1..22: mol_type = other DNA
aaagtaggaatctaagcactag

SEQ ID NO: 99184 - DNA, 22 bp, synthetic construct
  misc_feature 1..22: note = chemically synthesized
  source 1..22: mol_type = other DNA
agcactagtctctggatgctag

SEQ ID NO: 99185 - DNA, 22 bp, synthetic construct
  misc_feature 1..22: note = chemically synthesized
  source 1..22: mol_type = other DNA
gtctctggatgctaggagggcc

SEQ ID NO: 99186 - DNA, 22 bp, synthetic construct
  misc_feature 1..22: note = chemically synthesized
  source 1..22: mol_type = other DNA
tggatgctaggagggcctctgc

SEQ ID NO: 99187 - DNA, 22 bp, synthetic construct
  misc_feature 1..22: note = chemically synthesized
  source 1..22: mol_type = other DNA
gatgctaggagggcctctgcat

SEQ ID NO: 99188 - DNA, 22 bp, synthetic construct
  misc_feature 1..22: note = chemically synthesized
  source 1..22: mol_type = other DNA
ggagggcctctgcatgggtaac

SEQ ID NO: 99189 - DNA, 22 bp, synthetic construct
  misc_feature 1..22: note = chemically synthesized
  source 1..22: mol_type = other DNA
tgcatgggtaactctttcaact

SEQ ID NO: 99190 - DNA, 22 bp, synthetic construct
  misc_feature 1..22: note = chemically synthesized
  source 1..22: mol_type = other DNA
catgggtaactctttcaactag

SEQ ID NO: 99191 - DNA, 22 bp, synthetic construct
  misc_feature 1..22: note = chemically synthesized
  source 1..22: mol_type = other DNA
tttcaactagccaggggctgga

SEQ ID NO: 99192 - DNA, 22 bp, synthetic construct
  misc_feature 1..22: note = chemically synthesized
  source 1..22: mol_type = other DNA
tcaactagccaggggctggact

SEQ ID NO: 99193 - DNA, 22 bp, synthetic construct
  misc_feature 1..22: note = chemically synthesized
  source 1..22: mol_type = other DNA
caactagccaggggctggactg

SEQ ID NO: 99194 - DNA, 22 bp, synthetic construct
  misc_feature 1..22: note = chemically synthesized
  source 1..22: mol_type = other DNA
aactagccaggggctggactgt

SEQ ID NO: 99195 - DNA, 22 bp, synthetic construct
  misc_feature 1..22: note = chemically synthesized
  source 1..22: mol_type = other DNA
gccaggggctggactgtggaga

SEQ ID NO: 99196 - DNA, 22 bp, synthetic construct
  misc_feature 1..22: note = chemically synthesized
  source 1..22: mol_type = other DNA
gactgtggagaaaccatttcca

SEQ ID NO: 99197 - DNA, 22 bp, synthetic construct
  misc_feature 1..22: note = chemically synthesized
  source 1..22: mol_type = other DNA
tggagaaaccatttccagatag

SEQ ID NO: 99198 - DNA, 22 bp, synthetic construct
  misc_feature 1..22: note = chemically synthesized
  source 1..22: mol_type = other DNA
ccagatagaagtgaggagattc

SEQ ID NO: 99199 - DNA, 22 bp, synthetic construct
  misc_feature 1..22: note = chemically synthesized
  source 1..22: mol_type = other DNA
cagatagaagtgaggagattcc

SEQ ID NO: 99200 - DNA, 22 bp, synthetic construct
  misc_feature 1..22: note = chemically synthesized
  source 1..22: mol_type = other DNA
cagcaggaaacacttaagagag

SEQ ID NO: 99201 - DNA, 22 bp, synthetic construct
  misc_feature 1..22: note = chemically synthesized
  source 1..22: mol_type = other DNA
aagagaggatccctggaagttc

SEQ ID NO: 99202 - DNA, 22 bp, synthetic construct
  misc_feature 1..22: note = chemically synthesized
  source 1..22: mol_type = other DNA
agagaggatccctggaagttcg

SEQ ID NO: 99203 - DNA, 22 bp, synthetic construct
  misc_feature 1..22: note = chemically synthesized
  source 1..22: mol_type = other DNA
gaagttcggggcaggaggctcc

SEQ ID NO: 99204 - DNA, 22 bp, synthetic construct
  misc_feature 1..22: note = chemically synthesized
  source 1..22: mol_type = other DNA
ggggcaggaggctccctgtcac

SEQ ID NO: 99205 - DNA, 22 bp, synthetic construct
  misc_feature 1..22: note = chemically synthesized
  source 1..22: mol_type = other DNA
cctgtcacatgaaggaaacctg

SEQ ID NO: 99206 - DNA, 22 bp, synthetic construct
  misc_feature 1..22: note = chemically synthesized
  source 1..22: mol_type = other DNA
tcacatgaaggaaacctgctca

SEQ ID NO: 99207 - DNA, 22 bp, synthetic construct
  misc_feature 1..22: note = chemically synthesized
  source 1..22: mol_type = other DNA
ctcagcgtaggctctaggttct

SEQ ID NO: 99208 - DNA, 22 bp, synthetic construct
  misc_feature 1..22: note = chemically synthesized
  source 1..22: mol_type = other DNA
agcgtaggctctaggttcttcc

SEQ ID NO: 99209 - DNA, 22 bp, synthetic construct
  misc_feature 1..22: note = chemically synthesized
  source 1..22: mol_type = other DNA
taggttcttccctactcttatc

SEQ ID NO: 99210 - DNA, 22 bp, synthetic construct
  misc_feature 1..22: note = chemically synthesized
  source 1..22: mol_type = other DNA
ggttcttccctactcttatcca

SEQ ID NO: 99211 - DNA, 22 bp, synthetic construct
  misc_feature 1..22: note = chemically synthesized
  source 1..22: mol_type = other DNA
ttccctactcttatccaatggg

SEQ ID NO: 99212 - DNA, 22 bp, synthetic construct
  misc_feature 1..22: note = chemically synthesized
  source 1..22: mol_type = other DNA
ccctactcttatccaatggggc

SEQ ID NO: 99213 - DNA, 22 bp, synthetic construct
  misc_feature 1..22: note = chemically synthesized
  source 1..22: mol_type = other DNA
cctactcttatccaatggggct

SEQ ID NO: 99214 - DNA, 22 bp, synthetic construct
  misc_feature 1..22: note = chemically synthesized
  source 1..22: mol_type = other DNA
ctcttatccaatggggcttctg

SEQ ID NO: 99215 - DNA, 22 bp, synthetic construct
  misc_feature 1..22: note = chemically synthesized
  source 1..22: mol_type = other DNA
ttatccaatggggcttctgatt

SEQ ID NO: 99216 - DNA, 22 bp, synthetic construct
  misc_feature 1..22: note = chemically synthesized
  source 1..22: mol_type = other DNA
atccaatggggcttctgatttt

SEQ ID NO: 99217 - DNA, 22 bp, synthetic construct
  misc_feature 1..22: note = chemically synthesized
  source 1..22: mol_type = other DNA
tccaatggggcttctgatttta

SEQ ID NO: 99218 - DNA, 22 bp, synthetic construct
  misc_feature 1..22: note = chemically synthesized
  source 1..22: mol_type = other DNA
ctgattttaagccagtcttcac

SEQ ID NO: 99219 - DNA, 22 bp, synthetic construct
  misc_feature 1..22: note = chemically synthesized
  source 1..22: mol_type = other DNA
tgattttaagccagtcttcaca

SEQ ID NO: 99220 - DNA, 22 bp, synthetic construct
  misc_feature 1..22: note = chemically synthesized
  source 1..22: mol_type = other DNA
attttaagccagtcttcacaaa

SEQ ID NO: 99221 - DNA, 22 bp, synthetic construct
  misc_feature 1..22: note = chemically synthesized
  source 1..22: mol_type = other DNA
taagccagtcttcacaaagccc

SEQ ID NO: 99222 - DNA, 22 bp, synthetic construct
  misc_feature 1..22: note = chemically synthesized
  source 1..22: mol_type = other DNA
aagccagtcttcacaaagcccc

SEQ ID NO: 99223 - DNA, 22 bp, synthetic construct
  misc_feature 1..22: note = chemically synthesized
  source 1..22: mol_type = other DNA
agccagtcttcacaaagcccca

SEQ ID NO: 99224 - DNA, 22 bp, synthetic construct
  misc_feature 1..22: note = chemically synthesized
  source 1..22: mol_type = other DNA
cacaaagccccagatttctaca

SEQ ID NO: 99225 - DNA, 22 bp, synthetic construct
  misc_feature 1..22: note = chemically synthesized
  source 1..22: mol_type = other DNA
acaaagccccagatttctacat

SEQ ID NO: 99226 - DNA, 22 bp, synthetic construct
  misc_feature 1..22: note = chemically synthesized
  source 1..22: mol_type = other DNA
ctacatgctggagccctgaatg

SEQ ID NO: 99227 - DNA, 22 bp, synthetic construct
  misc_feature 1..22: note = chemically synthesized
  source 1..22: mol_type = other DNA
tacatgctggagccctgaatgg

SEQ ID NO: 99228 - DNA, 22 bp, synthetic construct
  misc_feature 1..22: note = chemically synthesized
  source 1..22: mol_type = other DNA
catgctggagccctgaatgggc

SEQ ID NO: 99229 - DNA, 22 bp, synthetic construct
  misc_feature 1..22: note = chemically synthesized
  source 1..22: mol_type = other DNA
gagccctgaatgggcaggaagc

SEQ ID NO: 99230 - DNA, 22 bp, synthetic construct
  misc_feature 1..22: note = chemically synthesized
  source 1..22: mol_type = other DNA
aatgggcaggaagcattgcggt

SEQ ID NO: 99231 - DNA, 22 bp, synthetic construct
  misc_feature 1..22: note = chemically synthesized
  source 1..22: mol_type = other DNA
cggtttccatttcattcagagc

SEQ ID NO: 99232 - DNA, 22 bp, synthetic construct
  misc_feature 1..22: note = chemically synthesized
  source 1..22: mol_type = other DNA
ccatttcattcagagctctttc

SEQ ID NO: 99233 - DNA, 22 bp, synthetic construct
  misc_feature 1..22: note = chemically synthesized
  source 1..22: mol_type = other DNA
catttcattcagagctctttca

SEQ ID NO: 99234 - DNA, 22 bp, synthetic construct
  misc_feature 1..22: note = chemically synthesized
  source 1..22: mol_type = other DNA
cattcagagctctttcataccc

SEQ ID NO: 99235 - DNA, 22 bp, synthetic construct
  misc_feature 1..22: note = chemically synthesized
  source 1..22: mol_type = other DNA
attcagagctctttcataccct

SEQ ID NO: 99236 - DNA, 22 bp, synthetic construct
  misc_feature 1..22: note = chemically synthesized
  source 1..22: mol_type = other DNA
agagctctttcataccctgctt

SEQ ID NO: 99237 - DNA, 22 bp, synthetic construct
  misc_feature 1..22: note = chemically synthesized
  source 1..22: mol_type = other DNA
tttcataccctgcttccccata

SEQ ID NO: 99238 - DNA, 22 bp, synthetic construct
  misc_feature 1..22: note = chemically synthesized
  source 1..22: mol_type = other DNA
tcataccctgcttccccatagt

SEQ ID NO: 99239 - DNA, 22 bp, synthetic construct
  misc_feature 1..22: note = chemically synthesized
  source 1..22: mol_type = other DNA
cataccctgcttccccatagtt

SEQ ID NO: 99240 - DNA, 22 bp, synthetic construct
  misc_feature 1..22: note = chemically synthesized
  source 1..22: mol_type = other DNA
ataccctgcttccccatagttt

SEQ ID NO: 99241 - DNA, 22 bp, synthetic construct
  misc_feature 1..22: note = chemically synthesized
  source 1..22: mol_type = other DNA
cttccccatagtttgtctcaac

SEQ ID NO: 99242 - DNA, 22 bp, synthetic construct
  misc_feature 1..22: note = chemically synthesized
  source 1..22: mol_type = other DNA
ccccatagtttgtctcaacatt

SEQ ID NO: 99243 - DNA, 22 bp, synthetic construct
  misc_feature 1..22: note = chemically synthesized
  source 1..22: mol_type = other DNA
cccatagtttgtctcaacattt

SEQ ID NO: 99244 - DNA, 22 bp, synthetic construct
  misc_feature 1..22: note = chemically synthesized
  source 1..22: mol_type = other DNA
gtctcaacatttctgttgataa

SEQ ID NO: 99245 - DNA, 22 bp, synthetic construct
  misc_feature 1..22: note = chemically synthesized
  source 1..22: mol_type = other DNA
tctcaacatttctgttgataat

SEQ ID NO: 99246 - DNA, 22 bp, synthetic construct
  misc_feature 1..22: note = chemically synthesized
  source 1..22: mol_type = other DNA
aacatttctgttgataatctga

SEQ ID NO: 99247 - DNA, 22 bp, synthetic construct
  misc_feature 1..22: note = chemically synthesized
  source 1..22: mol_type = other DNA
ctgttgataatctgattcatgc

SEQ ID NO: 99248 - DNA, 22 bp, synthetic construct
  misc_feature 1..22: note = chemically synthesized
  source 1..22: mol_type = other DNA
tgttgataatctgattcatgca

SEQ ID NO: 99249 - DNA, 22 bp, synthetic construct
  misc_feature 1..22: note = chemically synthesized
  source 1..22: mol_type = other DNA
ttgataatctgattcatgcaac

SEQ ID NO: 99250 - DNA, 22 bp, synthetic construct
  misc_feature 1..22: note = chemically synthesized
  source 1..22: mol_type = other DNA
ataatctgattcatgcaaccaa

SEQ ID NO: 99251 - DNA, 22 bp, synthetic construct
  misc_feature 1..22: note = chemically synthesized
  source 1..22: mol_type = other DNA
attcatgcaaccaagaattatg

SEQ ID NO: 99252 - DNA, 22 bp, synthetic construct
  misc_feature 1..22: note = chemically synthesized
  source 1..22: mol_type = other DNA
atgcaaccaagaattatgagag

SEQ ID NO: 99253 - DNA, 22 bp, synthetic construct
  misc_feature 1..22: note = chemically synthesized
  source 1..22: mol_type = other DNA
tgagagagccttcagtcatgcc

SEQ ID NO: 99254 - DNA, 22 bp, synthetic construct
  misc_feature 1..22: note = chemically synthesized
  source 1..22: mol_type = other DNA
cagtcatgcctaggcctgcatt

SEQ ID NO: 99255 - DNA, 22 bp, synthetic construct
  misc_feature 1..22: note = chemically synthesized
  source 1..22: mol_type = other DNA
agtcatgcctaggcctgcattt

SEQ ID NO: 99256 - DNA, 22 bp, synthetic construct
  misc_feature 1..22: note = chemically synthesized
  source 1..22: mol_type = other DNA
ggcctgcatttattgttgtgca

SEQ ID NO: 99257 - DNA, 22 bp, synthetic construct
  misc_feature 1..22: note = chemically synthesized
  source 1..22: mol_type = other DNA
catttattgttgtgcatatgat

SEQ ID NO: 99258 - DNA, 22 bp, synthetic construct
  misc_feature 1..22: note = chemically synthesized
  source 1..22: mol_type = other DNA
attgttgtgcatatgatggggt

SEQ ID NO: 99259 - DNA, 22 bp, synthetic construct
  misc_feature 1..22: note = chemically synthesized
  source 1..22: mol_type = other DNA
ttgttgtgcatatgatggggta

SEQ ID NO: 99260 - DNA, 22 bp, synthetic construct
  misc_feature 1..22: note = chemically synthesized
  source 1..22: mol_type = other DNA
ttgtgcatatgatggggtagca

SEQ ID NO: 99261 - DNA, 22 bp, synthetic construct
  misc_feature 1..22: note = chemically synthesized
  source 1..22: mol_type = other DNA
tgcatatgatggggtagcagac

SEQ ID NO: 99262 - DNA, 22 bp, synthetic construct
  misc_feature 1..22: note = chemically synthesized
  source 1..22: mol_type = other DNA
acagcatagactttctcagagc

SEQ ID NO: 99263 - DNA, 22 bp, synthetic construct
  misc_feature 1..22: note = chemically synthesized
  source 1..22: mol_type = other DNA
tctcagagctatatgagtttgg

SEQ ID NO: 99264 - DNA, 22 bp, synthetic construct
  misc_feature 1..22: note = chemically synthesized
  source 1..22: mol_type = other DNA
ctcagagctatatgagtttggg

SEQ ID NO: 99265 - DNA, 22 bp, synthetic construct
  misc_feature 1..22: note = chemically synthesized
  source 1..22: mol_type = other DNA
tcagagctatatgagtttggga

SEQ ID NO: 99266 - DNA, 22 bp, synthetic construct
  misc_feature 1..22: note = chemically synthesized
  source 1..22: mol_type = other DNA
agagctatatgagtttgggaat

SEQ ID NO: 99267 - DNA, 22 bp, synthetic construct
  misc_feature 1..22: note = chemically synthesized
  source 1..22: mol_type = other DNA
tatgagtttgggaattaatcaa

SEQ ID NO: 99268 - DNA, 22 bp, synthetic construct
  misc_feature 1..22: note = chemically synthesized
  source 1..22: mol_type = other DNA
gggaattaatcaagaccagcct

SEQ ID NO: 99269 - DNA, 22 bp, synthetic construct
  misc_feature 1..22: note = chemically synthesized
  source 1..22: mol_type = other DNA
ggaattaatcaagaccagcctt

SEQ ID NO: 99270 - DNA, 22 bp, synthetic construct
  misc_feature 1..22: note = chemically synthesized
  source 1..22: mol_type = other DNA
atcaagaccagccttttgctca

SEQ ID NO: 99271 - DNA, 22 bp, synthetic construct
  misc_feature 1..22: note = chemically synthesized
  source 1..22: mol_type = other DNA
ttgctcagggtagaaatcccct

SEQ ID NO: 99272 - DNA, 22 bp, synthetic construct
  misc_feature 1..22: note = chemically synthesized
  source 1..22: mol_type = other DNA
tgctcagggtagaaatccccta

SEQ ID NO: 99273 - DNA, 22 bp, synthetic construct
  misc_feature 1..22: note = chemically synthesized
  source 1..22: mol_type = other DNA
gctcagggtagaaatcccctat

SEQ ID NO: 99274 - DNA, 22 bp, synthetic construct
  misc_feature 1..22: note = chemically synthesized
  source 1..22: mol_type = other DNA
ctcagggtagaaatcccctata

SEQ ID NO: 99275 - DNA, 22 bp, synthetic construct
  misc_feature 1..22: note = chemically synthesized
  source 1..22: mol_type = other DNA
agggtagaaatcccctataggg

SEQ ID NO: 99276 - DNA, 22 bp, synthetic construct
  misc_feature 1..22: note = chemically synthesized
  source 1..22: mol_type = other DNA
tagggatttattcaatgatggg

SEQ ID NO: 99277 - DNA, 22 bp, synthetic construct
  misc_feature 1..22: note = chemically synthesized
  source 1..22: mol_type = other DNA
attcaatgatgggttaaaagct

SEQ ID NO: 99278 - DNA, 22 bp, synthetic construct
  misc_feature 1..22: note = chemically synthesized
  source 1..22: mol_type = other DNA
ttcaatgatgggttaaaagctt

SEQ ID NO: 99279 - DNA, 22 bp, synthetic construct
  misc_feature 1..22: note = chemically synthesized
  source 1..22: mol_type = other DNA
aatgatgggttaaaagctttct

SEQ ID NO: 99280 - DNA, 22 bp, synthetic construct
  misc_feature 1..22: note = chemically synthesized
  source 1..22: mol_type = other DNA
aaagctttctatatggtgagga

SEQ ID NO: 99281 - DNA, 22 bp, synthetic construct
  misc_feature 1..22: note = chemically synthesized
  source 1..22: mol_type = other DNA
tctatatggtgaggagctcaca

SEQ ID NO: 99282 - DNA, 22 bp, synthetic construct
  misc_feature 1..22: note = chemically synthesized
  source 1..22: mol_type = other DNA
ctatatggtgaggagctcacag

SEQ ID NO: 99283 - DNA, 22 bp, synthetic construct
  misc_feature 1..22: note = chemically synthesized
  source 1..22: mol_type = other DNA
tatatggtgaggagctcacaga

SEQ ID NO: 99284 - DNA, 22 bp, synthetic construct
  misc_feature 1..22: note = chemically synthesized
  source 1..22: mol_type = other DNA
tatggtgaggagctcacagatt

SEQ ID NO: 99285 - DNA, 22 bp, synthetic construct
  misc_feature 1..22: note = chemically synthesized
  source 1..22: mol_type = other DNA
acagattttccaagcccttgct

SEQ ID NO: 99286 - DNA, 22 bp, synthetic construct
  misc_feature 1..22: note = chemically synthesized
  source 1..22: mol_type = other DNA
tccaagcccttgcttttgctag

SEQ ID NO: 99287 - DNA, 22 bp, synthetic construct
  misc_feature 1..22: note = chemically synthesized
  source 1..22: mol_type = other DNA
ccaagcccttgcttttgctaga

SEQ ID NO: 99288 - DNA, 22 bp, synthetic construct
  misc_feature 1..22: note = chemically synthesized
  source 1..22: mol_type = other DNA
caagcccttgcttttgctagac

SEQ ID NO: 99289 - DNA, 22 bp, synthetic construct
  misc_feature 1..22: note = chemically synthesized
  source 1..22: mol_type = other DNA
gcttttgctagacagcttaatg

SEQ ID NO: 99290 - DNA, 22 bp, synthetic construct
  misc_feature 1..22: note = chemically synthesized
  source 1..22: mol_type = other DNA
cttttgctagacagcttaatgt

SEQ ID NO: 99291 - DNA, 22 bp, synthetic construct
  misc_feature 1..22: note = chemically synthesized
  source 1..22: mol_type = other DNA
ttgctagacagcttaatgttta

SEQ ID NO: 99292 - DNA, 22 bp, synthetic construct
  misc_feature 1..22: note = chemically synthesized
  source 1..22: mol_type = other DNA
tgctagacagcttaatgtttat

SEQ ID NO: 99293 - DNA, 22 bp, synthetic construct
  misc_feature 1..22: note = chemically synthesized
  source 1..22: mol_type = other DNA
gctagacagcttaatgtttatg

SEQ ID NO: 99294 - DNA, 22 bp, synthetic construct
  misc_feature 1..22: note = chemically synthesized
  source 1..22: mol_type = other DNA
ctagacagcttaatgtttatga

SEQ ID NO: 99295 - DNA, 22 bp, synthetic construct
  misc_feature 1..22: note = chemically synthesized
  source 1..22: mol_type = other DNA
gacagcttaatgtttatgaaat

SEQ ID NO: 99296 - DNA, 22 bp, synthetic construct
  misc_feature 1..22: note = chemically synthesized
  source 1..22: mol_type = other DNA
aatgtttatgaaattcttacac

SEQ ID NO: 99297 - DNA, 22 bp, synthetic construct
  misc_feature 1..22: note = chemically synthesized
  source 1..22: mol_type = other DNA
atgtttatgaaattcttacaca

SEQ ID NO: 99298 - DNA, 22 bp, synthetic construct
  misc_feature 1..22: note = chemically synthesized
  source 1..22: mol_type = other DNA
atgaaattcttacacacagaag

SEQ ID NO: 99299 - DNA, 22 bp, synthetic construct
  misc_feature 1..22: note = chemically synthesized
  source 1..22: mol_type = other DNA
tgaaattcttacacacagaaga

SEQ ID NO: 99300 - DNA, 22 bp, synthetic construct
  misc_feature 1..22: note = chemically synthesized
  source 1..22: mol_type = other DNA
ttacacacagaagaatcttcta

SEQ ID NO: 99301 - DNA, 22 bp, synthetic construct
  misc_feature 1..22: note = chemically synthesized
  source 1..22: mol_type = other DNA
acacacagaagaatcttctaat

SEQ ID NO: 99302 - DNA, 22 bp, synthetic construct
  misc_feature 1..22: note = chemically synthesized
  source 1..22: mol_type = other DNA
cacacagaagaatcttctaatc

SEQ ID NO: 99303 - DNA, 22 bp, synthetic construct
  misc_feature 1..22: note = chemically synthesized
  source 1..22: mol_type = other DNA
ctaatcctgggttacataatat

SEQ ID NO: 99304 - DNA, 22 bp, synthetic construct
  misc_feature 1..22: note = chemically synthesized
  source 1..22: mol_type = other DNA
taatcctgggttacataatata

SEQ ID NO: 99305 - DNA, 22 bp, synthetic construct
  misc_feature 1..22: note = chemically synthesized
  source 1..22: mol_type = other DNA
atcctgggttacataatataac

SEQ ID NO: 99306 - DNA, 22 bp, synthetic construct
  misc_feature 1..22: note = chemically synthesized
  source 1..22: mol_type = other DNA
ggttacataatataacttgatt

SEQ ID NO: 99307 - DNA, 22 bp, synthetic construct
  misc_feature 1..22: note = chemically synthesized
  source 1..22: mol_type = other DNA
cataatataacttgattcccta

SEQ ID NO: 99308 - DNA, 22 bp, synthetic construct
  misc_feature 1..22: note = chemically synthesized
  source 1..22: mol_type = other DNA
gattccctattccagaagataa

SEQ ID NO: 99309 - DNA, 22 bp, synthetic construct
  misc_feature 1..22: note = chemically synthesized
  source 1..22: mol_type = other DNA
attccctattccagaagataat

SEQ ID NO: 99310 - DNA, 22 bp, synthetic construct
  misc_feature 1..22: note = chemically synthesized
  source 1..22: mol_type = other DNA
cctattccagaagataatattc

SEQ ID NO: 99311 - DNA, 22 bp, synthetic construct
  misc_feature 1..22: note = chemically synthesized
  source 1..22: mol_type = other DNA
ttccagaagataatattcccat

SEQ ID NO: 99312 - DNA, 22 bp, synthetic construct
  misc_feature 1..22: note = chemically synthesized
  source 1..22: mol_type = other DNA
cagaagataatattcccatatt

SEQ ID NO: 99313 - DNA, 22 bp, synthetic construct
  misc_feature 1..22: note = chemically synthesized
  source 1..22: mol_type = other DNA
ccatattctgaagcattcatgc

SEQ ID NO: 99314 - DNA, 22 bp, synthetic construct
  misc_feature 1..22: note = chemically synthesized
  source 1..22: mol_type = other DNA
tgaagcattcatgcatttgtta

SEQ ID NO: 99315 - DNA, 22 bp, synthetic construct
  misc_feature 1..22: note = chemically synthesized
  source 1..22: mol_type = other DNA
aagcattcatgcatttgttaaa

SEQ ID NO: 99316 - DNA, 22 bp, synthetic construct
  misc_feature 1..22: note = chemically synthesized
  source 1..22: mol_type = other DNA
atgcatttgttaaataataggc

SEQ ID NO: 99317 - DNA, 22 bp, synthetic construct
  misc_feature 1..22: note = chemically synthesized
  source 1..22: mol_type = other DNA
gttaaataataggcatagtgac

SEQ ID NO: 99318 - DNA, 22 bp, synthetic construct
  misc_feature 1..22: note = chemically synthesized
  source 1..22: mol_type = other DNA
ttaaataataggcatagtgaca

SEQ ID NO: 99319 - DNA, 22 bp, synthetic construct
  misc_feature 1..22: note = chemically synthesized
  source 1..22: mol_type = other DNA
aataataggcatagtgacaagt

SEQ ID NO: 99320 - DNA, 22 bp, synthetic construct
  misc_feature 1..22: note = chemically synthesized
  source 1..22: mol_type = other DNA
taacagtcaaccagagagccac

SEQ ID NO: 99321 - DNA, 22 bp, synthetic construct
  misc_feature 1..22: note = chemically synthesized
  source 1..22: mol_type = other DNA
acagtcaaccagagagccacag

SEQ ID NO: 99322 - DNA, 22 bp, synthetic construct
  misc_feature 1..22: note = chemically synthesized
  source 1..22: mol_type = other DNA
tcaacttcacaaagttaaccat

SEQ ID NO: 99323 - DNA, 22 bp, synthetic construct
  misc_feature 1..22: note = chemically synthesized
  source 1..22: mol_type = other DNA
caacttcacaaagttaaccatc

SEQ ID NO: 99324 - DNA, 22 bp, synthetic construct
  misc_feature 1..22: note = chemically synthesized
  source 1..22: mol_type = other DNA
aacttcacaaagttaaccatct

SEQ ID NO: 99325 - DNA, 22 bp, synthetic construct
  misc_feature 1..22: note = chemically synthesized
  source 1..22: mol_type = other DNA
cacaaagttaaccatctaactg

SEQ ID NO: 99326 - DNA, 22 bp, synthetic construct
  misc_feature 1..22: note = chemically synthesized
  source 1..22: mol_type = other DNA
acaaagttaaccatctaactga

SEQ ID NO: 99327 - DNA, 22 bp, synthetic construct
  misc_feature 1..22: note = chemically synthesized
  source 1..22: mol_type = other DNA
accatctaactgaagacagcag

SEQ ID NO: 99328 - DNA, 22 bp, synthetic construct
  misc_feature 1..22: note = chemically synthesized
  source 1..22: mol_type = other DNA
actgaagacagcagcaatcaaa

SEQ ID NO: 99329 - DNA, 22 bp, synthetic construct
  misc_feature 1..22: note = chemically synthesized
  source 1..22: mol_type = other DNA
aagacagcagcaatcaaaacca

SEQ ID NO: 99330 - DNA, 22 bp, synthetic construct
  misc_feature 1..22: note = chemically synthesized
  source 1..22: mol_type = other DNA
ctccacatggtgtagtctttcc

SEQ ID NO: 99331 - DNA, 22 bp, synthetic construct
  misc_feature 1..22: note = chemically synthesized
  source 1..22: mol_type = other DNA
tccacatggtgtagtctttcct

SEQ ID NO: 99332 - DNA, 22 bp, synthetic construct
  misc_feature 1..22: note = chemically synthesized
  source 1..22: mol_type = other DNA
cacatggtgtagtctttcctga

SEQ ID NO: 99333 - DNA, 22 bp, synthetic construct
  misc_feature 1..22: note = chemically synthesized
  source 1..22: mol_type = other DNA
tcctgatgtcagggatgttagg

SEQ ID NO: 99334 - DNA, 22 bp, synthetic construct
  misc_feature 1..22: note = chemically synthesized
  source 1..22: mol_type = other DNA
cctgatgtcagggatgttaggc

SEQ ID NO: 99335 - DNA, 22 bp, synthetic construct
  misc_feature 1..22: note = chemically synthesized
  source 1..22: mol_type = other DNA
ctgatgtcagggatgttaggct

SEQ ID NO: 99336 - DNA, 22 bp, synthetic construct
  misc_feature 1..22: note = chemically synthesized
  source 1..22: mol_type = other DNA
atgtcagggatgttaggctcag

SEQ ID NO: 99337 - DNA, 22 bp, synthetic construct
  misc_feature 1..22: note = chemically synthesized
  source 1..22: mol_type = other DNA
ggctcaggttaggaaagtcaga

SEQ ID NO: 99338 - DNA, 22 bp, synthetic construct
  misc_feature 1..22: note = chemically synthesized
  source 1..22: mol_type = other DNA
aggttaggaaagtcagactatc

SEQ ID NO: 99339 - DNA, 22 bp, synthetic construct
  misc_feature 1..22: note = chemically synthesized
  source 1..22: mol_type = other DNA
ggaaagtcagactatcatccca

SEQ ID NO: 99340 - DNA, 22 bp, synthetic construct
  misc_feature 1..22: note = chemically synthesized
  source 1..22: mol_type = other DNA
tcatcccagagcaggacacaga

SEQ ID NO: 99341 - DNA, 22 bp, synthetic construct
  misc_feature 1..22: note = chemically synthesized
  source 1..22: mol_type = other DNA
tttagtcacttaggaaaaacag

SEQ ID NO: 99342 - DNA, 22 bp, synthetic construct
  misc_feature 1..22: note = chemically synthesized
  source 1..22: mol_type = other DNA
ttagtcacttaggaaaaacagt

SEQ ID NO: 99343 - DNA, 22 bp, synthetic construct
  misc_feature 1..22: note = chemically synthesized
  source 1..22: mol_type = other DNA
tagtcacttaggaaaaacagtg

SEQ ID NO: 99344 - DNA, 22 bp, synthetic construct
  misc_feature 1..22: note = chemically synthesized
  source 1..22: mol_type = other DNA
agtcacttaggaaaaacagtgg

SEQ ID NO: 99345 - DNA, 22 bp, synthetic construct
  misc_feature 1..22: note = chemically synthesized
  source 1..22: mol_type = other DNA
gtcacttaggaaaaacagtgga

SEQ ID NO: 99346 - DNA, 22 bp, synthetic construct
  misc_feature 1..22: note = chemically synthesized
  source 1..22: mol_type = other DNA
aggaaaaacagtggaatgcaaa

SEQ ID NO: 99347 - DNA, 22 bp, synthetic construct
  misc_feature 1..22: note = chemically synthesized
  source 1..22: mol_type = other DNA
ggaaaaacagtggaatgcaaag

SEQ ID NO: 99348 - DNA, 22 bp, synthetic construct
  misc_feature 1..22: note = chemically synthesized
  source 1..22: mol_type = other DNA
tctgaatggataacttggcctg

SEQ ID NO: 99349 - DNA, 22 bp, synthetic construct
  misc_feature 1..22: note = chemically synthesized
  source 1..22: mol_type = other DNA
ctgaatggataacttggcctgg

SEQ ID NO: 99350 - DNA, 22 bp, synthetic construct
  misc_feature 1..22: note = chemically synthesized
  source 1..22: mol_type = other DNA
tgaatggataacttggcctggg

SEQ ID NO: 99351 - DNA, 22 bp, synthetic construct
  misc_feature 1..22: note = chemically synthesized
  source 1..22: mol_type = other DNA
aatggataacttggcctgggag

SEQ ID NO: 99352 - DNA, 22 bp, synthetic construct
  misc_feature 1..22: note = chemically synthesized
  source 1..22: mol_type = other DNA
ggcctgggaggcctttggaagc

SEQ ID NO: 99353 - DNA, 22 bp, synthetic construct
  misc_feature 1..22: note = chemically synthesized
  source 1..22: mol_type = other DNA
gcctgggaggcctttggaagca

SEQ ID NO: 99354 - DNA, 22 bp, synthetic construct
  misc_feature 1..22: note = chemically synthesized
  source 1..22: mol_type = other DNA
ggaggcctttggaagcagagac

SEQ ID NO: 99355 - DNA, 22 bp, synthetic construct
  misc_feature 1..22: note = chemically synthesized
  source 1..22: mol_type = other DNA
tggaagcagagactggagctta

SEQ ID NO: 99356 - DNA, 22 bp, synthetic construct
  misc_feature 1..22: note = chemically synthesized
  source 1..22: mol_type = other DNA
ggaagcagagactggagcttaa

SEQ ID NO: 99357 - DNA, 22 bp, synthetic construct
  misc_feature 1..22: note = chemically synthesized
  source 1..22: mol_type = other DNA
gaagcagagactggagcttaaa

SEQ ID NO: 99358 - DNA, 22 bp, synthetic construct
  misc_feature 1..22: note = chemically synthesized
  source 1..22: mol_type = other DNA
gagcttaaatttaaacatcttt

SEQ ID NO: 99359 - DNA, 22 bp, synthetic construct
  misc_feature 1..22: note = chemically synthesized
  source 1..22: mol_type = other DNA
aaatttaaacatctttgtatcc

SEQ ID NO: 99360 - DNA, 22 bp, synthetic construct
  misc_feature 1..22: note = chemically synthesized
  source 1..22: mol_type = other DNA
aatttaaacatctttgtatccc

SEQ ID NO: 99361 - DNA, 22 bp, synthetic construct
  misc_feature 1..22: note = chemically synthesized
  source 1..22: mol_type = other DNA
aaacatctttgtatccccagca

SEQ ID NO: 99362 - DNA, 22 bp, synthetic construct
  misc_feature 1..22: note = chemically synthesized
  source 1..22: mol_type = other DNA
aacatctttgtatccccagcat

SEQ ID NO: 99363 - DNA, 22 bp, synthetic construct
  misc_feature 1..22: note = chemically synthesized
  source 1..22: mol_type = other DNA
tgtatccccagcatccagcata

SEQ ID NO: 99364 - DNA, 22 bp, synthetic construct
  misc_feature 1..22: note = chemically synthesized
  source 1..22: mol_type = other DNA
gtatccccagcatccagcatac

SEQ ID NO: 99365 - DNA, 22 bp, synthetic construct
  misc_feature 1..22: note = chemically synthesized
  source 1..22: mol_type = other DNA
tatccccagcatccagcataca

SEQ ID NO: 99366 - DNA, 22 bp, synthetic construct
  misc_feature 1..22: note = chemically synthesized
  source 1..22: mol_type = other DNA
ccaagaagtacatgtcaataaa

SEQ ID NO: 99367 - DNA, 22 bp, synthetic construct
  misc_feature 1..22: note = chemically synthesized
  source 1..22: mol_type = other DNA
attggatagtgagcaaagacat

SEQ ID NO: 99368 - DNA, 22 bp, synthetic construct
  misc_feature 1..22: note = chemically synthesized
  source 1..22: mol_type = other DNA
ttggatagtgagcaaagacata

SEQ ID NO: 99369 - DNA, 22 bp, synthetic construct
  misc_feature 1..22: note = chemically synthesized
  source 1..22: mol_type = other DNA
gatagtgagcaaagacataatt

SEQ ID NO: 99370 - DNA, 22 bp, synthetic construct
  misc_feature 1..22: note = chemically synthesized
  source 1..22: mol_type = other DNA
ggaccaaatctcaattctacta

SEQ ID NO: 99371 - DNA, 22 bp, synthetic construct
  misc_feature 1..22: note = chemically synthesized
  source 1..22: mol_type = other DNA
aattctactatttgctagtagt

SEQ ID NO: 99372 - DNA, 22 bp, synthetic construct
  misc_feature 1..22: note = chemically synthesized
  source 1..22: mol_type = other DNA
tactatttgctagtagtttatg

SEQ ID NO: 99373 - DNA, 22 bp, synthetic construct
  misc_feature 1..22: note = chemically synthesized
  source 1..22: mol_type = other DNA
ctatttgctagtagtttatgtt

SEQ ID NO: 99374 - DNA, 22 bp, synthetic construct
  misc_feature 1..22: note = chemically synthesized
  source 1..22: mol_type = other DNA
tttgctagtagtttatgtttgt

SEQ ID NO: 99375 - DNA, 22 bp, synthetic construct
  misc_feature 1..22: note = chemically synthesized
  source 1..22: mol_type = other DNA
gctagtagtttatgtttgtgtg

SEQ ID NO: 99376 - DNA, 22 bp, synthetic construct
  misc_feature 1..22: note = chemically synthesized
  source 1..22: mol_type = other DNA
ctagtagtttatgtttgtgtgt

SEQ ID NO: 99377 - DNA, 22 bp, synthetic construct
  misc_feature 1..22: note = chemically synthesized
  source 1..22: mol_type = other DNA
gtagtttatgtttgtgtgtgtg

SEQ ID NO: 99378 - DNA, 22 bp, synthetic construct
  misc_feature 1..22: note = chemically synthesized
  source 1..22: mol_type = other DNA
atgtttgtgtgtgtgagagtgt

SEQ ID NO: 99379 - DNA, 22 bp, synthetic construct
  misc_feature 1..22: note = chemically synthesized
  source 1..22: mol_type = other DNA
tgtttgtgtgtgtgagagtgta

SEQ ID NO: 99380 - DNA, 22 bp, synthetic construct
  misc_feature 1..22: note = chemically synthesized
  source 1..22: mol_type = other DNA
gtgtgtgtgagagtgtatgctt

SEQ ID NO: 99381 - DNA, 22 bp, synthetic construct
  misc_feature 1..22: note = chemically synthesized
  source 1..22: mol_type = other DNA
tgtgtgtgagagtgtatgcttg

SEQ ID NO: 99382 - DNA, 22 bp, synthetic construct
  misc_feature 1..22: note = chemically synthesized
  source 1..22: mol_type = other DNA
gagcaagttgagaggtagtttt

SEQ ID NO: 99383 - DNA, 22 bp, synthetic construct
  misc_feature 1..22: note = chemically synthesized
  source 1..22: mol_type = other DNA
agcaagttgagaggtagttttt

SEQ ID NO: 99384 - DNA, 22 bp, synthetic construct
  misc_feature 1..22: note = chemically synthesized
  source 1..22: mol_type = other DNA
agaggtagtttttttaactgta

SEQ ID NO: 99385 - DNA, 22 bp, synthetic construct
  misc_feature 1..22: note = chemically synthesized
  source 1..22: mol_type = other DNA
ttttaactgtagtaaaatgggg

SEQ ID NO: 99386 - DNA, 22 bp, synthetic construct
  misc_feature 1..22: note = chemically synthesized
  source 1..22: mol_type = other DNA
tttaactgtagtaaaatgggga

SEQ ID NO: 99387 - DNA, 22 bp, synthetic construct
  misc_feature 1..22: note = chemically synthesized
  source 1..22: mol_type = other DNA
ttaactgtagtaaaatggggat

SEQ ID NO: 99388 - DNA, 22 bp, synthetic construct
  misc_feature 1..22: note = chemically synthesized
  source 1..22: mol_type = other DNA
taactgtagtaaaatggggata

SEQ ID NO: 99389 - DNA, 22 bp, synthetic construct
  misc_feature 1..22: note = chemically synthesized
  source 1..22: mol_type = other DNA
aactgtagtaaaatggggataa

SEQ ID NO: 99390 - DNA, 22 bp, synthetic construct
  misc_feature 1..22: note = chemically synthesized
  source 1..22: mol_type = other DNA
actgtagtaaaatggggataat

SEQ ID NO: 99391 - DNA, 22 bp, synthetic construct
  misc_feature 1..22: note = chemically synthesized
  source 1..22: mol_type = other DNA
tagtaaaatggggataataata

SEQ ID NO: 99392 - DNA, 22 bp, synthetic construct
  misc_feature 1..22: note = chemically synthesized
  source 1..22: mol_type = other DNA
cctgaaagaatccaagagtatt

SEQ ID NO: 99393 - DNA, 22 bp, synthetic construct
  misc_feature 1..22: note = chemically synthesized
  source 1..22: mol_type = other DNA
aaagaatccaagagtattaaat

SEQ ID NO: 99394 - DNA, 22 bp, synthetic construct
  misc_feature 1..22: note = chemically synthesized
  source 1..22: mol_type = other DNA
aatatgattaattatgcaaagc

SEQ ID NO: 99395 - DNA, 22 bp, synthetic construct
  misc_feature 1..22: note = chemically synthesized
  source 1..22: mol_type = other DNA
attatgcaaagcactaattaca

SEQ ID NO: 99396 - DNA, 22 bp, synthetic construct
  misc_feature 1..22: note = chemically synthesized
  source 1..22: mol_type = other DNA
tgcaaagcactaattacagtct

SEQ ID NO: 99397 - DNA, 22 bp, synthetic construct
  misc_feature 1..22: note = chemically synthesized
  source 1..22: mol_type = other DNA
attacagtctctgatagccttc

SEQ ID NO: 99398 - DNA, 22 bp, synthetic construct
  misc_feature 1..22: note = chemically synthesized
  source 1..22: mol_type = other DNA
cagtctctgatagccttcaata

SEQ ID NO: 99399 - DNA, 22 bp, synthetic construct
  misc_feature 1..22: note = chemically synthesized
  source 1..22: mol_type = other DNA
tgatagccttcaataaatgtca

SEQ ID NO: 99400 - DNA, 22 bp, synthetic construct
  misc_feature 1..22: note = chemically synthesized
  source 1..22: mol_type = other DNA
atagccttcaataaatgtcagt

SEQ ID NO: 99401 - DNA, 22 bp, synthetic construct
  misc_feature 1..22: note = chemically synthesized
  source 1..22: mol_type = other DNA
caataaatgtcagttattttta

SEQ ID NO: 99402 - DNA, 22 bp, synthetic construct
  misc_feature 1..22: note = chemically synthesized
  source 1..22: mol_type = other DNA
aataaatgtcagttatttttat

SEQ ID NO: 99403 - DNA, 22 bp, synthetic construct
  misc_feature 1..22: note = chemically synthesized
  source 1..22: mol_type = other DNA
tttttattattacagttaaaga

SEQ ID NO: 99404 - DNA, 22 bp, synthetic construct
  misc_feature 1..22: note = chemically synthesized
  source 1..22: mol_type = other DNA
ttattattacagttaaagatga

SEQ ID NO: 99405 - DNA, 22 bp, synthetic construct
  misc_feature 1..22: note = chemically synthesized
  source 1..22: mol_type = other DNA
tattattacagttaaagatgaa

SEQ ID NO: 99406 - DNA, 22 bp, synthetic construct
  misc_feature 1..22: note = chemically synthesized
  source 1..22: mol_type = other DNA
attattacagttaaagatgaat

SEQ ID NO: 99407 - DNA, 22 bp, synthetic construct
  misc_feature 1..22: note = chemically synthesized
  source 1..22: mol_type = other DNA
ttattacagttaaagatgaatg

SEQ ID NO: 99408 - DNA, 22 bp, synthetic construct
  misc_feature 1..22: note = chemically synthesized
  source 1..22: mol_type = other DNA
ttacagttaaagatgaatgggc

SEQ ID NO: 99409 - DNA, 22 bp, synthetic construct
  misc_feature 1..22: note = chemically synthesized
  source 1..22: mol_type = other DNA
cagttaaagatgaatgggcata

SEQ ID NO: 99410 - DNA, 22 bp, synthetic construct
  misc_feature 1..22: note = chemically synthesized
  source 1..22: mol_type = other DNA
aagatgaatgggcataaagtac

SEQ ID NO: 99411 - DNA, 22 bp, synthetic construct
  misc_feature 1..22: note = chemically synthesized
  source 1..22: mol_type = other DNA
gttttcacctgcagcaagaatg

SEQ ID NO: 99412 - DNA, 22 bp, synthetic construct
  misc_feature 1..22: note = chemically synthesized
  source 1..22: mol_type = other DNA
tcacctgcagcaagaatgattg

SEQ ID NO: 99413 - DNA, 22 bp, synthetic construct
  misc_feature 1..22: note = chemically synthesized
  source 1..22: mol_type = other DNA
cacctgcagcaagaatgattgc

SEQ ID NO: 99414 - DNA, 22 bp, synthetic construct
  misc_feature 1..22: note = chemically synthesized
  source 1..22: mol_type = other DNA
acctgcagcaagaatgattgca

SEQ ID NO: 99415 - DNA, 22 bp, synthetic construct
  misc_feature 1..22: note = chemically synthesized
  source 1..22: mol_type = other DNA
cagcaagaatgattgcagttaa

SEQ ID NO: 99416 - DNA, 22 bp, synthetic construct
  misc_feature 1..22: note = chemically synthesized
  source 1..22: mol_type = other DNA
cagttaaacaaaaaatactagc

SEQ ID NO: 99417 - DNA, 22 bp, synthetic construct
  misc_feature 1..22: note = chemically synthesized
  source 1..22: mol_type = other DNA
aacaaaaaatactagcaaacat

SEQ ID NO: 99418 - DNA, 22 bp, synthetic construct
  misc_feature 1..22: note = chemically synthesized
  source 1..22: mol_type = other DNA
gcaaacatttctagagtagtta

SEQ ID NO: 99419 - DNA, 22 bp, synthetic construct
  misc_feature 1..22: note = chemically synthesized
  source 1..22: mol_type = other DNA
ctagagtagttagcatttataa

SEQ ID NO: 99420 - DNA, 22 bp, synthetic construct
  misc_feature 1..22: note = chemically synthesized
  source 1..22: mol_type = other DNA
tagagtagttagcatttataag

SEQ ID NO: 99421 - DNA, 22 bp, synthetic construct
  misc_feature 1..22: note = chemically synthesized
  source 1..22: mol_type = other DNA
gagtagttagcatttataagtc

SEQ ID NO: 99422 - DNA, 22 bp, synthetic construct
  misc_feature 1..22: note = chemically synthesized
  source 1..22: mol_type = other DNA
gcatttataagtcactgcttta

SEQ ID NO: 99423 - DNA, 22 bp, synthetic construct
  misc_feature 1..22: note = chemically synthesized
  source 1..22: mol_type = other DNA
ataagtcactgctttaaactct

SEQ ID NO: 99424 - DNA, 22 bp, synthetic construct
  misc_feature 1..22: note = chemically synthesized
  source 1..22: mol_type = other DNA
taagtcactgctttaaactctt

SEQ ID NO: 99425 - DNA, 22 bp, synthetic construct
  misc_feature 1..22: note = chemically synthesized
  source 1..22: mol_type = other DNA
ctttaaactctttgcatgtatt

SEQ ID NO: 99426 - DNA, 22 bp, synthetic construct
  misc_feature 1..22: note = chemically synthesized
  source 1..22: mol_type = other DNA
taaactctttgcatgtattaac

SEQ ID NO: 99427 - DNA, 22 bp, synthetic construct
  misc_feature 1..22: note = chemically synthesized
  source 1..22: mol_type = other DNA
aaactctttgcatgtattaact

SEQ ID NO: 99428 - DNA, 22 bp, synthetic construct
  misc_feature 1..22: note = chemically synthesized
  source 1..22: mol_type = other DNA
aactctttgcatgtattaactc

SEQ ID NO: 99429 - DNA, 22 bp, synthetic construct
  misc_feature 1..22: note = chemically synthesized
  source 1..22: mol_type = other DNA
tttgcatgtattaactcactcg

SEQ ID NO: 99430 - DNA, 22 bp, synthetic construct
  misc_feature 1..22: note = chemically synthesized
  source 1..22: mol_type = other DNA
tgcatgtattaactcactcggg

SEQ ID NO: 99431 - DNA, 22 bp, synthetic construct
  misc_feature 1..22: note = chemically synthesized
  source 1..22: mol_type = other DNA
gcatgtattaactcactcgggc

SEQ ID NO: 99432 - DNA, 22 bp, synthetic construct
  misc_feature 1..22: note = chemically synthesized
  source 1..22: mol_type = other DNA
catgtattaactcactcgggct

SEQ ID NO: 99433 - DNA, 22 bp, synthetic construct
  misc_feature 1..22: note = chemically synthesized
  source 1..22: mol_type = other DNA
actcactcgggctgcagaacaa

SEQ ID NO: 99434 - DNA, 22 bp, synthetic construct
  misc_feature 1..22: note = chemically synthesized
  source 1..22: mol_type = other DNA
actcgggctgcagaacaatctt

SEQ ID NO: 99435 - DNA, 22 bp, synthetic construct
  misc_feature 1..22: note = chemically synthesized
  source 1..22: mol_type = other DNA
gggctgcagaacaatcttatga

SEQ ID NO: 99436 - DNA, 22 bp, synthetic construct
  misc_feature 1..22: note = chemically synthesized
  source 1..22: mol_type = other DNA
cagaacaatcttatgagcctgt

SEQ ID NO: 99437 - DNA, 22 bp, synthetic construct
  misc_feature 1..22: note = chemically synthesized
  source 1..22: mol_type = other DNA
atgagcctgttaaaactcctgt

SEQ ID NO: 99438 - DNA, 22 bp, synthetic construct
  misc_feature 1..22: note = chemically synthesized
  source 1..22: mol_type = other DNA
tgagcctgttaaaactcctgta

SEQ ID NO: 99439 - DNA, 22 bp, synthetic construct
  misc_feature 1..22: note = chemically synthesized
  source 1..22: mol_type = other DNA
ttaaaactcctgtaatcatgct

SEQ ID NO: 99440 - DNA, 22 bp, synthetic construct
  misc_feature 1..22: note = chemically synthesized
  source 1..22: mol_type = other DNA
aaactcctgtaatcatgcttat

SEQ ID NO: 99441 - DNA, 22 bp, synthetic construct
  misc_feature 1..22: note = chemically synthesized
  source 1..22: mol_type = other DNA
ctgtaatcatgcttataatccc

SEQ ID NO: 99442 - DNA, 22 bp, synthetic construct
  misc_feature 1..22: note = chemically synthesized
  source 1..22: mol_type = other DNA
taatcatgcttataatcccagc

SEQ ID NO: 99443 - DNA, 22 bp, synthetic construct
  misc_feature 1..22: note = chemically synthesized
  source 1..22: mol_type = other DNA
ataatcccagcactttggaagg

SEQ ID NO: 99444 - DNA, 22 bp, synthetic construct
  misc_feature 1..22: note = chemically synthesized
  source 1..22: mol_type = other DNA
taatcccagcactttggaaggc

SEQ ID NO: 99445 - DNA, 22 bp, synthetic construct
  misc_feature 1..22: note = chemically synthesized
  source 1..22: mol_type = other DNA
tggaaggctgaggtgggcagat

SEQ ID NO: 99446 - DNA, 22 bp, synthetic construct
  misc_feature 1..22: note = chemically synthesized
  source 1..22: mol_type = other DNA
ggaaggctgaggtgggcagatt

SEQ ID NO: 99447 - DNA, 22 bp, synthetic construct
  misc_feature 1..22: note = chemically synthesized
  source 1..22: mol_type = other DNA
gaaggctgaggtgggcagattg

SEQ ID NO: 99448 - DNA, 22 bp, synthetic construct
  misc_feature 1..22: note = chemically synthesized
  source 1..22: mol_type = other DNA
aggtgggcagattgcttgagct

SEQ ID NO: 99449 - DNA, 22 bp, synthetic construct
  misc_feature 1..22: note = chemically synthesized
  source 1..22: mol_type = other DNA
cttgagctccggagtctgagac

SEQ ID NO: 99450 - DNA, 22 bp, synthetic construct
  misc_feature 1..22: note = chemically synthesized
  source 1..22: mol_type = other DNA
gagctccggagtctgagaccat

SEQ ID NO: 99451 - DNA, 22 bp, synthetic construct
  misc_feature 1..22: note = chemically synthesized
  source 1..22: mol_type = other DNA
agctccggagtctgagaccatc

SEQ ID NO: 99452 - DNA, 22 bp, synthetic construct
  misc_feature 1..22: note = chemically synthesized
  source 1..22: mol_type = other DNA
cggagtctgagaccatcctgtg

SEQ ID NO: 99453 - DNA, 22 bp, synthetic construct
  misc_feature 1..22: note = chemically synthesized
  source 1..22: mol_type = other DNA
agaccatcctgtgtaacatgtg

SEQ ID NO: 99454 - DNA, 22 bp, synthetic construct
  misc_feature 1..22: note = chemically synthesized
  source 1..22: mol_type = other DNA
tgtaacatgtgaaaccccatct

SEQ ID NO: 99455 - DNA, 22 bp, synthetic construct
  misc_feature 1..22: note = chemically synthesized
  source 1..22: mol_type = other DNA
taccaaaaatacaaaaaattag

SEQ ID NO: 99456 - DNA, 22 bp, synthetic construct
  misc_feature 1..22: note = chemically synthesized
  source 1..22: mol_type = other DNA
ccaaaaatacaaaaaattagcg

SEQ ID NO: 99457 - DNA, 22 bp, synthetic construct
  misc_feature 1..22: note = chemically synthesized
  source 1..22: mol_type = other DNA
gcgaggtatggtggtgtgtacc

SEQ ID NO: 99458 - DNA, 22 bp, synthetic construct
  misc_feature 1..22: note = chemically synthesized
  source 1..22: mol_type = other DNA
tggttccagctactcaggatgt

SEQ ID NO: 99459 - DNA, 22 bp, synthetic construct
  misc_feature 1..22: note = chemically synthesized
  source 1..22: mol_type = other DNA
cagctactcaggatgttgaggt

SEQ ID NO: 99460 - DNA, 22 bp, synthetic construct
  misc_feature 1..22: note = chemically synthesized
  source 1..22: mol_type = other DNA
ctcaggatgttgaggtgggagg

SEQ ID NO: 99461 - DNA, 22 bp, synthetic construct
  misc_feature 1..22: note = chemically synthesized
  source 1..22: mol_type = other DNA
aggatgttgaggtgggaggacc

SEQ ID NO: 99462 - DNA, 22 bp, synthetic construct
  misc_feature 1..22: note = chemically synthesized
  source 1..22: mol_type = other DNA
aggtgggaggaccgcttgagcc

SEQ ID NO: 99463 - DNA, 22 bp, synthetic construct
  misc_feature 1..22: note = chemically synthesized
  source 1..22: mol_type = other DNA
gagcctgggaagtgcaagttgc

SEQ ID NO: 99464 - DNA, 22 bp, synthetic construct
  misc_feature 1..22: note = chemically synthesized
  source 1..22: mol_type = other DNA
agcctgggaagtgcaagttgca

SEQ ID NO: 99465 - DNA, 22 bp, synthetic construct
  misc_feature 1..22: note = chemically synthesized
  source 1..22: mol_type = other DNA
ggaagtgcaagttgcagtgagc

SEQ ID NO: 99466 - DNA, 22 bp, synthetic construct
  misc_feature 1..22: note = chemically synthesized
  source 1..22: mol_type = other DNA
cagtgagccgagattttgccac

SEQ ID NO: 99467 - DNA, 22 bp, synthetic construct
  misc_feature 1..22: note = chemically synthesized
  source 1..22: mol_type = other DNA
tgccactacactcccatttggg

SEQ ID NO: 99468 - DNA, 22 bp, synthetic construct
  misc_feature 1..22: note = chemically synthesized
  source 1..22: mol_type = other DNA
gccactacactcccatttgggt

SEQ ID NO: 99469 - DNA, 22 bp, synthetic construct
  misc_feature 1..22: note = chemically synthesized
  source 1..22: mol_type = other DNA
ccactacactcccatttgggtg

SEQ ID NO: 99470 - DNA, 22 bp, synthetic construct
  misc_feature 1..22: note = chemically synthesized
  source 1..22: mol_type = other DNA
cactcccatttgggtgacagag

SEQ ID NO: 99471 - DNA, 22 bp, synthetic construct
  misc_feature 1..22: note = chemically synthesized
  source 1..22: mol_type = other DNA
ccatttgggtgacagagtgaga

SEQ ID NO: 99472 - DNA, 22 bp, synthetic construct
  misc_feature 1..22: note = chemically synthesized
  source 1..22: mol_type = other DNA
gggtgacagagtgagacccttt

SEQ ID NO: 99473 - DNA, 22 bp, synthetic construct
  misc_feature 1..22: note = chemically synthesized
  source 1..22: mol_type = other DNA
ggtgacagagtgagaccctttc

SEQ ID NO: 99474 - DNA, 22 bp, synthetic construct
  misc_feature 1..22: note = chemically synthesized
  source 1..22: mol_type = other DNA
tctcaaaaacaaactaattaaa

SEQ ID NO: 99475 - DNA, 22 bp, synthetic construct
  misc_feature 1..22: note = chemically synthesized
  source 1..22: mol_type = other DNA
ctcaaaaacaaactaattaaaa

SEQ ID NO: 99476 - DNA, 22 bp, synthetic construct
  misc_feature 1..22: note = chemically synthesized
  source 1..22: mol_type = other DNA
tcaaaaacaaactaattaaaaa

SEQ ID NO: 99477 - DNA, 22 bp, synthetic construct
  misc_feature 1..22: note = chemically synthesized
  source 1..22: mol_type = other DNA
aaaaacaaactaattaaaaaac

SEQ ID NO: 99478 - DNA, 22 bp, synthetic construct
  misc_feature 1..22: note = chemically synthesized
  source 1..22: mol_type = other DNA
attaaaaaaccctccattttac

SEQ ID NO: 99479 - DNA, 22 bp, synthetic construct
  misc_feature 1..22: note = chemically synthesized
  source 1..22: mol_type = other DNA
aaaaaccctccattttacagat

SEQ ID NO: 99480 - DNA, 22 bp, synthetic construct
  misc_feature 1..22: note = chemically synthesized
  source 1..22: mol_type = other DNA
cattttacagatgaagaaactg

SEQ ID NO: 99481 - DNA, 22 bp, synthetic construct
  misc_feature 1..22: note = chemically synthesized
  source 1..22: mol_type = other DNA
tacagatgaagaaactgagtca

SEQ ID NO: 99482 - DNA, 22 bp, synthetic construct
  misc_feature 1..22: note = chemically synthesized
  source 1..22: mol_type = other DNA
acagatgaagaaactgagtcat

SEQ ID NO: 99483 - DNA, 22 bp, synthetic construct
  misc_feature 1..22: note = chemically synthesized
  source 1..22: mol_type = other DNA
cagatgaagaaactgagtcata

SEQ ID NO: 99484 - DNA, 22 bp, synthetic construct
  misc_feature 1..22: note = chemically synthesized
  source 1..22: mol_type = other DNA
agtcatacaactactaagagaa

SEQ ID NO: 99485 - DNA, 22 bp, synthetic construct
  misc_feature 1..22: note = chemically synthesized
  source 1..22: mol_type = other DNA
ctaagagaaactgagtcactaa

SEQ ID NO: 99486 - DNA, 22 bp, synthetic construct
  misc_feature 1..22: note = chemically synthesized
  source 1..22: mol_type = other DNA
agagaaactgagtcactaatca

SEQ ID NO: 99487 - DNA, 22 bp, synthetic construct
  misc_feature 1..22: note = chemically synthesized
  source 1..22: mol_type = other DNA
agtcactaatcactcaggtggt

SEQ ID NO: 99488 - DNA, 22 bp, synthetic construct
  misc_feature 1..22: note = chemically synthesized
  source 1..22: mol_type = other DNA
atcactcaggtggtctggctcc

SEQ ID NO: 99489 - DNA, 22 bp, synthetic construct
  misc_feature 1..22: note = chemically synthesized
  source 1..22: mol_type = other DNA
aggtggtctggctccagcatct

SEQ ID NO: 99490 - DNA, 22 bp, synthetic construct
  misc_feature 1..22: note = chemically synthesized
  source 1..22: mol_type = other DNA
gctccagcatctgtactcttaa

SEQ ID NO: 99491 - DNA, 22 bp, synthetic construct
  misc_feature 1..22: note = chemically synthesized
  source 1..22: mol_type = other DNA
cagcatctgtactcttaatctc

SEQ ID NO: 99492 - DNA, 22 bp, synthetic construct
  misc_feature 1..22: note = chemically synthesized
  source 1..22: mol_type = other DNA
tactcttaatctctgctctata

SEQ ID NO: 99493 - DNA, 22 bp, synthetic construct
  misc_feature 1..22: note = chemically synthesized
  source 1..22: mol_type = other DNA
ttaatctctgctctatactgcc

SEQ ID NO: 99494 - DNA, 22 bp, synthetic construct
  misc_feature 1..22: note = chemically synthesized
  source 1..22: mol_type = other DNA
aatctctgctctatactgccca

SEQ ID NO: 99495 - DNA, 22 bp, synthetic construct
  misc_feature 1..22: note = chemically synthesized
  source 1..22: mol_type = other DNA
atctctgctctatactgcccaa

SEQ ID NO: 99496 - DNA, 22 bp, synthetic construct
  misc_feature 1..22: note = chemically synthesized
  source 1..22: mol_type = other DNA
tgctctatactgcccaagactt

SEQ ID NO: 99497 - DNA, 22 bp, synthetic construct
  misc_feature 1..22: note = chemically synthesized
  source 1..22: mol_type = other DNA
ctctatactgcccaagactttt

SEQ ID NO: 99498 - DNA, 22 bp, synthetic construct
  misc_feature 1..22: note = chemically synthesized
  source 1..22: mol_type = other DNA
tatactgcccaagacttttata

SEQ ID NO: 99499 - DNA, 22 bp, synthetic construct
  misc_feature 1..22: note = chemically synthesized
  source 1..22: mol_type = other DNA
tactgcccaagacttttataaa

SEQ ID NO: 99500 - DNA, 22 bp, synthetic construct
  misc_feature 1..22: note = chemically synthesized
  source 1..22: mol_type = other DNA
cccaagacttttataaagtcaa

SEQ ID NO: 99501 - DNA, 22 bp, synthetic construct
  misc_feature 1..22: note = chemically synthesized
  source 1..22: mol_type = other DNA
ttataaagtcaagggttgagtc

SEQ ID NO: 99502 - DNA, 22 bp, synthetic construct
  misc_feature 1..22: note = chemically synthesized
  source 1..22: mol_type = other DNA
tataaagtcaagggttgagtca

SEQ ID NO: 99503 - DNA, 22 bp, synthetic construct
  misc_feature 1..22: note = chemically synthesized
  source 1..22: mol_type = other DNA
ataaagtcaagggttgagtcac

SEQ ID NO: 99504 - DNA, 22 bp, synthetic construct
  misc_feature 1..22: note = chemically synthesized
  source 1..22: mol_type = other DNA
taaagtcaagggttgagtcact

SEQ ID NO: 99505 - DNA, 22 bp, synthetic construct
  misc_feature 1..22: note = chemically synthesized
  source 1..22: mol_type = other DNA
agtcactgaaatgagttattgg

SEQ ID NO: 99506 - DNA, 22 bp, synthetic construct
  misc_feature 1..22: note = chemically synthesized
  source 1..22: mol_type = other DNA
aaatgagttattgggatggctg

SEQ ID NO: 99507 - DNA, 22 bp, synthetic construct
  misc_feature 1..22: note = chemically synthesized
  source 1..22: mol_type = other DNA
ttgggatggctgtgtgggaagg

SEQ ID NO: 99508 - DNA, 22 bp, synthetic construct
  misc_feature 1..22: note = chemically synthesized
  source 1..22: mol_type = other DNA
ggatggctgtgtgggaagggtg

SEQ ID NO: 99509 - DNA, 22 bp, synthetic construct
  misc_feature 1..22: note = chemically synthesized
  source 1..22: mol_type = other DNA
tgtgggaagggtgctaagttct

SEQ ID NO: 99510 - DNA, 22 bp, synthetic construct
  misc_feature 1..22: note = chemically synthesized
  source 1..22: mol_type = other DNA
agttctttcctaaaggtatgtg

SEQ ID NO: 99511 - DNA, 22 bp, synthetic construct
  misc_feature 1..22: note = chemically synthesized
  source 1..22: mol_type = other DNA
tttcctaaaggtatgtgagaat

SEQ ID NO: 99512 - DNA, 22 bp, synthetic construct
  misc_feature 1..22: note = chemically synthesized
  source 1..22: mol_type = other DNA
tcctaaaggtatgtgagaatac

SEQ ID NO: 99513 - DNA, 22 bp, synthetic construct
  misc_feature 1..22: note = chemically synthesized
  source 1..22: mol_type = other DNA
cctaaaggtatgtgagaataca

SEQ ID NO: 99514 - DNA, 22 bp, synthetic construct
  misc_feature 1..22: note = chemically synthesized
  source 1..22: mol_type = other DNA
ctaaaggtatgtgagaatacaa

SEQ ID NO: 99515 - DNA, 22 bp, synthetic construct
  misc_feature 1..22: note = chemically synthesized
  source 1..22: mol_type = other DNA
aaggtatgtgagaatacaaagg

SEQ ID NO: 99516 - DNA, 22 bp, synthetic construct
  misc_feature 1..22: note = chemically synthesized
  source 1..22: mol_type = other DNA
ctttttacacacgtgaactagt

SEQ ID NO: 99517 - DNA, 22 bp, synthetic construct
  misc_feature 1..22: note = chemically synthesized
  source 1..22: mol_type = other DNA
tttacacacgtgaactagtgca

SEQ ID NO: 99518 - DNA, 22 bp, synthetic construct
  misc_feature 1..22: note = chemically synthesized
  source 1..22: mol_type = other DNA
ttacacacgtgaactagtgcat

SEQ ID NO: 99519 - DNA, 22 bp, synthetic construct
  misc_feature 1..22: note = chemically synthesized
  source 1..22: mol_type = other DNA
tacacacgtgaactagtgcatg

SEQ ID NO: 99520 - DNA, 22 bp, synthetic construct
  misc_feature 1..22: note = chemically synthesized
  source 1..22: mol_type = other DNA
acacacgtgaactagtgcatgc

SEQ ID NO: 99521 - DNA, 22 bp, synthetic construct
  misc_feature 1..22: note = chemically synthesized
  source 1..22: mol_type = other DNA
cacacgtgaactagtgcatgca

SEQ ID NO: 99522 - DNA, 22 bp, synthetic construct
  misc_feature 1..22: note = chemically synthesized
  source 1..22: mol_type = other DNA
gtgcatgcaaatctgacactca

SEQ ID NO: 99523 - DNA, 22 bp, synthetic construct
  misc_feature 1..22: note = chemically synthesized
  source 1..22: mol_type = other DNA
acactcagtgggcctgggtgaa

SEQ ID NO: 99524 - DNA, 22 bp, synthetic construct
  misc_feature 1..22: note = chemically synthesized
  source 1..22: mol_type = other DNA
agtgggcctgggtgaaggtgag

SEQ ID NO: 99525 - DNA, 22 bp, synthetic construct
  misc_feature 1..22: note = chemically synthesized
  source 1..22: mol_type = other DNA
ggtgaaggtgagaattttattg

SEQ ID NO: 99526 - DNA, 22 bp, synthetic construct
  misc_feature 1..22: note = chemically synthesized
  source 1..22: mol_type = other DNA
tattgctgaatgagagcctctg

SEQ ID NO: 99527 - DNA, 22 bp, synthetic construct
  misc_feature 1..22: note = chemically synthesized
  source 1..22: mol_type = other DNA
attgctgaatgagagcctctgg

SEQ ID NO: 99528 - DNA, 22 bp, synthetic construct
  misc_feature 1..22: note = chemically synthesized
  source 1..22: mol_type = other DNA
ttgctgaatgagagcctctggg

SEQ ID NO: 99529 - DNA, 22 bp, synthetic construct
  misc_feature 1..22: note = chemically synthesized
  source 1..22: mol_type = other DNA
ctgaatgagagcctctggggac

SEQ ID NO: 99530 - DNA, 22 bp, synthetic construct
  misc_feature 1..22: note = chemically synthesized
  source 1..22: mol_type = other DNA
aatgagagcctctggggacatc

SEQ ID NO: 99531 - DNA, 22 bp, synthetic construct
  misc_feature 1..22: note = chemically synthesized
  source 1..22: mol_type = other DNA
tggggacatcttgccagtcaat

SEQ ID NO: 99532 - DNA, 22 bp, synthetic construct
  misc_feature 1..22: note = chemically synthesized
  source 1..22: mol_type = other DNA
gggacatcttgccagtcaatga

SEQ ID NO: 99533 - DNA, 22 bp, synthetic construct
  misc_feature 1..22: note = chemically synthesized
  source 1..22: mol_type = other DNA
gccagtcaatgagtctcaggtt

SEQ ID NO: 99534 - DNA, 22 bp, synthetic construct
  misc_feature 1..22: note = chemically synthesized
  source 1..22: mol_type = other DNA
ccagtcaatgagtctcaggttc

SEQ ID NO: 99535 - DNA, 22 bp, synthetic construct
  misc_feature 1..22: note = chemically synthesized
  source 1..22: mol_type = other DNA
aggttcaatttccttctcagtc

SEQ ID NO: 99536 - DNA, 22 bp, synthetic construct
  misc_feature 1..22: note = chemically synthesized
  source 1..22: mol_type = other DNA
aatttccttctcagtcttggag

SEQ ID NO: 99537 - DNA, 22 bp, synthetic construct
  misc_feature 1..22: note = chemically synthesized
  source 1..22: mol_type = other DNA
ccttctcagtcttggagtaaca

SEQ ID NO: 99538 - DNA, 22 bp, synthetic construct
  misc_feature 1..22: note = chemically synthesized
  source 1..22: mol_type = other DNA
cttctcagtcttggagtaacag

SEQ ID NO: 99539 - DNA, 22 bp, synthetic construct
  misc_feature 1..22: note = chemically synthesized
  source 1..22: mol_type = other DNA
ctcagtcttggagtaacagaag

SEQ ID NO: 99540 - DNA, 22 bp, synthetic construct
  misc_feature 1..22: note = chemically synthesized
  source 1..22: mol_type = other DNA
tcagtcttggagtaacagaagc

SEQ ID NO: 99541 - DNA, 22 bp, synthetic construct
  misc_feature 1..22: note = chemically synthesized
  source 1..22: mol_type = other DNA
agtcttggagtaacagaagctc

SEQ ID NO: 99542 - DNA, 22 bp, synthetic construct
  misc_feature 1..22: note = chemically synthesized
  source 1..22: mol_type = other DNA
ggagtaacagaagctcatgcat

SEQ ID NO: 99543 - DNA, 22 bp, synthetic construct
  misc_feature 1..22: note = chemically synthesized
  source 1..22: mol_type = other DNA
gagtaacagaagctcatgcatt

SEQ ID NO: 99544 - DNA, 22 bp, synthetic construct
  misc_feature 1..22: note = chemically synthesized
  source 1..22: mol_type = other DNA
atgcatttaataaacggaaatt

SEQ ID NO: 99545 - DNA, 22 bp, synthetic construct
  misc_feature 1..22: note = chemically synthesized
  source 1..22: mol_type = other DNA
aataaacggaaattttgtattg

SEQ ID NO: 99546 - DNA, 22 bp, synthetic construct
  misc_feature 1..22: note = chemically synthesized
  source 1..22: mol_type = other DNA
ataaacggaaattttgtattga

SEQ ID NO: 99547 - DNA, 22 bp, synthetic construct
  misc_feature 1..22: note = chemically synthesized
  source 1..22: mol_type = other DNA
tgtattgaaatgagagccattg

SEQ ID NO: 99548 - DNA, 22 bp, synthetic construct
  misc_feature 1..22: note = chemically synthesized
  source 1..22: mol_type = other DNA
gtattgaaatgagagccattgg

SEQ ID NO: 99549 - DNA, 22 bp, synthetic construct
  misc_feature 1..22: note = chemically synthesized
  source 1..22: mol_type = other DNA
tattgaaatgagagccattgga

SEQ ID NO: 99550 - DNA, 22 bp, synthetic construct
  misc_feature 1..22: note = chemically synthesized
  source 1..22: mol_type = other DNA
aaatgagagccattggaaatca

SEQ ID NO: 99551 - DNA, 22 bp, synthetic construct
  misc_feature 1..22: note = chemically synthesized
  source 1..22: mol_type = other DNA
gaaatcatttactccagactcc

SEQ ID NO: 99552 - DNA, 22 bp, synthetic construct
  misc_feature 1..22: note = chemically synthesized
  source 1..22: mol_type = other DNA
actccagactcctacttataaa

SEQ ID NO: 99553 - DNA, 22 bp, synthetic construct
  misc_feature 1..22: note = chemically synthesized
  source 1..22: mol_type = other DNA
ctccagactcctacttataaaa

SEQ ID NO: 99554 - DNA, 22 bp, synthetic construct
  misc_feature 1..22: note = chemically synthesized
  source 1..22: mol_type = other DNA
cagactcctacttataaaaaga

SEQ ID NO: 99555 - DNA, 22 bp, synthetic construct
  misc_feature 1..22: note = chemically synthesized
  source 1..22: mol_type = other DNA
ctacttataaaaagagaaactg

SEQ ID NO: 99556 - DNA, 22 bp, synthetic construct
  misc_feature 1..22: note = chemically synthesized
  source 1..22: mol_type = other DNA
cttataaaaagagaaactgagg

SEQ ID NO: 99557 - DNA, 22 bp, synthetic construct
  misc_feature 1..22: note = chemically synthesized
  source 1..22: mol_type = other DNA
ataaaaagagaaactgaggctc

SEQ ID NO: 99558 - DNA, 22 bp, synthetic construct
  misc_feature 1..22: note = chemically synthesized
  source 1..22: mol_type = other DNA
taaaaagagaaactgaggctca

SEQ ID NO: 99559 - DNA, 22 bp, synthetic construct
  misc_feature 1..22: note = chemically synthesized
  source 1..22: mol_type = other DNA
aggctcagagaagggtggggac

SEQ ID NO: 99560 - DNA, 22 bp, synthetic construct
  misc_feature 1..22: note = chemically synthesized
  source 1..22: mol_type = other DNA
agagaagggtggggactttctc

SEQ ID NO: 99561 - DNA, 22 bp, synthetic construct
  misc_feature 1..22: note = chemically synthesized
  source 1..22: mol_type = other DNA
tctcagtatgacatggaaatga

SEQ ID NO: 99562 - DNA, 22 bp, synthetic construct
  misc_feature 1..22: note = chemically synthesized
  source 1..22: mol_type = other DNA
ctcagtatgacatggaaatgat

SEQ ID NO: 99563 - DNA, 22 bp, synthetic construct
  misc_feature 1..22: note = chemically synthesized
  source 1..22: mol_type = other DNA
tcagtatgacatggaaatgatc

SEQ ID NO: 99564 - DNA, 22 bp, synthetic construct
  misc_feature 1..22: note = chemically synthesized
  source 1..22: mol_type = other DNA
agtatgacatggaaatgatcag

SEQ ID NO: 99565 - DNA, 22 bp, synthetic construct
  misc_feature 1..22: note = chemically synthesized
  source 1..22: mol_type = other DNA
ggattcaaagctcctgactttc

SEQ ID NO: 99566 - DNA, 22 bp, synthetic construct
  misc_feature 1..22: note = chemically synthesized
  source 1..22: mol_type = other DNA
gattcaaagctcctgactttct

SEQ ID NO: 99567 - DNA, 22 bp, synthetic construct
  misc_feature 1..22: note = chemically synthesized
  source 1..22: mol_type = other DNA
aaagctcctgactttctgtcta

SEQ ID NO: 99568 - DNA, 22 bp, synthetic construct
  misc_feature 1..22: note = chemically synthesized
  source 1..22: mol_type = other DNA
ctgactttctgtctagtgtatg

SEQ ID NO: 99569 - DNA, 22 bp, synthetic construct
  misc_feature 1..22: note = chemically synthesized
  source 1..22: mol_type = other DNA
actttctgtctagtgtatgtgc

SEQ ID NO: 99570 - DNA, 22 bp, synthetic construct
  misc_feature 1..22: note = chemically synthesized
  source 1..22: mol_type = other DNA
tctgtctagtgtatgtgcagtg

SEQ ID NO: 99571 - DNA, 22 bp, synthetic construct
  misc_feature 1..22: note = chemically synthesized
  source 1..22: mol_type = other DNA
ctgtctagtgtatgtgcagtga

SEQ ID NO: 99572 - DNA, 22 bp, synthetic construct
  misc_feature 1..22: note = chemically synthesized
  source 1..22: mol_type = other DNA
tgtctagtgtatgtgcagtgag

SEQ ID NO: 99573 - DNA, 22 bp, synthetic construct
  misc_feature 1..22: note = chemically synthesized
  source 1..22: mol_type = other DNA
tctagtgtatgtgcagtgagcc

SEQ ID NO: 99574 - DNA, 22 bp, synthetic construct
  misc_feature 1..22: note = chemically synthesized
  source 1..22: mol_type = other DNA
gtgtatgtgcagtgagcccctt

SEQ ID NO: 99575 - DNA, 22 bp, synthetic construct
  misc_feature 1..22: note = chemically synthesized
  source 1..22: mol_type = other DNA
ttcctctaactgaaagaaggaa

SEQ ID NO: 99576 - DNA, 22 bp, synthetic construct
  misc_feature 1..22: note = chemically synthesized
  source 1..22: mol_type = other DNA
tcctctaactgaaagaaggaaa

SEQ ID NO: 99577 - DNA, 22 bp, synthetic construct
  misc_feature 1..22: note = chemically synthesized
  source 1..22: mol_type = other DNA
cctctaactgaaagaaggaaaa

SEQ ID NO: 99578 - DNA, 22 bp, synthetic construct
  misc_feature 1..22: note = chemically synthesized
  source 1..22: mol_type = other DNA
ctctaactgaaagaaggaaaaa

SEQ ID NO: 99579 - DNA, 22 bp, synthetic construct
  misc_feature 1..22: note = chemically synthesized
  source 1..22: mol_type = other DNA
taactgaaagaaggaaaaaaaa

SEQ ID NO: 99580 - DNA, 22 bp, synthetic construct
  misc_feature 1..22: note = chemically synthesized
  source 1..22: mol_type = other DNA
actgaaagaaggaaaaaaaaat

SEQ ID NO: 99581 - DNA, 22 bp, synthetic construct
  misc_feature 1..22: note = chemically synthesized
  source 1..22: mol_type = other DNA
aaagaaggaaaaaaaaatggaa

SEQ ID NO: 99582 - DNA, 22 bp, synthetic construct
  misc_feature 1..22: note = chemically synthesized
  source 1..22: mol_type = other DNA
tacatagtttccatgtcacagc

SEQ ID NO: 99583 - DNA, 22 bp, synthetic construct
  misc_feature 1..22: note = chemically synthesized
  source 1..22: mol_type = other DNA
catagtttccatgtcacagcca

SEQ ID NO: 99584 - DNA, 22 bp, synthetic construct
  misc_feature 1..22: note = chemically synthesized
  source 1..22: mol_type = other DNA
ccatgtcacagccagggctggg

SEQ ID NO: 99585 - DNA, 22 bp, synthetic construct
  misc_feature 1..22: note = chemically synthesized
  source 1..22: mol_type = other DNA
catgtcacagccagggctgggc

SEQ ID NO: 99586 - DNA, 22 bp, synthetic construct
  misc_feature 1..22: note = chemically synthesized
  source 1..22: mol_type = other DNA
ggcagtctcctgttatttcttt

SEQ ID NO: 99587 - DNA, 22 bp, synthetic construct
  misc_feature 1..22: note = chemically synthesized
  source 1..22: mol_type = other DNA
ctgttatttcttttaaaataaa

SEQ ID NO: 99588 - DNA, 22 bp, synthetic construct
  misc_feature 1..22: note = chemically synthesized
  source 1..22: mol_type = other DNA
ttatttcttttaaaataaatat

SEQ ID NO: 99589 - DNA, 22 bp, synthetic construct
  misc_feature 1..22: note = chemically synthesized
  source 1..22: mol_type = other DNA
tttcttttaaaataaatatatc

SEQ ID NO: 99590 - DNA, 22 bp, synthetic construct
  misc_feature 1..22: note = chemically synthesized
  source 1..22: mol_type = other DNA
cttttaaaataaatatatcatt

SEQ ID NO: 99591 - DNA, 22 bp, synthetic construct
  misc_feature 1..22: note = chemically synthesized
  source 1..22: mol_type = other DNA
ttttaaaataaatatatcattt

SEQ ID NO: 99592 - DNA, 22 bp, synthetic construct
  misc_feature 1..22: note = chemically synthesized
  source 1..22: mol_type = other DNA
ttaaaataaatatatcatttaa

SEQ ID NO: 99593 - DNA, 22 bp, synthetic construct
  misc_feature 1..22: note = chemically synthesized
  source 1..22: mol_type = other DNA
taaaataaatatatcatttaaa

SEQ ID NO: 99594 - DNA, 22 bp, synthetic construct
  misc_feature 1..22: note = chemically synthesized
  source 1..22: mol_type = other DNA
aaaataaatatatcatttaaat

SEQ ID NO: 99595 - DNA, 22 bp, synthetic construct
  misc_feature 1..22: note = chemically synthesized
  source 1..22: mol_type = other DNA
aaataaatatatcatttaaatg

SEQ ID NO: 99596 - DNA, 22 bp, synthetic construct
  misc_feature 1..22: note = chemically synthesized
  source 1..22: mol_type = other DNA
aaatgcataaataagcaaaccc

SEQ ID NO: 99597 - DNA, 22 bp, synthetic construct
  misc_feature 1..22: note = chemically synthesized
  source 1..22: mol_type = other DNA
aatgcataaataagcaaaccct

SEQ ID NO: 99598 - DNA, 22 bp, synthetic construct
  misc_feature 1..22: note = chemically synthesized
  source 1..22: mol_type = other DNA
ctcgggaatgggagggagagtc

SEQ ID NO: 99599 - DNA, 22 bp, synthetic construct
  misc_feature 1..22: note = chemically synthesized
  source 1..22: mol_type = other DNA
gggaatgggagggagagtctct

SEQ ID NO: 99600 - DNA, 22 bp, synthetic construct
  misc_feature 1..22: note = chemically synthesized
  source 1..22: mol_type = other DNA
tggagtccaccccttctcggcc

SEQ ID NO: 99601 - DNA, 22 bp, synthetic construct
  misc_feature 1..22: note = chemically synthesized
  source 1..22: mol_type = other DNA
gagtccaccccttctcggccct

SEQ ID NO: 99602 - DNA, 22 bp, synthetic construct
  misc_feature 1..22: note = chemically synthesized
  source 1..22: mol_type = other DNA
ctcggccctggctctgcagata

SEQ ID NO: 99603 - DNA, 22 bp, synthetic construct
  misc_feature 1..22: note = chemically synthesized
  source 1..22: mol_type = other DNA
tcggccctggctctgcagatag

SEQ ID NO: 99604 - DNA, 22 bp, synthetic construct
  misc_feature 1..22: note = chemically synthesized
  source 1..22: mol_type = other DNA
ggccctggctctgcagatagtg

SEQ ID NO: 99605 - DNA, 22 bp, synthetic construct
  misc_feature 1..22: note = chemically synthesized
  source 1..22: mol_type = other DNA
gctctgcagatagtgctatcaa

SEQ ID NO: 99606 - DNA, 22 bp, synthetic construct
  misc_feature 1..22: note = chemically synthesized
  source 1..22: mol_type = other DNA
tgcagatagtgctatcaaagcc

SEQ ID NO: 99607 - DNA, 22 bp, synthetic construct
  misc_feature 1..22: note = chemically synthesized
  source 1..22: mol_type = other DNA
cagatagtgctatcaaagccct

SEQ ID NO: 99608 - DNA, 22 bp, synthetic construct
  misc_feature 1..22: note = chemically synthesized
  source 1..22: mol_type = other DNA
tcaaagccctgacagagccctg

SEQ ID NO: 99609 - DNA, 22 bp, synthetic construct
  misc_feature 1..22: note = chemically synthesized
  source 1..22: mol_type = other DNA
acagagccctgcccattgctgg

SEQ ID NO: 99610 - DNA, 22 bp, synthetic construct
  misc_feature 1..22: note = chemically synthesized
  source 1..22: mol_type = other DNA
cccattgctgggccttggagtg

SEQ ID NO: 99611 - DNA, 22 bp, synthetic construct
  misc_feature 1..22: note = chemically synthesized
  source 1..22: mol_type = other DNA
ctgggccttggagtgagtcagc

SEQ ID NO: 99612 - DNA, 22 bp, synthetic construct
  misc_feature 1..22: note = chemically synthesized
  source 1..22: mol_type = other DNA
ggccttggagtgagtcagccta

SEQ ID NO: 99613 - DNA, 22 bp, synthetic construct
  misc_feature 1..22: note = chemically synthesized
  source 1..22: mol_type = other DNA
ggagtgagtcagcctagtagag

SEQ ID NO: 99614 - DNA, 22 bp, synthetic construct
  misc_feature 1..22: note = chemically synthesized
  source 1..22: mol_type = other DNA
gagtgagtcagcctagtagaga

SEQ ID NO: 99615 - DNA, 22 bp, synthetic construct
  misc_feature 1..22: note = chemically synthesized
  source 1..22: mol_type = other DNA
gtagagaggcagggcaagccat

SEQ ID NO: 99616 - DNA, 22 bp, synthetic construct
  misc_feature 1..22: note = chemically synthesized
  source 1..22: mol_type = other DNA
atagctgctgagtgggagagag

SEQ ID NO: 99617 - DNA, 22 bp, synthetic construct
  misc_feature 1..22: note = chemically synthesized
  source 1..22: mol_type = other DNA
ctgagtgggagagagaaaaggg

SEQ ID NO: 99618 - DNA, 22 bp, synthetic construct
  misc_feature 1..22: note = chemically synthesized
  source 1..22: mol_type = other DNA
agtgggagagagaaaagggctc

SEQ ID NO: 99619 - DNA, 22 bp, synthetic construct
  misc_feature 1..22: note = chemically synthesized
  source 1..22: mol_type = other DNA
attgtctataaactcaggtcat

SEQ ID NO: 99620 - DNA, 22 bp, synthetic construct
  misc_feature 1..22: note = chemically synthesized
  source 1..22: mol_type = other DNA
tctataaactcaggtcatggct

SEQ ID NO: 99621 - DNA, 22 bp, synthetic construct
  misc_feature 1..22: note = chemically synthesized
  source 1..22: mol_type = other DNA
taaactcaggtcatggctattc

SEQ ID NO: 99622 - DNA, 22 bp, synthetic construct
  misc_feature 1..22: note = chemically synthesized
  source 1..22: mol_type = other DNA
aggtcatggctattcttattct

SEQ ID NO: 99623 - DNA, 22 bp, synthetic construct
  misc_feature 1..22: note = chemically synthesized
  source 1..22: mol_type = other DNA
ttcttattctcacactaagaaa

SEQ ID NO: 99624 - DNA, 22 bp, synthetic construct
  misc_feature 1..22: note = chemically synthesized
  source 1..22: mol_type = other DNA
ttattctcacactaagaaaaag

SEQ ID NO: 99625 - DNA, 22 bp, synthetic construct
  misc_feature 1..22: note = chemically synthesized
  source 1..22: mol_type = other DNA
attctcacactaagaaaaagaa

SEQ ID NO: 99626 - DNA, 22 bp, synthetic construct
  misc_feature 1..22: note = chemically synthesized
  source 1..22: mol_type = other DNA
ttctcacactaagaaaaagaat

SEQ ID NO: 99627 - DNA, 22 bp, synthetic construct
  misc_feature 1..22: note = chemically synthesized
  source 1..22: mol_type = other DNA
tcacactaagaaaaagaatgag

SEQ ID NO: 99628 - DNA, 22 bp, synthetic construct
  misc_feature 1..22: note = chemically synthesized
  source 1..22: mol_type = other DNA
acactaagaaaaagaatgagat

SEQ ID NO: 99629 - DNA, 22 bp, synthetic construct
  misc_feature 1..22: note = chemically synthesized
  source 1..22: mol_type = other DNA
agaaaaagaatgagatgtctac

SEQ ID NO: 99630 - DNA, 22 bp, synthetic construct
  misc_feature 1..22: note = chemically synthesized
  source 1..22: mol_type = other DNA
catataccctgcgtcccctctt

SEQ ID NO: 99631 - DNA, 22 bp, synthetic construct
  misc_feature 1..22: note = chemically synthesized
  source 1..22: mol_type = other DNA
cgtcccctcttgtgtactgggg

SEQ ID NO: 99632 - DNA, 22 bp, synthetic construct
  misc_feature 1..22: note = chemically synthesized
  source 1..22: mol_type = other DNA
ttgtgtactggggtccccaaga

SEQ ID NO: 99633 - DNA, 22 bp, synthetic construct
  misc_feature 1..22: note = chemically synthesized
  source 1..22: mol_type = other DNA
gtgtactggggtccccaagagc

SEQ ID NO: 99634 - DNA, 22 bp, synthetic construct
  misc_feature 1..22: note = chemically synthesized
  source 1..22: mol_type = other DNA
tgtactggggtccccaagagct

SEQ ID NO: 99635 - DNA, 22 bp, synthetic construct
  misc_feature 1..22: note = chemically synthesized
  source 1..22: mol_type = other DNA
gggtccccaagagctctctaaa

SEQ ID NO: 99636 - DNA, 22 bp, synthetic construct
  misc_feature 1..22: note = chemically synthesized
  source 1..22: mol_type = other DNA
tctaaaagtgatggcaaagtca

SEQ ID NO: 99637 - DNA, 22 bp, synthetic construct
  misc_feature 1..22: note = chemically synthesized
  source 1..22: mol_type = other DNA
taaaagtgatggcaaagtcatt

SEQ ID NO: 99638 - DNA, 22 bp, synthetic construct
  misc_feature 1..22: note = chemically synthesized
  source 1..22: mol_type = other DNA
aaagtgatggcaaagtcattgc

SEQ ID NO: 99639 - DNA, 22 bp, synthetic construct
  misc_feature 1..22: note = chemically synthesized
  source 1..22: mol_type = other DNA
cgctagatgccatcccatctat

SEQ ID NO: 99640 - DNA, 22 bp, synthetic construct
  misc_feature 1..22: note = chemically synthesized
  source 1..22: mol_type = other DNA
gatgccatcccatctattataa

SEQ ID NO: 99641 - DNA, 22 bp, synthetic construct
  misc_feature 1..22: note = chemically synthesized
  source 1..22: mol_type = other DNA
ttataaacctgcatttgtctcc

SEQ ID NO: 99642 - DNA, 22 bp, synthetic construct
  misc_feature 1..22: note = chemically synthesized
  source 1..22: mol_type = other DNA
taaacctgcatttgtctccaca

SEQ ID NO: 99643 - DNA, 22 bp, synthetic construct
  misc_feature 1..22: note = chemically synthesized
  source 1..22: mol_type = other DNA
catttgtctccacacaccagtc

SEQ ID NO: 99644 - DNA, 22 bp, synthetic construct
  misc_feature 1..22: note = chemically synthesized
  source 1..22: mol_type = other DNA
gtctccacacaccagtcatgga

SEQ ID NO: 99645 - DNA, 22 bp, synthetic construct
  misc_feature 1..22: note = chemically synthesized
  source 1..22: mol_type = other DNA
tctccacacaccagtcatggac

SEQ ID NO: 99646 - DNA, 22 bp, synthetic construct
  misc_feature 1..22: note = chemically synthesized
  source 1..22: mol_type = other DNA
cacacaccagtcatggacaata

SEQ ID NO: 99647 - DNA, 22 bp, synthetic construct
  misc_feature 1..22: note = chemically synthesized
  source 1..22: mol_type = other DNA
ctcccaggtccacgtgcttgtc

SEQ ID NO: 99648 - DNA, 22 bp, synthetic construct
  misc_feature 1..22: note = chemically synthesized
  source 1..22: mol_type = other DNA
ccaggtccacgtgcttgtcttt

SEQ ID NO: 99649 - DNA, 22 bp, synthetic construct
  misc_feature 1..22: note = chemically synthesized
  source 1..22: mol_type = other DNA
gtctttgtataatactcaagta

SEQ ID NO: 99650 - DNA, 22 bp, synthetic construct
  misc_feature 1..22: note = chemically synthesized
  source 1..22: mol_type = other DNA
tctttgtataatactcaagtaa

SEQ ID NO: 99651 - DNA, 22 bp, synthetic construct
  misc_feature 1..22: note = chemically synthesized
  source 1..22: mol_type = other DNA
tgtataatactcaagtaatttc

SEQ ID NO: 99652 - DNA, 22 bp, synthetic construct
  misc_feature 1..22: note = chemically synthesized
  source 1..22: mol_type = other DNA
gtataatactcaagtaatttcg

SEQ ID NO: 99653 - DNA, 22 bp, synthetic construct
  misc_feature 1..22: note = chemically synthesized
  source 1..22: mol_type = other DNA
tataatactcaagtaatttcgg

SEQ ID NO: 99654 - DNA, 22 bp, synthetic construct
  misc_feature 1..22: note = chemically synthesized
  source 1..22: mol_type = other DNA
aagtaatttcggaaaatgtatt

SEQ ID NO: 99655 - DNA, 22 bp, synthetic construct
  misc_feature 1..22: note = chemically synthesized
  source 1..22: mol_type = other DNA
cggaaaatgtattctttcaatc

SEQ ID NO: 99656 - DNA, 22 bp, synthetic construct
  misc_feature 1..22: note = chemically synthesized
  source 1..22: mol_type = other DNA
ggaaaatgtattctttcaatct

SEQ ID NO: 99657 - DNA, 22 bp, synthetic construct
  misc_feature 1..22: note = chemically synthesized
  source 1..22: mol_type = other DNA
tttcaatcttgttctgttattc

SEQ ID NO: 99658 - DNA, 22 bp, synthetic construct
  misc_feature 1..22: note = chemically synthesized
  source 1..22: mol_type = other DNA
tcaatcttgttctgttattcct

SEQ ID NO: 99659 - DNA, 22 bp, synthetic construct
  misc_feature 1..22: note = chemically synthesized
  source 1..22: mol_type = other DNA
caatcttgttctgttattcctg

SEQ ID NO: 99660 - DNA, 22 bp, synthetic construct
  misc_feature 1..22: note = chemically synthesized
  source 1..22: mol_type = other DNA
aatcttgttctgttattcctgt

SEQ ID NO: 99661 - DNA, 22 bp, synthetic construct
  misc_feature 1..22: note = chemically synthesized
  source 1..22: mol_type = other DNA
gttctgttattcctgtttcaat

SEQ ID NO: 99662 - DNA, 22 bp, synthetic construct
  misc_feature 1..22: note = chemically synthesized
  source 1..22: mol_type = other DNA
ttctgttattcctgtttcaatg

SEQ ID NO: 99663 - DNA, 22 bp, synthetic construct
  misc_feature 1..22: note = chemically synthesized
  source 1..22: mol_type = other DNA
tgttattcctgtttcaatggct

SEQ ID NO: 99664 - DNA, 22 bp, synthetic construct
  misc_feature 1..22: note = chemically synthesized
  source 1..22: mol_type = other DNA
ttattcctgtttcaatggctta

SEQ ID NO: 99665 - DNA, 22 bp, synthetic construct
  misc_feature 1..22: note = chemically synthesized
  source 1..22: mol_type = other DNA
ttcctgtttcaatggcttagta

SEQ ID NO: 99666 - DNA, 22 bp, synthetic construct
  misc_feature 1..22: note = chemically synthesized
  source 1..22: mol_type = other DNA
ctgtttcaatggcttagtagaa

SEQ ID NO: 99667 - DNA, 22 bp, synthetic construct
  misc_feature 1..22: note = chemically synthesized
  source 1..22: mol_type = other DNA
tttcaatggcttagtagaaaaa

SEQ ID NO: 99668 - DNA, 22 bp, synthetic construct
  misc_feature 1..22: note = chemically synthesized
  source 1..22: mol_type = other DNA
caatggcttagtagaaaaagta

SEQ ID NO: 99669 - DNA, 22 bp, synthetic construct
  misc_feature 1..22: note = chemically synthesized
  source 1..22: mol_type = other DNA
aatggcttagtagaaaaagtac

SEQ ID NO: 99670 - DNA, 22 bp, synthetic construct
  misc_feature 1..22: note = chemically synthesized
  source 1..22: mol_type = other DNA
agtagaaaaagtacatacttgt

SEQ ID NO: 99671 - DNA, 22 bp, synthetic construct
  misc_feature 1..22: note = chemically synthesized
  source 1..22: mol_type = other DNA
gtagaaaaagtacatacttgtt

SEQ ID NO: 99672 - DNA, 22 bp, synthetic construct
  misc_feature 1..22: note = chemically synthesized
  source 1..22: mol_type = other DNA
gttttcccataaattgacaata

SEQ ID NO: 99673 - DNA, 22 bp, synthetic construct
  misc_feature 1..22: note = chemically synthesized
  source 1..22: mol_type = other DNA
ttttcccataaattgacaatag

SEQ ID NO: 99674 - DNA, 22 bp, synthetic construct
  misc_feature 1..22: note = chemically synthesized
  source 1..22: mol_type = other DNA
tcccataaattgacaatagaca

SEQ ID NO: 99675 - DNA, 22 bp, synthetic construct
  misc_feature 1..22: note = chemically synthesized
  source 1..22: mol_type = other DNA
cccataaattgacaatagacaa

SEQ ID NO: 99676 - DNA, 22 bp, synthetic construct
  misc_feature 1..22: note = chemically synthesized
  source 1..22: mol_type = other DNA
ccataaattgacaatagacaat

SEQ ID NO: 99677 - DNA, 22 bp, synthetic construct
  misc_feature 1..22: note = chemically synthesized
  source 1..22: mol_type = other DNA
acaatagacaatttcacatcaa

SEQ ID NO: 99678 - DNA, 22 bp, synthetic construct
  misc_feature 1..22: note = chemically synthesized
  source 1..22: mol_type = other DNA
cacatcaatgtctatatgggtc

SEQ ID NO: 99679 - DNA, 22 bp, synthetic construct
  misc_feature 1..22: note = chemically synthesized
  source 1..22: mol_type = other DNA
acatcaatgtctatatgggtcg

SEQ ID NO: 99680 - DNA, 22 bp, synthetic construct
  misc_feature 1..22: note = chemically synthesized
  source 1..22: mol_type = other DNA
tatgggtcgttgtgtttgctgt

SEQ ID NO: 99681 - DNA, 22 bp, synthetic construct
  misc_feature 1..22: note = chemically synthesized
  source 1..22: mol_type = other DNA
tgtttgctgtgtttgcaaaaac

SEQ ID NO: 99682 - DNA, 22 bp, synthetic construct
  misc_feature 1..22: note = chemically synthesized
  source 1..22: mol_type = other DNA
gctgtgtttgcaaaaactcaca

SEQ ID NO: 99683 - DNA, 22 bp, synthetic construct
  misc_feature 1..22: note = chemically synthesized
  source 1..22: mol_type = other DNA
ctgtgtttgcaaaaactcacaa

SEQ ID NO: 99684 - DNA, 22 bp, synthetic construct
  misc_feature 1..22: note = chemically synthesized
  source 1..22: mol_type = other DNA
tgtttgcaaaaactcacaataa

SEQ ID NO: 99685 - DNA, 22 bp, synthetic construct
  misc_feature 1..22: note = chemically synthesized
  source 1..22: mol_type = other DNA
gcaaaaactcacaataacttta

SEQ ID NO: 99686 - DNA, 22 bp, synthetic construct
  misc_feature 1..22: note = chemically synthesized
  source 1..22: mol_type = other DNA
caaaaactcacaataactttat

SEQ ID NO: 99687 - DNA, 22 bp, synthetic construct
  misc_feature 1..22: note = chemically synthesized
  source 1..22: mol_type = other DNA
acaataactttatattgttact

SEQ ID NO: 99688 - DNA, 22 bp, synthetic construct
  misc_feature 1..22: note = chemically synthesized
  source 1..22: mol_type = other DNA
tatattgttactactctaagaa

SEQ ID NO: 99689 - DNA, 22 bp, synthetic construct
  misc_feature 1..22: note = chemically synthesized
  source 1..22: mol_type = other DNA
atattgttactactctaagaaa

SEQ ID NO: 99690 - DNA, 22 bp, synthetic construct
  misc_feature 1..22: note = chemically synthesized
  source 1..22: mol_type = other DNA
tattgttactactctaagaaag

SEQ ID NO: 99691 - DNA, 22 bp, synthetic construct
  misc_feature 1..22: note = chemically synthesized
  source 1..22: mol_type = other DNA
ttactactctaagaaagttaca

SEQ ID NO: 99692 - DNA, 22 bp, synthetic construct
  misc_feature 1..22: note = chemically synthesized
  source 1..22: mol_type = other DNA
ctactctaagaaagttacaaca

SEQ ID NO: 99693 - DNA, 22 bp, synthetic construct
  misc_feature 1..22: note = chemically synthesized
  source 1..22: mol_type = other DNA
ctctaagaaagttacaacatgg

SEQ ID NO: 99694 - DNA, 22 bp, synthetic construct
  misc_feature 1..22: note = chemically synthesized
  source 1..22: mol_type = other DNA
taagaaagttacaacatggtga

SEQ ID NO: 99695 - DNA, 22 bp, synthetic construct
  misc_feature 1..22: note = chemically synthesized
  source 1..22: mol_type = other DNA
agaaagttacaacatggtgaat

SEQ ID NO: 99696 - DNA, 22 bp, synthetic construct
  misc_feature 1..22: note = chemically synthesized
  source 1..22: mol_type = other DNA
caacatggtgaatacaagagaa

SEQ ID NO: 99697 - DNA, 22 bp, synthetic construct
  misc_feature 1..22: note = chemically synthesized
  source 1..22: mol_type = other DNA
ttacaagtccagaaaataaaag

SEQ ID NO: 99698 - DNA, 22 bp, synthetic construct
  misc_feature 1..22: note = chemically synthesized
  source 1..22: mol_type = other DNA
caagtccagaaaataaaagtta

SEQ ID NO: 99699 - DNA, 22 bp, synthetic construct
  misc_feature 1..22: note = chemically synthesized
  source 1..22: mol_type = other DNA
tcatcttgaggcctcagctttc

SEQ ID NO: 99700 - DNA, 22 bp, synthetic construct
  misc_feature 1..22: note = chemically synthesized
  source 1..22: mol_type = other DNA
gaggcctcagctttctaggaat

SEQ ID NO: 99701 - DNA, 22 bp, synthetic construct
  misc_feature 1..22: note = chemically synthesized
  source 1..22: mol_type = other DNA
aggcctcagctttctaggaata

SEQ ID NO: 99702 - DNA, 22 bp, synthetic construct
  misc_feature 1..22: note = chemically synthesized
  source 1..22: mol_type = other DNA
agctttctaggaataatatcaa

SEQ ID NO: 99703 - DNA, 22 bp, synthetic construct
  misc_feature 1..22: note = chemically synthesized
  source 1..22: mol_type = other DNA
tctaggaataatatcaatatta

SEQ ID NO: 99704 - DNA, 22 bp, synthetic construct
  misc_feature 1..22: note = chemically synthesized
  source 1..22: mol_type = other DNA
ctaggaataatatcaatattac

SEQ ID NO: 99705 - DNA, 22 bp, synthetic construct
  misc_feature 1..22: note = chemically synthesized
  source 1..22: mol_type = other DNA
taggaataatatcaatattaca

SEQ ID NO: 99706 - DNA, 22 bp, synthetic construct
  misc_feature 1..22: note = chemically synthesized
  source 1..22: mol_type = other DNA
ggaataatatcaatattacaaa

SEQ ID NO: 99707 - DNA, 22 bp, synthetic construct
  misc_feature 1..22: note = chemically synthesized
  source 1..22: mol_type = other DNA
caaaattaatctaacaattatg

SEQ ID NO: 99708 - DNA, 22 bp, synthetic construct
  misc_feature 1..22: note = chemically synthesized
  source 1..22: mol_type = other DNA
atctaacaattatgaacagcaa

SEQ ID NO: 99709 - DNA, 22 bp, synthetic construct
  misc_feature 1..22: note = chemically synthesized
  source 1..22: mol_type = other DNA
acaattatgaacagcaatgaga

SEQ ID NO: 99710 - DNA, 22 bp, synthetic construct
  misc_feature 1..22: note = chemically synthesized
  source 1..22: mol_type = other DNA
tgaacagcaatgagataatgtg

SEQ ID NO: 99711 - DNA, 22 bp, synthetic construct
  misc_feature 1..22: note = chemically synthesized
  source 1..22: mol_type = other DNA
tgtggtagagcatcaaggaagc

SEQ ID NO: 99712 - DNA, 22 bp, synthetic construct
  misc_feature 1..22: note = chemically synthesized
  source 1..22: mol_type = other DNA
cggagcagttttttgtttgttt

SEQ ID NO: 99713 - DNA, 22 bp, synthetic construct
  misc_feature 1..22: note = chemically synthesized
  source 1..22: mol_type = other DNA
tttgtttgtttgtttttgtatt

SEQ ID NO: 99714 - DNA, 22 bp, synthetic construct
  misc_feature 1..22: note = chemically synthesized
  source 1..22: mol_type = other DNA
ttgtttgtttgtttttgtattc

SEQ ID NO: 99715 - DNA, 22 bp, synthetic construct
  misc_feature 1..22: note = chemically synthesized
  source 1..22: mol_type = other DNA
tgtttgtttgtttttgtattct

SEQ ID NO: 99716 - DNA, 22 bp, synthetic construct
  misc_feature 1..22: note = chemically synthesized
  source 1..22: mol_type = other DNA
gtttgtttgtttttgtattctg

SEQ ID NO: 99717 - DNA, 22 bp, synthetic construct
  misc_feature 1..22: note = chemically synthesized
  source 1..22: mol_type = other DNA
tttgtttgtttttgtattctgt

SEQ ID NO: 99718 - DNA, 22 bp, synthetic construct
  misc_feature 1..22: note = chemically synthesized
  source 1..22: mol_type = other DNA
gtttgtttttgtattctgtttc

SEQ ID NO: 99719 - DNA, 22 bp, synthetic construct
  misc_feature 1..22: note = chemically synthesized
  source 1..22: mol_type = other DNA
tttgtttttgtattctgtttcg

SEQ ID NO: 99720 - DNA, 22 bp, synthetic construct
  misc_feature 1..22: note = chemically synthesized
  source 1..22: mol_type = other DNA
gtttttgtattctgtttcgtga

SEQ ID NO: 99721 - DNA, 22 bp, synthetic construct
  misc_feature 1..22: note = chemically synthesized
  source 1..22: mol_type = other DNA
tttttgtattctgtttcgtgag

SEQ ID NO: 99722 - DNA, 22 bp, synthetic construct
  misc_feature 1..22: note = chemically synthesized
  source 1..22: mol_type = other DNA
ttgtattctgtttcgtgaggca

SEQ ID NO: 99723 - DNA, 22 bp, synthetic construct
  misc_feature 1..22: note = chemically synthesized
  source 1..22: mol_type = other DNA
tgtattctgtttcgtgaggcaa

SEQ ID NO: 99724 - DNA, 22 bp, synthetic construct
  misc_feature 1..22: note = chemically synthesized
  source 1..22: mol_type = other DNA
gtattctgtttcgtgaggcaag

SEQ ID NO: 99725 - DNA, 22 bp, synthetic construct
  misc_feature 1..22: note = chemically synthesized
  source 1..22: mol_type = other DNA
tattctgtttcgtgaggcaagg

SEQ ID NO: 99726 - DNA, 22 bp, synthetic construct
  misc_feature 1..22: note = chemically synthesized
  source 1..22: mol_type = other DNA
tgtttcgtgaggcaaggtttca

SEQ ID NO: 99727 - DNA, 22 bp, synthetic construct
  misc_feature 1..22: note = chemically synthesized
  source 1..22: mol_type = other DNA
tttcgtgaggcaaggtttcact

SEQ ID NO: 99728 - DNA, 22 bp, synthetic construct
  misc_feature 1..22: note = chemically synthesized
  source 1..22: mol_type = other DNA
cgtgaggcaaggtttcactctg

SEQ ID NO: 99729 - DNA, 22 bp, synthetic construct
  misc_feature 1..22: note = chemically synthesized
  source 1..22: mol_type = other DNA
gtgaggcaaggtttcactctgc

SEQ ID NO: 99730 - DNA, 22 bp, synthetic construct
  misc_feature 1..22: note = chemically synthesized
  source 1..22: mol_type = other DNA
cactctgctgtccaggctggag

SEQ ID NO: 99731 - DNA, 22 bp, synthetic construct
  misc_feature 1..22: note = chemically synthesized
  source 1..22: mol_type = other DNA
actctgctgtccaggctggagt

SEQ ID NO: 99732 - DNA, 22 bp, synthetic construct
  misc_feature 1..22: note = chemically synthesized
  source 1..22: mol_type = other DNA
tgctgtccaggctggagtgcag

SEQ ID NO: 99733 - DNA, 22 bp, synthetic construct
  misc_feature 1..22: note = chemically synthesized
  source 1..22: mol_type = other DNA
ctgtccaggctggagtgcagtg

SEQ ID NO: 99734 - DNA, 22 bp, synthetic construct
  misc_feature 1..22: note = chemically synthesized
  source 1..22: mol_type = other DNA
tccaggctggagtgcagtggca

SEQ ID NO: 99735 - DNA, 22 bp, synthetic construct
  misc_feature 1..22: note = chemically synthesized
  source 1..22: mol_type = other DNA
gagtgcagtggcaagatcatgt

SEQ ID NO: 99736 - DNA, 22 bp, synthetic construct
  misc_feature 1..22: note = chemically synthesized
  source 1..22: mol_type = other DNA
actgcagccttgacctcctgag

SEQ ID NO: 99737 - DNA, 22 bp, synthetic construct
  misc_feature 1..22: note = chemically synthesized
  source 1..22: mol_type = other DNA
cagccttgacctcctgagctca

SEQ ID NO: 99738 - DNA, 22 bp, synthetic construct
  misc_feature 1..22: note = chemically synthesized
  source 1..22: mol_type = other DNA
gacctcctgagctcaagggatc

SEQ ID NO: 99739 - DNA, 22 bp, synthetic construct
  misc_feature 1..22: note = chemically synthesized
  source 1..22: mol_type = other DNA
acctcctgagctcaagggatcc

SEQ ID NO: 99740 - DNA, 22 bp, synthetic construct
  misc_feature 1..22: note = chemically synthesized
  source 1..22: mol_type = other DNA
ctgagctcaagggatcctccca

SEQ ID NO: 99741 - DNA, 22 bp, synthetic construct
  misc_feature 1..22: note = chemically synthesized
  source 1..22: mol_type = other DNA
agctcaagggatcctcccattt

SEQ ID NO: 99742 - DNA, 22 bp, synthetic construct
  misc_feature 1..22: note = chemically synthesized
  source 1..22: mol_type = other DNA
aagggatcctcccatttcggcc

SEQ ID NO: 99743 - DNA, 22 bp, synthetic construct
  misc_feature 1..22: note = chemically synthesized
  source 1..22: mol_type = other DNA
ccatttcggcctcctgagtagc

SEQ ID NO: 99744 - DNA, 22 bp, synthetic construct
  misc_feature 1..22: note = chemically synthesized
  source 1..22: mol_type = other DNA
cggcctcctgagtagctgggac

SEQ ID NO: 99745 - DNA, 22 bp, synthetic construct
  misc_feature 1..22: note = chemically synthesized
  source 1..22: mol_type = other DNA
ggcctcctgagtagctgggact

SEQ ID NO: 99746 - DNA, 22 bp, synthetic construct
  misc_feature 1..22: note = chemically synthesized
  source 1..22: mol_type = other DNA
ctgagtagctgggactacaggt

SEQ ID NO: 99747 - DNA, 22 bp, synthetic construct
  misc_feature 1..22: note = chemically synthesized
  source 1..22: mol_type = other DNA
agtagctgggactacaggtgta

SEQ ID NO: 99748 - DNA, 22 bp, synthetic construct
  misc_feature 1..22: note = chemically synthesized
  source 1..22: mol_type = other DNA
ggactacaggtgtacatcacat

SEQ ID NO: 99749 - DNA, 22 bp, synthetic construct
  misc_feature 1..22: note = chemically synthesized
  source 1..22: mol_type = other DNA
caggtgtacatcacatgcctgg

SEQ ID NO: 99750 - DNA, 22 bp, synthetic construct
  misc_feature 1..22: note = chemically synthesized
  source 1..22: mol_type = other DNA
gctaatttttttttttttttta

SEQ ID NO: 99751 - DNA, 22 bp, synthetic construct
  misc_feature 1..22: note = chemically synthesized
  source 1..22: mol_type = other DNA
attttttttttttttttaagta

SEQ ID NO: 99752 - DNA, 22 bp, synthetic construct
  misc_feature 1..22: note = chemically synthesized
  source 1..22: mol_type = other DNA
tttttttttttttaagtagaga

SEQ ID NO: 99753 - DNA, 22 bp, synthetic construct
  misc_feature 1..22: note = chemically synthesized
  source 1..22: mol_type = other DNA
ttttttttttttaagtagagac

SEQ ID NO: 99754 - DNA, 22 bp, synthetic construct
  misc_feature 1..22: note = chemically synthesized
  source 1..22: mol_type = other DNA
tttttttttttaagtagagacg

SEQ ID NO: 99755 - DNA, 22 bp, synthetic construct
  misc_feature 1..22: note = chemically synthesized
  source 1..22: mol_type = other DNA
ttttttttttaagtagagacga

SEQ ID NO: 99756 - DNA, 22 bp, synthetic construct
  misc_feature 1..22: note = chemically synthesized
  source 1..22: mol_type = other DNA
tttttttttaagtagagacgag

SEQ ID NO: 99757 - DNA, 22 bp, synthetic construct
  misc_feature 1..22: note = chemically synthesized
  source 1..22: mol_type = other DNA
ttttttttaagtagagacgagg

SEQ ID NO: 99758 - DNA, 22 bp, synthetic construct
  misc_feature 1..22: note = chemically synthesized
  source 1..22: mol_type = other DNA
tttttttaagtagagacgaggt

SEQ ID NO: 99759 - DNA, 22 bp, synthetic construct
  misc_feature 1..22: note = chemically synthesized
  source 1..22: mol_type = other DNA
ttttttaagtagagacgaggtc

SEQ ID NO: 99760 - DNA, 22 bp, synthetic construct
  misc_feature 1..22: note = chemically synthesized
  source 1..22: mol_type = other DNA
tttttaagtagagacgaggtct

SEQ ID NO: 99761 - DNA, 22 bp, synthetic construct
  misc_feature 1..22: note = chemically synthesized
  source 1..22: mol_type = other DNA
ttttaagtagagacgaggtctt

SEQ ID NO: 99762 - DNA, 22 bp, synthetic construct
  misc_feature 1..22: note = chemically synthesized
  source 1..22: mol_type = other DNA
tttaagtagagacgaggtcttg

SEQ ID NO: 99763 - DNA, 22 bp, synthetic construct
  misc_feature 1..22: note = chemically synthesized
  source 1..22: mol_type = other DNA
ttaagtagagacgaggtcttgc

SEQ ID NO: 99764 - DNA, 22 bp, synthetic construct
  misc_feature 1..22: note = chemically synthesized
  source 1..22: mol_type = other DNA
taagtagagacgaggtcttgct

SEQ ID NO: 99765 - DNA, 22 bp, synthetic construct
  misc_feature 1..22: note = chemically synthesized
  source 1..22: mol_type = other DNA
aagtagagacgaggtcttgcta

SEQ ID NO: 99766 - DNA, 22 bp, synthetic construct
  misc_feature 1..22: note = chemically synthesized
  source 1..22: mol_type = other DNA
agtagagacgaggtcttgctat

SEQ ID NO: 99767 - DNA, 22 bp, synthetic construct
  misc_feature 1..22: note = chemically synthesized
  source 1..22: mol_type = other DNA
gctatgttgtccaggataatat

SEQ ID NO: 99768 - DNA, 22 bp, synthetic construct
  misc_feature 1..22: note = chemically synthesized
  source 1..22: mol_type = other DNA
ctatgttgtccaggataatatc

SEQ ID NO: 99769 - DNA, 22 bp, synthetic construct
  misc_feature 1..22: note = chemically synthesized
  source 1..22: mol_type = other DNA
tgttgtccaggataatatcaaa

SEQ ID NO: 99770 - DNA, 22 bp, synthetic construct
  misc_feature 1..22: note = chemically synthesized
  source 1..22: mol_type = other DNA
tccaggataatatcaaactctt

SEQ ID NO: 99771 - DNA, 22 bp, synthetic construct
  misc_feature 1..22: note = chemically synthesized
  source 1..22: mol_type = other DNA
ttgagctcaagcagtcctccca

SEQ ID NO: 99772 - DNA, 22 bp, synthetic construct
  misc_feature 1..22: note = chemically synthesized
  source 1..22: mol_type = other DNA
gagctcaagcagtcctcccact

SEQ ID NO: 99773 - DNA, 22 bp, synthetic construct
  misc_feature 1..22: note = chemically synthesized
  source 1..22: mol_type = other DNA
agctcaagcagtcctcccactt

SEQ ID NO: 99774 - DNA, 22 bp, synthetic construct
  misc_feature 1..22: note = chemically synthesized
  source 1..22: mol_type = other DNA
aagcagtcctcccacttctacc

SEQ ID NO: 99775 - DNA, 22 bp, synthetic construct
  misc_feature 1..22: note = chemically synthesized
  source 1..22: mol_type = other DNA
ccacttctacctctcaagtgct

SEQ ID NO: 99776 - DNA, 22 bp, synthetic construct
  misc_feature 1..22: note = chemically synthesized
  source 1..22: mol_type = other DNA
ctacctctcaagtgctggaatt

SEQ ID NO: 99777 - DNA, 22 bp, synthetic construct
  misc_feature 1..22: note = chemically synthesized
  source 1..22: mol_type = other DNA
tacctctcaagtgctggaatta

SEQ ID NO: 99778 - DNA, 22 bp, synthetic construct
  misc_feature 1..22: note = chemically synthesized
  source 1..22: mol_type = other DNA
cctctcaagtgctggaattaca

SEQ ID NO: 99779 - DNA, 22 bp, synthetic construct
  misc_feature 1..22: note = chemically synthesized
  source 1..22: mol_type = other DNA
tcaagtgctggaattacagaca

SEQ ID NO: 99780 - DNA, 22 bp, synthetic construct
  misc_feature 1..22: note = chemically synthesized
  source 1..22: mol_type = other DNA
aagtgctggaattacagacatg

SEQ ID NO: 99781 - DNA, 22 bp, synthetic construct
  misc_feature 1..22: note = chemically synthesized
  source 1..22: mol_type = other DNA
gaattacagacatgagccacca

SEQ ID NO: 99782 - DNA, 22 bp, synthetic construct
  misc_feature 1..22: note = chemically synthesized
  source 1..22: mol_type = other DNA
cagacatgagccaccactcctg

SEQ ID NO: 99783 - DNA, 22 bp, synthetic construct
  misc_feature 1..22: note = chemically synthesized
  source 1..22: mol_type = other DNA
ctggcttgcagactatttaaat

SEQ ID NO: 99784 - DNA, 22 bp, synthetic construct
  misc_feature 1..22: note = chemically synthesized
  source 1..22: mol_type = other DNA
gcttgcagactatttaaatgac

SEQ ID NO: 99785 - DNA, 22 bp, synthetic construct
  misc_feature 1..22: note = chemically synthesized
  source 1..22: mol_type = other DNA
gcagactatttaaatgactaat

SEQ ID NO: 99786 - DNA, 22 bp, synthetic construct
  misc_feature 1..22: note = chemically synthesized
  source 1..22: mol_type = other DNA
cagactatttaaatgactaatt

SEQ ID NO: 99787 - DNA, 22 bp, synthetic construct
  misc_feature 1..22: note = chemically synthesized
  source 1..22: mol_type = other DNA
tttaaatgactaattcctgaca

SEQ ID NO: 99788 - DNA, 22 bp, synthetic construct
  misc_feature 1..22: note = chemically synthesized
  source 1..22: mol_type = other DNA
aaatgactaattcctgacacta

SEQ ID NO: 99789 - DNA, 22 bp, synthetic construct
  misc_feature 1..22: note = chemically synthesized
  source 1..22: mol_type = other DNA
aatgactaattcctgacactac

SEQ ID NO: 99790 - DNA, 22 bp, synthetic construct
  misc_feature 1..22: note = chemically synthesized
  source 1..22: mol_type = other DNA
attcctgacactacttgaggga

SEQ ID NO: 99791 - DNA, 22 bp, synthetic construct
  misc_feature 1..22: note = chemically synthesized
  source 1..22: mol_type = other DNA
ctgacactacttgagggatact

SEQ ID NO: 99792 - DNA, 22 bp, synthetic construct
  misc_feature 1..22: note = chemically synthesized
  source 1..22: mol_type = other DNA
acactacttgagggatactaga

SEQ ID NO: 99793 - DNA, 22 bp, synthetic construct
  misc_feature 1..22: note = chemically synthesized
  source 1..22: mol_type = other DNA
cttgagggatactagacagtag

SEQ ID NO: 99794 - DNA, 22 bp, synthetic construct
  misc_feature 1..22: note = chemically synthesized
  source 1..22: mol_type = other DNA
gagggatactagacagtagaca

SEQ ID NO: 99795 - DNA, 22 bp, synthetic construct
  misc_feature 1..22: note = chemically synthesized
  source 1..22: mol_type = other DNA
agggatactagacagtagacaa

SEQ ID NO: 99796 - DNA, 22 bp, synthetic construct
  misc_feature 1..22: note = chemically synthesized
  source 1..22: mol_type = other DNA
gacagtagacaacacatcttta

SEQ ID NO: 99797 - DNA, 22 bp, synthetic construct
  misc_feature 1..22: note = chemically synthesized
  source 1..22: mol_type = other DNA
taatataccaaatgggtgactg

SEQ ID NO: 99798 - DNA, 22 bp, synthetic construct
  misc_feature 1..22: note = chemically synthesized
  source 1..22: mol_type = other DNA
aatataccaaatgggtgactgt

SEQ ID NO: 99799 - DNA, 22 bp, synthetic construct
  misc_feature 1..22: note = chemically synthesized
  source 1..22: mol_type = other DNA
atataccaaatgggtgactgta

SEQ ID NO: 99800 - DNA, 22 bp, synthetic construct
  misc_feature 1..22: note = chemically synthesized
  source 1..22: mol_type = other DNA
tagggttgagagggagattaga

SEQ ID NO: 99801 - DNA, 22 bp, synthetic construct
  misc_feature 1..22: note = chemically synthesized
  source 1..22: mol_type = other DNA
agagggagattagaattcaatg

SEQ ID NO: 99802 - DNA, 22 bp, synthetic construct
  misc_feature 1..22: note = chemically synthesized
  source 1..22: mol_type = other DNA
gaattcaatgttttatgaccaa

SEQ ID NO: 99803 - DNA, 22 bp, synthetic construct
  misc_feature 1..22: note = chemically synthesized
  source 1..22: mol_type = other DNA
aatgttttatgaccaaaaaggc

SEQ ID NO: 99804 - DNA, 22 bp, synthetic construct
  misc_feature 1..22: note = chemically synthesized
  source 1..22: mol_type = other DNA
tatgaccaaaaaggcttaaatc

SEQ ID NO: 99805 - DNA, 22 bp, synthetic construct
  misc_feature 1..22: note = chemically synthesized
  source 1..22: mol_type = other DNA
atgaccaaaaaggcttaaatca

SEQ ID NO: 99806 - DNA, 22 bp, synthetic construct
  misc_feature 1..22: note = chemically synthesized
  source 1..22: mol_type = other DNA
tgaccaaaaaggcttaaatcag

SEQ ID NO: 99807 - DNA, 22 bp, synthetic construct
  misc_feature 1..22: note = chemically synthesized
  source 1..22: mol_type = other DNA
aaatcaggcacaagcttaggtc

SEQ ID NO: 99808 - DNA, 22 bp, synthetic construct
  misc_feature 1..22: note = chemically synthesized
  source 1..22: mol_type = other DNA
aatcaggcacaagcttaggtct

SEQ ID NO: 99809 - DNA, 22 bp, synthetic construct
  misc_feature 1..22: note = chemically synthesized
  source 1..22: mol_type = other DNA
aggtcttttcaactgtgaggac

SEQ ID NO: 99810 - DNA, 22 bp, synthetic construct
  misc_feature 1..22: note = chemically synthesized
  source 1..22: mol_type = other DNA
ggtcttttcaactgtgaggacc

SEQ ID NO: 99811 - DNA, 22 bp, synthetic construct
  misc_feature 1..22: note = chemically synthesized
  source 1..22: mol_type = other DNA
ttcaactgtgaggaccggactg

SEQ ID NO: 99812 - DNA, 22 bp, synthetic construct
  misc_feature 1..22: note = chemically synthesized
  source 1..22: mol_type = other DNA
tcaactgtgaggaccggactga

SEQ ID NO: 99813 - DNA, 22 bp, synthetic construct
  misc_feature 1..22: note = chemically synthesized
  source 1..22: mol_type = other DNA
caactgtgaggaccggactgaa

SEQ ID NO: 99814 - DNA, 22 bp, synthetic construct
  misc_feature 1..22: note = chemically synthesized
  source 1..22: mol_type = other DNA
aactgtgaggaccggactgaaa

SEQ ID NO: 99815 - DNA, 22 bp, synthetic construct
  misc_feature 1..22: note = chemically synthesized
  source 1..22: mol_type = other DNA
tgaggaccggactgaaagtgtg

SEQ ID NO: 99816 - DNA, 22 bp, synthetic construct
  misc_feature 1..22: note = chemically synthesized
  source 1..22: mol_type = other DNA
aaagtgtgcagttcaaggccct

SEQ ID NO: 99817 - DNA, 22 bp, synthetic construct
  misc_feature 1..22: note = chemically synthesized
  source 1..22: mol_type = other DNA
aaggccctgtagttgctgttta

SEQ ID NO: 99818 - DNA, 22 bp, synthetic construct
  misc_feature 1..22: note = chemically synthesized
  source 1..22: mol_type = other DNA
tagttgctgtttaactgttccc

SEQ ID NO: 99819 - DNA, 22 bp, synthetic construct
  misc_feature 1..22: note = chemically synthesized
  source 1..22: mol_type = other DNA
ctgtttaactgttcccaggtgg

SEQ ID NO: 99820 - DNA, 22 bp, synthetic construct
  misc_feature 1..22: note = chemically synthesized
  source 1..22: mol_type = other DNA
tttaactgttcccaggtggaag

SEQ ID NO: 99821 - DNA, 22 bp, synthetic construct
  misc_feature 1..22: note = chemically synthesized
  source 1..22: mol_type = other DNA
aactgttcccaggtggaagtct

SEQ ID NO: 99822 - DNA, 22 bp, synthetic construct
  misc_feature 1..22: note = chemically synthesized
  source 1..22: mol_type = other DNA
actgttcccaggtggaagtctc

SEQ ID NO: 99823 - DNA, 22 bp, synthetic construct
  misc_feature 1..22: note = chemically synthesized
  source 1..22: mol_type = other DNA
ttcccaggtggaagtctcttca

SEQ ID NO: 99824 - DNA, 22 bp, synthetic construct
  misc_feature 1..22: note = chemically synthesized
  source 1..22: mol_type = other DNA
ccaggtggaagtctcttcaaag

SEQ ID NO: 99825 - DNA, 22 bp, synthetic construct
  misc_feature 1..22: note = chemically synthesized
  source 1..22: mol_type = other DNA
ttcaaagaaccactggtgcaaa

SEQ ID NO: 99826 - DNA, 22 bp, synthetic construct
  misc_feature 1..22: note = chemically synthesized
  source 1..22: mol_type = other DNA
caaagaaccactggtgcaaaaa

SEQ ID NO: 99827 - DNA, 22 bp, synthetic construct
  misc_feature 1..22: note = chemically synthesized
  source 1..22: mol_type = other DNA
aaagaaccactggtgcaaaaag

SEQ ID NO: 99828 - DNA, 22 bp, synthetic construct
  misc_feature 1..22: note = chemically synthesized
  source 1..22: mol_type = other DNA
gtgcaaaaagggaactacctgg

SEQ ID NO: 99829 - DNA, 22 bp, synthetic construct
  misc_feature 1..22: note = chemically synthesized
  source 1..22: mol_type = other DNA
cctggggataaatatttcctcc

SEQ ID NO: 99830 - DNA, 22 bp, synthetic construct
  misc_feature 1..22: note = chemically synthesized
  source 1..22: mol_type = other DNA
gggataaatatttcctccagaa

SEQ ID NO: 99831 - DNA, 22 bp, synthetic construct
  misc_feature 1..22: note = chemically synthesized
  source 1..22: mol_type = other DNA
cctccagaaagggggaaagtgc

SEQ ID NO: 99832 - DNA, 22 bp, synthetic construct
  misc_feature 1..22: note = chemically synthesized
  source 1..22: mol_type = other DNA
ctccagaaagggggaaagtgca

SEQ ID NO: 99833 - DNA, 22 bp, synthetic construct
  misc_feature 1..22: note = chemically synthesized
  source 1..22: mol_type = other DNA
cagaaagggggaaagtgcaagc

SEQ ID NO: 99834 - DNA, 22 bp, synthetic construct
  misc_feature 1..22: note = chemically synthesized
  source 1..22: mol_type = other DNA
ccctaccaaaagcaccaggcaa

SEQ ID NO: 99835 - DNA, 22 bp, synthetic construct
  misc_feature 1..22: note = chemically synthesized
  source 1..22: mol_type = other DNA
ccaaaagcaccaggcaagtcct

SEQ ID NO: 99836 - DNA, 22 bp, synthetic construct
  misc_feature 1..22: note = chemically synthesized
  source 1..22: mol_type = other DNA
gtctattttccctgaagttctc

SEQ ID NO: 99837 - DNA, 22 bp, synthetic construct
  misc_feature 1..22: note = chemically synthesized
  source 1..22: mol_type = other DNA
tctattttccctgaagttctca

SEQ ID NO: 99838 - DNA, 22 bp, synthetic construct
  misc_feature 1..22: note = chemically synthesized
  source 1..22: mol_type = other DNA
ttttccctgaagttctcaaaga

SEQ ID NO: 99839 - DNA, 22 bp, synthetic construct
  misc_feature 1..22: note = chemically synthesized
  source 1..22: mol_type = other DNA
tccctgaagttctcaaagaaat

SEQ ID NO: 99840 - DNA, 22 bp, synthetic construct
  misc_feature 1..22: note = chemically synthesized
  source 1..22: mol_type = other DNA
ccctgaagttctcaaagaaatg

SEQ ID NO: 99841 - DNA, 22 bp, synthetic construct
  misc_feature 1..22: note = chemically synthesized
  source 1..22: mol_type = other DNA
cctgaagttctcaaagaaatga

SEQ ID NO: 99842 - DNA, 22 bp, synthetic construct
  misc_feature 1..22: note = chemically synthesized
  source 1..22: mol_type = other DNA
aagttctcaaagaaatgagacc

SEQ ID NO: 99843 - DNA, 22 bp, synthetic construct
  misc_feature 1..22: note = chemically synthesized
  source 1..22: mol_type = other DNA
tcaaagaaatgagacccttgtt

SEQ ID NO: 99844 - DNA, 22 bp, synthetic construct
  misc_feature 1..22: note = chemically synthesized
  source 1..22: mol_type = other DNA
aaagaaatgagacccttgttta

SEQ ID NO: 99845 - DNA, 22 bp, synthetic construct
  misc_feature 1..22: note = chemically synthesized
  source 1..22: mol_type = other DNA
gtttacctttaagattagagaa

SEQ ID NO: 99846 - DNA, 22 bp, synthetic construct
  misc_feature 1..22: note = chemically synthesized
  source 1..22: mol_type = other DNA
tttacctttaagattagagaag

SEQ ID NO: 99847 - DNA, 22 bp, synthetic construct
  misc_feature 1..22: note = chemically synthesized
  source 1..22: mol_type = other DNA
acctttaagattagagaaggct

SEQ ID NO: 99848 - DNA, 22 bp, synthetic construct
  misc_feature 1..22: note = chemically synthesized
  source 1..22: mol_type = other DNA
cctttaagattagagaaggctt

SEQ ID NO: 99849 - DNA, 22 bp, synthetic construct
  misc_feature 1..22: note = chemically synthesized
  source 1..22: mol_type = other DNA
taagattagagaaggcttgaaa

SEQ ID NO: 99850 - DNA, 22 bp, synthetic construct
  misc_feature 1..22: note = chemically synthesized
  source 1..22: mol_type = other DNA
aagattagagaaggcttgaaaa

SEQ ID NO: 99851 - DNA, 22 bp, synthetic construct
  misc_feature 1..22: note = chemically synthesized
  source 1..22: mol_type = other DNA
agattagagaaggcttgaaaag

SEQ ID NO: 99852 - DNA, 22 bp, synthetic construct
  misc_feature 1..22: note = chemically synthesized
  source 1..22: mol_type = other DNA
gagaaggcttgaaaagtttgag

SEQ ID NO: 99853 - DNA, 22 bp, synthetic construct
  misc_feature 1..22: note = chemically synthesized
  source 1..22: mol_type = other DNA
gaaaagtttgagctgtgccttt

SEQ ID NO: 99854 - DNA, 22 bp, synthetic construct
  misc_feature 1..22: note = chemically synthesized
  source 1..22: mol_type = other DNA
aaaagtttgagctgtgcctttg

SEQ ID NO: 99855 - DNA, 22 bp, synthetic construct
  misc_feature 1..22: note = chemically synthesized
  source 1..22: mol_type = other DNA
gagctgtgcctttggaggccaa

SEQ ID NO: 99856 - DNA, 22 bp, synthetic construct
  misc_feature 1..22: note = chemically synthesized
  source 1..22: mol_type = other DNA
agctgtgcctttggaggccaac

SEQ ID NO: 99857 - DNA, 22 bp, synthetic construct
  misc_feature 1..22: note = chemically synthesized
  source 1..22: mol_type = other DNA
tgcctttggaggccaacaaact

SEQ ID NO: 99858 - DNA, 22 bp, synthetic construct
  misc_feature 1..22: note = chemically synthesized
  source 1..22: mol_type = other DNA
tggaggccaacaaacttttctc

SEQ ID NO: 99859 - DNA, 22 bp, synthetic construct
  misc_feature 1..22: note = chemically synthesized
  source 1..22: mol_type = other DNA
ggaggccaacaaacttttctcc

SEQ ID NO: 99860 - DNA, 22 bp, synthetic construct
  misc_feature 1..22: note = chemically synthesized
  source 1..22: mol_type = other DNA
gaggccaacaaacttttctcct

SEQ ID NO: 99861 - DNA, 22 bp, synthetic construct
  misc_feature 1..22: note = chemically synthesized
  source 1..22: mol_type = other DNA
ttctcctttgttgaccaagttc

SEQ ID NO: 99862 - DNA, 22 bp, synthetic construct
  misc_feature 1..22: note = chemically synthesized
  source 1..22: mol_type = other DNA
tctcctttgttgaccaagttca

SEQ ID NO: 99863 - DNA, 22 bp, synthetic construct
  misc_feature 1..22: note = chemically synthesized
  source 1..22: mol_type = other DNA
ctcctttgttgaccaagttcag

SEQ ID NO: 99864 - DNA, 22 bp, synthetic construct
  misc_feature 1..22: note = chemically synthesized
  source 1..22: mol_type = other DNA
tcctttgttgaccaagttcagc

SEQ ID NO: 99865 - DNA, 22 bp, synthetic construct
  misc_feature 1..22: note = chemically synthesized
  source 1..22: mol_type = other DNA
ctttgttgaccaagttcagctc

SEQ ID NO: 99866 - DNA, 22 bp, synthetic construct
  misc_feature 1..22: note = chemically synthesized
  source 1..22: mol_type = other DNA
tgttgaccaagttcagctctcc

SEQ ID NO: 99867 - DNA, 22 bp, synthetic construct
  misc_feature 1..22: note = chemically synthesized
  source 1..22: mol_type = other DNA
gttgaccaagttcagctctcct

SEQ ID NO: 99868 - DNA, 22 bp, synthetic construct
  misc_feature 1..22: note = chemically synthesized
  source 1..22: mol_type = other DNA
ttgaccaagttcagctctcctg

SEQ ID NO: 99869 - DNA, 22 bp, synthetic construct
  misc_feature 1..22: note = chemically synthesized
  source 1..22: mol_type = other DNA
accaagttcagctctcctgtat

SEQ ID NO: 99870 - DNA, 22 bp, synthetic construct
  misc_feature 1..22: note = chemically synthesized
  source 1..22: mol_type = other DNA
agctctcctgtatgcttccaag

SEQ ID NO: 99871 - DNA, 22 bp, synthetic construct
  misc_feature 1..22: note = chemically synthesized
  source 1..22: mol_type = other DNA
tcctgtatgcttccaaggtctg

SEQ ID NO: 99872 - DNA, 22 bp, synthetic construct
  misc_feature 1..22: note = chemically synthesized
  source 1..22: mol_type = other DNA
ctgtatgcttccaaggtctgtt

SEQ ID NO: 99873 - DNA, 22 bp, synthetic construct
  misc_feature 1..22: note = chemically synthesized
  source 1..22: mol_type = other DNA
tatgcttccaaggtctgttgca

SEQ ID NO: 99874 - DNA, 22 bp, synthetic construct
  misc_feature 1..22: note = chemically synthesized
  source 1..22: mol_type = other DNA
ccaaggtctgttgcatcaagag

SEQ ID NO: 99875 - DNA, 22 bp, synthetic construct
  misc_feature 1..22: note = chemically synthesized
  source 1..22: mol_type = other DNA
caaggtctgttgcatcaagagt

SEQ ID NO: 99876 - DNA, 22 bp, synthetic construct
  misc_feature 1..22: note = chemically synthesized
  source 1..22: mol_type = other DNA
ttgcatcaagagtgagaattga

SEQ ID NO: 99877 - DNA, 22 bp, synthetic construct
  misc_feature 1..22: note = chemically synthesized
  source 1..22: mol_type = other DNA
catcaagagtgagaattgaagg

SEQ ID NO: 99878 - DNA, 22 bp, synthetic construct
  misc_feature 1..22: note = chemically synthesized
  source 1..22: mol_type = other DNA
aaggtcttagaagctgggatct

SEQ ID NO: 99879 - DNA, 22 bp, synthetic construct
  misc_feature 1..22: note = chemically synthesized
  source 1..22: mol_type = other DNA
agaagctgggatctcagatgta

SEQ ID NO: 99880 - DNA, 22 bp, synthetic construct
  misc_feature 1..22: note = chemically synthesized
  source 1..22: mol_type = other DNA
gaagctgggatctcagatgtag

SEQ ID NO: 99881 - DNA, 22 bp, synthetic construct
  misc_feature 1..22: note = chemically synthesized
  source 1..22: mol_type = other DNA
ggatctcagatgtagggaaaag

SEQ ID NO: 99882 - DNA, 22 bp, synthetic construct
  misc_feature 1..22: note = chemically synthesized
  source 1..22: mol_type = other DNA
agatgtagggaaaagaggagat

SEQ ID NO: 99883 - DNA, 22 bp, synthetic construct
  misc_feature 1..22: note = chemically synthesized
  source 1..22: mol_type = other DNA
cctgttcactcactgttaagat

SEQ ID NO: 99884 - DNA, 22 bp, synthetic construct
  misc_feature 1..22: note = chemically synthesized
  source 1..22: mol_type = other DNA
ctgttcactcactgttaagata

SEQ ID NO: 99885 - DNA, 22 bp, synthetic construct
  misc_feature 1..22: note = chemically synthesized
  source 1..22: mol_type = other DNA
ttcactcactgttaagatatgg

SEQ ID NO: 99886 - DNA, 22 bp, synthetic construct
  misc_feature 1..22: note = chemically synthesized
  source 1..22: mol_type = other DNA
actcactgttaagatatggctg

SEQ ID NO: 99887 - DNA, 22 bp, synthetic construct
  misc_feature 1..22: note = chemically synthesized
  source 1..22: mol_type = other DNA
actgttaagatatggctgaaat

SEQ ID NO: 99888 - DNA, 22 bp, synthetic construct
  misc_feature 1..22: note = chemically synthesized
  source 1..22: mol_type = other DNA
ttaagatatggctgaaattttt

SEQ ID NO: 99889 - DNA, 22 bp, synthetic construct
  misc_feature 1..22: note = chemically synthesized
  source 1..22: mol_type = other DNA
agatatggctgaaattttttga

SEQ ID NO: 99890 - DNA, 22 bp, synthetic construct
  misc_feature 1..22: note = chemically synthesized
  source 1..22: mol_type = other DNA
aaattttttgatctagtcatct

SEQ ID NO: 99891 - DNA, 22 bp, synthetic construct
  misc_feature 1..22: note = chemically synthesized
  source 1..22: mol_type = other DNA
tttgatctagtcatctacaaag

SEQ ID NO: 99892 - DNA, 22 bp, synthetic construct
  misc_feature 1..22: note = chemically synthesized
  source 1..22: mol_type = other DNA
ttgatctagtcatctacaaagc

SEQ ID NO: 99893 - DNA, 22 bp, synthetic construct
  misc_feature 1..22: note = chemically synthesized
  source 1..22: mol_type = other DNA
tgatctagtcatctacaaagca

SEQ ID NO: 99894 - DNA, 22 bp, synthetic construct
  misc_feature 1..22: note = chemically synthesized
  source 1..22: mol_type = other DNA
gatctagtcatctacaaagcat

SEQ ID NO: 99895 - DNA, 22 bp, synthetic construct
  misc_feature 1..22: note = chemically synthesized
  source 1..22: mol_type = other DNA
atctagtcatctacaaagcatg

SEQ ID NO: 99896 - DNA, 22 bp, synthetic construct
  misc_feature 1..22: note = chemically synthesized
  source 1..22: mol_type = other DNA
gtcatctacaaagcatgagttg

SEQ ID NO: 99897 - DNA, 22 bp, synthetic construct
  misc_feature 1..22: note = chemically synthesized
  source 1..22: mol_type = other DNA
caaagcatgagttgtgggtcag

SEQ ID NO: 99898 - DNA, 22 bp, synthetic construct
  misc_feature 1..22: note = chemically synthesized
  source 1..22: mol_type = other DNA
tgggtcagaaattgtttttcac

SEQ ID NO: 99899 - DNA, 22 bp, synthetic construct
  misc_feature 1..22: note = chemically synthesized
  source 1..22: mol_type = other DNA
tttttcacatcttttgacttcc

SEQ ID NO: 99900 - DNA, 22 bp, synthetic construct
  misc_feature 1..22: note = chemically synthesized
  source 1..22: mol_type = other DNA
ttcacatcttttgacttccttt

SEQ ID NO: 99901 - DNA, 22 bp, synthetic construct
  misc_feature 1..22: note = chemically synthesized
  source 1..22: mol_type = other DNA
tcacatcttttgacttcctttg

SEQ ID NO: 99902 - DNA, 22 bp, synthetic construct
  misc_feature 1..22: note = chemically synthesized
  source 1..22: mol_type = other DNA
cacatcttttgacttcctttga

SEQ ID NO: 99903 - DNA, 22 bp, synthetic construct
  misc_feature 1..22: note = chemically synthesized
  source 1..22: mol_type = other DNA
acatcttttgacttcctttgac

SEQ ID NO: 99904 - DNA, 22 bp, synthetic construct
  misc_feature 1..22: note = chemically synthesized
  source 1..22: mol_type = other DNA
ttgacttcctttgacatcagaa

SEQ ID NO: 99905 - DNA, 22 bp, synthetic construct
  misc_feature 1..22: note = chemically synthesized
  source 1..22: mol_type = other DNA
tgacttcctttgacatcagaat

SEQ ID NO: 99906 - DNA, 22 bp, synthetic construct
  misc_feature 1..22: note = chemically synthesized
  source 1..22: mol_type = other DNA
gacttcctttgacatcagaata

SEQ ID NO: 99907 - DNA, 22 bp, synthetic construct
  misc_feature 1..22: note = chemically synthesized
  source 1..22: mol_type = other DNA
acttcctttgacatcagaatat

SEQ ID NO: 99908 - DNA, 22 bp, synthetic construct
  misc_feature 1..22: note = chemically synthesized
  source 1..22: mol_type = other DNA
cctttgacatcagaatataacc

SEQ ID NO: 99909 - DNA, 22 bp, synthetic construct
  misc_feature 1..22: note = chemically synthesized
  source 1..22: mol_type = other DNA
ctttgacatcagaatataacct

SEQ ID NO: 99910 - DNA, 22 bp, synthetic construct
  misc_feature 1..22: note = chemically synthesized
  source 1..22: mol_type = other DNA
tgacatcagaatataacctagg

SEQ ID NO: 99911 - DNA, 22 bp, synthetic construct
  misc_feature 1..22: note = chemically synthesized
  source 1..22: mol_type = other DNA
gacatcagaatataacctagga

SEQ ID NO: 99912 - DNA, 22 bp, synthetic construct
  misc_feature 1..22: note = chemically synthesized
  source 1..22: mol_type = other DNA
acatcagaatataacctaggaa

SEQ ID NO: 99913 - DNA, 22 bp, synthetic construct
  misc_feature 1..22: note = chemically synthesized
  source 1..22: mol_type = other DNA
ggaattgattacttaagtgaag

SEQ ID NO: 99914 - DNA, 22 bp, synthetic construct
  misc_feature 1..22: note = chemically synthesized
  source 1..22: mol_type = other DNA
attacttaagtgaaggcaaggt

SEQ ID NO: 99915 - DNA, 22 bp, synthetic construct
  misc_feature 1..22: note = chemically synthesized
  source 1..22: mol_type = other DNA
cttaagtgaaggcaaggtactt

SEQ ID NO: 99916 - DNA, 22 bp, synthetic construct
  misc_feature 1..22: note = chemically synthesized
  source 1..22: mol_type = other DNA
aagtgaaggcaaggtactttgg

SEQ ID NO: 99917 - DNA, 22 bp, synthetic construct
  misc_feature 1..22: note = chemically synthesized
  source 1..22: mol_type = other DNA
agtgaaggcaaggtactttggt

SEQ ID NO: 99918 - DNA, 22 bp, synthetic construct
  misc_feature 1..22: note = chemically synthesized
  source 1..22: mol_type = other DNA
tggtctggacaggaacattttg

SEQ ID NO: 99919 - DNA, 22 bp, synthetic construct
  misc_feature 1..22: note = chemically synthesized
  source 1..22: mol_type = other DNA
ggtctggacaggaacattttga

SEQ ID NO: 99920 - DNA, 22 bp, synthetic construct
  misc_feature 1..22: note = chemically synthesized
  source 1..22: mol_type = other DNA
gtctggacaggaacattttgaa

SEQ ID NO: 99921 - DNA, 22 bp, synthetic construct
  misc_feature 1..22: note = chemically synthesized
  source 1..22: mol_type = other DNA
gacaggaacattttgaacaagg

SEQ ID NO: 99922 - DNA, 22 bp, synthetic construct
  misc_feature 1..22: note = chemically synthesized
  source 1..22: mol_type = other DNA
tgaacaaggtagggagacagct

SEQ ID NO: 99923 - DNA, 22 bp, synthetic construct
  misc_feature 1..22: note = chemically synthesized
  source 1..22: mol_type = other DNA
gaacaaggtagggagacagcta

SEQ ID NO: 99924 - DNA, 22 bp, synthetic construct
  misc_feature 1..22: note = chemically synthesized
  source 1..22: mol_type = other DNA
aacaaggtagggagacagctat

SEQ ID NO: 99925 - DNA, 22 bp, synthetic construct
  misc_feature 1..22: note = chemically synthesized
  source 1..22: mol_type = other DNA
tgaaggcaagcatttattctat

SEQ ID NO: 99926 - DNA, 22 bp, synthetic construct
  misc_feature 1..22: note = chemically synthesized
  source 1..22: mol_type = other DNA
attctatctatcatctatctgt

SEQ ID NO: 99927 - DNA, 22 bp, synthetic construct
  misc_feature 1..22: note = chemically synthesized
  source 1..22: mol_type = other DNA
ttctatctatcatctatctgtc

SEQ ID NO: 99928 - DNA, 22 bp, synthetic construct
  misc_feature 1..22: note = chemically synthesized
  source 1..22: mol_type = other DNA
tatctatcatctatctgtctat

SEQ ID NO: 99929 - DNA, 22 bp, synthetic construct
  misc_feature 1..22: note = chemically synthesized
  source 1..22: mol_type = other DNA
tctatcatctatctgtctatct

SEQ ID NO: 99930 - DNA, 22 bp, synthetic construct
  misc_feature 1..22: note = chemically synthesized
  source 1..22: mol_type = other DNA
tcatctatctgtctatctatct

SEQ ID NO: 99931 - DNA, 22 bp, synthetic construct
  misc_feature 1..22: note = chemically synthesized
  source 1..22: mol_type = other DNA
tctgtctatctatctatctatt

SEQ ID NO: 99932 - DNA, 22 bp, synthetic construct
  misc_feature 1..22: note = chemically synthesized
  source 1..22: mol_type = other DNA
tctatctatctatctattcttt

SEQ ID NO: 99933 - DNA, 22 bp, synthetic construct
  misc_feature 1..22: note = chemically synthesized
  source 1..22: mol_type = other DNA
tctatctatctattctttcatc

SEQ ID NO: 99934 - DNA, 22 bp, synthetic construct
  misc_feature 1..22: note = chemically synthesized
  source 1..22: mol_type = other DNA
tctatctattctttcatccact

SEQ ID NO: 99935 - DNA, 22 bp, synthetic construct
  misc_feature 1..22: note = chemically synthesized
  source 1..22: mol_type = other DNA
tctattctttcatccacttatt

SEQ ID NO: 99936 - DNA, 22 bp, synthetic construct
  misc_feature 1..22: note = chemically synthesized
  source 1..22: mol_type = other DNA
ttctttcatccacttatttata

SEQ ID NO: 99937 - DNA, 22 bp, synthetic construct
  misc_feature 1..22: note = chemically synthesized
  source 1..22: mol_type = other DNA
tttcatccacttatttatacat

SEQ ID NO: 99938 - DNA, 22 bp, synthetic construct
  misc_feature 1..22: note = chemically synthesized
  source 1..22: mol_type = other DNA
tcatccacttatttatacattt

SEQ ID NO: 99939 - DNA, 22 bp, synthetic construct
  misc_feature 1..22: note = chemically synthesized
  source 1..22: mol_type = other DNA
catccacttatttatacattta

SEQ ID NO: 99940 - DNA, 22 bp, synthetic construct
  misc_feature 1..22: note = chemically synthesized
  source 1..22: mol_type = other DNA
atccacttatttatacatttaa

SEQ ID NO: 99941 - DNA, 22 bp, synthetic construct
  misc_feature 1..22: note = chemically synthesized
  source 1..22: mol_type = other DNA
atttatacatttaaacaaaaag

SEQ ID NO: 99942 - DNA, 22 bp, synthetic construct
  misc_feature 1..22: note = chemically synthesized
  source 1..22: mol_type = other DNA
tttatacatttaaacaaaaagt

SEQ ID NO: 99943 - DNA, 22 bp, synthetic construct
  misc_feature 1..22: note = chemically synthesized
  source 1..22: mol_type = other DNA
atacatttaaacaaaaagtata

SEQ ID NO: 99944 - DNA, 22 bp, synthetic construct
  misc_feature 1..22: note = chemically synthesized
  source 1..22: mol_type = other DNA
tacatttaaacaaaaagtatag

SEQ ID NO: 99945 - DNA, 22 bp, synthetic construct
  misc_feature 1..22: note = chemically synthesized
  source 1..22: mol_type = other DNA
aaacaaaaagtatagagcgtag

SEQ ID NO: 99946 - DNA, 22 bp, synthetic construct
  misc_feature 1..22: note = chemically synthesized
  source 1..22: mol_type = other DNA
aacaaaaagtatagagcgtagt

SEQ ID NO: 99947 - DNA, 22 bp, synthetic construct
  misc_feature 1..22: note = chemically synthesized
  source 1..22: mol_type = other DNA
gtaagtgctcagggctgtgtgt

SEQ ID NO: 99948 - DNA, 22 bp, synthetic construct
  misc_feature 1..22: note = chemically synthesized
  source 1..22: mol_type = other DNA
taagtgctcagggctgtgtgtg

SEQ ID NO: 99949 - DNA, 22 bp, synthetic construct
  misc_feature 1..22: note = chemically synthesized
  source 1..22: mol_type = other DNA
agggctgtgtgtgtatggattg

SEQ ID NO: 99950 - DNA, 22 bp, synthetic construct
  misc_feature 1..22: note = chemically synthesized
  source 1..22: mol_type = other DNA
tgtgtgtatggattgtttgaaa

SEQ ID NO: 99951 - DNA, 22 bp, synthetic construct
  misc_feature 1..22: note = chemically synthesized
  source 1..22: mol_type = other DNA
tttgaaatgaaactaaagtggg

SEQ ID NO: 99952 - DNA, 22 bp, synthetic construct
  misc_feature 1..22: note = chemically synthesized
  source 1..22: mol_type = other DNA
gaaatgaaactaaagtgggagt

SEQ ID NO: 99953 - DNA, 22 bp, synthetic construct
  misc_feature 1..22: note = chemically synthesized
  source 1..22: mol_type = other DNA
aaatgaaactaaagtgggagta

SEQ ID NO: 99954 - DNA, 22 bp, synthetic construct
  misc_feature 1..22: note = chemically synthesized
  source 1..22: mol_type = other DNA
aagtgggagtataattctactg

SEQ ID NO: 99955 - DNA, 22 bp, synthetic construct
  misc_feature 1..22: note = chemically synthesized
  source 1..22: mol_type = other DNA
tactgcccccttaaccctgtgg

SEQ ID NO: 99956 - DNA, 22 bp, synthetic construct
  misc_feature 1..22: note = chemically synthesized
  source 1..22: mol_type = other DNA
ctgcccccttaaccctgtggtc

SEQ ID NO: 99957 - DNA, 22 bp, synthetic construct
  misc_feature 1..22: note = chemically synthesized
  source 1..22: mol_type = other DNA
cccccttaaccctgtggtccct

SEQ ID NO: 99958 - DNA, 22 bp, synthetic construct
  misc_feature 1..22: note = chemically synthesized
  source 1..22: mol_type = other DNA
aaccctgtggtccctacactac

SEQ ID NO: 99959 - DNA, 22 bp, synthetic construct
  misc_feature 1..22: note = chemically synthesized
  source 1..22: mol_type = other DNA
accctgtggtccctacactacc

SEQ ID NO: 99960 - DNA, 22 bp, synthetic construct
  misc_feature 1..22: note = chemically synthesized
  source 1..22: mol_type = other DNA
tggtccctacactaccctgcaa

SEQ ID NO: 99961 - DNA, 22 bp, synthetic construct
  misc_feature 1..22: note = chemically synthesized
  source 1..22: mol_type = other DNA
cactaccctgcaagactcttag

SEQ ID NO: 99962 - DNA, 22 bp, synthetic construct
  misc_feature 1..22: note = chemically synthesized
  source 1..22: mol_type = other DNA
ccctgcaagactcttagctgct

SEQ ID NO: 99963 - DNA, 22 bp, synthetic construct
  misc_feature 1..22: note = chemically synthesized
  source 1..22: mol_type = other DNA
caagactcttagctgcttagct

SEQ ID NO: 99964 - DNA, 22 bp, synthetic construct
  misc_feature 1..22: note = chemically synthesized
  source 1..22: mol_type = other DNA
ttagctgcttagcttaattgtg

SEQ ID NO: 99965 - DNA, 22 bp, synthetic construct
  misc_feature 1..22: note = chemically synthesized
  source 1..22: mol_type = other DNA
agctgcttagcttaattgtgag

SEQ ID NO: 99966 - DNA, 22 bp, synthetic construct
  misc_feature 1..22: note = chemically synthesized
  source 1..22: mol_type = other DNA
gctgcttagcttaattgtgagg

SEQ ID NO: 99967 - DNA, 22 bp, synthetic construct
  misc_feature 1..22: note = chemically synthesized
  source 1..22: mol_type = other DNA
cttagcttaattgtgaggctga

SEQ ID NO: 99968 - DNA, 22 bp, synthetic construct
  misc_feature 1..22: note = chemically synthesized
  source 1..22: mol_type = other DNA
agcttaattgtgaggctgattt

SEQ ID NO: 99969 - DNA, 22 bp, synthetic construct
  misc_feature 1..22: note = chemically synthesized
  source 1..22: mol_type = other DNA
gcttaattgtgaggctgatttg

SEQ ID NO: 99970 - DNA, 22 bp, synthetic construct
  misc_feature 1..22: note = chemically synthesized
  source 1..22: mol_type = other DNA
aattgtgaggctgatttggggc

SEQ ID NO: 99971 - DNA, 22 bp, synthetic construct
  misc_feature 1..22: note = chemically synthesized
  source 1..22: mol_type = other DNA
attgtgaggctgatttggggca

SEQ ID NO: 99972 - DNA, 22 bp, synthetic construct
  misc_feature 1..22: note = chemically synthesized
  source 1..22: mol_type = other DNA
tgaggctgatttggggcatagc

SEQ ID NO: 99973 - DNA, 22 bp, synthetic construct
  misc_feature 1..22: note = chemically synthesized
  source 1..22: mol_type = other DNA
atttggggcatagcaccccatc

SEQ ID NO: 99974 - DNA, 22 bp, synthetic construct
  misc_feature 1..22: note = chemically synthesized
  source 1..22: mol_type = other DNA
ggggcatagcaccccatcctct

SEQ ID NO: 99975 - DNA, 22 bp, synthetic construct
  misc_feature 1..22: note = chemically synthesized
  source 1..22: mol_type = other DNA
gggcatagcaccccatcctctc

SEQ ID NO: 99976 - DNA, 22 bp, synthetic construct
  misc_feature 1..22: note = chemically synthesized
  source 1..22: mol_type = other DNA
tctgtctttcaacatcctcata

SEQ ID NO: 99977 - DNA, 22 bp, synthetic construct
  misc_feature 1..22: note = chemically synthesized
  source 1..22: mol_type = other DNA
tgtctttcaacatcctcataat

SEQ ID NO: 99978 - DNA, 22 bp, synthetic construct
  misc_feature 1..22: note = chemically synthesized
  source 1..22: mol_type = other DNA
tctttcaacatcctcataataa

SEQ ID NO: 99979 - DNA, 22 bp, synthetic construct
  misc_feature 1..22: note = chemically synthesized
  source 1..22: mol_type = other DNA
tcaacatcctcataataacttg

SEQ ID NO: 99980 - DNA, 22 bp, synthetic construct
  misc_feature 1..22: note = chemically synthesized
  source 1..22: mol_type = other DNA
caacatcctcataataacttga

SEQ ID NO: 99981 - DNA, 22 bp, synthetic construct
  misc_feature 1..22: note = chemically synthesized
  source 1..22: mol_type = other DNA
aacatcctcataataacttgag

SEQ ID NO: 99982 - DNA, 22 bp, synthetic construct
  misc_feature 1..22: note = chemically synthesized
  source 1..22: mol_type = other DNA
ataataacttgagaataatttt

SEQ ID NO: 99983 - DNA, 22 bp, synthetic construct
  misc_feature 1..22: note = chemically synthesized
  source 1..22: mol_type = other DNA
gagaataattttataaaatatc

SEQ ID NO: 99984 - DNA, 22 bp, synthetic construct
  misc_feature 1..22: note = chemically synthesized
  source 1..22: mol_type = other DNA
agaataattttataaaatatca

SEQ ID NO: 99985 - DNA, 22 bp, synthetic construct
  misc_feature 1..22: note = chemically synthesized
  source 1..22: mol_type = other DNA
tataaaatatcacaatagggtc

SEQ ID NO: 99986 - DNA, 22 bp, synthetic construct
  misc_feature 1..22: note = chemically synthesized
  source 1..22: mol_type = other DNA
ataaaatatcacaatagggtca

SEQ ID NO: 99987 - DNA, 22 bp, synthetic construct
  misc_feature 1..22: note = chemically synthesized
  source 1..22: mol_type = other DNA
taaaatatcacaatagggtcat

SEQ ID NO: 99988 - DNA, 22 bp, synthetic construct
  misc_feature 1..22: note = chemically synthesized
  source 1..22: mol_type = other DNA
agtagggtgatatataaaatta

SEQ ID NO: 99989 - DNA, 22 bp, synthetic construct
  misc_feature 1..22: note = chemically synthesized
  source 1..22: mol_type = other DNA
gacaagccatagtttgagttta

SEQ ID NO: 99990 - DNA, 22 bp, synthetic construct
  misc_feature 1..22: note = chemically synthesized
  source 1..22: mol_type = other DNA
gagtttacccttttgaataaat

SEQ ID NO: 99991 - DNA, 22 bp, synthetic construct
  misc_feature 1..22: note = chemically synthesized
  source 1..22: mol_type = other DNA
agtttacccttttgaataaata

SEQ ID NO: 99992 - DNA, 22 bp, synthetic construct
  misc_feature 1..22: note = chemically synthesized
  source 1..22: mol_type = other DNA
acccttttgaataaatatatga

SEQ ID NO: 99993 - DNA, 22 bp, synthetic construct
  misc_feature 1..22: note = chemically synthesized
  source 1..22: mol_type = other DNA
cccttttgaataaatatatgac

SEQ ID NO: 99994 - DNA, 22 bp, synthetic construct
  misc_feature 1..22: note = chemically synthesized
  source 1..22: mol_type = other DNA
ttgaataaatatatgacaaaag

SEQ ID NO: 99995 - DNA, 22 bp, synthetic construct
  misc_feature 1..22: note = chemically synthesized
  source 1..22: mol_type = other DNA
tgaataaatatatgacaaaagg

SEQ ID NO: 99996 - DNA, 22 bp, synthetic construct
  misc_feature 1..22: note = chemically synthesized
  source 1..22: mol_type = other DNA
gaataaatatatgacaaaaggc

SEQ ID NO: 99997 - DNA, 22 bp, synthetic construct
  misc_feature 1..22: note = chemically synthesized
  source 1..22: mol_type = other DNA
aataaatatatgacaaaaggca

SEQ ID NO: 99998 - DNA, 22 bp, synthetic construct
  misc_feature 1..22: note = chemically synthesized
  source 1..22: mol_type = other DNA
aattatctttatgagtttggag

SEQ ID NO: 99999 - DNA, 22 bp, synthetic construct
  misc_feature 1..22: note = chemically synthesized
  source 1..22: mol_type = other DNA
attatctttatgagtttggagg

SEQ ID NO: 100000 - DNA, 22 bp, synthetic construct
  misc_feature 1..22: note = chemically synthesized
  source 1..22: mol_type = other DNA
tctttatgagtttggaggtatc

SEQ ID NO: 100001 - DNA, 22 bp, synthetic construct
  misc_feature 1..22: note = chemically synthesized
  source 1..22: mol_type = other DNA
tatgagtttggaggtatccagt

SEQ ID NO: 100002 - DNA, 22 bp, synthetic construct
  misc_feature 1..22: note = chemically synthesized
  source 1..22: mol_type = other DNA
atgagtttggaggtatccagta

SEQ ID NO: 100003 - DNA, 22 bp, synthetic construct
  misc_feature 1..22: note = chemically synthesized
  source 1..22: mol_type = other DNA
tgagtttggaggtatccagtat

SEQ ID NO: 100004 - DNA, 22 bp, synthetic construct
  misc_feature 1..22: note = chemically synthesized
  source 1..22: mol_type = other DNA
ggaggtatccagtatgaaattt

SEQ ID NO: 100005 - DNA, 22 bp, synthetic construct
  misc_feature 1..22: note = chemically synthesized
  source 1..22: mol_type = other DNA
gaggtatccagtatgaaattta

SEQ ID NO: 100006 - DNA, 22 bp, synthetic construct
  misc_feature 1..22: note = chemically synthesized
  source 1..22: mol_type = other DNA
agataatacctgccttctagtg

SEQ ID NO: 100007 - DNA, 22 bp, synthetic construct
  misc_feature 1..22: note = chemically synthesized
  source 1..22: mol_type = other DNA
gataatacctgccttctagtgt

SEQ ID NO: 100008 - DNA, 22 bp, synthetic construct
  misc_feature 1..22: note = chemically synthesized
  source 1..22: mol_type = other DNA
ccttctagtgttgaaattagaa

SEQ ID NO: 100009 - DNA, 22 bp, synthetic construct
  misc_feature 1..22: note = chemically synthesized
  source 1..22: mol_type = other DNA
ctagtgttgaaattagaactta

SEQ ID NO: 100010 - DNA, 22 bp, synthetic construct
  misc_feature 1..22: note = chemically synthesized
  source 1..22: mol_type = other DNA
tagtgttgaaattagaacttaa

SEQ ID NO: 100011 - DNA, 22 bp, synthetic construct
  misc_feature 1..22: note = chemically synthesized
  source 1..22: mol_type = other DNA
gtgttgaaattagaacttaatg

SEQ ID NO: 100012 - DNA, 22 bp, synthetic construct
  misc_feature 1..22: note = chemically synthesized
  source 1..22: mol_type = other DNA
aaattagaacttaatgatataa

SEQ ID NO: 100013 - DNA, 22 bp, synthetic construct
  misc_feature 1..22: note = chemically synthesized
  source 1..22: mol_type = other DNA
gaacttaatgatataatgcatc

SEQ ID NO: 100014 - DNA, 22 bp, synthetic construct
  misc_feature 1..22: note = chemically synthesized
  source 1..22: mol_type = other DNA
aatgatataatgcatcaatgaa

SEQ ID NO: 100015 - DNA, 22 bp, synthetic construct
  misc_feature 1..22: note = chemically synthesized
  source 1..22: mol_type = other DNA
atgatataatgcatcaatgaac

SEQ ID NO: 100016 - DNA, 22 bp, synthetic construct
  misc_feature 1..22: note = chemically synthesized
  source 1..22: mol_type = other DNA
attatagttcctagcacaaagt

SEQ ID NO: 100017 - DNA, 22 bp, synthetic construct
  misc_feature 1..22: note = chemically synthesized
  source 1..22: mol_type = other DNA
ttatagttcctagcacaaagta

SEQ ID NO: 100018 - DNA, 22 bp, synthetic construct
  misc_feature 1..22: note = chemically synthesized
  source 1..22: mol_type = other DNA
tagttcctagcacaaagtaaga

SEQ ID NO: 100019 - DNA, 22 bp, synthetic construct
  misc_feature 1..22: note = chemically synthesized
  source 1..22: mol_type = other DNA
ctagcacaaagtaagaatcctt

SEQ ID NO: 100020 - DNA, 22 bp, synthetic construct
  misc_feature 1..22: note = chemically synthesized
  source 1..22: mol_type = other DNA
gcacaaagtaagaatcctttca

SEQ ID NO: 100021 - DNA, 22 bp, synthetic construct
  misc_feature 1..22: note = chemically synthesized
  source 1..22: mol_type = other DNA
tcaatgtgtgtgtgtgtgtatg

SEQ ID NO: 100022 - DNA, 22 bp, synthetic construct
  misc_feature 1..22: note = chemically synthesized
  source 1..22: mol_type = other DNA
caatgtgtgtgtgtgtgtatgt

SEQ ID NO: 100023 - DNA, 22 bp, synthetic construct
  misc_feature 1..22: note = chemically synthesized
  source 1..22: mol_type = other DNA
aatgtgtgtgtgtgtgtatgta

SEQ ID NO: 100024 - DNA, 22 bp, synthetic construct
  misc_feature 1..22: note = chemically synthesized
  source 1..22: mol_type = other DNA
atctgttattaataggaatctt

SEQ ID NO: 100025 - DNA, 22 bp, synthetic construct
  misc_feature 1..22: note = chemically synthesized
  source 1..22: mol_type = other DNA
tctgttattaataggaatctta

SEQ ID NO: 100026 - DNA, 22 bp, synthetic construct
  misc_feature 1..22: note = chemically synthesized
  source 1..22: mol_type = other DNA
ttattaataggaatcttatggg

SEQ ID NO: 100027 - DNA, 22 bp, synthetic construct
  misc_feature 1..22: note = chemically synthesized
  source 1..22: mol_type = other DNA
ttaataggaatcttatgggcat

SEQ ID NO: 100028 - DNA, 22 bp, synthetic construct
  misc_feature 1..22: note = chemically synthesized
  source 1..22: mol_type = other DNA
ataggaatcttatgggcattat

SEQ ID NO: 100029 - DNA, 22 bp, synthetic construct
  misc_feature 1..22: note = chemically synthesized
  source 1..22: mol_type = other DNA
atgggcattatctcacttaatc

SEQ ID NO: 100030 - DNA, 22 bp, synthetic construct
  misc_feature 1..22: note = chemically synthesized
  source 1..22: mol_type = other DNA
tgggcattatctcacttaatcc

SEQ ID NO: 100031 - DNA, 22 bp, synthetic construct
  misc_feature 1..22: note = chemically synthesized
  source 1..22: mol_type = other DNA
tctcacttaatccttattaata

SEQ ID NO: 100032 - DNA, 22 bp, synthetic construct
  misc_feature 1..22: note = chemically synthesized
  source 1..22: mol_type = other DNA
acttaatccttattaataacta

SEQ ID NO: 100033 - DNA, 22 bp, synthetic construct
  misc_feature 1..22: note = chemically synthesized
  source 1..22: mol_type = other DNA
aatccttattaataactatgaa

SEQ ID NO: 100034 - DNA, 22 bp, synthetic construct
  misc_feature 1..22: note = chemically synthesized
  source 1..22: mol_type = other DNA
atccttattaataactatgaag

SEQ ID NO: 100035 - DNA, 22 bp, synthetic construct
  misc_feature 1..22: note = chemically synthesized
  source 1..22: mol_type = other DNA
attaataactatgaagcaggta

SEQ ID NO: 100036 - DNA, 22 bp, synthetic construct
  misc_feature 1..22: note = chemically synthesized
  source 1..22: mol_type = other DNA
ttaataactatgaagcaggtat

SEQ ID NO: 100037 - DNA, 22 bp, synthetic construct
  misc_feature 1..22: note = chemically synthesized
  source 1..22: mol_type = other DNA
ataactatgaagcaggtattta

SEQ ID NO: 100038 - DNA, 22 bp, synthetic construct
  misc_feature 1..22: note = chemically synthesized
  source 1..22: mol_type = other DNA
tgaagcaggtatttatttgagt

SEQ ID NO: 100039 - DNA, 22 bp, synthetic construct
  misc_feature 1..22: note = chemically synthesized
  source 1..22: mol_type = other DNA
atttgagttttccaagtgagtt

SEQ ID NO: 100040 - DNA, 22 bp, synthetic construct
  misc_feature 1..22: note = chemically synthesized
  source 1..22: mol_type = other DNA
tttgagttttccaagtgagtta

SEQ ID NO: 100041 - DNA, 22 bp, synthetic construct
  misc_feature 1..22: note = chemically synthesized
  source 1..22: mol_type = other DNA
gagttttccaagtgagttaagt

SEQ ID NO: 100042 - DNA, 22 bp, synthetic construct
  misc_feature 1..22: note = chemically synthesized
  source 1..22: mol_type = other DNA
agttttccaagtgagttaagta

SEQ ID NO: 100043 - DNA, 22 bp, synthetic construct
  misc_feature 1..22: note = chemically synthesized
  source 1..22: mol_type = other DNA
tccaagtgagttaagtatagct

SEQ ID NO: 100044 - DNA, 22 bp, synthetic construct
  misc_feature 1..22: note = chemically synthesized
  source 1..22: mol_type = other DNA
ccaagtgagttaagtatagctt

SEQ ID NO: 100045 - DNA, 22 bp, synthetic construct
  misc_feature 1..22: note = chemically synthesized
  source 1..22: mol_type = other DNA
caagtgagttaagtatagcttg

SEQ ID NO: 100046 - DNA, 22 bp, synthetic construct
  misc_feature 1..22: note = chemically synthesized
  source 1..22: mol_type = other DNA
agtatagcttgtaatacttaag

SEQ ID NO: 100047 - DNA, 22 bp, synthetic construct
  misc_feature 1..22: note = chemically synthesized
  source 1..22: mol_type = other DNA
gtaatacttaaggaaatatcca

SEQ ID NO: 100048 - DNA, 22 bp, synthetic construct
  misc_feature 1..22: note = chemically synthesized
  source 1..22: mol_type = other DNA
taatacttaaggaaatatccac

SEQ ID NO: 100049 - DNA, 22 bp, synthetic construct
  misc_feature 1..22: note = chemically synthesized
  source 1..22: mol_type = other DNA
aaggaaatatccacaggttaca

SEQ ID NO: 100050 - DNA, 22 bp, synthetic construct
  misc_feature 1..22: note = chemically synthesized
  source 1..22: mol_type = other DNA
aggaaatatccacaggttacat

SEQ ID NO: 100051 - DNA, 22 bp, synthetic construct
  misc_feature 1..22: note = chemically synthesized
  source 1..22: mol_type = other DNA
catagctagtatataactgaga

SEQ ID NO: 100052 - DNA, 22 bp, synthetic construct
  misc_feature 1..22: note = chemically synthesized
  source 1..22: mol_type = other DNA
gtatataactgagaaataattt

SEQ ID NO: 100053 - DNA, 22 bp, synthetic construct
  misc_feature 1..22: note = chemically synthesized
  source 1..22: mol_type = other DNA
agaaataattttatttatatta

SEQ ID NO: 100054 - DNA, 22 bp, synthetic construct
  misc_feature 1..22: note = chemically synthesized
  source 1..22: mol_type = other DNA
tatttatattataaaacattct

SEQ ID NO: 100055 - DNA, 22 bp, synthetic construct
  misc_feature 1..22: note = chemically synthesized
  source 1..22: mol_type = other DNA
atttatattataaaacattcta

SEQ ID NO: 100056 - DNA, 22 bp, synthetic construct
  misc_feature 1..22: note = chemically synthesized
  source 1..22: mol_type = other DNA
tttatattataaaacattctaa

SEQ ID NO: 100057 - DNA, 22 bp, synthetic construct
  misc_feature 1..22: note = chemically synthesized
  source 1..22: mol_type = other DNA
atattataaaacattctaacaa

SEQ ID NO: 100058 - DNA, 22 bp, synthetic construct
  misc_feature 1..22: note = chemically synthesized
  source 1..22: mol_type = other DNA
tattataaaacattctaacaat

SEQ ID NO: 100059 - DNA, 22 bp, synthetic construct
  misc_feature 1..22: note = chemically synthesized
  source 1..22: mol_type = other DNA
taaaacattctaacaatacaga

SEQ ID NO: 100060 - DNA, 22 bp, synthetic construct
  misc_feature 1..22: note = chemically synthesized
  source 1..22: mol_type = other DNA
taacaatacagatgtatataaa

SEQ ID NO: 100061 - DNA, 22 bp, synthetic construct
  misc_feature 1..22: note = chemically synthesized
  source 1..22: mol_type = other DNA
acaatacagatgtatataaact

SEQ ID NO: 100062 - DNA, 22 bp, synthetic construct
  misc_feature 1..22: note = chemically synthesized
  source 1..22: mol_type = other DNA
aaaaactgaaagggctcatgca

SEQ ID NO: 100063 - DNA, 22 bp, synthetic construct
  misc_feature 1..22: note = chemically synthesized
  source 1..22: mol_type = other DNA
aaagggctcatgcaaccctacc

SEQ ID NO: 100064 - DNA, 22 bp, synthetic construct
  misc_feature 1..22: note = chemically synthesized
  source 1..22: mol_type = other DNA
atgcaaccctaccttctcaata

SEQ ID NO: 100065 - DNA, 22 bp, synthetic construct
  misc_feature 1..22: note = chemically synthesized
  source 1..22: mol_type = other DNA
ccttctcaatatcacttcttca

SEQ ID NO: 100066 - DNA, 22 bp, synthetic construct
  misc_feature 1..22: note = chemically synthesized
  source 1..22: mol_type = other DNA
ctcaatatcacttcttcactta

SEQ ID NO: 100067 - DNA, 22 bp, synthetic construct
  misc_feature 1..22: note = chemically synthesized
  source 1..22: mol_type = other DNA
tcaatatcacttcttcacttag

SEQ ID NO: 100068 - DNA, 22 bp, synthetic construct
  misc_feature 1..22: note = chemically synthesized
  source 1..22: mol_type = other DNA
aatatcacttcttcacttagaa

SEQ ID NO: 100069 - DNA, 22 bp, synthetic construct
  misc_feature 1..22: note = chemically synthesized
  source 1..22: mol_type = other DNA
cttcacttagaaaaaaccagcc

SEQ ID NO: 100070 - DNA, 22 bp, synthetic construct
  misc_feature 1..22: note = chemically synthesized
  source 1..22: mol_type = other DNA
ttcacttagaaaaaaccagcct

SEQ ID NO: 100071 - DNA, 22 bp, synthetic construct
  misc_feature 1..22: note = chemically synthesized
  source 1..22: mol_type = other DNA
cacttagaaaaaaccagcctta

SEQ ID NO: 100072 - DNA, 22 bp, synthetic construct
  misc_feature 1..22: note = chemically synthesized
  source 1..22: mol_type = other DNA
acttagaaaaaaccagccttag

SEQ ID NO: 100073 - DNA, 22 bp, synthetic construct
  misc_feature 1..22: note = chemically synthesized
  source 1..22: mol_type = other DNA
agaaaaaaccagccttagctgt

SEQ ID NO: 100074 - DNA, 22 bp, synthetic construct
  misc_feature 1..22: note = chemically synthesized
  source 1..22: mol_type = other DNA
gaaaaaaccagccttagctgtc

SEQ ID NO: 100075 - DNA, 22 bp, synthetic construct
  misc_feature 1..22: note = chemically synthesized
  source 1..22: mol_type = other DNA
agctgtctgctatgaatccttt

SEQ ID NO: 100076 - DNA, 22 bp, synthetic construct
  misc_feature 1..22: note = chemically synthesized
  source 1..22: mol_type = other DNA
gctgtctgctatgaatcctttc

SEQ ID NO: 100077 - DNA, 22 bp, synthetic construct
  misc_feature 1..22: note = chemically synthesized
  source 1..22: mol_type = other DNA
tctgctatgaatcctttcaaaa

SEQ ID NO: 100078 - DNA, 22 bp, synthetic construct
  misc_feature 1..22: note = chemically synthesized
  source 1..22: mol_type = other DNA
ctatgaatcctttcaaaatata

SEQ ID NO: 100079 - DNA, 22 bp, synthetic construct
  misc_feature 1..22: note = chemically synthesized
  source 1..22: mol_type = other DNA
tgaatcctttcaaaatatactt

SEQ ID NO: 100080 - DNA, 22 bp, synthetic construct
  misc_feature 1..22: note = chemically synthesized
  source 1..22: mol_type = other DNA
tcaaaatatacttctgagaaat

SEQ ID NO: 100081 - DNA, 22 bp, synthetic construct
  misc_feature 1..22: note = chemically synthesized
  source 1..22: mol_type = other DNA
caaaatatacttctgagaaatg

SEQ ID NO: 100082 - DNA, 22 bp, synthetic construct
  misc_feature 1..22: note = chemically synthesized
  source 1..22: mol_type = other DNA
aaaatatacttctgagaaatga

SEQ ID NO: 100083 - DNA, 22 bp, synthetic construct
  misc_feature 1..22: note = chemically synthesized
  source 1..22: mol_type = other DNA
ctgagaaatgagagagagaaat

SEQ ID NO: 100084 - DNA, 22 bp, synthetic construct
  misc_feature 1..22: note = chemically synthesized
  source 1..22: mol_type = other DNA
tgagaaatgagagagagaaatg

SEQ ID NO: 100085 - DNA, 22 bp, synthetic construct
  misc_feature 1..22: note = chemically synthesized
  source 1..22: mol_type = other DNA
agaaatgagagagagaaatggg

SEQ ID NO: 100086 - DNA, 22 bp, synthetic construct
  misc_feature 1..22: note = chemically synthesized
  source 1..22: mol_type = other DNA
aattattcttttctctgtctct

SEQ ID NO: 100087 - DNA, 22 bp, synthetic construct
  misc_feature 1..22: note = chemically synthesized
  source 1..22: mol_type = other DNA
ttcttttctctgtctcttgaaa

SEQ ID NO: 100088 - DNA, 22 bp, synthetic construct
  misc_feature 1..22: note = chemically synthesized
  source 1..22: mol_type = other DNA
ttttctctgtctcttgaaagag

SEQ ID NO: 100089 - DNA, 22 bp, synthetic construct
  misc_feature 1..22: note = chemically synthesized
  source 1..22: mol_type = other DNA
ttctctgtctcttgaaagagct

SEQ ID NO: 100090 - DNA, 22 bp, synthetic construct
  misc_feature 1..22: note = chemically synthesized
  source 1..22: mol_type = other DNA
tctctgtctcttgaaagagctc

SEQ ID NO: 100091 - DNA, 22 bp, synthetic construct
  misc_feature 1..22: note = chemically synthesized
  source 1..22: mol_type = other DNA
ctctgtctcttgaaagagctct

SEQ ID NO: 100092 - DNA, 22 bp, synthetic construct
  misc_feature 1..22: note = chemically synthesized
  source 1..22: mol_type = other DNA
tctgtctcttgaaagagctctt

SEQ ID NO: 100093 - DNA, 22 bp, synthetic construct
  misc_feature 1..22: note = chemically synthesized
  source 1..22: mol_type = other DNA
tgtctcttgaaagagctctttc

SEQ ID NO: 100094 - DNA, 22 bp, synthetic construct
  misc_feature 1..22: note = chemically synthesized
  source 1..22: mol_type = other DNA
tctcttgaaagagctctttcca

SEQ ID NO: 100095 - DNA, 22 bp, synthetic construct
  misc_feature 1..22: note = chemically synthesized
  source 1..22: mol_type = other DNA
ttgaaagagctctttccattac

SEQ ID NO: 100096 - DNA, 22 bp, synthetic construct
  misc_feature 1..22: note = chemically synthesized
  source 1..22: mol_type = other DNA
gaaagagctctttccattacat

SEQ ID NO: 100097 - DNA, 22 bp, synthetic construct
  misc_feature 1..22: note = chemically synthesized
  source 1..22: mol_type = other DNA
aaagagctctttccattacatt

SEQ ID NO: 100098 - DNA, 22 bp, synthetic construct
  misc_feature 1..22: note = chemically synthesized
  source 1..22: mol_type = other DNA
tttccattacattgaatcaaag

SEQ ID NO: 100099 - DNA, 22 bp, synthetic construct
  misc_feature 1..22: note = chemically synthesized
  source 1..22: mol_type = other DNA
tccattacattgaatcaaaggt

SEQ ID NO: 100100 - DNA, 22 bp, synthetic construct
  misc_feature 1..22: note = chemically synthesized
  source 1..22: mol_type = other DNA
ccattacattgaatcaaaggta

SEQ ID NO: 100101 - DNA, 22 bp, synthetic construct
  misc_feature 1..22: note = chemically synthesized
  source 1..22: mol_type = other DNA
cattacattgaatcaaaggtaa

SEQ ID NO: 100102 - DNA, 22 bp, synthetic construct
  misc_feature 1..22: note = chemically synthesized
  source 1..22: mol_type = other DNA
cattgaatcaaaggtaatgttg

SEQ ID NO: 100103 - DNA, 22 bp, synthetic construct
  misc_feature 1..22: note = chemically synthesized
  source 1..22: mol_type = other DNA
aatcaaaggtaatgttgccatt

SEQ ID NO: 100104 - DNA, 22 bp, synthetic construct
  misc_feature 1..22: note = chemically synthesized
  source 1..22: mol_type = other DNA
ccatttctggactcttgaaata

SEQ ID NO: 100105 - DNA, 22 bp, synthetic construct
  misc_feature 1..22: note = chemically synthesized
  source 1..22: mol_type = other DNA
ctggactcttgaaataaagaaa

SEQ ID NO: 100106 - DNA, 22 bp, synthetic construct
  misc_feature 1..22: note = chemically synthesized
  source 1..22: mol_type = other DNA
tggactcttgaaataaagaaag

SEQ ID NO: 100107 - DNA, 22 bp, synthetic construct
  misc_feature 1..22: note = chemically synthesized
  source 1..22: mol_type = other DNA
gactcttgaaataaagaaagac

SEQ ID NO: 100108 - DNA, 22 bp, synthetic construct
  misc_feature 1..22: note = chemically synthesized
  source 1..22: mol_type = other DNA
ttgaaataaagaaagaccgatg

SEQ ID NO: 100109 - DNA, 22 bp, synthetic construct
  misc_feature 1..22: note = chemically synthesized
  source 1..22: mol_type = other DNA
gaaataaagaaagaccgatgta

SEQ ID NO: 100110 - DNA, 22 bp, synthetic construct
  misc_feature 1..22: note = chemically synthesized
  source 1..22: mol_type = other DNA
aaataaagaaagaccgatgtat

SEQ ID NO: 100111 - DNA, 22 bp, synthetic construct
  misc_feature 1..22: note = chemically synthesized
  source 1..22: mol_type = other DNA
tgaaagtctatggcattttcaa

SEQ ID NO: 100112 - DNA, 22 bp, synthetic construct
  misc_feature 1..22: note = chemically synthesized
  source 1..22: mol_type = other DNA
gaaagtctatggcattttcaaa

SEQ ID NO: 100113 - DNA, 22 bp, synthetic construct
  misc_feature 1..22: note = chemically synthesized
  source 1..22: mol_type = other DNA
aaagtctatggcattttcaaaa

SEQ ID NO: 100114 - DNA, 22 bp, synthetic construct
  misc_feature 1..22: note = chemically synthesized
  source 1..22: mol_type = other DNA
tggcattttcaaaatgcaaggt

SEQ ID NO: 100115 - DNA, 22 bp, synthetic construct
  misc_feature 1..22: note = chemically synthesized
  source 1..22: mol_type = other DNA
tcaaaatgcaaggtgatgtctt

SEQ ID NO: 100116 - DNA, 22 bp, synthetic construct
  misc_feature 1..22: note = chemically synthesized
  source 1..22: mol_type = other DNA
caaaatgcaaggtgatgtctta

SEQ ID NO: 100117 - DNA, 22 bp, synthetic construct
  misc_feature 1..22: note = chemically synthesized
  source 1..22: mol_type = other DNA
aaaatgcaaggtgatgtcttac

SEQ ID NO: 100118 - DNA, 22 bp, synthetic construct
  misc_feature 1..22: note = chemically synthesized
  source 1..22: mol_type = other DNA
actaactagcctttgctttatt

SEQ ID NO: 100119 - DNA, 22 bp, synthetic construct
  misc_feature 1..22: note = chemically synthesized
  source 1..22: mol_type = other DNA
ctaactagcctttgctttatta

SEQ ID NO: 100120 - DNA, 22 bp, synthetic construct
  misc_feature 1..22: note = chemically synthesized
  source 1..22: mol_type = other DNA
actagcctttgctttattatta

SEQ ID NO: 100121 - DNA, 22 bp, synthetic construct
  misc_feature 1..22: note = chemically synthesized
  source 1..22: mol_type = other DNA
gcctttgctttattattagaaa

SEQ ID NO: 100122 - DNA, 22 bp, synthetic construct
  misc_feature 1..22: note = chemically synthesized
  source 1..22: mol_type = other DNA
tgctttattattagaaatgggg

SEQ ID NO: 100123 - DNA, 22 bp, synthetic construct
  misc_feature 1..22: note = chemically synthesized
  source 1..22: mol_type = other DNA
gctttattattagaaatgggga

SEQ ID NO: 100124 - DNA, 22 bp, synthetic construct
  misc_feature 1..22: note = chemically synthesized
  source 1..22: mol_type = other DNA
ctttattattagaaatggggaa

SEQ ID NO: 100125 - DNA, 22 bp, synthetic construct
  misc_feature 1..22: note = chemically synthesized
  source 1..22: mol_type = other DNA
tattattagaaatggggaagtg

SEQ ID NO: 100126 - DNA, 22 bp, synthetic construct
  misc_feature 1..22: note = chemically synthesized
  source 1..22: mol_type = other DNA
attattagaaatggggaagtga

SEQ ID NO: 100127 - DNA, 22 bp, synthetic construct
  misc_feature 1..22: note = chemically synthesized
  source 1..22: mol_type = other DNA
ttattagaaatggggaagtgag

SEQ ID NO: 100128 - DNA, 22 bp, synthetic construct
  misc_feature 1..22: note = chemically synthesized
  source 1..22: mol_type = other DNA
ttagaaatggggaagtgagtat

SEQ ID NO: 100129 - DNA, 22 bp, synthetic construct
  misc_feature 1..22: note = chemically synthesized
  source 1..22: mol_type = other DNA
gaaatggggaagtgagtataga

SEQ ID NO: 100130 - DNA, 22 bp, synthetic construct
  misc_feature 1..22: note = chemically synthesized
  source 1..22: mol_type = other DNA
tatcaggagatatattaggaaa

SEQ ID NO: 100131 - DNA, 22 bp, synthetic construct
  misc_feature 1..22: note = chemically synthesized
  source 1..22: mol_type = other DNA
atcaggagatatattaggaaaa

SEQ ID NO: 100132 - DNA, 22 bp, synthetic construct
  misc_feature 1..22: note = chemically synthesized
  source 1..22: mol_type = other DNA
tcaggagatatattaggaaaaa

SEQ ID NO: 100133 - DNA, 22 bp, synthetic construct
  misc_feature 1..22: note = chemically synthesized
  source 1..22: mol_type = other DNA
ggaaaaagggaaactggagaaa

SEQ ID NO: 100134 - DNA, 22 bp, synthetic construct
  misc_feature 1..22: note = chemically synthesized
  source 1..22: mol_type = other DNA
gagaaactgggaggagtatcca

SEQ ID NO: 100135 - DNA, 22 bp, synthetic construct
  misc_feature 1..22: note = chemically synthesized
  source 1..22: mol_type = other DNA
ggaggagtatccagatgtcctg

SEQ ID NO: 100136 - DNA, 22 bp, synthetic construct
  misc_feature 1..22: note = chemically synthesized
  source 1..22: mol_type = other DNA
tccctgtaaggtgggggcaccc

SEQ ID NO: 100137 - DNA, 22 bp, synthetic construct
  misc_feature 1..22: note = chemically synthesized
  source 1..22: mol_type = other DNA
taaggtgggggcacccaccttc

SEQ ID NO: 100138 - DNA, 22 bp, synthetic construct
  misc_feature 1..22: note = chemically synthesized
  source 1..22: mol_type = other DNA
caatcaaaagggctccttaaca

SEQ ID NO: 100139 - DNA, 22 bp, synthetic construct
  misc_feature 1..22: note = chemically synthesized
  source 1..22: mol_type = other DNA
aatcaaaagggctccttaacaa

SEQ ID NO: 100140 - DNA, 22 bp, synthetic construct
  misc_feature 1..22: note = chemically synthesized
  source 1..22: mol_type = other DNA
cttaacaacttccttgcttggg

SEQ ID NO: 100141 - DNA, 22 bp, synthetic construct
  misc_feature 1..22: note = chemically synthesized
  source 1..22: mol_type = other DNA
aacaacttccttgcttggggct

SEQ ID NO: 100142 - DNA, 22 bp, synthetic construct
  misc_feature 1..22: note = chemically synthesized
  source 1..22: mol_type = other DNA
acaacttccttgcttggggctc

SEQ ID NO: 100143 - DNA, 22 bp, synthetic construct
  misc_feature 1..22: note = chemically synthesized
  source 1..22: mol_type = other DNA
ccttgcttggggctccaccatc

SEQ ID NO: 100144 - DNA, 22 bp, synthetic construct
  misc_feature 1..22: note = chemically synthesized
  source 1..22: mol_type = other DNA
cttgcttggggctccaccatct

SEQ ID NO: 100145 - DNA, 22 bp, synthetic construct
  misc_feature 1..22: note = chemically synthesized
  source 1..22: mol_type = other DNA
gcttggggctccaccatcttgg

SEQ ID NO: 100146 - DNA, 22 bp, synthetic construct
  misc_feature 1..22: note = chemically synthesized
  source 1..22: mol_type = other DNA
cttggggctccaccatcttgga

SEQ ID NO: 100147 - DNA, 22 bp, synthetic construct
  misc_feature 1..22: note = chemically synthesized
  source 1..22: mol_type = other DNA
ggggctccaccatcttggacca

SEQ ID NO: 100148 - DNA, 22 bp, synthetic construct
  misc_feature 1..22: note = chemically synthesized
  source 1..22: mol_type = other DNA
gggctccaccatcttggaccat

SEQ ID NO: 100149 - DNA, 22 bp, synthetic construct
  misc_feature 1..22: note = chemically synthesized
  source 1..22: mol_type = other DNA
caccatcttggaccattagctc

SEQ ID NO: 100150 - DNA, 22 bp, synthetic construct
  misc_feature 1..22: note = chemically synthesized
  source 1..22: mol_type = other DNA
ggaccattagctccacaggtat

SEQ ID NO: 100151 - DNA, 22 bp, synthetic construct
  misc_feature 1..22: note = chemically synthesized
  source 1..22: mol_type = other DNA
gaccattagctccacaggtatc

SEQ ID NO: 100152 - DNA, 22 bp, synthetic construct
  misc_feature 1..22: note = chemically synthesized
  source 1..22: mol_type = other DNA
gctccacaggtatcttcttccc

SEQ ID NO: 100153 - DNA, 22 bp, synthetic construct
  misc_feature 1..22: note = chemically synthesized
  source 1..22: mol_type = other DNA
cacaggtatcttcttccctcta

SEQ ID NO: 100154 - DNA, 22 bp, synthetic construct
  misc_feature 1..22: note = chemically synthesized
  source 1..22: mol_type = other DNA
cttccctctagtggtcataaca

SEQ ID NO: 100155 - DNA, 22 bp, synthetic construct
  misc_feature 1..22: note = chemically synthesized
  source 1..22: mol_type = other DNA
ttccctctagtggtcataacag

SEQ ID NO: 100156 - DNA, 22 bp, synthetic construct
  misc_feature 1..22: note = chemically synthesized
  source 1..22: mol_type = other DNA
ccctctagtggtcataacagca

SEQ ID NO: 100157 - DNA, 22 bp, synthetic construct
  misc_feature 1..22: note = chemically synthesized
  source 1..22: mol_type = other DNA
cctctagtggtcataacagcag

SEQ ID NO: 100158 - DNA, 22 bp, synthetic construct
  misc_feature 1..22: note = chemically synthesized
  source 1..22: mol_type = other DNA
tagtggtcataacagcagcttc

SEQ ID NO: 100159 - DNA, 22 bp, synthetic construct
  misc_feature 1..22: note = chemically synthesized
  source 1..22: mol_type = other DNA
gtggtcataacagcagcttcag

SEQ ID NO: 100160 - DNA, 22 bp, synthetic construct
  misc_feature 1..22: note = chemically synthesized
  source 1..22: mol_type = other DNA
cagctacctctctaaagagtcc

SEQ ID NO: 100161 - DNA, 22 bp, synthetic construct
  misc_feature 1..22: note = chemically synthesized
  source 1..22: mol_type = other DNA
agctacctctctaaagagtcct

SEQ ID NO: 100162 - DNA, 22 bp, synthetic construct
  misc_feature 1..22: note = chemically synthesized
  source 1..22: mol_type = other DNA
cctctctaaagagtcctgccag

SEQ ID NO: 100163 - DNA, 22 bp, synthetic construct
  misc_feature 1..22: note = chemically synthesized
  source 1..22: mol_type = other DNA
tctaaagagtcctgccagatat

SEQ ID NO: 100164 - DNA, 22 bp, synthetic construct
  misc_feature 1..22: note = chemically synthesized
  source 1..22: mol_type = other DNA
taaagagtcctgccagatatag

SEQ ID NO: 100165 - DNA, 22 bp, synthetic construct
  misc_feature 1..22: note = chemically synthesized
  source 1..22: mol_type = other DNA
aagagtcctgccagatataggt

SEQ ID NO: 100166 - DNA, 22 bp, synthetic construct
  misc_feature 1..22: note = chemically synthesized
  source 1..22: mol_type = other DNA
ccagatataggtcaggaaatat

SEQ ID NO: 100167 - DNA, 22 bp, synthetic construct
  misc_feature 1..22: note = chemically synthesized
  source 1..22: mol_type = other DNA
ataaaaagagaaacattttgac

SEQ ID NO: 100168 - DNA, 22 bp, synthetic construct
  misc_feature 1..22: note = chemically synthesized
  source 1..22: mol_type = other DNA
tgactgtagttgtttgtttttt

SEQ ID NO: 100169 - DNA, 22 bp, synthetic construct
  misc_feature 1..22: note = chemically synthesized
  source 1..22: mol_type = other DNA
gactgtagttgtttgttttttg

SEQ ID NO: 100170 - DNA, 22 bp, synthetic construct
  misc_feature 1..22: note = chemically synthesized
  source 1..22: mol_type = other DNA
actgtagttgtttgttttttgt

SEQ ID NO: 100171 - DNA, 22 bp, synthetic construct
  misc_feature 1..22: note = chemically synthesized
  source 1..22: mol_type = other DNA
tagttgtttgttttttgtcatt

SEQ ID NO: 100172 - DNA, 22 bp, synthetic construct
  misc_feature 1..22: note = chemically synthesized
  source 1..22: mol_type = other DNA
tttgttttttgtcattgtgact

SEQ ID NO: 100173 - DNA, 22 bp, synthetic construct
  misc_feature 1..22: note = chemically synthesized
  source 1..22: mol_type = other DNA
gttttttgtcattgtgactatc

SEQ ID NO: 100174 - DNA, 22 bp, synthetic construct
  misc_feature 1..22: note = chemically synthesized
  source 1..22: mol_type = other DNA
ttttttgtcattgtgactatca

SEQ ID NO: 100175 - DNA, 22 bp, synthetic construct
  misc_feature 1..22: note = chemically synthesized
  source 1..22: mol_type = other DNA
tttgtcattgtgactatcaata

SEQ ID NO: 100176 - DNA, 22 bp, synthetic construct
  misc_feature 1..22: note = chemically synthesized
  source 1..22: mol_type = other DNA
ttgtcattgtgactatcaataa

SEQ ID NO: 100177 - DNA, 22 bp, synthetic construct
  misc_feature 1..22: note = chemically synthesized
  source 1..22: mol_type = other DNA
tgtcattgtgactatcaataac

SEQ ID NO: 100178 - DNA, 22 bp, synthetic construct
  misc_feature 1..22: note = chemically synthesized
  source 1..22: mol_type = other DNA
gtcattgtgactatcaataaca

SEQ ID NO: 100179 - DNA, 22 bp, synthetic construct
  misc_feature 1..22: note = chemically synthesized
  source 1..22: mol_type = other DNA
tcattgtgactatcaataacat

SEQ ID NO: 100180 - DNA, 22 bp, synthetic construct
  misc_feature 1..22: note = chemically synthesized
  source 1..22: mol_type = other DNA
tgactatcaataacattctcac

SEQ ID NO: 100181 - DNA, 22 bp, synthetic construct
  misc_feature 1..22: note = chemically synthesized
  source 1..22: mol_type = other DNA
tcaataacattctcactctttc

SEQ ID NO: 100182 - DNA, 22 bp, synthetic construct
  misc_feature 1..22: note = chemically synthesized
  source 1..22: mol_type = other DNA
tcactctttcatcagtaatcac

SEQ ID NO: 100183 - DNA, 22 bp, synthetic construct
  misc_feature 1..22: note = chemically synthesized
  source 1..22: mol_type = other DNA
actctttcatcagtaatcactc

SEQ ID NO: 100184 - DNA, 22 bp, synthetic construct
  misc_feature 1..22: note = chemically synthesized
  source 1..22: mol_type = other DNA
tttcatcagtaatcactcaggt

SEQ ID NO: 100185 - DNA, 22 bp, synthetic construct
  misc_feature 1..22: note = chemically synthesized
  source 1..22: mol_type = other DNA
tcatcagtaatcactcaggtta

SEQ ID NO: 100186 - DNA, 22 bp, synthetic construct
  misc_feature 1..22: note = chemically synthesized
  source 1..22: mol_type = other DNA
catcagtaatcactcaggttat

SEQ ID NO: 100187 - DNA, 22 bp, synthetic construct
  misc_feature 1..22: note = chemically synthesized
  source 1..22: mol_type = other DNA
atcagtaatcactcaggttatt

SEQ ID NO: 100188 - DNA, 22 bp, synthetic construct
  misc_feature 1..22: note = chemically synthesized
  source 1..22: mol_type = other DNA
aggttattctgtgaccaacaga

SEQ ID NO: 100189 - DNA, 22 bp, synthetic construct
  misc_feature 1..22: note = chemically synthesized
  source 1..22: mol_type = other DNA
ttctgtgaccaacagactgtgg

SEQ ID NO: 100190 - DNA, 22 bp, synthetic construct
  misc_feature 1..22: note = chemically synthesized
  source 1..22: mol_type = other DNA
tgtgaccaacagactgtgggaa

SEQ ID NO: 100191 - DNA, 22 bp, synthetic construct
  misc_feature 1..22: note = chemically synthesized
  source 1..22: mol_type = other DNA
tgaccaacagactgtgggaaaa

SEQ ID NO: 100192 - DNA, 22 bp, synthetic construct
  misc_feature 1..22: note = chemically synthesized
  source 1..22: mol_type = other DNA
tgggaaaaatcagagaaggagg

SEQ ID NO: 100193 - DNA, 22 bp, synthetic construct
  misc_feature 1..22: note = chemically synthesized
  source 1..22: mol_type = other DNA
atgcttactagcctaaactgaa

SEQ ID NO: 100194 - DNA, 22 bp, synthetic construct
  misc_feature 1..22: note = chemically synthesized
  source 1..22: mol_type = other DNA
actagcctaaactgaaattgct

SEQ ID NO: 100195 - DNA, 22 bp, synthetic construct
  misc_feature 1..22: note = chemically synthesized
  source 1..22: mol_type = other DNA
ctagcctaaactgaaattgcta

SEQ ID NO: 100196 - DNA, 22 bp, synthetic construct
  misc_feature 1..22: note = chemically synthesized
  source 1..22: mol_type = other DNA
gcctaaactgaaattgctatag

SEQ ID NO: 100197 - DNA, 22 bp, synthetic construct
  misc_feature 1..22: note = chemically synthesized
  source 1..22: mol_type = other DNA
aactgaaattgctatagcagag

SEQ ID NO: 100198 - DNA, 22 bp, synthetic construct
  misc_feature 1..22: note = chemically synthesized
  source 1..22: mol_type = other DNA
aaattgctatagcagagtgaac

SEQ ID NO: 100199 - DNA, 22 bp, synthetic construct
  misc_feature 1..22: note = chemically synthesized
  source 1..22: mol_type = other DNA
ctatagcagagtgaaccagaag

SEQ ID NO: 100200 - DNA, 22 bp, synthetic construct
  misc_feature 1..22: note = chemically synthesized
  source 1..22: mol_type = other DNA
tagcagagtgaaccagaaggtt

SEQ ID NO: 100201 - DNA, 22 bp, synthetic construct
  misc_feature 1..22: note = chemically synthesized
  source 1..22: mol_type = other DNA
acagatattttccacaaagagt

SEQ ID NO: 100202 - DNA, 22 bp, synthetic construct
  misc_feature 1..22: note = chemically synthesized
  source 1..22: mol_type = other DNA
cagatattttccacaaagagta

SEQ ID NO: 100203 - DNA, 22 bp, synthetic construct
  misc_feature 1..22: note = chemically synthesized
  source 1..22: mol_type = other DNA
tccacaaagagtaaaaggattg

SEQ ID NO: 100204 - DNA, 22 bp, synthetic construct
  misc_feature 1..22: note = chemically synthesized
  source 1..22: mol_type = other DNA
ccacaaagagtaaaaggattga

SEQ ID NO: 100205 - DNA, 22 bp, synthetic construct
  misc_feature 1..22: note = chemically synthesized
  source 1..22: mol_type = other DNA
cacaaagagtaaaaggattgaa

SEQ ID NO: 100206 - DNA, 22 bp, synthetic construct
  misc_feature 1..22: note = chemically synthesized
  source 1..22: mol_type = other DNA
aagccttctccagatcaatgca

SEQ ID NO: 100207 - DNA, 22 bp, synthetic construct
  misc_feature 1..22: note = chemically synthesized
  source 1..22: mol_type = other DNA
ctccagatcaatgcataggaaa

SEQ ID NO: 100208 - DNA, 22 bp, synthetic construct
  misc_feature 1..22: note = chemically synthesized
  source 1..22: mol_type = other DNA
tccagatcaatgcataggaaat

SEQ ID NO: 100209 - DNA, 22 bp, synthetic construct
  misc_feature 1..22: note = chemically synthesized
  source 1..22: mol_type = other DNA
cagatcaatgcataggaaataa

SEQ ID NO: 100210 - DNA, 22 bp, synthetic construct
  misc_feature 1..22: note = chemically synthesized
  source 1..22: mol_type = other DNA
tgacgaacaacattaggataag

SEQ ID NO: 100211 - DNA, 22 bp, synthetic construct
  misc_feature 1..22: note = chemically synthesized
  source 1..22: mol_type = other DNA
ggataagtccatatcaattttt

SEQ ID NO: 100212 - DNA, 22 bp, synthetic construct
  misc_feature 1..22: note = chemically synthesized
  source 1..22: mol_type = other DNA
ttaatccagtcataagcacaga

SEQ ID NO: 100213 - DNA, 22 bp, synthetic construct
  misc_feature 1..22: note = chemically synthesized
  source 1..22: mol_type = other DNA
taatccagtcataagcacagac

SEQ ID NO: 100214 - DNA, 22 bp, synthetic construct
  misc_feature 1..22: note = chemically synthesized
  source 1..22: mol_type = other DNA
aatccagtcataagcacagact

SEQ ID NO: 100215 - DNA, 22 bp, synthetic construct
  misc_feature 1..22: note = chemically synthesized
  source 1..22: mol_type = other DNA
atccagtcataagcacagacta

SEQ ID NO: 100216 - DNA, 22 bp, synthetic construct
  misc_feature 1..22: note = chemically synthesized
  source 1..22: mol_type = other DNA
cgtgaagcacgtccaagtgaag

SEQ ID NO: 100217 - DNA, 22 bp, synthetic construct
  misc_feature 1..22: note = chemically synthesized
  source 1..22: mol_type = other DNA
gatcaagaatagcagaaaaagg

SEQ ID NO: 100218 - DNA, 22 bp, synthetic construct
  misc_feature 1..22: note = chemically synthesized
  source 1..22: mol_type = other DNA
atcaagaatagcagaaaaagga

SEQ ID NO: 100219 - DNA, 22 bp, synthetic construct
  misc_feature 1..22: note = chemically synthesized
  source 1..22: mol_type = other DNA
acaaatgattgtcatgccaaca

SEQ ID NO: 100220 - DNA, 22 bp, synthetic construct
  misc_feature 1..22: note = chemically synthesized
  source 1..22: mol_type = other DNA
tcatgccaacagtacagataac

SEQ ID NO: 100221 - DNA, 22 bp, synthetic construct
  misc_feature 1..22: note = chemically synthesized
  source 1..22: mol_type = other DNA
tgctaataaaggtagaggcata

SEQ ID NO: 100222 - DNA, 22 bp, synthetic construct
  misc_feature 1..22: note = chemically synthesized
  source 1..22: mol_type = other DNA
ctaataaaggtagaggcataat

SEQ ID NO: 100223 - DNA, 22 bp, synthetic construct
  misc_feature 1..22: note = chemically synthesized
  source 1..22: mol_type = other DNA
ataaaggtagaggcataataca

SEQ ID NO: 100224 - DNA, 22 bp, synthetic construct
  misc_feature 1..22: note = chemically synthesized
  source 1..22: mol_type = other DNA
catagtagttaaaggacatggc

SEQ ID NO: 100225 - DNA, 22 bp, synthetic construct
  misc_feature 1..22: note = chemically synthesized
  source 1..22: mol_type = other DNA
aaggacatggccatcagtacag

SEQ ID NO: 100226 - DNA, 22 bp, synthetic construct
  misc_feature 1..22: note = chemically synthesized
  source 1..22: mol_type = other DNA
cataaaggagaacctaaagagg

SEQ ID NO: 100227 - DNA, 22 bp, synthetic construct
  misc_feature 1..22: note = chemically synthesized
  source 1..22: mol_type = other DNA
aagaggaagaataatttgtcag

SEQ ID NO: 100228 - DNA, 22 bp, synthetic construct
  misc_feature 1..22: note = chemically synthesized
  source 1..22: mol_type = other DNA
gtcagaagcttaaaagctgaac

SEQ ID NO: 100229 - DNA, 22 bp, synthetic construct
  misc_feature 1..22: note = chemically synthesized
  source 1..22: mol_type = other DNA
tcagaagcttaaaagctgaact

SEQ ID NO: 100230 - DNA, 22 bp, synthetic construct
  misc_feature 1..22: note = chemically synthesized
  source 1..22: mol_type = other DNA
aaaagctgaactctgaggcatt

SEQ ID NO: 100231 - DNA, 22 bp, synthetic construct
  misc_feature 1..22: note = chemically synthesized
  source 1..22: mol_type = other DNA
aaagctgaactctgaggcatta

SEQ ID NO: 100232 - DNA, 22 bp, synthetic construct
  misc_feature 1..22: note = chemically synthesized
  source 1..22: mol_type = other DNA
aactctgaggcattaaactaca

SEQ ID NO: 100233 - DNA, 22 bp, synthetic construct
  misc_feature 1..22: note = chemically synthesized
  source 1..22: mol_type = other DNA
tgaggcattaaactacaatatc

SEQ ID NO: 100234 - DNA, 22 bp, synthetic construct
  misc_feature 1..22: note = chemically synthesized
  source 1..22: mol_type = other DNA
aggcattaaactacaatatcct

SEQ ID NO: 100235 - DNA, 22 bp, synthetic construct
  misc_feature 1..22: note = chemically synthesized
  source 1..22: mol_type = other DNA
aactacaatatccttttgactg

SEQ ID NO: 100236 - DNA, 22 bp, synthetic construct
  misc_feature 1..22: note = chemically synthesized
  source 1..22: mol_type = other DNA
caatatccttttgactgtggaa

SEQ ID NO: 100237 - DNA, 22 bp, synthetic construct
  misc_feature 1..22: note = chemically synthesized
  source 1..22: mol_type = other DNA
ttgactgtggaaagggtggtga

SEQ ID NO: 100238 - DNA, 22 bp, synthetic construct
  misc_feature 1..22: note = chemically synthesized
  source 1..22: mol_type = other DNA
tgactgtggaaagggtggtgaa

SEQ ID NO: 100239 - DNA, 22 bp, synthetic construct
  misc_feature 1..22: note = chemically synthesized
  source 1..22: mol_type = other DNA
gactgtggaaagggtggtgaaa

SEQ ID NO: 100240 - DNA, 22 bp, synthetic construct
  misc_feature 1..22: note = chemically synthesized
  source 1..22: mol_type = other DNA
actgtggaaagggtggtgaaag

SEQ ID NO: 100241 - DNA, 22 bp, synthetic construct
  misc_feature 1..22: note = chemically synthesized
  source 1..22: mol_type = other DNA
tggaaagggtggtgaaaggaaa

SEQ ID NO: 100242 - DNA, 22 bp, synthetic construct
  misc_feature 1..22: note = chemically synthesized
  source 1..22: mol_type = other DNA
aaggacatttgagccaacatag

SEQ ID NO: 100243 - DNA, 22 bp, synthetic construct
  misc_feature 1..22: note = chemically synthesized
  source 1..22: mol_type = other DNA
gagccaacatagagaggaacat

SEQ ID NO: 100244 - DNA, 22 bp, synthetic construct
  misc_feature 1..22: note = chemically synthesized
  source 1..22: mol_type = other DNA
agccaacatagagaggaacatt

SEQ ID NO: 100245 - DNA, 22 bp, synthetic construct
  misc_feature 1..22: note = chemically synthesized
  source 1..22: mol_type = other DNA
gcttggtgagggatatctgtcc

SEQ ID NO: 100246 - DNA, 22 bp, synthetic construct
  misc_feature 1..22: note = chemically synthesized
  source 1..22: mol_type = other DNA
ggtgagggatatctgtcctgat

SEQ ID NO: 100247 - DNA, 22 bp, synthetic construct
  misc_feature 1..22: note = chemically synthesized
  source 1..22: mol_type = other DNA
gtgagggatatctgtcctgatg

SEQ ID NO: 100248 - DNA, 22 bp, synthetic construct
  misc_feature 1..22: note = chemically synthesized
  source 1..22: mol_type = other DNA
tcctgatgttgtccaggatggt

SEQ ID NO: 100249 - DNA, 22 bp, synthetic construct
  misc_feature 1..22: note = chemically synthesized
  source 1..22: mol_type = other DNA
atgttgtccaggatggtgatga

SEQ ID NO: 100250 - DNA, 22 bp, synthetic construct
  misc_feature 1..22: note = chemically synthesized
  source 1..22: mol_type = other DNA
tccaggatggtgatgataccca

SEQ ID NO: 100251 - DNA, 22 bp, synthetic construct
  misc_feature 1..22: note = chemically synthesized
  source 1..22: mol_type = other DNA
gacaaagaggcatcaaagatag

SEQ ID NO: 100252 - DNA, 22 bp, synthetic construct
  misc_feature 1..22: note = chemically synthesized
  source 1..22: mol_type = other DNA
gtaaggatgaaatagaacgttt

SEQ ID NO: 100253 - DNA, 22 bp, synthetic construct
  misc_feature 1..22: note = chemically synthesized
  source 1..22: mol_type = other DNA
taaggatgaaatagaacgtttt

SEQ ID NO: 100254 - DNA, 22 bp, synthetic construct
  misc_feature 1..22: note = chemically synthesized
  source 1..22: mol_type = other DNA
tttgcgttagtcaccgtgagga

SEQ ID NO: 100255 - DNA, 22 bp, synthetic construct
  misc_feature 1..22: note = chemically synthesized
  source 1..22: mol_type = other DNA
ttgcgttagtcaccgtgaggat

SEQ ID NO: 100256 - DNA, 22 bp, synthetic construct
  misc_feature 1..22: note = chemically synthesized
  source 1..22: mol_type = other DNA
tgcgttagtcaccgtgaggatg

SEQ ID NO: 100257 - DNA, 22 bp, synthetic construct
  misc_feature 1..22: note = chemically synthesized
  source 1..22: mol_type = other DNA
gcgttagtcaccgtgaggatga

SEQ ID NO: 100258 - DNA, 22 bp, synthetic construct
  misc_feature 1..22: note = chemically synthesized
  source 1..22: mol_type = other DNA
cgttagtcaccgtgaggatgac

SEQ ID NO: 100259 - DNA, 22 bp, synthetic construct
  misc_feature 1..22: note = chemically synthesized
  source 1..22: mol_type = other DNA
gtcaccgtgaggatgaccggta

SEQ ID NO: 100260 - DNA, 22 bp, synthetic construct
  misc_feature 1..22: note = chemically synthesized
  source 1..22: mol_type = other DNA
atgcctttgttattttttatta

SEQ ID NO: 100261 - DNA, 22 bp, synthetic construct
  misc_feature 1..22: note = chemically synthesized
  source 1..22: mol_type = other DNA
tgttattttttattatttcatt

SEQ ID NO: 100262 - DNA, 22 bp, synthetic construct
  misc_feature 1..22: note = chemically synthesized
  source 1..22: mol_type = other DNA
gttattttttattatttcattt

SEQ ID NO: 100263 - DNA, 22 bp, synthetic construct
  misc_feature 1..22: note = chemically synthesized
  source 1..22: mol_type = other DNA
ttattttttattatttcatttt

SEQ ID NO: 100264 - DNA, 22 bp, synthetic construct
  misc_feature 1..22: note = chemically synthesized
  source 1..22: mol_type = other DNA
ttttttattatttcattttaaa

SEQ ID NO: 100265 - DNA, 22 bp, synthetic construct
  misc_feature 1..22: note = chemically synthesized
  source 1..22: mol_type = other DNA
tttattatttcattttaaattg

SEQ ID NO: 100266 - DNA, 22 bp, synthetic construct
  misc_feature 1..22: note = chemically synthesized
  source 1..22: mol_type = other DNA
ttattatttcattttaaattga

SEQ ID NO: 100267 - DNA, 22 bp, synthetic construct
  misc_feature 1..22: note = chemically synthesized
  source 1..22: mol_type = other DNA
tattatttcattttaaattgac

SEQ ID NO: 100268 - DNA, 22 bp, synthetic construct
  misc_feature 1..22: note = chemically synthesized
  source 1..22: mol_type = other DNA
attatttcattttaaattgaca

SEQ ID NO: 100269 - DNA, 22 bp, synthetic construct
  misc_feature 1..22: note = chemically synthesized
  source 1..22: mol_type = other DNA
ttatttcattttaaattgacaa

SEQ ID NO: 100270 - DNA, 22 bp, synthetic construct
  misc_feature 1..22: note = chemically synthesized
  source 1..22: mol_type = other DNA
tttcattttaaattgacaaata

SEQ ID NO: 100271 - DNA, 22 bp, synthetic construct
  misc_feature 1..22: note = chemically synthesized
  source 1..22: mol_type = other DNA
cattttaaattgacaaataata

SEQ ID NO: 100272 - DNA, 22 bp, synthetic construct
  misc_feature 1..22: note = chemically synthesized
  source 1..22: mol_type = other DNA
attttaaattgacaaataataa

SEQ ID NO: 100273 - DNA, 22 bp, synthetic construct
  misc_feature 1..22: note = chemically synthesized
  source 1..22: mol_type = other DNA
taaattgacaaataataattgt

SEQ ID NO: 100274 - DNA, 22 bp, synthetic construct
  misc_feature 1..22: note = chemically synthesized
  source 1..22: mol_type = other DNA
aaattgacaaataataattgtg

SEQ ID NO: 100275 - DNA, 22 bp, synthetic construct
  misc_feature 1..22: note = chemically synthesized
  source 1..22: mol_type = other DNA
aattgacaaataataattgtgt

SEQ ID NO: 100276 - DNA, 22 bp, synthetic construct
  misc_feature 1..22: note = chemically synthesized
  source 1..22: mol_type = other DNA
acaaataataattgtgtgtatt

SEQ ID NO: 100277 - DNA, 22 bp, synthetic construct
  misc_feature 1..22: note = chemically synthesized
  source 1..22: mol_type = other DNA
tgtgtattcatggggtacaaca

SEQ ID NO: 100278 - DNA, 22 bp, synthetic construct
  misc_feature 1..22: note = chemically synthesized
  source 1..22: mol_type = other DNA
atggggtacaacatgatgcttt

SEQ ID NO: 100279 - DNA, 22 bp, synthetic construct
  misc_feature 1..22: note = chemically synthesized
  source 1..22: mol_type = other DNA
tggtgtacgtgtacaatattaa

SEQ ID NO: 100280 - DNA, 22 bp, synthetic construct
  misc_feature 1..22: note = chemically synthesized
  source 1..22: mol_type = other DNA
ggtgtacgtgtacaatattaaa

SEQ ID NO: 100281 - DNA, 22 bp, synthetic construct
  misc_feature 1..22: note = chemically synthesized
  source 1..22: mol_type = other DNA
gtgtacgtgtacaatattaaat

SEQ ID NO: 100282 - DNA, 22 bp, synthetic construct
  misc_feature 1..22: note = chemically synthesized
  source 1..22: mol_type = other DNA
aatggttaaataaggctaatta

SEQ ID NO: 100283 - DNA, 22 bp, synthetic construct
  misc_feature 1..22: note = chemically synthesized
  source 1..22: mol_type = other DNA
aataaggctaattaacaaatcc

SEQ ID NO: 100284 - DNA, 22 bp, synthetic construct
  misc_feature 1..22: note = chemically synthesized
  source 1..22: mol_type = other DNA
attaacaaatccaccacttcac

SEQ ID NO: 100285 - DNA, 22 bp, synthetic construct
  misc_feature 1..22: note = chemically synthesized
  source 1..22: mol_type = other DNA
acaaatccaccacttcacatac

SEQ ID NO: 100286 - DNA, 22 bp, synthetic construct
  misc_feature 1..22: note = chemically synthesized
  source 1..22: mol_type = other DNA
cacatacttattttttgtggtg

SEQ ID NO: 100287 - DNA, 22 bp, synthetic construct
  misc_feature 1..22: note = chemically synthesized
  source 1..22: mol_type = other DNA
acatacttattttttgtggtga

SEQ ID NO: 100288 - DNA, 22 bp, synthetic construct
  misc_feature 1..22: note = chemically synthesized
  source 1..22: mol_type = other DNA
attttttgtggtgaaaacattt

SEQ ID NO: 100289 - DNA, 22 bp, synthetic construct
  misc_feature 1..22: note = chemically synthesized
  source 1..22: mol_type = other DNA
ttttttgtggtgaaaacattta

SEQ ID NO: 100290 - DNA, 22 bp, synthetic construct
  misc_feature 1..22: note = chemically synthesized
  source 1..22: mol_type = other DNA
tttgtggtgaaaacatttaaaa

SEQ ID NO: 100291 - DNA, 22 bp, synthetic construct
  misc_feature 1..22: note = chemically synthesized
  source 1..22: mol_type = other DNA
ttgtggtgaaaacatttaaaat

SEQ ID NO: 100292 - DNA, 22 bp, synthetic construct
  misc_feature 1..22: note = chemically synthesized
  source 1..22: mol_type = other DNA
tgtggtgaaaacatttaaaatt

SEQ ID NO: 100293 - DNA, 22 bp, synthetic construct
  misc_feature 1..22: note = chemically synthesized
  source 1..22: mol_type = other DNA
gtggtgaaaacatttaaaattt

SEQ ID NO: 100294 - DNA, 22 bp, synthetic construct
  misc_feature 1..22: note = chemically synthesized
  source 1..22: mol_type = other DNA
tggtgaaaacatttaaaattta

SEQ ID NO: 100295 - DNA, 22 bp, synthetic construct
  misc_feature 1..22: note = chemically synthesized
  source 1..22: mol_type = other DNA
aaaatttacactcttcattcaa

SEQ ID NO: 100296 - DNA, 22 bp, synthetic construct
  misc_feature 1..22: note = chemically synthesized
  source 1..22: mol_type = other DNA
aaatttacactcttcattcaaa

SEQ ID NO: 100297 - DNA, 22 bp, synthetic construct
  misc_feature 1..22: note = chemically synthesized
  source 1..22: mol_type = other DNA
acactcttcattcaaaaatctg

SEQ ID NO: 100298 - DNA, 22 bp, synthetic construct
  misc_feature 1..22: note = chemically synthesized
  source 1..22: mol_type = other DNA
cactcttcattcaaaaatctgg

SEQ ID NO: 100299 - DNA, 22 bp, synthetic construct
  misc_feature 1..22: note = chemically synthesized
  source 1..22: mol_type = other DNA
ttcattcaaaaatctggaacat

SEQ ID NO: 100300 - DNA, 22 bp, synthetic construct
  misc_feature 1..22: note = chemically synthesized
  source 1..22: mol_type = other DNA
cattcaaaaatctggaacatag

SEQ ID NO: 100301 - DNA, 22 bp, synthetic construct
  misc_feature 1..22: note = chemically synthesized
  source 1..22: mol_type = other DNA
attcaaaaatctggaacatagt

SEQ ID NO: 100302 - DNA, 22 bp, synthetic construct
  misc_feature 1..22: note = chemically synthesized
  source 1..22: mol_type = other DNA
aaaaatctggaacatagttaaa

SEQ ID NO: 100303 - DNA, 22 bp, synthetic construct
  misc_feature 1..22: note = chemically synthesized
  source 1..22: mol_type = other DNA
gaacatagttaaaatgtcatat

SEQ ID NO: 100304 - DNA, 22 bp, synthetic construct
  misc_feature 1..22: note = chemically synthesized
  source 1..22: mol_type = other DNA
aaatgtcatatgtgtcaggatg

SEQ ID NO: 100305 - DNA, 22 bp, synthetic construct
  misc_feature 1..22: note = chemically synthesized
  source 1..22: mol_type = other DNA
agaaaacattgaatgattcctt

SEQ ID NO: 100306 - DNA, 22 bp, synthetic construct
  misc_feature 1..22: note = chemically synthesized
  source 1..22: mol_type = other DNA
gaaaacattgaatgattccttg

SEQ ID NO: 100307 - DNA, 22 bp, synthetic construct
  misc_feature 1..22: note = chemically synthesized
  source 1..22: mol_type = other DNA
aatgattccttgcaaatcatga

SEQ ID NO: 100308 - DNA, 22 bp, synthetic construct
  misc_feature 1..22: note = chemically synthesized
  source 1..22: mol_type = other DNA
cttgcaaatcatgaataatgat

SEQ ID NO: 100309 - DNA, 22 bp, synthetic construct
  misc_feature 1..22: note = chemically synthesized
  source 1..22: mol_type = other DNA
gcaaatcatgaataatgatcaa

SEQ ID NO: 100310 - DNA, 22 bp, synthetic construct
  misc_feature 1..22: note = chemically synthesized
  source 1..22: mol_type = other DNA
caaatcatgaataatgatcaat

SEQ ID NO: 100311 - DNA, 22 bp, synthetic construct
  misc_feature 1..22: note = chemically synthesized
  source 1..22: mol_type = other DNA
tgaaaatgagaaaattttggag

SEQ ID NO: 100312 - DNA, 22 bp, synthetic construct
  misc_feature 1..22: note = chemically synthesized
  source 1..22: mol_type = other DNA
tggagcctgaactaaaaatatc

SEQ ID NO: 100313 - DNA, 22 bp, synthetic construct
  misc_feature 1..22: note = chemically synthesized
  source 1..22: mol_type = other DNA
ggagcctgaactaaaaatatct

SEQ ID NO: 100314 - DNA, 22 bp, synthetic construct
  misc_feature 1..22: note = chemically synthesized
  source 1..22: mol_type = other DNA
gagcctgaactaaaaatatctt

SEQ ID NO: 100315 - DNA, 22 bp, synthetic construct
  misc_feature 1..22: note = chemically synthesized
  source 1..22: mol_type = other DNA
aactaaaaatatcttgatcact

SEQ ID NO: 100316 - DNA, 22 bp, synthetic construct
  misc_feature 1..22: note = chemically synthesized
  source 1..22: mol_type = other DNA
aaaatatcttgatcacttttgg

SEQ ID NO: 100317 - DNA, 22 bp, synthetic construct
  misc_feature 1..22: note = chemically synthesized
  source 1..22: mol_type = other DNA
gatcacttttggaggtcaggaa

SEQ ID NO: 100318 - DNA, 22 bp, synthetic construct
  misc_feature 1..22: note = chemically synthesized
  source 1..22: mol_type = other DNA
atcacttttggaggtcaggaat

SEQ ID NO: 100319 - DNA, 22 bp, synthetic construct
  misc_feature 1..22: note = chemically synthesized
  source 1..22: mol_type = other DNA
ttggaggtcaggaattcagatt

SEQ ID NO: 100320 - DNA, 22 bp, synthetic construct
  misc_feature 1..22: note = chemically synthesized
  source 1..22: mol_type = other DNA
tggaggtcaggaattcagattc

SEQ ID NO: 100321 - DNA, 22 bp, synthetic construct
  misc_feature 1..22: note = chemically synthesized
  source 1..22: mol_type = other DNA
ggaggtcaggaattcagattca

SEQ ID NO: 100322 - DNA, 22 bp, synthetic construct
  misc_feature 1..22: note = chemically synthesized
  source 1..22: mol_type = other DNA
gaggtcaggaattcagattcat

SEQ ID NO: 100323 - DNA, 22 bp, synthetic construct
  misc_feature 1..22: note = chemically synthesized
  source 1..22: mol_type = other DNA
agattcatttttctcggcctgt

SEQ ID NO: 100324 - DNA, 22 bp, synthetic construct
  misc_feature 1..22: note = chemically synthesized
  source 1..22: mol_type = other DNA
atttttctcggcctgtaaagaa

SEQ ID NO: 100325 - DNA, 22 bp, synthetic construct
  misc_feature 1..22: note = chemically synthesized
  source 1..22: mol_type = other DNA
ttctcggcctgtaaagaacttg

SEQ ID NO: 100326 - DNA, 22 bp, synthetic construct
  misc_feature 1..22: note = chemically synthesized
  source 1..22: mol_type = other DNA
tctcggcctgtaaagaacttga

SEQ ID NO: 100327 - DNA, 22 bp, synthetic construct
  misc_feature 1..22: note = chemically synthesized
  source 1..22: mol_type = other DNA
ctcggcctgtaaagaacttgaa

SEQ ID NO: 100328 - DNA, 22 bp, synthetic construct
  misc_feature 1..22: note = chemically synthesized
  source 1..22: mol_type = other DNA
tcggcctgtaaagaacttgaaa

SEQ ID NO: 100329 - DNA, 22 bp, synthetic construct
  misc_feature 1..22: note = chemically synthesized
  source 1..22: mol_type = other DNA
ggcctgtaaagaacttgaaatt

SEQ ID NO: 100330 - DNA, 22 bp, synthetic construct
  misc_feature 1..22: note = chemically synthesized
  source 1..22: mol_type = other DNA
taaagaacttgaaattgcatta

SEQ ID NO: 100331 - DNA, 22 bp, synthetic construct
  misc_feature 1..22: note = chemically synthesized
  source 1..22: mol_type = other DNA
gaaattgcattatagcagaatg

SEQ ID NO: 100332 - DNA, 22 bp, synthetic construct
  misc_feature 1..22: note = chemically synthesized
  source 1..22: mol_type = other DNA
aaattgcattatagcagaatgt

SEQ ID NO: 100333 - DNA, 22 bp, synthetic construct
  misc_feature 1..22: note = chemically synthesized
  source 1..22: mol_type = other DNA
cattatagcagaatgtaggcct

SEQ ID NO: 100334 - DNA, 22 bp, synthetic construct
  misc_feature 1..22: note = chemically synthesized
  source 1..22: mol_type = other DNA
tagcagaatgtaggccttgagt

SEQ ID NO: 100335 - DNA, 22 bp, synthetic construct
  misc_feature 1..22: note = chemically synthesized
  source 1..22: mol_type = other DNA
gagtggattgatgtggaagcaa

SEQ ID NO: 100336 - DNA, 22 bp, synthetic construct
  misc_feature 1..22: note = chemically synthesized
  source 1..22: mol_type = other DNA
agtggattgatgtggaagcaaa

SEQ ID NO: 100337 - DNA, 22 bp, synthetic construct
  misc_feature 1..22: note = chemically synthesized
  source 1..22: mol_type = other DNA
atgtggaagcaaaacaagccac

SEQ ID NO: 100338 - DNA, 22 bp, synthetic construct
  misc_feature 1..22: note = chemically synthesized
  source 1..22: mol_type = other DNA
gtgccattaattttaagcagtt

SEQ ID NO: 100339 - DNA, 22 bp, synthetic construct
  misc_feature 1..22: note = chemically synthesized
  source 1..22: mol_type = other DNA
tgccattaattttaagcagttt

SEQ ID NO: 100340 - DNA, 22 bp, synthetic construct
  misc_feature 1..22: note = chemically synthesized
  source 1..22: mol_type = other DNA
attttaagcagtttcatatgaa

SEQ ID NO: 100341 - DNA, 22 bp, synthetic construct
  misc_feature 1..22: note = chemically synthesized
  source 1..22: mol_type = other DNA
taagcagtttcatatgaaacgt

SEQ ID NO: 100342 - DNA, 22 bp, synthetic construct
  misc_feature 1..22: note = chemically synthesized
  source 1..22: mol_type = other DNA
aagcagtttcatatgaaacgtg

SEQ ID NO: 100343 - DNA, 22 bp, synthetic construct
  misc_feature 1..22: note = chemically synthesized
  source 1..22: mol_type = other DNA
agcagtttcatatgaaacgtgg

SEQ ID NO: 100344 - DNA, 22 bp, synthetic construct
  misc_feature 1..22: note = chemically synthesized
  source 1..22: mol_type = other DNA
catatgaaacgtgggtttcttt

SEQ ID NO: 100345 - DNA, 22 bp, synthetic construct
  misc_feature 1..22: note = chemically synthesized
  source 1..22: mol_type = other DNA
atatgaaacgtgggtttcttta

SEQ ID NO: 100346 - DNA, 22 bp, synthetic construct
  misc_feature 1..22: note = chemically synthesized
  source 1..22: mol_type = other DNA
ctttattgctacgtcacagtca

SEQ ID NO: 100347 - DNA, 22 bp, synthetic construct
  misc_feature 1..22: note = chemically synthesized
  source 1..22: mol_type = other DNA
tttattgctacgtcacagtcag

SEQ ID NO: 100348 - DNA, 22 bp, synthetic construct
  misc_feature 1..22: note = chemically synthesized
  source 1..22: mol_type = other DNA
tattgctacgtcacagtcagat

SEQ ID NO: 100349 - DNA, 22 bp, synthetic construct
  misc_feature 1..22: note = chemically synthesized
  source 1..22: mol_type = other DNA
attgctacgtcacagtcagatg

SEQ ID NO: 100350 - DNA, 22 bp, synthetic construct
  misc_feature 1..22: note = chemically synthesized
  source 1..22: mol_type = other DNA
ttgctacgtcacagtcagatgt

SEQ ID NO: 100351 - DNA, 22 bp, synthetic construct
  misc_feature 1..22: note = chemically synthesized
  source 1..22: mol_type = other DNA
ctacgtcacagtcagatgttca

SEQ ID NO: 100352 - DNA, 22 bp, synthetic construct
  misc_feature 1..22: note = chemically synthesized
  source 1..22: mol_type = other DNA
cgtcacagtcagatgttcatgg

SEQ ID NO: 100353 - DNA, 22 bp, synthetic construct
  misc_feature 1..22: note = chemically synthesized
  source 1..22: mol_type = other DNA
atggtcctgagtgctctcctcc

SEQ ID NO: 100354 - DNA, 22 bp, synthetic construct
  misc_feature 1..22: note = chemically synthesized
  source 1..22: mol_type = other DNA
agtgctctcctccaagcagtgg

SEQ ID NO: 100355 - DNA, 22 bp, synthetic construct
  misc_feature 1..22: note = chemically synthesized
  source 1..22: mol_type = other DNA
tcctccaagcagtgggccagga

SEQ ID NO: 100356 - DNA, 22 bp, synthetic construct
  misc_feature 1..22: note = chemically synthesized
  source 1..22: mol_type = other DNA
ctccaagcagtgggccaggagt

SEQ ID NO: 100357 - DNA, 22 bp, synthetic construct
  misc_feature 1..22: note = chemically synthesized
  source 1..22: mol_type = other DNA
caagcagtgggccaggagtcca

SEQ ID NO: 100358 - DNA, 22 bp, synthetic construct
  misc_feature 1..22: note = chemically synthesized
  source 1..22: mol_type = other DNA
cctgtgattgactttatcattt

SEQ ID NO: 100359 - DNA, 22 bp, synthetic construct
  misc_feature 1..22: note = chemically synthesized
  source 1..22: mol_type = other DNA
ctgtgattgactttatcatttc

SEQ ID NO: 100360 - DNA, 22 bp, synthetic construct
  misc_feature 1..22: note = chemically synthesized
  source 1..22: mol_type = other DNA
tgattgactttatcatttcaga

SEQ ID NO: 100361 - DNA, 22 bp, synthetic construct
  misc_feature 1..22: note = chemically synthesized
  source 1..22: mol_type = other DNA
actttatcatttcagaatcttt

SEQ ID NO: 100362 - DNA, 22 bp, synthetic construct
  misc_feature 1..22: note = chemically synthesized
  source 1..22: mol_type = other DNA
tatcatttcagaatcttttact

SEQ ID NO: 100363 - DNA, 22 bp, synthetic construct
  misc_feature 1..22: note = chemically synthesized
  source 1..22: mol_type = other DNA
atcatttcagaatcttttactt

SEQ ID NO: 100364 - DNA, 22 bp, synthetic construct
  misc_feature 1..22: note = chemically synthesized
  source 1..22: mol_type = other DNA
tcatttcagaatcttttacttt

SEQ ID NO: 100365 - DNA, 22 bp, synthetic construct
  misc_feature 1..22: note = chemically synthesized
  source 1..22: mol_type = other DNA
cagaatcttttactttctgcca

SEQ ID NO: 100366 - DNA, 22 bp, synthetic construct
  misc_feature 1..22: note = chemically synthesized
  source 1..22: mol_type = other DNA
agaatcttttactttctgccac

SEQ ID NO: 100367 - DNA, 22 bp, synthetic construct
  misc_feature 1..22: note = chemically synthesized
  source 1..22: mol_type = other DNA
ttactttctgccacatagagga

SEQ ID NO: 100368 - DNA, 22 bp, synthetic construct
  misc_feature 1..22: note = chemically synthesized
  source 1..22: mol_type = other DNA
tactttctgccacatagaggaa

SEQ ID NO: 100369 - DNA, 22 bp, synthetic construct
  misc_feature 1..22: note = chemically synthesized
  source 1..22: mol_type = other DNA
actttctgccacatagaggaag

SEQ ID NO: 100370 - DNA, 22 bp, synthetic construct
  misc_feature 1..22: note = chemically synthesized
  source 1..22: mol_type = other DNA
ctttctgccacatagaggaagg

SEQ ID NO: 100371 - DNA, 22 bp, synthetic construct
  misc_feature 1..22: note = chemically synthesized
  source 1..22: mol_type = other DNA
tctgccacatagaggaagggaa

SEQ ID NO: 100372 - DNA, 22 bp, synthetic construct
  misc_feature 1..22: note = chemically synthesized
  source 1..22: mol_type = other DNA
ctgccacatagaggaagggaaa

SEQ ID NO: 100373 - DNA, 22 bp, synthetic construct
  misc_feature 1..22: note = chemically synthesized
  source 1..22: mol_type = other DNA
tgccacatagaggaagggaaag

SEQ ID NO: 100374 - DNA, 22 bp, synthetic construct
  misc_feature 1..22: note = chemically synthesized
  source 1..22: mol_type = other DNA
ccacatagaggaagggaaagag

SEQ ID NO: 100375 - DNA, 22 bp, synthetic construct
  misc_feature 1..22: note = chemically synthesized
  source 1..22: mol_type = other DNA
tgccttagggagtaacacatta

SEQ ID NO: 100376 - DNA, 22 bp, synthetic construct
  misc_feature 1..22: note = chemically synthesized
  source 1..22: mol_type = other DNA
ccttagggagtaacacattatt

SEQ ID NO: 100377 - DNA, 22 bp, synthetic construct
  misc_feature 1..22: note = chemically synthesized
  source 1..22: mol_type = other DNA
agggagtaacacattattatct

SEQ ID NO: 100378 - DNA, 22 bp, synthetic construct
  misc_feature 1..22: note = chemically synthesized
  source 1..22: mol_type = other DNA
gggagtaacacattattatctc

SEQ ID NO: 100379 - DNA, 22 bp, synthetic construct
  misc_feature 1..22: note = chemically synthesized
  source 1..22: mol_type = other DNA
ttatctccacattattttagtc

SEQ ID NO: 100380 - DNA, 22 bp, synthetic construct
  misc_feature 1..22: note = chemically synthesized
  source 1..22: mol_type = other DNA
tctccacattattttagtcaca

SEQ ID NO: 100381 - DNA, 22 bp, synthetic construct
  misc_feature 1..22: note = chemically synthesized
  source 1..22: mol_type = other DNA
cacattattttagtcacaacca

SEQ ID NO: 100382 - DNA, 22 bp, synthetic construct
  misc_feature 1..22: note = chemically synthesized
  source 1..22: mol_type = other DNA
ttttagtcacaaccagtcacat

SEQ ID NO: 100383 - DNA, 22 bp, synthetic construct
  misc_feature 1..22: note = chemically synthesized
  source 1..22: mol_type = other DNA
tagtcacaaccagtcacatggc

SEQ ID NO: 100384 - DNA, 22 bp, synthetic construct
  misc_feature 1..22: note = chemically synthesized
  source 1..22: mol_type = other DNA
agtcacaaccagtcacatggcc

SEQ ID NO: 100385 - DNA, 22 bp, synthetic construct
  misc_feature 1..22: note = chemically synthesized
  source 1..22: mol_type = other DNA
gtcacaaccagtcacatggcca

SEQ ID NO: 100386 - DNA, 22 bp, synthetic construct
  misc_feature 1..22: note = chemically synthesized
  source 1..22: mol_type = other DNA
attgcaagggctgttggaaatt

SEQ ID NO: 100387 - DNA, 22 bp, synthetic construct
  misc_feature 1..22: note = chemically synthesized
  source 1..22: mol_type = other DNA
caagggctgttggaaattgttg

SEQ ID NO: 100388 - DNA, 22 bp, synthetic construct
  misc_feature 1..22: note = chemically synthesized
  source 1..22: mol_type = other DNA
ttggaaattgttgagaagtata

SEQ ID NO: 100389 - DNA, 22 bp, synthetic construct
  misc_feature 1..22: note = chemically synthesized
  source 1..22: mol_type = other DNA
gaaattgttgagaagtatattg

SEQ ID NO: 100390 - DNA, 22 bp, synthetic construct
  misc_feature 1..22: note = chemically synthesized
  source 1..22: mol_type = other DNA
ttgagaagtatattgatttagt

SEQ ID NO: 100391 - DNA, 22 bp, synthetic construct
  misc_feature 1..22: note = chemically synthesized
  source 1..22: mol_type = other DNA
agaagtatattgatttagtgac

SEQ ID NO: 100392 - DNA, 22 bp, synthetic construct
  misc_feature 1..22: note = chemically synthesized
  source 1..22: mol_type = other DNA
atttagtgactcatattgtttc

SEQ ID NO: 100393 - DNA, 22 bp, synthetic construct
  misc_feature 1..22: note = chemically synthesized
  source 1..22: mol_type = other DNA
agtgactcatattgtttctgac

SEQ ID NO: 100394 - DNA, 22 bp, synthetic construct
  misc_feature 1..22: note = chemically synthesized
  source 1..22: mol_type = other DNA
gtgactcatattgtttctgaca

SEQ ID NO: 100395 - DNA, 22 bp, synthetic construct
  misc_feature 1..22: note = chemically synthesized
  source 1..22: mol_type = other DNA
atattgtttctgacatactgtg

SEQ ID NO: 100396 - DNA, 22 bp, synthetic construct
  misc_feature 1..22: note = chemically synthesized
  source 1..22: mol_type = other DNA
tttctgacatactgtgtccgga

SEQ ID NO: 100397 - DNA, 22 bp, synthetic construct
  misc_feature 1..22: note = chemically synthesized
  source 1..22: mol_type = other DNA
ctgacatactgtgtccggaatt

SEQ ID NO: 100398 - DNA, 22 bp, synthetic construct
  misc_feature 1..22: note = chemically synthesized
  source 1..22: mol_type = other DNA
tgacatactgtgtccggaattg

SEQ ID NO: 100399 - DNA, 22 bp, synthetic construct
  misc_feature 1..22: note = chemically synthesized
  source 1..22: mol_type = other DNA
acatactgtgtccggaattggt

SEQ ID NO: 100400 - DNA, 22 bp, synthetic construct
  misc_feature 1..22: note = chemically synthesized
  source 1..22: mol_type = other DNA
tgtccggaattggtgggttctt

SEQ ID NO: 100401 - DNA, 22 bp, synthetic construct
  misc_feature 1..22: note = chemically synthesized
  source 1..22: mol_type = other DNA
gtgggttcttggtttcactgac

SEQ ID NO: 100402 - DNA, 22 bp, synthetic construct
  misc_feature 1..22: note = chemically synthesized
  source 1..22: mol_type = other DNA
ttggtttcactgacttcaagaa

SEQ ID NO: 100403 - DNA, 22 bp, synthetic construct
  misc_feature 1..22: note = chemically synthesized
  source 1..22: mol_type = other DNA
ggtttcactgacttcaagaatg

SEQ ID NO: 100404 - DNA, 22 bp, synthetic construct
  misc_feature 1..22: note = chemically synthesized
  source 1..22: mol_type = other DNA
gtttcactgacttcaagaatga

SEQ ID NO: 100405 - DNA, 22 bp, synthetic construct
  misc_feature 1..22: note = chemically synthesized
  source 1..22: mol_type = other DNA
cactgacttcaagaatgaagcc

SEQ ID NO: 100406 - DNA, 22 bp, synthetic construct
  misc_feature 1..22: note = chemically synthesized
  source 1..22: mol_type = other DNA
actgacttcaagaatgaagccg

SEQ ID NO: 100407 - DNA, 22 bp, synthetic construct
  misc_feature 1..22: note = chemically synthesized
  source 1..22: mol_type = other DNA
acttcaagaatgaagccgggga

SEQ ID NO: 100408 - DNA, 22 bp, synthetic construct
  misc_feature 1..22: note = chemically synthesized
  source 1..22: mol_type = other DNA
caagaatgaagccggggaccct

SEQ ID NO: 100409 - DNA, 22 bp, synthetic construct
  misc_feature 1..22: note = chemically synthesized
  source 1..22: mol_type = other DNA
aagaatgaagccggggaccctc

SEQ ID NO: 100410 - DNA, 22 bp, synthetic construct
  misc_feature 1..22: note = chemically synthesized
  source 1..22: mol_type = other DNA
gtggtgagtgttacagttctta

SEQ ID NO: 100411 - DNA, 22 bp, synthetic construct
  misc_feature 1..22: note = chemically synthesized
  source 1..22: mol_type = other DNA
cagttcttaaaggctgcgtgtg

SEQ ID NO: 100412 - DNA, 22 bp, synthetic construct
  misc_feature 1..22: note = chemically synthesized
  source 1..22: mol_type = other DNA
ttaaaggctgcgtgtgtggagt

SEQ ID NO: 100413 - DNA, 22 bp, synthetic construct
  misc_feature 1..22: note = chemically synthesized
  source 1..22: mol_type = other DNA
aaaggctgcgtgtgtggagttt

SEQ ID NO: 100414 - DNA, 22 bp, synthetic construct
  misc_feature 1..22: note = chemically synthesized
  source 1..22: mol_type = other DNA
aaggctgcgtgtgtggagtttg

SEQ ID NO: 100415 - DNA, 22 bp, synthetic construct
  misc_feature 1..22: note = chemically synthesized
  source 1..22: mol_type = other DNA
cgtgtgtggagtttgttcgttc

SEQ ID NO: 100416 - DNA, 22 bp, synthetic construct
  misc_feature 1..22: note = chemically synthesized
  source 1..22: mol_type = other DNA
gttcgttctgatgtttggatgt

SEQ ID NO: 100417 - DNA, 22 bp, synthetic construct
  misc_feature 1..22: note = chemically synthesized
  source 1..22: mol_type = other DNA
ttcgttctgatgtttggatgtg

SEQ ID NO: 100418 - DNA, 22 bp, synthetic construct
  misc_feature 1..22: note = chemically synthesized
  source 1..22: mol_type = other DNA
gttctgatgtttggatgtgttc

SEQ ID NO: 100419 - DNA, 22 bp, synthetic construct
  misc_feature 1..22: note = chemically synthesized
  source 1..22: mol_type = other DNA
tgatgtttggatgtgttcggag

SEQ ID NO: 100420 - DNA, 22 bp, synthetic construct
  misc_feature 1..22: note = chemically synthesized
  source 1..22: mol_type = other DNA
atgtttggatgtgttcggagtt

SEQ ID NO: 100421 - DNA, 22 bp, synthetic construct
  misc_feature 1..22: note = chemically synthesized
  source 1..22: mol_type = other DNA
ggatgtgttcggagtttcttcc

SEQ ID NO: 100422 - DNA, 22 bp, synthetic construct
  misc_feature 1..22: note = chemically synthesized
  source 1..22: mol_type = other DNA
gatgtgttcggagtttcttcct

SEQ ID NO: 100423 - DNA, 22 bp, synthetic construct
  misc_feature 1..22: note = chemically synthesized
  source 1..22: mol_type = other DNA
ggagtttcttccttctgatggg

SEQ ID NO: 100424 - DNA, 22 bp, synthetic construct
  misc_feature 1..22: note = chemically synthesized
  source 1..22: mol_type = other DNA
cttccttctgatgggttcgtgg

SEQ ID NO: 100425 - DNA, 22 bp, synthetic construct
  misc_feature 1..22: note = chemically synthesized
  source 1..22: mol_type = other DNA
ttccttctgatgggttcgtggt

SEQ ID NO: 100426 - DNA, 22 bp, synthetic construct
  misc_feature 1..22: note = chemically synthesized
  source 1..22: mol_type = other DNA
ccttctgatgggttcgtggtct

SEQ ID NO: 100427 - DNA, 22 bp, synthetic construct
  misc_feature 1..22: note = chemically synthesized
  source 1..22: mol_type = other DNA
cttctgatgggttcgtggtctc

SEQ ID NO: 100428 - DNA, 22 bp, synthetic construct
  misc_feature 1..22: note = chemically synthesized
  source 1..22: mol_type = other DNA
ctgatgggttcgtggtctcgct

SEQ ID NO: 100429 - DNA, 22 bp, synthetic construct
  misc_feature 1..22: note = chemically synthesized
  source 1..22: mol_type = other DNA
tgatgggttcgtggtctcgctg

SEQ ID NO: 100430 - DNA, 22 bp, synthetic construct
  misc_feature 1..22: note = chemically synthesized
  source 1..22: mol_type = other DNA
atgggttcgtggtctcgctggc

SEQ ID NO: 100431 - DNA, 22 bp, synthetic construct
  misc_feature 1..22: note = chemically synthesized
  source 1..22: mol_type = other DNA
gtggtctcgctggctcaggagt

SEQ ID NO: 100432 - DNA, 22 bp, synthetic construct
  misc_feature 1..22: note = chemically synthesized
  source 1..22: mol_type = other DNA
gctggctcaggagtgaagctgc

SEQ ID NO: 100433 - DNA, 22 bp, synthetic construct
  misc_feature 1..22: note = chemically synthesized
  source 1..22: mol_type = other DNA
gctcaggagtgaagctgcagac

SEQ ID NO: 100434 - DNA, 22 bp, synthetic construct
  misc_feature 1..22: note = chemically synthesized
  source 1..22: mol_type = other DNA
aggagtgaagctgcagaccttc

SEQ ID NO: 100435 - DNA, 22 bp, synthetic construct
  misc_feature 1..22: note = chemically synthesized
  source 1..22: mol_type = other DNA
cagaccttcacagtgaacgttc

SEQ ID NO: 100436 - DNA, 22 bp, synthetic construct
  misc_feature 1..22: note = chemically synthesized
  source 1..22: mol_type = other DNA
cacagtgaacgttccagctctt

SEQ ID NO: 100437 - DNA, 22 bp, synthetic construct
  misc_feature 1..22: note = chemically synthesized
  source 1..22: mol_type = other DNA
acagtgaacgttccagctctta

SEQ ID NO: 100438 - DNA, 22 bp, synthetic construct
  misc_feature 1..22: note = chemically synthesized
  source 1..22: mol_type = other DNA
cagctcttaaggcggcgcctct

SEQ ID NO: 100439 - DNA, 22 bp, synthetic construct
  misc_feature 1..22: note = chemically synthesized
  source 1..22: mol_type = other DNA
ttaaggcggcgcctctggagtt

SEQ ID NO: 100440 - DNA, 22 bp, synthetic construct
  misc_feature 1..22: note = chemically synthesized
  source 1..22: mol_type = other DNA
aaggcggcgcctctggagttgt

SEQ ID NO: 100441 - DNA, 22 bp, synthetic construct
  misc_feature 1..22: note = chemically synthesized
  source 1..22: mol_type = other DNA
aggcggcgcctctggagttgtt

SEQ ID NO: 100442 - DNA, 22 bp, synthetic construct
  misc_feature 1..22: note = chemically synthesized
  source 1..22: mol_type = other DNA
tggagttgttcgttcctcccgg

SEQ ID NO: 100443 - DNA, 22 bp, synthetic construct
  misc_feature 1..22: note = chemically synthesized
  source 1..22: mol_type = other DNA
gagttgttcgttcctcccggtg

SEQ ID NO: 100444 - DNA, 22 bp, synthetic construct
  misc_feature 1..22: note = chemically synthesized
  source 1..22: mol_type = other DNA
ttcgttcctcccggtgggttcg

SEQ ID NO: 100445 - DNA, 22 bp, synthetic construct
  misc_feature 1..22: note = chemically synthesized
  source 1..22: mol_type = other DNA
gttcctcccggtgggttcgtgg

SEQ ID NO: 100446 - DNA, 22 bp, synthetic construct
  misc_feature 1..22: note = chemically synthesized
  source 1..22: mol_type = other DNA
ctcccggtgggttcgtggtctc

SEQ ID NO: 100447 - DNA, 22 bp, synthetic construct
  misc_feature 1..22: note = chemically synthesized
  source 1..22: mol_type = other DNA
ccggtgggttcgtggtctcgct

SEQ ID NO: 100448 - DNA, 22 bp, synthetic construct
  misc_feature 1..22: note = chemically synthesized
  source 1..22: mol_type = other DNA
gtggtctcgctggcttcaagag

SEQ ID NO: 100449 - DNA, 22 bp, synthetic construct
  misc_feature 1..22: note = chemically synthesized
  source 1..22: mol_type = other DNA
gctggcttcaagagtgaagctg

SEQ ID NO: 100450 - DNA, 22 bp, synthetic construct
  misc_feature 1..22: note = chemically synthesized
  source 1..22: mol_type = other DNA
gcttcaagagtgaagctgcaga

SEQ ID NO: 100451 - DNA, 22 bp, synthetic construct
  misc_feature 1..22: note = chemically synthesized
  source 1..22: mol_type = other DNA
caagagtgaagctgcagacctt

SEQ ID NO: 100452 - DNA, 22 bp, synthetic construct
  misc_feature 1..22: note = chemically synthesized
  source 1..22: mol_type = other DNA
aagagtgaagctgcagaccttc

SEQ ID NO: 100453 - DNA, 22 bp, synthetic construct
  misc_feature 1..22: note = chemically synthesized
  source 1..22: mol_type = other DNA
cagaccttcgcggtgagcgtta

SEQ ID NO: 100454 - DNA, 22 bp, synthetic construct
  misc_feature 1..22: note = chemically synthesized
  source 1..22: mol_type = other DNA
cgcggtgagcgttacagctcat

SEQ ID NO: 100455 - DNA, 22 bp, synthetic construct
  misc_feature 1..22: note = chemically synthesized
  source 1..22: mol_type = other DNA
gcggtgagcgttacagctcata

SEQ ID NO: 100456 - DNA, 22 bp, synthetic construct
  misc_feature 1..22: note = chemically synthesized
  source 1..22: mol_type = other DNA
cagctcataaaggcagtgtaga

SEQ ID NO: 100457 - DNA, 22 bp, synthetic construct
  misc_feature 1..22: note = chemically synthesized
  source 1..22: mol_type = other DNA
ataaaggcagtgtagacccaaa

SEQ ID NO: 100458 - DNA, 22 bp, synthetic construct
  misc_feature 1..22: note = chemically synthesized
  source 1..22: mol_type = other DNA
attgcaaagagcgaaagaacaa

SEQ ID NO: 100459 - DNA, 22 bp, synthetic construct
  misc_feature 1..22: note = chemically synthesized
  source 1..22: mol_type = other DNA
ttgcaaagagcgaaagaacaaa

SEQ ID NO: 100460 - DNA, 22 bp, synthetic construct
  misc_feature 1..22: note = chemically synthesized
  source 1..22: mol_type = other DNA
caaagagcgaaagaacaaagct

SEQ ID NO: 100461 - DNA, 22 bp, synthetic construct
  misc_feature 1..22: note = chemically synthesized
  source 1..22: mol_type = other DNA
ccacagtgtggaaggggacccg

SEQ ID NO: 100462 - DNA, 22 bp, synthetic construct
  misc_feature 1..22: note = chemically synthesized
  source 1..22: mol_type = other DNA
cacagtgtggaaggggacccga

SEQ ID NO: 100463 - DNA, 22 bp, synthetic construct
  misc_feature 1..22: note = chemically synthesized
  source 1..22: mol_type = other DNA
ccactgctggctcgggcagcct

SEQ ID NO: 100464 - DNA, 22 bp, synthetic construct
  misc_feature 1..22: note = chemically synthesized
  source 1..22: mol_type = other DNA
ctggctcgggcagcctgctttt

SEQ ID NO: 100465 - DNA, 22 bp, synthetic construct
  misc_feature 1..22: note = chemically synthesized
  source 1..22: mol_type = other DNA
gctcgggcagcctgcttttatt

SEQ ID NO: 100466 - DNA, 22 bp, synthetic construct
  misc_feature 1..22: note = chemically synthesized
  source 1..22: mol_type = other DNA
gggcagcctgcttttattctct

SEQ ID NO: 100467 - DNA, 22 bp, synthetic construct
  misc_feature 1..22: note = chemically synthesized
  source 1..22: mol_type = other DNA
cttttattctcttatctggccc

SEQ ID NO: 100468 - DNA, 22 bp, synthetic construct
  misc_feature 1..22: note = chemically synthesized
  source 1..22: mol_type = other DNA
ttattctcttatctggccccac

SEQ ID NO: 100469 - DNA, 22 bp, synthetic construct
  misc_feature 1..22: note = chemically synthesized
  source 1..22: mol_type = other DNA
tattctcttatctggccccacc

SEQ ID NO: 100470 - DNA, 22 bp, synthetic construct
  misc_feature 1..22: note = chemically synthesized
  source 1..22: mol_type = other DNA
attctcttatctggccccaccc

SEQ ID NO: 100471 - DNA, 22 bp, synthetic construct
  misc_feature 1..22: note = chemically synthesized
  source 1..22: mol_type = other DNA
ttctcttatctggccccaccca

SEQ ID NO: 100472 - DNA, 22 bp, synthetic construct
  misc_feature 1..22: note = chemically synthesized
  source 1..22: mol_type = other DNA
tcttatctggccccacccacat

SEQ ID NO: 100473 - DNA, 22 bp, synthetic construct
  misc_feature 1..22: note = chemically synthesized
  source 1..22: mol_type = other DNA
ttatctggccccacccacatcc

SEQ ID NO: 100474 - DNA, 22 bp, synthetic construct
  misc_feature 1..22: note = chemically synthesized
  source 1..22: mol_type = other DNA
atctggccccacccacatcctg

SEQ ID NO: 100475 - DNA, 22 bp, synthetic construct
  misc_feature 1..22: note = chemically synthesized
  source 1..22: mol_type = other DNA
tctggccccacccacatcctgc

SEQ ID NO: 100476 - DNA, 22 bp, synthetic construct
  misc_feature 1..22: note = chemically synthesized
  source 1..22: mol_type = other DNA
gccccacccacatcctgctgat

SEQ ID NO: 100477 - DNA, 22 bp, synthetic construct
  misc_feature 1..22: note = chemically synthesized
  source 1..22: mol_type = other DNA
ctgattggtagagcccagtggt

SEQ ID NO: 100478 - DNA, 22 bp, synthetic construct
  misc_feature 1..22: note = chemically synthesized
  source 1..22: mol_type = other DNA
attggtagagcccagtggtctg

SEQ ID NO: 100479 - DNA, 22 bp, synthetic construct
  misc_feature 1..22: note = chemically synthesized
  source 1..22: mol_type = other DNA
gtagagcccagtggtctgtttt

SEQ ID NO: 100480 - DNA, 22 bp, synthetic construct
  misc_feature 1..22: note = chemically synthesized
  source 1..22: mol_type = other DNA
ttttgacagggcactgattggt

SEQ ID NO: 100481 - DNA, 22 bp, synthetic construct
  misc_feature 1..22: note = chemically synthesized
  source 1..22: mol_type = other DNA
tgacagggcactgattggtgca

SEQ ID NO: 100482 - DNA, 22 bp, synthetic construct
  misc_feature 1..22: note = chemically synthesized
  source 1..22: mol_type = other DNA
gacagggcactgattggtgcat

SEQ ID NO: 100483 - DNA, 22 bp, synthetic construct
  misc_feature 1..22: note = chemically synthesized
  source 1..22: mol_type = other DNA
acagggcactgattggtgcatt

SEQ ID NO: 100484 - DNA, 22 bp, synthetic construct
  misc_feature 1..22: note = chemically synthesized
  source 1..22: mol_type = other DNA
attggtgcatttacaatccatg

SEQ ID NO: 100485 - DNA, 22 bp, synthetic construct
  misc_feature 1..22: note = chemically synthesized
  source 1..22: mol_type = other DNA
gtgcatttacaatccatgagct

SEQ ID NO: 100486 - DNA, 22 bp, synthetic construct
  misc_feature 1..22: note = chemically synthesized
  source 1..22: mol_type = other DNA
acaatccatgagctagacacaa

SEQ ID NO: 100487 - DNA, 22 bp, synthetic construct
  misc_feature 1..22: note = chemically synthesized
  source 1..22: mol_type = other DNA
caatccatgagctagacacaaa

SEQ ID NO: 100488 - DNA, 22 bp, synthetic construct
  misc_feature 1..22: note = chemically synthesized
  source 1..22: mol_type = other DNA
gacacaaaggttctccacgtcc

SEQ ID NO: 100489 - DNA, 22 bp, synthetic construct
  misc_feature 1..22: note = chemically synthesized
  source 1..22: mol_type = other DNA
tccacgtccccaccagattagc

SEQ ID NO: 100490 - DNA, 22 bp, synthetic construct
  misc_feature 1..22: note = chemically synthesized
  source 1..22: mol_type = other DNA
cacgtccccaccagattagcta

SEQ ID NO: 100491 - DNA, 22 bp, synthetic construct
  misc_feature 1..22: note = chemically synthesized
  source 1..22: mol_type = other DNA
gctagatacagagtgtccacac

SEQ ID NO: 100492 - DNA, 22 bp, synthetic construct
  misc_feature 1..22: note = chemically synthesized
  source 1..22: mol_type = other DNA
gatacagagtgtccacacaaag

SEQ ID NO: 100493 - DNA, 22 bp, synthetic construct
  misc_feature 1..22: note = chemically synthesized
  source 1..22: mol_type = other DNA
tccaagtccccaccagagtagc

SEQ ID NO: 100494 - DNA, 22 bp, synthetic construct
  misc_feature 1..22: note = chemically synthesized
  source 1..22: mol_type = other DNA
caagtccccaccagagtagcta

SEQ ID NO: 100495 - DNA, 22 bp, synthetic construct
  misc_feature 1..22: note = chemically synthesized
  source 1..22: mol_type = other DNA
gatacagagtgttgattggtgc

SEQ ID NO: 100496 - DNA, 22 bp, synthetic construct
  misc_feature 1..22: note = chemically synthesized
  source 1..22: mol_type = other DNA
attggtgcattcacaaaccctg

SEQ ID NO: 100497 - DNA, 22 bp, synthetic construct
  misc_feature 1..22: note = chemically synthesized
  source 1..22: mol_type = other DNA
gtgcattcacaaaccctgagct

SEQ ID NO: 100498 - DNA, 22 bp, synthetic construct
  misc_feature 1..22: note = chemically synthesized
  source 1..22: mol_type = other DNA
acaaaccctgagctagacacag

SEQ ID NO: 100499 - DNA, 22 bp, synthetic construct
  misc_feature 1..22: note = chemically synthesized
  source 1..22: mol_type = other DNA
agctagacacagggtgctgatt

SEQ ID NO: 100500 - DNA, 22 bp, synthetic construct
  misc_feature 1..22: note = chemically synthesized
  source 1..22: mol_type = other DNA
gacacagggtgctgattggtgt

SEQ ID NO: 100501 - DNA, 22 bp, synthetic construct
  misc_feature 1..22: note = chemically synthesized
  source 1..22: mol_type = other DNA
attggtgtgtttacaaaccttg

SEQ ID NO: 100502 - DNA, 22 bp, synthetic construct
  misc_feature 1..22: note = chemically synthesized
  source 1..22: mol_type = other DNA
gtgtgtttacaaaccttgagct

SEQ ID NO: 100503 - DNA, 22 bp, synthetic construct
  misc_feature 1..22: note = chemically synthesized
  source 1..22: mol_type = other DNA
acaaaccttgagctagatacag

SEQ ID NO: 100504 - DNA, 22 bp, synthetic construct
  misc_feature 1..22: note = chemically synthesized
  source 1..22: mol_type = other DNA
caaaccttgagctagatacaga

SEQ ID NO: 100505 - DNA, 22 bp, synthetic construct
  misc_feature 1..22: note = chemically synthesized
  source 1..22: mol_type = other DNA
gagctagatacagactgccgag

SEQ ID NO: 100506 - DNA, 22 bp, synthetic construct
  misc_feature 1..22: note = chemically synthesized
  source 1..22: mol_type = other DNA
agctagatacagactgccgagt

SEQ ID NO: 100507 - DNA, 22 bp, synthetic construct
  misc_feature 1..22: note = chemically synthesized
  source 1..22: mol_type = other DNA
gatacagactgccgagtggtgt

SEQ ID NO: 100508 - DNA, 22 bp, synthetic construct
  misc_feature 1..22: note = chemically synthesized
  source 1..22: mol_type = other DNA
ccgagtggtgtatttacaatcc

SEQ ID NO: 100509 - DNA, 22 bp, synthetic construct
  misc_feature 1..22: note = chemically synthesized
  source 1..22: mol_type = other DNA
acaatccctgagctagacataa

SEQ ID NO: 100510 - DNA, 22 bp, synthetic construct
  misc_feature 1..22: note = chemically synthesized
  source 1..22: mol_type = other DNA
caatccctgagctagacataaa

SEQ ID NO: 100511 - DNA, 22 bp, synthetic construct
  misc_feature 1..22: note = chemically synthesized
  source 1..22: mol_type = other DNA
agctagacataaaggttctcca

SEQ ID NO: 100512 - DNA, 22 bp, synthetic construct
  misc_feature 1..22: note = chemically synthesized
  source 1..22: mol_type = other DNA
gacataaaggttctccacgtcc

SEQ ID NO: 100513 - DNA, 22 bp, synthetic construct
  misc_feature 1..22: note = chemically synthesized
  source 1..22: mol_type = other DNA
tccacgtccccaccagagtagc

SEQ ID NO: 100514 - DNA, 22 bp, synthetic construct
  misc_feature 1..22: note = chemically synthesized
  source 1..22: mol_type = other DNA
cacgtccccaccagagtagcta

SEQ ID NO: 100515 - DNA, 22 bp, synthetic construct
  misc_feature 1..22: note = chemically synthesized
  source 1..22: mol_type = other DNA
gatacagagtgttgattggtgc

SEQ ID NO: 100516 - DNA, 22 bp, synthetic construct
  misc_feature 1..22: note = chemically synthesized
  source 1..22: mol_type = other DNA
attggtgcattcacaaaccctg

SEQ ID NO: 100517 - DNA, 22 bp, synthetic construct
  misc_feature 1..22: note = chemically synthesized
  source 1..22: mol_type = other DNA
gtgcattcacaaaccctgagct

SEQ ID NO: 100518 - DNA, 22 bp, synthetic construct
  misc_feature 1..22: note = chemically synthesized
  source 1..22: mol_type = other DNA
acaaaccctgagctagacacag

SEQ ID NO: 100519 - DNA, 22 bp, synthetic construct
  misc_feature 1..22: note = chemically synthesized
  source 1..22: mol_type = other DNA
agctagacacagggtgctgatt

SEQ ID NO: 100520 - DNA, 22 bp, synthetic construct
  misc_feature 1..22: note = chemically synthesized
  source 1..22: mol_type = other DNA
gacacagggtgctgattggtgt

SEQ ID NO: 100521 - DNA, 22 bp, synthetic construct
  misc_feature 1..22: note = chemically synthesized
  source 1..22: mol_type = other DNA
attggtgtgtttacaaaccttg

SEQ ID NO: 100522 - DNA, 22 bp, synthetic construct
  misc_feature 1..22: note = chemically synthesized
  source 1..22: mol_type = other DNA
gtgtgtttacaaaccttgagct

SEQ ID NO: 100523 - DNA, 22 bp, synthetic construct
  misc_feature 1..22: note = chemically synthesized
  source 1..22: mol_type = other DNA
acaaaccttgagctagatacag

SEQ ID NO: 100524 - DNA, 22 bp, synthetic construct
  misc_feature 1..22: note = chemically synthesized
  source 1..22: mol_type = other DNA
caaaccttgagctagatacaga

SEQ ID NO: 100525 - DNA, 22 bp, synthetic construct
  misc_feature 1..22: note = chemically synthesized
  source 1..22: mol_type = other DNA
gagctagatacagactgccgat

SEQ ID NO: 100526 - DNA, 22 bp, synthetic construct
  misc_feature 1..22: note = chemically synthesized
  source 1..22: mol_type = other DNA
agctagatacagactgccgatt

SEQ ID NO: 100527 - DNA, 22 bp, synthetic construct
  misc_feature 1..22: note = chemically synthesized
  source 1..22: mol_type = other DNA
gatacagactgccgattggtgt

SEQ ID NO: 100528 - DNA, 22 bp, synthetic construct
  misc_feature 1..22: note = chemically synthesized
  source 1..22: mol_type = other DNA
ccgattggtgtatttacaatcc

SEQ ID NO: 100529 - DNA, 22 bp, synthetic construct
  misc_feature 1..22: note = chemically synthesized
  source 1..22: mol_type = other DNA
gtgtatttacaatccctgagct

SEQ ID NO: 100530 - DNA, 22 bp, synthetic construct
  misc_feature 1..22: note = chemically synthesized
  source 1..22: mol_type = other DNA
acaatccctgagctagacataa

SEQ ID NO: 100531 - DNA, 22 bp, synthetic construct
  misc_feature 1..22: note = chemically synthesized
  source 1..22: mol_type = other DNA
caatccctgagctagacataaa

SEQ ID NO: 100532 - DNA, 22 bp, synthetic construct
  misc_feature 1..22: note = chemically synthesized
  source 1..22: mol_type = other DNA
agctagacataaaggttctcca

SEQ ID NO: 100533 - DNA, 22 bp, synthetic construct
  misc_feature 1..22: note = chemically synthesized
  source 1..22: mol_type = other DNA
gacataaaggttctccaaggcc

SEQ ID NO: 100534 - DNA, 22 bp, synthetic construct
  misc_feature 1..22: note = chemically synthesized
  source 1..22: mol_type = other DNA
tccaaggccccaccagagtagc

SEQ ID NO: 100535 - DNA, 22 bp, synthetic construct
  misc_feature 1..22: note = chemically synthesized
  source 1..22: mol_type = other DNA
caaggccccaccagagtagcta

SEQ ID NO: 100536 - DNA, 22 bp, synthetic construct
  misc_feature 1..22: note = chemically synthesized
  source 1..22: mol_type = other DNA
gatagagtgttgattggtgcat

SEQ ID NO: 100537 - DNA, 22 bp, synthetic construct
  misc_feature 1..22: note = chemically synthesized
  source 1..22: mol_type = other DNA
attggtgcattcacaaaccctg

SEQ ID NO: 100538 - DNA, 22 bp, synthetic construct
  misc_feature 1..22: note = chemically synthesized
  source 1..22: mol_type = other DNA
gtgcattcacaaaccctgagct

SEQ ID NO: 100539 - DNA, 22 bp, synthetic construct
  misc_feature 1..22: note = chemically synthesized
  source 1..22: mol_type = other DNA
acaaaccctgagctagacacag

SEQ ID NO: 100540 - DNA, 22 bp, synthetic construct
  misc_feature 1..22: note = chemically synthesized
  source 1..22: mol_type = other DNA
agctagacacagggtgctgatt

SEQ ID NO: 100541 - DNA, 22 bp, synthetic construct
  misc_feature 1..22: note = chemically synthesized
  source 1..22: mol_type = other DNA
gacacagggtgctgattggtgt

SEQ ID NO: 100542 - DNA, 22 bp, synthetic construct
  misc_feature 1..22: note = chemically synthesized
  source 1..22: mol_type = other DNA
attggtgtgtttacaaaccttg

SEQ ID NO: 100543 - DNA, 22 bp, synthetic construct
  misc_feature 1..22: note = chemically synthesized
  source 1..22: mol_type = other DNA
gtgtgtttacaaaccttgagct

SEQ ID NO: 100544 - DNA, 22 bp, synthetic construct
  misc_feature 1..22: note = chemically synthesized
  source 1..22: mol_type = other DNA
acaaaccttgagctagatacag

SEQ ID NO: 100545 - DNA, 22 bp, synthetic construct
  misc_feature 1..22: note = chemically synthesized
  source 1..22: mol_type = other DNA
caaaccttgagctagatacaga

SEQ ID NO: 100546 - DNA, 22 bp, synthetic construct
  misc_feature 1..22: note = chemically synthesized
  source 1..22: mol_type = other DNA
gagctagatacagagtgccaat

SEQ ID NO: 100547 - DNA, 22 bp, synthetic construct
  misc_feature 1..22: note = chemically synthesized
  source 1..22: mol_type = other DNA
agctagatacagagtgccaatt

SEQ ID NO: 100548 - DNA, 22 bp, synthetic construct
  misc_feature 1..22: note = chemically synthesized
  source 1..22: mol_type = other DNA
gatacagagtgccaattggtgt

SEQ ID NO: 100549 - DNA, 22 bp, synthetic construct
  misc_feature 1..22: note = chemically synthesized
  source 1..22: mol_type = other DNA
gtgtatttacaatcccttatct

SEQ ID NO: 100550 - DNA, 22 bp, synthetic construct
  misc_feature 1..22: note = chemically synthesized
  source 1..22: mol_type = other DNA
acaatcccttatctagacataa

SEQ ID NO: 100551 - DNA, 22 bp, synthetic construct
  misc_feature 1..22: note = chemically synthesized
  source 1..22: mol_type = other DNA
caatcccttatctagacataag

SEQ ID NO: 100552 - DNA, 22 bp, synthetic construct
  misc_feature 1..22: note = chemically synthesized
  source 1..22: mol_type = other DNA
atctagacataagggttcttcg

SEQ ID NO: 100553 - DNA, 22 bp, synthetic construct
  misc_feature 1..22: note = chemically synthesized
  source 1..22: mol_type = other DNA
tctagacataagggttcttcgc

SEQ ID NO: 100554 - DNA, 22 bp, synthetic construct
  misc_feature 1..22: note = chemically synthesized
  source 1..22: mol_type = other DNA
gacataagggttcttcgcatcc

SEQ ID NO: 100555 - DNA, 22 bp, synthetic construct
  misc_feature 1..22: note = chemically synthesized
  source 1..22: mol_type = other DNA
ttcgcatccccagcaaactcag

SEQ ID NO: 100556 - DNA, 22 bp, synthetic construct
  misc_feature 1..22: note = chemically synthesized
  source 1..22: mol_type = other DNA
cgcatccccagcaaactcagga

SEQ ID NO: 100557 - DNA, 22 bp, synthetic construct
  misc_feature 1..22: note = chemically synthesized
  source 1..22: mol_type = other DNA
gcatccccagcaaactcaggag

SEQ ID NO: 100558 - DNA, 22 bp, synthetic construct
  misc_feature 1..22: note = chemically synthesized
  source 1..22: mol_type = other DNA
aggagcctagccggcttcaccc

SEQ ID NO: 100559 - DNA, 22 bp, synthetic construct
  misc_feature 1..22: note = chemically synthesized
  source 1..22: mol_type = other DNA
gccggcttcacccagtggatcc

SEQ ID NO: 100560 - DNA, 22 bp, synthetic construct
  misc_feature 1..22: note = chemically synthesized
  source 1..22: mol_type = other DNA
cacccagtggatcccgcacctg

SEQ ID NO: 100561 - DNA, 22 bp, synthetic construct
  misc_feature 1..22: note = chemically synthesized
  source 1..22: mol_type = other DNA
acccagtggatcccgcacctgg

SEQ ID NO: 100562 - DNA, 22 bp, synthetic construct
  misc_feature 1..22: note = chemically synthesized
  source 1..22: mol_type = other DNA
ggctgcagggggagctgcctgc

SEQ ID NO: 100563 - DNA, 22 bp, synthetic construct
  misc_feature 1..22: note = chemically synthesized
  source 1..22: mol_type = other DNA
cagggggagctgcctgccagtc

SEQ ID NO: 100564 - DNA, 22 bp, synthetic construct
  misc_feature 1..22: note = chemically synthesized
  source 1..22: mol_type = other DNA
cctgccagtcccctgccgtgcg

SEQ ID NO: 100565 - DNA, 22 bp, synthetic construct
  misc_feature 1..22: note = chemically synthesized
  source 1..22: mol_type = other DNA
ccagtcccctgccgtgcgcccg

SEQ ID NO: 100566 - DNA, 22 bp, synthetic construct
  misc_feature 1..22: note = chemically synthesized
  source 1..22: mol_type = other DNA
ccgtgcgcccgcactcttcagc

SEQ ID NO: 100567 - DNA, 22 bp, synthetic construct
  misc_feature 1..22: note = chemically synthesized
  source 1..22: mol_type = other DNA
ttcagcccttgggtggtcgatg

SEQ ID NO: 100568 - DNA, 22 bp, synthetic construct
  misc_feature 1..22: note = chemically synthesized
  source 1..22: mol_type = other DNA
cagcccttgggtggtcgatggg

SEQ ID NO: 100569 - DNA, 22 bp, synthetic construct
  misc_feature 1..22: note = chemically synthesized
  source 1..22: mol_type = other DNA
agcccttgggtggtcgatggga

SEQ ID NO: 100570 - DNA, 22 bp, synthetic construct
  misc_feature 1..22: note = chemically synthesized
  source 1..22: mol_type = other DNA
gggtggtcgatgggactgggtg

SEQ ID NO: 100571 - DNA, 22 bp, synthetic construct
  misc_feature 1..22: note = chemically synthesized
  source 1..22: mol_type = other DNA
ggtggtcgatgggactgggtgc

SEQ ID NO: 100572 - DNA, 22 bp, synthetic construct
  misc_feature 1..22: note = chemically synthesized
  source 1..22: mol_type = other DNA
ggtgccctggagcagggggcgg

SEQ ID NO: 100573 - DNA, 22 bp, synthetic construct
  misc_feature 1..22: note = chemically synthesized
  source 1..22: mol_type = other DNA
gagcagggggcggcgctcgtcg

SEQ ID NO: 100574 - DNA, 22 bp, synthetic construct
  misc_feature 1..22: note = chemically synthesized
  source 1..22: mol_type = other DNA
gtcggcgaggctcgggccgcac

SEQ ID NO: 100575 - DNA, 22 bp, synthetic construct
  misc_feature 1..22: note = chemically synthesized
  source 1..22: mol_type = other DNA
gggccgcacaggagcccatgaa

SEQ ID NO: 100576 - DNA, 22 bp, synthetic construct
  misc_feature 1..22: note = chemically synthesized
  source 1..22: mol_type = other DNA
aggcatggcgcgctgcaggtcc

SEQ ID NO: 100577 - DNA, 22 bp, synthetic construct
  misc_feature 1..22: note = chemically synthesized
  source 1..22: mol_type = other DNA
caggtcccgagccctgccccgc

SEQ ID NO: 100578 - DNA, 22 bp, synthetic construct
  misc_feature 1..22: note = chemically synthesized
  source 1..22: mol_type = other DNA
ccccgcaggaaggcagctaagg

SEQ ID NO: 100579 - DNA, 22 bp, synthetic construct
  misc_feature 1..22: note = chemically synthesized
  source 1..22: mol_type = other DNA
aggcccggcgaggaattgagca

SEQ ID NO: 100580 - DNA, 22 bp, synthetic construct
  misc_feature 1..22: note = chemically synthesized
  source 1..22: mol_type = other DNA
agcacagcagctgctggcccag

SEQ ID NO: 100581 - DNA, 22 bp, synthetic construct
  misc_feature 1..22: note = chemically synthesized
  source 1..22: mol_type = other DNA
ctggcccaggtgctaagcccct

SEQ ID NO: 100582 - DNA, 22 bp, synthetic construct
  misc_feature 1..22: note = chemically synthesized
  source 1..22: mol_type = other DNA
gcccaggtgctaagcccctcac

SEQ ID NO: 100583 - DNA, 22 bp, synthetic construct
  misc_feature 1..22: note = chemically synthesized
  source 1..22: mol_type = other DNA
agcccctcactgcccgcggccg

SEQ ID NO: 100584 - DNA, 22 bp, synthetic construct
  misc_feature 1..22: note = chemically synthesized
  source 1..22: mol_type = other DNA
actgcccgcggccggtggggcc

SEQ ID NO: 100585 - DNA, 22 bp, synthetic construct
  misc_feature 1..22: note = chemically synthesized
  source 1..22: mol_type = other DNA
cccgcggccggtggggccggct

SEQ ID NO: 100586 - DNA, 22 bp, synthetic construct
  misc_feature 1..22: note = chemically synthesized
  source 1..22: mol_type = other DNA
gcggctccgagtgcggggtcct

SEQ ID NO: 100587 - DNA, 22 bp, synthetic construct
  misc_feature 1..22: note = chemically synthesized
  source 1..22: mol_type = other DNA
cgagtgcggggtcctcggagcc

SEQ ID NO: 100588 - DNA, 22 bp, synthetic construct
  misc_feature 1..22: note = chemically synthesized
  source 1..22: mol_type = other DNA
ggagcccatgcccacccggaac

SEQ ID NO: 100589 - DNA, 22 bp, synthetic construct
  misc_feature 1..22: note = chemically synthesized
  source 1..22: mol_type = other DNA
cctcaagcacggcgcacagccc

SEQ ID NO: 100590 - DNA, 22 bp, synthetic construct
  misc_feature 1..22: note = chemically synthesized
  source 1..22: mol_type = other DNA
aagcacggcgcacagcccggtt

SEQ ID NO: 100591 - DNA, 22 bp, synthetic construct
  misc_feature 1..22: note = chemically synthesized
  source 1..22: mol_type = other DNA
ctgcccgcgtctgtccctccac

SEQ ID NO: 100592 - DNA, 22 bp, synthetic construct
  misc_feature 1..22: note = chemically synthesized
  source 1..22: mol_type = other DNA
cccgcgtctgtccctccacacc

SEQ ID NO: 100593 - DNA, 22 bp, synthetic construct
  misc_feature 1..22: note = chemically synthesized
  source 1..22: mol_type = other DNA
tccctccacacctcctggcaag

SEQ ID NO: 100594 - DNA, 22 bp, synthetic construct
  misc_feature 1..22: note = chemically synthesized
  source 1..22: mol_type = other DNA
cacacctcctggcaagctgagg

SEQ ID NO: 100595 - DNA, 22 bp, synthetic construct
  misc_feature 1..22: note = chemically synthesized
  source 1..22: mol_type = other DNA
ctggcaagctgagggagccggc

SEQ ID NO: 100596 - DNA, 22 bp, synthetic construct
  misc_feature 1..22: note = chemically synthesized
  source 1..22: mol_type = other DNA
gcaagctgagggagccggctct

SEQ ID NO: 100597 - DNA, 22 bp, synthetic construct
  misc_feature 1..22: note = chemically synthesized
  source 1..22: mol_type = other DNA
agggagccggctctggccttgg

SEQ ID NO: 100598 - DNA, 22 bp, synthetic construct
  misc_feature 1..22: note = chemically synthesized
  source 1..22: mol_type = other DNA
tggccttggccagcccagaaaa

SEQ ID NO: 100599 - DNA, 22 bp, synthetic construct
  misc_feature 1..22: note = chemically synthesized
  source 1..22: mol_type = other DNA
gccttggccagcccagaaaagg

SEQ ID NO: 100600 - DNA, 22 bp, synthetic construct
  misc_feature 1..22: note = chemically synthesized
  source 1..22: mol_type = other DNA
ggccagcccagaaaagggctcc

SEQ ID NO: 100601 - DNA, 22 bp, synthetic construct
  misc_feature 1..22: note = chemically synthesized
  source 1..22: mol_type = other DNA
gccagcccagaaaagggctccc

SEQ ID NO: 100602 - DNA, 22 bp, synthetic construct
  misc_feature 1..22: note = chemically synthesized
  source 1..22: mol_type = other DNA
ccacagtgcagcggccggctga

SEQ ID NO: 100603 - DNA, 22 bp, synthetic construct
  misc_feature 1..22: note = chemically synthesized
  source 1..22: mol_type = other DNA
aagggctcctcaagtgccacca

SEQ ID NO: 100604 - DNA, 22 bp, synthetic construct
  misc_feature 1..22: note = chemically synthesized
  source 1..22: mol_type = other DNA
ctcaagtgccaccaatgtggga

SEQ ID NO: 100605 - DNA, 22 bp, synthetic construct
  misc_feature 1..22: note = chemically synthesized
  source 1..22: mol_type = other DNA
aagtgccaccaatgtgggagcc

SEQ ID NO: 100606 - DNA, 22 bp, synthetic construct
  misc_feature 1..22: note = chemically synthesized
  source 1..22: mol_type = other DNA
tgaggactgccagcacgctgtc

SEQ ID NO: 100607 - DNA, 22 bp, synthetic construct
  misc_feature 1..22: note = chemically synthesized
  source 1..22: mol_type = other DNA
ccagcacgctgtcacctctcaa

SEQ ID NO: 100608 - DNA, 22 bp, synthetic construct
  misc_feature 1..22: note = chemically synthesized
  source 1..22: mol_type = other DNA
tcacctctcaatactaatcact

SEQ ID NO: 100609 - DNA, 22 bp, synthetic construct
  misc_feature 1..22: note = chemically synthesized
  source 1..22: mol_type = other DNA
tcaatactaatcactagtaatt

SEQ ID NO: 100610 - DNA, 22 bp, synthetic construct
  misc_feature 1..22: note = chemically synthesized
  source 1..22: mol_type = other DNA
aatactaatcactagtaattag

SEQ ID NO: 100611 - DNA, 22 bp, synthetic construct
  misc_feature 1..22: note = chemically synthesized
  source 1..22: mol_type = other DNA
atcactagtaattagcattatc

SEQ ID NO: 100612 - DNA, 22 bp, synthetic construct
  misc_feature 1..22: note = chemically synthesized
  source 1..22: mol_type = other DNA
gtaattagcattatcccacacc

SEQ ID NO: 100613 - DNA, 22 bp, synthetic construct
  misc_feature 1..22: note = chemically synthesized
  source 1..22: mol_type = other DNA
gcattatcccacaccctgtgct

SEQ ID NO: 100614 - DNA, 22 bp, synthetic construct
  misc_feature 1..22: note = chemically synthesized
  source 1..22: mol_type = other DNA
tcccacaccctgtgcttccaaa

SEQ ID NO: 100615 - DNA, 22 bp, synthetic construct
  misc_feature 1..22: note = chemically synthesized
  source 1..22: mol_type = other DNA
tgcttccaaaaataacaggaat

SEQ ID NO: 100616 - DNA, 22 bp, synthetic construct
  misc_feature 1..22: note = chemically synthesized
  source 1..22: mol_type = other DNA
ccaaaaataacaggaatattat

SEQ ID NO: 100617 - DNA, 22 bp, synthetic construct
  misc_feature 1..22: note = chemically synthesized
  source 1..22: mol_type = other DNA
caaaaataacaggaatattatt

SEQ ID NO: 100618 - DNA, 22 bp, synthetic construct
  misc_feature 1..22: note = chemically synthesized
  source 1..22: mol_type = other DNA
ttgtaaaatcaaaggcatactg

SEQ ID NO: 100619 - DNA, 22 bp, synthetic construct
  misc_feature 1..22: note = chemically synthesized
  source 1..22: mol_type = other DNA
taaaatcaaaggcatactgaac

SEQ ID NO: 100620 - DNA, 22 bp, synthetic construct
  misc_feature 1..22: note = chemically synthesized
  source 1..22: mol_type = other DNA
aaccatatgttttattatgttt

SEQ ID NO: 100621 - DNA, 22 bp, synthetic construct
  misc_feature 1..22: note = chemically synthesized
  source 1..22: mol_type = other DNA
tattatgtttaagcagtaaaaa

SEQ ID NO: 100622 - DNA, 22 bp, synthetic construct
  misc_feature 1..22: note = chemically synthesized
  source 1..22: mol_type = other DNA
attatgtttaagcagtaaaaat

SEQ ID NO: 100623 - DNA, 22 bp, synthetic construct
  misc_feature 1..22: note = chemically synthesized
  source 1..22: mol_type = other DNA
ttatgtttaagcagtaaaaata

SEQ ID NO: 100624 - DNA, 22 bp, synthetic construct
  misc_feature 1..22: note = chemically synthesized
  source 1..22: mol_type = other DNA
tgtttaagcagtaaaaataaga

SEQ ID NO: 100625 - DNA, 22 bp, synthetic construct
  misc_feature 1..22: note = chemically synthesized
  source 1..22: mol_type = other DNA
aagcagtaaaaataagacctgg

SEQ ID NO: 100626 - DNA, 22 bp, synthetic construct
  misc_feature 1..22: note = chemically synthesized
  source 1..22: mol_type = other DNA
agcagtaaaaataagacctgga

SEQ ID NO: 100627 - DNA, 22 bp, synthetic construct
  misc_feature 1..22: note = chemically synthesized
  source 1..22: mol_type = other DNA
gagtgcaaaaagactaccaaat

SEQ ID NO: 100628 - DNA, 22 bp, synthetic construct
  misc_feature 1..22: note = chemically synthesized
  source 1..22: mol_type = other DNA
ccaaatgctgtaatacttcatg

SEQ ID NO: 100629 - DNA, 22 bp, synthetic construct
  misc_feature 1..22: note = chemically synthesized
  source 1..22: mol_type = other DNA
taatacttcatggaatctaagc

SEQ ID NO: 100630 - DNA, 22 bp, synthetic construct
  misc_feature 1..22: note = chemically synthesized
  source 1..22: mol_type = other DNA
catggaatctaagctttctcac

SEQ ID NO: 100631 - DNA, 22 bp, synthetic construct
  misc_feature 1..22: note = chemically synthesized
  source 1..22: mol_type = other DNA
atggaatctaagctttctcacc

SEQ ID NO: 100632 - DNA, 22 bp, synthetic construct
  misc_feature 1..22: note = chemically synthesized
  source 1..22: mol_type = other DNA
agctttctcaccccaaattatg

SEQ ID NO: 100633 - DNA, 22 bp, synthetic construct
  misc_feature 1..22: note = chemically synthesized
  source 1..22: mol_type = other DNA
tctcaccccaaattatgtctta

SEQ ID NO: 100634 - DNA, 22 bp, synthetic construct
  misc_feature 1..22: note = chemically synthesized
  source 1..22: mol_type = other DNA
ctcaccccaaattatgtcttat

SEQ ID NO: 100635 - DNA, 22 bp, synthetic construct
  misc_feature 1..22: note = chemically synthesized
  source 1..22: mol_type = other DNA
tcaccccaaattatgtcttatt

SEQ ID NO: 100636 - DNA, 22 bp, synthetic construct
  misc_feature 1..22: note = chemically synthesized
  source 1..22: mol_type = other DNA
accccaaattatgtcttatttc

SEQ ID NO: 100637 - DNA, 22 bp, synthetic construct
  misc_feature 1..22: note = chemically synthesized
  source 1..22: mol_type = other DNA
tgtcttatttcagagcaaataa

SEQ ID NO: 100638 - DNA, 22 bp, synthetic construct
  misc_feature 1..22: note = chemically synthesized
  source 1..22: mol_type = other DNA
atttcagagcaaataacttagg

SEQ ID NO: 100639 - DNA, 22 bp, synthetic construct
  misc_feature 1..22: note = chemically synthesized
  source 1..22: mol_type = other DNA
tttcagagcaaataacttaggc

SEQ ID NO: 100640 - DNA, 22 bp, synthetic construct
  misc_feature 1..22: note = chemically synthesized
  source 1..22: mol_type = other DNA
cagagcaaataacttaggcttt

SEQ ID NO: 100641 - DNA, 22 bp, synthetic construct
  misc_feature 1..22: note = chemically synthesized
  source 1..22: mol_type = other DNA
agagcaaataacttaggcttta

SEQ ID NO: 100642 - DNA, 22 bp, synthetic construct
  misc_feature 1..22: note = chemically synthesized
  source 1..22: mol_type = other DNA
aggctttaaaaaatgtttcctc

SEQ ID NO: 100643 - DNA, 22 bp, synthetic construct
  misc_feature 1..22: note = chemically synthesized
  source 1..22: mol_type = other DNA
ggctttaaaaaatgtttcctca

SEQ ID NO: 100644 - DNA, 22 bp, synthetic construct
  misc_feature 1..22: note = chemically synthesized
  source 1..22: mol_type = other DNA
taaaaaatgtttcctcatgaat

SEQ ID NO: 100645 - DNA, 22 bp, synthetic construct
  misc_feature 1..22: note = chemically synthesized
  source 1..22: mol_type = other DNA
aaaaaatgtttcctcatgaatt

SEQ ID NO: 100646 - DNA, 22 bp, synthetic construct
  misc_feature 1..22: note = chemically synthesized
  source 1..22: mol_type = other DNA
aaaaatgtttcctcatgaatta

SEQ ID NO: 100647 - DNA, 22 bp, synthetic construct
  misc_feature 1..22: note = chemically synthesized
  source 1..22: mol_type = other DNA
cctcatgaattattattgtata

SEQ ID NO: 100648 - DNA, 22 bp, synthetic construct
  misc_feature 1..22: note = chemically synthesized
  source 1..22: mol_type = other DNA
ctcatgaattattattgtataa

SEQ ID NO: 100649 - DNA, 22 bp, synthetic construct
  misc_feature 1..22: note = chemically synthesized
  source 1..22: mol_type = other DNA
atgaattattattgtataatga

SEQ ID NO: 100650 - DNA, 22 bp, synthetic construct
  misc_feature 1..22: note = chemically synthesized
  source 1..22: mol_type = other DNA
ttattgtataatgattcagagc

SEQ ID NO: 100651 - DNA, 22 bp, synthetic construct
  misc_feature 1..22: note = chemically synthesized
  source 1..22: mol_type = other DNA
ttgtataatgattcagagcatg

SEQ ID NO: 100652 - DNA, 22 bp, synthetic construct
  misc_feature 1..22: note = chemically synthesized
  source 1..22: mol_type = other DNA
tataatgattcagagcatgtat

SEQ ID NO: 100653 - DNA, 22 bp, synthetic construct
  misc_feature 1..22: note = chemically synthesized
  source 1..22: mol_type = other DNA
agagcatgtattctagagccaa

SEQ ID NO: 100654 - DNA, 22 bp, synthetic construct
  misc_feature 1..22: note = chemically synthesized
  source 1..22: mol_type = other DNA
tagagccaaatatcatgagttg

SEQ ID NO: 100655 - DNA, 22 bp, synthetic construct
  misc_feature 1..22: note = chemically synthesized
  source 1..22: mol_type = other DNA
gagccaaatatcatgagttgaa

SEQ ID NO: 100656 - DNA, 22 bp, synthetic construct
  misc_feature 1..22: note = chemically synthesized
  source 1..22: mol_type = other DNA
aattatgccctctgtcagttag

SEQ ID NO: 100657 - DNA, 22 bp, synthetic construct
  misc_feature 1..22: note = chemically synthesized
  source 1..22: mol_type = other DNA
tgccctctgtcagttagtagcc

SEQ ID NO: 100658 - DNA, 22 bp, synthetic construct
  misc_feature 1..22: note = chemically synthesized
  source 1..22: mol_type = other DNA
tgtcagttagtagccacttcat

SEQ ID NO: 100659 - DNA, 22 bp, synthetic construct
  misc_feature 1..22: note = chemically synthesized
  source 1..22: mol_type = other DNA
tcagttagtagccacttcatct

SEQ ID NO: 100660 - DNA, 22 bp, synthetic construct
  misc_feature 1..22: note = chemically synthesized
  source 1..22: mol_type = other DNA
gtagccacttcatcttggaata

SEQ ID NO: 100661 - DNA, 22 bp, synthetic construct
  misc_feature 1..22: note = chemically synthesized
  source 1..22: mol_type = other DNA
catcttggaatattactttagg

SEQ ID NO: 100662 - DNA, 22 bp, synthetic construct
  misc_feature 1..22: note = chemically synthesized
  source 1..22: mol_type = other DNA
atcttggaatattactttaggg

SEQ ID NO: 100663 - DNA, 22 bp, synthetic construct
  misc_feature 1..22: note = chemically synthesized
  source 1..22: mol_type = other DNA
ggaatattactttagggccctg

SEQ ID NO: 100664 - DNA, 22 bp, synthetic construct
  misc_feature 1..22: note = chemically synthesized
  source 1..22: mol_type = other DNA
gaatattactttagggccctgt

SEQ ID NO: 100665 - DNA, 22 bp, synthetic construct
  misc_feature 1..22: note = chemically synthesized
  source 1..22: mol_type = other DNA
ctttagggccctgtgcctcagt

SEQ ID NO: 100666 - DNA, 22 bp, synthetic construct
  misc_feature 1..22: note = chemically synthesized
  source 1..22: mol_type = other DNA
tagggccctgtgcctcagtttc

SEQ ID NO: 100667 - DNA, 22 bp, synthetic construct
  misc_feature 1..22: note = chemically synthesized
  source 1..22: mol_type = other DNA
agggccctgtgcctcagtttcc

SEQ ID NO: 100668 - DNA, 22 bp, synthetic construct
  misc_feature 1..22: note = chemically synthesized
  source 1..22: mol_type = other DNA
gggccctgtgcctcagtttcct

SEQ ID NO: 100669 - DNA, 22 bp, synthetic construct
  misc_feature 1..22: note = chemically synthesized
  source 1..22: mol_type = other DNA
tgcctcagtttcctcctcttaa

SEQ ID NO: 100670 - DNA, 22 bp, synthetic construct
  misc_feature 1..22: note = chemically synthesized
  source 1..22: mol_type = other DNA
agtttcctcctcttaaagggta

SEQ ID NO: 100671 - DNA, 22 bp, synthetic construct
  misc_feature 1..22: note = chemically synthesized
  source 1..22: mol_type = other DNA
cctcctcttaaagggtattaca

SEQ ID NO: 100672 - DNA, 22 bp, synthetic construct
  misc_feature 1..22: note = chemically synthesized
  source 1..22: mol_type = other DNA
ctcctcttaaagggtattacaa

SEQ ID NO: 100673 - DNA, 22 bp, synthetic construct
  misc_feature 1..22: note = chemically synthesized
  source 1..22: mol_type = other DNA
ctcttaaagggtattacaatag

SEQ ID NO: 100674 - DNA, 22 bp, synthetic construct
  misc_feature 1..22: note = chemically synthesized
  source 1..22: mol_type = other DNA
ttaaagggtattacaatagtac

SEQ ID NO: 100675 - DNA, 22 bp, synthetic construct
  misc_feature 1..22: note = chemically synthesized
  source 1..22: mol_type = other DNA
aaagggtattacaatagtactt

SEQ ID NO: 100676 - DNA, 22 bp, synthetic construct
  misc_feature 1..22: note = chemically synthesized
  source 1..22: mol_type = other DNA
aagggtattacaatagtacttg

SEQ ID NO: 100677 - DNA, 22 bp, synthetic construct
  misc_feature 1..22: note = chemically synthesized
  source 1..22: mol_type = other DNA
caatagtacttgaggcacagag

SEQ ID NO: 100678 - DNA, 22 bp, synthetic construct
  misc_feature 1..22: note = chemically synthesized
  source 1..22: mol_type = other DNA
gaggcacagagttactgtgaat

SEQ ID NO: 100679 - DNA, 22 bp, synthetic construct
  misc_feature 1..22: note = chemically synthesized
  source 1..22: mol_type = other DNA
aggcacagagttactgtgaata

SEQ ID NO: 100680 - DNA, 22 bp, synthetic construct
  misc_feature 1..22: note = chemically synthesized
  source 1..22: mol_type = other DNA
ctgtgaatactaaatgaaataa

SEQ ID NO: 100681 - DNA, 22 bp, synthetic construct
  misc_feature 1..22: note = chemically synthesized
  source 1..22: mol_type = other DNA
tgaatactaaatgaaataatat

SEQ ID NO: 100682 - DNA, 22 bp, synthetic construct
  misc_feature 1..22: note = chemically synthesized
  source 1..22: mol_type = other DNA
aatgaaataatatatcaacagt

SEQ ID NO: 100683 - DNA, 22 bp, synthetic construct
  misc_feature 1..22: note = chemically synthesized
  source 1..22: mol_type = other DNA
gtgtatagtataagccataatc

SEQ ID NO: 100684 - DNA, 22 bp, synthetic construct
  misc_feature 1..22: note = chemically synthesized
  source 1..22: mol_type = other DNA
tgtatagtataagccataatca

SEQ ID NO: 100685 - DNA, 22 bp, synthetic construct
  misc_feature 1..22: note = chemically synthesized
  source 1..22: mol_type = other DNA
tattgttattactattactact

SEQ ID NO: 100686 - DNA, 22 bp, synthetic construct
  misc_feature 1..22: note = chemically synthesized
  source 1..22: mol_type = other DNA
ttattactattactactattat

SEQ ID NO: 100687 - DNA, 22 bp, synthetic construct
  misc_feature 1..22: note = chemically synthesized
  source 1..22: mol_type = other DNA
ttactattactactattattac

SEQ ID NO: 100688 - DNA, 22 bp, synthetic construct
  misc_feature 1..22: note = chemically synthesized
  source 1..22: mol_type = other DNA
ctattactactattattactat

SEQ ID NO: 100689 - DNA, 22 bp, synthetic construct
  misc_feature 1..22: note = chemically synthesized
  source 1..22: mol_type = other DNA
ttactactattattactattac

SEQ ID NO: 100690 - DNA, 22 bp, synthetic construct
  misc_feature 1..22: note = chemically synthesized
  source 1..22: mol_type = other DNA
ctactattattactattacttt

SEQ ID NO: 100691 - DNA, 22 bp, synthetic construct
  misc_feature 1..22: note = chemically synthesized
  source 1..22: mol_type = other DNA
ctattattactattacttttat

SEQ ID NO: 100692 - DNA, 22 bp, synthetic construct
  misc_feature 1..22: note = chemically synthesized
  source 1..22: mol_type = other DNA
ttattactattacttttatact

SEQ ID NO: 100693 - DNA, 22 bp, synthetic construct
  misc_feature 1..22: note = chemically synthesized
  source 1..22: mol_type = other DNA
ttactattacttttatactatc

SEQ ID NO: 100694 - DNA, 22 bp, synthetic construct
  misc_feature 1..22: note = chemically synthesized
  source 1..22: mol_type = other DNA
ctattacttttatactatccta

SEQ ID NO: 100695 - DNA, 22 bp, synthetic construct
  misc_feature 1..22: note = chemically synthesized
  source 1..22: mol_type = other DNA
ttacttttatactatcctagtg

SEQ ID NO: 100696 - DNA, 22 bp, synthetic construct
  misc_feature 1..22: note = chemically synthesized
  source 1..22: mol_type = other DNA
cttttatactatcctagtgtgt

SEQ ID NO: 100697 - DNA, 22 bp, synthetic construct
  misc_feature 1..22: note = chemically synthesized
  source 1..22: mol_type = other DNA
ttatactatcctagtgtgtaga

SEQ ID NO: 100698 - DNA, 22 bp, synthetic construct
  misc_feature 1..22: note = chemically synthesized
  source 1..22: mol_type = other DNA
tatactatcctagtgtgtagat

SEQ ID NO: 100699 - DNA, 22 bp, synthetic construct
  misc_feature 1..22: note = chemically synthesized
  source 1..22: mol_type = other DNA
atactatcctagtgtgtagatt

SEQ ID NO: 100700 - DNA, 22 bp, synthetic construct
  misc_feature 1..22: note = chemically synthesized
  source 1..22: mol_type = other DNA
tactatcctagtgtgtagattg

SEQ ID NO: 100701 - DNA, 22 bp, synthetic construct
  misc_feature 1..22: note = chemically synthesized
  source 1..22: mol_type = other DNA
tcctagtgtgtagattgaggat

SEQ ID NO: 100702 - DNA, 22 bp, synthetic construct
  misc_feature 1..22: note = chemically synthesized
  source 1..22: mol_type = other DNA
gtgtgtagattgaggatgtagg

SEQ ID NO: 100703 - DNA, 22 bp, synthetic construct
  misc_feature 1..22: note = chemically synthesized
  source 1..22: mol_type = other DNA
aggatgtaggggcttagagcaa

SEQ ID NO: 100704 - DNA, 22 bp, synthetic construct
  misc_feature 1..22: note = chemically synthesized
  source 1..22: mol_type = other DNA
agagcaaagacatgaaggtcac

SEQ ID NO: 100705 - DNA, 22 bp, synthetic construct
  misc_feature 1..22: note = chemically synthesized
  source 1..22: mol_type = other DNA
gagcaaagacatgaaggtcaca

SEQ ID NO: 100706 - DNA, 22 bp, synthetic construct
  misc_feature 1..22: note = chemically synthesized
  source 1..22: mol_type = other DNA
tcaaggattacacgagtctttc

SEQ ID NO: 100707 - DNA, 22 bp, synthetic construct
  misc_feature 1..22: note = chemically synthesized
  source 1..22: mol_type = other DNA
cacgagtctttctctgcaaagc

SEQ ID NO: 100708 - DNA, 22 bp, synthetic construct
  misc_feature 1..22: note = chemically synthesized
  source 1..22: mol_type = other DNA
tctctgcaaagcgagggaaggt

SEQ ID NO: 100709 - DNA, 22 bp, synthetic construct
  misc_feature 1..22: note = chemically synthesized
  source 1..22: mol_type = other DNA
ctctgcaaagcgagggaaggtt

SEQ ID NO: 100710 - DNA, 22 bp, synthetic construct
  misc_feature 1..22: note = chemically synthesized
  source 1..22: mol_type = other DNA
tctgcaaagcgagggaaggtta

SEQ ID NO: 100711 - DNA, 22 bp, synthetic construct
  misc_feature 1..22: note = chemically synthesized
  source 1..22: mol_type = other DNA
tgcaaagcgagggaaggttagt

SEQ ID NO: 100712 - DNA, 22 bp, synthetic construct
  misc_feature 1..22: note = chemically synthesized
  source 1..22: mol_type = other DNA
caaagcgagggaaggttagtct

SEQ ID NO: 100713 - DNA, 22 bp, synthetic construct
  misc_feature 1..22: note = chemically synthesized
  source 1..22: mol_type = other DNA
gtctctttcagagaacatcatg

SEQ ID NO: 100714 - DNA, 22 bp, synthetic construct
  misc_feature 1..22: note = chemically synthesized
  source 1..22: mol_type = other DNA
tttcagagaacatcatggcaga

SEQ ID NO: 100715 - DNA, 22 bp, synthetic construct
  misc_feature 1..22: note = chemically synthesized
  source 1..22: mol_type = other DNA
tcagagaacatcatggcagaaa

SEQ ID NO: 100716 - DNA, 22 bp, synthetic construct
  misc_feature 1..22: note = chemically synthesized
  source 1..22: mol_type = other DNA
cagagaacatcatggcagaaac

SEQ ID NO: 100717 - DNA, 22 bp, synthetic construct
  misc_feature 1..22: note = chemically synthesized
  source 1..22: mol_type = other DNA
agagaacatcatggcagaaaca

SEQ ID NO: 100718 - DNA, 22 bp, synthetic construct
  misc_feature 1..22: note = chemically synthesized
  source 1..22: mol_type = other DNA
tttcaagagaatccatgcattt

SEQ ID NO: 100719 - DNA, 22 bp, synthetic construct
  misc_feature 1..22: note = chemically synthesized
  source 1..22: mol_type = other DNA
ttcaagagaatccatgcatttt

SEQ ID NO: 100720 - DNA, 22 bp, synthetic construct
  misc_feature 1..22: note = chemically synthesized
  source 1..22: mol_type = other DNA
tcaagagaatccatgcatttta

SEQ ID NO: 100721 - DNA, 22 bp, synthetic construct
  misc_feature 1..22: note = chemically synthesized
  source 1..22: mol_type = other DNA
caagagaatccatgcattttac

SEQ ID NO: 100722 - DNA, 22 bp, synthetic construct
  misc_feature 1..22: note = chemically synthesized
  source 1..22: mol_type = other DNA
aagagaatccatgcattttacg

SEQ ID NO: 100723 - DNA, 22 bp, synthetic construct
  misc_feature 1..22: note = chemically synthesized
  source 1..22: mol_type = other DNA
tacgtccatgtagttgcaaaca

SEQ ID NO: 100724 - DNA, 22 bp, synthetic construct
  misc_feature 1..22: note = chemically synthesized
  source 1..22: mol_type = other DNA
acgtccatgtagttgcaaacaa

SEQ ID NO: 100725 - DNA, 22 bp, synthetic construct
  misc_feature 1..22: note = chemically synthesized
  source 1..22: mol_type = other DNA
cgtccatgtagttgcaaacaat

SEQ ID NO: 100726 - DNA, 22 bp, synthetic construct
  misc_feature 1..22: note = chemically synthesized
  source 1..22: mol_type = other DNA
caaacaatgccaagtagaactc

SEQ ID NO: 100727 - DNA, 22 bp, synthetic construct
  misc_feature 1..22: note = chemically synthesized
  source 1..22: mol_type = other DNA
caatccagagctaagtggggct

SEQ ID NO: 100728 - DNA, 22 bp, synthetic construct
  misc_feature 1..22: note = chemically synthesized
  source 1..22: mol_type = other DNA
agtggggctgtgggaactatgt

SEQ ID NO: 100729 - DNA, 22 bp, synthetic construct
  misc_feature 1..22: note = chemically synthesized
  source 1..22: mol_type = other DNA
tgggaactatgtaccaattgat

SEQ ID NO: 100730 - DNA, 22 bp, synthetic construct
  misc_feature 1..22: note = chemically synthesized
  source 1..22: mol_type = other DNA
tgtaccaattgatggacatgct

SEQ ID NO: 100731 - DNA, 22 bp, synthetic construct
  misc_feature 1..22: note = chemically synthesized
  source 1..22: mol_type = other DNA
atggacatgctgctttttgact

SEQ ID NO: 100732 - DNA, 22 bp, synthetic construct
  misc_feature 1..22: note = chemically synthesized
  source 1..22: mol_type = other DNA
ctttttgactcagaggtggata

SEQ ID NO: 100733 - DNA, 22 bp, synthetic construct
  misc_feature 1..22: note = chemically synthesized
  source 1..22: mol_type = other DNA
tttgactcagaggtggataaga

SEQ ID NO: 100734 - DNA, 22 bp, synthetic construct
  misc_feature 1..22: note = chemically synthesized
  source 1..22: mol_type = other DNA
ttgactcagaggtggataagag

SEQ ID NO: 100735 - DNA, 22 bp, synthetic construct
  misc_feature 1..22: note = chemically synthesized
  source 1..22: mol_type = other DNA
tgactcagaggtggataagaga

SEQ ID NO: 100736 - DNA, 22 bp, synthetic construct
  misc_feature 1..22: note = chemically synthesized
  source 1..22: mol_type = other DNA
gactcagaggtggataagagac

SEQ ID NO: 100737 - DNA, 22 bp, synthetic construct
  misc_feature 1..22: note = chemically synthesized
  source 1..22: mol_type = other DNA
actcagaggtggataagagaca

SEQ ID NO: 100738 - DNA, 22 bp, synthetic construct
  misc_feature 1..22: note = chemically synthesized
  source 1..22: mol_type = other DNA
agaggtggataagagacaaaac

SEQ ID NO: 100739 - DNA, 22 bp, synthetic construct
  misc_feature 1..22: note = chemically synthesized
  source 1..22: mol_type = other DNA
ttttcttcttagatgtactaaa

SEQ ID NO: 100740 - DNA, 22 bp, synthetic construct
  misc_feature 1..22: note = chemically synthesized
  source 1..22: mol_type = other DNA
ttcttcttagatgtactaaaaa

SEQ ID NO: 100741 - DNA, 22 bp, synthetic construct
  misc_feature 1..22: note = chemically synthesized
  source 1..22: mol_type = other DNA
tcttcttagatgtactaaaaag

SEQ ID NO: 100742 - DNA, 22 bp, synthetic construct
  misc_feature 1..22: note = chemically synthesized
  source 1..22: mol_type = other DNA
cttcttagatgtactaaaaagt

SEQ ID NO: 100743 - DNA, 22 bp, synthetic construct
  misc_feature 1..22: note = chemically synthesized
  source 1..22: mol_type = other DNA
ttcttagatgtactaaaaagta

SEQ ID NO: 100744 - DNA, 22 bp, synthetic construct
  misc_feature 1..22: note = chemically synthesized
  source 1..22: mol_type = other DNA
cttagatgtactaaaaagtagt

SEQ ID NO: 100745 - DNA, 22 bp, synthetic construct
  misc_feature 1..22: note = chemically synthesized
  source 1..22: mol_type = other DNA
ttagatgtactaaaaagtagtt

SEQ ID NO: 100746 - DNA, 22 bp, synthetic construct
  misc_feature 1..22: note = chemically synthesized
  source 1..22: mol_type = other DNA
agatgtactaaaaagtagttag

SEQ ID NO: 100747 - DNA, 22 bp, synthetic construct
  misc_feature 1..22: note = chemically synthesized
  source 1..22: mol_type = other DNA
gatgtactaaaaagtagttagt

SEQ ID NO: 100748 - DNA, 22 bp, synthetic construct
  misc_feature 1..22: note = chemically synthesized
  source 1..22: mol_type = other DNA
aaaagtagttagtctggaagta

SEQ ID NO: 100749 - DNA, 22 bp, synthetic construct
  misc_feature 1..22: note = chemically synthesized
  source 1..22: mol_type = other DNA
gtctggaagtatttagaaggct

SEQ ID NO: 100750 - DNA, 22 bp, synthetic construct
  misc_feature 1..22: note = chemically synthesized
  source 1..22: mol_type = other DNA
gaagtatttagaaggctttgga

SEQ ID NO: 100751 - DNA, 22 bp, synthetic construct
  misc_feature 1..22: note = chemically synthesized
  source 1..22: mol_type = other DNA
agaaggctttggagaggaatgt

SEQ ID NO: 100752 - DNA, 22 bp, synthetic construct
  misc_feature 1..22: note = chemically synthesized
  source 1..22: mol_type = other DNA
gaaggctttggagaggaatgtg

SEQ ID NO: 100753 - DNA, 22 bp, synthetic construct
  misc_feature 1..22: note = chemically synthesized
  source 1..22: mol_type = other DNA
tggagaggaatgtgattttatc

SEQ ID NO: 100754 - DNA, 22 bp, synthetic construct
  misc_feature 1..22: note = chemically synthesized
  source 1..22: mol_type = other DNA
ggagaggaatgtgattttatca

SEQ ID NO: 100755 - DNA, 22 bp, synthetic construct
  misc_feature 1..22: note = chemically synthesized
  source 1..22: mol_type = other DNA
gagaggaatgtgattttatcag

SEQ ID NO: 100756 - DNA, 22 bp, synthetic construct
  misc_feature 1..22: note = chemically synthesized
  source 1..22: mol_type = other DNA
tatcaggtaaatcaaaaataga

SEQ ID NO: 100757 - DNA, 22 bp, synthetic construct
  misc_feature 1..22: note = chemically synthesized
  source 1..22: mol_type = other DNA
atcaggtaaatcaaaaatagag

SEQ ID NO: 100758 - DNA, 22 bp, synthetic construct
  misc_feature 1..22: note = chemically synthesized
  source 1..22: mol_type = other DNA
tcaggtaaatcaaaaatagagg

SEQ ID NO: 100759 - DNA, 22 bp, synthetic construct
  misc_feature 1..22: note = chemically synthesized
  source 1..22: mol_type = other DNA
tttctgaaagaagcaactagaa

SEQ ID NO: 100760 - DNA, 22 bp, synthetic construct
  misc_feature 1..22: note = chemically synthesized
  source 1..22: mol_type = other DNA
ctgaaagaagcaactagaacca

SEQ ID NO: 100761 - DNA, 22 bp, synthetic construct
  misc_feature 1..22: note = chemically synthesized
  source 1..22: mol_type = other DNA
tgaaagaagcaactagaaccaa

SEQ ID NO: 100762 - DNA, 22 bp, synthetic construct
  misc_feature 1..22: note = chemically synthesized
  source 1..22: mol_type = other DNA
aaagaagcaactagaaccaagt

SEQ ID NO: 100763 - DNA, 22 bp, synthetic construct
  misc_feature 1..22: note = chemically synthesized
  source 1..22: mol_type = other DNA
gaaccaagttacacacagaaaa

SEQ ID NO: 100764 - DNA, 22 bp, synthetic construct
  misc_feature 1..22: note = chemically synthesized
  source 1..22: mol_type = other DNA
cacacagaaaatacccataatg

SEQ ID NO: 100765 - DNA, 22 bp, synthetic construct
  misc_feature 1..22: note = chemically synthesized
  source 1..22: mol_type = other DNA
ttgactagagtagcatgtgcaa

SEQ ID NO: 100766 - DNA, 22 bp, synthetic construct
  misc_feature 1..22: note = chemically synthesized
  source 1..22: mol_type = other DNA
tgactagagtagcatgtgcaaa

SEQ ID NO: 100767 - DNA, 22 bp, synthetic construct
  misc_feature 1..22: note = chemically synthesized
  source 1..22: mol_type = other DNA
gactagagtagcatgtgcaaat

SEQ ID NO: 100768 - DNA, 22 bp, synthetic construct
  misc_feature 1..22: note = chemically synthesized
  source 1..22: mol_type = other DNA
actagagtagcatgtgcaaatt

SEQ ID NO: 100769 - DNA, 22 bp, synthetic construct
  misc_feature 1..22: note = chemically synthesized
  source 1..22: mol_type = other DNA
gagtagcatgtgcaaatttgta

SEQ ID NO: 100770 - DNA, 22 bp, synthetic construct
  misc_feature 1..22: note = chemically synthesized
  source 1..22: mol_type = other DNA
gtataaaatatttgcaggtaag

SEQ ID NO: 100771 - DNA, 22 bp, synthetic construct
  misc_feature 1..22: note = chemically synthesized
  source 1..22: mol_type = other DNA
tataaaatatttgcaggtaagt

SEQ ID NO: 100772 - DNA, 22 bp, synthetic construct
  misc_feature 1..22: note = chemically synthesized
  source 1..22: mol_type = other DNA
gcaggtaagttaggtaatgcaa

SEQ ID NO: 100773 - DNA, 22 bp, synthetic construct
  misc_feature 1..22: note = chemically synthesized
  source 1..22: mol_type = other DNA
caggtaagttaggtaatgcaac

SEQ ID NO: 100774 - DNA, 22 bp, synthetic construct
  misc_feature 1..22: note = chemically synthesized
  source 1..22: mol_type = other DNA
ggtaatgcaacatttgagactc

SEQ ID NO: 100775 - DNA, 22 bp, synthetic construct
  misc_feature 1..22: note = chemically synthesized
  source 1..22: mol_type = other DNA
gagactctaagtttgtgggaaa

SEQ ID NO: 100776 - DNA, 22 bp, synthetic construct
  misc_feature 1..22: note = chemically synthesized
  source 1..22: mol_type = other DNA
agactctaagtttgtgggaaac

SEQ ID NO: 100777 - DNA, 22 bp, synthetic construct
  misc_feature 1..22: note = chemically synthesized
  source 1..22: mol_type = other DNA
taagtttgtgggaaacttagaa

SEQ ID NO: 100778 - DNA, 22 bp, synthetic construct
  misc_feature 1..22: note = chemically synthesized
  source 1..22: mol_type = other DNA
agtttgtgggaaacttagaact

SEQ ID NO: 100779 - DNA, 22 bp, synthetic construct
  misc_feature 1..22: note = chemically synthesized
  source 1..22: mol_type = other DNA
gtgggaaacttagaactgtttc

SEQ ID NO: 100780 - DNA, 22 bp, synthetic construct
  misc_feature 1..22: note = chemically synthesized
  source 1..22: mol_type = other DNA
tgggaaacttagaactgtttca

SEQ ID NO: 100781 - DNA, 22 bp, synthetic construct
  misc_feature 1..22: note = chemically synthesized
  source 1..22: mol_type = other DNA
agaactgtttcagttttctaca

SEQ ID NO: 100782 - DNA, 22 bp, synthetic construct
  misc_feature 1..22: note = chemically synthesized
  source 1..22: mol_type = other DNA
gaactgtttcagttttctacat

SEQ ID NO: 100783 - DNA, 22 bp, synthetic construct
  misc_feature 1..22: note = chemically synthesized
  source 1..22: mol_type = other DNA
tttcagttttctacattattcc

SEQ ID NO: 100784 - DNA, 22 bp, synthetic construct
  misc_feature 1..22: note = chemically synthesized
  source 1..22: mol_type = other DNA
cagttttctacattattcctaa

SEQ ID NO: 100785 - DNA, 22 bp, synthetic construct
  misc_feature 1..22: note = chemically synthesized
  source 1..22: mol_type = other DNA
agttttctacattattcctaac

SEQ ID NO: 100786 - DNA, 22 bp, synthetic construct
  misc_feature 1..22: note = chemically synthesized
  source 1..22: mol_type = other DNA
tctacattattcctaactattt

SEQ ID NO: 100787 - DNA, 22 bp, synthetic construct
  misc_feature 1..22: note = chemically synthesized
  source 1..22: mol_type = other DNA
ctacattattcctaactattta

SEQ ID NO: 100788 - DNA, 22 bp, synthetic construct
  misc_feature 1..22: note = chemically synthesized
  source 1..22: mol_type = other DNA
tacattattcctaactatttaa

SEQ ID NO: 100789 - DNA, 22 bp, synthetic construct
  misc_feature 1..22: note = chemically synthesized
  source 1..22: mol_type = other DNA
cattattcctaactatttaaaa

SEQ ID NO: 100790 - DNA, 22 bp, synthetic construct
  misc_feature 1..22: note = chemically synthesized
  source 1..22: mol_type = other DNA
ttcctaactatttaaaatgcta

SEQ ID NO: 100791 - DNA, 22 bp, synthetic construct
  misc_feature 1..22: note = chemically synthesized
  source 1..22: mol_type = other DNA
ctaactatttaaaatgctatga

SEQ ID NO: 100792 - DNA, 22 bp, synthetic construct
  misc_feature 1..22: note = chemically synthesized
  source 1..22: mol_type = other DNA
actatttaaaatgctatgaaat

SEQ ID NO: 100793 - DNA, 22 bp, synthetic construct
  misc_feature 1..22: note = chemically synthesized
  source 1..22: mol_type = other DNA
tttaaaatgctatgaaatgatt

SEQ ID NO: 100794 - DNA, 22 bp, synthetic construct
  misc_feature 1..22: note = chemically synthesized
  source 1..22: mol_type = other DNA
aaaatgctatgaaatgattttg

SEQ ID NO: 100795 - DNA, 22 bp, synthetic construct
  misc_feature 1..22: note = chemically synthesized
  source 1..22: mol_type = other DNA
aaatgctatgaaatgattttgc

SEQ ID NO: 100796 - DNA, 22 bp, synthetic construct
  misc_feature 1..22: note = chemically synthesized
  source 1..22: mol_type = other DNA
tgaaatgattttgcagattttt

SEQ ID NO: 100797 - DNA, 22 bp, synthetic construct
  misc_feature 1..22: note = chemically synthesized
  source 1..22: mol_type = other DNA
tgcagatttttctgagatgttt

SEQ ID NO: 100798 - DNA, 22 bp, synthetic construct
  misc_feature 1..22: note = chemically synthesized
  source 1..22: mol_type = other DNA
gcagatttttctgagatgttta

SEQ ID NO: 100799 - DNA, 22 bp, synthetic construct
  misc_feature 1..22: note = chemically synthesized
  source 1..22: mol_type = other DNA
cagatttttctgagatgtttat

SEQ ID NO: 100800 - DNA, 22 bp, synthetic construct
  misc_feature 1..22: note = chemically synthesized
  source 1..22: mol_type = other DNA
ttctgagatgtttatagtgata

SEQ ID NO: 100801 - DNA, 22 bp, synthetic construct
  misc_feature 1..22: note = chemically synthesized
  source 1..22: mol_type = other DNA
tctgagatgtttatagtgataa

SEQ ID NO: 100802 - DNA, 22 bp, synthetic construct
  misc_feature 1..22: note = chemically synthesized
  source 1..22: mol_type = other DNA
ctgagatgtttatagtgataag

SEQ ID NO: 100803 - DNA, 22 bp, synthetic construct
  misc_feature 1..22: note = chemically synthesized
  source 1..22: mol_type = other DNA
tgagatgtttatagtgataagt

SEQ ID NO: 100804 - DNA, 22 bp, synthetic construct
  misc_feature 1..22: note = chemically synthesized
  source 1..22: mol_type = other DNA
agatgtttatagtgataagtga

SEQ ID NO: 100805 - DNA, 22 bp, synthetic construct
  misc_feature 1..22: note = chemically synthesized
  source 1..22: mol_type = other DNA
atagtgataagtgagaatatat

SEQ ID NO: 100806 - DNA, 22 bp, synthetic construct
  misc_feature 1..22: note = chemically synthesized
  source 1..22: mol_type = other DNA
tagtgataagtgagaatatatg

SEQ ID NO: 100807 - DNA, 22 bp, synthetic construct
  misc_feature 1..22: note = chemically synthesized
  source 1..22: mol_type = other DNA
ttcctttgttgtataactctgt

SEQ ID NO: 100808 - DNA, 22 bp, synthetic construct
  misc_feature 1..22: note = chemically synthesized
  source 1..22: mol_type = other DNA
ctttgttgtataactctgttta

SEQ ID NO: 100809 - DNA, 22 bp, synthetic construct
  misc_feature 1..22: note = chemically synthesized
  source 1..22: mol_type = other DNA
tgttgtataactctgtttaaaa

SEQ ID NO: 100810 - DNA, 22 bp, synthetic construct
  misc_feature 1..22: note = chemically synthesized
  source 1..22: mol_type = other DNA
gttgtataactctgtttaaaat

SEQ ID NO: 100811 - DNA, 22 bp, synthetic construct
  misc_feature 1..22: note = chemically synthesized
  source 1..22: mol_type = other DNA
ttgtataactctgtttaaaata

SEQ ID NO: 100812 - DNA, 22 bp, synthetic construct
  misc_feature 1..22: note = chemically synthesized
  source 1..22: mol_type = other DNA
tataactctgtttaaaatatct

SEQ ID NO: 100813 - DNA, 22 bp, synthetic construct
  misc_feature 1..22: note = chemically synthesized
  source 1..22: mol_type = other DNA
tgtttaaaatatcttttatata

SEQ ID NO: 100814 - DNA, 22 bp, synthetic construct
  misc_feature 1..22: note = chemically synthesized
  source 1..22: mol_type = other DNA
tttaaaatatcttttatataat

SEQ ID NO: 100815 - DNA, 22 bp, synthetic construct
  misc_feature 1..22: note = chemically synthesized
  source 1..22: mol_type = other DNA
aaaatatcttttatataatgat

SEQ ID NO: 100816 - DNA, 22 bp, synthetic construct
  misc_feature 1..22: note = chemically synthesized
  source 1..22: mol_type = other DNA
aaatatcttttatataatgata

SEQ ID NO: 100817 - DNA, 22 bp, synthetic construct
  misc_feature 1..22: note = chemically synthesized
  source 1..22: mol_type = other DNA
ttatataatgataaaaaatcta

SEQ ID NO: 100818 - DNA, 22 bp, synthetic construct
  misc_feature 1..22: note = chemically synthesized
  source 1..22: mol_type = other DNA
tatataatgataaaaaatctat

SEQ ID NO: 100819 - DNA, 22 bp, synthetic construct
  misc_feature 1..22: note = chemically synthesized
  source 1..22: mol_type = other DNA
atataatgataaaaaatctatc

SEQ ID NO: 100820 - DNA, 22 bp, synthetic construct
  misc_feature 1..22: note = chemically synthesized
  source 1..22: mol_type = other DNA
tataatgataaaaaatctatct

SEQ ID NO: 100821 - DNA, 22 bp, synthetic construct
  misc_feature 1..22: note = chemically synthesized
  source 1..22: mol_type = other DNA
tctctttgtaacttaccacagc

SEQ ID NO: 100822 - DNA, 22 bp, synthetic construct
  misc_feature 1..22: note = chemically synthesized
  source 1..22: mol_type = other DNA
tttgtaacttaccacagcagat

SEQ ID NO: 100823 - DNA, 22 bp, synthetic construct
  misc_feature 1..22: note = chemically synthesized
  source 1..22: mol_type = other DNA
tgtaacttaccacagcagattt

SEQ ID NO: 100824 - DNA, 22 bp, synthetic construct
  misc_feature 1..22: note = chemically synthesized
  source 1..22: mol_type = other DNA
gtaacttaccacagcagatttg

SEQ ID NO: 100825 - DNA, 22 bp, synthetic construct
  misc_feature 1..22: note = chemically synthesized
  source 1..22: mol_type = other DNA
taacttaccacagcagatttgt

SEQ ID NO: 100826 - DNA, 22 bp, synthetic construct
  misc_feature 1..22: note = chemically synthesized
  source 1..22: mol_type = other DNA
accacagcagatttgtattatt

SEQ ID NO: 100827 - DNA, 22 bp, synthetic construct
  misc_feature 1..22: note = chemically synthesized
  source 1..22: mol_type = other DNA
ccacagcagatttgtattattt

SEQ ID NO: 100828 - DNA, 22 bp, synthetic construct
  misc_feature 1..22: note = chemically synthesized
  source 1..22: mol_type = other DNA
gtattattttatgtgaagaaac

SEQ ID NO: 100829 - DNA, 22 bp, synthetic construct
  misc_feature 1..22: note = chemically synthesized
  source 1..22: mol_type = other DNA
tattattttatgtgaagaaact

SEQ ID NO: 100830 - DNA, 22 bp, synthetic construct
  misc_feature 1..22: note = chemically synthesized
  source 1..22: mol_type = other DNA
ttttatgtgaagaaactcagaa

SEQ ID NO: 100831 - DNA, 22 bp, synthetic construct
  misc_feature 1..22: note = chemically synthesized
  source 1..22: mol_type = other DNA
tatgtgaagaaactcagaatat

SEQ ID NO: 100832 - DNA, 22 bp, synthetic construct
  misc_feature 1..22: note = chemically synthesized
  source 1..22: mol_type = other DNA
atgtgaagaaactcagaatatg

SEQ ID NO: 100833 - DNA, 22 bp, synthetic construct
  misc_feature 1..22: note = chemically synthesized
  source 1..22: mol_type = other DNA
tgtgaagaaactcagaatatgg

SEQ ID NO: 100834 - DNA, 22 bp, synthetic construct
  misc_feature 1..22: note = chemically synthesized
  source 1..22: mol_type = other DNA
agaatatggagtattttttttc

SEQ ID NO: 100835 - DNA, 22 bp, synthetic construct
  misc_feature 1..22: note = chemically synthesized
  source 1..22: mol_type = other DNA
tttttctcaaattatcactttt

SEQ ID NO: 100836 - DNA, 22 bp, synthetic construct
  misc_feature 1..22: note = chemically synthesized
  source 1..22: mol_type = other DNA
ttttctcaaattatcactttta

SEQ ID NO: 100837 - DNA, 22 bp, synthetic construct
  misc_feature 1..22: note = chemically synthesized
  source 1..22: mol_type = other DNA
tttctcaaattatcacttttat

SEQ ID NO: 100838 - DNA, 22 bp, synthetic construct
  misc_feature 1..22: note = chemically synthesized
  source 1..22: mol_type = other DNA
ttctcaaattatcacttttata

SEQ ID NO: 100839 - DNA, 22 bp, synthetic construct
  misc_feature 1..22: note = chemically synthesized
  source 1..22: mol_type = other DNA
tctcaaattatcacttttataa

SEQ ID NO: 100840 - DNA, 22 bp, synthetic construct
  misc_feature 1..22: note = chemically synthesized
  source 1..22: mol_type = other DNA
ctcaaattatcacttttataag

SEQ ID NO: 100841 - DNA, 22 bp, synthetic construct
  misc_feature 1..22: note = chemically synthesized
  source 1..22: mol_type = other DNA
tcaaattatcacttttataagg

SEQ ID NO: 100842 - DNA, 22 bp, synthetic construct
  misc_feature 1..22: note = chemically synthesized
  source 1..22: mol_type = other DNA
aaattatcacttttataaggat

SEQ ID NO: 100843 - DNA, 22 bp, synthetic construct
  misc_feature 1..22: note = chemically synthesized
  source 1..22: mol_type = other DNA
tcacttttataaggatctgcta

SEQ ID NO: 100844 - DNA, 22 bp, synthetic construct
  misc_feature 1..22: note = chemically synthesized
  source 1..22: mol_type = other DNA
ttataaggatctgctatctatc

SEQ ID NO: 100845 - DNA, 22 bp, synthetic construct
  misc_feature 1..22: note = chemically synthesized
  source 1..22: mol_type = other DNA
tataaggatctgctatctatcc

SEQ ID NO: 100846 - DNA, 22 bp, synthetic construct
  misc_feature 1..22: note = chemically synthesized
  source 1..22: mol_type = other DNA
ataaggatctgctatctatcca

SEQ ID NO: 100847 - DNA, 22 bp, synthetic construct
  misc_feature 1..22: note = chemically synthesized
  source 1..22: mol_type = other DNA
taaggatctgctatctatccat

SEQ ID NO: 100848 - DNA, 22 bp, synthetic construct
  misc_feature 1..22: note = chemically synthesized
  source 1..22: mol_type = other DNA
ctatctatccatcttattttct

SEQ ID NO: 100849 - DNA, 22 bp, synthetic construct
  misc_feature 1..22: note = chemically synthesized
  source 1..22: mol_type = other DNA
tctatccatcttattttcttta

SEQ ID NO: 100850 - DNA, 22 bp, synthetic construct
  misc_feature 1..22: note = chemically synthesized
  source 1..22: mol_type = other DNA
tccatcttattttctttatgta

SEQ ID NO: 100851 - DNA, 22 bp, synthetic construct
  misc_feature 1..22: note = chemically synthesized
  source 1..22: mol_type = other DNA
attttctttatgtaaaccagtg

SEQ ID NO: 100852 - DNA, 22 bp, synthetic construct
  misc_feature 1..22: note = chemically synthesized
  source 1..22: mol_type = other DNA
ttttctttatgtaaaccagtgt

SEQ ID NO: 100853 - DNA, 22 bp, synthetic construct
  misc_feature 1..22: note = chemically synthesized
  source 1..22: mol_type = other DNA
tctttatgtaaaccagtgtttt

SEQ ID NO: 100854 - DNA, 22 bp, synthetic construct
  misc_feature 1..22: note = chemically synthesized
  source 1..22: mol_type = other DNA
ctttatgtaaaccagtgtttta

SEQ ID NO: 100855 - DNA, 22 bp, synthetic construct
  misc_feature 1..22: note = chemically synthesized
  source 1..22: mol_type = other DNA
tttatgtaaaccagtgttttat

SEQ ID NO: 100856 - DNA, 22 bp, synthetic construct
  misc_feature 1..22: note = chemically synthesized
  source 1..22: mol_type = other DNA
tatgtaaaccagtgttttatct

SEQ ID NO: 100857 - DNA, 22 bp, synthetic construct
  misc_feature 1..22: note = chemically synthesized
  source 1..22: mol_type = other DNA
atgtaaaccagtgttttatctc

SEQ ID NO: 100858 - DNA, 22 bp, synthetic construct
  misc_feature 1..22: note = chemically synthesized
  source 1..22: mol_type = other DNA
tgtaaaccagtgttttatctct

SEQ ID NO: 100859 - DNA, 22 bp, synthetic construct
  misc_feature 1..22: note = chemically synthesized
  source 1..22: mol_type = other DNA
tatctcttctcattttctatca

SEQ ID NO: 100860 - DNA, 22 bp, synthetic construct
  misc_feature 1..22: note = chemically synthesized
  source 1..22: mol_type = other DNA
atctcttctcattttctatcaa

SEQ ID NO: 100861 - DNA, 22 bp, synthetic construct
  misc_feature 1..22: note = chemically synthesized
  source 1..22: mol_type = other DNA
tctcttctcattttctatcaag

SEQ ID NO: 100862 - DNA, 22 bp, synthetic construct
  misc_feature 1..22: note = chemically synthesized
  source 1..22: mol_type = other DNA
ttctcattttctatcaaggatt

SEQ ID NO: 100863 - DNA, 22 bp, synthetic construct
  misc_feature 1..22: note = chemically synthesized
  source 1..22: mol_type = other DNA
ctcattttctatcaaggattaa

SEQ ID NO: 100864 - DNA, 22 bp, synthetic construct
  misc_feature 1..22: note = chemically synthesized
  source 1..22: mol_type = other DNA
tcattttctatcaaggattaat

SEQ ID NO: 100865 - DNA, 22 bp, synthetic construct
  misc_feature 1..22: note = chemically synthesized
  source 1..22: mol_type = other DNA
attttctatcaaggattaatag

SEQ ID NO: 100866 - DNA, 22 bp, synthetic construct
  misc_feature 1..22: note = chemically synthesized
  source 1..22: mol_type = other DNA
tctatcaaggattaatagattt

SEQ ID NO: 100867 - DNA, 22 bp, synthetic construct
  misc_feature 1..22: note = chemically synthesized
  source 1..22: mol_type = other DNA
ctatcaaggattaatagatttt

SEQ ID NO: 100868 - DNA, 22 bp, synthetic construct
  misc_feature 1..22: note = chemically synthesized
  source 1..22: mol_type = other DNA
tatcaaggattaatagattttt

SEQ ID NO: 100869 - DNA, 22 bp, synthetic construct
  misc_feature 1..22: note = chemically synthesized
  source 1..22: mol_type = other DNA
tcaaggattaatagatttttgt

SEQ ID NO: 100870 - DNA, 22 bp, synthetic construct
  misc_feature 1..22: note = chemically synthesized
  source 1..22: mol_type = other DNA
atagatttttgtcatctttatt

SEQ ID NO: 100871 - DNA, 22 bp, synthetic construct
  misc_feature 1..22: note = chemically synthesized
  source 1..22: mol_type = other DNA
ttgtcatctttattgtcttttt

SEQ ID NO: 100872 - DNA, 22 bp, synthetic construct
  misc_feature 1..22: note = chemically synthesized
  source 1..22: mol_type = other DNA
tgtcatctttattgtctttttt

SEQ ID NO: 100873 - DNA, 22 bp, synthetic construct
  misc_feature 1..22: note = chemically synthesized
  source 1..22: mol_type = other DNA
gtcatctttattgtcttttttt

SEQ ID NO: 100874 - DNA, 22 bp, synthetic construct
  misc_feature 1..22: note = chemically synthesized
  source 1..22: mol_type = other DNA
tcatctttattgtctttttttc

SEQ ID NO: 100875 - DNA, 22 bp, synthetic construct
  misc_feature 1..22: note = chemically synthesized
  source 1..22: mol_type = other DNA
tattgtctttttttctccaact

SEQ ID NO: 100876 - DNA, 22 bp, synthetic construct
  misc_feature 1..22: note = chemically synthesized
  source 1..22: mol_type = other DNA
attgtctttttttctccaactt

SEQ ID NO: 100877 - DNA, 22 bp, synthetic construct
  misc_feature 1..22: note = chemically synthesized
  source 1..22: mol_type = other DNA
ttgtctttttttctccaacttt

SEQ ID NO: 100878 - DNA, 22 bp, synthetic construct
  misc_feature 1..22: note = chemically synthesized
  source 1..22: mol_type = other DNA
tctttttttctccaactttttg

SEQ ID NO: 100879 - DNA, 22 bp, synthetic construct
  misc_feature 1..22: note = chemically synthesized
  source 1..22: mol_type = other DNA
tttttctccaactttttgtatc

SEQ ID NO: 100880 - DNA, 22 bp, synthetic construct
  misc_feature 1..22: note = chemically synthesized
  source 1..22: mol_type = other DNA
ttttctccaactttttgtatct

SEQ ID NO: 100881 - DNA, 22 bp, synthetic construct
  misc_feature 1..22: note = chemically synthesized
  source 1..22: mol_type = other DNA
tttctccaactttttgtatcta

SEQ ID NO: 100882 - DNA, 22 bp, synthetic construct
  misc_feature 1..22: note = chemically synthesized
  source 1..22: mol_type = other DNA
ttctccaactttttgtatctac

SEQ ID NO: 100883 - DNA, 22 bp, synthetic construct
  misc_feature 1..22: note = chemically synthesized
  source 1..22: mol_type = other DNA
tctccaactttttgtatctaca

SEQ ID NO: 100884 - DNA, 22 bp, synthetic construct
  misc_feature 1..22: note = chemically synthesized
  source 1..22: mol_type = other DNA
ctccaactttttgtatctacag

SEQ ID NO: 100885 - DNA, 22 bp, synthetic construct
  misc_feature 1..22: note = chemically synthesized
  source 1..22: mol_type = other DNA
tccaactttttgtatctacagg

SEQ ID NO: 100886 - DNA, 22 bp, synthetic construct
  misc_feature 1..22: note = chemically synthesized
  source 1..22: mol_type = other DNA
caactttttgtatctacaggtt

SEQ ID NO: 100887 - DNA, 22 bp, synthetic construct
  misc_feature 1..22: note = chemically synthesized
  source 1..22: mol_type = other DNA
tttgtatctacaggttcctacc

SEQ ID NO: 100888 - DNA, 22 bp, synthetic construct
  misc_feature 1..22: note = chemically synthesized
  source 1..22: mol_type = other DNA
ttgtatctacaggttcctacct

SEQ ID NO: 100889 - DNA, 22 bp, synthetic construct
  misc_feature 1..22: note = chemically synthesized
  source 1..22: mol_type = other DNA
tgtatctacaggttcctacctt

SEQ ID NO: 100890 - DNA, 22 bp, synthetic construct
  misc_feature 1..22: note = chemically synthesized
  source 1..22: mol_type = other DNA
gtatctacaggttcctaccttc

SEQ ID NO: 100891 - DNA, 22 bp, synthetic construct
  misc_feature 1..22: note = chemically synthesized
  source 1..22: mol_type = other DNA
tatctacaggttcctaccttca

SEQ ID NO: 100892 - DNA, 22 bp, synthetic construct
  misc_feature 1..22: note = chemically synthesized
  source 1..22: mol_type = other DNA
caggttcctaccttcatttata

SEQ ID NO: 100893 - DNA, 22 bp, synthetic construct
  misc_feature 1..22: note = chemically synthesized
  source 1..22: mol_type = other DNA
ctaccttcatttatattttaaa

SEQ ID NO: 100894 - DNA, 22 bp, synthetic construct
  misc_feature 1..22: note = chemically synthesized
  source 1..22: mol_type = other DNA
ccttcatttatattttaaagta

SEQ ID NO: 100895 - DNA, 22 bp, synthetic construct
  misc_feature 1..22: note = chemically synthesized
  source 1..22: mol_type = other DNA
catttatattttaaagtaggtg

SEQ ID NO: 100896 - DNA, 22 bp, synthetic construct
  misc_feature 1..22: note = chemically synthesized
  source 1..22: mol_type = other DNA
atttatattttaaagtaggtga

SEQ ID NO: 100897 - DNA, 22 bp, synthetic construct
  misc_feature 1..22: note = chemically synthesized
  source 1..22: mol_type = other DNA
atattttaaagtaggtgagcaa

SEQ ID NO: 100898 - DNA, 22 bp, synthetic construct
  misc_feature 1..22: note = chemically synthesized
  source 1..22: mol_type = other DNA
tattttaaagtaggtgagcaaa

SEQ ID NO: 100899 - DNA, 22 bp, synthetic construct
  misc_feature 1..22: note = chemically synthesized
  source 1..22: mol_type = other DNA
taaagtaggtgagcaaatgcat

SEQ ID NO: 100900 - DNA, 22 bp, synthetic construct
  misc_feature 1..22: note = chemically synthesized
  source 1..22: mol_type = other DNA
aaagtaggtgagcaaatgcatt

SEQ ID NO: 100901 - DNA, 22 bp, synthetic construct
  misc_feature 1..22: note = chemically synthesized
  source 1..22: mol_type = other DNA
aagtaggtgagcaaatgcattt

SEQ ID NO: 100902 - DNA, 22 bp, synthetic construct
  misc_feature 1..22: note = chemically synthesized
  source 1..22: mol_type = other DNA
taacactccaagatagatttag

SEQ ID NO: 100903 - DNA, 22 bp, synthetic construct
  misc_feature 1..22: note = chemically synthesized
  source 1..22: mol_type = other DNA
aacactccaagatagatttaga

SEQ ID NO: 100904 - DNA, 22 bp, synthetic construct
  misc_feature 1..22: note = chemically synthesized
  source 1..22: mol_type = other DNA
acactccaagatagatttagat

SEQ ID NO: 100905 - DNA, 22 bp, synthetic construct
  misc_feature 1..22: note = chemically synthesized
  source 1..22: mol_type = other DNA
caagatagatttagattaaaac

SEQ ID NO: 100906 - DNA, 22 bp, synthetic construct
  misc_feature 1..22: note = chemically synthesized
  source 1..22: mol_type = other DNA
agattaaaacatctaaccagga

SEQ ID NO: 100907 - DNA, 22 bp, synthetic construct
  misc_feature 1..22: note = chemically synthesized
  source 1..22: mol_type = other DNA
gattaaaacatctaaccaggat

SEQ ID NO: 100908 - DNA, 22 bp, synthetic construct
  misc_feature 1..22: note = chemically synthesized
  source 1..22: mol_type = other DNA
aaacatctaaccaggataaaca

SEQ ID NO: 100909 - DNA, 22 bp, synthetic construct
  misc_feature 1..22: note = chemically synthesized
  source 1..22: mol_type = other DNA
accaggataaacattgctgtct

SEQ ID NO: 100910 - DNA, 22 bp, synthetic construct
  misc_feature 1..22: note = chemically synthesized
  source 1..22: mol_type = other DNA
ctgtctaaatgtatttgttgtt

SEQ ID NO: 100911 - DNA, 22 bp, synthetic construct
  misc_feature 1..22: note = chemically synthesized
  source 1..22: mol_type = other DNA
tctaaatgtatttgttgtttta

SEQ ID NO: 100912 - DNA, 22 bp, synthetic construct
  misc_feature 1..22: note = chemically synthesized
  source 1..22: mol_type = other DNA
aatgtatttgttgttttaatct

SEQ ID NO: 100913 - DNA, 22 bp, synthetic construct
  misc_feature 1..22: note = chemically synthesized
  source 1..22: mol_type = other DNA
gttgttttaatctcttccgtta

SEQ ID NO: 100914 - DNA, 22 bp, synthetic construct
  misc_feature 1..22: note = chemically synthesized
  source 1..22: mol_type = other DNA
ttgttttaatctcttccgttat

SEQ ID NO: 100915 - DNA, 22 bp, synthetic construct
  misc_feature 1..22: note = chemically synthesized
  source 1..22: mol_type = other DNA
ttttaatctcttccgttattgt

SEQ ID NO: 100916 - DNA, 22 bp, synthetic construct
  misc_feature 1..22: note = chemically synthesized
  source 1..22: mol_type = other DNA
taatctcttccgttattgtaac

SEQ ID NO: 100917 - DNA, 22 bp, synthetic construct
  misc_feature 1..22: note = chemically synthesized
  source 1..22: mol_type = other DNA
aatctcttccgttattgtaaca

SEQ ID NO: 100918 - DNA, 22 bp, synthetic construct
  misc_feature 1..22: note = chemically synthesized
  source 1..22: mol_type = other DNA
atctcttccgttattgtaacat

SEQ ID NO: 100919 - DNA, 22 bp, synthetic construct
  misc_feature 1..22: note = chemically synthesized
  source 1..22: mol_type = other DNA
ttccgttattgtaacatgatga

SEQ ID NO: 100920 - DNA, 22 bp, synthetic construct
  misc_feature 1..22: note = chemically synthesized
  source 1..22: mol_type = other DNA
ccgttattgtaacatgatgagg

SEQ ID NO: 100921 - DNA, 22 bp, synthetic construct
  misc_feature 1..22: note = chemically synthesized
  source 1..22: mol_type = other DNA
cgttattgtaacatgatgagga

SEQ ID NO: 100922 - DNA, 22 bp, synthetic construct
  misc_feature 1..22: note = chemically synthesized
  source 1..22: mol_type = other DNA
ttgtaacatgatgaggagacat

SEQ ID NO: 100923 - DNA, 22 bp, synthetic construct
  misc_feature 1..22: note = chemically synthesized
  source 1..22: mol_type = other DNA
taacatgatgaggagacatgga

SEQ ID NO: 100924 - DNA, 22 bp, synthetic construct
  misc_feature 1..22: note = chemically synthesized
  source 1..22: mol_type = other DNA
ctgctaatttctcctttaaagt

SEQ ID NO: 100925 - DNA, 22 bp, synthetic construct
  misc_feature 1..22: note = chemically synthesized
  source 1..22: mol_type = other DNA
tgctaatttctcctttaaagtc

SEQ ID NO: 100926 - DNA, 22 bp, synthetic construct
  misc_feature 1..22: note = chemically synthesized
  source 1..22: mol_type = other DNA
ctaatttctcctttaaagtcac

SEQ ID NO: 100927 - DNA, 22 bp, synthetic construct
  misc_feature 1..22: note = chemically synthesized
  source 1..22: mol_type = other DNA
atttctcctttaaagtcacttc

SEQ ID NO: 100928 - DNA, 22 bp, synthetic construct
  misc_feature 1..22: note = chemically synthesized
  source 1..22: mol_type = other DNA
ctcctttaaagtcacttcacat

SEQ ID NO: 100929 - DNA, 22 bp, synthetic construct
  misc_feature 1..22: note = chemically synthesized
  source 1..22: mol_type = other DNA
tcctttaaagtcacttcacatt

SEQ ID NO: 100930 - DNA, 22 bp, synthetic construct
  misc_feature 1..22: note = chemically synthesized
  source 1..22: mol_type = other DNA
ctttaaagtcacttcacattag

SEQ ID NO: 100931 - DNA, 22 bp, synthetic construct
  misc_feature 1..22: note = chemically synthesized
  source 1..22: mol_type = other DNA
taaagtcacttcacattagtta

SEQ ID NO: 100932 - DNA, 22 bp, synthetic construct
  misc_feature 1..22: note = chemically synthesized
  source 1..22: mol_type = other DNA
aaagtcacttcacattagttat

SEQ ID NO: 100933 - DNA, 22 bp, synthetic construct
  misc_feature 1..22: note = chemically synthesized
  source 1..22: mol_type = other DNA
aagtcacttcacattagttatc

SEQ ID NO: 100934 - DNA, 22 bp, synthetic construct
  misc_feature 1..22: note = chemically synthesized
  source 1..22: mol_type = other DNA
cacattagttatctcttacata

SEQ ID NO: 100935 - DNA, 22 bp, synthetic construct
  misc_feature 1..22: note = chemically synthesized
  source 1..22: mol_type = other DNA
acattagttatctcttacatat

SEQ ID NO: 100936 - DNA, 22 bp, synthetic construct
  misc_feature 1..22: note = chemically synthesized
  source 1..22: mol_type = other DNA
gttatctcttacatatgagtcc

SEQ ID NO: 100937 - DNA, 22 bp, synthetic construct
  misc_feature 1..22: note = chemically synthesized
  source 1..22: mol_type = other DNA
tctcttacatatgagtccctgg

SEQ ID NO: 100938 - DNA, 22 bp, synthetic construct
  misc_feature 1..22: note = chemically synthesized
  source 1..22: mol_type = other DNA
ttacatatgagtccctggcagt

SEQ ID NO: 100939 - DNA, 22 bp, synthetic construct
  misc_feature 1..22: note = chemically synthesized
  source 1..22: mol_type = other DNA
acatatgagtccctggcagtgt

SEQ ID NO: 100940 - DNA, 22 bp, synthetic construct
  misc_feature 1..22: note = chemically synthesized
  source 1..22: mol_type = other DNA
catatgagtccctggcagtgtc

SEQ ID NO: 100941 - DNA, 22 bp, synthetic construct
  misc_feature 1..22: note = chemically synthesized
  source 1..22: mol_type = other DNA
gcagtgtcagttgaccattcct

SEQ ID NO: 100942 - DNA, 22 bp, synthetic construct
  misc_feature 1..22: note = chemically synthesized
  source 1..22: mol_type = other DNA
accattccttttcatgacccta

SEQ ID NO: 100943 - DNA, 22 bp, synthetic construct
  misc_feature 1..22: note = chemically synthesized
  source 1..22: mol_type = other DNA
cttttcatgaccctaaagactt

SEQ ID NO: 100944 - DNA, 22 bp, synthetic construct
  misc_feature 1..22: note = chemically synthesized
  source 1..22: mol_type = other DNA
ttcatgaccctaaagacttctg

SEQ ID NO: 100945 - DNA, 22 bp, synthetic construct
  misc_feature 1..22: note = chemically synthesized
  source 1..22: mol_type = other DNA
tcatgaccctaaagacttctga

SEQ ID NO: 100946 - DNA, 22 bp, synthetic construct
  misc_feature 1..22: note = chemically synthesized
  source 1..22: mol_type = other DNA
catgaccctaaagacttctgat

SEQ ID NO: 100947 - DNA, 22 bp, synthetic construct
  misc_feature 1..22: note = chemically synthesized
  source 1..22: mol_type = other DNA
atgaccctaaagacttctgata

SEQ ID NO: 100948 - DNA, 22 bp, synthetic construct
  misc_feature 1..22: note = chemically synthesized
  source 1..22: mol_type = other DNA
aagacttctgataaatatactg

SEQ ID NO: 100949 - DNA, 22 bp, synthetic construct
  misc_feature 1..22: note = chemically synthesized
  source 1..22: mol_type = other DNA
ctgataaatatactgcattttt

SEQ ID NO: 100950 - DNA, 22 bp, synthetic construct
  misc_feature 1..22: note = chemically synthesized
  source 1..22: mol_type = other DNA
tgataaatatactgcatttttc

SEQ ID NO: 100951 - DNA, 22 bp, synthetic construct
  misc_feature 1..22: note = chemically synthesized
  source 1..22: mol_type = other DNA
ataaatatactgcatttttcta

SEQ ID NO: 100952 - DNA, 22 bp, synthetic construct
  misc_feature 1..22: note = chemically synthesized
  source 1..22: mol_type = other DNA
catttttctatagctcatttca

SEQ ID NO: 100953 - DNA, 22 bp, synthetic construct
  misc_feature 1..22: note = chemically synthesized
  source 1..22: mol_type = other DNA
ttctatagctcatttcaaccta

SEQ ID NO: 100954 - DNA, 22 bp, synthetic construct
  misc_feature 1..22: note = chemically synthesized
  source 1..22: mol_type = other DNA
tctatagctcatttcaacctac

SEQ ID NO: 100955 - DNA, 22 bp, synthetic construct
  misc_feature 1..22: note = chemically synthesized
  source 1..22: mol_type = other DNA
ctatagctcatttcaacctaca

SEQ ID NO: 100956 - DNA, 22 bp, synthetic construct
  misc_feature 1..22: note = chemically synthesized
  source 1..22: mol_type = other DNA
tatagctcatttcaacctacac

SEQ ID NO: 100957 - DNA, 22 bp, synthetic construct
  misc_feature 1..22: note = chemically synthesized
  source 1..22: mol_type = other DNA
tagctcatttcaacctacacaa

SEQ ID NO: 100958 - DNA, 22 bp, synthetic construct
  misc_feature 1..22: note = chemically synthesized
  source 1..22: mol_type = other DNA
atttcaacctacacaaattatg

SEQ ID NO: 100959 - DNA, 22 bp, synthetic construct
  misc_feature 1..22: note = chemically synthesized
  source 1..22: mol_type = other DNA
caacctacacaaattatgggtt

SEQ ID NO: 100960 - DNA, 22 bp, synthetic construct
  misc_feature 1..22: note = chemically synthesized
  source 1..22: mol_type = other DNA
aacctacacaaattatgggttt

SEQ ID NO: 100961 - DNA, 22 bp, synthetic construct
  misc_feature 1..22: note = chemically synthesized
  source 1..22: mol_type = other DNA
cacaaattatgggtttgcatgc

SEQ ID NO: 100962 - DNA, 22 bp, synthetic construct
  misc_feature 1..22: note = chemically synthesized
  source 1..22: mol_type = other DNA
tgggtttgcatgcctttatccc

SEQ ID NO: 100963 - DNA, 22 bp, synthetic construct
  misc_feature 1..22: note = chemically synthesized
  source 1..22: mol_type = other DNA
gcatgcctttatccctaattag

SEQ ID NO: 100964 - DNA, 22 bp, synthetic construct
  misc_feature 1..22: note = chemically synthesized
  source 1..22: mol_type = other DNA
catgcctttatccctaattagg

SEQ ID NO: 100965 - DNA, 22 bp, synthetic construct
  misc_feature 1..22: note = chemically synthesized
  source 1..22: mol_type = other DNA
tatccctaattaggctacacag

SEQ ID NO: 100966 - DNA, 22 bp, synthetic construct
  misc_feature 1..22: note = chemically synthesized
  source 1..22: mol_type = other DNA
atccctaattaggctacacagc

SEQ ID NO: 100967 - DNA, 22 bp, synthetic construct
  misc_feature 1..22: note = chemically synthesized
  source 1..22: mol_type = other DNA
tccctaattaggctacacagct

SEQ ID NO: 100968 - DNA, 22 bp, synthetic construct
  misc_feature 1..22: note = chemically synthesized
  source 1..22: mol_type = other DNA
attaggctacacagctgtttaa

SEQ ID NO: 100969 - DNA, 22 bp, synthetic construct
  misc_feature 1..22: note = chemically synthesized
  source 1..22: mol_type = other DNA
ggctacacagctgtttaaatta

SEQ ID NO: 100970 - DNA, 22 bp, synthetic construct
  misc_feature 1..22: note = chemically synthesized
  source 1..22: mol_type = other DNA
cacagctgtttaaattaggaat

SEQ ID NO: 100971 - DNA, 22 bp, synthetic construct
  misc_feature 1..22: note = chemically synthesized
  source 1..22: mol_type = other DNA
tttaaattaggaattacagatt

SEQ ID NO: 100972 - DNA, 22 bp, synthetic construct
  misc_feature 1..22: note = chemically synthesized
  source 1..22: mol_type = other DNA
aaattaggaattacagatttcg

SEQ ID NO: 100973 - DNA, 22 bp, synthetic construct
  misc_feature 1..22: note = chemically synthesized
  source 1..22: mol_type = other DNA
aattaggaattacagatttcgc

SEQ ID NO: 100974 - DNA, 22 bp, synthetic construct
  misc_feature 1..22: note = chemically synthesized
  source 1..22: mol_type = other DNA
ggaattacagatttcgccagat

SEQ ID NO: 100975 - DNA, 22 bp, synthetic construct
  misc_feature 1..22: note = chemically synthesized
  source 1..22: mol_type = other DNA
cagatttcgccagataattgta

SEQ ID NO: 100976 - DNA, 22 bp, synthetic construct
  misc_feature 1..22: note = chemically synthesized
  source 1..22: mol_type = other DNA
cgccagataattgtatatctga

SEQ ID NO: 100977 - DNA, 22 bp, synthetic construct
  misc_feature 1..22: note = chemically synthesized
  source 1..22: mol_type = other DNA
gccagataattgtatatctgat

SEQ ID NO: 100978 - DNA, 22 bp, synthetic construct
  misc_feature 1..22: note = chemically synthesized
  source 1..22: mol_type = other DNA
tatatctgatacagattaggca

SEQ ID NO: 100979 - DNA, 22 bp, synthetic construct
  misc_feature 1..22: note = chemically synthesized
  source 1..22: mol_type = other DNA
atacagattaggcatttaataa

SEQ ID NO: 100980 - DNA, 22 bp, synthetic construct
  misc_feature 1..22: note = chemically synthesized
  source 1..22: mol_type = other DNA
ggcatttaataaattttggtga

SEQ ID NO: 100981 - DNA, 22 bp, synthetic construct
  misc_feature 1..22: note = chemically synthesized
  source 1..22: mol_type = other DNA
aataaattttggtgaataggta

SEQ ID NO: 100982 - DNA, 22 bp, synthetic construct
  misc_feature 1..22: note = chemically synthesized
  source 1..22: mol_type = other DNA
ataaattttggtgaataggtaa

SEQ ID NO: 100983 - DNA, 22 bp, synthetic construct
  misc_feature 1..22: note = chemically synthesized
  source 1..22: mol_type = other DNA
tggtgaataggtaaacactaaa

SEQ ID NO: 100984 - DNA, 22 bp, synthetic construct
  misc_feature 1..22: note = chemically synthesized
  source 1..22: mol_type = other DNA
ggtgaataggtaaacactaaat

SEQ ID NO: 100985 - DNA, 22 bp, synthetic construct
  misc_feature 1..22: note = chemically synthesized
  source 1..22: mol_type = other DNA
gtgaataggtaaacactaaatt

SEQ ID NO: 100986 - DNA, 22 bp, synthetic construct
  misc_feature 1..22: note = chemically synthesized
  source 1..22: mol_type = other DNA
aattgttcctcaaacatttgtc

SEQ ID NO: 100987 - DNA, 22 bp, synthetic construct
  misc_feature 1..22: note = chemically synthesized
  source 1..22: mol_type = other DNA
ttcctcaaacatttgtcagatg

SEQ ID NO: 100988 - DNA, 22 bp, synthetic construct
  misc_feature 1..22: note = chemically synthesized
  source 1..22: mol_type = other DNA
ctcaaacatttgtcagatgttc

SEQ ID NO: 100989 - DNA, 22 bp, synthetic construct
  misc_feature 1..22: note = chemically synthesized
  source 1..22: mol_type = other DNA
aaacatttgtcagatgttcact

SEQ ID NO: 100990 - DNA, 22 bp, synthetic construct
  misc_feature 1..22: note = chemically synthesized
  source 1..22: mol_type = other DNA
gtcagatgttcactatgatacc

SEQ ID NO: 100991 - DNA, 22 bp, synthetic construct
  misc_feature 1..22: note = chemically synthesized
  source 1..22: mol_type = other DNA
tcagatgttcactatgatacct

SEQ ID NO: 100992 - DNA, 22 bp, synthetic construct
  misc_feature 1..22: note = chemically synthesized
  source 1..22: mol_type = other DNA
actatgatacctacttattgag

SEQ ID NO: 100993 - DNA, 22 bp, synthetic construct
  misc_feature 1..22: note = chemically synthesized
  source 1..22: mol_type = other DNA
tgatacctacttattgagaatc

SEQ ID NO: 100994 - DNA, 22 bp, synthetic construct
  misc_feature 1..22: note = chemically synthesized
  source 1..22: mol_type = other DNA
cttattgagaatcaagtaaata

SEQ ID NO: 100995 - DNA, 22 bp, synthetic construct
  misc_feature 1..22: note = chemically synthesized
  source 1..22: mol_type = other DNA
attgagaatcaagtaaatagag

SEQ ID NO: 100996 - DNA, 22 bp, synthetic construct
  misc_feature 1..22: note = chemically synthesized
  source 1..22: mol_type = other DNA
ttgagaatcaagtaaatagaga

SEQ ID NO: 100997 - DNA, 22 bp, synthetic construct
  misc_feature 1..22: note = chemically synthesized
  source 1..22: mol_type = other DNA
agaatcaagtaaatagagatat

SEQ ID NO: 100998 - DNA, 22 bp, synthetic construct
  misc_feature 1..22: note = chemically synthesized
  source 1..22: mol_type = other DNA
agacacattacagagaagtata

SEQ ID NO: 100999 - DNA, 22 bp, synthetic construct
  misc_feature 1..22: note = chemically synthesized
  source 1..22: mol_type = other DNA
cagagaagtatatacttacaaa

SEQ ID NO: 101000 - DNA, 22 bp, synthetic construct
  misc_feature 1..22: note = chemically synthesized
  source 1..22: mol_type = other DNA
acaaactcaaagtatttgacac

SEQ ID NO: 101001 - DNA, 22 bp, synthetic construct
  misc_feature 1..22: note = chemically synthesized
  source 1..22: mol_type = other DNA
caaactcaaagtatttgacacc

SEQ ID NO: 101002 - DNA, 22 bp, synthetic construct
  misc_feature 1..22: note = chemically synthesized
  source 1..22: mol_type = other DNA
aaagtatttgacacccctaggc

SEQ ID NO: 101003 - DNA, 22 bp, synthetic construct
  misc_feature 1..22: note = chemically synthesized
  source 1..22: mol_type = other DNA
gacacccctaggcacatgaaac

SEQ ID NO: 101004 - DNA, 22 bp, synthetic construct
  misc_feature 1..22: note = chemically synthesized
  source 1..22: mol_type = other DNA
acacccctaggcacatgaaaca

SEQ ID NO: 101005 - DNA, 22 bp, synthetic construct
  misc_feature 1..22: note = chemically synthesized
  source 1..22: mol_type = other DNA
ggcacatgaaacacttttgaat

SEQ ID NO: 101006 - DNA, 22 bp, synthetic construct
  misc_feature 1..22: note = chemically synthesized
  source 1..22: mol_type = other DNA
ttgaatatacagcacactttta

SEQ ID NO: 101007 - DNA, 22 bp, synthetic construct
  misc_feature 1..22: note = chemically synthesized
  source 1..22: mol_type = other DNA
tgaatatacagcacacttttac

SEQ ID NO: 101008 - DNA, 22 bp, synthetic construct
  misc_feature 1..22: note = chemically synthesized
  source 1..22: mol_type = other DNA
gaatatacagcacacttttaca

SEQ ID NO: 101009 - DNA, 22 bp, synthetic construct
  misc_feature 1..22: note = chemically synthesized
  source 1..22: mol_type = other DNA
aatatacagcacacttttacat

SEQ ID NO: 101010 - DNA, 22 bp, synthetic construct
  misc_feature 1..22: note = chemically synthesized
  source 1..22: mol_type = other DNA
ttacatacacattattcataaa

SEQ ID NO: 101011 - DNA, 22 bp, synthetic construct
  misc_feature 1..22: note = chemically synthesized
  source 1..22: mol_type = other DNA
tacatacacattattcataaac

SEQ ID NO: 101012 - DNA, 22 bp, synthetic construct
  misc_feature 1..22: note = chemically synthesized
  source 1..22: mol_type = other DNA
acatacacattattcataaaca

SEQ ID NO: 101013 - DNA, 22 bp, synthetic construct
  misc_feature 1..22: note = chemically synthesized
  source 1..22: mol_type = other DNA
catacacattattcataaacat

SEQ ID NO: 101014 - DNA, 22 bp, synthetic construct
  misc_feature 1..22: note = chemically synthesized
  source 1..22: mol_type = other DNA
ttcataaacattgccaatgcat

SEQ ID NO: 101015 - DNA, 22 bp, synthetic construct
  misc_feature 1..22: note = chemically synthesized
  source 1..22: mol_type = other DNA
ataaacattgccaatgcatgca

SEQ ID NO: 101016 - DNA, 22 bp, synthetic construct
  misc_feature 1..22: note = chemically synthesized
  source 1..22: mol_type = other DNA
ccaatgcatgcagaaagaagct

SEQ ID NO: 101017 - DNA, 22 bp, synthetic construct
  misc_feature 1..22: note = chemically synthesized
  source 1..22: mol_type = other DNA
aatgtggattttacatatactt

SEQ ID NO: 101018 - DNA, 22 bp, synthetic construct
  misc_feature 1..22: note = chemically synthesized
  source 1..22: mol_type = other DNA
atgtggattttacatatacttt

SEQ ID NO: 101019 - DNA, 22 bp, synthetic construct
  misc_feature 1..22: note = chemically synthesized
  source 1..22: mol_type = other DNA
tacatatactttcatgaacata

SEQ ID NO: 101020 - DNA, 22 bp, synthetic construct
  misc_feature 1..22: note = chemically synthesized
  source 1..22: mol_type = other DNA
acatatactttcatgaacatag

SEQ ID NO: 101021 - DNA, 22 bp, synthetic construct
  misc_feature 1..22: note = chemically synthesized
  source 1..22: mol_type = other DNA
catatactttcatgaacatagc

SEQ ID NO: 101022 - DNA, 22 bp, synthetic construct
  misc_feature 1..22: note = chemically synthesized
  source 1..22: mol_type = other DNA
tcatgaacatagccttgccaac

SEQ ID NO: 101023 - DNA, 22 bp, synthetic construct
  misc_feature 1..22: note = chemically synthesized
  source 1..22: mol_type = other DNA
catgaacatagccttgccaaca

SEQ ID NO: 101024 - DNA, 22 bp, synthetic construct
  misc_feature 1..22: note = chemically synthesized
  source 1..22: mol_type = other DNA
atgaacatagccttgccaacat

SEQ ID NO: 101025 - DNA, 22 bp, synthetic construct
  misc_feature 1..22: note = chemically synthesized
  source 1..22: mol_type = other DNA
gccaacatcctttccctttctg

SEQ ID NO: 101026 - DNA, 22 bp, synthetic construct
  misc_feature 1..22: note = chemically synthesized
  source 1..22: mol_type = other DNA
ccaacatcctttccctttctgt

SEQ ID NO: 101027 - DNA, 22 bp, synthetic construct
  misc_feature 1..22: note = chemically synthesized
  source 1..22: mol_type = other DNA
tccctttctgttagagtcacct

SEQ ID NO: 101028 - DNA, 22 bp, synthetic construct
  misc_feature 1..22: note = chemically synthesized
  source 1..22: mol_type = other DNA
ccctttctgttagagtcacctg

SEQ ID NO: 101029 - DNA, 22 bp, synthetic construct
  misc_feature 1..22: note = chemically synthesized
  source 1..22: mol_type = other DNA
cctttctgttagagtcacctgc

SEQ ID NO: 101030 - DNA, 22 bp, synthetic construct
  misc_feature 1..22: note = chemically synthesized
  source 1..22: mol_type = other DNA
tctgttagagtcacctgccttc

SEQ ID NO: 101031 - DNA, 22 bp, synthetic construct
  misc_feature 1..22: note = chemically synthesized
  source 1..22: mol_type = other DNA
ctgttagagtcacctgccttca

SEQ ID NO: 101032 - DNA, 22 bp, synthetic construct
  misc_feature 1..22: note = chemically synthesized
  source 1..22: mol_type = other DNA
tgttagagtcacctgccttcat

SEQ ID NO: 101033 - DNA, 22 bp, synthetic construct
  misc_feature 1..22: note = chemically synthesized
  source 1..22: mol_type = other DNA
ttagagtcacctgccttcatcc

SEQ ID NO: 101034 - DNA, 22 bp, synthetic construct
  misc_feature 1..22: note = chemically synthesized
  source 1..22: mol_type = other DNA
gagtcacctgccttcatccatc

SEQ ID NO: 101035 - DNA, 22 bp, synthetic construct
  misc_feature 1..22: note = chemically synthesized
  source 1..22: mol_type = other DNA
ccttcatccatcccttggatat

SEQ ID NO: 101036 - DNA, 22 bp, synthetic construct
  misc_feature 1..22: note = chemically synthesized
  source 1..22: mol_type = other DNA
catccatcccttggatatgata

SEQ ID NO: 101037 - DNA, 22 bp, synthetic construct
  misc_feature 1..22: note = chemically synthesized
  source 1..22: mol_type = other DNA
atccatcccttggatatgatac

SEQ ID NO: 101038 - DNA, 22 bp, synthetic construct
  misc_feature 1..22: note = chemically synthesized
  source 1..22: mol_type = other DNA
ggatatgataccttgagttatc

SEQ ID NO: 101039 - DNA, 22 bp, synthetic construct
  misc_feature 1..22: note = chemically synthesized
  source 1..22: mol_type = other DNA
gatatgataccttgagttatcc

SEQ ID NO: 101040 - DNA, 22 bp, synthetic construct
  misc_feature 1..22: note = chemically synthesized
  source 1..22: mol_type = other DNA
gagttatccccacacccaaatc

SEQ ID NO: 101041 - DNA, 22 bp, synthetic construct
  misc_feature 1..22: note = chemically synthesized
  source 1..22: mol_type = other DNA
agttatccccacacccaaatct

SEQ ID NO: 101042 - DNA, 22 bp, synthetic construct
  misc_feature 1..22: note = chemically synthesized
  source 1..22: mol_type = other DNA
tccccacacccaaatcttcaac

SEQ ID NO: 101043 - DNA, 22 bp, synthetic construct
  misc_feature 1..22: note = chemically synthesized
  source 1..22: mol_type = other DNA
caacagacagaaatgtaaagtc

SEQ ID NO: 101044 - DNA, 22 bp, synthetic construct
  misc_feature 1..22: note = chemically synthesized
  source 1..22: mol_type = other DNA
aacagacagaaatgtaaagtcc

SEQ ID NO: 101045 - DNA, 22 bp, synthetic construct
  misc_feature 1..22: note = chemically synthesized
  source 1..22: mol_type = other DNA
aatgtgtgatagatgaactaaa

SEQ ID NO: 101046 - DNA, 22 bp, synthetic construct
  misc_feature 1..22: note = chemically synthesized
  source 1..22: mol_type = other DNA
atgtgtgatagatgaactaaat

SEQ ID NO: 101047 - DNA, 22 bp, synthetic construct
  misc_feature 1..22: note = chemically synthesized
  source 1..22: mol_type = other DNA
aatattctatctcagtattcat

SEQ ID NO: 101048 - DNA, 22 bp, synthetic construct
  misc_feature 1..22: note = chemically synthesized
  source 1..22: mol_type = other DNA
tatctcagtattcatctgacag

SEQ ID NO: 101049 - DNA, 22 bp, synthetic construct
  misc_feature 1..22: note = chemically synthesized
  source 1..22: mol_type = other DNA
tctcagtattcatctgacagca

SEQ ID NO: 101050 - DNA, 22 bp, synthetic construct
  misc_feature 1..22: note = chemically synthesized
  source 1..22: mol_type = other DNA
agtattcatctgacagcatagg

SEQ ID NO: 101051 - DNA, 22 bp, synthetic construct
  misc_feature 1..22: note = chemically synthesized
  source 1..22: mol_type = other DNA
atctgacagcataggaaggaga

SEQ ID NO: 101052 - DNA, 22 bp, synthetic construct
  misc_feature 1..22: note = chemically synthesized
  source 1..22: mol_type = other DNA
acagcataggaaggagagaaat

SEQ ID NO: 101053 - DNA, 22 bp, synthetic construct
  misc_feature 1..22: note = chemically synthesized
  source 1..22: mol_type = other DNA
tgtctcatttataccacatatt

SEQ ID NO: 101054 - DNA, 22 bp, synthetic construct
  misc_feature 1..22: note = chemically synthesized
  source 1..22: mol_type = other DNA
tctcatttataccacatattgt

SEQ ID NO: 101055 - DNA, 22 bp, synthetic construct
  misc_feature 1..22: note = chemically synthesized
  source 1..22: mol_type = other DNA
atttataccacatattgtgttt

SEQ ID NO: 101056 - DNA, 22 bp, synthetic construct
  misc_feature 1..22: note = chemically synthesized
  source 1..22: mol_type = other DNA
ataccacatattgtgtttctat

SEQ ID NO: 101057 - DNA, 22 bp, synthetic construct
  misc_feature 1..22: note = chemically synthesized
  source 1..22: mol_type = other DNA
taccacatattgtgtttctatg

SEQ ID NO: 101058 - DNA, 22 bp, synthetic construct
  misc_feature 1..22: note = chemically synthesized
  source 1..22: mol_type = other DNA
tgtttctatggccgaatcagct

SEQ ID NO: 101059 - DNA, 22 bp, synthetic construct
  misc_feature 1..22: note = chemically synthesized
  source 1..22: mol_type = other DNA
ctatggccgaatcagcttaggt

SEQ ID NO: 101060 - DNA, 22 bp, synthetic construct
  misc_feature 1..22: note = chemically synthesized
  source 1..22: mol_type = other DNA
tatggccgaatcagcttaggtt

SEQ ID NO: 101061 - DNA, 22 bp, synthetic construct
  misc_feature 1..22: note = chemically synthesized
  source 1..22: mol_type = other DNA
tggccgaatcagcttaggttct

SEQ ID NO: 101062 - DNA, 22 bp, synthetic construct
  misc_feature 1..22: note = chemically synthesized
  source 1..22: mol_type = other DNA
aggttctacattgtgtggtttt

SEQ ID NO: 101063 - DNA, 22 bp, synthetic construct
  misc_feature 1..22: note = chemically synthesized
  source 1..22: mol_type = other DNA
ggttctacattgtgtggttttg

SEQ ID NO: 101064 - DNA, 22 bp, synthetic construct
  misc_feature 1..22: note = chemically synthesized
  source 1..22: mol_type = other DNA
tacattgtgtggttttggataa

SEQ ID NO: 101065 - DNA, 22 bp, synthetic construct
  misc_feature 1..22: note = chemically synthesized
  source 1..22: mol_type = other DNA
cattgtgtggttttggataaat

SEQ ID NO: 101066 - DNA, 22 bp, synthetic construct
  misc_feature 1..22: note = chemically synthesized
  source 1..22: mol_type = other DNA
tgtggttttggataaattactt

SEQ ID NO: 101067 - DNA, 22 bp, synthetic construct
  misc_feature 1..22: note = chemically synthesized
  source 1..22: mol_type = other DNA
tggataaattacttaacctacc

SEQ ID NO: 101068 - DNA, 22 bp, synthetic construct
  misc_feature 1..22: note = chemically synthesized
  source 1..22: mol_type = other DNA
ggataaattacttaacctacct

SEQ ID NO: 101069 - DNA, 22 bp, synthetic construct
  misc_feature 1..22: note = chemically synthesized
  source 1..22: mol_type = other DNA
gataaattacttaacctaccta

SEQ ID NO: 101070 - DNA, 22 bp, synthetic construct
  misc_feature 1..22: note = chemically synthesized
  source 1..22: mol_type = other DNA
cttaacctacctaagtaaggca

SEQ ID NO: 101071 - DNA, 22 bp, synthetic construct
  misc_feature 1..22: note = chemically synthesized
  source 1..22: mol_type = other DNA
aacctacctaagtaaggcacct

SEQ ID NO: 101072 - DNA, 22 bp, synthetic construct
  misc_feature 1..22: note = chemically synthesized
  source 1..22: mol_type = other DNA
acctacctaagtaaggcaccta

SEQ ID NO: 101073 - DNA, 22 bp, synthetic construct
  misc_feature 1..22: note = chemically synthesized
  source 1..22: mol_type = other DNA
cctaagtaaggcacctacgtgt

SEQ ID NO: 101074 - DNA, 22 bp, synthetic construct
  misc_feature 1..22: note = chemically synthesized
  source 1..22: mol_type = other DNA
agtaaggcacctacgtgtcagt

SEQ ID NO: 101075 - DNA, 22 bp, synthetic construct
  misc_feature 1..22: note = chemically synthesized
  source 1..22: mol_type = other DNA
cgtgtcagtctcttcatgtgta

SEQ ID NO: 101076 - DNA, 22 bp, synthetic construct
  misc_feature 1..22: note = chemically synthesized
  source 1..22: mol_type = other DNA
ttcatgtgtagtcaggaattat

SEQ ID NO: 101077 - DNA, 22 bp, synthetic construct
  misc_feature 1..22: note = chemically synthesized
  source 1..22: mol_type = other DNA
catgtgtagtcaggaattataa

SEQ ID NO: 101078 - DNA, 22 bp, synthetic construct
  misc_feature 1..22: note = chemically synthesized
  source 1..22: mol_type = other DNA
atgtgtagtcaggaattataat

SEQ ID NO: 101079 - DNA, 22 bp, synthetic construct
  misc_feature 1..22: note = chemically synthesized
  source 1..22: mol_type = other DNA
taatgaaaagtaactcgaagta

SEQ ID NO: 101080 - DNA, 22 bp, synthetic construct
  misc_feature 1..22: note = chemically synthesized
  source 1..22: mol_type = other DNA
gaagtatttttgtgataatcag

SEQ ID NO: 101081 - DNA, 22 bp, synthetic construct
  misc_feature 1..22: note = chemically synthesized
  source 1..22: mol_type = other DNA
ttgtgataatcagttagataaa

SEQ ID NO: 101082 - DNA, 22 bp, synthetic construct
  misc_feature 1..22: note = chemically synthesized
  source 1..22: mol_type = other DNA
tgtgataatcagttagataaaa

SEQ ID NO: 101083 - DNA, 22 bp, synthetic construct
  misc_feature 1..22: note = chemically synthesized
  source 1..22: mol_type = other DNA
gtgataatcagttagataaaaa

SEQ ID NO: 101084 - DNA, 22 bp, synthetic construct
  misc_feature 1..22: note = chemically synthesized
  source 1..22: mol_type = other DNA
tgataatcagttagataaaaat

SEQ ID NO: 101085 - DNA, 22 bp, synthetic construct
  misc_feature 1..22: note = chemically synthesized
  source 1..22: mol_type = other DNA
gataaaaatgtgaacctcttaa

SEQ ID NO: 101086 - DNA, 22 bp, synthetic construct
  misc_feature 1..22: note = chemically synthesized
  source 1..22: mol_type = other DNA
ttaagacactagcaacttgaat

SEQ ID NO: 101087 - DNA, 22 bp, synthetic construct
  misc_feature 1..22: note = chemically synthesized
  source 1..22: mol_type = other DNA
aagacactagcaacttgaatac

SEQ ID NO: 101088 - DNA, 22 bp, synthetic construct
  misc_feature 1..22: note = chemically synthesized
  source 1..22: mol_type = other DNA
agacactagcaacttgaataca

SEQ ID NO: 101089 - DNA, 22 bp, synthetic construct
  misc_feature 1..22: note = chemically synthesized
  source 1..22: mol_type = other DNA
gcaacttgaatacataattgat

SEQ ID NO: 101090 - DNA, 22 bp, synthetic construct
  misc_feature 1..22: note = chemically synthesized
  source 1..22: mol_type = other DNA
gaatacataattgattttttat

SEQ ID NO: 101091 - DNA, 22 bp, synthetic construct
  misc_feature 1..22: note = chemically synthesized
  source 1..22: mol_type = other DNA
aatacataattgattttttatt

SEQ ID NO: 101092 - DNA, 22 bp, synthetic construct
  misc_feature 1..22: note = chemically synthesized
  source 1..22: mol_type = other DNA
attttttattctgttacaatta

SEQ ID NO: 101093 - DNA, 22 bp, synthetic construct
  misc_feature 1..22: note = chemically synthesized
  source 1..22: mol_type = other DNA
tttattctgttacaattatata

SEQ ID NO: 101094 - DNA, 22 bp, synthetic construct
  misc_feature 1..22: note = chemically synthesized
  source 1..22: mol_type = other DNA
ttattctgttacaattatatac

SEQ ID NO: 101095 - DNA, 22 bp, synthetic construct
  misc_feature 1..22: note = chemically synthesized
  source 1..22: mol_type = other DNA
tattctgttacaattatatact

SEQ ID NO: 101096 - DNA, 22 bp, synthetic construct
  misc_feature 1..22: note = chemically synthesized
  source 1..22: mol_type = other DNA
attctgttacaattatatactg

SEQ ID NO: 101097 - DNA, 22 bp, synthetic construct
  misc_feature 1..22: note = chemically synthesized
  source 1..22: mol_type = other DNA
ttctgttacaattatatactga

SEQ ID NO: 101098 - DNA, 22 bp, synthetic construct
  misc_feature 1..22: note = chemically synthesized
  source 1..22: mol_type = other DNA
tgttacaattatatactgaact

SEQ ID NO: 101099 - DNA, 22 bp, synthetic construct
  misc_feature 1..22: note = chemically synthesized
  source 1..22: mol_type = other DNA
ttacaattatatactgaactca

SEQ ID NO: 101100 - DNA, 22 bp, synthetic construct
  misc_feature 1..22: note = chemically synthesized
  source 1..22: mol_type = other DNA
caattatatactgaactcatgt

SEQ ID NO: 101101 - DNA, 22 bp, synthetic construct
  misc_feature 1..22: note = chemically synthesized
  source 1..22: mol_type = other DNA
tatactgaactcatgtgaggat

SEQ ID NO: 101102 - DNA, 22 bp, synthetic construct
  misc_feature 1..22: note = chemically synthesized
  source 1..22: mol_type = other DNA
aactcatgtgaggatccagttt

SEQ ID NO: 101103 - DNA, 22 bp, synthetic construct
  misc_feature 1..22: note = chemically synthesized
  source 1..22: mol_type = other DNA
atgtgaggatccagtttctata

SEQ ID NO: 101104 - DNA, 22 bp, synthetic construct
  misc_feature 1..22: note = chemically synthesized
  source 1..22: mol_type = other DNA
ctatatctaggcttttcaaact

SEQ ID NO: 101105 - DNA, 22 bp, synthetic construct
  misc_feature 1..22: note = chemically synthesized
  source 1..22: mol_type = other DNA
tatatctaggcttttcaaacta

SEQ ID NO: 101106 - DNA, 22 bp, synthetic construct
  misc_feature 1..22: note = chemically synthesized
  source 1..22: mol_type = other DNA
tatctaggcttttcaaactacc

SEQ ID NO: 101107 - DNA, 22 bp, synthetic construct
  misc_feature 1..22: note = chemically synthesized
  source 1..22: mol_type = other DNA
ggcttttcaaactaccttagag

SEQ ID NO: 101108 - DNA, 22 bp, synthetic construct
  misc_feature 1..22: note = chemically synthesized
  source 1..22: mol_type = other DNA
ttcaaactaccttagagaaata

SEQ ID NO: 101109 - DNA, 22 bp, synthetic construct
  misc_feature 1..22: note = chemically synthesized
  source 1..22: mol_type = other DNA
tcaaactaccttagagaaatac

SEQ ID NO: 101110 - DNA, 22 bp, synthetic construct
  misc_feature 1..22: note = chemically synthesized
  source 1..22: mol_type = other DNA
caaactaccttagagaaatact

SEQ ID NO: 101111 - DNA, 22 bp, synthetic construct
  misc_feature 1..22: note = chemically synthesized
  source 1..22: mol_type = other DNA
aaactaccttagagaaatactt

SEQ ID NO: 101112 - DNA, 22 bp, synthetic construct
  misc_feature 1..22: note = chemically synthesized
  source 1..22: mol_type = other DNA
ccttagagaaatacttgtatat

SEQ ID NO: 101113 - DNA, 22 bp, synthetic construct
  misc_feature 1..22: note = chemically synthesized
  source 1..22: mol_type = other DNA
agagaaatacttgtatatcttc

SEQ ID NO: 101114 - DNA, 22 bp, synthetic construct
  misc_feature 1..22: note = chemically synthesized
  source 1..22: mol_type = other DNA
gagaaatacttgtatatcttcc

SEQ ID NO: 101115 - DNA, 22 bp, synthetic construct
  misc_feature 1..22: note = chemically synthesized
  source 1..22: mol_type = other DNA
gtatatcttccttgtaggtata

SEQ ID NO: 101116 - DNA, 22 bp, synthetic construct
  misc_feature 1..22: note = chemically synthesized
  source 1..22: mol_type = other DNA
tatatcttccttgtaggtatag

SEQ ID NO: 101117 - DNA, 22 bp, synthetic construct
  misc_feature 1..22: note = chemically synthesized
  source 1..22: mol_type = other DNA
ccttgtaggtatagagtaaaat

SEQ ID NO: 101118 - DNA, 22 bp, synthetic construct
  misc_feature 1..22: note = chemically synthesized
  source 1..22: mol_type = other DNA
cttgtaggtatagagtaaaata

SEQ ID NO: 101119 - DNA, 22 bp, synthetic construct
  misc_feature 1..22: note = chemically synthesized
  source 1..22: mol_type = other DNA
gtaggtatagagtaaaatacta

SEQ ID NO: 101120 - DNA, 22 bp, synthetic construct
  misc_feature 1..22: note = chemically synthesized
  source 1..22: mol_type = other DNA
taggtatagagtaaaatactaa

SEQ ID NO: 101121 - DNA, 22 bp, synthetic construct
  misc_feature 1..22: note = chemically synthesized
  source 1..22: mol_type = other DNA
acttcaggtttagtaccaatgc

SEQ ID NO: 101122 - DNA, 22 bp, synthetic construct
  misc_feature 1..22: note = chemically synthesized
  source 1..22: mol_type = other DNA
caggtttagtaccaatgcttat

SEQ ID NO: 101123 - DNA, 22 bp, synthetic construct
  misc_feature 1..22: note = chemically synthesized
  source 1..22: mol_type = other DNA
aggtttagtaccaatgcttatc

SEQ ID NO: 101124 - DNA, 22 bp, synthetic construct
  misc_feature 1..22: note = chemically synthesized
  source 1..22: mol_type = other DNA
agtaccaatgcttatccatatt

SEQ ID NO: 101125 - DNA, 22 bp, synthetic construct
  misc_feature 1..22: note = chemically synthesized
  source 1..22: mol_type = other DNA
gtaccaatgcttatccatatta

SEQ ID NO: 101126 - DNA, 22 bp, synthetic construct
  misc_feature 1..22: note = chemically synthesized
  source 1..22: mol_type = other DNA
atccatattataatttacattg

SEQ ID NO: 101127 - DNA, 22 bp, synthetic construct
  misc_feature 1..22: note = chemically synthesized
  source 1..22: mol_type = other DNA
tccatattataatttacattgc

SEQ ID NO: 101128 - DNA, 22 bp, synthetic construct
  misc_feature 1..22: note = chemically synthesized
  source 1..22: mol_type = other DNA
taatttacattgcaagttttat

SEQ ID NO: 101129 - DNA, 22 bp, synthetic construct
  misc_feature 1..22: note = chemically synthesized
  source 1..22: mol_type = other DNA
acattgcaagttttattttctg

SEQ ID NO: 101130 - DNA, 22 bp, synthetic construct
  misc_feature 1..22: note = chemically synthesized
  source 1..22: mol_type = other DNA
cattgcaagttttattttctgt

SEQ ID NO: 101131 - DNA, 22 bp, synthetic construct
  misc_feature 1..22: note = chemically synthesized
  source 1..22: mol_type = other DNA
caagttttattttctgttcctt

SEQ ID NO: 101132 - DNA, 22 bp, synthetic construct
  misc_feature 1..22: note = chemically synthesized
  source 1..22: mol_type = other DNA
tattttctgttccttattggtc

SEQ ID NO: 101133 - DNA, 22 bp, synthetic construct
  misc_feature 1..22: note = chemically synthesized
  source 1..22: mol_type = other DNA
attttctgttccttattggtca

SEQ ID NO: 101134 - DNA, 22 bp, synthetic construct
  misc_feature 1..22: note = chemically synthesized
  source 1..22: mol_type = other DNA
ttttctgttccttattggtcaa

SEQ ID NO: 101135 - DNA, 22 bp, synthetic construct
  misc_feature 1..22: note = chemically synthesized
  source 1..22: mol_type = other DNA
tctgttccttattggtcaatac

SEQ ID NO: 101136 - DNA, 22 bp, synthetic construct
  misc_feature 1..22: note = chemically synthesized
  source 1..22: mol_type = other DNA
ctgttccttattggtcaatact

SEQ ID NO: 101137 - DNA, 22 bp, synthetic construct
  misc_feature 1..22: note = chemically synthesized
  source 1..22: mol_type = other DNA
tgttccttattggtcaatactt

SEQ ID NO: 101138 - DNA, 22 bp, synthetic construct
  misc_feature 1..22: note = chemically synthesized
  source 1..22: mol_type = other DNA
ttccttattggtcaatactttt

SEQ ID NO: 101139 - DNA, 22 bp, synthetic construct
  misc_feature 1..22: note = chemically synthesized
  source 1..22: mol_type = other DNA
cttattggtcaatacttttgga

SEQ ID NO: 101140 - DNA, 22 bp, synthetic construct
  misc_feature 1..22: note = chemically synthesized
  source 1..22: mol_type = other DNA
attggtcaatacttttggatcc

SEQ ID NO: 101141 - DNA, 22 bp, synthetic construct
  misc_feature 1..22: note = chemically synthesized
  source 1..22: mol_type = other DNA
ttggtcaatacttttggatcca

SEQ ID NO: 101142 - DNA, 22 bp, synthetic construct
  misc_feature 1..22: note = chemically synthesized
  source 1..22: mol_type = other DNA
gtcaatacttttggatccagct

SEQ ID NO: 101143 - DNA, 22 bp, synthetic construct
  misc_feature 1..22: note = chemically synthesized
  source 1..22: mol_type = other DNA
ttggatccagctgttcaactgt

SEQ ID NO: 101144 - DNA, 22 bp, synthetic construct
  misc_feature 1..22: note = chemically synthesized
  source 1..22: mol_type = other DNA
tggatccagctgttcaactgtg

SEQ ID NO: 101145 - DNA, 22 bp, synthetic construct
  misc_feature 1..22: note = chemically synthesized
  source 1..22: mol_type = other DNA
ggatccagctgttcaactgtgg

SEQ ID NO: 101146 - DNA, 22 bp, synthetic construct
  misc_feature 1..22: note = chemically synthesized
  source 1..22: mol_type = other DNA
gatccagctgttcaactgtggt

SEQ ID NO: 101147 - DNA, 22 bp, synthetic construct
  misc_feature 1..22: note = chemically synthesized
  source 1..22: mol_type = other DNA
ttcaactgtggtaacacttgat

SEQ ID NO: 101148 - DNA, 22 bp, synthetic construct
  misc_feature 1..22: note = chemically synthesized
  source 1..22: mol_type = other DNA
aactgtggtaacacttgataat

SEQ ID NO: 101149 - DNA, 22 bp, synthetic construct
  misc_feature 1..22: note = chemically synthesized
  source 1..22: mol_type = other DNA
tggtaacacttgataataatgc

SEQ ID NO: 101150 - DNA, 22 bp, synthetic construct
  misc_feature 1..22: note = chemically synthesized
  source 1..22: mol_type = other DNA
gataataatgccaagaggctgg

SEQ ID NO: 101151 - DNA, 22 bp, synthetic construct
  misc_feature 1..22: note = chemically synthesized
  source 1..22: mol_type = other DNA
ataataatgccaagaggctggg

SEQ ID NO: 101152 - DNA, 22 bp, synthetic construct
  misc_feature 1..22: note = chemically synthesized
  source 1..22: mol_type = other DNA
gggtgagctataagaggagtca

SEQ ID NO: 101153 - DNA, 22 bp, synthetic construct
  misc_feature 1..22: note = chemically synthesized
  source 1..22: mol_type = other DNA
taagaggagtcaaggctaatca

SEQ ID NO: 101154 - DNA, 22 bp, synthetic construct
  misc_feature 1..22: note = chemically synthesized
  source 1..22: mol_type = other DNA
atcagtacagcaagaggaatga

SEQ ID NO: 101155 - DNA, 22 bp, synthetic construct
  misc_feature 1..22: note = chemically synthesized
  source 1..22: mol_type = other DNA
gataaagggaacggcgtgggag

SEQ ID NO: 101156 - DNA, 22 bp, synthetic construct
  misc_feature 1..22: note = chemically synthesized
  source 1..22: mol_type = other DNA
cctgagggaatattcatgagac

SEQ ID NO: 101157 - DNA, 22 bp, synthetic construct
  misc_feature 1..22: note = chemically synthesized
  source 1..22: mol_type = other DNA
ctgagggaatattcatgagaca

SEQ ID NO: 101158 - DNA, 22 bp, synthetic construct
  misc_feature 1..22: note = chemically synthesized
  source 1..22: mol_type = other DNA
agggaatattcatgagacaaac

SEQ ID NO: 101159 - DNA, 22 bp, synthetic construct
  misc_feature 1..22: note = chemically synthesized
  source 1..22: mol_type = other DNA
atgagacaaacagagaataaag

SEQ ID NO: 101160 - DNA, 22 bp, synthetic construct
  misc_feature 1..22: note = chemically synthesized
  source 1..22: mol_type = other DNA
atatacaagtgatttctagaaa

SEQ ID NO: 101161 - DNA, 22 bp, synthetic construct
  misc_feature 1..22: note = chemically synthesized
  source 1..22: mol_type = other DNA
ctagaaagtgcatgaataagac

SEQ ID NO: 101162 - DNA, 22 bp, synthetic construct
  misc_feature 1..22: note = chemically synthesized
  source 1..22: mol_type = other DNA
tagaaagtgcatgaataagaca

SEQ ID NO: 101163 - DNA, 22 bp, synthetic construct
  misc_feature 1..22: note = chemically synthesized
  source 1..22: mol_type = other DNA
gaaagtgcatgaataagacagc

SEQ ID NO: 101164 - DNA, 22 bp, synthetic construct
  misc_feature 1..22: note = chemically synthesized
  source 1..22: mol_type = other DNA
gaaagatagaaagacctggcac

SEQ ID NO: 101165 - DNA, 22 bp, synthetic construct
  misc_feature 1..22: note = chemically synthesized
  source 1..22: mol_type = other DNA
gcacttaaaatgtgaatgtgaa

SEQ ID NO: 101166 - DNA, 22 bp, synthetic construct
  misc_feature 1..22: note = chemically synthesized
  source 1..22: mol_type = other DNA
aaaatgtgaatgtgaaacagtt

SEQ ID NO: 101167 - DNA, 22 bp, synthetic construct
  misc_feature 1..22: note = chemically synthesized
  source 1..22: mol_type = other DNA
aaatgtgaatgtgaaacagttc

SEQ ID NO: 101168 - DNA, 22 bp, synthetic construct
  misc_feature 1..22: note = chemically synthesized
  source 1..22: mol_type = other DNA
tggctgagagaaatatctcagg

SEQ ID NO: 101169 - DNA, 22 bp, synthetic construct
  misc_feature 1..22: note = chemically synthesized
  source 1..22: mol_type = other DNA
gctgagagaaatatctcaggaa

SEQ ID NO: 101170 - DNA, 22 bp, synthetic construct
  misc_feature 1..22: note = chemically synthesized
  source 1..22: mol_type = other DNA
agagaaatatctcaggaatggc

SEQ ID NO: 101171 - DNA, 22 bp, synthetic construct
  misc_feature 1..22: note = chemically synthesized
  source 1..22: mol_type = other DNA
aggaatggccatgttccaggct

SEQ ID NO: 101172 - DNA, 22 bp, synthetic construct
  misc_feature 1..22: note = chemically synthesized
  source 1..22: mol_type = other DNA
caggcttcagggtaggacccat

SEQ ID NO: 101173 - DNA, 22 bp, synthetic construct
  misc_feature 1..22: note = chemically synthesized
  source 1..22: mol_type = other DNA
cagggtaggacccatgccaggg

SEQ ID NO: 101174 - DNA, 22 bp, synthetic construct
  misc_feature 1..22: note = chemically synthesized
  source 1..22: mol_type = other DNA
agggtaggacccatgccaggga

SEQ ID NO: 101175 - DNA, 22 bp, synthetic construct
  misc_feature 1..22: note = chemically synthesized
  source 1..22: mol_type = other DNA
ttctgcctaaaatttctctgcc

SEQ ID NO: 101176 - DNA, 22 bp, synthetic construct
  misc_feature 1..22: note = chemically synthesized
  source 1..22: mol_type = other DNA
tctgcctaaaatttctctgcct

SEQ ID NO: 101177 - DNA, 22 bp, synthetic construct
  misc_feature 1..22: note = chemically synthesized
  source 1..22: mol_type = other DNA
ctgcctaaaatttctctgcctc

SEQ ID NO: 101178 - DNA, 22 bp, synthetic construct
  misc_feature 1..22: note = chemically synthesized
  source 1..22: mol_type = other DNA
tgcctaaaatttctctgcctcc

SEQ ID NO: 101179 - DNA, 22 bp, synthetic construct
  misc_feature 1..22: note = chemically synthesized
  source 1..22: mol_type = other DNA
cctaaaatttctctgcctcctg

SEQ ID NO: 101180 - DNA, 22 bp, synthetic construct
  misc_feature 1..22: note = chemically synthesized
  source 1..22: mol_type = other DNA
aaatttctctgcctcctgtccc

SEQ ID NO: 101181 - DNA, 22 bp, synthetic construct
  misc_feature 1..22: note = chemically synthesized
  source 1..22: mol_type = other DNA
ctctgcctcctgtccctatcat

SEQ ID NO: 101182 - DNA, 22 bp, synthetic construct
  misc_feature 1..22: note = chemically synthesized
  source 1..22: mol_type = other DNA
tctgcctcctgtccctatcatt

SEQ ID NO: 101183 - DNA, 22 bp, synthetic construct
  misc_feature 1..22: note = chemically synthesized
  source 1..22: mol_type = other DNA
tgcctcctgtccctatcattag

SEQ ID NO: 101184 - DNA, 22 bp, synthetic construct
  misc_feature 1..22: note = chemically synthesized
  source 1..22: mol_type = other DNA
cctcctgtccctatcattagga

SEQ ID NO: 101185 - DNA, 22 bp, synthetic construct
  misc_feature 1..22: note = chemically synthesized
  source 1..22: mol_type = other DNA
ctgtccctatcattaggaggcc

SEQ ID NO: 101186 - DNA, 22 bp, synthetic construct
  misc_feature 1..22: note = chemically synthesized
  source 1..22: mol_type = other DNA
tccctatcattaggaggccagg

SEQ ID NO: 101187 - DNA, 22 bp, synthetic construct
  misc_feature 1..22: note = chemically synthesized
  source 1..22: mol_type = other DNA
tcattaggaggccagggtggga

SEQ ID NO: 101188 - DNA, 22 bp, synthetic construct
  misc_feature 1..22: note = chemically synthesized
  source 1..22: mol_type = other DNA
ggaggccagggtgggaggattg

SEQ ID NO: 101189 - DNA, 22 bp, synthetic construct
  misc_feature 1..22: note = chemically synthesized
  source 1..22: mol_type = other DNA
cttgaggttaggaattggagag

SEQ ID NO: 101190 - DNA, 22 bp, synthetic construct
  misc_feature 1..22: note = chemically synthesized
  source 1..22: mol_type = other DNA
gaggttaggaattggagagcag

SEQ ID NO: 101191 - DNA, 22 bp, synthetic construct
  misc_feature 1..22: note = chemically synthesized
  source 1..22: mol_type = other DNA
aggttaggaattggagagcagc

SEQ ID NO: 101192 - DNA, 22 bp, synthetic construct
  misc_feature 1..22: note = chemically synthesized
  source 1..22: mol_type = other DNA
ggaattggagagcagcctcggc

SEQ ID NO: 101193 - DNA, 22 bp, synthetic construct
  misc_feature 1..22: note = chemically synthesized
  source 1..22: mol_type = other DNA
gagagcagcctcggcaacataa

SEQ ID NO: 101194 - DNA, 22 bp, synthetic construct
  misc_feature 1..22: note = chemically synthesized
  source 1..22: mol_type = other DNA
ggcaacataacatgatcccata

SEQ ID NO: 101195 - DNA, 22 bp, synthetic construct
  misc_feature 1..22: note = chemically synthesized
  source 1..22: mol_type = other DNA
acaaaaaataaaaacattagct

SEQ ID NO: 101196 - DNA, 22 bp, synthetic construct
  misc_feature 1..22: note = chemically synthesized
  source 1..22: mol_type = other DNA
caaaaaataaaaacattagcta

SEQ ID NO: 101197 - DNA, 22 bp, synthetic construct
  misc_feature 1..22: note = chemically synthesized
  source 1..22: mol_type = other DNA
gctaggtgcagtggcataaacc

SEQ ID NO: 101198 - DNA, 22 bp, synthetic construct
  misc_feature 1..22: note = chemically synthesized
  source 1..22: mol_type = other DNA
ggtgcagtggcataaacctgta

SEQ ID NO: 101199 - DNA, 22 bp, synthetic construct
  misc_feature 1..22: note = chemically synthesized
  source 1..22: mol_type = other DNA
tagtcctaggtactcaaaaagc

SEQ ID NO: 101200 - DNA, 22 bp, synthetic construct
  misc_feature 1..22: note = chemically synthesized
  source 1..22: mol_type = other DNA
ggtactcaaaaagctgaggaag

SEQ ID NO: 101201 - DNA, 22 bp, synthetic construct
  misc_feature 1..22: note = chemically synthesized
  source 1..22: mol_type = other DNA
aaaaagctgaggaagaaggatt

SEQ ID NO: 101202 - DNA, 22 bp, synthetic construct
  misc_feature 1..22: note = chemically synthesized
  source 1..22: mol_type = other DNA
aggaagaaggattgcttgagcc

SEQ ID NO: 101203 - DNA, 22 bp, synthetic construct
  misc_feature 1..22: note = chemically synthesized
  source 1..22: mol_type = other DNA
cttgagcccaggatttcaaggc

SEQ ID NO: 101204 - DNA, 22 bp, synthetic construct
  misc_feature 1..22: note = chemically synthesized
  source 1..22: mol_type = other DNA
gagcccaggatttcaaggctgc

SEQ ID NO: 101205 - DNA, 22 bp, synthetic construct
  misc_feature 1..22: note = chemically synthesized
  source 1..22: mol_type = other DNA
agcccaggatttcaaggctgca

SEQ ID NO: 101206 - DNA, 22 bp, synthetic construct
  misc_feature 1..22: note = chemically synthesized
  source 1..22: mol_type = other DNA
caaggctgcagtgagctgtgat

SEQ ID NO: 101207 - DNA, 22 bp, synthetic construct
  misc_feature 1..22: note = chemically synthesized
  source 1..22: mol_type = other DNA
aaggctgcagtgagctgtgatg

SEQ ID NO: 101208 - DNA, 22 bp, synthetic construct
  misc_feature 1..22: note = chemically synthesized
  source 1..22: mol_type = other DNA
cagtgagctgtgatggcaccac

SEQ ID NO: 101209 - DNA, 22 bp, synthetic construct
  misc_feature 1..22: note = chemically synthesized
  source 1..22: mol_type = other DNA
tgatggcaccactgcactccag

SEQ ID NO: 101210 - DNA, 22 bp, synthetic construct
  misc_feature 1..22: note = chemically synthesized
  source 1..22: mol_type = other DNA
cactccagcctgggcaacagag

SEQ ID NO: 101211 - DNA, 22 bp, synthetic construct
  misc_feature 1..22: note = chemically synthesized
  source 1..22: mol_type = other DNA
cagcctgggcaacagagcaaga

SEQ ID NO: 101212 - DNA, 22 bp, synthetic construct
  misc_feature 1..22: note = chemically synthesized
  source 1..22: mol_type = other DNA
ggcaacagagcaagatcatgtc

SEQ ID NO: 101213 - DNA, 22 bp, synthetic construct
  misc_feature 1..22: note = chemically synthesized
  source 1..22: mol_type = other DNA
taaaaataaataaataaataaa

SEQ ID NO: 101214 - DNA, 22 bp, synthetic construct
  misc_feature 1..22: note = chemically synthesized
  source 1..22: mol_type = other DNA
tagccacaccagacaagtaaca

SEQ ID NO: 101215 - DNA, 22 bp, synthetic construct
  misc_feature 1..22: note = chemically synthesized
  source 1..22: mol_type = other DNA
agccacaccagacaagtaacat

SEQ ID NO: 101216 - DNA, 22 bp, synthetic construct
  misc_feature 1..22: note = chemically synthesized
  source 1..22: mol_type = other DNA
gccacaccagacaagtaacatt

SEQ ID NO: 101217 - DNA, 22 bp, synthetic construct
  misc_feature 1..22: note = chemically synthesized
  source 1..22: mol_type = other DNA
tgtatttttaaaggactgcatt

SEQ ID NO: 101218 - DNA, 22 bp, synthetic construct
  misc_feature 1..22: note = chemically synthesized
  source 1..22: mol_type = other DNA
ttaaaggactgcattaataaat

SEQ ID NO: 101219 - DNA, 22 bp, synthetic construct
  misc_feature 1..22: note = chemically synthesized
  source 1..22: mol_type = other DNA
taaaggactgcattaataaatt

SEQ ID NO: 101220 - DNA, 22 bp, synthetic construct
  misc_feature 1..22: note = chemically synthesized
  source 1..22: mol_type = other DNA
aaaggactgcattaataaattt

SEQ ID NO: 101221 - DNA, 22 bp, synthetic construct
  misc_feature 1..22: note = chemically synthesized
  source 1..22: mol_type = other DNA
aaggactgcattaataaatttg

SEQ ID NO: 101222 - DNA, 22 bp, synthetic construct
  misc_feature 1..22: note = chemically synthesized
  source 1..22: mol_type = other DNA
cattaataaatttgggggttta

SEQ ID NO: 101223 - DNA, 22 bp, synthetic construct
  misc_feature 1..22: note = chemically synthesized
  source 1..22: mol_type = other DNA
ataaatttgggggtttacagaa

SEQ ID NO: 101224 - DNA, 22 bp, synthetic construct
  misc_feature 1..22: note = chemically synthesized
  source 1..22: mol_type = other DNA
gggggtttacagaatggcaggt

SEQ ID NO: 101225 - DNA, 22 bp, synthetic construct
  misc_feature 1..22: note = chemically synthesized
  source 1..22: mol_type = other DNA
ggggtttacagaatggcaggta

SEQ ID NO: 101226 - DNA, 22 bp, synthetic construct
  misc_feature 1..22: note = chemically synthesized
  source 1..22: mol_type = other DNA
acagaatggcaggtagttatcc

SEQ ID NO: 101227 - DNA, 22 bp, synthetic construct
  misc_feature 1..22: note = chemically synthesized
  source 1..22: mol_type = other DNA
cagaatggcaggtagttatcct

SEQ ID NO: 101228 - DNA, 22 bp, synthetic construct
  misc_feature 1..22: note = chemically synthesized
  source 1..22: mol_type = other DNA
tccttgggaagacaatatgctg

SEQ ID NO: 101229 - DNA, 22 bp, synthetic construct
  misc_feature 1..22: note = chemically synthesized
  source 1..22: mol_type = other DNA
gggaagacaatatgctgatggg

SEQ ID NO: 101230 - DNA, 22 bp, synthetic construct
  misc_feature 1..22: note = chemically synthesized
  source 1..22: mol_type = other DNA
ggaagacaatatgctgatgggg

SEQ ID NO: 101231 - DNA, 22 bp, synthetic construct
  misc_feature 1..22: note = chemically synthesized
  source 1..22: mol_type = other DNA
atggggaaatataattactgcc

SEQ ID NO: 101232 - DNA, 22 bp, synthetic construct
  misc_feature 1..22: note = chemically synthesized
  source 1..22: mol_type = other DNA
ctgccctgactaaactcacagt

SEQ ID NO: 101233 - DNA, 22 bp, synthetic construct
  misc_feature 1..22: note = chemically synthesized
  source 1..22: mol_type = other DNA
ccctgactaaactcacagtatg

SEQ ID NO: 101234 - DNA, 22 bp, synthetic construct
  misc_feature 1..22: note = chemically synthesized
  source 1..22: mol_type = other DNA
actaaactcacagtatgacaga

SEQ ID NO: 101235 - DNA, 22 bp, synthetic construct
  misc_feature 1..22: note = chemically synthesized
  source 1..22: mol_type = other DNA
aactcacagtatgacagagaat

SEQ ID NO: 101236 - DNA, 22 bp, synthetic construct
  misc_feature 1..22: note = chemically synthesized
  source 1..22: mol_type = other DNA
acagtatgacagagaattaact

SEQ ID NO: 101237 - DNA, 22 bp, synthetic construct
  misc_feature 1..22: note = chemically synthesized
  source 1..22: mol_type = other DNA
actgtgctgacttgataattcc

SEQ ID NO: 101238 - DNA, 22 bp, synthetic construct
  misc_feature 1..22: note = chemically synthesized
  source 1..22: mol_type = other DNA
tgctgacttgataattcctcag

SEQ ID NO: 101239 - DNA, 22 bp, synthetic construct
  misc_feature 1..22: note = chemically synthesized
  source 1..22: mol_type = other DNA
acttgataattcctcagagcag

SEQ ID NO: 101240 - DNA, 22 bp, synthetic construct
  misc_feature 1..22: note = chemically synthesized
  source 1..22: mol_type = other DNA
gataattcctcagagcagatct

SEQ ID NO: 101241 - DNA, 22 bp, synthetic construct
  misc_feature 1..22: note = chemically synthesized
  source 1..22: mol_type = other DNA
ataattcctcagagcagatctc

SEQ ID NO: 101242 - DNA, 22 bp, synthetic construct
  misc_feature 1..22: note = chemically synthesized
  source 1..22: mol_type = other DNA
ctcagagcagatctctaagaga

SEQ ID NO: 101243 - DNA, 22 bp, synthetic construct
  misc_feature 1..22: note = chemically synthesized
  source 1..22: mol_type = other DNA
agagcagatctctaagagagct

SEQ ID NO: 101244 - DNA, 22 bp, synthetic construct
  misc_feature 1..22: note = chemically synthesized
  source 1..22: mol_type = other DNA
taagagagcttatagacacaac

SEQ ID NO: 101245 - DNA, 22 bp, synthetic construct
  misc_feature 1..22: note = chemically synthesized
  source 1..22: mol_type = other DNA
agagagcttatagacacaacgc

SEQ ID NO: 101246 - DNA, 22 bp, synthetic construct
  misc_feature 1..22: note = chemically synthesized
  source 1..22: mol_type = other DNA
atagacacaacgcctgcttcac

SEQ ID NO: 101247 - DNA, 22 bp, synthetic construct
  misc_feature 1..22: note = chemically synthesized
  source 1..22: mol_type = other DNA
tagacacaacgcctgcttcaca

SEQ ID NO: 101248 - DNA, 22 bp, synthetic construct
  misc_feature 1..22: note = chemically synthesized
  source 1..22: mol_type = other DNA
cttcacaaggttctcaagtatg

SEQ ID NO: 101249 - DNA, 22 bp, synthetic construct
  misc_feature 1..22: note = chemically synthesized
  source 1..22: mol_type = other DNA
cacaaggttctcaagtatggca

SEQ ID NO: 101250 - DNA, 22 bp, synthetic construct
  misc_feature 1..22: note = chemically synthesized
  source 1..22: mol_type = other DNA
acaaggttctcaagtatggcaa

SEQ ID NO: 101251 - DNA, 22 bp, synthetic construct
  misc_feature 1..22: note = chemically synthesized
  source 1..22: mol_type = other DNA
tcaagtatggcaaacttgtcag

SEQ ID NO: 101252 - DNA, 22 bp, synthetic construct
  misc_feature 1..22: note = chemically synthesized
  source 1..22: mol_type = other DNA
aagtatggcaaacttgtcagtc

SEQ ID NO: 101253 - DNA, 22 bp, synthetic construct
  misc_feature 1..22: note = chemically synthesized
  source 1..22: mol_type = other DNA
gtcagtcagggtgagactgagg

SEQ ID NO: 101254 - DNA, 22 bp, synthetic construct
  misc_feature 1..22: note = chemically synthesized
  source 1..22: mol_type = other DNA
tcagtcagggtgagactgagga

SEQ ID NO: 101255 - DNA, 22 bp, synthetic construct
  misc_feature 1..22: note = chemically synthesized
  source 1..22: mol_type = other DNA
aggatgaggtctaagagacttg

SEQ ID NO: 101256 - DNA, 22 bp, synthetic construct
  misc_feature 1..22: note = chemically synthesized
  source 1..22: mol_type = other DNA
agagacttgtctggaagctgca

SEQ ID NO: 101257 - DNA, 22 bp, synthetic construct
  misc_feature 1..22: note = chemically synthesized
  source 1..22: mol_type = other DNA
gtctggaagctgcacttgtttg

SEQ ID NO: 101258 - DNA, 22 bp, synthetic construct
  misc_feature 1..22: note = chemically synthesized
  source 1..22: mol_type = other DNA
tctggaagctgcacttgtttga

SEQ ID NO: 101259 - DNA, 22 bp, synthetic construct
  misc_feature 1..22: note = chemically synthesized
  source 1..22: mol_type = other DNA
gaagctgcacttgtttgaaagg

SEQ ID NO: 101260 - DNA, 22 bp, synthetic construct
  misc_feature 1..22: note = chemically synthesized
  source 1..22: mol_type = other DNA
cacttgtttgaaaggacactga

SEQ ID NO: 101261 - DNA, 22 bp, synthetic construct
  misc_feature 1..22: note = chemically synthesized
  source 1..22: mol_type = other DNA
gtttgaaaggacactgatttta

SEQ ID NO: 101262 - DNA, 22 bp, synthetic construct
  misc_feature 1..22: note = chemically synthesized
  source 1..22: mol_type = other DNA
tttgaaaggacactgattttac

SEQ ID NO: 101263 - DNA, 22 bp, synthetic construct
  misc_feature 1..22: note = chemically synthesized
  source 1..22: mol_type = other DNA
gaaaggacactgattttacttc

SEQ ID NO: 101264 - DNA, 22 bp, synthetic construct
  misc_feature 1..22: note = chemically synthesized
  source 1..22: mol_type = other DNA
aaaggacactgattttacttca

SEQ ID NO: 101265 - DNA, 22 bp, synthetic construct
  misc_feature 1..22: note = chemically synthesized
  source 1..22: mol_type = other DNA
attttacttcagtggtgcaata

SEQ ID NO: 101266 - DNA, 22 bp, synthetic construct
  misc_feature 1..22: note = chemically synthesized
  source 1..22: mol_type = other DNA
tacttcagtggtgcaataaatg

SEQ ID NO: 101267 - DNA, 22 bp, synthetic construct
  misc_feature 1..22: note = chemically synthesized
  source 1..22: mol_type = other DNA
acttcagtggtgcaataaatgt

SEQ ID NO: 101268 - DNA, 22 bp, synthetic construct
  misc_feature 1..22: note = chemically synthesized
  source 1..22: mol_type = other DNA
cttcagtggtgcaataaatgtc

SEQ ID NO: 101269 - DNA, 22 bp, synthetic construct
  misc_feature 1..22: note = chemically synthesized
  source 1..22: mol_type = other DNA
cagtggtgcaataaatgtcctt

SEQ ID NO: 101270 - DNA, 22 bp, synthetic construct
  misc_feature 1..22: note = chemically synthesized
  source 1..22: mol_type = other DNA
agtggtgcaataaatgtcctta

SEQ ID NO: 101271 - DNA, 22 bp, synthetic construct
  misc_feature 1..22: note = chemically synthesized
  source 1..22: mol_type = other DNA
atatatcactggatcagcaggt

SEQ ID NO: 101272 - DNA, 22 bp, synthetic construct
  misc_feature 1..22: note = chemically synthesized
  source 1..22: mol_type = other DNA
tatatcactggatcagcaggtg

SEQ ID NO: 101273 - DNA, 22 bp, synthetic construct
  misc_feature 1..22: note = chemically synthesized
  source 1..22: mol_type = other DNA
gatcagcaggtggatgctgact

SEQ ID NO: 101274 - DNA, 22 bp, synthetic construct
  misc_feature 1..22: note = chemically synthesized
  source 1..22: mol_type = other DNA
acttaataattgaaaggatttt

SEQ ID NO: 101275 - DNA, 22 bp, synthetic construct
  misc_feature 1..22: note = chemically synthesized
  source 1..22: mol_type = other DNA
aataattgaaaggattttcaaa

SEQ ID NO: 101276 - DNA, 22 bp, synthetic construct
  misc_feature 1..22: note = chemically synthesized
  source 1..22: mol_type = other DNA
ataattgaaaggattttcaaac

SEQ ID NO: 101277 - DNA, 22 bp, synthetic construct
  misc_feature 1..22: note = chemically synthesized
  source 1..22: mol_type = other DNA
aaaggattttcaaactaagaag

SEQ ID NO: 101278 - DNA, 22 bp, synthetic construct
  misc_feature 1..22: note = chemically synthesized
  source 1..22: mol_type = other DNA
tcaaactaagaagttgtaaaat

SEQ ID NO: 101279 - DNA, 22 bp, synthetic construct
  misc_feature 1..22: note = chemically synthesized
  source 1..22: mol_type = other DNA
caaactaagaagttgtaaaata

SEQ ID NO: 101280 - DNA, 22 bp, synthetic construct
  misc_feature 1..22: note = chemically synthesized
  source 1..22: mol_type = other DNA
aaactaagaagttgtaaaatat

SEQ ID NO: 101281 - DNA, 22 bp, synthetic construct
  misc_feature 1..22: note = chemically synthesized
  source 1..22: mol_type = other DNA
agaagttgtaaaatataatata

SEQ ID NO: 101282 - DNA, 22 bp, synthetic construct
  misc_feature 1..22: note = chemically synthesized
  source 1..22: mol_type = other DNA
taaaatataatatataggttat

SEQ ID NO: 101283 - DNA, 22 bp, synthetic construct
  misc_feature 1..22: note = chemically synthesized
  source 1..22: mol_type = other DNA
tgaatataattaaaattaaaac

SEQ ID NO: 101284 - DNA, 22 bp, synthetic construct
  misc_feature 1..22: note = chemically synthesized
  source 1..22: mol_type = other DNA
aaattaaaacgcataaatatac

SEQ ID NO: 101285 - DNA, 22 bp, synthetic construct
  misc_feature 1..22: note = chemically synthesized
  source 1..22: mol_type = other DNA
aaacgcataaatatacatttac

SEQ ID NO: 101286 - DNA, 22 bp, synthetic construct
  misc_feature 1..22: note = chemically synthesized
  source 1..22: mol_type = other DNA
acttaagaaaatgagtgatttt

SEQ ID NO: 101287 - DNA, 22 bp, synthetic construct
  misc_feature 1..22: note = chemically synthesized
  source 1..22: mol_type = other DNA
cttaagaaaatgagtgattttt

SEQ ID NO: 101288 - DNA, 22 bp, synthetic construct
  misc_feature 1..22: note = chemically synthesized
  source 1..22: mol_type = other DNA
aagaaaatgagtgatttttaaa

SEQ ID NO: 101289 - DNA, 22 bp, synthetic construct
  misc_feature 1..22: note = chemically synthesized
  source 1..22: mol_type = other DNA
agaaaatgagtgatttttaaaa

SEQ ID NO: 101290 - DNA, 22 bp, synthetic construct
  misc_feature 1..22: note = chemically synthesized
  source 1..22: mol_type = other DNA
ttaaaatttatcctttttaatt

SEQ ID NO: 101291 - DNA, 22 bp, synthetic construct
  misc_feature 1..22: note = chemically synthesized
  source 1..22: mol_type = other DNA
taaaatttatcctttttaattg

SEQ ID NO: 101292 - DNA, 22 bp, synthetic construct
  misc_feature 1..22: note = chemically synthesized
  source 1..22: mol_type = other DNA
aaaatttatcctttttaattga

SEQ ID NO: 101293 - DNA, 22 bp, synthetic construct
  misc_feature 1..22: note = chemically synthesized
  source 1..22: mol_type = other DNA
aaatttatcctttttaattgat

SEQ ID NO: 101294 - DNA, 22 bp, synthetic construct
  misc_feature 1..22: note = chemically synthesized
  source 1..22: mol_type = other DNA
atcctttttaattgatttttga

SEQ ID NO: 101295 - DNA, 22 bp, synthetic construct
  misc_feature 1..22: note = chemically synthesized
  source 1..22: mol_type = other DNA
tcctttttaattgatttttgac

SEQ ID NO: 101296 - DNA, 22 bp, synthetic construct
  misc_feature 1..22: note = chemically synthesized
  source 1..22: mol_type = other DNA
tttaattgatttttgactattg

SEQ ID NO: 101297 - DNA, 22 bp, synthetic construct
  misc_feature 1..22: note = chemically synthesized
  source 1..22: mol_type = other DNA
ttaattgatttttgactattga

SEQ ID NO: 101298 - DNA, 22 bp, synthetic construct
  misc_feature 1..22: note = chemically synthesized
  source 1..22: mol_type = other DNA
taattgatttttgactattgat

SEQ ID NO: 101299 - DNA, 22 bp, synthetic construct
  misc_feature 1..22: note = chemically synthesized
  source 1..22: mol_type = other DNA
aattgatttttgactattgata

SEQ ID NO: 101300 - DNA, 22 bp, synthetic construct
  misc_feature 1..22: note = chemically synthesized
  source 1..22: mol_type = other DNA
attgatttttgactattgatac

SEQ ID NO: 101301 - DNA, 22 bp, synthetic construct
  misc_feature 1..22: note = chemically synthesized
  source 1..22: mol_type = other DNA
atttttgactattgatacaggc

SEQ ID NO: 101302 - DNA, 22 bp, synthetic construct
  misc_feature 1..22: note = chemically synthesized
  source 1..22: mol_type = other DNA
ttgactattgatacaggctgtt

SEQ ID NO: 101303 - DNA, 22 bp, synthetic construct
  misc_feature 1..22: note = chemically synthesized
  source 1..22: mol_type = other DNA
tgactattgatacaggctgttt

SEQ ID NO: 101304 - DNA, 22 bp, synthetic construct
  misc_feature 1..22: note = chemically synthesized
  source 1..22: mol_type = other DNA
gactattgatacaggctgttta

SEQ ID NO: 101305 - DNA, 22 bp, synthetic construct
  misc_feature 1..22: note = chemically synthesized
  source 1..22: mol_type = other DNA
actattgatacaggctgtttaa

SEQ ID NO: 101306 - DNA, 22 bp, synthetic construct
  misc_feature 1..22: note = chemically synthesized
  source 1..22: mol_type = other DNA
ttgatacaggctgtttaaagat

SEQ ID NO: 101307 - DNA, 22 bp, synthetic construct
  misc_feature 1..22: note = chemically synthesized
  source 1..22: mol_type = other DNA
atacaggctgtttaaagatcaa

SEQ ID NO: 101308 - DNA, 22 bp, synthetic construct
  misc_feature 1..22: note = chemically synthesized
  source 1..22: mol_type = other DNA
tttaaagatcaataggctataa

SEQ ID NO: 101309 - DNA, 22 bp, synthetic construct
  misc_feature 1..22: note = chemically synthesized
  source 1..22: mol_type = other DNA
aaagatcaataggctataatat

SEQ ID NO: 101310 - DNA, 22 bp, synthetic construct
  misc_feature 1..22: note = chemically synthesized
  source 1..22: mol_type = other DNA
aagatcaataggctataatatc

SEQ ID NO: 101311 - DNA, 22 bp, synthetic construct
  misc_feature 1..22: note = chemically synthesized
  source 1..22: mol_type = other DNA
taatatcatattatgtcatccc

SEQ ID NO: 101312 - DNA, 22 bp, synthetic construct
  misc_feature 1..22: note = chemically synthesized
  source 1..22: mol_type = other DNA
tgtcatcccttgctaacatatg

SEQ ID NO: 101313 - DNA, 22 bp, synthetic construct
  misc_feature 1..22: note = chemically synthesized
  source 1..22: mol_type = other DNA
gctaacatatgagtaaacttga

SEQ ID NO: 101314 - DNA, 22 bp, synthetic construct
  misc_feature 1..22: note = chemically synthesized
  source 1..22: mol_type = other DNA
ctaacatatgagtaaacttgag

SEQ ID NO: 101315 - DNA, 22 bp, synthetic construct
  misc_feature 1..22: note = chemically synthesized
  source 1..22: mol_type = other DNA
acatatgagtaaacttgagctc

SEQ ID NO: 101316 - DNA, 22 bp, synthetic construct
  misc_feature 1..22: note = chemically synthesized
  source 1..22: mol_type = other DNA
gagctctcaacttgatcttccc

SEQ ID NO: 101317 - DNA, 22 bp, synthetic construct
  misc_feature 1..22: note = chemically synthesized
  source 1..22: mol_type = other DNA
agctctcaacttgatcttccca

SEQ ID NO: 101318 - DNA, 22 bp, synthetic construct
  misc_feature 1..22: note = chemically synthesized
  source 1..22: mol_type = other DNA
tcaacttgatcttcccacttct

SEQ ID NO: 101319 - DNA, 22 bp, synthetic construct
  misc_feature 1..22: note = chemically synthesized
  source 1..22: mol_type = other DNA
aacttgatcttcccacttcttc

SEQ ID NO: 101320 - DNA, 22 bp, synthetic construct
  misc_feature 1..22: note = chemically synthesized
  source 1..22: mol_type = other DNA
gatcttcccacttcttcttatt

SEQ ID NO: 101321 - DNA, 22 bp, synthetic construct
  misc_feature 1..22: note = chemically synthesized
  source 1..22: mol_type = other DNA
atcttcccacttcttcttattt

SEQ ID NO: 101322 - DNA, 22 bp, synthetic construct
  misc_feature 1..22: note = chemically synthesized
  source 1..22: mol_type = other DNA
cccacttcttcttatttataat

SEQ ID NO: 101323 - DNA, 22 bp, synthetic construct
  misc_feature 1..22: note = chemically synthesized
  source 1..22: mol_type = other DNA
ccacttcttcttatttataatt

SEQ ID NO: 101324 - DNA, 22 bp, synthetic construct
  misc_feature 1..22: note = chemically synthesized
  source 1..22: mol_type = other DNA
cttcttatttataattagatac

SEQ ID NO: 101325 - DNA, 22 bp, synthetic construct
  misc_feature 1..22: note = chemically synthesized
  source 1..22: mol_type = other DNA
ttcttatttataattagatacc

SEQ ID NO: 101326 - DNA, 22 bp, synthetic construct
  misc_feature 1..22: note = chemically synthesized
  source 1..22: mol_type = other DNA
cttatttataattagatacctc

SEQ ID NO: 101327 - DNA, 22 bp, synthetic construct
  misc_feature 1..22: note = chemically synthesized
  source 1..22: mol_type = other DNA
ttatttataattagatacctct

SEQ ID NO: 101328 - DNA, 22 bp, synthetic construct
  misc_feature 1..22: note = chemically synthesized
  source 1..22: mol_type = other DNA
atttataattagatacctctgt

SEQ ID NO: 101329 - DNA, 22 bp, synthetic construct
  misc_feature 1..22: note = chemically synthesized
  source 1..22: mol_type = other DNA
tttataattagatacctctgtt

SEQ ID NO: 101330 - DNA, 22 bp, synthetic construct
  misc_feature 1..22: note = chemically synthesized
  source 1..22: mol_type = other DNA
ataattagatacctctgtttct

SEQ ID NO: 101331 - DNA, 22 bp, synthetic construct
  misc_feature 1..22: note = chemically synthesized
  source 1..22: mol_type = other DNA
taattagatacctctgtttctt

SEQ ID NO: 101332 - DNA, 22 bp, synthetic construct
  misc_feature 1..22: note = chemically synthesized
  source 1..22: mol_type = other DNA
gatacctctgtttcttagactt

SEQ ID NO: 101333 - DNA, 22 bp, synthetic construct
  misc_feature 1..22: note = chemically synthesized
  source 1..22: mol_type = other DNA
tgtttcttagacttcgctatca

SEQ ID NO: 101334 - DNA, 22 bp, synthetic construct
  misc_feature 1..22: note = chemically synthesized
  source 1..22: mol_type = other DNA
tttcttagacttcgctatcata

SEQ ID NO: 101335 - DNA, 22 bp, synthetic construct
  misc_feature 1..22: note = chemically synthesized
  source 1..22: mol_type = other DNA
cttagacttcgctatcatacct

SEQ ID NO: 101336 - DNA, 22 bp, synthetic construct
  misc_feature 1..22: note = chemically synthesized
  source 1..22: mol_type = other DNA
ttagacttcgctatcatacctt

SEQ ID NO: 101337 - DNA, 22 bp, synthetic construct
  misc_feature 1..22: note = chemically synthesized
  source 1..22: mol_type = other DNA
agacttcgctatcataccttat

SEQ ID NO: 101338 - DNA, 22 bp, synthetic construct
  misc_feature 1..22: note = chemically synthesized
  source 1..22: mol_type = other DNA
gacttcgctatcataccttatt

SEQ ID NO: 101339 - DNA, 22 bp, synthetic construct
  misc_feature 1..22: note = chemically synthesized
  source 1..22: mol_type = other DNA
cgctatcataccttattttcag

SEQ ID NO: 101340 - DNA, 22 bp, synthetic construct
  misc_feature 1..22: note = chemically synthesized
  source 1..22: mol_type = other DNA
gctatcataccttattttcagc

SEQ ID NO: 101341 - DNA, 22 bp, synthetic construct
  misc_feature 1..22: note = chemically synthesized
  source 1..22: mol_type = other DNA
tcataccttattttcagcacat

SEQ ID NO: 101342 - DNA, 22 bp, synthetic construct
  misc_feature 1..22: note = chemically synthesized
  source 1..22: mol_type = other DNA
attttcagcacatcgcccctaa

SEQ ID NO: 101343 - DNA, 22 bp, synthetic construct
  misc_feature 1..22: note = chemically synthesized
  source 1..22: mol_type = other DNA
ttttcagcacatcgcccctaag

SEQ ID NO: 101344 - DNA, 22 bp, synthetic construct
  misc_feature 1..22: note = chemically synthesized
  source 1..22: mol_type = other DNA
tcagcacatcgcccctaagttt

SEQ ID NO: 101345 - DNA, 22 bp, synthetic construct
  misc_feature 1..22: note = chemically synthesized
  source 1..22: mol_type = other DNA
cagcacatcgcccctaagtttg

SEQ ID NO: 101346 - DNA, 22 bp, synthetic construct
  misc_feature 1..22: note = chemically synthesized
  source 1..22: mol_type = other DNA
agcacatcgcccctaagtttgc

SEQ ID NO: 101347 - DNA, 22 bp, synthetic construct
  misc_feature 1..22: note = chemically synthesized
  source 1..22: mol_type = other DNA
agtttgcattacacatttacac

SEQ ID NO: 101348 - DNA, 22 bp, synthetic construct
  misc_feature 1..22: note = chemically synthesized
  source 1..22: mol_type = other DNA
gcattacacatttacacattgt

SEQ ID NO: 101349 - DNA, 22 bp, synthetic construct
  misc_feature 1..22: note = chemically synthesized
  source 1..22: mol_type = other DNA
cattacacatttacacattgtt

SEQ ID NO: 101350 - DNA, 22 bp, synthetic construct
  misc_feature 1..22: note = chemically synthesized
  source 1..22: mol_type = other DNA
cacatttacacattgttgtagg

SEQ ID NO: 101351 - DNA, 22 bp, synthetic construct
  misc_feature 1..22: note = chemically synthesized
  source 1..22: mol_type = other DNA
acacattgttgtaggctgtctt

SEQ ID NO: 101352 - DNA, 22 bp, synthetic construct
  misc_feature 1..22: note = chemically synthesized
  source 1..22: mol_type = other DNA
cacattgttgtaggctgtcttc

SEQ ID NO: 101353 - DNA, 22 bp, synthetic construct
  misc_feature 1..22: note = chemically synthesized
  source 1..22: mol_type = other DNA
ttgtaggctgtcttcttataac

SEQ ID NO: 101354 - DNA, 22 bp, synthetic construct
  misc_feature 1..22: note = chemically synthesized
  source 1..22: mol_type = other DNA
taggctgtcttcttataacaat

SEQ ID NO: 101355 - DNA, 22 bp, synthetic construct
  misc_feature 1..22: note = chemically synthesized
  source 1..22: mol_type = other DNA
tcttcttataacaatcaagaaa

SEQ ID NO: 101356 - DNA, 22 bp, synthetic construct
  misc_feature 1..22: note = chemically synthesized
  source 1..22: mol_type = other DNA
cttataacaatcaagaaaacag

SEQ ID NO: 101357 - DNA, 22 bp, synthetic construct
  misc_feature 1..22: note = chemically synthesized
  source 1..22: mol_type = other DNA
ttataacaatcaagaaaacagc

SEQ ID NO: 101358 - DNA, 22 bp, synthetic construct
  misc_feature 1..22: note = chemically synthesized
  source 1..22: mol_type = other DNA
ataacaatcaagaaaacagcat

SEQ ID NO: 101359 - DNA, 22 bp, synthetic construct
  misc_feature 1..22: note = chemically synthesized
  source 1..22: mol_type = other DNA
taacaatcaagaaaacagcatc

SEQ ID NO: 101360 - DNA, 22 bp, synthetic construct
  misc_feature 1..22: note = chemically synthesized
  source 1..22: mol_type = other DNA
ctgacaaatacatttgccattt

SEQ ID NO: 101361 - DNA, 22 bp, synthetic construct
  misc_feature 1..22: note = chemically synthesized
  source 1..22: mol_type = other DNA
acaaatacatttgccattttta

SEQ ID NO: 101362 - DNA, 22 bp, synthetic construct
  misc_feature 1..22: note = chemically synthesized
  source 1..22: mol_type = other DNA
gccatttttacaaaaaaccctt

SEQ ID NO: 101363 - DNA, 22 bp, synthetic construct
  misc_feature 1..22: note = chemically synthesized
  source 1..22: mol_type = other DNA
ccatttttacaaaaaaccctta

SEQ ID NO: 101364 - DNA, 22 bp, synthetic construct
  misc_feature 1..22: note = chemically synthesized
  source 1..22: mol_type = other DNA
ttacaaaaaacccttattcgcc

SEQ ID NO: 101365 - DNA, 22 bp, synthetic construct
  misc_feature 1..22: note = chemically synthesized
  source 1..22: mol_type = other DNA
tacaaaaaacccttattcgcct

SEQ ID NO: 101366 - DNA, 22 bp, synthetic construct
  misc_feature 1..22: note = chemically synthesized
  source 1..22: mol_type = other DNA
acaaaaaacccttattcgcctg

SEQ ID NO: 101367 - DNA, 22 bp, synthetic construct
  misc_feature 1..22: note = chemically synthesized
  source 1..22: mol_type = other DNA
caaaaaacccttattcgcctga

SEQ ID NO: 101368 - DNA, 22 bp, synthetic construct
  misc_feature 1..22: note = chemically synthesized
  source 1..22: mol_type = other DNA
attcgcctgaaaattttaatac

SEQ ID NO: 101369 - DNA, 22 bp, synthetic construct
  misc_feature 1..22: note = chemically synthesized
  source 1..22: mol_type = other DNA
ttcgcctgaaaattttaatacc

SEQ ID NO: 101370 - DNA, 22 bp, synthetic construct
  misc_feature 1..22: note = chemically synthesized
  source 1..22: mol_type = other DNA
gcctgaaaattttaataccgct

SEQ ID NO: 101371 - DNA, 22 bp, synthetic construct
  misc_feature 1..22: note = chemically synthesized
  source 1..22: mol_type = other DNA
aaaattttaataccgctatgtt

SEQ ID NO: 101372 - DNA, 22 bp, synthetic construct
  misc_feature 1..22: note = chemically synthesized
  source 1..22: mol_type = other DNA
taataccgctatgttttttact

SEQ ID NO: 101373 - DNA, 22 bp, synthetic construct
  misc_feature 1..22: note = chemically synthesized
  source 1..22: mol_type = other DNA
aataccgctatgttttttactc

SEQ ID NO: 101374 - DNA, 22 bp, synthetic construct
  misc_feature 1..22: note = chemically synthesized
  source 1..22: mol_type = other DNA
ataccgctatgttttttactct

SEQ ID NO: 101375 - DNA, 22 bp, synthetic construct
  misc_feature 1..22: note = chemically synthesized
  source 1..22: mol_type = other DNA
tgttttttactcttacagacat

SEQ ID NO: 101376 - DNA, 22 bp, synthetic construct
  misc_feature 1..22: note = chemically synthesized
  source 1..22: mol_type = other DNA
tttactcttacagacatccttt

SEQ ID NO: 101377 - DNA, 22 bp, synthetic construct
  misc_feature 1..22: note = chemically synthesized
  source 1..22: mol_type = other DNA
ttactcttacagacatcctttc

SEQ ID NO: 101378 - DNA, 22 bp, synthetic construct
  misc_feature 1..22: note = chemically synthesized
  source 1..22: mol_type = other DNA
tactcttacagacatcctttca

SEQ ID NO: 101379 - DNA, 22 bp, synthetic construct
  misc_feature 1..22: note = chemically synthesized
  source 1..22: mol_type = other DNA
actcttacagacatcctttcag

SEQ ID NO: 101380 - DNA, 22 bp, synthetic construct
  misc_feature 1..22: note = chemically synthesized
  source 1..22: mol_type = other DNA
ctcttacagacatcctttcagt

SEQ ID NO: 101381 - DNA, 22 bp, synthetic construct
  misc_feature 1..22: note = chemically synthesized
  source 1..22: mol_type = other DNA
ttacagacatcctttcagtggt

SEQ ID NO: 101382 - DNA, 22 bp, synthetic construct
  misc_feature 1..22: note = chemically synthesized
  source 1..22: mol_type = other DNA
acagacatcctttcagtggtca

SEQ ID NO: 101383 - DNA, 22 bp, synthetic construct
  misc_feature 1..22: note = chemically synthesized
  source 1..22: mol_type = other DNA
cagacatcctttcagtggtcaa

SEQ ID NO: 101384 - DNA, 22 bp, synthetic construct
  misc_feature 1..22: note = chemically synthesized
  source 1..22: mol_type = other DNA
tcagtggtcaatagagatgcag

SEQ ID NO: 101385 - DNA, 22 bp, synthetic construct
  misc_feature 1..22: note = chemically synthesized
  source 1..22: mol_type = other DNA
cagtggtcaatagagatgcagc

SEQ ID NO: 101386 - DNA, 22 bp, synthetic construct
  misc_feature 1..22: note = chemically synthesized
  source 1..22: mol_type = other DNA
agtggtcaatagagatgcagct

SEQ ID NO: 101387 - DNA, 22 bp, synthetic construct
  misc_feature 1..22: note = chemically synthesized
  source 1..22: mol_type = other DNA
tcctaaatgtagtttgtatgtt

SEQ ID NO: 101388 - DNA, 22 bp, synthetic construct
  misc_feature 1..22: note = chemically synthesized
  source 1..22: mol_type = other DNA
cctaaatgtagtttgtatgtta

SEQ ID NO: 101389 - DNA, 22 bp, synthetic construct
  misc_feature 1..22: note = chemically synthesized
  source 1..22: mol_type = other DNA
ctaaatgtagtttgtatgttag

SEQ ID NO: 101390 - DNA, 22 bp, synthetic construct
  misc_feature 1..22: note = chemically synthesized
  source 1..22: mol_type = other DNA
aatgtagtttgtatgttagcac

SEQ ID NO: 101391 - DNA, 22 bp, synthetic construct
  misc_feature 1..22: note = chemically synthesized
  source 1..22: mol_type = other DNA
gtatgttagcacaatgtgcatt

SEQ ID NO: 101392 - DNA, 22 bp, synthetic construct
  misc_feature 1..22: note = chemically synthesized
  source 1..22: mol_type = other DNA
tatgttagcacaatgtgcattt

SEQ ID NO: 101393 - DNA, 22 bp, synthetic construct
  misc_feature 1..22: note = chemically synthesized
  source 1..22: mol_type = other DNA
gcacaatgtgcattttagacca

SEQ ID NO: 101394 - DNA, 22 bp, synthetic construct
  misc_feature 1..22: note = chemically synthesized
  source 1..22: mol_type = other DNA
tagaccaaacaacaaaggcaac

SEQ ID NO: 101395 - DNA, 22 bp, synthetic construct
  misc_feature 1..22: note = chemically synthesized
  source 1..22: mol_type = other DNA
agaccaaacaacaaaggcaacc

SEQ ID NO: 101396 - DNA, 22 bp, synthetic construct
  misc_feature 1..22: note = chemically synthesized
  source 1..22: mol_type = other DNA
gaccaaacaacaaaggcaacca

SEQ ID NO: 101397 - DNA, 22 bp, synthetic construct
  misc_feature 1..22: note = chemically synthesized
  source 1..22: mol_type = other DNA
ctaaatagaataaactctgtat

SEQ ID NO: 101398 - DNA, 22 bp, synthetic construct
  misc_feature 1..22: note = chemically synthesized
  source 1..22: mol_type = other DNA
taaatagaataaactctgtatg

SEQ ID NO: 101399 - DNA, 22 bp, synthetic construct
  misc_feature 1..22: note = chemically synthesized
  source 1..22: mol_type = other DNA
aatagaataaactctgtatgcc

SEQ ID NO: 101400 - DNA, 22 bp, synthetic construct
  misc_feature 1..22: note = chemically synthesized
  source 1..22: mol_type = other DNA
tgtatgccaactttggaaaaac

SEQ ID NO: 101401 - DNA, 22 bp, synthetic construct
  misc_feature 1..22: note = chemically synthesized
  source 1..22: mol_type = other DNA
tatgccaactttggaaaaacaa

SEQ ID NO: 101402 - DNA, 22 bp, synthetic construct
  misc_feature 1..22: note = chemically synthesized
  source 1..22: mol_type = other DNA
tggaaaaacaaataaataaatt

SEQ ID NO: 101403 - DNA, 22 bp, synthetic construct
  misc_feature 1..22: note = chemically synthesized
  source 1..22: mol_type = other DNA
ggaaaaacaaataaataaattt

SEQ ID NO: 101404 - DNA, 22 bp, synthetic construct
  misc_feature 1..22: note = chemically synthesized
  source 1..22: mol_type = other DNA
gaaaaacaaataaataaatttt

SEQ ID NO: 101405 - DNA, 22 bp, synthetic construct
  misc_feature 1..22: note = chemically synthesized
  source 1..22: mol_type = other DNA
tacacagagaataacaactaaa

SEQ ID NO: 101406 - DNA, 22 bp, synthetic construct
  misc_feature 1..22: note = chemically synthesized
  source 1..22: mol_type = other DNA
acacagagaataacaactaaaa

SEQ ID NO: 101407 - DNA, 22 bp, synthetic construct
  misc_feature 1..22: note = chemically synthesized
  source 1..22: mol_type = other DNA
cacagagaataacaactaaaat

SEQ ID NO: 101408 - DNA, 22 bp, synthetic construct
  misc_feature 1..22: note = chemically synthesized
  source 1..22: mol_type = other DNA
aaatgacaatgaataaaccccc

SEQ ID NO: 101409 - DNA, 22 bp, synthetic construct
  misc_feature 1..22: note = chemically synthesized
  source 1..22: mol_type = other DNA
ctttcaaagaactctcacaaac

SEQ ID NO: 101410 - DNA, 22 bp, synthetic construct
  misc_feature 1..22: note = chemically synthesized
  source 1..22: mol_type = other DNA
tcaaagaactctcacaaacaat

SEQ ID NO: 101411 - DNA, 22 bp, synthetic construct
  misc_feature 1..22: note = chemically synthesized
  source 1..22: mol_type = other DNA
caaagaactctcacaaacaatt

SEQ ID NO: 101412 - DNA, 22 bp, synthetic construct
  misc_feature 1..22: note = chemically synthesized
  source 1..22: mol_type = other DNA
aaagaactctcacaaacaattc

SEQ ID NO: 101413 - DNA, 22 bp, synthetic construct
  misc_feature 1..22: note = chemically synthesized
  source 1..22: mol_type = other DNA
tcacaaacaattcgcacaataa

SEQ ID NO: 101414 - DNA, 22 bp, synthetic construct
  misc_feature 1..22: note = chemically synthesized
  source 1..22: mol_type = other DNA
acaaacaattcgcacaataact

SEQ ID NO: 101415 - DNA, 22 bp, synthetic construct
  misc_feature 1..22: note = chemically synthesized
  source 1..22: mol_type = other DNA
gcacaataactgaatccttcag

SEQ ID NO: 101416 - DNA, 22 bp, synthetic construct
  misc_feature 1..22: note = chemically synthesized
  source 1..22: mol_type = other DNA
aatccttcaggagtagtcattt

SEQ ID NO: 101417 - DNA, 22 bp, synthetic construct
  misc_feature 1..22: note = chemically synthesized
  source 1..22: mol_type = other DNA
caggagtagtcatttattagtt

SEQ ID NO: 101418 - DNA, 22 bp, synthetic construct
  misc_feature 1..22: note = chemically synthesized
  source 1..22: mol_type = other DNA
aggagtagtcatttattagttt

SEQ ID NO: 101419 - DNA, 22 bp, synthetic construct
  misc_feature 1..22: note = chemically synthesized
  source 1..22: mol_type = other DNA
attagtttttatttttcctgca

SEQ ID NO: 101420 - DNA, 22 bp, synthetic construct
  misc_feature 1..22: note = chemically synthesized
  source 1..22: mol_type = other DNA
ttagtttttatttttcctgcat

SEQ ID NO: 101421 - DNA, 22 bp, synthetic construct
  misc_feature 1..22: note = chemically synthesized
  source 1..22: mol_type = other DNA
gtttttatttttcctgcatcca

SEQ ID NO: 101422 - DNA, 22 bp, synthetic construct
  misc_feature 1..22: note = chemically synthesized
  source 1..22: mol_type = other DNA
ttatttttcctgcatccaaatg

SEQ ID NO: 101423 - DNA, 22 bp, synthetic construct
  misc_feature 1..22: note = chemically synthesized
  source 1..22: mol_type = other DNA
tatttttcctgcatccaaatgg

SEQ ID NO: 101424 - DNA, 22 bp, synthetic construct
  misc_feature 1..22: note = chemically synthesized
  source 1..22: mol_type = other DNA
atttttcctgcatccaaatggg

SEQ ID NO: 101425 - DNA, 22 bp, synthetic construct
  misc_feature 1..22: note = chemically synthesized
  source 1..22: mol_type = other DNA
tttttcctgcatccaaatgggc

SEQ ID NO: 101426 - DNA, 22 bp, synthetic construct
  misc_feature 1..22: note = chemically synthesized
  source 1..22: mol_type = other DNA
ttcctgcatccaaatgggcctt

SEQ ID NO: 101427 - DNA, 22 bp, synthetic construct
  misc_feature 1..22: note = chemically synthesized
  source 1..22: mol_type = other DNA
tcctgcatccaaatgggccttc

SEQ ID NO: 101428 - DNA, 22 bp, synthetic construct
  misc_feature 1..22: note = chemically synthesized
  source 1..22: mol_type = other DNA
cctgcatccaaatgggccttct

SEQ ID NO: 101429 - DNA, 22 bp, synthetic construct
  misc_feature 1..22: note = chemically synthesized
  source 1..22: mol_type = other DNA
ctgcatccaaatgggccttcta

SEQ ID NO: 101430 - DNA, 22 bp, synthetic construct
  misc_feature 1..22: note = chemically synthesized
  source 1..22: mol_type = other DNA
catccaaatgggccttctaatt

SEQ ID NO: 101431 - DNA, 22 bp, synthetic construct
  misc_feature 1..22: note = chemically synthesized
  source 1..22: mol_type = other DNA
ctaatttggagaaatactgcat

SEQ ID NO: 101432 - DNA, 22 bp, synthetic construct
  misc_feature 1..22: note = chemically synthesized
  source 1..22: mol_type = other DNA
taatttggagaaatactgcatt

SEQ ID NO: 101433 - DNA, 22 bp, synthetic construct
  misc_feature 1..22: note = chemically synthesized
  source 1..22: mol_type = other DNA
atttggagaaatactgcattat

SEQ ID NO: 101434 - DNA, 22 bp, synthetic construct
  misc_feature 1..22: note = chemically synthesized
  source 1..22: mol_type = other DNA
ggagaaatactgcattatttag

SEQ ID NO: 101435 - DNA, 22 bp, synthetic construct
  misc_feature 1..22: note = chemically synthesized
  source 1..22: mol_type = other DNA
gagaaatactgcattatttagc

SEQ ID NO: 101436 - DNA, 22 bp, synthetic construct
  misc_feature 1..22: note = chemically synthesized
  source 1..22: mol_type = other DNA
cattatttagctttagttttca

SEQ ID NO: 101437 - DNA, 22 bp, synthetic construct
  misc_feature 1..22: note = chemically synthesized
  source 1..22: mol_type = other DNA
tttagctttagttttcagtaag

SEQ ID NO: 101438 - DNA, 22 bp, synthetic construct
  misc_feature 1..22: note = chemically synthesized
  source 1..22: mol_type = other DNA
agctttagttttcagtaagtat

SEQ ID NO: 101439 - DNA, 22 bp, synthetic construct
  misc_feature 1..22: note = chemically synthesized
  source 1..22: mol_type = other DNA
gctttagttttcagtaagtatt

SEQ ID NO: 101440 - DNA, 22 bp, synthetic construct
  misc_feature 1..22: note = chemically synthesized
  source 1..22: mol_type = other DNA
tagttttcagtaagtattttct

SEQ ID NO: 101441 - DNA, 22 bp, synthetic construct
  misc_feature 1..22: note = chemically synthesized
  source 1..22: mol_type = other DNA
agttttcagtaagtattttctt

SEQ ID NO: 101442 - DNA, 22 bp, synthetic construct
  misc_feature 1..22: note = chemically synthesized
  source 1..22: mol_type = other DNA
gttttcagtaagtattttctta

SEQ ID NO: 101443 - DNA, 22 bp, synthetic construct
  misc_feature 1..22: note = chemically synthesized
  source 1..22: mol_type = other DNA
tcagtaagtattttcttatcaa

SEQ ID NO: 101444 - DNA, 22 bp, synthetic construct
  misc_feature 1..22: note = chemically synthesized
  source 1..22: mol_type = other DNA
cagtaagtattttcttatcaaa

SEQ ID NO: 101445 - DNA, 22 bp, synthetic construct
  misc_feature 1..22: note = chemically synthesized
  source 1..22: mol_type = other DNA
agtaagtattttcttatcaaat

SEQ ID NO: 101446 - DNA, 22 bp, synthetic construct
  misc_feature 1..22: note = chemically synthesized
  source 1..22: mol_type = other DNA
tcttatcaaatctctggaatat

SEQ ID NO: 101447 - DNA, 22 bp, synthetic construct
  misc_feature 1..22: note = chemically synthesized
  source 1..22: mol_type = other DNA
cttatcaaatctctggaatatt

SEQ ID NO: 101448 - DNA, 22 bp, synthetic construct
  misc_feature 1..22: note = chemically synthesized
  source 1..22: mol_type = other DNA
ttatcaaatctctggaatattt

SEQ ID NO: 101449 - DNA, 22 bp, synthetic construct
  misc_feature 1..22: note = chemically synthesized
  source 1..22: mol_type = other DNA
atcaaatctctggaatattttc

SEQ ID NO: 101450 - DNA, 22 bp, synthetic construct
  misc_feature 1..22: note = chemically synthesized
  source 1..22: mol_type = other DNA
tcaaatctctggaatattttca

SEQ ID NO: 101451 - DNA, 22 bp, synthetic construct
  misc_feature 1..22: note = chemically synthesized
  source 1..22: mol_type = other DNA
tggaatattttcagagtgctca

SEQ ID NO: 101452 - DNA, 22 bp, synthetic construct
  misc_feature 1..22: note = chemically synthesized
  source 1..22: mol_type = other DNA
gaatattttcagagtgctcact

SEQ ID NO: 101453 - DNA, 22 bp, synthetic construct
  misc_feature 1..22: note = chemically synthesized
  source 1..22: mol_type = other DNA
tcagagtgctcactgtccagat

SEQ ID NO: 101454 - DNA, 22 bp, synthetic construct
  misc_feature 1..22: note = chemically synthesized
  source 1..22: mol_type = other DNA
cagagtgctcactgtccagatg

SEQ ID NO: 101455 - DNA, 22 bp, synthetic construct
  misc_feature 1..22: note = chemically synthesized
  source 1..22: mol_type = other DNA
agagtgctcactgtccagatgt

SEQ ID NO: 101456 - DNA, 22 bp, synthetic construct
  misc_feature 1..22: note = chemically synthesized
  source 1..22: mol_type = other DNA
actgtccagatgtaaaataaat

SEQ ID NO: 101457 - DNA, 22 bp, synthetic construct
  misc_feature 1..22: note = chemically synthesized
  source 1..22: mol_type = other DNA
tccagatgtaaaataaatatga

SEQ ID NO: 101458 - DNA, 22 bp, synthetic construct
  misc_feature 1..22: note = chemically synthesized
  source 1..22: mol_type = other DNA
cttaagtgaagcagagagaatt

SEQ ID NO: 101459 - DNA, 22 bp, synthetic construct
  misc_feature 1..22: note = chemically synthesized
  source 1..22: mol_type = other DNA
ttaagtgaagcagagagaattt

SEQ ID NO: 101460 - DNA, 22 bp, synthetic construct
  misc_feature 1..22: note = chemically synthesized
  source 1..22: mol_type = other DNA
aagtgaagcagagagaatttag

SEQ ID NO: 101461 - DNA, 22 bp, synthetic construct
  misc_feature 1..22: note = chemically synthesized
  source 1..22: mol_type = other DNA
agtgaagcagagagaatttaga

SEQ ID NO: 101462 - DNA, 22 bp, synthetic construct
  misc_feature 1..22: note = chemically synthesized
  source 1..22: mol_type = other DNA
agaatggaataattatatactg

SEQ ID NO: 101463 - DNA, 22 bp, synthetic construct
  misc_feature 1..22: note = chemically synthesized
  source 1..22: mol_type = other DNA
gaatggaataattatatactgg

SEQ ID NO: 101464 - DNA, 22 bp, synthetic construct
  misc_feature 1..22: note = chemically synthesized
  source 1..22: mol_type = other DNA
tatactgggttctgaacatgga

SEQ ID NO: 101465 - DNA, 22 bp, synthetic construct
  misc_feature 1..22: note = chemically synthesized
  source 1..22: mol_type = other DNA
ggttctgaacatggactttcaa

SEQ ID NO: 101466 - DNA, 22 bp, synthetic construct
  misc_feature 1..22: note = chemically synthesized
  source 1..22: mol_type = other DNA
tgaacatggactttcaatcaga

SEQ ID NO: 101467 - DNA, 22 bp, synthetic construct
  misc_feature 1..22: note = chemically synthesized
  source 1..22: mol_type = other DNA
aacatggactttcaatcagaaa

SEQ ID NO: 101468 - DNA, 22 bp, synthetic construct
  misc_feature 1..22: note = chemically synthesized
  source 1..22: mol_type = other DNA
tcaatcagaaaagaaaatatta

SEQ ID NO: 101469 - DNA, 22 bp, synthetic construct
  misc_feature 1..22: note = chemically synthesized
  source 1..22: mol_type = other DNA
caatcagaaaagaaaatattag

SEQ ID NO: 101470 - DNA, 22 bp, synthetic construct
  misc_feature 1..22: note = chemically synthesized
  source 1..22: mol_type = other DNA
aatcagaaaagaaaatattaga

SEQ ID NO: 101471 - DNA, 22 bp, synthetic construct
  misc_feature 1..22: note = chemically synthesized
  source 1..22: mol_type = other DNA
gaagcaagctcaacgagaactt

SEQ ID NO: 101472 - DNA, 22 bp, synthetic construct
  misc_feature 1..22: note = chemically synthesized
  source 1..22: mol_type = other DNA
aacgagaacttaaaaattggaa

SEQ ID NO: 101473 - DNA, 22 bp, synthetic construct
  misc_feature 1..22: note = chemically synthesized
  source 1..22: mol_type = other DNA
aaaaattggaagaaacagcagt

SEQ ID NO: 101474 - DNA, 22 bp, synthetic construct
  misc_feature 1..22: note = chemically synthesized
  source 1..22: mol_type = other DNA
aaaattggaagaaacagcagtc

SEQ ID NO: 101475 - DNA, 22 bp, synthetic construct
  misc_feature 1..22: note = chemically synthesized
  source 1..22: mol_type = other DNA
gaagaaacagcagtcttcagag

SEQ ID NO: 101476 - DNA, 22 bp, synthetic construct
  misc_feature 1..22: note = chemically synthesized
  source 1..22: mol_type = other DNA
cagagaggaatgaatgcaactt

SEQ ID NO: 101477 - DNA, 22 bp, synthetic construct
  misc_feature 1..22: note = chemically synthesized
  source 1..22: mol_type = other DNA
agagaggaatgaatgcaacttt

SEQ ID NO: 101478 - DNA, 22 bp, synthetic construct
  misc_feature 1..22: note = chemically synthesized
  source 1..22: mol_type = other DNA
ttgagattagtttcctataagg

SEQ ID NO: 101479 - DNA, 22 bp, synthetic construct
  misc_feature 1..22: note = chemically synthesized
  source 1..22: mol_type = other DNA
tgagattagtttcctataagga

SEQ ID NO: 101480 - DNA, 22 bp, synthetic construct
  misc_feature 1..22: note = chemically synthesized
  source 1..22: mol_type = other DNA
gagattagtttcctataaggag

SEQ ID NO: 101481 - DNA, 22 bp, synthetic construct
  misc_feature 1..22: note = chemically synthesized
  source 1..22: mol_type = other DNA
agattagtttcctataaggaga

SEQ ID NO: 101482 - DNA, 22 bp, synthetic construct
  misc_feature 1..22: note = chemically synthesized
  source 1..22: mol_type = other DNA
gtttcctataaggagatcagct

SEQ ID NO: 101483 - DNA, 22 bp, synthetic construct
  misc_feature 1..22: note = chemically synthesized
  source 1..22: mol_type = other DNA
cctataaggagatcagctgcaa

SEQ ID NO: 101484 - DNA, 22 bp, synthetic construct
  misc_feature 1..22: note = chemically synthesized
  source 1..22: mol_type = other DNA
ctataaggagatcagctgcaaa

SEQ ID NO: 101485 - DNA, 22 bp, synthetic construct
  misc_feature 1..22: note = chemically synthesized
  source 1..22: mol_type = other DNA
taaggagatcagctgcaaatac

SEQ ID NO: 101486 - DNA, 22 bp, synthetic construct
  misc_feature 1..22: note = chemically synthesized
  source 1..22: mol_type = other DNA
caaatactagcgcagaactagc

SEQ ID NO: 101487 - DNA, 22 bp, synthetic construct
  misc_feature 1..22: note = chemically synthesized
  source 1..22: mol_type = other DNA
gcgcagaactagcagtagatga

SEQ ID NO: 101488 - DNA, 22 bp, synthetic construct
  misc_feature 1..22: note = chemically synthesized
  source 1..22: mol_type = other DNA
gcagtagatgaagaaattgtca

SEQ ID NO: 101489 - DNA, 22 bp, synthetic construct
  misc_feature 1..22: note = chemically synthesized
  source 1..22: mol_type = other DNA
tcatcccctgttacactaatag

SEQ ID NO: 101490 - DNA, 22 bp, synthetic construct
  misc_feature 1..22: note = chemically synthesized
  source 1..22: mol_type = other DNA
ttacactaatagcaagtggtag

SEQ ID NO: 101491 - DNA, 22 bp, synthetic construct
  misc_feature 1..22: note = chemically synthesized
  source 1..22: mol_type = other DNA
cactaatagcaagtggtagact

SEQ ID NO: 101492 - DNA, 22 bp, synthetic construct
  misc_feature 1..22: note = chemically synthesized
  source 1..22: mol_type = other DNA
atagcaagtggtagactgcggt

SEQ ID NO: 101493 - DNA, 22 bp, synthetic construct
  misc_feature 1..22: note = chemically synthesized
  source 1..22: mol_type = other DNA
cggttcagacccaatgaacagc

SEQ ID NO: 101494 - DNA, 22 bp, synthetic construct
  misc_feature 1..22: note = chemically synthesized
  source 1..22: mol_type = other DNA
agacccaatgaacagcataaag

SEQ ID NO: 101495 - DNA, 22 bp, synthetic construct
  misc_feature 1..22: note = chemically synthesized
  source 1..22: mol_type = other DNA
acaaacactttgaagaagattg

SEQ ID NO: 101496 - DNA, 22 bp, synthetic construct
  misc_feature 1..22: note = chemically synthesized
  source 1..22: mol_type = other DNA
caaacactttgaagaagattga

SEQ ID NO: 101497 - DNA, 22 bp, synthetic construct
  misc_feature 1..22: note = chemically synthesized
  source 1..22: mol_type = other DNA
tgaagaagattgaaggaagaaa

SEQ ID NO: 101498 - DNA, 22 bp, synthetic construct
  misc_feature 1..22: note = chemically synthesized
  source 1..22: mol_type = other DNA
gaagaagattgaaggaagaaac

SEQ ID NO: 101499 - DNA, 22 bp, synthetic construct
  misc_feature 1..22: note = chemically synthesized
  source 1..22: mol_type = other DNA
aagaagattgaaggaagaaact

SEQ ID NO: 101500 - DNA, 22 bp, synthetic construct
  misc_feature 1..22: note = chemically synthesized
  source 1..22: mol_type = other DNA
aaggaagaaactattccatcag

SEQ ID NO: 101501 - DNA, 22 bp, synthetic construct
  misc_feature 1..22: note = chemically synthesized
  source 1..22: mol_type = other DNA
ttccatcagtgaaaaatttcta

SEQ ID NO: 101502 - DNA, 22 bp, synthetic construct
  misc_feature 1..22: note = chemically synthesized
  source 1..22: mol_type = other DNA
catcagtgaaaaatttctaaaa

SEQ ID NO: 101503 - DNA, 22 bp, synthetic construct
  misc_feature 1..22: note = chemically synthesized
  source 1..22: mol_type = other DNA
ctaaaatataacattacctttg

SEQ ID NO: 101504 - DNA, 22 bp, synthetic construct
  misc_feature 1..22: note = chemically synthesized
  source 1..22: mol_type = other DNA
taaaatataacattacctttgc

SEQ ID NO: 101505 - DNA, 22 bp, synthetic construct
  misc_feature 1..22: note = chemically synthesized
  source 1..22: mol_type = other DNA
aaatataacattacctttgcca

SEQ ID NO: 101506 - DNA, 22 bp, synthetic construct
  misc_feature 1..22: note = chemically synthesized
  source 1..22: mol_type = other DNA
cctttgccaagtttttgcatta

SEQ ID NO: 101507 - DNA, 22 bp, synthetic construct
  misc_feature 1..22: note = chemically synthesized
  source 1..22: mol_type = other DNA
tgccaagtttttgcattaatta

SEQ ID NO: 101508 - DNA, 22 bp, synthetic construct
  misc_feature 1..22: note = chemically synthesized
  source 1..22: mol_type = other DNA
gccaagtttttgcattaattat

SEQ ID NO: 101509 - DNA, 22 bp, synthetic construct
  misc_feature 1..22: note = chemically synthesized
  source 1..22: mol_type = other DNA
ccaagtttttgcattaattatc

SEQ ID NO: 101510 - DNA, 22 bp, synthetic construct
  misc_feature 1..22: note = chemically synthesized
  source 1..22: mol_type = other DNA
ttgcattaattatcaaaactat

SEQ ID NO: 101511 - DNA, 22 bp, synthetic construct
  misc_feature 1..22: note = chemically synthesized
  source 1..22: mol_type = other DNA
tgcattaattatcaaaactatt

SEQ ID NO: 101512 - DNA, 22 bp, synthetic construct
  misc_feature 1..22: note = chemically synthesized
  source 1..22: mol_type = other DNA
gcattaattatcaaaactattt

SEQ ID NO: 101513 - DNA, 22 bp, synthetic construct
  misc_feature 1..22: note = chemically synthesized
  source 1..22: mol_type = other DNA
cattaattatcaaaactatttc

SEQ ID NO: 101514 - DNA, 22 bp, synthetic construct
  misc_feature 1..22: note = chemically synthesized
  source 1..22: mol_type = other DNA
attatcaaaactatttcatgaa

SEQ ID NO: 101515 - DNA, 22 bp, synthetic construct
  misc_feature 1..22: note = chemically synthesized
  source 1..22: mol_type = other DNA
tcaaaactatttcatgaagtga

SEQ ID NO: 101516 - DNA, 22 bp, synthetic construct
  misc_feature 1..22: note = chemically synthesized
  source 1..22: mol_type = other DNA
tttcatgaagtgaaaaagtctc

SEQ ID NO: 101517 - DNA, 22 bp, synthetic construct
  misc_feature 1..22: note = chemically synthesized
  source 1..22: mol_type = other DNA
catgaagtgaaaaagtctcgag

SEQ ID NO: 101518 - DNA, 22 bp, synthetic construct
  misc_feature 1..22: note = chemically synthesized
  source 1..22: mol_type = other DNA
atgaagtgaaaaagtctcgaga

SEQ ID NO: 101519 - DNA, 22 bp, synthetic construct
  misc_feature 1..22: note = chemically synthesized
  source 1..22: mol_type = other DNA
gagattttttatgtgagaagca

SEQ ID NO: 101520 - DNA, 22 bp, synthetic construct
  misc_feature 1..22: note = chemically synthesized
  source 1..22: mol_type = other DNA
tttatgtgagaagcaagagggg

SEQ ID NO: 101521 - DNA, 22 bp, synthetic construct
  misc_feature 1..22: note = chemically synthesized
  source 1..22: mol_type = other DNA
ttatgtgagaagcaagagggga

SEQ ID NO: 101522 - DNA, 22 bp, synthetic construct
  misc_feature 1..22: note = chemically synthesized
  source 1..22: mol_type = other DNA
tatgtgagaagcaagaggggaa

SEQ ID NO: 101523 - DNA, 22 bp, synthetic construct
  misc_feature 1..22: note = chemically synthesized
  source 1..22: mol_type = other DNA
atgtgagaagcaagaggggaaa

SEQ ID NO: 101524 - DNA, 22 bp, synthetic construct
  misc_feature 1..22: note = chemically synthesized
  source 1..22: mol_type = other DNA
tgtgagaagcaagaggggaaat

SEQ ID NO: 101525 - DNA, 22 bp, synthetic construct
  misc_feature 1..22: note = chemically synthesized
  source 1..22: mol_type = other DNA
aatttatagttggttatttttt

SEQ ID NO: 101526 - DNA, 22 bp, synthetic construct
  misc_feature 1..22: note = chemically synthesized
  source 1..22: mol_type = other DNA
atagttggttatttttttcaga

SEQ ID NO: 101527 - DNA, 22 bp, synthetic construct
  misc_feature 1..22: note = chemically synthesized
  source 1..22: mol_type = other DNA
tagttggttatttttttcagaa

SEQ ID NO: 101528 - DNA, 22 bp, synthetic construct
  misc_feature 1..22: note = chemically synthesized
  source 1..22: mol_type = other DNA
gttatttttttcagaagaaaaa

SEQ ID NO: 101529 - DNA, 22 bp, synthetic construct
  misc_feature 1..22: note = chemically synthesized
  source 1..22: mol_type = other DNA
tttttttcagaagaaaaatgtc

SEQ ID NO: 101530 - DNA, 22 bp, synthetic construct
  misc_feature 1..22: note = chemically synthesized
  source 1..22: mol_type = other DNA
ttttcagaagaaaaatgtcagg

SEQ ID NO: 101531 - DNA, 22 bp, synthetic construct
  misc_feature 1..22: note = chemically synthesized
  source 1..22: mol_type = other DNA
tttcagaagaaaaatgtcagga

SEQ ID NO: 101532 - DNA, 22 bp, synthetic construct
  misc_feature 1..22: note = chemically synthesized
  source 1..22: mol_type = other DNA
ttcagaagaaaaatgtcaggag

SEQ ID NO: 101533 - DNA, 22 bp, synthetic construct
  misc_feature 1..22: note = chemically synthesized
  source 1..22: mol_type = other DNA
tcagaagaaaaatgtcaggaga

SEQ ID NO: 101534 - DNA, 22 bp, synthetic construct
  misc_feature 1..22: note = chemically synthesized
  source 1..22: mol_type = other DNA
cagaagaaaaatgtcaggagac

SEQ ID NO: 101535 - DNA, 22 bp, synthetic construct
  misc_feature 1..22: note = chemically synthesized
  source 1..22: mol_type = other DNA
agaagaaaaatgtcaggagaca

SEQ ID NO: 101536 - DNA, 22 bp, synthetic construct
  misc_feature 1..22: note = chemically synthesized
  source 1..22: mol_type = other DNA
gaaagaagaaaaagtattaagt

SEQ ID NO: 101537 - DNA, 22 bp, synthetic construct
  misc_feature 1..22: note = chemically synthesized
  source 1..22: mol_type = other DNA
agttagtttcagcagacaatgg

SEQ ID NO: 101538 - DNA, 22 bp, synthetic construct
  misc_feature 1..22: note = chemically synthesized
  source 1..22: mol_type = other DNA
gtttcagcagacaatgggaaga

SEQ ID NO: 101539 - DNA, 22 bp, synthetic construct
  misc_feature 1..22: note = chemically synthesized
  source 1..22: mol_type = other DNA
cagcagacaatgggaagaagga

SEQ ID NO: 101540 - DNA, 22 bp, synthetic construct
  misc_feature 1..22: note = chemically synthesized
  source 1..22: mol_type = other DNA
agcagacaatgggaagaaggaa

SEQ ID NO: 101541 - DNA, 22 bp, synthetic construct
  misc_feature 1..22: note = chemically synthesized
  source 1..22: mol_type = other DNA
ggatatctggcttccacgagat

SEQ ID NO: 101542 - DNA, 22 bp, synthetic construct
  misc_feature 1..22: note = chemically synthesized
  source 1..22: mol_type = other DNA
gcttccacgagatgataagaaa

SEQ ID NO: 101543 - DNA, 22 bp, synthetic construct
  misc_feature 1..22: note = chemically synthesized
  source 1..22: mol_type = other DNA
ccacgagatgataagaaatgtg

SEQ ID NO: 101544 - DNA, 22 bp, synthetic construct
  misc_feature 1..22: note = chemically synthesized
  source 1..22: mol_type = other DNA
cacgagatgataagaaatgtgt

SEQ ID NO: 101545 - DNA, 22 bp, synthetic construct
  misc_feature 1..22: note = chemically synthesized
  source 1..22: mol_type = other DNA
gctgctatttagctgttagtct

SEQ ID NO: 101546 - DNA, 22 bp, synthetic construct
  misc_feature 1..22: note = chemically synthesized
  source 1..22: mol_type = other DNA
ctgctatttagctgttagtctg

SEQ ID NO: 101547 - DNA, 22 bp, synthetic construct
  misc_feature 1..22: note = chemically synthesized
  source 1..22: mol_type = other DNA
ctatttagctgttagtctgtat

SEQ ID NO: 101548 - DNA, 22 bp, synthetic construct
  misc_feature 1..22: note = chemically synthesized
  source 1..22: mol_type = other DNA
tttagctgttagtctgtatcac

SEQ ID NO: 101549 - DNA, 22 bp, synthetic construct
  misc_feature 1..22: note = chemically synthesized
  source 1..22: mol_type = other DNA
agctgttagtctgtatcacacg

SEQ ID NO: 101550 - DNA, 22 bp, synthetic construct
  misc_feature 1..22: note = chemically synthesized
  source 1..22: mol_type = other DNA
gctgttagtctgtatcacacgc

SEQ ID NO: 101551 - DNA, 22 bp, synthetic construct
  misc_feature 1..22: note = chemically synthesized
  source 1..22: mol_type = other DNA
ttagtctgtatcacacgccttt

SEQ ID NO: 101552 - DNA, 22 bp, synthetic construct
  misc_feature 1..22: note = chemically synthesized
  source 1..22: mol_type = other DNA
gtctgtatcacacgccttttag

SEQ ID NO: 101553 - DNA, 22 bp, synthetic construct
  misc_feature 1..22: note = chemically synthesized
  source 1..22: mol_type = other DNA
tatcacacgccttttagtagta

SEQ ID NO: 101554 - DNA, 22 bp, synthetic construct
  misc_feature 1..22: note = chemically synthesized
  source 1..22: mol_type = other DNA
ttagtagtaaaatatgccagtc

SEQ ID NO: 101555 - DNA, 22 bp, synthetic construct
  misc_feature 1..22: note = chemically synthesized
  source 1..22: mol_type = other DNA
tagtagtaaaatatgccagtct

SEQ ID NO: 101556 - DNA, 22 bp, synthetic construct
  misc_feature 1..22: note = chemically synthesized
  source 1..22: mol_type = other DNA
agtagtaaaatatgccagtcta

SEQ ID NO: 101557 - DNA, 22 bp, synthetic construct
  misc_feature 1..22: note = chemically synthesized
  source 1..22: mol_type = other DNA
gtagtaaaatatgccagtctac

SEQ ID NO: 101558 - DNA, 22 bp, synthetic construct
  misc_feature 1..22: note = chemically synthesized
  source 1..22: mol_type = other DNA
ctaagggaaattacatttcatg

SEQ ID NO: 101559 - DNA, 22 bp, synthetic construct
  misc_feature 1..22: note = chemically synthesized
  source 1..22: mol_type = other DNA
agggaaattacatttcatgagt

SEQ ID NO: 101560 - DNA, 22 bp, synthetic construct
  misc_feature 1..22: note = chemically synthesized
  source 1..22: mol_type = other DNA
catttcatgagtaagcttccta

SEQ ID NO: 101561 - DNA, 22 bp, synthetic construct
  misc_feature 1..22: note = chemically synthesized
  source 1..22: mol_type = other DNA
catgagtaagcttcctaaagtt

SEQ ID NO: 101562 - DNA, 22 bp, synthetic construct
  misc_feature 1..22: note = chemically synthesized
  source 1..22: mol_type = other DNA
atgagtaagcttcctaaagttc

SEQ ID NO: 101563 - DNA, 22 bp, synthetic construct
  misc_feature 1..22: note = chemically synthesized
  source 1..22: mol_type = other DNA
cctaaagttctagatatttgct

SEQ ID NO: 101564 - DNA, 22 bp, synthetic construct
  misc_feature 1..22: note = chemically synthesized
  source 1..22: mol_type = other DNA
ctaaagttctagatatttgctg

SEQ ID NO: 101565 - DNA, 22 bp, synthetic construct
  misc_feature 1..22: note = chemically synthesized
  source 1..22: mol_type = other DNA
aagttctagatatttgctgttt

SEQ ID NO: 101566 - DNA, 22 bp, synthetic construct
  misc_feature 1..22: note = chemically synthesized
  source 1..22: mol_type = other DNA
tagatatttgctgtttagcctc

SEQ ID NO: 101567 - DNA, 22 bp, synthetic construct
  misc_feature 1..22: note = chemically synthesized
  source 1..22: mol_type = other DNA
gatatttgctgtttagcctcac

SEQ ID NO: 101568 - DNA, 22 bp, synthetic construct
  misc_feature 1..22: note = chemically synthesized
  source 1..22: mol_type = other DNA
gctgtttagcctcacacaagtt

SEQ ID NO: 101569 - DNA, 22 bp, synthetic construct
  misc_feature 1..22: note = chemically synthesized
  source 1..22: mol_type = other DNA
ctgtttagcctcacacaagttt

SEQ ID NO: 101570 - DNA, 22 bp, synthetic construct
  misc_feature 1..22: note = chemically synthesized
  source 1..22: mol_type = other DNA
tttagcctcacacaagtttgct

SEQ ID NO: 101571 - DNA, 22 bp, synthetic construct
  misc_feature 1..22: note = chemically synthesized
  source 1..22: mol_type = other DNA
agcctcacacaagtttgcttac

SEQ ID NO: 101572 - DNA, 22 bp, synthetic construct
  misc_feature 1..22: note = chemically synthesized
  source 1..22: mol_type = other DNA
gcctcacacaagtttgcttact

SEQ ID NO: 101573 - DNA, 22 bp, synthetic construct
  misc_feature 1..22: note = chemically synthesized
  source 1..22: mol_type = other DNA
acacaagtttgcttactaatca

SEQ ID NO: 101574 - DNA, 22 bp, synthetic construct
  misc_feature 1..22: note = chemically synthesized
  source 1..22: mol_type = other DNA
gcttactaatcaagcaagatcc

SEQ ID NO: 101575 - DNA, 22 bp, synthetic construct
  misc_feature 1..22: note = chemically synthesized
  source 1..22: mol_type = other DNA
cttactaatcaagcaagatcct

SEQ ID NO: 101576 - DNA, 22 bp, synthetic construct
  misc_feature 1..22: note = chemically synthesized
  source 1..22: mol_type = other DNA
actaatcaagcaagatcctttt

SEQ ID NO: 101577 - DNA, 22 bp, synthetic construct
  misc_feature 1..22: note = chemically synthesized
  source 1..22: mol_type = other DNA
ctaatcaagcaagatccttttc

SEQ ID NO: 101578 - DNA, 22 bp, synthetic construct
  misc_feature 1..22: note = chemically synthesized
  source 1..22: mol_type = other DNA
atcaagcaagatccttttcaga

SEQ ID NO: 101579 - DNA, 22 bp, synthetic construct
  misc_feature 1..22: note = chemically synthesized
  source 1..22: mol_type = other DNA
ttcagagtaactagtttcaaag

SEQ ID NO: 101580 - DNA, 22 bp, synthetic construct
  misc_feature 1..22: note = chemically synthesized
  source 1..22: mol_type = other DNA
tcagagtaactagtttcaaagt

SEQ ID NO: 101581 - DNA, 22 bp, synthetic construct
  misc_feature 1..22: note = chemically synthesized
  source 1..22: mol_type = other DNA
cagagtaactagtttcaaagta

SEQ ID NO: 101582 - DNA, 22 bp, synthetic construct
  misc_feature 1..22: note = chemically synthesized
  source 1..22: mol_type = other DNA
agagtaactagtttcaaagtat

SEQ ID NO: 101583 - DNA, 22 bp, synthetic construct
  misc_feature 1..22: note = chemically synthesized
  source 1..22: mol_type = other DNA
gtttcaaagtatggagatgaaa

SEQ ID NO: 101584 - DNA, 22 bp, synthetic construct
  misc_feature 1..22: note = chemically synthesized
  source 1..22: mol_type = other DNA
caaagtatggagatgaaaatat

SEQ ID NO: 101585 - DNA, 22 bp, synthetic construct
  misc_feature 1..22: note = chemically synthesized
  source 1..22: mol_type = other DNA
aaagtatggagatgaaaatatg

SEQ ID NO: 101586 - DNA, 22 bp, synthetic construct
  misc_feature 1..22: note = chemically synthesized
  source 1..22: mol_type = other DNA
ttcaaattcacctttataagac

SEQ ID NO: 101587 - DNA, 22 bp, synthetic construct
  misc_feature 1..22: note = chemically synthesized
  source 1..22: mol_type = other DNA
aaattcacctttataagacaca

SEQ ID NO: 101588 - DNA, 22 bp, synthetic construct
  misc_feature 1..22: note = chemically synthesized
  source 1..22: mol_type = other DNA
acctttataagacacataaaat

SEQ ID NO: 101589 - DNA, 22 bp, synthetic construct
  misc_feature 1..22: note = chemically synthesized
  source 1..22: mol_type = other DNA
tataagacacataaaatgtacc

SEQ ID NO: 101590 - DNA, 22 bp, synthetic construct
  misc_feature 1..22: note = chemically synthesized
  source 1..22: mol_type = other DNA
ataagacacataaaatgtacct

SEQ ID NO: 101591 - DNA, 22 bp, synthetic construct
  misc_feature 1..22: note = chemically synthesized
  source 1..22: mol_type = other DNA
taagacacataaaatgtacctc

SEQ ID NO: 101592 - DNA, 22 bp, synthetic construct
  misc_feature 1..22: note = chemically synthesized
  source 1..22: mol_type = other DNA
caactgcacatttttctttaga

SEQ ID NO: 101593 - DNA, 22 bp, synthetic construct
  misc_feature 1..22: note = chemically synthesized
  source 1..22: mol_type = other DNA
cacatttttctttagatgaact

SEQ ID NO: 101594 - DNA, 22 bp, synthetic construct
  misc_feature 1..22: note = chemically synthesized
  source 1..22: mol_type = other DNA
ttctttagatgaactgtatttg

SEQ ID NO: 101595 - DNA, 22 bp, synthetic construct
  misc_feature 1..22: note = chemically synthesized
  source 1..22: mol_type = other DNA
tctttagatgaactgtatttga

SEQ ID NO: 101596 - DNA, 22 bp, synthetic construct
  misc_feature 1..22: note = chemically synthesized
  source 1..22: mol_type = other DNA
ctttagatgaactgtatttgac

SEQ ID NO: 101597 - DNA, 22 bp, synthetic construct
  misc_feature 1..22: note = chemically synthesized
  source 1..22: mol_type = other DNA
tttagatgaactgtatttgacc

SEQ ID NO: 101598 - DNA, 22 bp, synthetic construct
  misc_feature 1..22: note = chemically synthesized
  source 1..22: mol_type = other DNA
tagatgaactgtatttgaccca

SEQ ID NO: 101599 - DNA, 22 bp, synthetic construct
  misc_feature 1..22: note = chemically synthesized
  source 1..22: mol_type = other DNA
agatgaactgtatttgacccaa

SEQ ID NO: 101600 - DNA, 22 bp, synthetic construct
  misc_feature 1..22: note = chemically synthesized
  source 1..22: mol_type = other DNA
gatgaactgtatttgacccaag

SEQ ID NO: 101601 - DNA, 22 bp, synthetic construct
  misc_feature 1..22: note = chemically synthesized
  source 1..22: mol_type = other DNA
tatttgacccaagctgctttag

SEQ ID NO: 101602 - DNA, 22 bp, synthetic construct
  misc_feature 1..22: note = chemically synthesized
  source 1..22: mol_type = other DNA
gacccaagctgctttagtccac

SEQ ID NO: 101603 - DNA, 22 bp, synthetic construct
  misc_feature 1..22: note = chemically synthesized
  source 1..22: mol_type = other DNA
acccaagctgctttagtccact

SEQ ID NO: 101604 - DNA, 22 bp, synthetic construct
  misc_feature 1..22: note = chemically synthesized
  source 1..22: mol_type = other DNA
ctttagtccacttatcttgact

SEQ ID NO: 101605 - DNA, 22 bp, synthetic construct
  misc_feature 1..22: note = chemically synthesized
  source 1..22: mol_type = other DNA
tagtccacttatcttgactatt

SEQ ID NO: 101606 - DNA, 22 bp, synthetic construct
  misc_feature 1..22: note = chemically synthesized
  source 1..22: mol_type = other DNA
agtccacttatcttgactattt

SEQ ID NO: 101607 - DNA, 22 bp, synthetic construct
  misc_feature 1..22: note = chemically synthesized
  source 1..22: mol_type = other DNA
gtccacttatcttgactatttc

SEQ ID NO: 101608 - DNA, 22 bp, synthetic construct
  misc_feature 1..22: note = chemically synthesized
  source 1..22: mol_type = other DNA
atcttgactatttctgaaatca

SEQ ID NO: 101609 - DNA, 22 bp, synthetic construct
  misc_feature 1..22: note = chemically synthesized
  source 1..22: mol_type = other DNA
tcttgactatttctgaaatcat

SEQ ID NO: 101610 - DNA, 22 bp, synthetic construct
  misc_feature 1..22: note = chemically synthesized
  source 1..22: mol_type = other DNA
gactatttctgaaatcatagtt

SEQ ID NO: 101611 - DNA, 22 bp, synthetic construct
  misc_feature 1..22: note = chemically synthesized
  source 1..22: mol_type = other DNA
actatttctgaaatcatagtta

SEQ ID NO: 101612 - DNA, 22 bp, synthetic construct
  misc_feature 1..22: note = chemically synthesized
  source 1..22: mol_type = other DNA
tttctgaaatcatagttactct

SEQ ID NO: 101613 - DNA, 22 bp, synthetic construct
  misc_feature 1..22: note = chemically synthesized
  source 1..22: mol_type = other DNA
ctgaaatcatagttactcttct

SEQ ID NO: 101614 - DNA, 22 bp, synthetic construct
  misc_feature 1..22: note = chemically synthesized
  source 1..22: mol_type = other DNA
tgaaatcatagttactcttctt

SEQ ID NO: 101615 - DNA, 22 bp, synthetic construct
  misc_feature 1..22: note = chemically synthesized
  source 1..22: mol_type = other DNA
aaatcatagttactcttctttt

SEQ ID NO: 101616 - DNA, 22 bp, synthetic construct
  misc_feature 1..22: note = chemically synthesized
  source 1..22: mol_type = other DNA
ctcttcttttggattgttatat

SEQ ID NO: 101617 - DNA, 22 bp, synthetic construct
  misc_feature 1..22: note = chemically synthesized
  source 1..22: mol_type = other DNA
ttcttttggattgttatatctc

SEQ ID NO: 101618 - DNA, 22 bp, synthetic construct
  misc_feature 1..22: note = chemically synthesized
  source 1..22: mol_type = other DNA
cttttggattgttatatctcct

SEQ ID NO: 101619 - DNA, 22 bp, synthetic construct
  misc_feature 1..22: note = chemically synthesized
  source 1..22: mol_type = other DNA
ttttggattgttatatctcctc

SEQ ID NO: 101620 - DNA, 22 bp, synthetic construct
  misc_feature 1..22: note = chemically synthesized
  source 1..22: mol_type = other DNA
ttggattgttatatctcctctg

SEQ ID NO: 101621 - DNA, 22 bp, synthetic construct
  misc_feature 1..22: note = chemically synthesized
  source 1..22: mol_type = other DNA
tggattgttatatctcctctgc

SEQ ID NO: 101622 - DNA, 22 bp, synthetic construct
  misc_feature 1..22: note = chemically synthesized
  source 1..22: mol_type = other DNA
ggattgttatatctcctctgct

SEQ ID NO: 101623 - DNA, 22 bp, synthetic construct
  misc_feature 1..22: note = chemically synthesized
  source 1..22: mol_type = other DNA
gattgttatatctcctctgctt

SEQ ID NO: 101624 - DNA, 22 bp, synthetic construct
  misc_feature 1..22: note = chemically synthesized
  source 1..22: mol_type = other DNA
ttatatctcctctgcttcctgt

SEQ ID NO: 101625 - DNA, 22 bp, synthetic construct
  misc_feature 1..22: note = chemically synthesized
  source 1..22: mol_type = other DNA
tatctcctctgcttcctgtatt

SEQ ID NO: 101626 - DNA, 22 bp, synthetic construct
  misc_feature 1..22: note = chemically synthesized
  source 1..22: mol_type = other DNA
ctctgcttcctgtattcttttt

SEQ ID NO: 101627 - DNA, 22 bp, synthetic construct
  misc_feature 1..22: note = chemically synthesized
  source 1..22: mol_type = other DNA
tgcttcctgtattctttttctt

SEQ ID NO: 101628 - DNA, 22 bp, synthetic construct
  misc_feature 1..22: note = chemically synthesized
  source 1..22: mol_type = other DNA
cttcctgtattctttttcttca

SEQ ID NO: 101629 - DNA, 22 bp, synthetic construct
  misc_feature 1..22: note = chemically synthesized
  source 1..22: mol_type = other DNA
cctgtattctttttcttcagca

SEQ ID NO: 101630 - DNA, 22 bp, synthetic construct
  misc_feature 1..22: note = chemically synthesized
  source 1..22: mol_type = other DNA
ctgtattctttttcttcagcat

SEQ ID NO: 101631 - DNA, 22 bp, synthetic construct
  misc_feature 1..22: note = chemically synthesized
  source 1..22: mol_type = other DNA
tattctttttcttcagcatcac

SEQ ID NO: 101632 - DNA, 22 bp, synthetic construct
  misc_feature 1..22: note = chemically synthesized
  source 1..22: mol_type = other DNA
tttttcttcagcatcactggca

SEQ ID NO: 101633 - DNA, 22 bp, synthetic construct
  misc_feature 1..22: note = chemically synthesized
  source 1..22: mol_type = other DNA
tttcttcagcatcactggcatt

SEQ ID NO: 101634 - DNA, 22 bp, synthetic construct
  misc_feature 1..22: note = chemically synthesized
  source 1..22: mol_type = other DNA
ttcttcagcatcactggcattc

SEQ ID NO: 101635 - DNA, 22 bp, synthetic construct
  misc_feature 1..22: note = chemically synthesized
  source 1..22: mol_type = other DNA
tcttcagcatcactggcattcc

SEQ ID NO: 101636 - DNA, 22 bp, synthetic construct
  misc_feature 1..22: note = chemically synthesized
  source 1..22: mol_type = other DNA
cttcagcatcactggcattccc

SEQ ID NO: 101637 - DNA, 22 bp, synthetic construct
  misc_feature 1..22: note = chemically synthesized
  source 1..22: mol_type = other DNA
ttcagcatcactggcattccct

SEQ ID NO: 101638 - DNA, 22 bp, synthetic construct
  misc_feature 1..22: note = chemically synthesized
  source 1..22: mol_type = other DNA
cagcatcactggcattccctct

SEQ ID NO: 101639 - DNA, 22 bp, synthetic construct
  misc_feature 1..22: note = chemically synthesized
  source 1..22: mol_type = other DNA
agcatcactggcattccctctt

SEQ ID NO: 101640 - DNA, 22 bp, synthetic construct
  misc_feature 1..22: note = chemically synthesized
  source 1..22: mol_type = other DNA
gcattccctctttattaggtga

SEQ ID NO: 101641 - DNA, 22 bp, synthetic construct
  misc_feature 1..22: note = chemically synthesized
  source 1..22: mol_type = other DNA
cctctttattaggtgatatata

SEQ ID NO: 101642 - DNA, 22 bp, synthetic construct
  misc_feature 1..22: note = chemically synthesized
  source 1..22: mol_type = other DNA
tttattaggtgatatatatata

SEQ ID NO: 101643 - DNA, 22 bp, synthetic construct
  misc_feature 1..22: note = chemically synthesized
  source 1..22: mol_type = other DNA
tattaggtgatatatatatata

SEQ ID NO: 101644 - DNA, 22 bp, synthetic construct
  misc_feature 1..22: note = chemically synthesized
  source 1..22: mol_type = other DNA
attaggtgatatatatatatat

SEQ ID NO: 101645 - DNA, 22 bp, synthetic construct
  misc_feature 1..22: note = chemically synthesized
  source 1..22: mol_type = other DNA
ttaggtgatatatatatatata

SEQ ID NO: 101646 - DNA, 22 bp, synthetic construct
  misc_feature 1..22: note = chemically synthesized
  source 1..22: mol_type = other DNA
ggtgatatatatatatatatat

SEQ ID NO: 101647 - DNA, 22 bp, synthetic construct
  misc_feature 1..22: note = chemically synthesized
  source 1..22: mol_type = other DNA
ctcgctcacatcagctttttca

SEQ ID NO: 101648 - DNA, 22 bp, synthetic construct
  misc_feature 1..22: note = chemically synthesized
  source 1..22: mol_type = other DNA
tcgctcacatcagctttttcat

SEQ ID NO: 101649 - DNA, 22 bp, synthetic construct
  misc_feature 1..22: note = chemically synthesized
  source 1..22: mol_type = other DNA
gctcacatcagctttttcatgt

SEQ ID NO: 101650 - DNA, 22 bp, synthetic construct
  misc_feature 1..22: note = chemically synthesized
  source 1..22: mol_type = other DNA
acatcagctttttcatgtgata

SEQ ID NO: 101651 - DNA, 22 bp, synthetic construct
  misc_feature 1..22: note = chemically synthesized
  source 1..22: mol_type = other DNA
tttcatgtgataattaaaattg

SEQ ID NO: 101652 - DNA, 22 bp, synthetic construct
  misc_feature 1..22: note = chemically synthesized
  source 1..22: mol_type = other DNA
ttcatgtgataattaaaattga

SEQ ID NO: 101653 - DNA, 22 bp, synthetic construct
  misc_feature 1..22: note = chemically synthesized
  source 1..22: mol_type = other DNA
tcatgtgataattaaaattgaa

SEQ ID NO: 101654 - DNA, 22 bp, synthetic construct
  misc_feature 1..22: note = chemically synthesized
  source 1..22: mol_type = other DNA
catgtgataattaaaattgaat

SEQ ID NO: 101655 - DNA, 22 bp, synthetic construct
  misc_feature 1..22: note = chemically synthesized
  source 1..22: mol_type = other DNA
atgtgataattaaaattgaatc

SEQ ID NO: 101656 - DNA, 22 bp, synthetic construct
  misc_feature 1..22: note = chemically synthesized
  source 1..22: mol_type = other DNA
aaattgaatctaactctgagga

SEQ ID NO: 101657 - DNA, 22 bp, synthetic construct
  misc_feature 1..22: note = chemically synthesized
  source 1..22: mol_type = other DNA
aatctaactctgaggaaaaaaa

SEQ ID NO: 101658 - DNA, 22 bp, synthetic construct
  misc_feature 1..22: note = chemically synthesized
  source 1..22: mol_type = other DNA
actctgaggaaaaaaaagtgtg

SEQ ID NO: 101659 - DNA, 22 bp, synthetic construct
  misc_feature 1..22: note = chemically synthesized
  source 1..22: mol_type = other DNA
tgaggaaaaaaaagtgtggata

SEQ ID NO: 101660 - DNA, 22 bp, synthetic construct
  misc_feature 1..22: note = chemically synthesized
  source 1..22: mol_type = other DNA
aggaaaaaaaagtgtggatata

SEQ ID NO: 101661 - DNA, 22 bp, synthetic construct
  misc_feature 1..22: note = chemically synthesized
  source 1..22: mol_type = other DNA
cttttcagtaatgggagaggcc

SEQ ID NO: 101662 - DNA, 22 bp, synthetic construct
  misc_feature 1..22: note = chemically synthesized
  source 1..22: mol_type = other DNA
ttcagtaatgggagaggcccag

SEQ ID NO: 101663 - DNA, 22 bp, synthetic construct
  misc_feature 1..22: note = chemically synthesized
  source 1..22: mol_type = other DNA
tcagtaatgggagaggcccaga

SEQ ID NO: 101664 - DNA, 22 bp, synthetic construct
  misc_feature 1..22: note = chemically synthesized
  source 1..22: mol_type = other DNA
cagtaatgggagaggcccagaa

SEQ ID NO: 101665 - DNA, 22 bp, synthetic construct
  misc_feature 1..22: note = chemically synthesized
  source 1..22: mol_type = other DNA
agtaatgggagaggcccagaaa

SEQ ID NO: 101666 - DNA, 22 bp, synthetic construct
  misc_feature 1..22: note = chemically synthesized
  source 1..22: mol_type = other DNA
gagatcttgagattctgaaata

SEQ ID NO: 101667 - DNA, 22 bp, synthetic construct
  misc_feature 1..22: note = chemically synthesized
  source 1..22: mol_type = other DNA
gagattctgaaataagggctca

SEQ ID NO: 101668 - DNA, 22 bp, synthetic construct
  misc_feature 1..22: note = chemically synthesized
  source 1..22: mol_type = other DNA
agattctgaaataagggctcaa

SEQ ID NO: 101669 - DNA, 22 bp, synthetic construct
  misc_feature 1..22: note = chemically synthesized
  source 1..22: mol_type = other DNA
tgaaataagggctcaagcccta

SEQ ID NO: 101670 - DNA, 22 bp, synthetic construct
  misc_feature 1..22: note = chemically synthesized
  source 1..22: mol_type = other DNA
aaataagggctcaagccctact

SEQ ID NO: 101671 - DNA, 22 bp, synthetic construct
  misc_feature 1..22: note = chemically synthesized
  source 1..22: mol_type = other DNA
aagccctactctgcccagaaaa

SEQ ID NO: 101672 - DNA, 22 bp, synthetic construct
  misc_feature 1..22: note = chemically synthesized
  source 1..22: mol_type = other DNA
ctctgcccagaaaataggcgaa

SEQ ID NO: 101673 - DNA, 22 bp, synthetic construct
  misc_feature 1..22: note = chemically synthesized
  source 1..22: mol_type = other DNA
tgcccagaaaataggcgaataa

SEQ ID NO: 101674 - DNA, 22 bp, synthetic construct
  misc_feature 1..22: note = chemically synthesized
  source 1..22: mol_type = other DNA
cccagaaaataggcgaataatg

SEQ ID NO: 101675 - DNA, 22 bp, synthetic construct
  misc_feature 1..22: note = chemically synthesized
  source 1..22: mol_type = other DNA
ctttgaatctgcttggtcttga

SEQ ID NO: 101676 - DNA, 22 bp, synthetic construct
  misc_feature 1..22: note = chemically synthesized
  source 1..22: mol_type = other DNA
tttgaatctgcttggtcttgat

SEQ ID NO: 101677 - DNA, 22 bp, synthetic construct
  misc_feature 1..22: note = chemically synthesized
  source 1..22: mol_type = other DNA
tgaatctgcttggtcttgatgc

SEQ ID NO: 101678 - DNA, 22 bp, synthetic construct
  misc_feature 1..22: note = chemically synthesized
  source 1..22: mol_type = other DNA
gaatctgcttggtcttgatgct

SEQ ID NO: 101679 - DNA, 22 bp, synthetic construct
  misc_feature 1..22: note = chemically synthesized
  source 1..22: mol_type = other DNA
aatctgcttggtcttgatgcta

SEQ ID NO: 101680 - DNA, 22 bp, synthetic construct
  misc_feature 1..22: note = chemically synthesized
  source 1..22: mol_type = other DNA
cttggtcttgatgctataaatg

SEQ ID NO: 101681 - DNA, 22 bp, synthetic construct
  misc_feature 1..22: note = chemically synthesized
  source 1..22: mol_type = other DNA
ggtcttgatgctataaatgata

SEQ ID NO: 101682 - DNA, 22 bp, synthetic construct
  misc_feature 1..22: note = chemically synthesized
  source 1..22: mol_type = other DNA
gtcttgatgctataaatgatag

SEQ ID NO: 101683 - DNA, 22 bp, synthetic construct
  misc_feature 1..22: note = chemically synthesized
  source 1..22: mol_type = other DNA
gatgctataaatgataggattc

SEQ ID NO: 101684 - DNA, 22 bp, synthetic construct
  misc_feature 1..22: note = chemically synthesized
  source 1..22: mol_type = other DNA
atgctataaatgataggattca

SEQ ID NO: 101685 - DNA, 22 bp, synthetic construct
  misc_feature 1..22: note = chemically synthesized
  source 1..22: mol_type = other DNA
taaatgataggattcacgaatg

SEQ ID NO: 101686 - DNA, 22 bp, synthetic construct
  misc_feature 1..22: note = chemically synthesized
  source 1..22: mol_type = other DNA
acgaatggaggaaagagaaaat

SEQ ID NO: 101687 - DNA, 22 bp, synthetic construct
  misc_feature 1..22: note = chemically synthesized
  source 1..22: mol_type = other DNA
atggtaatggggaccacatgag

SEQ ID NO: 101688 - DNA, 22 bp, synthetic construct
  misc_feature 1..22: note = chemically synthesized
  source 1..22: mol_type = other DNA
cccaaacctgtgaatgaatgac

SEQ ID NO: 101689 - DNA, 22 bp, synthetic construct
  misc_feature 1..22: note = chemically synthesized
  source 1..22: mol_type = other DNA
ccaaacctgtgaatgaatgaca

SEQ ID NO: 101690 - DNA, 22 bp, synthetic construct
  misc_feature 1..22: note = chemically synthesized
  source 1..22: mol_type = other DNA
tgaatgaatgacagtcccatca

SEQ ID NO: 101691 - DNA, 22 bp, synthetic construct
  misc_feature 1..22: note = chemically synthesized
  source 1..22: mol_type = other DNA
ggacacagctaatatgggagac

SEQ ID NO: 101692 - DNA, 22 bp, synthetic construct
  misc_feature 1..22: note = chemically synthesized
  source 1..22: mol_type = other DNA
atatgggagacacaagtgttga

SEQ ID NO: 101693 - DNA, 22 bp, synthetic construct
  misc_feature 1..22: note = chemically synthesized
  source 1..22: mol_type = other DNA
agagatttagcttcctcttgtc

SEQ ID NO: 101694 - DNA, 22 bp, synthetic construct
  misc_feature 1..22: note = chemically synthesized
  source 1..22: mol_type = other DNA
agcttcctcttgtccagacgca

SEQ ID NO: 101695 - DNA, 22 bp, synthetic construct
  misc_feature 1..22: note = chemically synthesized
  source 1..22: mol_type = other DNA
gcttcctcttgtccagacgcaa

SEQ ID NO: 101696 - DNA, 22 bp, synthetic construct
  misc_feature 1..22: note = chemically synthesized
  source 1..22: mol_type = other DNA
cctcttgtccagacgcaatgcc

SEQ ID NO: 101697 - DNA, 22 bp, synthetic construct
  misc_feature 1..22: note = chemically synthesized
  source 1..22: mol_type = other DNA
ctcttgtccagacgcaatgccc

SEQ ID NO: 101698 - DNA, 22 bp, synthetic construct
  misc_feature 1..22: note = chemically synthesized
  source 1..22: mol_type = other DNA
ttgtccagacgcaatgcccatc

SEQ ID NO: 101699 - DNA, 22 bp, synthetic construct
  misc_feature 1..22: note = chemically synthesized
  source 1..22: mol_type = other DNA
gtccagacgcaatgcccatcac

SEQ ID NO: 101700 - DNA, 22 bp, synthetic construct
  misc_feature 1..22: note = chemically synthesized
  source 1..22: mol_type = other DNA
tccagacgcaatgcccatcact

SEQ ID NO: 101701 - DNA, 22 bp, synthetic construct
  misc_feature 1..22: note = chemically synthesized
  source 1..22: mol_type = other DNA
tcttgaggattagtatataaga

SEQ ID NO: 101702 - DNA, 22 bp, synthetic construct
  misc_feature 1..22: note = chemically synthesized
  source 1..22: mol_type = other DNA
gaggattagtatataagaaaag

SEQ ID NO: 101703 - DNA, 22 bp, synthetic construct
  misc_feature 1..22: note = chemically synthesized
  source 1..22: mol_type = other DNA
aggattagtatataagaaaaga

SEQ ID NO: 101704 - DNA, 22 bp, synthetic construct
  misc_feature 1..22: note = chemically synthesized
  source 1..22: mol_type = other DNA
gtatataagaaaagatgatgat

SEQ ID NO: 101705 - DNA, 22 bp, synthetic construct
  misc_feature 1..22: note = chemically synthesized
  source 1..22: mol_type = other DNA
gagcatctaaaaagacagtcaa

SEQ ID NO: 101706 - DNA, 22 bp, synthetic construct
  misc_feature 1..22: note = chemically synthesized
  source 1..22: mol_type = other DNA
aaaagacagtcaaagaagtctg

SEQ ID NO: 101707 - DNA, 22 bp, synthetic construct
  misc_feature 1..22: note = chemically synthesized
  source 1..22: mol_type = other DNA
aataattggatatatgtgatta

SEQ ID NO: 101708 - DNA, 22 bp, synthetic construct
  misc_feature 1..22: note = chemically synthesized
  source 1..22: mol_type = other DNA
gatatatgtgattaaacgtgat

SEQ ID NO: 101709 - DNA, 22 bp, synthetic construct
  misc_feature 1..22: note = chemically synthesized
  source 1..22: mol_type = other DNA
aacgtgatatcagcacaggcga

SEQ ID NO: 101710 - DNA, 22 bp, synthetic construct
  misc_feature 1..22: note = chemically synthesized
  source 1..22: mol_type = other DNA
tatgacatcttgatggaggcaa

SEQ ID NO: 101711 - DNA, 22 bp, synthetic construct
  misc_feature 1..22: note = chemically synthesized
  source 1..22: mol_type = other DNA
atgacatcttgatggaggcaaa

SEQ ID NO: 101712 - DNA, 22 bp, synthetic construct
  misc_feature 1..22: note = chemically synthesized
  source 1..22: mol_type = other DNA
tgacatcttgatggaggcaaaa

SEQ ID NO: 101713 - DNA, 22 bp, synthetic construct
  misc_feature 1..22: note = chemically synthesized
  source 1..22: mol_type = other DNA
gatggaggcaaaatgtgtgcaa

SEQ ID NO: 101714 - DNA, 22 bp, synthetic construct
  misc_feature 1..22: note = chemically synthesized
  source 1..22: mol_type = other DNA
atggaggcaaaatgtgtgcaag

SEQ ID NO: 101715 - DNA, 22 bp, synthetic construct
  misc_feature 1..22: note = chemically synthesized
  source 1..22: mol_type = other DNA
tgggcaaaatggacataaaacc

SEQ ID NO: 101716 - DNA, 22 bp, synthetic construct
  misc_feature 1..22: note = chemically synthesized
  source 1..22: mol_type = other DNA
tcatcagtacccccagtcctat

SEQ ID NO: 101717 - DNA, 22 bp, synthetic construct
  misc_feature 1..22: note = chemically synthesized
  source 1..22: mol_type = other DNA
atcagtacccccagtcctatgt

SEQ ID NO: 101718 - DNA, 22 bp, synthetic construct
  misc_feature 1..22: note = chemically synthesized
  source 1..22: mol_type = other DNA
tgttcatcactcgggaattggt

SEQ ID NO: 101719 - DNA, 22 bp, synthetic construct
  misc_feature 1..22: note = chemically synthesized
  source 1..22: mol_type = other DNA
atcactcgggaattggtaagaa

SEQ ID NO: 101720 - DNA, 22 bp, synthetic construct
  misc_feature 1..22: note = chemically synthesized
  source 1..22: mol_type = other DNA
gggaattggtaagaatgcagtt

SEQ ID NO: 101721 - DNA, 22 bp, synthetic construct
  misc_feature 1..22: note = chemically synthesized
  source 1..22: mol_type = other DNA
gtaagaatgcagttgtacctca

SEQ ID NO: 101722 - DNA, 22 bp, synthetic construct
  misc_feature 1..22: note = chemically synthesized
  source 1..22: mol_type = other DNA
tacctcagtggtgtgcggatgg

SEQ ID NO: 101723 - DNA, 22 bp, synthetic construct
  misc_feature 1..22: note = chemically synthesized
  source 1..22: mol_type = other DNA
agtggtgtgcggatggcaatga

SEQ ID NO: 101724 - DNA, 22 bp, synthetic construct
  misc_feature 1..22: note = chemically synthesized
  source 1..22: mol_type = other DNA
attctacaatggccagtgaatg

SEQ ID NO: 101725 - DNA, 22 bp, synthetic construct
  misc_feature 1..22: note = chemically synthesized
  source 1..22: mol_type = other DNA
tacaatggccagtgaatgaatg

SEQ ID NO: 101726 - DNA, 22 bp, synthetic construct
  misc_feature 1..22: note = chemically synthesized
  source 1..22: mol_type = other DNA
caatggccagtgaatgaatgaa

SEQ ID NO: 101727 - DNA, 22 bp, synthetic construct
  misc_feature 1..22: note = chemically synthesized
  source 1..22: mol_type = other DNA
ggtgaaacaggcagcatgggca

SEQ ID NO: 101728 - DNA, 22 bp, synthetic construct
  misc_feature 1..22: note = chemically synthesized
  source 1..22: mol_type = other DNA
cctctggtctagcagcaggaca

SEQ ID NO: 101729 - DNA, 22 bp, synthetic construct
  misc_feature 1..22: note = chemically synthesized
  source 1..22: mol_type = other DNA
tggtctagcagcaggacaccca

SEQ ID NO: 101730 - DNA, 22 bp, synthetic construct
  misc_feature 1..22: note = chemically synthesized
  source 1..22: mol_type = other DNA
gtctagcagcaggacacccagg

SEQ ID NO: 101731 - DNA, 22 bp, synthetic construct
  misc_feature 1..22: note = chemically synthesized
  source 1..22: mol_type = other DNA
gcagcaggacacccaggactgt

SEQ ID NO: 101732 - DNA, 22 bp, synthetic construct
  misc_feature 1..22: note = chemically synthesized
  source 1..22: mol_type = other DNA
tgggcattgtagtgaatgtcat

SEQ ID NO: 101733 - DNA, 22 bp, synthetic construct
  misc_feature 1..22: note = chemically synthesized
  source 1..22: mol_type = other DNA
tagtgaatgtcatcccaaggtc

SEQ ID NO: 101734 - DNA, 22 bp, synthetic construct
  misc_feature 1..22: note = chemically synthesized
  source 1..22: mol_type = other DNA
ccagcatagccaggaagtagta

SEQ ID NO: 101735 - DNA, 22 bp, synthetic construct
  misc_feature 1..22: note = chemically synthesized
  source 1..22: mol_type = other DNA
atggaggctgtgatcattccaa

SEQ ID NO: 101736 - DNA, 22 bp, synthetic construct
  misc_feature 1..22: note = chemically synthesized
  source 1..22: mol_type = other DNA
tgatcattccaaatgaggacaa

SEQ ID NO: 101737 - DNA, 22 bp, synthetic construct
  misc_feature 1..22: note = chemically synthesized
  source 1..22: mol_type = other DNA
caaatgaggacaagaagagtgc

SEQ ID NO: 101738 - DNA, 22 bp, synthetic construct
  misc_feature 1..22: note = chemically synthesized
  source 1..22: mol_type = other DNA
ccaaaaaggacggagaagtaga

SEQ ID NO: 101739 - DNA, 22 bp, synthetic construct
  misc_feature 1..22: note = chemically synthesized
  source 1..22: mol_type = other DNA
caaaaaggacggagaagtagat

SEQ ID NO: 101740 - DNA, 22 bp, synthetic construct
  misc_feature 1..22: note = chemically synthesized
  source 1..22: mol_type = other DNA
cctctgagcccaagaagccagt

SEQ ID NO: 101741 - DNA, 22 bp, synthetic construct
  misc_feature 1..22: note = chemically synthesized
  source 1..22: mol_type = other DNA
tgagcccaagaagccagtcagc

SEQ ID NO: 101742 - DNA, 22 bp, synthetic construct
  misc_feature 1..22: note = chemically synthesized
  source 1..22: mol_type = other DNA
agcccaagaagccagtcagcaa

SEQ ID NO: 101743 - DNA, 22 bp, synthetic construct
  misc_feature 1..22: note = chemically synthesized
  source 1..22: mol_type = other DNA
ttgttataccacatggtaggtt

SEQ ID NO: 101744 - DNA, 22 bp, synthetic construct
  misc_feature 1..22: note = chemically synthesized
  source 1..22: mol_type = other DNA
ttataccacatggtaggttttg

SEQ ID NO: 101745 - DNA, 22 bp, synthetic construct
  misc_feature 1..22: note = chemically synthesized
  source 1..22: mol_type = other DNA
taccacatggtaggttttgcag

SEQ ID NO: 101746 - DNA, 22 bp, synthetic construct
  misc_feature 1..22: note = chemically synthesized
  source 1..22: mol_type = other DNA
tgcaggtggagaagatattttt

SEQ ID NO: 101747 - DNA, 22 bp, synthetic construct
  misc_feature 1..22: note = chemically synthesized
  source 1..22: mol_type = other DNA
gcaggtggagaagatatttttt

SEQ ID NO: 101748 - DNA, 22 bp, synthetic construct
  misc_feature 1..22: note = chemically synthesized
  source 1..22: mol_type = other DNA
caggtggagaagatatttttta

SEQ ID NO: 101749 - DNA, 22 bp, synthetic construct
  misc_feature 1..22: note = chemically synthesized
  source 1..22: mol_type = other DNA
tttaggggtgatgacctccaaa

SEQ ID NO: 101750 - DNA, 22 bp, synthetic construct
  misc_feature 1..22: note = chemically synthesized
  source 1..22: mol_type = other DNA
ttaggggtgatgacctccaaag

SEQ ID NO: 101751 - DNA, 22 bp, synthetic construct
  misc_feature 1..22: note = chemically synthesized
  source 1..22: mol_type = other DNA
taggggtgatgacctccaaaga

SEQ ID NO: 101752 - DNA, 22 bp, synthetic construct
  misc_feature 1..22: note = chemically synthesized
  source 1..22: mol_type = other DNA
aggggtgatgacctccaaagat

SEQ ID NO: 101753 - DNA, 22 bp, synthetic construct
  misc_feature 1..22: note = chemically synthesized
  source 1..22: mol_type = other DNA
ggggtgatgacctccaaagatg

SEQ ID NO: 101754 - DNA, 22 bp, synthetic construct
  misc_feature 1..22: note = chemically synthesized
  source 1..22: mol_type = other DNA
caaagatgcagttttctttttt

SEQ ID NO: 101755 - DNA, 22 bp, synthetic construct
  misc_feature 1..22: note = chemically synthesized
  source 1..22: mol_type = other DNA
tcttttttctctcacaatcttc

SEQ ID NO: 101756 - DNA, 22 bp, synthetic construct
  misc_feature 1..22: note = chemically synthesized
  source 1..22: mol_type = other DNA
cttttttctctcacaatcttct

SEQ ID NO: 101757 - DNA, 22 bp, synthetic construct
  misc_feature 1..22: note = chemically synthesized
  source 1..22: mol_type = other DNA
ttttttctctcacaatcttctt

SEQ ID NO: 101758 - DNA, 22 bp, synthetic construct
  misc_feature 1..22: note = chemically synthesized
  source 1..22: mol_type = other DNA
ttttctctcacaatcttcttgt

SEQ ID NO: 101759 - DNA, 22 bp, synthetic construct
  misc_feature 1..22: note = chemically synthesized
  source 1..22: mol_type = other DNA
tttctctcacaatcttcttgta

SEQ ID NO: 101760 - DNA, 22 bp, synthetic construct
  misc_feature 1..22: note = chemically synthesized
  source 1..22: mol_type = other DNA
ttctctcacaatcttcttgtag

SEQ ID NO: 101761 - DNA, 22 bp, synthetic construct
  misc_feature 1..22: note = chemically synthesized
  source 1..22: mol_type = other DNA
tctctcacaatcttcttgtagc

SEQ ID NO: 101762 - DNA, 22 bp, synthetic construct
  misc_feature 1..22: note = chemically synthesized
  source 1..22: mol_type = other DNA
ctctcacaatcttcttgtagca

SEQ ID NO: 101763 - DNA, 22 bp, synthetic construct
  misc_feature 1..22: note = chemically synthesized
  source 1..22: mol_type = other DNA
tctcacaatcttcttgtagcac

SEQ ID NO: 101764 - DNA, 22 bp, synthetic construct
  misc_feature 1..22: note = chemically synthesized
  source 1..22: mol_type = other DNA
tcacaatcttcttgtagcacat

SEQ ID NO: 101765 - DNA, 22 bp, synthetic construct
  misc_feature 1..22: note = chemically synthesized
  source 1..22: mol_type = other DNA
acaatcttcttgtagcacatca

SEQ ID NO: 101766 - DNA, 22 bp, synthetic construct
  misc_feature 1..22: note = chemically synthesized
  source 1..22: mol_type = other DNA
cttgtagcacatcatcaggcca

SEQ ID NO: 101767 - DNA, 22 bp, synthetic construct
  misc_feature 1..22: note = chemically synthesized
  source 1..22: mol_type = other DNA
ttgtagcacatcatcaggccat

SEQ ID NO: 101768 - DNA, 22 bp, synthetic construct
  misc_feature 1..22: note = chemically synthesized
  source 1..22: mol_type = other DNA
gtagcacatcatcaggccattt

SEQ ID NO: 101769 - DNA, 22 bp, synthetic construct
  misc_feature 1..22: note = chemically synthesized
  source 1..22: mol_type = other DNA
tagcacatcatcaggccatttt

SEQ ID NO: 101770 - DNA, 22 bp, synthetic construct
  misc_feature 1..22: note = chemically synthesized
  source 1..22: mol_type = other DNA
tttacctcaaaacttaaatatt

SEQ ID NO: 101771 - DNA, 22 bp, synthetic construct
  misc_feature 1..22: note = chemically synthesized
  source 1..22: mol_type = other DNA
ttacctcaaaacttaaatattt

SEQ ID NO: 101772 - DNA, 22 bp, synthetic construct
  misc_feature 1..22: note = chemically synthesized
  source 1..22: mol_type = other DNA
tacctcaaaacttaaatatttt

SEQ ID NO: 101773 - DNA, 22 bp, synthetic construct
  misc_feature 1..22: note = chemically synthesized
  source 1..22: mol_type = other DNA
acctcaaaacttaaatattttt

SEQ ID NO: 101774 - DNA, 22 bp, synthetic construct
  misc_feature 1..22: note = chemically synthesized
  source 1..22: mol_type = other DNA
cctcaaaacttaaatatttttc

SEQ ID NO: 101775 - DNA, 22 bp, synthetic construct
  misc_feature 1..22: note = chemically synthesized
  source 1..22: mol_type = other DNA
aaaacttaaatatttttctgga

SEQ ID NO: 101776 - DNA, 22 bp, synthetic construct
  misc_feature 1..22: note = chemically synthesized
  source 1..22: mol_type = other DNA
aaatatttttctggattgtctc

SEQ ID NO: 101777 - DNA, 22 bp, synthetic construct
  misc_feature 1..22: note = chemically synthesized
  source 1..22: mol_type = other DNA
aatatttttctggattgtctca

SEQ ID NO: 101778 - DNA, 22 bp, synthetic construct
  misc_feature 1..22: note = chemically synthesized
  source 1..22: mol_type = other DNA
ttctggattgtctcatacttaa

SEQ ID NO: 101779 - DNA, 22 bp, synthetic construct
  misc_feature 1..22: note = chemically synthesized
  source 1..22: mol_type = other DNA
tctggattgtctcatacttaat

SEQ ID NO: 101780 - DNA, 22 bp, synthetic construct
  misc_feature 1..22: note = chemically synthesized
  source 1..22: mol_type = other DNA
ctggattgtctcatacttaatt

SEQ ID NO: 101781 - DNA, 22 bp, synthetic construct
  misc_feature 1..22: note = chemically synthesized
  source 1..22: mol_type = other DNA
tggattgtctcatacttaatta

SEQ ID NO: 101782 - DNA, 22 bp, synthetic construct
  misc_feature 1..22: note = chemically synthesized
  source 1..22: mol_type = other DNA
gattgtctcatacttaattaat

SEQ ID NO: 101783 - DNA, 22 bp, synthetic construct
  misc_feature 1..22: note = chemically synthesized
  source 1..22: mol_type = other DNA
tctcatacttaattaattgtaa

SEQ ID NO: 101784 - DNA, 22 bp, synthetic construct
  misc_feature 1..22: note = chemically synthesized
  source 1..22: mol_type = other DNA
atacttaattaattgtaagcct

SEQ ID NO: 101785 - DNA, 22 bp, synthetic construct
  misc_feature 1..22: note = chemically synthesized
  source 1..22: mol_type = other DNA
aattaattgtaagcctgtactc

SEQ ID NO: 101786 - DNA, 22 bp, synthetic construct
  misc_feature 1..22: note = chemically synthesized
  source 1..22: mol_type = other DNA
attaattgtaagcctgtactca

SEQ ID NO: 101787 - DNA, 22 bp, synthetic construct
  misc_feature 1..22: note = chemically synthesized
  source 1..22: mol_type = other DNA
attgtaagcctgtactcacaag

SEQ ID NO: 101788 - DNA, 22 bp, synthetic construct
  misc_feature 1..22: note = chemically synthesized
  source 1..22: mol_type = other DNA
taagcctgtactcacaaggcct

SEQ ID NO: 101789 - DNA, 22 bp, synthetic construct
  misc_feature 1..22: note = chemically synthesized
  source 1..22: mol_type = other DNA
tactcacaaggcctttccctag

SEQ ID NO: 101790 - DNA, 22 bp, synthetic construct
  misc_feature 1..22: note = chemically synthesized
  source 1..22: mol_type = other DNA
acaaggcctttccctagaataa

SEQ ID NO: 101791 - DNA, 22 bp, synthetic construct
  misc_feature 1..22: note = chemically synthesized
  source 1..22: mol_type = other DNA
tccctagaataacaaataacaa

SEQ ID NO: 101792 - DNA, 22 bp, synthetic construct
  misc_feature 1..22: note = chemically synthesized
  source 1..22: mol_type = other DNA
ccctagaataacaaataacaaa

SEQ ID NO: 101793 - DNA, 22 bp, synthetic construct
  misc_feature 1..22: note = chemically synthesized
  source 1..22: mol_type = other DNA
cctagaataacaaataacaaaa

SEQ ID NO: 101794 - DNA, 22 bp, synthetic construct
  misc_feature 1..22: note = chemically synthesized
  source 1..22: mol_type = other DNA
gaataacaaataacaaaaatca

SEQ ID NO: 101795 - DNA, 22 bp, synthetic construct
  misc_feature 1..22: note = chemically synthesized
  source 1..22: mol_type = other DNA
caattcactatgaagcatacaa

SEQ ID NO: 101796 - DNA, 22 bp, synthetic construct
  misc_feature 1..22: note = chemically synthesized
  source 1..22: mol_type = other DNA
actatgaagcatacaaccttta

SEQ ID NO: 101797 - DNA, 22 bp, synthetic construct
  misc_feature 1..22: note = chemically synthesized
  source 1..22: mol_type = other DNA
tgaagcatacaacctttatttt

SEQ ID NO: 101798 - DNA, 22 bp, synthetic construct
  misc_feature 1..22: note = chemically synthesized
  source 1..22: mol_type = other DNA
tattttttcaacactcatctta

SEQ ID NO: 101799 - DNA, 22 bp, synthetic construct
  misc_feature 1..22: note = chemically synthesized
  source 1..22: mol_type = other DNA
attttttcaacactcatcttac

SEQ ID NO: 101800 - DNA, 22 bp, synthetic construct
  misc_feature 1..22: note = chemically synthesized
  source 1..22: mol_type = other DNA
ttttttcaacactcatcttacg

SEQ ID NO: 101801 - DNA, 22 bp, synthetic construct
  misc_feature 1..22: note = chemically synthesized
  source 1..22: mol_type = other DNA
tttcaacactcatcttacgtct

SEQ ID NO: 101802 - DNA, 22 bp, synthetic construct
  misc_feature 1..22: note = chemically synthesized
  source 1..22: mol_type = other DNA
ttcaacactcatcttacgtctg

SEQ ID NO: 101803 - DNA, 22 bp, synthetic construct
  misc_feature 1..22: note = chemically synthesized
  source 1..22: mol_type = other DNA
tcaacactcatcttacgtctgt

SEQ ID NO: 101804 - DNA, 22 bp, synthetic construct
  misc_feature 1..22: note = chemically synthesized
  source 1..22: mol_type = other DNA
caacactcatcttacgtctgtg

SEQ ID NO: 101805 - DNA, 22 bp, synthetic construct
  misc_feature 1..22: note = chemically synthesized
  source 1..22: mol_type = other DNA
aacactcatcttacgtctgtgc

SEQ ID NO: 101806 - DNA, 22 bp, synthetic construct
  misc_feature 1..22: note = chemically synthesized
  source 1..22: mol_type = other DNA
atcttacgtctgtgctcatagc

SEQ ID NO: 101807 - DNA, 22 bp, synthetic construct
  misc_feature 1..22: note = chemically synthesized
  source 1..22: mol_type = other DNA
acgtctgtgctcatagccttga

SEQ ID NO: 101808 - DNA, 22 bp, synthetic construct
  misc_feature 1..22: note = chemically synthesized
  source 1..22: mol_type = other DNA
cgtctgtgctcatagccttgac

SEQ ID NO: 101809 - DNA, 22 bp, synthetic construct
  misc_feature 1..22: note = chemically synthesized
  source 1..22: mol_type = other DNA
tgctcatagccttgactcttgg

SEQ ID NO: 101810 - DNA, 22 bp, synthetic construct
  misc_feature 1..22: note = chemically synthesized
  source 1..22: mol_type = other DNA
atagccttgactcttggtccca

SEQ ID NO: 101811 - DNA, 22 bp, synthetic construct
  misc_feature 1..22: note = chemically synthesized
  source 1..22: mol_type = other DNA
gactcttggtcccaaataggac

SEQ ID NO: 101812 - DNA, 22 bp, synthetic construct
  misc_feature 1..22: note = chemically synthesized
  source 1..22: mol_type = other DNA
actcttggtcccaaataggact

SEQ ID NO: 101813 - DNA, 22 bp, synthetic construct
  misc_feature 1..22: note = chemically synthesized
  source 1..22: mol_type = other DNA
ttggtcccaaataggactcctt

SEQ ID NO: 101814 - DNA, 22 bp, synthetic construct
  misc_feature 1..22: note = chemically synthesized
  source 1..22: mol_type = other DNA
ggtcccaaataggactcctttg

SEQ ID NO: 101815 - DNA, 22 bp, synthetic construct
  misc_feature 1..22: note = chemically synthesized
  source 1..22: mol_type = other DNA
gtcccaaataggactcctttgt

SEQ ID NO: 101816 - DNA, 22 bp, synthetic construct
  misc_feature 1..22: note = chemically synthesized
  source 1..22: mol_type = other DNA
ctttgttcccttttattctctt

SEQ ID NO: 101817 - DNA, 22 bp, synthetic construct
  misc_feature 1..22: note = chemically synthesized
  source 1..22: mol_type = other DNA
tgttcccttttattctctttac

SEQ ID NO: 101818 - DNA, 22 bp, synthetic construct
  misc_feature 1..22: note = chemically synthesized
  source 1..22: mol_type = other DNA
gttcccttttattctctttact

SEQ ID NO: 101819 - DNA, 22 bp, synthetic construct
  misc_feature 1..22: note = chemically synthesized
  source 1..22: mol_type = other DNA
ttcccttttattctctttactc

SEQ ID NO: 101820 - DNA, 22 bp, synthetic construct
  misc_feature 1..22: note = chemically synthesized
  source 1..22: mol_type = other DNA
ccttttattctctttactcttt

SEQ ID NO: 101821 - DNA, 22 bp, synthetic construct
  misc_feature 1..22: note = chemically synthesized
  source 1..22: mol_type = other DNA
ttattctctttactcttttatt

SEQ ID NO: 101822 - DNA, 22 bp, synthetic construct
  misc_feature 1..22: note = chemically synthesized
  source 1..22: mol_type = other DNA
tattctctttactcttttattc

SEQ ID NO: 101823 - DNA, 22 bp, synthetic construct
  misc_feature 1..22: note = chemically synthesized
  source 1..22: mol_type = other DNA
attctctttactcttttattcc

SEQ ID NO: 101824 - DNA, 22 bp, synthetic construct
  misc_feature 1..22: note = chemically synthesized
  source 1..22: mol_type = other DNA
ttctctttactcttttattcct

SEQ ID NO: 101825 - DNA, 22 bp, synthetic construct
  misc_feature 1..22: note = chemically synthesized
  source 1..22: mol_type = other DNA
tctttactcttttattcctcct

SEQ ID NO: 101826 - DNA, 22 bp, synthetic construct
  misc_feature 1..22: note = chemically synthesized
  source 1..22: mol_type = other DNA
tttactcttttattcctcctcc

SEQ ID NO: 101827 - DNA, 22 bp, synthetic construct
  misc_feature 1..22: note = chemically synthesized
  source 1..22: mol_type = other DNA
tactcttttattcctcctccta

SEQ ID NO: 101828 - DNA, 22 bp, synthetic construct
  misc_feature 1..22: note = chemically synthesized
  source 1..22: mol_type = other DNA
actcttttattcctcctcctat

SEQ ID NO: 101829 - DNA, 22 bp, synthetic construct
  misc_feature 1..22: note = chemically synthesized
  source 1..22: mol_type = other DNA
ctcttttattcctcctcctatt

SEQ ID NO: 101830 - DNA, 22 bp, synthetic construct
  misc_feature 1..22: note = chemically synthesized
  source 1..22: mol_type = other DNA
ttttattcctcctcctattatt

SEQ ID NO: 101831 - DNA, 22 bp, synthetic construct
  misc_feature 1..22: note = chemically synthesized
  source 1..22: mol_type = other DNA
ttattcctcctcctattattta

SEQ ID NO: 101832 - DNA, 22 bp, synthetic construct
  misc_feature 1..22: note = chemically synthesized
  source 1..22: mol_type = other DNA
tattcctcctcctattatttat

SEQ ID NO: 101833 - DNA, 22 bp, synthetic construct
  misc_feature 1..22: note = chemically synthesized
  source 1..22: mol_type = other DNA
attcctcctcctattatttatc

SEQ ID NO: 101834 - DNA, 22 bp, synthetic construct
  misc_feature 1..22: note = chemically synthesized
  source 1..22: mol_type = other DNA
ttcctcctcctattatttatca

SEQ ID NO: 101835 - DNA, 22 bp, synthetic construct
  misc_feature 1..22: note = chemically synthesized
  source 1..22: mol_type = other DNA
ctcctcctattatttatcatat

SEQ ID NO: 101836 - DNA, 22 bp, synthetic construct
  misc_feature 1..22: note = chemically synthesized
  source 1..22: mol_type = other DNA
ctcctattatttatcatatggg

SEQ ID NO: 101837 - DNA, 22 bp, synthetic construct
  misc_feature 1..22: note = chemically synthesized
  source 1..22: mol_type = other DNA
ctattatttatcatatgggccc

SEQ ID NO: 101838 - DNA, 22 bp, synthetic construct
  misc_feature 1..22: note = chemically synthesized
  source 1..22: mol_type = other DNA
ttatttatcatatgggccctta

SEQ ID NO: 101839 - DNA, 22 bp, synthetic construct
  misc_feature 1..22: note = chemically synthesized
  source 1..22: mol_type = other DNA
tttatcatatgggcccttactg

SEQ ID NO: 101840 - DNA, 22 bp, synthetic construct
  misc_feature 1..22: note = chemically synthesized
  source 1..22: mol_type = other DNA
atcatatgggcccttactgtgt

SEQ ID NO: 101841 - DNA, 22 bp, synthetic construct
  misc_feature 1..22: note = chemically synthesized
  source 1..22: mol_type = other DNA
tcatatgggcccttactgtgtt

SEQ ID NO: 101842 - DNA, 22 bp, synthetic construct
  misc_feature 1..22: note = chemically synthesized
  source 1..22: mol_type = other DNA
actgtgttactatccaagttga

SEQ ID NO: 101843 - DNA, 22 bp, synthetic construct
  misc_feature 1..22: note = chemically synthesized
  source 1..22: mol_type = other DNA
ctgtgttactatccaagttgag

SEQ ID NO: 101844 - DNA, 22 bp, synthetic construct
  misc_feature 1..22: note = chemically synthesized
  source 1..22: mol_type = other DNA
tgttactatccaagttgagtca

SEQ ID NO: 101845 - DNA, 22 bp, synthetic construct
  misc_feature 1..22: note = chemically synthesized
  source 1..22: mol_type = other DNA
ctatccaagttgagtcagttca

SEQ ID NO: 101846 - DNA, 22 bp, synthetic construct
  misc_feature 1..22: note = chemically synthesized
  source 1..22: mol_type = other DNA
tccaagttgagtcagttcaaat

SEQ ID NO: 101847 - DNA, 22 bp, synthetic construct
  misc_feature 1..22: note = chemically synthesized
  source 1..22: mol_type = other DNA
agtcagttcaaattttttctct

SEQ ID NO: 101848 - DNA, 22 bp, synthetic construct
  misc_feature 1..22: note = chemically synthesized
  source 1..22: mol_type = other DNA
aaattttttctcttgaaactaa

SEQ ID NO: 101849 - DNA, 22 bp, synthetic construct
  misc_feature 1..22: note = chemically synthesized
  source 1..22: mol_type = other DNA
tttctcttgaaactaatgggac

SEQ ID NO: 101850 - DNA, 22 bp, synthetic construct
  misc_feature 1..22: note = chemically synthesized
  source 1..22: mol_type = other DNA
ttctcttgaaactaatgggaca

SEQ ID NO: 101851 - DNA, 22 bp, synthetic construct
  misc_feature 1..22: note = chemically synthesized
  source 1..22: mol_type = other DNA
tctcttgaaactaatgggacag

SEQ ID NO: 101852 - DNA, 22 bp, synthetic construct
  misc_feature 1..22: note = chemically synthesized
  source 1..22: mol_type = other DNA
ctcttgaaactaatgggacagc

SEQ ID NO: 101853 - DNA, 22 bp, synthetic construct
  misc_feature 1..22: note = chemically synthesized
  source 1..22: mol_type = other DNA
tcttgaaactaatgggacagct

SEQ ID NO: 101854 - DNA, 22 bp, synthetic construct
  misc_feature 1..22: note = chemically synthesized
  source 1..22: mol_type = other DNA
ttgaaactaatgggacagctgt

SEQ ID NO: 101855 - DNA, 22 bp, synthetic construct
  misc_feature 1..22: note = chemically synthesized
  source 1..22: mol_type = other DNA
gaaactaatgggacagctgtat

SEQ ID NO: 101856 - DNA, 22 bp, synthetic construct
  misc_feature 1..22: note = chemically synthesized
  source 1..22: mol_type = other DNA
aaactaatgggacagctgtatt

SEQ ID NO: 101857 - DNA, 22 bp, synthetic construct
  misc_feature 1..22: note = chemically synthesized
  source 1..22: mol_type = other DNA
atgggacagctgtatttaggat

SEQ ID NO: 101858 - DNA, 22 bp, synthetic construct
  misc_feature 1..22: note = chemically synthesized
  source 1..22: mol_type = other DNA
tatttaggattaaccactgagg

SEQ ID NO: 101859 - DNA, 22 bp, synthetic construct
  misc_feature 1..22: note = chemically synthesized
  source 1..22: mol_type = other DNA
aggattaaccactgaggaaaat

SEQ ID NO: 101860 - DNA, 22 bp, synthetic construct
  misc_feature 1..22: note = chemically synthesized
  source 1..22: mol_type = other DNA
ggattaaccactgaggaaaatg

SEQ ID NO: 101861 - DNA, 22 bp, synthetic construct
  misc_feature 1..22: note = chemically synthesized
  source 1..22: mol_type = other DNA
accactgaggaaaatgcttatt

SEQ ID NO: 101862 - DNA, 22 bp, synthetic construct
  misc_feature 1..22: note = chemically synthesized
  source 1..22: mol_type = other DNA
aggaaaatgcttattcaataga

SEQ ID NO: 101863 - DNA, 22 bp, synthetic construct
  misc_feature 1..22: note = chemically synthesized
  source 1..22: mol_type = other DNA
attcaatagaaatgactgagaa

SEQ ID NO: 101864 - DNA, 22 bp, synthetic construct
  misc_feature 1..22: note = chemically synthesized
  source 1..22: mol_type = other DNA
ttcaatagaaatgactgagaaa

SEQ ID NO: 101865 - DNA, 22 bp, synthetic construct
  misc_feature 1..22: note = chemically synthesized
  source 1..22: mol_type = other DNA
aatagaaatgactgagaaatat

SEQ ID NO: 101866 - DNA, 22 bp, synthetic construct
  misc_feature 1..22: note = chemically synthesized
  source 1..22: mol_type = other DNA
agaaatattgtgatcaatgttg

SEQ ID NO: 101867 - DNA, 22 bp, synthetic construct
  misc_feature 1..22: note = chemically synthesized
  source 1..22: mol_type = other DNA
tgatcaatgttgctatctcaag

SEQ ID NO: 101868 - DNA, 22 bp, synthetic construct
  misc_feature 1..22: note = chemically synthesized
  source 1..22: mol_type = other DNA
ctatctcaagtggactgtgaat

SEQ ID NO: 101869 - DNA, 22 bp, synthetic construct
  misc_feature 1..22: note = chemically synthesized
  source 1..22: mol_type = other DNA
tctcaagtggactgtgaataag

SEQ ID NO: 101870 - DNA, 22 bp, synthetic construct
  misc_feature 1..22: note = chemically synthesized
  source 1..22: mol_type = other DNA
aagtggactgtgaataagaaga

SEQ ID NO: 101871 - DNA, 22 bp, synthetic construct
  misc_feature 1..22: note = chemically synthesized
  source 1..22: mol_type = other DNA
tgaataagaagagaacccagcc

SEQ ID NO: 101872 - DNA, 22 bp, synthetic construct
  misc_feature 1..22: note = chemically synthesized
  source 1..22: mol_type = other DNA
ggcaacatagctagaccctgcc

SEQ ID NO: 101873 - DNA, 22 bp, synthetic construct
  misc_feature 1..22: note = chemically synthesized
  source 1..22: mol_type = other DNA
gaccctgcctccaccaaaaaaa

SEQ ID NO: 101874 - DNA, 22 bp, synthetic construct
  misc_feature 1..22: note = chemically synthesized
  source 1..22: mol_type = other DNA
cctccaccaaaaaaaaaagaaa

SEQ ID NO: 101875 - DNA, 22 bp, synthetic construct
  misc_feature 1..22: note = chemically synthesized
  source 1..22: mol_type = other DNA
caccaaaaaaaaaagaaaagat

SEQ ID NO: 101876 - DNA, 22 bp, synthetic construct
  misc_feature 1..22: note = chemically synthesized
  source 1..22: mol_type = other DNA
gctgggcacaggggcacacatc

SEQ ID NO: 101877 - DNA, 22 bp, synthetic construct
  misc_feature 1..22: note = chemically synthesized
  source 1..22: mol_type = other DNA
ggcacaggggcacacatcacct

SEQ ID NO: 101878 - DNA, 22 bp, synthetic construct
  misc_feature 1..22: note = chemically synthesized
  source 1..22: mol_type = other DNA
agcccaggactgtgaggctgca

SEQ ID NO: 101879 - DNA, 22 bp, synthetic construct
  misc_feature 1..22: note = chemically synthesized
  source 1..22: mol_type = other DNA
tgaggctgcagggagctatgat

SEQ ID NO: 101880 - DNA, 22 bp, synthetic construct
  misc_feature 1..22: note = chemically synthesized
  source 1..22: mol_type = other DNA
cagggagctatgattgcagcac

SEQ ID NO: 101881 - DNA, 22 bp, synthetic construct
  misc_feature 1..22: note = chemically synthesized
  source 1..22: mol_type = other DNA
tgattgcagcactgctctccag

SEQ ID NO: 101882 - DNA, 22 bp, synthetic construct
  misc_feature 1..22: note = chemically synthesized
  source 1..22: mol_type = other DNA
cagcactgctctccagcctggg

SEQ ID NO: 101883 - DNA, 22 bp, synthetic construct
  misc_feature 1..22: note = chemically synthesized
  source 1..22: mol_type = other DNA
ctctccagcctgggcaacggag

SEQ ID NO: 101884 - DNA, 22 bp, synthetic construct
  misc_feature 1..22: note = chemically synthesized
  source 1..22: mol_type = other DNA
tccagcctgggcaacggagtca

SEQ ID NO: 101885 - DNA, 22 bp, synthetic construct
  misc_feature 1..22: note = chemically synthesized
  source 1..22: mol_type = other DNA
cagcctgggcaacggagtcaga

SEQ ID NO: 101886 - DNA, 22 bp, synthetic construct
  misc_feature 1..22: note = chemically synthesized
  source 1..22: mol_type = other DNA
ggcaacggagtcagactctgtc

SEQ ID NO: 101887 - DNA, 22 bp, synthetic construct
  misc_feature 1..22: note = chemically synthesized
  source 1..22: mol_type = other DNA
tgtctctataaaaaataaaata

SEQ ID NO: 101888 - DNA, 22 bp, synthetic construct
  misc_feature 1..22: note = chemically synthesized
  source 1..22: mol_type = other DNA
tctctataaaaaataaaataaa

SEQ ID NO: 101889 - DNA, 22 bp, synthetic construct
  misc_feature 1..22: note = chemically synthesized
  source 1..22: mol_type = other DNA
tataaaaaataaaataaaataa

SEQ ID NO: 101890 - DNA, 22 bp, synthetic construct
  misc_feature 1..22: note = chemically synthesized
  source 1..22: mol_type = other DNA
taaaaaataaaataaaataaaa

SEQ ID NO: 101891 - DNA, 22 bp, synthetic construct
  misc_feature 1..22: note = chemically synthesized
  source 1..22: mol_type = other DNA
atctattgtgagtttccacaga

SEQ ID NO: 101892 - DNA, 22 bp, synthetic construct
  misc_feature 1..22: note = chemically synthesized
  source 1..22: mol_type = other DNA
ttgtgagtttccacagaaatct

SEQ ID NO: 101893 - DNA, 22 bp, synthetic construct
  misc_feature 1..22: note = chemically synthesized
  source 1..22: mol_type = other DNA
tgagtttccacagaaatctgaa

SEQ ID NO: 101894 - DNA, 22 bp, synthetic construct
  misc_feature 1..22: note = chemically synthesized
  source 1..22: mol_type = other DNA
ccacagaaatctgaacacctga

SEQ ID NO: 101895 - DNA, 22 bp, synthetic construct
  misc_feature 1..22: note = chemically synthesized
  source 1..22: mol_type = other DNA
cacagaaatctgaacacctgaa

SEQ ID NO: 101896 - DNA, 22 bp, synthetic construct
  misc_feature 1..22: note = chemically synthesized
  source 1..22: mol_type = other DNA
aacacctgaacaagtgggtaaa

SEQ ID NO: 101897 - DNA, 22 bp, synthetic construct
  misc_feature 1..22: note = chemically synthesized
  source 1..22: mol_type = other DNA
aacaagtgggtaaagttagtaa

SEQ ID NO: 101898 - DNA, 22 bp, synthetic construct
  misc_feature 1..22: note = chemically synthesized
  source 1..22: mol_type = other DNA
gtaaactcattttagaaaggtg

SEQ ID NO: 101899 - DNA, 22 bp, synthetic construct
  misc_feature 1..22: note = chemically synthesized
  source 1..22: mol_type = other DNA
attttagaaaggtgtaattact

SEQ ID NO: 101900 - DNA, 22 bp, synthetic construct
  misc_feature 1..22: note = chemically synthesized
  source 1..22: mol_type = other DNA
tagaaaggtgtaattactcagt

SEQ ID NO: 101901 - DNA, 22 bp, synthetic construct
  misc_feature 1..22: note = chemically synthesized
  source 1..22: mol_type = other DNA
agaaaggtgtaattactcagtg

SEQ ID NO: 101902 - DNA, 22 bp, synthetic construct
  misc_feature 1..22: note = chemically synthesized
  source 1..22: mol_type = other DNA
gaaaggtgtaattactcagtgg

SEQ ID NO: 101903 - DNA, 22 bp, synthetic construct
  misc_feature 1..22: note = chemically synthesized
  source 1..22: mol_type = other DNA
ctcagtggacttgggactcagc

SEQ ID NO: 101904 - DNA, 22 bp, synthetic construct
  misc_feature 1..22: note = chemically synthesized
  source 1..22: mol_type = other DNA
agtggacttgggactcagcaag

SEQ ID NO: 101905 - DNA, 22 bp, synthetic construct
  misc_feature 1..22: note = chemically synthesized
  source 1..22: mol_type = other DNA
gggactcagcaagttccctatg

SEQ ID NO: 101906 - DNA, 22 bp, synthetic construct
  misc_feature 1..22: note = chemically synthesized
  source 1..22: mol_type = other DNA
ggactcagcaagttccctatgc

SEQ ID NO: 101907 - DNA, 22 bp, synthetic construct
  misc_feature 1..22: note = chemically synthesized
  source 1..22: mol_type = other DNA
agcaagttccctatgctgcaaa

SEQ ID NO: 101908 - DNA, 22 bp, synthetic construct
  misc_feature 1..22: note = chemically synthesized
  source 1..22: mol_type = other DNA
cctatgctgcaaaaagtctgag

SEQ ID NO: 101909 - DNA, 22 bp, synthetic construct
  misc_feature 1..22: note = chemically synthesized
  source 1..22: mol_type = other DNA
tgctgcaaaaagtctgagtttt

SEQ ID NO: 101910 - DNA, 22 bp, synthetic construct
  misc_feature 1..22: note = chemically synthesized
  source 1..22: mol_type = other DNA
caaaaagtctgagttttggcac

SEQ ID NO: 101911 - DNA, 22 bp, synthetic construct
  misc_feature 1..22: note = chemically synthesized
  source 1..22: mol_type = other DNA
agttttggcacattagggacaa

SEQ ID NO: 101912 - DNA, 22 bp, synthetic construct
  misc_feature 1..22: note = chemically synthesized
  source 1..22: mol_type = other DNA
tggcacattagggacaaacatg

SEQ ID NO: 101913 - DNA, 22 bp, synthetic construct
  misc_feature 1..22: note = chemically synthesized
  source 1..22: mol_type = other DNA
ggcacattagggacaaacatga

SEQ ID NO: 101914 - DNA, 22 bp, synthetic construct
  misc_feature 1..22: note = chemically synthesized
  source 1..22: mol_type = other DNA
gcacattagggacaaacatgaa

SEQ ID NO: 101915 - DNA, 22 bp, synthetic construct
  misc_feature 1..22: note = chemically synthesized
  source 1..22: mol_type = other DNA
gggacaaacatgaaaataggag

SEQ ID NO: 101916 - DNA, 22 bp, synthetic construct
  misc_feature 1..22: note = chemically synthesized
  source 1..22: mol_type = other DNA
atgttggaagctcataacggaa

SEQ ID NO: 101917 - DNA, 22 bp, synthetic construct
  misc_feature 1..22: note = chemically synthesized
  source 1..22: mol_type = other DNA
gaagctcataacggaaatattt

SEQ ID NO: 101918 - DNA, 22 bp, synthetic construct
  misc_feature 1..22: note = chemically synthesized
  source 1..22: mol_type = other DNA
ataacggaaatattttaaggac

SEQ ID NO: 101919 - DNA, 22 bp, synthetic construct
  misc_feature 1..22: note = chemically synthesized
  source 1..22: mol_type = other DNA
taaggacatacttctacaatga

SEQ ID NO: 101920 - DNA, 22 bp, synthetic construct
  misc_feature 1..22: note = chemically synthesized
  source 1..22: mol_type = other DNA
aaggacatacttctacaatgag

SEQ ID NO: 101921 - DNA, 22 bp, synthetic construct
  misc_feature 1..22: note = chemically synthesized
  source 1..22: mol_type = other DNA
aggacatacttctacaatgagg

SEQ ID NO: 101922 - DNA, 22 bp, synthetic construct
  misc_feature 1..22: note = chemically synthesized
  source 1..22: mol_type = other DNA
ctacaatgagggcctccacaaa

SEQ ID NO: 101923 - DNA, 22 bp, synthetic construct
  misc_feature 1..22: note = chemically synthesized
  source 1..22: mol_type = other DNA
tacaatgagggcctccacaaaa

SEQ ID NO: 101924 - DNA, 22 bp, synthetic construct
  misc_feature 1..22: note = chemically synthesized
  source 1..22: mol_type = other DNA
caatgagggcctccacaaaagc

SEQ ID NO: 101925 - DNA, 22 bp, synthetic construct
  misc_feature 1..22: note = chemically synthesized
  source 1..22: mol_type = other DNA
cacaaaagcctaatacttgtta

SEQ ID NO: 101926 - DNA, 22 bp, synthetic construct
  misc_feature 1..22: note = chemically synthesized
  source 1..22: mol_type = other DNA
atacttgttagagtcatagatt

SEQ ID NO: 101927 - DNA, 22 bp, synthetic construct
  misc_feature 1..22: note = chemically synthesized
  source 1..22: mol_type = other DNA
gttagagtcatagattcgtaag

SEQ ID NO: 101928 - DNA, 22 bp, synthetic construct
  misc_feature 1..22: note = chemically synthesized
  source 1..22: mol_type = other DNA
ttagagtcatagattcgtaagt

SEQ ID NO: 101929 - DNA, 22 bp, synthetic construct
  misc_feature 1..22: note = chemically synthesized
  source 1..22: mol_type = other DNA
gagtcatagattcgtaagtatg

SEQ ID NO: 101930 - DNA, 22 bp, synthetic construct
  misc_feature 1..22: note = chemically synthesized
  source 1..22: mol_type = other DNA
gtaagtatgttgatctgaaggg

SEQ ID NO: 101931 - DNA, 22 bp, synthetic construct
  misc_feature 1..22: note = chemically synthesized
  source 1..22: mol_type = other DNA
atctgaagggcaatagtaatat

SEQ ID NO: 101932 - DNA, 22 bp, synthetic construct
  misc_feature 1..22: note = chemically synthesized
  source 1..22: mol_type = other DNA
aagggcaatagtaatatcggaa

SEQ ID NO: 101933 - DNA, 22 bp, synthetic construct
  misc_feature 1..22: note = chemically synthesized
  source 1..22: mol_type = other DNA
gtaattgagttaataaacttca

SEQ ID NO: 101934 - DNA, 22 bp, synthetic construct
  misc_feature 1..22: note = chemically synthesized
  source 1..22: mol_type = other DNA
agttaataaacttcacacaacc

SEQ ID NO: 101935 - DNA, 22 bp, synthetic construct
  misc_feature 1..22: note = chemically synthesized
  source 1..22: mol_type = other DNA
ataaacttcacacaaccagttc

SEQ ID NO: 101936 - DNA, 22 bp, synthetic construct
  misc_feature 1..22: note = chemically synthesized
  source 1..22: mol_type = other DNA
cacacaaccagttctagggaaa

SEQ ID NO: 101937 - DNA, 22 bp, synthetic construct
  misc_feature 1..22: note = chemically synthesized
  source 1..22: mol_type = other DNA
acacaaccagttctagggaaaa

SEQ ID NO: 101938 - DNA, 22 bp, synthetic construct
  misc_feature 1..22: note = chemically synthesized
  source 1..22: mol_type = other DNA
tagggaaaagataagcactccc

SEQ ID NO: 101939 - DNA, 22 bp, synthetic construct
  misc_feature 1..22: note = chemically synthesized
  source 1..22: mol_type = other DNA
gggaaaagataagcactcccag

SEQ ID NO: 101940 - DNA, 22 bp, synthetic construct
  misc_feature 1..22: note = chemically synthesized
  source 1..22: mol_type = other DNA
ccagagagaaaatacggcaact

SEQ ID NO: 101941 - DNA, 22 bp, synthetic construct
  misc_feature 1..22: note = chemically synthesized
  source 1..22: mol_type = other DNA
tgttgctgatggagacaatctt

SEQ ID NO: 101942 - DNA, 22 bp, synthetic construct
  misc_feature 1..22: note = chemically synthesized
  source 1..22: mol_type = other DNA
ctgatggagacaatcttacaga

SEQ ID NO: 101943 - DNA, 22 bp, synthetic construct
  misc_feature 1..22: note = chemically synthesized
  source 1..22: mol_type = other DNA
atggagacaatcttacagaccc

SEQ ID NO: 101944 - DNA, 22 bp, synthetic construct
  misc_feature 1..22: note = chemically synthesized
  source 1..22: mol_type = other DNA
acagaccctctaatcattatga

SEQ ID NO: 101945 - DNA, 22 bp, synthetic construct
  misc_feature 1..22: note = chemically synthesized
  source 1..22: mol_type = other DNA
cagaccctctaatcattatgaa

SEQ ID NO: 101946 - DNA, 22 bp, synthetic construct
  misc_feature 1..22: note = chemically synthesized
  source 1..22: mol_type = other DNA
taatcattatgaatctgtaaga

SEQ ID NO: 101947 - DNA, 22 bp, synthetic construct
  misc_feature 1..22: note = chemically synthesized
  source 1..22: mol_type = other DNA
atcattatgaatctgtaagact

SEQ ID NO: 101948 - DNA, 22 bp, synthetic construct
  misc_feature 1..22: note = chemically synthesized
  source 1..22: mol_type = other DNA
tgaatctgtaagactcgtattg

SEQ ID NO: 101949 - DNA, 22 bp, synthetic construct
  misc_feature 1..22: note = chemically synthesized
  source 1..22: mol_type = other DNA
taagactcgtattgagaaaaat

SEQ ID NO: 101950 - DNA, 22 bp, synthetic construct
  misc_feature 1..22: note = chemically synthesized
  source 1..22: mol_type = other DNA
gtattgagaaaaattcacaagg

SEQ ID NO: 101951 - DNA, 22 bp, synthetic construct
  misc_feature 1..22: note = chemically synthesized
  source 1..22: mol_type = other DNA
agaaaaattcacaaggatcctc

SEQ ID NO: 101952 - DNA, 22 bp, synthetic construct
  misc_feature 1..22: note = chemically synthesized
  source 1..22: mol_type = other DNA
acaaggatcctcatagggaact

SEQ ID NO: 101953 - DNA, 22 bp, synthetic construct
  misc_feature 1..22: note = chemically synthesized
  source 1..22: mol_type = other DNA
atagggaactatgaagtctatt

SEQ ID NO: 101954 - DNA, 22 bp, synthetic construct
  misc_feature 1..22: note = chemically synthesized
  source 1..22: mol_type = other DNA
tgaagtctatttataattaata

SEQ ID NO: 101955 - DNA, 22 bp, synthetic construct
  misc_feature 1..22: note = chemically synthesized
  source 1..22: mol_type = other DNA
tttataattaatatttatttat

SEQ ID NO: 101956 - DNA, 22 bp, synthetic construct
  misc_feature 1..22: note = chemically synthesized
  source 1..22: mol_type = other DNA
ataattaatatttatttatatt

SEQ ID NO: 101957 - DNA, 22 bp, synthetic construct
  misc_feature 1..22: note = chemically synthesized
  source 1..22: mol_type = other DNA
taattaatatttatttatattt

SEQ ID NO: 101958 - DNA, 22 bp, synthetic construct
  misc_feature 1..22: note = chemically synthesized
  source 1..22: mol_type = other DNA
atatttatttatatttataatt

SEQ ID NO: 101959 - DNA, 22 bp, synthetic construct
  misc_feature 1..22: note = chemically synthesized
  source 1..22: mol_type = other DNA
atttatatttataattacactt

SEQ ID NO: 101960 - DNA, 22 bp, synthetic construct
  misc_feature 1..22: note = chemically synthesized
  source 1..22: mol_type = other DNA
tttatatttataattacacttt

SEQ ID NO: 101961 - DNA, 22 bp, synthetic construct
  misc_feature 1..22: note = chemically synthesized
  source 1..22: mol_type = other DNA
atatttataattacacttttac

SEQ ID NO: 101962 - DNA, 22 bp, synthetic construct
  misc_feature 1..22: note = chemically synthesized
  source 1..22: mol_type = other DNA
tatttataattacacttttaca

SEQ ID NO: 101963 - DNA, 22 bp, synthetic construct
  misc_feature 1..22: note = chemically synthesized
  source 1..22: mol_type = other DNA
ataattacacttttacaaagtc

SEQ ID NO: 101964 - DNA, 22 bp, synthetic construct
  misc_feature 1..22: note = chemically synthesized
  source 1..22: mol_type = other DNA
taattacacttttacaaagtca

SEQ ID NO: 101965 - DNA, 22 bp, synthetic construct
  misc_feature 1..22: note = chemically synthesized
  source 1..22: mol_type = other DNA
cacttttacaaagtcaagattt

SEQ ID NO: 101966 - DNA, 22 bp, synthetic construct
  misc_feature 1..22: note = chemically synthesized
  source 1..22: mol_type = other DNA
ttacaaagtcaagatttttgtt

SEQ ID NO: 101967 - DNA, 22 bp, synthetic construct
  misc_feature 1..22: note = chemically synthesized
  source 1..22: mol_type = other DNA
tacaaagtcaagatttttgttg

SEQ ID NO: 101968 - DNA, 22 bp, synthetic construct
  misc_feature 1..22: note = chemically synthesized
  source 1..22: mol_type = other DNA
acaaagtcaagatttttgttgt

SEQ ID NO: 101969 - DNA, 22 bp, synthetic construct
  misc_feature 1..22: note = chemically synthesized
  source 1..22: mol_type = other DNA
caaagtcaagatttttgttgtt

SEQ ID NO: 101970 - DNA, 22 bp, synthetic construct
  misc_feature 1..22: note = chemically synthesized
  source 1..22: mol_type = other DNA
ttgttgttgtgataccaagaaa

SEQ ID NO: 101971 - DNA, 22 bp, synthetic construct
  misc_feature 1..22: note = chemically synthesized
  source 1..22: mol_type = other DNA
tgttgttgtgataccaagaaat

SEQ ID NO: 101972 - DNA, 22 bp, synthetic construct
  misc_feature 1..22: note = chemically synthesized
  source 1..22: mol_type = other DNA
gttgttgtgataccaagaaatt

SEQ ID NO: 101973 - DNA, 22 bp, synthetic construct
  misc_feature 1..22: note = chemically synthesized
  source 1..22: mol_type = other DNA
ttgttgtgataccaagaaattt

SEQ ID NO: 101974 - DNA, 22 bp, synthetic construct
  misc_feature 1..22: note = chemically synthesized
  source 1..22: mol_type = other DNA
ttgtgataccaagaaattttgt

SEQ ID NO: 101975 - DNA, 22 bp, synthetic construct
  misc_feature 1..22: note = chemically synthesized
  source 1..22: mol_type = other DNA
tgataccaagaaattttgtagc

SEQ ID NO: 101976 - DNA, 22 bp, synthetic construct
  misc_feature 1..22: note = chemically synthesized
  source 1..22: mol_type = other DNA
tgtagcaggtttattgggaaaa

SEQ ID NO: 101977 - DNA, 22 bp, synthetic construct
  misc_feature 1..22: note = chemically synthesized
  source 1..22: mol_type = other DNA
gtagcaggtttattgggaaaac

SEQ ID NO: 101978 - DNA, 22 bp, synthetic construct
  misc_feature 1..22: note = chemically synthesized
  source 1..22: mol_type = other DNA
tagcaggtttattgggaaaaca

SEQ ID NO: 101979 - DNA, 22 bp, synthetic construct
  misc_feature 1..22: note = chemically synthesized
  source 1..22: mol_type = other DNA
attgggaaaacaaagagaacta

SEQ ID NO: 101980 - DNA, 22 bp, synthetic construct
  misc_feature 1..22: note = chemically synthesized
  source 1..22: mol_type = other DNA
ttgggaaaacaaagagaactac

SEQ ID NO: 101981 - DNA, 22 bp, synthetic construct
  misc_feature 1..22: note = chemically synthesized
  source 1..22: mol_type = other DNA
ggaaaacaaagagaactacaag

SEQ ID NO: 101982 - DNA, 22 bp, synthetic construct
  misc_feature 1..22: note = chemically synthesized
  source 1..22: mol_type = other DNA
caagggaaactcagtttctccc

SEQ ID NO: 101983 - DNA, 22 bp, synthetic construct
  misc_feature 1..22: note = chemically synthesized
  source 1..22: mol_type = other DNA
agtttctcccaaattcaattga

SEQ ID NO: 101984 - DNA, 22 bp, synthetic construct
  misc_feature 1..22: note = chemically synthesized
  source 1..22: mol_type = other DNA
ctcccaaattcaattgattctg

SEQ ID NO: 101985 - DNA, 22 bp, synthetic construct
  misc_feature 1..22: note = chemically synthesized
  source 1..22: mol_type = other DNA
tcccaaattcaattgattctgt

SEQ ID NO: 101986 - DNA, 22 bp, synthetic construct
  misc_feature 1..22: note = chemically synthesized
  source 1..22: mol_type = other DNA
ccaaattcaattgattctgtat

SEQ ID NO: 101987 - DNA, 22 bp, synthetic construct
  misc_feature 1..22: note = chemically synthesized
  source 1..22: mol_type = other DNA
aattgattctgtatgtgtccag

SEQ ID NO: 101988 - DNA, 22 bp, synthetic construct
  misc_feature 1..22: note = chemically synthesized
  source 1..22: mol_type = other DNA
attctgtatgtgtccagagtct

SEQ ID NO: 101989 - DNA, 22 bp, synthetic construct
  misc_feature 1..22: note = chemically synthesized
  source 1..22: mol_type = other DNA
tgtatgtgtccagagtctttta

SEQ ID NO: 101990 - DNA, 22 bp, synthetic construct
  misc_feature 1..22: note = chemically synthesized
  source 1..22: mol_type = other DNA
tatgtgtccagagtcttttaaa

SEQ ID NO: 101991 - DNA, 22 bp, synthetic construct
  misc_feature 1..22: note = chemically synthesized
  source 1..22: mol_type = other DNA
ttaaaatatcattcaatattat

SEQ ID NO: 101992 - DNA, 22 bp, synthetic construct
  misc_feature 1..22: note = chemically synthesized
  source 1..22: mol_type = other DNA
taaaatatcattcaatattata

SEQ ID NO: 101993 - DNA, 22 bp, synthetic construct
  misc_feature 1..22: note = chemically synthesized
  source 1..22: mol_type = other DNA
aaaatatcattcaatattataa

SEQ ID NO: 101994 - DNA, 22 bp, synthetic construct
  misc_feature 1..22: note = chemically synthesized
  source 1..22: mol_type = other DNA
aaatatcattcaatattataaa

SEQ ID NO: 101995 - DNA, 22 bp, synthetic construct
  misc_feature 1..22: note = chemically synthesized
  source 1..22: mol_type = other DNA
aatattataaatattactaccg

SEQ ID NO: 101996 - DNA, 22 bp, synthetic construct
  misc_feature 1..22: note = chemically synthesized
  source 1..22: mol_type = other DNA
taaatattactaccgacacctt

SEQ ID NO: 101997 - DNA, 22 bp, synthetic construct
  misc_feature 1..22: note = chemically synthesized
  source 1..22: mol_type = other DNA
ctaccgacacctttgaagtgta

SEQ ID NO: 101998 - DNA, 22 bp, synthetic construct
  misc_feature 1..22: note = chemically synthesized
  source 1..22: mol_type = other DNA
ccgacacctttgaagtgtaatt

SEQ ID NO: 101999 - DNA, 22 bp, synthetic construct
  misc_feature 1..22: note = chemically synthesized
  source 1..22: mol_type = other DNA
tgaagtgtaattcagtaaaaat

SEQ ID NO: 102000 - DNA, 22 bp, synthetic construct
  misc_feature 1..22: note = chemically synthesized
  source 1..22: mol_type = other DNA
gaagtgtaattcagtaaaaatg

SEQ ID NO: 102001 - DNA, 22 bp, synthetic construct
  misc_feature 1..22: note = chemically synthesized
  source 1..22: mol_type = other DNA
aagtgtaattcagtaaaaatga

SEQ ID NO: 102002 - DNA, 22 bp, synthetic construct
  misc_feature 1..22: note = chemically synthesized
  source 1..22: mol_type = other DNA
agtaaaaatgaagtgataacaa

SEQ ID NO: 102003 - DNA, 22 bp, synthetic construct
  misc_feature 1..22: note = chemically synthesized
  source 1..22: mol_type = other DNA
tgcaccttttttattttataaa

SEQ ID NO: 102004 - DNA, 22 bp, synthetic construct
  misc_feature 1..22: note = chemically synthesized
  source 1..22: mol_type = other DNA
gcaccttttttattttataaaa

SEQ ID NO: 102005 - DNA, 22 bp, synthetic construct
  misc_feature 1..22: note = chemically synthesized
  source 1..22: mol_type = other DNA
caccttttttattttataaaaa

SEQ ID NO: 102006 - DNA, 22 bp, synthetic construct
  misc_feature 1..22: note = chemically synthesized
  source 1..22: mol_type = other DNA
ttttattttataaaaacctata

SEQ ID NO: 102007 - DNA, 22 bp, synthetic construct
  misc_feature 1..22: note = chemically synthesized
  source 1..22: mol_type = other DNA
tttattttataaaaacctatag

SEQ ID NO: 102008 - DNA, 22 bp, synthetic construct
  misc_feature 1..22: note = chemically synthesized
  source 1..22: mol_type = other DNA
ttattttataaaaacctataga

SEQ ID NO: 102009 - DNA, 22 bp, synthetic construct
  misc_feature 1..22: note = chemically synthesized
  source 1..22: mol_type = other DNA
tattttataaaaacctatagaa

SEQ ID NO: 102010 - DNA, 22 bp, synthetic construct
  misc_feature 1..22: note = chemically synthesized
  source 1..22: mol_type = other DNA
attttataaaaacctatagaaa

SEQ ID NO: 102011 - DNA, 22 bp, synthetic construct
  misc_feature 1..22: note = chemically synthesized
  source 1..22: mol_type = other DNA
ttttataaaaacctatagaaac

SEQ ID NO: 102012 - DNA, 22 bp, synthetic construct
  misc_feature 1..22: note = chemically synthesized
  source 1..22: mol_type = other DNA
tataaaaacctatagaaacaat

SEQ ID NO: 102013 - DNA, 22 bp, synthetic construct
  misc_feature 1..22: note = chemically synthesized
  source 1..22: mol_type = other DNA
ataaaaacctatagaaacaata

SEQ ID NO: 102014 - DNA, 22 bp, synthetic construct
  misc_feature 1..22: note = chemically synthesized
  source 1..22: mol_type = other DNA
taaaaacctatagaaacaataa

SEQ ID NO: 102015 - DNA, 22 bp, synthetic construct
  misc_feature 1..22: note = chemically synthesized
  source 1..22: mol_type = other DNA
tagaaacaataataattatatg

SEQ ID NO: 102016 - DNA, 22 bp, synthetic construct
  misc_feature 1..22: note = chemically synthesized
  source 1..22: mol_type = other DNA
tatgtttcagaattttggcaca

SEQ ID NO: 102017 - DNA, 22 bp, synthetic construct
  misc_feature 1..22: note = chemically synthesized
  source 1..22: mol_type = other DNA
cagaattttggcacatagtaac

SEQ ID NO: 102018 - DNA, 22 bp, synthetic construct
  misc_feature 1..22: note = chemically synthesized
  source 1..22: mol_type = other DNA
agaattttggcacatagtaaca

SEQ ID NO: 102019 - DNA, 22 bp, synthetic construct
  misc_feature 1..22: note = chemically synthesized
  source 1..22: mol_type = other DNA
tggcacatagtaacatctctaa

SEQ ID NO: 102020 - DNA, 22 bp, synthetic construct
  misc_feature 1..22: note = chemically synthesized
  source 1..22: mol_type = other DNA
ggcacatagtaacatctctaat

SEQ ID NO: 102021 - DNA, 22 bp, synthetic construct
  misc_feature 1..22: note = chemically synthesized
  source 1..22: mol_type = other DNA
gcacatagtaacatctctaata

SEQ ID NO: 102022 - DNA, 22 bp, synthetic construct
  misc_feature 1..22: note = chemically synthesized
  source 1..22: mol_type = other DNA
taatataagcaattattggtgg

SEQ ID NO: 102023 - DNA, 22 bp, synthetic construct
  misc_feature 1..22: note = chemically synthesized
  source 1..22: mol_type = other DNA
atataagcaattattggtggag

SEQ ID NO: 102024 - DNA, 22 bp, synthetic construct
  misc_feature 1..22: note = chemically synthesized
  source 1..22: mol_type = other DNA
ttggtggagagagatggacaga

SEQ ID NO: 102025 - DNA, 22 bp, synthetic construct
  misc_feature 1..22: note = chemically synthesized
  source 1..22: mol_type = other DNA
gtggagagagatggacagagga

SEQ ID NO: 102026 - DNA, 22 bp, synthetic construct
  misc_feature 1..22: note = chemically synthesized
  source 1..22: mol_type = other DNA
ttgaaagggctgctacttcagg

SEQ ID NO: 102027 - DNA, 22 bp, synthetic construct
  misc_feature 1..22: note = chemically synthesized
  source 1..22: mol_type = other DNA
tgaaagggctgctacttcaggg

SEQ ID NO: 102028 - DNA, 22 bp, synthetic construct
  misc_feature 1..22: note = chemically synthesized
  source 1..22: mol_type = other DNA
gaaagggctgctacttcagggg

SEQ ID NO: 102029 - DNA, 22 bp, synthetic construct
  misc_feature 1..22: note = chemically synthesized
  source 1..22: mol_type = other DNA
aaagggctgctacttcagggga

SEQ ID NO: 102030 - DNA, 22 bp, synthetic construct
  misc_feature 1..22: note = chemically synthesized
  source 1..22: mol_type = other DNA
ctacttcaggggacactgttga

SEQ ID NO: 102031 - DNA, 22 bp, synthetic construct
  misc_feature 1..22: note = chemically synthesized
  source 1..22: mol_type = other DNA
cttcaggggacactgttgataa

SEQ ID NO: 102032 - DNA, 22 bp, synthetic construct
  misc_feature 1..22: note = chemically synthesized
  source 1..22: mol_type = other DNA
caggggacactgttgataacaa

SEQ ID NO: 102033 - DNA, 22 bp, synthetic construct
  misc_feature 1..22: note = chemically synthesized
  source 1..22: mol_type = other DNA
aggggacactgttgataacaaa

SEQ ID NO: 102034 - DNA, 22 bp, synthetic construct
  misc_feature 1..22: note = chemically synthesized
  source 1..22: mol_type = other DNA
ttgataacaaaaatgtcagtct

SEQ ID NO: 102035 - DNA, 22 bp, synthetic construct
  misc_feature 1..22: note = chemically synthesized
  source 1..22: mol_type = other DNA
ataacaaaaatgtcagtctagg

SEQ ID NO: 102036 - DNA, 22 bp, synthetic construct
  misc_feature 1..22: note = chemically synthesized
  source 1..22: mol_type = other DNA
ggcactgcagtagcagagacta

SEQ ID NO: 102037 - DNA, 22 bp, synthetic construct
  misc_feature 1..22: note = chemically synthesized
  source 1..22: mol_type = other DNA
cagtagcagagactatgttcat

SEQ ID NO: 102038 - DNA, 22 bp, synthetic construct
  misc_feature 1..22: note = chemically synthesized
  source 1..22: mol_type = other DNA
tgttcatatggatactaaaaac

SEQ ID NO: 102039 - DNA, 22 bp, synthetic construct
  misc_feature 1..22: note = chemically synthesized
  source 1..22: mol_type = other DNA
atatggatactaaaaacactgc

SEQ ID NO: 102040 - DNA, 22 bp, synthetic construct
  misc_feature 1..22: note = chemically synthesized
  source 1..22: mol_type = other DNA
aaaacactgctaactaacttga

SEQ ID NO: 102041 - DNA, 22 bp, synthetic construct
  misc_feature 1..22: note = chemically synthesized
  source 1..22: mol_type = other DNA
ctaactaacttgatccactgaa

SEQ ID NO: 102042 - DNA, 22 bp, synthetic construct
  misc_feature 1..22: note = chemically synthesized
  source 1..22: mol_type = other DNA
actaacttgatccactgaatta

SEQ ID NO: 102043 - DNA, 22 bp, synthetic construct
  misc_feature 1..22: note = chemically synthesized
  source 1..22: mol_type = other DNA
acttgatccactgaattatgac

SEQ ID NO: 102044 - DNA, 22 bp, synthetic construct
  misc_feature 1..22: note = chemically synthesized
  source 1..22: mol_type = other DNA
gatccactgaattatgacctgc

SEQ ID NO: 102045 - DNA, 22 bp, synthetic construct
  misc_feature 1..22: note = chemically synthesized
  source 1..22: mol_type = other DNA
atccactgaattatgacctgca

SEQ ID NO: 102046 - DNA, 22 bp, synthetic construct
  misc_feature 1..22: note = chemically synthesized
  source 1..22: mol_type = other DNA
aattatgacctgcatagtgctt

SEQ ID NO: 102047 - DNA, 22 bp, synthetic construct
  misc_feature 1..22: note = chemically synthesized
  source 1..22: mol_type = other DNA
tgacctgcatagtgcttaatgt

SEQ ID NO: 102048 - DNA, 22 bp, synthetic construct
  misc_feature 1..22: note = chemically synthesized
  source 1..22: mol_type = other DNA
catagtgcttaatgtggcagaa

SEQ ID NO: 102049 - DNA, 22 bp, synthetic construct
  misc_feature 1..22: note = chemically synthesized
  source 1..22: mol_type = other DNA
aatgtggcagaacttatctacc

SEQ ID NO: 102050 - DNA, 22 bp, synthetic construct
  misc_feature 1..22: note = chemically synthesized
  source 1..22: mol_type = other DNA
atgtggcagaacttatctaccg

SEQ ID NO: 102051 - DNA, 22 bp, synthetic construct
  misc_feature 1..22: note = chemically synthesized
  source 1..22: mol_type = other DNA
atctaccgccacaggagtgatg

SEQ ID NO: 102052 - DNA, 22 bp, synthetic construct
  misc_feature 1..22: note = chemically synthesized
  source 1..22: mol_type = other DNA
tctaccgccacaggagtgatgt

SEQ ID NO: 102053 - DNA, 22 bp, synthetic construct
  misc_feature 1..22: note = chemically synthesized
  source 1..22: mol_type = other DNA
ccgccacaggagtgatgtgtat

SEQ ID NO: 102054 - DNA, 22 bp, synthetic construct
  misc_feature 1..22: note = chemically synthesized
  source 1..22: mol_type = other DNA
taagttctcttaaccttccaat

SEQ ID NO: 102055 - DNA, 22 bp, synthetic construct
  misc_feature 1..22: note = chemically synthesized
  source 1..22: mol_type = other DNA
tcttaaccttccaatgttgcct

SEQ ID NO: 102056 - DNA, 22 bp, synthetic construct
  misc_feature 1..22: note = chemically synthesized
  source 1..22: mol_type = other DNA
ttaaccttccaatgttgcctta

SEQ ID NO: 102057 - DNA, 22 bp, synthetic construct
  misc_feature 1..22: note = chemically synthesized
  source 1..22: mol_type = other DNA
aaccttccaatgttgccttata

SEQ ID NO: 102058 - DNA, 22 bp, synthetic construct
  misc_feature 1..22: note = chemically synthesized
  source 1..22: mol_type = other DNA
accttccaatgttgccttataa

SEQ ID NO: 102059 - DNA, 22 bp, synthetic construct
  misc_feature 1..22: note = chemically synthesized
  source 1..22: mol_type = other DNA
ccaatgttgccttataagagaa

SEQ ID NO: 102060 - DNA, 22 bp, synthetic construct
  misc_feature 1..22: note = chemically synthesized
  source 1..22: mol_type = other DNA
caatgttgccttataagagaat

SEQ ID NO: 102061 - DNA, 22 bp, synthetic construct
  misc_feature 1..22: note = chemically synthesized
  source 1..22: mol_type = other DNA
ccttataagagaatggattaat

SEQ ID NO: 102062 - DNA, 22 bp, synthetic construct
  misc_feature 1..22: note = chemically synthesized
  source 1..22: mol_type = other DNA
ataagagaatggattaatgcca

SEQ ID NO: 102063 - DNA, 22 bp, synthetic construct
  misc_feature 1..22: note = chemically synthesized
  source 1..22: mol_type = other DNA
taagagaatggattaatgccaa

SEQ ID NO: 102064 - DNA, 22 bp, synthetic construct
  misc_feature 1..22: note = chemically synthesized
  source 1..22: mol_type = other DNA
atgccaaaatttgttgtacagg

SEQ ID NO: 102065 - DNA, 22 bp, synthetic construct
  misc_feature 1..22: note = chemically synthesized
  source 1..22: mol_type = other DNA
gttgtacaggataagagctaac

SEQ ID NO: 102066 - DNA, 22 bp, synthetic construct
  misc_feature 1..22: note = chemically synthesized
  source 1..22: mol_type = other DNA
ttgtacaggataagagctaacc

SEQ ID NO: 102067 - DNA, 22 bp, synthetic construct
  misc_feature 1..22: note = chemically synthesized
  source 1..22: mol_type = other DNA
tacaggataagagctaaccact

SEQ ID NO: 102068 - DNA, 22 bp, synthetic construct
  misc_feature 1..22: note = chemically synthesized
  source 1..22: mol_type = other DNA
accacttatttggatctactgt

SEQ ID NO: 102069 - DNA, 22 bp, synthetic construct
  misc_feature 1..22: note = chemically synthesized
  source 1..22: mol_type = other DNA
atttggatctactgtcacccag

SEQ ID NO: 102070 - DNA, 22 bp, synthetic construct
  misc_feature 1..22: note = chemically synthesized
  source 1..22: mol_type = other DNA
tttggatctactgtcacccaga

SEQ ID NO: 102071 - DNA, 22 bp, synthetic construct
  misc_feature 1..22: note = chemically synthesized
  source 1..22: mol_type = other DNA
ggatctactgtcacccagataa

SEQ ID NO: 102072 - DNA, 22 bp, synthetic construct
  misc_feature 1..22: note = chemically synthesized
  source 1..22: mol_type = other DNA
gatctactgtcacccagataat

SEQ ID NO: 102073 - DNA, 22 bp, synthetic construct
  misc_feature 1..22: note = chemically synthesized
  source 1..22: mol_type = other DNA
ctgtcacccagataatggacca

SEQ ID NO: 102074 - DNA, 22 bp, synthetic construct
  misc_feature 1..22: note = chemically synthesized
  source 1..22: mol_type = other DNA
tcacccagataatggaccagat

SEQ ID NO: 102075 - DNA, 22 bp, synthetic construct
  misc_feature 1..22: note = chemically synthesized
  source 1..22: mol_type = other DNA
attattcttaaactatagtcgt

SEQ ID NO: 102076 - DNA, 22 bp, synthetic construct
  misc_feature 1..22: note = chemically synthesized
  source 1..22: mol_type = other DNA
ttcttaaactatagtcgtgttt

SEQ ID NO: 102077 - DNA, 22 bp, synthetic construct
  misc_feature 1..22: note = chemically synthesized
  source 1..22: mol_type = other DNA
ttaaactatagtcgtgttttca

SEQ ID NO: 102078 - DNA, 22 bp, synthetic construct
  misc_feature 1..22: note = chemically synthesized
  source 1..22: mol_type = other DNA
aaactatagtcgtgttttcaaa

SEQ ID NO: 102079 - DNA, 22 bp, synthetic construct
  misc_feature 1..22: note = chemically synthesized
  source 1..22: mol_type = other DNA
aactatagtcgtgttttcaaaa

SEQ ID NO: 102080 - DNA, 22 bp, synthetic construct
  misc_feature 1..22: note = chemically synthesized
  source 1..22: mol_type = other DNA
tagtcgtgttttcaaaacctga

SEQ ID NO: 102081 - DNA, 22 bp, synthetic construct
  misc_feature 1..22: note = chemically synthesized
  source 1..22: mol_type = other DNA
tcaaaacctgagctgcgtttgg

SEQ ID NO: 102082 - DNA, 22 bp, synthetic construct
  misc_feature 1..22: note = chemically synthesized
  source 1..22: mol_type = other DNA
caaaacctgagctgcgtttggg

SEQ ID NO: 102083 - DNA, 22 bp, synthetic construct
  misc_feature 1..22: note = chemically synthesized
  source 1..22: mol_type = other DNA
aaaacctgagctgcgtttggga

SEQ ID NO: 102084 - DNA, 22 bp, synthetic construct
  misc_feature 1..22: note = chemically synthesized
  source 1..22: mol_type = other DNA
agctgcgtttgggacatgcgga

SEQ ID NO: 102085 - DNA, 22 bp, synthetic construct
  misc_feature 1..22: note = chemically synthesized
  source 1..22: mol_type = other DNA
cgtttgggacatgcggatgcac

SEQ ID NO: 102086 - DNA, 22 bp, synthetic construct
  misc_feature 1..22: note = chemically synthesized
  source 1..22: mol_type = other DNA
gggacatgcggatgcacagggt

SEQ ID NO: 102087 - DNA, 22 bp, synthetic construct
  misc_feature 1..22: note = chemically synthesized
  source 1..22: mol_type = other DNA
ggacatgcggatgcacagggtt

SEQ ID NO: 102088 - DNA, 22 bp, synthetic construct
  misc_feature 1..22: note = chemically synthesized
  source 1..22: mol_type = other DNA
tattaaaactgtgtggtaatta

SEQ ID NO: 102089 - DNA, 22 bp, synthetic construct
  misc_feature 1..22: note = chemically synthesized
  source 1..22: mol_type = other DNA
attaaaactgtgtggtaattac

SEQ ID NO: 102090 - DNA, 22 bp, synthetic construct
  misc_feature 1..22: note = chemically synthesized
  source 1..22: mol_type = other DNA
ttaaaactgtgtggtaattact

SEQ ID NO: 102091 - DNA, 22 bp, synthetic construct
  misc_feature 1..22: note = chemically synthesized
  source 1..22: mol_type = other DNA
aaactgtgtggtaattactggg

SEQ ID NO: 102092 - DNA, 22 bp, synthetic construct
  misc_feature 1..22: note = chemically synthesized
  source 1..22: mol_type = other DNA
tgtggtaattactggggaaata

SEQ ID NO: 102093 - DNA, 22 bp, synthetic construct
  misc_feature 1..22: note = chemically synthesized
  source 1..22: mol_type = other DNA
ctggggaaatagttaatacaat

SEQ ID NO: 102094 - DNA, 22 bp, synthetic construct
  misc_feature 1..22: note = chemically synthesized
  source 1..22: mol_type = other DNA
gggaaatagttaatacaattta

SEQ ID NO: 102095 - DNA, 22 bp, synthetic construct
  misc_feature 1..22: note = chemically synthesized
  source 1..22: mol_type = other DNA
atacaatttataagtatatttt

SEQ ID NO: 102096 - DNA, 22 bp, synthetic construct
  misc_feature 1..22: note = chemically synthesized
  source 1..22: mol_type = other DNA
ataagtatattttattgaccta

SEQ ID NO: 102097 - DNA, 22 bp, synthetic construct
  misc_feature 1..22: note = chemically synthesized
  source 1..22: mol_type = other DNA
taagtatattttattgacctaa

SEQ ID NO: 102098 - DNA, 22 bp, synthetic construct
  misc_feature 1..22: note = chemically synthesized
  source 1..22: mol_type = other DNA
tattgacctaaagatagccctc

SEQ ID NO: 102099 - DNA, 22 bp, synthetic construct
  misc_feature 1..22: note = chemically synthesized
  source 1..22: mol_type = other DNA
attgacctaaagatagccctct

SEQ ID NO: 102100 - DNA, 22 bp, synthetic construct
  misc_feature 1..22: note = chemically synthesized
  source 1..22: mol_type = other DNA
ttgacctaaagatagccctcta

SEQ ID NO: 102101 - DNA, 22 bp, synthetic construct
  misc_feature 1..22: note = chemically synthesized
  source 1..22: mol_type = other DNA
acctaaagatagccctctattt

SEQ ID NO: 102102 - DNA, 22 bp, synthetic construct
  misc_feature 1..22: note = chemically synthesized
  source 1..22: mol_type = other DNA
aagatagccctctatttaacat

SEQ ID NO: 102103 - DNA, 22 bp, synthetic construct
  misc_feature 1..22: note = chemically synthesized
  source 1..22: mol_type = other DNA
tatttaacatctgcagtctcta

SEQ ID NO: 102104 - DNA, 22 bp, synthetic construct
  misc_feature 1..22: note = chemically synthesized
  source 1..22: mol_type = other DNA
tttaacatctgcagtctctagc

SEQ ID NO: 102105 - DNA, 22 bp, synthetic construct
  misc_feature 1..22: note = chemically synthesized
  source 1..22: mol_type = other DNA
aacatctgcagtctctagcaaa

SEQ ID NO: 102106 - DNA, 22 bp, synthetic construct
  misc_feature 1..22: note = chemically synthesized
  source 1..22: mol_type = other DNA
acatctgcagtctctagcaaaa

SEQ ID NO: 102107 - DNA, 22 bp, synthetic construct
  misc_feature 1..22: note = chemically synthesized
  source 1..22: mol_type = other DNA
cagtctctagcaaaacagctac

SEQ ID NO: 102108 - DNA, 22 bp, synthetic construct
  misc_feature 1..22: note = chemically synthesized
  source 1..22: mol_type = other DNA
tagcaaaacagctacgctggca

SEQ ID NO: 102109 - DNA, 22 bp, synthetic construct
  misc_feature 1..22: note = chemically synthesized
  source 1..22: mol_type = other DNA
gcaaaacagctacgctggcatt

SEQ ID NO: 102110 - DNA, 22 bp, synthetic construct
  misc_feature 1..22: note = chemically synthesized
  source 1..22: mol_type = other DNA
cgctggcatttaattgtggcaa

SEQ ID NO: 102111 - DNA, 22 bp, synthetic construct
  misc_feature 1..22: note = chemically synthesized
  source 1..22: mol_type = other DNA
gcatttaattgtggcaaatttg

SEQ ID NO: 102112 - DNA, 22 bp, synthetic construct
  misc_feature 1..22: note = chemically synthesized
  source 1..22: mol_type = other DNA
aattgtggcaaatttggtagta

SEQ ID NO: 102113 - DNA, 22 bp, synthetic construct
  misc_feature 1..22: note = chemically synthesized
  source 1..22: mol_type = other DNA
attgtggcaaatttggtagtac

SEQ ID NO: 102114 - DNA, 22 bp, synthetic construct
  misc_feature 1..22: note = chemically synthesized
  source 1..22: mol_type = other DNA
tggcaaatttggtagtaccaga

SEQ ID NO: 102115 - DNA, 22 bp, synthetic construct
  misc_feature 1..22: note = chemically synthesized
  source 1..22: mol_type = other DNA
ggtagtaccagaaactgtccac

SEQ ID NO: 102116 - DNA, 22 bp, synthetic construct
  misc_feature 1..22: note = chemically synthesized
  source 1..22: mol_type = other DNA
gtagtaccagaaactgtccaca

SEQ ID NO: 102117 - DNA, 22 bp, synthetic construct
  misc_feature 1..22: note = chemically synthesized
  source 1..22: mol_type = other DNA
tccacatacccaaatattccag

SEQ ID NO: 102118 - DNA, 22 bp, synthetic construct
  misc_feature 1..22: note = chemically synthesized
  source 1..22: mol_type = other DNA
cagggagaatagttgccctaat

SEQ ID NO: 102119 - DNA, 22 bp, synthetic construct
  misc_feature 1..22: note = chemically synthesized
  source 1..22: mol_type = other DNA
ccctaatagtttagggagtctc

SEQ ID NO: 102120 - DNA, 22 bp, synthetic construct
  misc_feature 1..22: note = chemically synthesized
  source 1..22: mol_type = other DNA
atagtttagggagtctcctaga

SEQ ID NO: 102121 - DNA, 22 bp, synthetic construct
  misc_feature 1..22: note = chemically synthesized
  source 1..22: mol_type = other DNA
agggagtctcctagaatgtgat

SEQ ID NO: 102122 - DNA, 22 bp, synthetic construct
  misc_feature 1..22: note = chemically synthesized
  source 1..22: mol_type = other DNA
gggagtctcctagaatgtgata

SEQ ID NO: 102123 - DNA, 22 bp, synthetic construct
  misc_feature 1..22: note = chemically synthesized
  source 1..22: mol_type = other DNA
ctagaatgtgatacatgacaaa

SEQ ID NO: 102124 - DNA, 22 bp, synthetic construct
  misc_feature 1..22: note = chemically synthesized
  source 1..22: mol_type = other DNA
gaatgtgatacatgacaaaagt

SEQ ID NO: 102125 - DNA, 22 bp, synthetic construct
  misc_feature 1..22: note = chemically synthesized
  source 1..22: mol_type = other DNA
tagtggaatttatcactctcag

SEQ ID NO: 102126 - DNA, 22 bp, synthetic construct
  misc_feature 1..22: note = chemically synthesized
  source 1..22: mol_type = other DNA
agtggaatttatcactctcagg

SEQ ID NO: 102127 - DNA, 22 bp, synthetic construct
  misc_feature 1..22: note = chemically synthesized
  source 1..22: mol_type = other DNA
gtggaatttatcactctcaggc

SEQ ID NO: 102128 - DNA, 22 bp, synthetic construct
  misc_feature 1..22: note = chemically synthesized
  source 1..22: mol_type = other DNA
atcactctcaggcaagcataga

SEQ ID NO: 102129 - DNA, 22 bp, synthetic construct
  misc_feature 1..22: note = chemically synthesized
  source 1..22: mol_type = other DNA
tcactctcaggcaagcatagag

SEQ ID NO: 102130 - DNA, 22 bp, synthetic construct
  misc_feature 1..22: note = chemically synthesized
  source 1..22: mol_type = other DNA
tcaggcaagcatagaggccccc

SEQ ID NO: 102131 - DNA, 22 bp, synthetic construct
  misc_feature 1..22: note = chemically synthesized
  source 1..22: mol_type = other DNA
aggcaagcatagaggccccctg

SEQ ID NO: 102132 - DNA, 22 bp, synthetic construct
  misc_feature 1..22: note = chemically synthesized
  source 1..22: mol_type = other DNA
agggatgcaaaaatgactggct

SEQ ID NO: 102133 - DNA, 22 bp, synthetic construct
  misc_feature 1..22: note = chemically synthesized
  source 1..22: mol_type = other DNA
gctcactgttctcttgcccctt

SEQ ID NO: 102134 - DNA, 22 bp, synthetic construct
  misc_feature 1..22: note = chemically synthesized
  source 1..22: mol_type = other DNA
actgttctcttgcccctttctg

SEQ ID NO: 102135 - DNA, 22 bp, synthetic construct
  misc_feature 1..22: note = chemically synthesized
  source 1..22: mol_type = other DNA
ttctcttgcccctttctgagtg

SEQ ID NO: 102136 - DNA, 22 bp, synthetic construct
  misc_feature 1..22: note = chemically synthesized
  source 1..22: mol_type = other DNA
tcttgcccctttctgagtgcct

SEQ ID NO: 102137 - DNA, 22 bp, synthetic construct
  misc_feature 1..22: note = chemically synthesized
  source 1..22: mol_type = other DNA
ttgcccctttctgagtgccttt

SEQ ID NO: 102138 - DNA, 22 bp, synthetic construct
  misc_feature 1..22: note = chemically synthesized
  source 1..22: mol_type = other DNA
gcccctttctgagtgcctttgg

SEQ ID NO: 102139 - DNA, 22 bp, synthetic construct
  misc_feature 1..22: note = chemically synthesized
  source 1..22: mol_type = other DNA
cccctttctgagtgcctttgga

SEQ ID NO: 102140 - DNA, 22 bp, synthetic construct
  misc_feature 1..22: note = chemically synthesized
  source 1..22: mol_type = other DNA
tctgagtgcctttggactgatt

SEQ ID NO: 102141 - DNA, 22 bp, synthetic construct
  misc_feature 1..22: note = chemically synthesized
  source 1..22: mol_type = other DNA
ctgagtgcctttggactgattc

SEQ ID NO: 102142 - DNA, 22 bp, synthetic construct
  misc_feature 1..22: note = chemically synthesized
  source 1..22: mol_type = other DNA
tgagtgcctttggactgattct

SEQ ID NO: 102143 - DNA, 22 bp, synthetic construct
  misc_feature 1..22: note = chemically synthesized
  source 1..22: mol_type = other DNA
agtgcctttggactgattcttt

SEQ ID NO: 102144 - DNA, 22 bp, synthetic construct
  misc_feature 1..22: note = chemically synthesized
  source 1..22: mol_type = other DNA
tggactgattctttgacagcaa

SEQ ID NO: 102145 - DNA, 22 bp, synthetic construct
  misc_feature 1..22: note = chemically synthesized
  source 1..22: mol_type = other DNA
ggactgattctttgacagcaac

SEQ ID NO: 102146 - DNA, 22 bp, synthetic construct
  misc_feature 1..22: note = chemically synthesized
  source 1..22: mol_type = other DNA
gactgattctttgacagcaact

SEQ ID NO: 102147 - DNA, 22 bp, synthetic construct
  misc_feature 1..22: note = chemically synthesized
  source 1..22: mol_type = other DNA
attctttgacagcaactatccc

SEQ ID NO: 102148 - DNA, 22 bp, synthetic construct
  misc_feature 1..22: note = chemically synthesized
  source 1..22: mol_type = other DNA
tttgacagcaactatcccagag

SEQ ID NO: 102149 - DNA, 22 bp, synthetic construct
  misc_feature 1..22: note = chemically synthesized
  source 1..22: mol_type = other DNA
tgacagcaactatcccagagtc

SEQ ID NO: 102150 - DNA, 22 bp, synthetic construct
  misc_feature 1..22: note = chemically synthesized
  source 1..22: mol_type = other DNA
gacagcaactatcccagagtcc

SEQ ID NO: 102151 - DNA, 22 bp, synthetic construct
  misc_feature 1..22: note = chemically synthesized
  source 1..22: mol_type = other DNA
acagcaactatcccagagtcct

SEQ ID NO: 102152 - DNA, 22 bp, synthetic construct
  misc_feature 1..22: note = chemically synthesized
  source 1..22: mol_type = other DNA
tcccagagtcctcaagagtttc

SEQ ID NO: 102153 - DNA, 22 bp, synthetic construct
  misc_feature 1..22: note = chemically synthesized
  source 1..22: mol_type = other DNA
aagagtttctgaaggtaacata

SEQ ID NO: 102154 - DNA, 22 bp, synthetic construct
  misc_feature 1..22: note = chemically synthesized
  source 1..22: mol_type = other DNA
ctgaaggtaacatagatccatc

SEQ ID NO: 102155 - DNA, 22 bp, synthetic construct
  misc_feature 1..22: note = chemically synthesized
  source 1..22: mol_type = other DNA
tgaaggtaacatagatccatca

SEQ ID NO: 102156 - DNA, 22 bp, synthetic construct
  misc_feature 1..22: note = chemically synthesized
  source 1..22: mol_type = other DNA
aaggtaacatagatccatcatc

SEQ ID NO: 102157 - DNA, 22 bp, synthetic construct
  misc_feature 1..22: note = chemically synthesized
  source 1..22: mol_type = other DNA
cttcaacttgccatgctgacaa

SEQ ID NO: 102158 - DNA, 22 bp, synthetic construct
  misc_feature 1..22: note = chemically synthesized
  source 1..22: mol_type = other DNA
ttcaacttgccatgctgacaaa

SEQ ID NO: 102159 - DNA, 22 bp, synthetic construct
  misc_feature 1..22: note = chemically synthesized
  source 1..22: mol_type = other DNA
caacttgccatgctgacaaaaa

SEQ ID NO: 102160 - DNA, 22 bp, synthetic construct
  misc_feature 1..22: note = chemically synthesized
  source 1..22: mol_type = other DNA
aacttgccatgctgacaaaaag

SEQ ID NO: 102161 - DNA, 22 bp, synthetic construct
  misc_feature 1..22: note = chemically synthesized
  source 1..22: mol_type = other DNA
gccatgctgacaaaaagcttag

SEQ ID NO: 102162 - DNA, 22 bp, synthetic construct
  misc_feature 1..22: note = chemically synthesized
  source 1..22: mol_type = other DNA
ccatgctgacaaaaagcttagg

SEQ ID NO: 102163 - DNA, 22 bp, synthetic construct
  misc_feature 1..22: note = chemically synthesized
  source 1..22: mol_type = other DNA
acaaaaagcttaggaactgttc

SEQ ID NO: 102164 - DNA, 22 bp, synthetic construct
  misc_feature 1..22: note = chemically synthesized
  source 1..22: mol_type = other DNA
aggaactgttcaggaaaccatt

SEQ ID NO: 102165 - DNA, 22 bp, synthetic construct
  misc_feature 1..22: note = chemically synthesized
  source 1..22: mol_type = other DNA
ggaactgttcaggaaaccattt

SEQ ID NO: 102166 - DNA, 22 bp, synthetic construct
  misc_feature 1..22: note = chemically synthesized
  source 1..22: mol_type = other DNA
ttcaggaaaccatttataaaga

SEQ ID NO: 102167 - DNA, 22 bp, synthetic construct
  misc_feature 1..22: note = chemically synthesized
  source 1..22: mol_type = other DNA
aggaaaccatttataaagacat

SEQ ID NO: 102168 - DNA, 22 bp, synthetic construct
  misc_feature 1..22: note = chemically synthesized
  source 1..22: mol_type = other DNA
ataaagacataaactaaaatga

SEQ ID NO: 102169 - DNA, 22 bp, synthetic construct
  misc_feature 1..22: note = chemically synthesized
  source 1..22: mol_type = other DNA
taaagacataaactaaaatgag

SEQ ID NO: 102170 - DNA, 22 bp, synthetic construct
  misc_feature 1..22: note = chemically synthesized
  source 1..22: mol_type = other DNA
aaatgagaagacaaaaagagaa

SEQ ID NO: 102171 - DNA, 22 bp, synthetic construct
  misc_feature 1..22: note = chemically synthesized
  source 1..22: mol_type = other DNA
agatcgtgttaaaaaagaacag

SEQ ID NO: 102172 - DNA, 22 bp, synthetic construct
  misc_feature 1..22: note = chemically synthesized
  source 1..22: mol_type = other DNA
aaaaagaacagtcttccgttta

SEQ ID NO: 102173 - DNA, 22 bp, synthetic construct
  misc_feature 1..22: note = chemically synthesized
  source 1..22: mol_type = other DNA
ccgtttagttccagataatctg

SEQ ID NO: 102174 - DNA, 22 bp, synthetic construct
  misc_feature 1..22: note = chemically synthesized
  source 1..22: mol_type = other DNA
cgtttagttccagataatctgc

SEQ ID NO: 102175 - DNA, 22 bp, synthetic construct
  misc_feature 1..22: note = chemically synthesized
  source 1..22: mol_type = other DNA
agttccagataatctgcaagtg

SEQ ID NO: 102176 - DNA, 22 bp, synthetic construct
  misc_feature 1..22: note = chemically synthesized
  source 1..22: mol_type = other DNA
gttccagataatctgcaagtgc

SEQ ID NO: 102177 - DNA, 22 bp, synthetic construct
  misc_feature 1..22: note = chemically synthesized
  source 1..22: mol_type = other DNA
cagataatctgcaagtgccctg

SEQ ID NO: 102178 - DNA, 22 bp, synthetic construct
  misc_feature 1..22: note = chemically synthesized
  source 1..22: mol_type = other DNA
caagtgccctgtacaatcagtg

SEQ ID NO: 102179 - DNA, 22 bp, synthetic construct
  misc_feature 1..22: note = chemically synthesized
  source 1..22: mol_type = other DNA
tacaatcagtgtcccctgaatc

SEQ ID NO: 102180 - DNA, 22 bp, synthetic construct
  misc_feature 1..22: note = chemically synthesized
  source 1..22: mol_type = other DNA
aatccactttttcatctccaca

SEQ ID NO: 102181 - DNA, 22 bp, synthetic construct
  misc_feature 1..22: note = chemically synthesized
  source 1..22: mol_type = other DNA
tttcatctccacatattgcccc

SEQ ID NO: 102182 - DNA, 22 bp, synthetic construct
  misc_feature 1..22: note = chemically synthesized
  source 1..22: mol_type = other DNA
ttcatctccacatattgcccca

SEQ ID NO: 102183 - DNA, 22 bp, synthetic construct
  misc_feature 1..22: note = chemically synthesized
  source 1..22: mol_type = other DNA
tcatctccacatattgccccaa

SEQ ID NO: 102184 - DNA, 22 bp, synthetic construct
  misc_feature 1..22: note = chemically synthesized
  source 1..22: mol_type = other DNA
catctccacatattgccccaaa

SEQ ID NO: 102185 - DNA, 22 bp, synthetic construct
  misc_feature 1..22: note = chemically synthesized
  source 1..22: mol_type = other DNA
atctccacatattgccccaaaa

SEQ ID NO: 102186 - DNA, 22 bp, synthetic construct
  misc_feature 1..22: note = chemically synthesized
  source 1..22: mol_type = other DNA
cacatattgccccaaaattgtg

SEQ ID NO: 102187 - DNA, 22 bp, synthetic construct
  misc_feature 1..22: note = chemically synthesized
  source 1..22: mol_type = other DNA
ccccaaaattgtgttcctatag

SEQ ID NO: 102188 - DNA, 22 bp, synthetic construct
  misc_feature 1..22: note = chemically synthesized
  source 1..22: mol_type = other DNA
tgttcctatagaagaaattaat

SEQ ID NO: 102189 - DNA, 22 bp, synthetic construct
  misc_feature 1..22: note = chemically synthesized
  source 1..22: mol_type = other DNA
ctatagaagaaattaataaata

SEQ ID NO: 102190 - DNA, 22 bp, synthetic construct
  misc_feature 1..22: note = chemically synthesized
  source 1..22: mol_type = other DNA
tagaagaaattaataaatatac

SEQ ID NO: 102191 - DNA, 22 bp, synthetic construct
  misc_feature 1..22: note = chemically synthesized
  source 1..22: mol_type = other DNA
ataaatataccaaaataaatat

SEQ ID NO: 102192 - DNA, 22 bp, synthetic construct
  misc_feature 1..22: note = chemically synthesized
  source 1..22: mol_type = other DNA
aaagtcaactgacaatgggaag

SEQ ID NO: 102193 - DNA, 22 bp, synthetic construct
  misc_feature 1..22: note = chemically synthesized
  source 1..22: mol_type = other DNA
aagtcaactgacaatgggaagc

SEQ ID NO: 102194 - DNA, 22 bp, synthetic construct
  misc_feature 1..22: note = chemically synthesized
  source 1..22: mol_type = other DNA
acaatgggaagccatgagatga

SEQ ID NO: 102195 - DNA, 22 bp, synthetic construct
  misc_feature 1..22: note = chemically synthesized
  source 1..22: mol_type = other DNA
aaaaatctcagcttttaagtga

SEQ ID NO: 102196 - DNA, 22 bp, synthetic construct
  misc_feature 1..22: note = chemically synthesized
  source 1..22: mol_type = other DNA
agcttttaagtgacttttttat

SEQ ID NO: 102197 - DNA, 22 bp, synthetic construct
  misc_feature 1..22: note = chemically synthesized
  source 1..22: mol_type = other DNA
ttaagtgacttttttatatctt

SEQ ID NO: 102198 - DNA, 22 bp, synthetic construct
  misc_feature 1..22: note = chemically synthesized
  source 1..22: mol_type = other DNA
taagtgacttttttatatctta

SEQ ID NO: 102199 - DNA, 22 bp, synthetic construct
  misc_feature 1..22: note = chemically synthesized
  source 1..22: mol_type = other DNA
aagtgacttttttatatcttac

SEQ ID NO: 102200 - DNA, 22 bp, synthetic construct
  misc_feature 1..22: note = chemically synthesized
  source 1..22: mol_type = other DNA
agtgacttttttatatcttacc

SEQ ID NO: 102201 - DNA, 22 bp, synthetic construct
  misc_feature 1..22: note = chemically synthesized
  source 1..22: mol_type = other DNA
ttttatatcttaccttaagtac

SEQ ID NO: 102202 - DNA, 22 bp, synthetic construct
  misc_feature 1..22: note = chemically synthesized
  source 1..22: mol_type = other DNA
tttatatcttaccttaagtaca

SEQ ID NO: 102203 - DNA, 22 bp, synthetic construct
  misc_feature 1..22: note = chemically synthesized
  source 1..22: mol_type = other DNA
ttatatcttaccttaagtacaa

SEQ ID NO: 102204 - DNA, 22 bp, synthetic construct
  misc_feature 1..22: note = chemically synthesized
  source 1..22: mol_type = other DNA
tatatcttaccttaagtacaaa

SEQ ID NO: 102205 - DNA, 22 bp, synthetic construct
  misc_feature 1..22: note = chemically synthesized
  source 1..22: mol_type = other DNA
atatcttaccttaagtacaaat

SEQ ID NO: 102206 - DNA, 22 bp, synthetic construct
  misc_feature 1..22: note = chemically synthesized
  source 1..22: mol_type = other DNA
tatcttaccttaagtacaaatt

SEQ ID NO: 102207 - DNA, 22 bp, synthetic construct
  misc_feature 1..22: note = chemically synthesized
  source 1..22: mol_type = other DNA
accttaagtacaaattaaaatg

SEQ ID NO: 102208 - DNA, 22 bp, synthetic construct
  misc_feature 1..22: note = chemically synthesized
  source 1..22: mol_type = other DNA
ccttaagtacaaattaaaatgg

SEQ ID NO: 102209 - DNA, 22 bp, synthetic construct
  misc_feature 1..22: note = chemically synthesized
  source 1..22: mol_type = other DNA
aagtacaaattaaaatggaaga

SEQ ID NO: 102210 - DNA, 22 bp, synthetic construct
  misc_feature 1..22: note = chemically synthesized
  source 1..22: mol_type = other DNA
agtacaaattaaaatggaagag

SEQ ID NO: 102211 - DNA, 22 bp, synthetic construct
  misc_feature 1..22: note = chemically synthesized
  source 1..22: mol_type = other DNA
aaatggaagaggtggccaggca

SEQ ID NO: 102212 - DNA, 22 bp, synthetic construct
  misc_feature 1..22: note = chemically synthesized
  source 1..22: mol_type = other DNA
atgcctgtaatcctagcacttt

SEQ ID NO: 102213 - DNA, 22 bp, synthetic construct
  misc_feature 1..22: note = chemically synthesized
  source 1..22: mol_type = other DNA
taatcctagcactttggaaggc

SEQ ID NO: 102214 - DNA, 22 bp, synthetic construct
  misc_feature 1..22: note = chemically synthesized
  source 1..22: mol_type = other DNA
gcactttggaaggctgaggtgg

SEQ ID NO: 102215 - DNA, 22 bp, synthetic construct
  misc_feature 1..22: note = chemically synthesized
  source 1..22: mol_type = other DNA
tggaaggctgaggtggatcacg

SEQ ID NO: 102216 - DNA, 22 bp, synthetic construct
  misc_feature 1..22: note = chemically synthesized
  source 1..22: mol_type = other DNA
ggaaggctgaggtggatcacga

SEQ ID NO: 102217 - DNA, 22 bp, synthetic construct
  misc_feature 1..22: note = chemically synthesized
  source 1..22: mol_type = other DNA
gaaggctgaggtggatcacgag

SEQ ID NO: 102218 - DNA, 22 bp, synthetic construct
  misc_feature 1..22: note = chemically synthesized
  source 1..22: mol_type = other DNA
aggtggatcacgaggtcagcag

SEQ ID NO: 102219 - DNA, 22 bp, synthetic construct
  misc_feature 1..22: note = chemically synthesized
  source 1..22: mol_type = other DNA
gagactagcctggccaacatgg

SEQ ID NO: 102220 - DNA, 22 bp, synthetic construct
  misc_feature 1..22: note = chemically synthesized
  source 1..22: mol_type = other DNA
agactagcctggccaacatggt

SEQ ID NO: 102221 - DNA, 22 bp, synthetic construct
  misc_feature 1..22: note = chemically synthesized
  source 1..22: mol_type = other DNA
gcctggccaacatggtgaaacc

SEQ ID NO: 102222 - DNA, 22 bp, synthetic construct
  misc_feature 1..22: note = chemically synthesized
  source 1..22: mol_type = other DNA
gccaacatggtgaaaccctgtc

SEQ ID NO: 102223 - DNA, 22 bp, synthetic construct
  misc_feature 1..22: note = chemically synthesized
  source 1..22: mol_type = other DNA
tctctactaaaaatacaaaaat

SEQ ID NO: 102224 - DNA, 22 bp, synthetic construct
  misc_feature 1..22: note = chemically synthesized
  source 1..22: mol_type = other DNA
tactaaaaatacaaaaattagc

SEQ ID NO: 102225 - DNA, 22 bp, synthetic construct
  misc_feature 1..22: note = chemically synthesized
  source 1..22: mol_type = other DNA
ctaaaaatacaaaaattagctg

SEQ ID NO: 102226 - DNA, 22 bp, synthetic construct
  misc_feature 1..22: note = chemically synthesized
  source 1..22: mol_type = other DNA
aaaatacaaaaattagctgggt

SEQ ID NO: 102227 - DNA, 22 bp, synthetic construct
  misc_feature 1..22: note = chemically synthesized
  source 1..22: mol_type = other DNA
gctgggtgtggtggtgagcgcc

SEQ ID NO: 102228 - DNA, 22 bp, synthetic construct
  misc_feature 1..22: note = chemically synthesized
  source 1..22: mol_type = other DNA
ggtgtggtggtgagcgcctgta

SEQ ID NO: 102229 - DNA, 22 bp, synthetic construct
  misc_feature 1..22: note = chemically synthesized
  source 1..22: mol_type = other DNA
taatcccagctactcgggaggc

SEQ ID NO: 102230 - DNA, 22 bp, synthetic construct
  misc_feature 1..22: note = chemically synthesized
  source 1..22: mol_type = other DNA
ctcgggaggctgaggcaggaga

SEQ ID NO: 102231 - DNA, 22 bp, synthetic construct
  misc_feature 1..22: note = chemically synthesized
  source 1..22: mol_type = other DNA
gggaggctgaggcaggagaatt

SEQ ID NO: 102232 - DNA, 22 bp, synthetic construct
  misc_feature 1..22: note = chemically synthesized
  source 1..22: mol_type = other DNA
aggcaggagaattgctttaaaa

SEQ ID NO: 102233 - DNA, 22 bp, synthetic construct
  misc_feature 1..22: note = chemically synthesized
  source 1..22: mol_type = other DNA
ctttaaaaaaactggggagcag

SEQ ID NO: 102234 - DNA, 22 bp, synthetic construct
  misc_feature 1..22: note = chemically synthesized
  source 1..22: mol_type = other DNA
taaaaaaactggggagcagagg

SEQ ID NO: 102235 - DNA, 22 bp, synthetic construct
  misc_feature 1..22: note = chemically synthesized
  source 1..22: mol_type = other DNA
aaaaaaactggggagcagaggt

SEQ ID NO: 102236 - DNA, 22 bp, synthetic construct
  misc_feature 1..22: note = chemically synthesized
  source 1..22: mol_type = other DNA
aaaaaactggggagcagaggtc

SEQ ID NO: 102237 - DNA, 22 bp, synthetic construct
  misc_feature 1..22: note = chemically synthesized
  source 1..22: mol_type = other DNA
gggagcagaggtcgtcgcagtg

SEQ ID NO: 102238 - DNA, 22 bp, synthetic construct
  misc_feature 1..22: note = chemically synthesized
  source 1..22: mol_type = other DNA
tgccactgcactacagcctggg

SEQ ID NO: 102239 - DNA, 22 bp, synthetic construct
  misc_feature 1..22: note = chemically synthesized
  source 1..22: mol_type = other DNA
cactacagcctgggcgacaaag

SEQ ID NO: 102240 - DNA, 22 bp, synthetic construct
  misc_feature 1..22: note = chemically synthesized
  source 1..22: mol_type = other DNA
cagcctgggcgacaaagcaagg

SEQ ID NO: 102241 - DNA, 22 bp, synthetic construct
  misc_feature 1..22: note = chemically synthesized
  source 1..22: mol_type = other DNA
ggcgacaaagcaaggctctgtc

SEQ ID NO: 102242 - DNA, 22 bp, synthetic construct
  misc_feature 1..22: note = chemically synthesized
  source 1..22: mol_type = other DNA
tgtctcaaaaaaaaaaaaaaaa

SEQ ID NO: 102243 - DNA, 22 bp, synthetic construct
  misc_feature 1..22: note = chemically synthesized
  source 1..22: mol_type = other DNA
tctcaaaaaaaaaaaaaaaaaa

SEQ ID NO: 102244 - DNA, 22 bp, synthetic construct
  misc_feature 1..22: note = chemically synthesized
  source 1..22: mol_type = other DNA
aaaaaaaaaaaaaaaaaaggtt

SEQ ID NO: 102245 - DNA, 22 bp, synthetic construct
  misc_feature 1..22: note = chemically synthesized
  source 1..22: mol_type = other DNA
ggagagaaacattgggaaacta

SEQ ID NO: 102246 - DNA, 22 bp, synthetic construct
  misc_feature 1..22: note = chemically synthesized
  source 1..22: mol_type = other DNA
gagagaaacattgggaaactag

SEQ ID NO: 102247 - DNA, 22 bp, synthetic construct
  misc_feature 1..22: note = chemically synthesized
  source 1..22: mol_type = other DNA
ggaaactaggacaaattttgct

SEQ ID NO: 102248 - DNA, 22 bp, synthetic construct
  misc_feature 1..22: note = chemically synthesized
  source 1..22: mol_type = other DNA
ggacaaattttgctctcagtaa

SEQ ID NO: 102249 - DNA, 22 bp, synthetic construct
  misc_feature 1..22: note = chemically synthesized
  source 1..22: mol_type = other DNA
tgctctcagtaaaaagaaagat

SEQ ID NO: 102250 - DNA, 22 bp, synthetic construct
  misc_feature 1..22: note = chemically synthesized
  source 1..22: mol_type = other DNA
gctctcagtaaaaagaaagatc

SEQ ID NO: 102251 - DNA, 22 bp, synthetic construct
  misc_feature 1..22: note = chemically synthesized
  source 1..22: mol_type = other DNA
ctctcagtaaaaagaaagatct

SEQ ID NO: 102252 - DNA, 22 bp, synthetic construct
  misc_feature 1..22: note = chemically synthesized
  source 1..22: mol_type = other DNA
tcagtaaaaagaaagatctcaa

SEQ ID NO: 102253 - DNA, 22 bp, synthetic construct
  misc_feature 1..22: note = chemically synthesized
  source 1..22: mol_type = other DNA
agtaaaaagaaagatctcaaag

SEQ ID NO: 102254 - DNA, 22 bp, synthetic construct
  misc_feature 1..22: note = chemically synthesized
  source 1..22: mol_type = other DNA
aaaggagatagacaaagaagca

SEQ ID NO: 102255 - DNA, 22 bp, synthetic construct
  misc_feature 1..22: note = chemically synthesized
  source 1..22: mol_type = other DNA
atctgtatttacaaaaaaacaa

SEQ ID NO: 102256 - DNA, 22 bp, synthetic construct
  misc_feature 1..22: note = chemically synthesized
  source 1..22: mol_type = other DNA
tatttacaaaaaaacaatgaaa

SEQ ID NO: 102257 - DNA, 22 bp, synthetic construct
  misc_feature 1..22: note = chemically synthesized
  source 1..22: mol_type = other DNA
acaaaaaaacaatgaaaaggga

SEQ ID NO: 102258 - DNA, 22 bp, synthetic construct
  misc_feature 1..22: note = chemically synthesized
  source 1..22: mol_type = other DNA
caaaaaaacaatgaaaagggaa

SEQ ID NO: 102259 - DNA, 22 bp, synthetic construct
  misc_feature 1..22: note = chemically synthesized
  source 1..22: mol_type = other DNA
ataggagtggatactatggtag

SEQ ID NO: 102260 - DNA, 22 bp, synthetic construct
  misc_feature 1..22: note = chemically synthesized
  source 1..22: mol_type = other DNA
taggagtggatactatggtagg

SEQ ID NO: 102261 - DNA, 22 bp, synthetic construct
  misc_feature 1..22: note = chemically synthesized
  source 1..22: mol_type = other DNA
tggtaggttaatagtgaaaaat

SEQ ID NO: 102262 - DNA, 22 bp, synthetic construct
  misc_feature 1..22: note = chemically synthesized
  source 1..22: mol_type = other DNA
atagtgaaaaatatagaattat

SEQ ID NO: 102263 - DNA, 22 bp, synthetic construct
  misc_feature 1..22: note = chemically synthesized
  source 1..22: mol_type = other DNA
tcaattaatataaacatagagg

SEQ ID NO: 102264 - DNA, 22 bp, synthetic construct
  misc_feature 1..22: note = chemically synthesized
  source 1..22: mol_type = other DNA
atataaacatagaggtgttgat

SEQ ID NO: 102265 - DNA, 22 bp, synthetic construct
  misc_feature 1..22: note = chemically synthesized
  source 1..22: mol_type = other DNA
attgtttggggcaactaggtct

SEQ ID NO: 102266 - DNA, 22 bp, synthetic construct
  misc_feature 1..22: note = chemically synthesized
  source 1..22: mol_type = other DNA
tttggggcaactaggtctttgg

SEQ ID NO: 102267 - DNA, 22 bp, synthetic construct
  misc_feature 1..22: note = chemically synthesized
  source 1..22: mol_type = other DNA
ggggcaactaggtctttggtaa

SEQ ID NO: 102268 - DNA, 22 bp, synthetic construct
  misc_feature 1..22: note = chemically synthesized
  source 1..22: mol_type = other DNA
gggcaactaggtctttggtaat

SEQ ID NO: 102269 - DNA, 22 bp, synthetic construct
  misc_feature 1..22: note = chemically synthesized
  source 1..22: mol_type = other DNA
ggtctttggtaatattgacaat

SEQ ID NO: 102270 - DNA, 22 bp, synthetic construct
  misc_feature 1..22: note = chemically synthesized
  source 1..22: mol_type = other DNA
tggtaatattgacaatttcaac

SEQ ID NO: 102271 - DNA, 22 bp, synthetic construct
  misc_feature 1..22: note = chemically synthesized
  source 1..22: mol_type = other DNA
ggtaatattgacaatttcaaca

SEQ ID NO: 102272 - DNA, 22 bp, synthetic construct
  misc_feature 1..22: note = chemically synthesized
  source 1..22: mol_type = other DNA
gtaatattgacaatttcaacat

SEQ ID NO: 102273 - DNA, 22 bp, synthetic construct
  misc_feature 1..22: note = chemically synthesized
  source 1..22: mol_type = other DNA
acaatttcaacataatggcaga

SEQ ID NO: 102274 - DNA, 22 bp, synthetic construct
  misc_feature 1..22: note = chemically synthesized
  source 1..22: mol_type = other DNA
caacataatggcagaaatgaat

SEQ ID NO: 102275 - DNA, 22 bp, synthetic construct
  misc_feature 1..22: note = chemically synthesized
  source 1..22: mol_type = other DNA
aacataatggcagaaatgaatg

SEQ ID NO: 102276 - DNA, 22 bp, synthetic construct
  misc_feature 1..22: note = chemically synthesized
  source 1..22: mol_type = other DNA
atgactgtgagacaaaaagtga

SEQ ID NO: 102277 - DNA, 22 bp, synthetic construct
  misc_feature 1..22: note = chemically synthesized
  source 1..22: mol_type = other DNA
tgagacaaaaagtgagtaaaaa

SEQ ID NO: 102278 - DNA, 22 bp, synthetic construct
  misc_feature 1..22: note = chemically synthesized
  source 1..22: mol_type = other DNA
ggcacggtggctcatgcctata

SEQ ID NO: 102279 - DNA, 22 bp, synthetic construct
  misc_feature 1..22: note = chemically synthesized
  source 1..22: mol_type = other DNA
atgcctataatcccagcacttt

SEQ ID NO: 102280 - DNA, 22 bp, synthetic construct
  misc_feature 1..22: note = chemically synthesized
  source 1..22: mol_type = other DNA
taatcccagcactttgggaggc

SEQ ID NO: 102281 - DNA, 22 bp, synthetic construct
  misc_feature 1..22: note = chemically synthesized
  source 1..22: mol_type = other DNA
tgggaggccgaggagggtggat

SEQ ID NO: 102282 - DNA, 22 bp, synthetic construct
  misc_feature 1..22: note = chemically synthesized
  source 1..22: mol_type = other DNA
gggaggccgaggagggtggatc

SEQ ID NO: 102283 - DNA, 22 bp, synthetic construct
  misc_feature 1..22: note = chemically synthesized
  source 1..22: mol_type = other DNA
ggaggccgaggagggtggatca

SEQ ID NO: 102284 - DNA, 22 bp, synthetic construct
  misc_feature 1..22: note = chemically synthesized
  source 1..22: mol_type = other DNA
gagttcaggagttcgagaccag

SEQ ID NO: 102285 - DNA, 22 bp, synthetic construct
  misc_feature 1..22: note = chemically synthesized
  source 1..22: mol_type = other DNA
agttcaggagttcgagaccagc

SEQ ID NO: 102286 - DNA, 22 bp, synthetic construct
  misc_feature 1..22: note = chemically synthesized
  source 1..22: mol_type = other DNA
aggagttcgagaccagctgggc

SEQ ID NO: 102287 - DNA, 22 bp, synthetic construct
  misc_feature 1..22: note = chemically synthesized
  source 1..22: mol_type = other DNA
gagaccagctgggccaacatgg

SEQ ID NO: 102288 - DNA, 22 bp, synthetic construct
  misc_feature 1..22: note = chemically synthesized
  source 1..22: mol_type = other DNA
ggccaacatggcaaaacaccat

SEQ ID NO: 102289 - DNA, 22 bp, synthetic construct
  misc_feature 1..22: note = chemically synthesized
  source 1..22: mol_type = other DNA
ctataattacaaaaataagcca

SEQ ID NO: 102290 - DNA, 22 bp, synthetic construct
  misc_feature 1..22: note = chemically synthesized
  source 1..22: mol_type = other DNA
taattacaaaaataagccaggt

SEQ ID NO: 102291 - DNA, 22 bp, synthetic construct
  misc_feature 1..22: note = chemically synthesized
  source 1..22: mol_type = other DNA
caaaaataagccaggtgtggtg

SEQ ID NO: 102292 - DNA, 22 bp, synthetic construct
  misc_feature 1..22: note = chemically synthesized
  source 1..22: mol_type = other DNA
ctctggaggctgaggcatgaga

SEQ ID NO: 102293 - DNA, 22 bp, synthetic construct
  misc_feature 1..22: note = chemically synthesized
  source 1..22: mol_type = other DNA
tggaggctgaggcatgagaatc

SEQ ID NO: 102294 - DNA, 22 bp, synthetic construct
  misc_feature 1..22: note = chemically synthesized
  source 1..22: mol_type = other DNA
gaggctgaggcatgagaatccc

SEQ ID NO: 102295 - DNA, 22 bp, synthetic construct
  misc_feature 1..22: note = chemically synthesized
  source 1..22: mol_type = other DNA
aggcatgagaatcccctgaacc

SEQ ID NO: 102296 - DNA, 22 bp, synthetic construct
  misc_feature 1..22: note = chemically synthesized
  source 1..22: mol_type = other DNA
aaccctggtggaggaggtcgca

SEQ ID NO: 102297 - DNA, 22 bp, synthetic construct
  misc_feature 1..22: note = chemically synthesized
  source 1..22: mol_type = other DNA
gtggaggaggtcgcagtgagct

SEQ ID NO: 102298 - DNA, 22 bp, synthetic construct
  misc_feature 1..22: note = chemically synthesized
  source 1..22: mol_type = other DNA
agatcgcaccactgcactctag

SEQ ID NO: 102299 - DNA, 22 bp, synthetic construct
  misc_feature 1..22: note = chemically synthesized
  source 1..22: mol_type = other DNA
cactctagcctgggcaacagag

SEQ ID NO: 102300 - DNA, 22 bp, synthetic construct
  misc_feature 1..22: note = chemically synthesized
  source 1..22: mol_type = other DNA
tagcctgggcaacagagaaaaa

SEQ ID NO: 102301 - DNA, 22 bp, synthetic construct
  misc_feature 1..22: note = chemically synthesized
  source 1..22: mol_type = other DNA
gcctgggcaacagagaaaaatc

SEQ ID NO: 102302 - DNA, 22 bp, synthetic construct
  misc_feature 1..22: note = chemically synthesized
  source 1..22: mol_type = other DNA
ggcaacagagaaaaatctgtta

SEQ ID NO: 102303 - DNA, 22 bp, synthetic construct
  misc_feature 1..22: note = chemically synthesized
  source 1..22: mol_type = other DNA
ttaaagagagagagagaaaaga

SEQ ID NO: 102304 - DNA, 22 bp, synthetic construct
  misc_feature 1..22: note = chemically synthesized
  source 1..22: mol_type = other DNA
aagagagagagagaaaagaaaa

SEQ ID NO: 102305 - DNA, 22 bp, synthetic construct
  misc_feature 1..22: note = chemically synthesized
  source 1..22: mol_type = other DNA
ttttatttatattgttatggtg

SEQ ID NO: 102306 - DNA, 22 bp, synthetic construct
  misc_feature 1..22: note = chemically synthesized
  source 1..22: mol_type = other DNA
tatttatattgttatggtgagg

SEQ ID NO: 102307 - DNA, 22 bp, synthetic construct
  misc_feature 1..22: note = chemically synthesized
  source 1..22: mol_type = other DNA
atttatattgttatggtgagga

SEQ ID NO: 102308 - DNA, 22 bp, synthetic construct
  misc_feature 1..22: note = chemically synthesized
  source 1..22: mol_type = other DNA
tttatattgttatggtgaggaa

SEQ ID NO: 102309 - DNA, 22 bp, synthetic construct
  misc_feature 1..22: note = chemically synthesized
  source 1..22: mol_type = other DNA
atattgttatggtgaggaaatt

SEQ ID NO: 102310 - DNA, 22 bp, synthetic construct
  misc_feature 1..22: note = chemically synthesized
  source 1..22: mol_type = other DNA
tattgttatggtgaggaaattg

SEQ ID NO: 102311 - DNA, 22 bp, synthetic construct
  misc_feature 1..22: note = chemically synthesized
  source 1..22: mol_type = other DNA
ttatggtgaggaaattgagcct

SEQ ID NO: 102312 - DNA, 22 bp, synthetic construct
  misc_feature 1..22: note = chemically synthesized
  source 1..22: mol_type = other DNA
tggtgaggaaattgagccttag

SEQ ID NO: 102313 - DNA, 22 bp, synthetic construct
  misc_feature 1..22: note = chemically synthesized
  source 1..22: mol_type = other DNA
agccttagacaagttaagcaat

SEQ ID NO: 102314 - DNA, 22 bp, synthetic construct
  misc_feature 1..22: note = chemically synthesized
  source 1..22: mol_type = other DNA
agacaagttaagcaattagcct

SEQ ID NO: 102315 - DNA, 22 bp, synthetic construct
  misc_feature 1..22: note = chemically synthesized
  source 1..22: mol_type = other DNA
gacaagttaagcaattagccta

SEQ ID NO: 102316 - DNA, 22 bp, synthetic construct
  misc_feature 1..22: note = chemically synthesized
  source 1..22: mol_type = other DNA
agcaattagcctaagatcacgc

SEQ ID NO: 102317 - DNA, 22 bp, synthetic construct
  misc_feature 1..22: note = chemically synthesized
  source 1..22: mol_type = other DNA
gcctaagatcacgcaactaata

SEQ ID NO: 102318 - DNA, 22 bp, synthetic construct
  misc_feature 1..22: note = chemically synthesized
  source 1..22: mol_type = other DNA
agatcacgcaactaatatgtgt

SEQ ID NO: 102319 - DNA, 22 bp, synthetic construct
  misc_feature 1..22: note = chemically synthesized
  source 1..22: mol_type = other DNA
atatgtgtcataaaggaattca

SEQ ID NO: 102320 - DNA, 22 bp, synthetic construct
  misc_feature 1..22: note = chemically synthesized
  source 1..22: mol_type = other DNA
aaacacaggtttatctaaccca

SEQ ID NO: 102321 - DNA, 22 bp, synthetic construct
  misc_feature 1..22: note = chemically synthesized
  source 1..22: mol_type = other DNA
atctaacccaaaacccaagctc

SEQ ID NO: 102322 - DNA, 22 bp, synthetic construct
  misc_feature 1..22: note = chemically synthesized
  source 1..22: mol_type = other DNA
tctaacccaaaacccaagctca

SEQ ID NO: 102323 - DNA, 22 bp, synthetic construct
  misc_feature 1..22: note = chemically synthesized
  source 1..22: mol_type = other DNA
acccaaaacccaagctcatatt

SEQ ID NO: 102324 - DNA, 22 bp, synthetic construct
  misc_feature 1..22: note = chemically synthesized
  source 1..22: mol_type = other DNA
atattctcaaccaatgtccatc

SEQ ID NO: 102325 - DNA, 22 bp, synthetic construct
  misc_feature 1..22: note = chemically synthesized
  source 1..22: mol_type = other DNA
tcaaccaatgtccatcaaatgg

SEQ ID NO: 102326 - DNA, 22 bp, synthetic construct
  misc_feature 1..22: note = chemically synthesized
  source 1..22: mol_type = other DNA
aaccaatgtccatcaaatggaa

SEQ ID NO: 102327 - DNA, 22 bp, synthetic construct
  misc_feature 1..22: note = chemically synthesized
  source 1..22: mol_type = other DNA
aacttgcttcccgtatttgaat

SEQ ID NO: 102328 - DNA, 22 bp, synthetic construct
  misc_feature 1..22: note = chemically synthesized
  source 1..22: mol_type = other DNA
gcttcccgtatttgaatccttg

SEQ ID NO: 102329 - DNA, 22 bp, synthetic construct
  misc_feature 1..22: note = chemically synthesized
  source 1..22: mol_type = other DNA
cttcccgtatttgaatccttgg

SEQ ID NO: 102330 - DNA, 22 bp, synthetic construct
  misc_feature 1..22: note = chemically synthesized
  source 1..22: mol_type = other DNA
cccgtatttgaatccttggctt

SEQ ID NO: 102331 - DNA, 22 bp, synthetic construct
  misc_feature 1..22: note = chemically synthesized
  source 1..22: mol_type = other DNA
ccgtatttgaatccttggcttt

SEQ ID NO: 102332 - DNA, 22 bp, synthetic construct
  misc_feature 1..22: note = chemically synthesized
  source 1..22: mol_type = other DNA
gaatccttggcttttcttacct

SEQ ID NO: 102333 - DNA, 22 bp, synthetic construct
  misc_feature 1..22: note = chemically synthesized
  source 1..22: mol_type = other DNA
aatccttggcttttcttacctg

SEQ ID NO: 102334 - DNA, 22 bp, synthetic construct
  misc_feature 1..22: note = chemically synthesized
  source 1..22: mol_type = other DNA
ggcttttcttacctgagccaca

SEQ ID NO: 102335 - DNA, 22 bp, synthetic construct
  misc_feature 1..22: note = chemically synthesized
  source 1..22: mol_type = other DNA
gcttttcttacctgagccacag

SEQ ID NO: 102336 - DNA, 22 bp, synthetic construct
  misc_feature 1..22: note = chemically synthesized
  source 1..22: mol_type = other DNA
ttcttacctgagccacagtttt

SEQ ID NO: 102337 - DNA, 22 bp, synthetic construct
  misc_feature 1..22: note = chemically synthesized
  source 1..22: mol_type = other DNA
tcttacctgagccacagttttc

SEQ ID NO: 102338 - DNA, 22 bp, synthetic construct
  misc_feature 1..22: note = chemically synthesized
  source 1..22: mol_type = other DNA
cttacctgagccacagttttct

SEQ ID NO: 102339 - DNA, 22 bp, synthetic construct
  misc_feature 1..22: note = chemically synthesized
  source 1..22: mol_type = other DNA
ttacctgagccacagttttctc

SEQ ID NO: 102340 - DNA, 22 bp, synthetic construct
  misc_feature 1..22: note = chemically synthesized
  source 1..22: mol_type = other DNA
acctgagccacagttttctctt

SEQ ID NO: 102341 - DNA, 22 bp, synthetic construct
  misc_feature 1..22: note = chemically synthesized
  source 1..22: mol_type = other DNA
cctgagccacagttttctcttt

SEQ ID NO: 102342 - DNA, 22 bp, synthetic construct
  misc_feature 1..22: note = chemically synthesized
  source 1..22: mol_type = other DNA
agccacagttttctctttgcgg

SEQ ID NO: 102343 - DNA, 22 bp, synthetic construct
  misc_feature 1..22: note = chemically synthesized
  source 1..22: mol_type = other DNA
tctctttgcggtttctgagcat

SEQ ID NO: 102344 - DNA, 22 bp, synthetic construct
  misc_feature 1..22: note = chemically synthesized
  source 1..22: mol_type = other DNA
ctctttgcggtttctgagcatg

SEQ ID NO: 102345 - DNA, 22 bp, synthetic construct
  misc_feature 1..22: note = chemically synthesized
  source 1..22: mol_type = other DNA
tctttgcggtttctgagcatga

SEQ ID NO: 102346 - DNA, 22 bp, synthetic construct
  misc_feature 1..22: note = chemically synthesized
  source 1..22: mol_type = other DNA
tttgcggtttctgagcatgacc

SEQ ID NO: 102347 - DNA, 22 bp, synthetic construct
  misc_feature 1..22: note = chemically synthesized
  source 1..22: mol_type = other DNA
tgcggtttctgagcatgacctg

SEQ ID NO: 102348 - DNA, 22 bp, synthetic construct
  misc_feature 1..22: note = chemically synthesized
  source 1..22: mol_type = other DNA
gcggtttctgagcatgacctga

SEQ ID NO: 102349 - DNA, 22 bp, synthetic construct
  misc_feature 1..22: note = chemically synthesized
  source 1..22: mol_type = other DNA
cggtttctgagcatgacctgaa

SEQ ID NO: 102350 - DNA, 22 bp, synthetic construct
  misc_feature 1..22: note = chemically synthesized
  source 1..22: mol_type = other DNA
ctgagcatgacctgaatattgg

SEQ ID NO: 102351 - DNA, 22 bp, synthetic construct
  misc_feature 1..22: note = chemically synthesized
  source 1..22: mol_type = other DNA
tgagcatgacctgaatattggt

SEQ ID NO: 102352 - DNA, 22 bp, synthetic construct
  misc_feature 1..22: note = chemically synthesized
  source 1..22: mol_type = other DNA
agcatgacctgaatattggttg

SEQ ID NO: 102353 - DNA, 22 bp, synthetic construct
  misc_feature 1..22: note = chemically synthesized
  source 1..22: mol_type = other DNA
aatattggttgtttgctatatc

SEQ ID NO: 102354 - DNA, 22 bp, synthetic construct
  misc_feature 1..22: note = chemically synthesized
  source 1..22: mol_type = other DNA
gttgtttgctatatcctcagta

SEQ ID NO: 102355 - DNA, 22 bp, synthetic construct
  misc_feature 1..22: note = chemically synthesized
  source 1..22: mol_type = other DNA
tttgctatatcctcagtattta

SEQ ID NO: 102356 - DNA, 22 bp, synthetic construct
  misc_feature 1..22: note = chemically synthesized
  source 1..22: mol_type = other DNA
gctatatcctcagtatttactc

SEQ ID NO: 102357 - DNA, 22 bp, synthetic construct
  misc_feature 1..22: note = chemically synthesized
  source 1..22: mol_type = other DNA
ctatatcctcagtatttactct

SEQ ID NO: 102358 - DNA, 22 bp, synthetic construct
  misc_feature 1..22: note = chemically synthesized
  source 1..22: mol_type = other DNA
tatcctcagtatttactcttaa

SEQ ID NO: 102359 - DNA, 22 bp, synthetic construct
  misc_feature 1..22: note = chemically synthesized
  source 1..22: mol_type = other DNA
agtatttactcttaattctgat

SEQ ID NO: 102360 - DNA, 22 bp, synthetic construct
  misc_feature 1..22: note = chemically synthesized
  source 1..22: mol_type = other DNA
actcttaattctgatgagagat

SEQ ID NO: 102361 - DNA, 22 bp, synthetic construct
  misc_feature 1..22: note = chemically synthesized
  source 1..22: mol_type = other DNA
ctcttaattctgatgagagata

SEQ ID NO: 102362 - DNA, 22 bp, synthetic construct
  misc_feature 1..22: note = chemically synthesized
  source 1..22: mol_type = other DNA
ttaattctgatgagagatatat

SEQ ID NO: 102363 - DNA, 22 bp, synthetic construct
  misc_feature 1..22: note = chemically synthesized
  source 1..22: mol_type = other DNA
aattctgatgagagatatattt

SEQ ID NO: 102364 - DNA, 22 bp, synthetic construct
  misc_feature 1..22: note = chemically synthesized
  source 1..22: mol_type = other DNA
attctgatgagagatatatttg

SEQ ID NO: 102365 - DNA, 22 bp, synthetic construct
  misc_feature 1..22: note = chemically synthesized
  source 1..22: mol_type = other DNA
tgatgagagatatatttgttac

SEQ ID NO: 102366 - DNA, 22 bp, synthetic construct
  misc_feature 1..22: note = chemically synthesized
  source 1..22: mol_type = other DNA
atgagagatatatttgttacac

SEQ ID NO: 102367 - DNA, 22 bp, synthetic construct
  misc_feature 1..22: note = chemically synthesized
  source 1..22: mol_type = other DNA
gttacacaaacaactctcaagg

SEQ ID NO: 102368 - DNA, 22 bp, synthetic construct
  misc_feature 1..22: note = chemically synthesized
  source 1..22: mol_type = other DNA
ttacacaaacaactctcaaggg

SEQ ID NO: 102369 - DNA, 22 bp, synthetic construct
  misc_feature 1..22: note = chemically synthesized
  source 1..22: mol_type = other DNA
cacaaacaactctcaaggggtt

SEQ ID NO: 102370 - DNA, 22 bp, synthetic construct
  misc_feature 1..22: note = chemically synthesized
  source 1..22: mol_type = other DNA
tcaaggggttattctagctcat

SEQ ID NO: 102371 - DNA, 22 bp, synthetic construct
  misc_feature 1..22: note = chemically synthesized
  source 1..22: mol_type = other DNA
aaggggttattctagctcattt

SEQ ID NO: 102372 - DNA, 22 bp, synthetic construct
  misc_feature 1..22: note = chemically synthesized
  source 1..22: mol_type = other DNA
ttctagctcatttccacatagg

SEQ ID NO: 102373 - DNA, 22 bp, synthetic construct
  misc_feature 1..22: note = chemically synthesized
  source 1..22: mol_type = other DNA
tagctcatttccacataggata

SEQ ID NO: 102374 - DNA, 22 bp, synthetic construct
  misc_feature 1..22: note = chemically synthesized
  source 1..22: mol_type = other DNA
gctcatttccacataggatatt

SEQ ID NO: 102375 - DNA, 22 bp, synthetic construct
  misc_feature 1..22: note = chemically synthesized
  source 1..22: mol_type = other DNA
atttccacataggatatttggg

SEQ ID NO: 102376 - DNA, 22 bp, synthetic construct
  misc_feature 1..22: note = chemically synthesized
  source 1..22: mol_type = other DNA
ccacataggatatttgggaata

SEQ ID NO: 102377 - DNA, 22 bp, synthetic construct
  misc_feature 1..22: note = chemically synthesized
  source 1..22: mol_type = other DNA
cacataggatatttgggaatag

SEQ ID NO: 102378 - DNA, 22 bp, synthetic construct
  misc_feature 1..22: note = chemically synthesized
  source 1..22: mol_type = other DNA
gggaatagtgtaccaaataatt

SEQ ID NO: 102379 - DNA, 22 bp, synthetic construct
  misc_feature 1..22: note = chemically synthesized
  source 1..22: mol_type = other DNA
ggaatagtgtaccaaataattc

SEQ ID NO: 102380 - DNA, 22 bp, synthetic construct
  misc_feature 1..22: note = chemically synthesized
  source 1..22: mol_type = other DNA
tcttttcctccccaacctggga

SEQ ID NO: 102381 - DNA, 22 bp, synthetic construct
  misc_feature 1..22: note = chemically synthesized
  source 1..22: mol_type = other DNA
ttttcctccccaacctgggaaa

SEQ ID NO: 102382 - DNA, 22 bp, synthetic construct
  misc_feature 1..22: note = chemically synthesized
  source 1..22: mol_type = other DNA
ttcctccccaacctgggaaaga

SEQ ID NO: 102383 - DNA, 22 bp, synthetic construct
  misc_feature 1..22: note = chemically synthesized
  source 1..22: mol_type = other DNA
tcctccccaacctgggaaagat

SEQ ID NO: 102384 - DNA, 22 bp, synthetic construct
  misc_feature 1..22: note = chemically synthesized
  source 1..22: mol_type = other DNA
cctccccaacctgggaaagatc

SEQ ID NO: 102385 - DNA, 22 bp, synthetic construct
  misc_feature 1..22: note = chemically synthesized
  source 1..22: mol_type = other DNA
ctccccaacctgggaaagatct

SEQ ID NO: 102386 - DNA, 22 bp, synthetic construct
  misc_feature 1..22: note = chemically synthesized
  source 1..22: mol_type = other DNA
cccaacctgggaaagatctggg

SEQ ID NO: 102387 - DNA, 22 bp, synthetic construct
  misc_feature 1..22: note = chemically synthesized
  source 1..22: mol_type = other DNA
ggaaagatctgggccattgaaa

SEQ ID NO: 102388 - DNA, 22 bp, synthetic construct
  misc_feature 1..22: note = chemically synthesized
  source 1..22: mol_type = other DNA
ggccattgaaactggtccccat

SEQ ID NO: 102389 - DNA, 22 bp, synthetic construct
  misc_feature 1..22: note = chemically synthesized
  source 1..22: mol_type = other DNA
aaactggtccccatggccttta

SEQ ID NO: 102390 - DNA, 22 bp, synthetic construct
  misc_feature 1..22: note = chemically synthesized
  source 1..22: mol_type = other DNA
gtccccatggcctttatttttt

SEQ ID NO: 102391 - DNA, 22 bp, synthetic construct
  misc_feature 1..22: note = chemically synthesized
  source 1..22: mol_type = other DNA
tattttttctttggaaggagag

SEQ ID NO: 102392 - DNA, 22 bp, synthetic construct
  misc_feature 1..22: note = chemically synthesized
  source 1..22: mol_type = other DNA
attttttctttggaaggagagt

SEQ ID NO: 102393 - DNA, 22 bp, synthetic construct
  misc_feature 1..22: note = chemically synthesized
  source 1..22: mol_type = other DNA
ttttttctttggaaggagagtc

SEQ ID NO: 102394 - DNA, 22 bp, synthetic construct
  misc_feature 1..22: note = chemically synthesized
  source 1..22: mol_type = other DNA
tttctttggaaggagagtctct

SEQ ID NO: 102395 - DNA, 22 bp, synthetic construct
  misc_feature 1..22: note = chemically synthesized
  source 1..22: mol_type = other DNA
ttctttggaaggagagtctcta

SEQ ID NO: 102396 - DNA, 22 bp, synthetic construct
  misc_feature 1..22: note = chemically synthesized
  source 1..22: mol_type = other DNA
tctttggaaggagagtctctaa

SEQ ID NO: 102397 - DNA, 22 bp, synthetic construct
  misc_feature 1..22: note = chemically synthesized
  source 1..22: mol_type = other DNA
ctttggaaggagagtctctaag

SEQ ID NO: 102398 - DNA, 22 bp, synthetic construct
  misc_feature 1..22: note = chemically synthesized
  source 1..22: mol_type = other DNA
tttggaaggagagtctctaaga

SEQ ID NO: 102399 - DNA, 22 bp, synthetic construct
  misc_feature 1..22: note = chemically synthesized
  source 1..22: mol_type = other DNA
tggaaggagagtctctaagaga

SEQ ID NO: 102400 - DNA, 22 bp, synthetic construct
  misc_feature 1..22: note = chemically synthesized
  source 1..22: mol_type = other DNA
ggaaggagagtctctaagagaa

SEQ ID NO: 102401 - DNA, 22 bp, synthetic construct
  misc_feature 1..22: note = chemically synthesized
  source 1..22: mol_type = other DNA
gaaggagagtctctaagagaag

SEQ ID NO: 102402 - DNA, 22 bp, synthetic construct
  misc_feature 1..22: note = chemically synthesized
  source 1..22: mol_type = other DNA
taagagaagttgtgtctctaac

SEQ ID NO: 102403 - DNA, 22 bp, synthetic construct
  misc_feature 1..22: note = chemically synthesized
  source 1..22: mol_type = other DNA
agagaagttgtgtctctaacat

SEQ ID NO: 102404 - DNA, 22 bp, synthetic construct
  misc_feature 1..22: note = chemically synthesized
  source 1..22: mol_type = other DNA
tgtctctaacatcagatgaggc

SEQ ID NO: 102405 - DNA, 22 bp, synthetic construct
  misc_feature 1..22: note = chemically synthesized
  source 1..22: mol_type = other DNA
taacatcagatgaggcatgacc

SEQ ID NO: 102406 - DNA, 22 bp, synthetic construct
  misc_feature 1..22: note = chemically synthesized
  source 1..22: mol_type = other DNA
acatcagatgaggcatgaccga

SEQ ID NO: 102407 - DNA, 22 bp, synthetic construct
  misc_feature 1..22: note = chemically synthesized
  source 1..22: mol_type = other DNA
tcaagtgttccattggtcttag

SEQ ID NO: 102408 - DNA, 22 bp, synthetic construct
  misc_feature 1..22: note = chemically synthesized
  source 1..22: mol_type = other DNA
aagtgttccattggtcttagag

SEQ ID NO: 102409 - DNA, 22 bp, synthetic construct
  misc_feature 1..22: note = chemically synthesized
  source 1..22: mol_type = other DNA
cattggtcttagagtgggaaga

SEQ ID NO: 102410 - DNA, 22 bp, synthetic construct
  misc_feature 1..22: note = chemically synthesized
  source 1..22: mol_type = other DNA
gtcttagagtgggaagaccagt

SEQ ID NO: 102411 - DNA, 22 bp, synthetic construct
  misc_feature 1..22: note = chemically synthesized
  source 1..22: mol_type = other DNA
agagtgggaagaccagtcactt

SEQ ID NO: 102412 - DNA, 22 bp, synthetic construct
  misc_feature 1..22: note = chemically synthesized
  source 1..22: mol_type = other DNA
gagtgggaagaccagtcacttt

SEQ ID NO: 102413 - DNA, 22 bp, synthetic construct
  misc_feature 1..22: note = chemically synthesized
  source 1..22: mol_type = other DNA
tgtctttgtaaatgttaacatt

SEQ ID NO: 102414 - DNA, 22 bp, synthetic construct
  misc_feature 1..22: note = chemically synthesized
  source 1..22: mol_type = other DNA
gtctttgtaaatgttaacattt

SEQ ID NO: 102415 - DNA, 22 bp, synthetic construct
  misc_feature 1..22: note = chemically synthesized
  source 1..22: mol_type = other DNA
tctttgtaaatgttaacatttg

SEQ ID NO: 102416 - DNA, 22 bp, synthetic construct
  misc_feature 1..22: note = chemically synthesized
  source 1..22: mol_type = other DNA
tgtaaatgttaacatttgaaga

SEQ ID NO: 102417 - DNA, 22 bp, synthetic construct
  misc_feature 1..22: note = chemically synthesized
  source 1..22: mol_type = other DNA
gtaaatgttaacatttgaagaa

SEQ ID NO: 102418 - DNA, 22 bp, synthetic construct
  misc_feature 1..22: note = chemically synthesized
  source 1..22: mol_type = other DNA
taaatgttaacatttgaagaac

SEQ ID NO: 102419 - DNA, 22 bp, synthetic construct
  misc_feature 1..22: note = chemically synthesized
  source 1..22: mol_type = other DNA
acatttgaagaacattgcccct

SEQ ID NO: 102420 - DNA, 22 bp, synthetic construct
  misc_feature 1..22: note = chemically synthesized
  source 1..22: mol_type = other DNA
gaagaacattgccccttttcaa

SEQ ID NO: 102421 - DNA, 22 bp, synthetic construct
  misc_feature 1..22: note = chemically synthesized
  source 1..22: mol_type = other DNA
aagaacattgccccttttcaaa

SEQ ID NO: 102422 - DNA, 22 bp, synthetic construct
  misc_feature 1..22: note = chemically synthesized
  source 1..22: mol_type = other DNA
ccccttttcaaactgtattata

SEQ ID NO: 102423 - DNA, 22 bp, synthetic construct
  misc_feature 1..22: note = chemically synthesized
  source 1..22: mol_type = other DNA
ttcaaactgtattatattctct

SEQ ID NO: 102424 - DNA, 22 bp, synthetic construct
  misc_feature 1..22: note = chemically synthesized
  source 1..22: mol_type = other DNA
tcaaactgtattatattctcta

SEQ ID NO: 102425 - DNA, 22 bp, synthetic construct
  misc_feature 1..22: note = chemically synthesized
  source 1..22: mol_type = other DNA
caaactgtattatattctctaa

SEQ ID NO: 102426 - DNA, 22 bp, synthetic construct
  misc_feature 1..22: note = chemically synthesized
  source 1..22: mol_type = other DNA
aaactgtattatattctctaat

SEQ ID NO: 102427 - DNA, 22 bp, synthetic construct
  misc_feature 1..22: note = chemically synthesized
  source 1..22: mol_type = other DNA
tattatattctctaattcaacc

SEQ ID NO: 102428 - DNA, 22 bp, synthetic construct
  misc_feature 1..22: note = chemically synthesized
  source 1..22: mol_type = other DNA
tattctctaattcaacccttta

SEQ ID NO: 102429 - DNA, 22 bp, synthetic construct
  misc_feature 1..22: note = chemically synthesized
  source 1..22: mol_type = other DNA
tctaattcaaccctttacaaaa

SEQ ID NO: 102430 - DNA, 22 bp, synthetic construct
  misc_feature 1..22: note = chemically synthesized
  source 1..22: mol_type = other DNA
taattcaaccctttacaaaatc

SEQ ID NO: 102431 - DNA, 22 bp, synthetic construct
  misc_feature 1..22: note = chemically synthesized
  source 1..22: mol_type = other DNA
attcaaccctttacaaaatcct

SEQ ID NO: 102432 - DNA, 22 bp, synthetic construct
  misc_feature 1..22: note = chemically synthesized
  source 1..22: mol_type = other DNA
aaccctttacaaaatccttgag

SEQ ID NO: 102433 - DNA, 22 bp, synthetic construct
  misc_feature 1..22: note = chemically synthesized
  source 1..22: mol_type = other DNA
tacaaaatccttgagccaccac

SEQ ID NO: 102434 - DNA, 22 bp, synthetic construct
  misc_feature 1..22: note = chemically synthesized
  source 1..22: mol_type = other DNA
acaaaatccttgagccaccacc

SEQ ID NO: 102435 - DNA, 22 bp, synthetic construct
  misc_feature 1..22: note = chemically synthesized
  source 1..22: mol_type = other DNA
caaaatccttgagccaccacca

SEQ ID NO: 102436 - DNA, 22 bp, synthetic construct
  misc_feature 1..22: note = chemically synthesized
  source 1..22: mol_type = other DNA
gagccaccaccaaaccttttcg

SEQ ID NO: 102437 - DNA, 22 bp, synthetic construct
  misc_feature 1..22: note = chemically synthesized
  source 1..22: mol_type = other DNA
agccaccaccaaaccttttcgt

SEQ ID NO: 102438 - DNA, 22 bp, synthetic construct
  misc_feature 1..22: note = chemically synthesized
  source 1..22: mol_type = other DNA
ttcgtcttgatgattattcatc

SEQ ID NO: 102439 - DNA, 22 bp, synthetic construct
  misc_feature 1..22: note = chemically synthesized
  source 1..22: mol_type = other DNA
tcgtcttgatgattattcatca

SEQ ID NO: 102440 - DNA, 22 bp, synthetic construct
  misc_feature 1..22: note = chemically synthesized
  source 1..22: mol_type = other DNA
cgtcttgatgattattcatcag

SEQ ID NO: 102441 - DNA, 22 bp, synthetic construct
  misc_feature 1..22: note = chemically synthesized
  source 1..22: mol_type = other DNA
gtcttgatgattattcatcaga

SEQ ID NO: 102442 - DNA, 22 bp, synthetic construct
  misc_feature 1..22: note = chemically synthesized
  source 1..22: mol_type = other DNA
gatgattattcatcagacattt

SEQ ID NO: 102443 - DNA, 22 bp, synthetic construct
  misc_feature 1..22: note = chemically synthesized
  source 1..22: mol_type = other DNA
atgattattcatcagacattta

SEQ ID NO: 102444 - DNA, 22 bp, synthetic construct
  misc_feature 1..22: note = chemically synthesized
  source 1..22: mol_type = other DNA
ttcatcagacatttatttattc

SEQ ID NO: 102445 - DNA, 22 bp, synthetic construct
  misc_feature 1..22: note = chemically synthesized
  source 1..22: mol_type = other DNA
atcagacatttatttattcttt

SEQ ID NO: 102446 - DNA, 22 bp, synthetic construct
  misc_feature 1..22: note = chemically synthesized
  source 1..22: mol_type = other DNA
atttattctttctattgattca

SEQ ID NO: 102447 - DNA, 22 bp, synthetic construct
  misc_feature 1..22: note = chemically synthesized
  source 1..22: mol_type = other DNA
tttattctttctattgattcaa

SEQ ID NO: 102448 - DNA, 22 bp, synthetic construct
  misc_feature 1..22: note = chemically synthesized
  source 1..22: mol_type = other DNA
attctttctattgattcaaaac

SEQ ID NO: 102449 - DNA, 22 bp, synthetic construct
  misc_feature 1..22: note = chemically synthesized
  source 1..22: mol_type = other DNA
ttctttctattgattcaaaact

SEQ ID NO: 102450 - DNA, 22 bp, synthetic construct
  misc_feature 1..22: note = chemically synthesized
  source 1..22: mol_type = other DNA
tttctattgattcaaaactcac

SEQ ID NO: 102451 - DNA, 22 bp, synthetic construct
  misc_feature 1..22: note = chemically synthesized
  source 1..22: mol_type = other DNA
tctattgattcaaaactcacta

SEQ ID NO: 102452 - DNA, 22 bp, synthetic construct
  misc_feature 1..22: note = chemically synthesized
  source 1..22: mol_type = other DNA
ctattgattcaaaactcactac

SEQ ID NO: 102453 - DNA, 22 bp, synthetic construct
  misc_feature 1..22: note = chemically synthesized
  source 1..22: mol_type = other DNA
tattgattcaaaactcactacc

SEQ ID NO: 102454 - DNA, 22 bp, synthetic construct
  misc_feature 1..22: note = chemically synthesized
  source 1..22: mol_type = other DNA
ttgattcaaaactcactaccct

SEQ ID NO: 102455 - DNA, 22 bp, synthetic construct
  misc_feature 1..22: note = chemically synthesized
  source 1..22: mol_type = other DNA
attcaaaactcactaccctacc

SEQ ID NO: 102456 - DNA, 22 bp, synthetic construct
  misc_feature 1..22: note = chemically synthesized
  source 1..22: mol_type = other DNA
aaaactcactaccctaccctga

SEQ ID NO: 102457 - DNA, 22 bp, synthetic construct
  misc_feature 1..22: note = chemically synthesized
  source 1..22: mol_type = other DNA
actaccctaccctgagctatct

SEQ ID NO: 102458 - DNA, 22 bp, synthetic construct
  misc_feature 1..22: note = chemically synthesized
  source 1..22: mol_type = other DNA
ccctaccctgagctatctcatt

SEQ ID NO: 102459 - DNA, 22 bp, synthetic construct
  misc_feature 1..22: note = chemically synthesized
  source 1..22: mol_type = other DNA
ccctgagctatctcattcatat

SEQ ID NO: 102460 - DNA, 22 bp, synthetic construct
  misc_feature 1..22: note = chemically synthesized
  source 1..22: mol_type = other DNA
agctatctcattcatatatatg

SEQ ID NO: 102461 - DNA, 22 bp, synthetic construct
  misc_feature 1..22: note = chemically synthesized
  source 1..22: mol_type = other DNA
tctcattcatatatatgtgggt

SEQ ID NO: 102462 - DNA, 22 bp, synthetic construct
  misc_feature 1..22: note = chemically synthesized
  source 1..22: mol_type = other DNA
attcatatatatgtgggtttca

SEQ ID NO: 102463 - DNA, 22 bp, synthetic construct
  misc_feature 1..22: note = chemically synthesized
  source 1..22: mol_type = other DNA
atatatatgtgggtttcattta

SEQ ID NO: 102464 - DNA, 22 bp, synthetic construct
  misc_feature 1..22: note = chemically synthesized
  source 1..22: mol_type = other DNA
catttaattatttagtatatgt

SEQ ID NO: 102465 - DNA, 22 bp, synthetic construct
  misc_feature 1..22: note = chemically synthesized
  source 1..22: mol_type = other DNA
atttaattatttagtatatgta

SEQ ID NO: 102466 - DNA, 22 bp, synthetic construct
  misc_feature 1..22: note = chemically synthesized
  source 1..22: mol_type = other DNA
aattatttagtatatgtatata

SEQ ID NO: 102467 - DNA, 22 bp, synthetic construct
  misc_feature 1..22: note = chemically synthesized
  source 1..22: mol_type = other DNA
attatttagtatatgtatatat

SEQ ID NO: 102468 - DNA, 22 bp, synthetic construct
  misc_feature 1..22: note = chemically synthesized
  source 1..22: mol_type = other DNA
tttagtatatgtatatatggta

SEQ ID NO: 102469 - DNA, 22 bp, synthetic construct
  misc_feature 1..22: note = chemically synthesized
  source 1..22: mol_type = other DNA
agtatatgtatatatggtattt

SEQ ID NO: 102470 - DNA, 22 bp, synthetic construct
  misc_feature 1..22: note = chemically synthesized
  source 1..22: mol_type = other DNA
gtatatgtatatatggtattta

SEQ ID NO: 102471 - DNA, 22 bp, synthetic construct
  misc_feature 1..22: note = chemically synthesized
  source 1..22: mol_type = other DNA
actatcaatatatgtatgcata

SEQ ID NO: 102472 - DNA, 22 bp, synthetic construct
  misc_feature 1..22: note = chemically synthesized
  source 1..22: mol_type = other DNA
ctatcaatatatgtatgcatag

SEQ ID NO: 102473 - DNA, 22 bp, synthetic construct
  misc_feature 1..22: note = chemically synthesized
  source 1..22: mol_type = other DNA
tcaatatatgtatgcataggtg

SEQ ID NO: 102474 - DNA, 22 bp, synthetic construct
  misc_feature 1..22: note = chemically synthesized
  source 1..22: mol_type = other DNA
acagacagagacagtgagagag

SEQ ID NO: 102475 - DNA, 22 bp, synthetic construct
  misc_feature 1..22: note = chemically synthesized
  source 1..22: mol_type = other DNA
ctctgaaacatataatatctac

SEQ ID NO: 102476 - DNA, 22 bp, synthetic construct
  misc_feature 1..22: note = chemically synthesized
  source 1..22: mol_type = other DNA
tctgaaacatataatatctact

SEQ ID NO: 102477 - DNA, 22 bp, synthetic construct
  misc_feature 1..22: note = chemically synthesized
  source 1..22: mol_type = other DNA
tgaaacatataatatctactcc

SEQ ID NO: 102478 - DNA, 22 bp, synthetic construct
  misc_feature 1..22: note = chemically synthesized
  source 1..22: mol_type = other DNA
aaacatataatatctactcctt

SEQ ID NO: 102479 - DNA, 22 bp, synthetic construct
  misc_feature 1..22: note = chemically synthesized
  source 1..22: mol_type = other DNA
ctccttatatttaggtctgatc

SEQ ID NO: 102480 - DNA, 22 bp, synthetic construct
  misc_feature 1..22: note = chemically synthesized
  source 1..22: mol_type = other DNA
cttatatttaggtctgatctcc

SEQ ID NO: 102481 - DNA, 22 bp, synthetic construct
  misc_feature 1..22: note = chemically synthesized
  source 1..22: mol_type = other DNA
atatttaggtctgatctccaga

SEQ ID NO: 102482 - DNA, 22 bp, synthetic construct
  misc_feature 1..22: note = chemically synthesized
  source 1..22: mol_type = other DNA
tatttaggtctgatctccagaa

SEQ ID NO: 102483 - DNA, 22 bp, synthetic construct
  misc_feature 1..22: note = chemically synthesized
  source 1..22: mol_type = other DNA
aggtctgatctccagaataaaa

SEQ ID NO: 102484 - DNA, 22 bp, synthetic construct
  misc_feature 1..22: note = chemically synthesized
  source 1..22: mol_type = other DNA
ggtctgatctccagaataaaat

SEQ ID NO: 102485 - DNA, 22 bp, synthetic construct
  misc_feature 1..22: note = chemically synthesized
  source 1..22: mol_type = other DNA
atctccagaataaaataaccat

SEQ ID NO: 102486 - DNA, 22 bp, synthetic construct
  misc_feature 1..22: note = chemically synthesized
  source 1..22: mol_type = other DNA
cagaataaaataaccatatatt

SEQ ID NO: 102487 - DNA, 22 bp, synthetic construct
  misc_feature 1..22: note = chemically synthesized
  source 1..22: mol_type = other DNA
gccattatattcatacataatt

SEQ ID NO: 102488 - DNA, 22 bp, synthetic construct
  misc_feature 1..22: note = chemically synthesized
  source 1..22: mol_type = other DNA
tattcatacataatttttttct

SEQ ID NO: 102489 - DNA, 22 bp, synthetic construct
  misc_feature 1..22: note = chemically synthesized
  source 1..22: mol_type = other DNA
atacataatttttttctagatg

SEQ ID NO: 102490 - DNA, 22 bp, synthetic construct
  misc_feature 1..22: note = chemically synthesized
  source 1..22: mol_type = other DNA
ttttctagatgtataaagatat

SEQ ID NO: 102491 - DNA, 22 bp, synthetic construct
  misc_feature 1..22: note = chemically synthesized
  source 1..22: mol_type = other DNA
tttctagatgtataaagatatc

SEQ ID NO: 102492 - DNA, 22 bp, synthetic construct
  misc_feature 1..22: note = chemically synthesized
  source 1..22: mol_type = other DNA
ttctagatgtataaagatatct

SEQ ID NO: 102493 - DNA, 22 bp, synthetic construct
  misc_feature 1..22: note = chemically synthesized
  source 1..22: mol_type = other DNA
tctagatgtataaagatatctg

SEQ ID NO: 102494 - DNA, 22 bp, synthetic construct
  misc_feature 1..22: note = chemically synthesized
  source 1..22: mol_type = other DNA
ctagatgtataaagatatctgc

SEQ ID NO: 102495 - DNA, 22 bp, synthetic construct
  misc_feature 1..22: note = chemically synthesized
  source 1..22: mol_type = other DNA
tagatgtataaagatatctgca

SEQ ID NO: 102496 - DNA, 22 bp, synthetic construct
  misc_feature 1..22: note = chemically synthesized
  source 1..22: mol_type = other DNA
gatgtataaagatatctgcatt

SEQ ID NO: 102497 - DNA, 22 bp, synthetic construct
  misc_feature 1..22: note = chemically synthesized
  source 1..22: mol_type = other DNA
cattaaaaaccctaagacttct

SEQ ID NO: 102498 - DNA, 22 bp, synthetic construct
  misc_feature 1..22: note = chemically synthesized
  source 1..22: mol_type = other DNA
aaaaccctaagacttctttcct

SEQ ID NO: 102499 - DNA, 22 bp, synthetic construct
  misc_feature 1..22: note = chemically synthesized
  source 1..22: mol_type = other DNA
agacttctttcctgatgggtga

SEQ ID NO: 102500 - DNA, 22 bp, synthetic construct
  misc_feature 1..22: note = chemically synthesized
  source 1..22: mol_type = other DNA
ctttcctgatgggtgaaccaat

SEQ ID NO: 102501 - DNA, 22 bp, synthetic construct
  misc_feature 1..22: note = chemically synthesized
  source 1..22: mol_type = other DNA
tttcctgatgggtgaaccaata

SEQ ID NO: 102502 - DNA, 22 bp, synthetic construct
  misc_feature 1..22: note = chemically synthesized
  source 1..22: mol_type = other DNA
tcctgatgggtgaaccaatatc

SEQ ID NO: 102503 - DNA, 22 bp, synthetic construct
  misc_feature 1..22: note = chemically synthesized
  source 1..22: mol_type = other DNA
cctgatgggtgaaccaatatca

SEQ ID NO: 102504 - DNA, 22 bp, synthetic construct
  misc_feature 1..22: note = chemically synthesized
  source 1..22: mol_type = other DNA
ctgatgggtgaaccaatatcaa

SEQ ID NO: 102505 - DNA, 22 bp, synthetic construct
  misc_feature 1..22: note = chemically synthesized
  source 1..22: mol_type = other DNA
atgggtgaaccaatatcaacag

SEQ ID NO: 102506 - DNA, 22 bp, synthetic construct
  misc_feature 1..22: note = chemically synthesized
  source 1..22: mol_type = other DNA
taaatgtttatcatgtaattat

SEQ ID NO: 102507 - DNA, 22 bp, synthetic construct
  misc_feature 1..22: note = chemically synthesized
  source 1..22: mol_type = other DNA
aaatgtttatcatgtaattatt

SEQ ID NO: 102508 - DNA, 22 bp, synthetic construct
  misc_feature 1..22: note = chemically synthesized
  source 1..22: mol_type = other DNA
aatgtttatcatgtaattattc

SEQ ID NO: 102509 - DNA, 22 bp, synthetic construct
  misc_feature 1..22: note = chemically synthesized
  source 1..22: mol_type = other DNA
atcatgtaattattcctaatcc

SEQ ID NO: 102510 - DNA, 22 bp, synthetic construct
  misc_feature 1..22: note = chemically synthesized
  source 1..22: mol_type = other DNA
tcatgtaattattcctaatcct

SEQ ID NO: 102511 - DNA, 22 bp, synthetic construct
  misc_feature 1..22: note = chemically synthesized
  source 1..22: mol_type = other DNA
ttcctaatcctgatttatttcc

SEQ ID NO: 102512 - DNA, 22 bp, synthetic construct
  misc_feature 1..22: note = chemically synthesized
  source 1..22: mol_type = other DNA
ctaatcctgatttatttcctat

SEQ ID NO: 102513 - DNA, 22 bp, synthetic construct
  misc_feature 1..22: note = chemically synthesized
  source 1..22: mol_type = other DNA
atcctgatttatttcctatgat

SEQ ID NO: 102514 - DNA, 22 bp, synthetic construct
  misc_feature 1..22: note = chemically synthesized
  source 1..22: mol_type = other DNA
atttatttcctatgatgctcca

SEQ ID NO: 102515 - DNA, 22 bp, synthetic construct
  misc_feature 1..22: note = chemically synthesized
  source 1..22: mol_type = other DNA
atttcctatgatgctccacctt

SEQ ID NO: 102516 - DNA, 22 bp, synthetic construct
  misc_feature 1..22: note = chemically synthesized
  source 1..22: mol_type = other DNA
tttcctatgatgctccacctta

SEQ ID NO: 102517 - DNA, 22 bp, synthetic construct
  misc_feature 1..22: note = chemically synthesized
  source 1..22: mol_type = other DNA
cctatgatgctccaccttattg

SEQ ID NO: 102518 - DNA, 22 bp, synthetic construct
  misc_feature 1..22: note = chemically synthesized
  source 1..22: mol_type = other DNA
ctatgatgctccaccttattga

SEQ ID NO: 102519 - DNA, 22 bp, synthetic construct
  misc_feature 1..22: note = chemically synthesized
  source 1..22: mol_type = other DNA
tgatgctccaccttattgaaca

SEQ ID NO: 102520 - DNA, 22 bp, synthetic construct
  misc_feature 1..22: note = chemically synthesized
  source 1..22: mol_type = other DNA
caccttattgaacataataatc

SEQ ID NO: 102521 - DNA, 22 bp, synthetic construct
  misc_feature 1..22: note = chemically synthesized
  source 1..22: mol_type = other DNA
attgaacataataatccagatg

SEQ ID NO: 102522 - DNA, 22 bp, synthetic construct
  misc_feature 1..22: note = chemically synthesized
  source 1..22: mol_type = other DNA
ttgaacataataatccagatgt

SEQ ID NO: 102523 - DNA, 22 bp, synthetic construct
  misc_feature 1..22: note = chemically synthesized
  source 1..22: mol_type = other DNA
aacataataatccagatgttgt

SEQ ID NO: 102524 - DNA, 22 bp, synthetic construct
  misc_feature 1..22: note = chemically synthesized
  source 1..22: mol_type = other DNA
tcatattagtcccattctgaaa

SEQ ID NO: 102525 - DNA, 22 bp, synthetic construct
  misc_feature 1..22: note = chemically synthesized
  source 1..22: mol_type = other DNA
gtcccattctgaaatctctttt

SEQ ID NO: 102526 - DNA, 22 bp, synthetic construct
  misc_feature 1..22: note = chemically synthesized
  source 1..22: mol_type = other DNA
tgaaatctcttttttcattgga

SEQ ID NO: 102527 - DNA, 22 bp, synthetic construct
  misc_feature 1..22: note = chemically synthesized
  source 1..22: mol_type = other DNA
aaatctcttttttcattggatt

SEQ ID NO: 102528 - DNA, 22 bp, synthetic construct
  misc_feature 1..22: note = chemically synthesized
  source 1..22: mol_type = other DNA
ttttttcattggattatgtgct

SEQ ID NO: 102529 - DNA, 22 bp, synthetic construct
  misc_feature 1..22: note = chemically synthesized
  source 1..22: mol_type = other DNA
ttttcattggattatgtgctga

SEQ ID NO: 102530 - DNA, 22 bp, synthetic construct
  misc_feature 1..22: note = chemically synthesized
  source 1..22: mol_type = other DNA
tttcattggattatgtgctgag

SEQ ID NO: 102531 - DNA, 22 bp, synthetic construct
  misc_feature 1..22: note = chemically synthesized
  source 1..22: mol_type = other DNA
ttcattggattatgtgctgagt

SEQ ID NO: 102532 - DNA, 22 bp, synthetic construct
  misc_feature 1..22: note = chemically synthesized
  source 1..22: mol_type = other DNA
tcattggattatgtgctgagtt

SEQ ID NO: 102533 - DNA, 22 bp, synthetic construct
  misc_feature 1..22: note = chemically synthesized
  source 1..22: mol_type = other DNA
cattggattatgtgctgagttt

SEQ ID NO: 102534 - DNA, 22 bp, synthetic construct
  misc_feature 1..22: note = chemically synthesized
  source 1..22: mol_type = other DNA
attggattatgtgctgagtttc

SEQ ID NO: 102535 - DNA, 22 bp, synthetic construct
  misc_feature 1..22: note = chemically synthesized
  source 1..22: mol_type = other DNA
gattatgtgctgagtttctatt

SEQ ID NO: 102536 - DNA, 22 bp, synthetic construct
  misc_feature 1..22: note = chemically synthesized
  source 1..22: mol_type = other DNA
tgtgctgagtttctatttaagt

SEQ ID NO: 102537 - DNA, 22 bp, synthetic construct
  misc_feature 1..22: note = chemically synthesized
  source 1..22: mol_type = other DNA
agtttctatttaagtagtctaa

SEQ ID NO: 102538 - DNA, 22 bp, synthetic construct
  misc_feature 1..22: note = chemically synthesized
  source 1..22: mol_type = other DNA
ctatttaagtagtctaagatcg

SEQ ID NO: 102539 - DNA, 22 bp, synthetic construct
  misc_feature 1..22: note = chemically synthesized
  source 1..22: mol_type = other DNA
tatttaagtagtctaagatcgt

SEQ ID NO: 102540 - DNA, 22 bp, synthetic construct
  misc_feature 1..22: note = chemically synthesized
  source 1..22: mol_type = other DNA
tttaagtagtctaagatcgtgc

SEQ ID NO: 102541 - DNA, 22 bp, synthetic construct
  misc_feature 1..22: note = chemically synthesized
  source 1..22: mol_type = other DNA
aagtagtctaagatcgtgcaga

SEQ ID NO: 102542 - DNA, 22 bp, synthetic construct
  misc_feature 1..22: note = chemically synthesized
  source 1..22: mol_type = other DNA
agtagtctaagatcgtgcagat

SEQ ID NO: 102543 - DNA, 22 bp, synthetic construct
  misc_feature 1..22: note = chemically synthesized
  source 1..22: mol_type = other DNA
agatcgtgcagatacacaactc

SEQ ID NO: 102544 - DNA, 22 bp, synthetic construct
  misc_feature 1..22: note = chemically synthesized
  source 1..22: mol_type = other DNA
taccctaaactcttatctcaaa

SEQ ID NO: 102545 - DNA, 22 bp, synthetic construct
  misc_feature 1..22: note = chemically synthesized
  source 1..22: mol_type = other DNA
ccctaaactcttatctcaaaac

SEQ ID NO: 102546 - DNA, 22 bp, synthetic construct
  misc_feature 1..22: note = chemically synthesized
  source 1..22: mol_type = other DNA
aactcttatctcaaaacatgtc

SEQ ID NO: 102547 - DNA, 22 bp, synthetic construct
  misc_feature 1..22: note = chemically synthesized
  source 1..22: mol_type = other DNA
ttatctcaaaacatgtcaaatt

SEQ ID NO: 102548 - DNA, 22 bp, synthetic construct
  misc_feature 1..22: note = chemically synthesized
  source 1..22: mol_type = other DNA
atctcaaaacatgtcaaattca

SEQ ID NO: 102549 - DNA, 22 bp, synthetic construct
  misc_feature 1..22: note = chemically synthesized
  source 1..22: mol_type = other DNA
tctcaaaacatgtcaaattcag

SEQ ID NO: 102550 - DNA, 22 bp, synthetic construct
  misc_feature 1..22: note = chemically synthesized
  source 1..22: mol_type = other DNA
aaaacatgtcaaattcagtctt

SEQ ID NO: 102551 - DNA, 22 bp, synthetic construct
  misc_feature 1..22: note = chemically synthesized
  source 1..22: mol_type = other DNA
agtctttcagatttaaaatagt

SEQ ID NO: 102552 - DNA, 22 bp, synthetic construct
  misc_feature 1..22: note = chemically synthesized
  source 1..22: mol_type = other DNA
tcagatttaaaatagtgataaa

SEQ ID NO: 102553 - DNA, 22 bp, synthetic construct
  misc_feature 1..22: note = chemically synthesized
  source 1..22: mol_type = other DNA
cagatttaaaatagtgataaaa

SEQ ID NO: 102554 - DNA, 22 bp, synthetic construct
  misc_feature 1..22: note = chemically synthesized
  source 1..22: mol_type = other DNA
agatttaaaatagtgataaaat

SEQ ID NO: 102555 - DNA, 22 bp, synthetic construct
  misc_feature 1..22: note = chemically synthesized
  source 1..22: mol_type = other DNA
aaaatagtgataaaatgcatat

SEQ ID NO: 102556 - DNA, 22 bp, synthetic construct
  misc_feature 1..22: note = chemically synthesized
  source 1..22: mol_type = other DNA
aaatagtgataaaatgcatatt

SEQ ID NO: 102557 - DNA, 22 bp, synthetic construct
  misc_feature 1..22: note = chemically synthesized
  source 1..22: mol_type = other DNA
tacataatatatgtgacactcg

SEQ ID NO: 102558 - DNA, 22 bp, synthetic construct
  misc_feature 1..22: note = chemically synthesized
  source 1..22: mol_type = other DNA
cataatatatgtgacactcgca

SEQ ID NO: 102559 - DNA, 22 bp, synthetic construct
  misc_feature 1..22: note = chemically synthesized
  source 1..22: mol_type = other DNA
gcagcaagttactctatttact

SEQ ID NO: 102560 - DNA, 22 bp, synthetic construct
  misc_feature 1..22: note = chemically synthesized
  source 1..22: mol_type = other DNA
ctctatttactatcacctgttt

SEQ ID NO: 102561 - DNA, 22 bp, synthetic construct
  misc_feature 1..22: note = chemically synthesized
  source 1..22: mol_type = other DNA
tatttactatcacctgtttata

SEQ ID NO: 102562 - DNA, 22 bp, synthetic construct
  misc_feature 1..22: note = chemically synthesized
  source 1..22: mol_type = other DNA
tttactatcacctgtttatact

SEQ ID NO: 102563 - DNA, 22 bp, synthetic construct
  misc_feature 1..22: note = chemically synthesized
  source 1..22: mol_type = other DNA
actatcacctgtttatacttag

SEQ ID NO: 102564 - DNA, 22 bp, synthetic construct
  misc_feature 1..22: note = chemically synthesized
  source 1..22: mol_type = other DNA
ctatcacctgtttatacttagg

SEQ ID NO: 102565 - DNA, 22 bp, synthetic construct
  misc_feature 1..22: note = chemically synthesized
  source 1..22: mol_type = other DNA
tcacctgtttatacttagggga

SEQ ID NO: 102566 - DNA, 22 bp, synthetic construct
  misc_feature 1..22: note = chemically synthesized
  source 1..22: mol_type = other DNA
tttatacttaggggaaaaaaac

SEQ ID NO: 102567 - DNA, 22 bp, synthetic construct
  misc_feature 1..22: note = chemically synthesized
  source 1..22: mol_type = other DNA
atacttaggggaaaaaaaccta

SEQ ID NO: 102568 - DNA, 22 bp, synthetic construct
  misc_feature 1..22: note = chemically synthesized
  source 1..22: mol_type = other DNA
tacttaggggaaaaaaacctaa

SEQ ID NO: 102569 - DNA, 22 bp, synthetic construct
  misc_feature 1..22: note = chemically synthesized
  source 1..22: mol_type = other DNA
aggggaaaaaaacctaaatatc

SEQ ID NO: 102570 - DNA, 22 bp, synthetic construct
  misc_feature 1..22: note = chemically synthesized
  source 1..22: mol_type = other DNA
ggggaaaaaaacctaaatatcc

SEQ ID NO: 102571 - DNA, 22 bp, synthetic construct
  misc_feature 1..22: note = chemically synthesized
  source 1..22: mol_type = other DNA
aatatcctctcatatattcagg

SEQ ID NO: 102572 - DNA, 22 bp, synthetic construct
  misc_feature 1..22: note = chemically synthesized
  source 1..22: mol_type = other DNA
tcatatattcaggtaagatttt

SEQ ID NO: 102573 - DNA, 22 bp, synthetic construct
  misc_feature 1..22: note = chemically synthesized
  source 1..22: mol_type = other DNA
atatattcaggtaagattttgc

SEQ ID NO: 102574 - DNA, 22 bp, synthetic construct
  misc_feature 1..22: note = chemically synthesized
  source 1..22: mol_type = other DNA
aggtaagattttgccaaaacgt

SEQ ID NO: 102575 - DNA, 22 bp, synthetic construct
  misc_feature 1..22: note = chemically synthesized
  source 1..22: mol_type = other DNA
tgccaaaacgtgattttaggtc

SEQ ID NO: 102576 - DNA, 22 bp, synthetic construct
  misc_feature 1..22: note = chemically synthesized
  source 1..22: mol_type = other DNA
gccaaaacgtgattttaggtca

SEQ ID NO: 102577 - DNA, 22 bp, synthetic construct
  misc_feature 1..22: note = chemically synthesized
  source 1..22: mol_type = other DNA
ccaaaacgtgattttaggtcat

SEQ ID NO: 102578 - DNA, 22 bp, synthetic construct
  misc_feature 1..22: note = chemically synthesized
  source 1..22: mol_type = other DNA
taggtcatacagcaataaatgc

SEQ ID NO: 102579 - DNA, 22 bp, synthetic construct
  misc_feature 1..22: note = chemically synthesized
  source 1..22: mol_type = other DNA
aggtcatacagcaataaatgca

SEQ ID NO: 102580 - DNA, 22 bp, synthetic construct
  misc_feature 1..22: note = chemically synthesized
  source 1..22: mol_type = other DNA
ggtcatacagcaataaatgcat

SEQ ID NO: 102581 - DNA, 22 bp, synthetic construct
  misc_feature 1..22: note = chemically synthesized
  source 1..22: mol_type = other DNA
cagaattcattttgcagaacct

SEQ ID NO: 102582 - DNA, 22 bp, synthetic construct
  misc_feature 1..22: note = chemically synthesized
  source 1..22: mol_type = other DNA
attttgcagaacctgttgattc

SEQ ID NO: 102583 - DNA, 22 bp, synthetic construct
  misc_feature 1..22: note = chemically synthesized
  source 1..22: mol_type = other DNA
tgcagaacctgttgattctaga

SEQ ID NO: 102584 - DNA, 22 bp, synthetic construct
  misc_feature 1..22: note = chemically synthesized
  source 1..22: mol_type = other DNA
gcagaacctgttgattctagac

SEQ ID NO: 102585 - DNA, 22 bp, synthetic construct
  misc_feature 1..22: note = chemically synthesized
  source 1..22: mol_type = other DNA
cagaacctgttgattctagact

SEQ ID NO: 102586 - DNA, 22 bp, synthetic construct
  misc_feature 1..22: note = chemically synthesized
  source 1..22: mol_type = other DNA
ttgattctagacttgtagctaa

SEQ ID NO: 102587 - DNA, 22 bp, synthetic construct
  misc_feature 1..22: note = chemically synthesized
  source 1..22: mol_type = other DNA
attctagacttgtagctaagaa

SEQ ID NO: 102588 - DNA, 22 bp, synthetic construct
  misc_feature 1..22: note = chemically synthesized
  source 1..22: mol_type = other DNA
tagacttgtagctaagaagtga

SEQ ID NO: 102589 - DNA, 22 bp, synthetic construct
  misc_feature 1..22: note = chemically synthesized
  source 1..22: mol_type = other DNA
gacttgtagctaagaagtgacg

SEQ ID NO: 102590 - DNA, 22 bp, synthetic construct
  misc_feature 1..22: note = chemically synthesized
  source 1..22: mol_type = other DNA
gtagctaagaagtgacggcttg

SEQ ID NO: 102591 - DNA, 22 bp, synthetic construct
  misc_feature 1..22: note = chemically synthesized
  source 1..22: mol_type = other DNA
tagctaagaagtgacggcttgg

SEQ ID NO: 102592 - DNA, 22 bp, synthetic construct
  misc_feature 1..22: note = chemically synthesized
  source 1..22: mol_type = other DNA
agaagtgacggcttggtaaata

SEQ ID NO: 102593 - DNA, 22 bp, synthetic construct
  misc_feature 1..22: note = chemically synthesized
  source 1..22: mol_type = other DNA
ggtaaataaccatatcataaag

SEQ ID NO: 102594 - DNA, 22 bp, synthetic construct
  misc_feature 1..22: note = chemically synthesized
  source 1..22: mol_type = other DNA
gtaaataaccatatcataaagt

SEQ ID NO: 102595 - DNA, 22 bp, synthetic construct
  misc_feature 1..22: note = chemically synthesized
  source 1..22: mol_type = other DNA
tctttgtactcacagtaaaaca

SEQ ID NO: 102596 - DNA, 22 bp, synthetic construct
  misc_feature 1..22: note = chemically synthesized
  source 1..22: mol_type = other DNA
tttgtactcacagtaaaacaaa

SEQ ID NO: 102597 - DNA, 22 bp, synthetic construct
  misc_feature 1..22: note = chemically synthesized
  source 1..22: mol_type = other DNA
tgtactcacagtaaaacaaaac

SEQ ID NO: 102598 - DNA, 22 bp, synthetic construct
  misc_feature 1..22: note = chemically synthesized
  source 1..22: mol_type = other DNA
gtactcacagtaaaacaaaact

SEQ ID NO: 102599 - DNA, 22 bp, synthetic construct
  misc_feature 1..22: note = chemically synthesized
  source 1..22: mol_type = other DNA
tactcacagtaaaacaaaactt

SEQ ID NO: 102600 - DNA, 22 bp, synthetic construct
  misc_feature 1..22: note = chemically synthesized
  source 1..22: mol_type = other DNA
acagtaaaacaaaacttctgaa

SEQ ID NO: 102601 - DNA, 22 bp, synthetic construct
  misc_feature 1..22: note = chemically synthesized
  source 1..22: mol_type = other DNA
ctgaaagattttaagtgagtga

SEQ ID NO: 102602 - DNA, 22 bp, synthetic construct
  misc_feature 1..22: note = chemically synthesized
  source 1..22: mol_type = other DNA
tgaaagattttaagtgagtgac

SEQ ID NO: 102603 - DNA, 22 bp, synthetic construct
  misc_feature 1..22: note = chemically synthesized
  source 1..22: mol_type = other DNA
aaagattttaagtgagtgacat

SEQ ID NO: 102604 - DNA, 22 bp, synthetic construct
  misc_feature 1..22: note = chemically synthesized
  source 1..22: mol_type = other DNA
taagtgagtgacattttcagtg

SEQ ID NO: 102605 - DNA, 22 bp, synthetic construct
  misc_feature 1..22: note = chemically synthesized
  source 1..22: mol_type = other DNA
aagtgagtgacattttcagtgc

SEQ ID NO: 102606 - DNA, 22 bp, synthetic construct
  misc_feature 1..22: note = chemically synthesized
  source 1..22: mol_type = other DNA
agtgagtgacattttcagtgct

SEQ ID NO: 102607 - DNA, 22 bp, synthetic construct
  misc_feature 1..22: note = chemically synthesized
  source 1..22: mol_type = other DNA
tcagtgcttaaaatggagctta

SEQ ID NO: 102608 - DNA, 22 bp, synthetic construct
  misc_feature 1..22: note = chemically synthesized
  source 1..22: mol_type = other DNA
cagtgcttaaaatggagcttaa

SEQ ID NO: 102609 - DNA, 22 bp, synthetic construct
  misc_feature 1..22: note = chemically synthesized
  source 1..22: mol_type = other DNA
agtgcttaaaatggagcttaac

SEQ ID NO: 102610 - DNA, 22 bp, synthetic construct
  misc_feature 1..22: note = chemically synthesized
  source 1..22: mol_type = other DNA
aaaatggagcttaacatatagt

SEQ ID NO: 102611 - DNA, 22 bp, synthetic construct
  misc_feature 1..22: note = chemically synthesized
  source 1..22: mol_type = other DNA
aaatggagcttaacatatagtg

SEQ ID NO: 102612 - DNA, 22 bp, synthetic construct
  misc_feature 1..22: note = chemically synthesized
  source 1..22: mol_type = other DNA
aacatatagtgggtgctcagta

SEQ ID NO: 102613 - DNA, 22 bp, synthetic construct
  misc_feature 1..22: note = chemically synthesized
  source 1..22: mol_type = other DNA
acatatagtgggtgctcagtaa

SEQ ID NO: 102614 - DNA, 22 bp, synthetic construct
  misc_feature 1..22: note = chemically synthesized
  source 1..22: mol_type = other DNA
agtaagtactagttaagcaaat

SEQ ID NO: 102615 - DNA, 22 bp, synthetic construct
  misc_feature 1..22: note = chemically synthesized
  source 1..22: mol_type = other DNA
gttaagcaaatgaatgctattc

SEQ ID NO: 102616 - DNA, 22 bp, synthetic construct
  misc_feature 1..22: note = chemically synthesized
  source 1..22: mol_type = other DNA
agcaaatgaatgctattcttgt

SEQ ID NO: 102617 - DNA, 22 bp, synthetic construct
  misc_feature 1..22: note = chemically synthesized
  source 1..22: mol_type = other DNA
ttcttgtgatcaagccattggt

SEQ ID NO: 102618 - DNA, 22 bp, synthetic construct
  misc_feature 1..22: note = chemically synthesized
  source 1..22: mol_type = other DNA
ttgtgatcaagccattggtttt

SEQ ID NO: 102619 - DNA, 22 bp, synthetic construct
  misc_feature 1..22: note = chemically synthesized
  source 1..22: mol_type = other DNA
gtgatcaagccattggttttgt

SEQ ID NO: 102620 - DNA, 22 bp, synthetic construct
  misc_feature 1..22: note = chemically synthesized
  source 1..22: mol_type = other DNA
tgatcaagccattggttttgta

SEQ ID NO: 102621 - DNA, 22 bp, synthetic construct
  misc_feature 1..22: note = chemically synthesized
  source 1..22: mol_type = other DNA
gttttgtagccaaattgtagac

SEQ ID NO: 102622 - DNA, 22 bp, synthetic construct
  misc_feature 1..22: note = chemically synthesized
  source 1..22: mol_type = other DNA
tgtagccaaattgtagaccttt

SEQ ID NO: 102623 - DNA, 22 bp, synthetic construct
  misc_feature 1..22: note = chemically synthesized
  source 1..22: mol_type = other DNA
gtagccaaattgtagaccttta

SEQ ID NO: 102624 - DNA, 22 bp, synthetic construct
  misc_feature 1..22: note = chemically synthesized
  source 1..22: mol_type = other DNA
tagccaaattgtagacctttac

SEQ ID NO: 102625 - DNA, 22 bp, synthetic construct
  misc_feature 1..22: note = chemically synthesized
  source 1..22: mol_type = other DNA
tagacctttacaacctctacat

SEQ ID NO: 102626 - DNA, 22 bp, synthetic construct
  misc_feature 1..22: note = chemically synthesized
  source 1..22: mol_type = other DNA
tacaacctctacatctgtttgt

SEQ ID NO: 102627 - DNA, 22 bp, synthetic construct
  misc_feature 1..22: note = chemically synthesized
  source 1..22: mol_type = other DNA
acaacctctacatctgtttgta

SEQ ID NO: 102628 - DNA, 22 bp, synthetic construct
  misc_feature 1..22: note = chemically synthesized
  source 1..22: mol_type = other DNA
caacctctacatctgtttgtaa

SEQ ID NO: 102629 - DNA, 22 bp, synthetic construct
  misc_feature 1..22: note = chemically synthesized
  source 1..22: mol_type = other DNA
tacatctgtttgtaataagatt

SEQ ID NO: 102630 - DNA, 22 bp, synthetic construct
  misc_feature 1..22: note = chemically synthesized
  source 1..22: mol_type = other DNA
catctgtttgtaataagattac

SEQ ID NO: 102631 - DNA, 22 bp, synthetic construct
  misc_feature 1..22: note = chemically synthesized
  source 1..22: mol_type = other DNA
tttgtaataagattactagttc

SEQ ID NO: 102632 - DNA, 22 bp, synthetic construct
  misc_feature 1..22: note = chemically synthesized
  source 1..22: mol_type = other DNA
gtaataagattactagttcaag

SEQ ID NO: 102633 - DNA, 22 bp, synthetic construct
  misc_feature 1..22: note = chemically synthesized
  source 1..22: mol_type = other DNA
taataagattactagttcaagc

SEQ ID NO: 102634 - DNA, 22 bp, synthetic construct
  misc_feature 1..22: note = chemically synthesized
  source 1..22: mol_type = other DNA
ctagttcaagcatgccaaacaa

SEQ ID NO: 102635 - DNA, 22 bp, synthetic construct
  misc_feature 1..22: note = chemically synthesized
  source 1..22: mol_type = other DNA
gttcaagcatgccaaacaatgc

SEQ ID NO: 102636 - DNA, 22 bp, synthetic construct
  misc_feature 1..22: note = chemically synthesized
  source 1..22: mol_type = other DNA
aagcatgccaaacaatgctatc

SEQ ID NO: 102637 - DNA, 22 bp, synthetic construct
  misc_feature 1..22: note = chemically synthesized
  source 1..22: mol_type = other DNA
tctccttttctttattgtttag

SEQ ID NO: 102638 - DNA, 22 bp, synthetic construct
  misc_feature 1..22: note = chemically synthesized
  source 1..22: mol_type = other DNA
cttttctttattgtttagtact

SEQ ID NO: 102639 - DNA, 22 bp, synthetic construct
  misc_feature 1..22: note = chemically synthesized
  source 1..22: mol_type = other DNA
ttctttattgtttagtacttcg

SEQ ID NO: 102640 - DNA, 22 bp, synthetic construct
  misc_feature 1..22: note = chemically synthesized
  source 1..22: mol_type = other DNA
tctttattgtttagtacttcga

SEQ ID NO: 102641 - DNA, 22 bp, synthetic construct
  misc_feature 1..22: note = chemically synthesized
  source 1..22: mol_type = other DNA
ctttattgtttagtacttcgat

SEQ ID NO: 102642 - DNA, 22 bp, synthetic construct
  misc_feature 1..22: note = chemically synthesized
  source 1..22: mol_type = other DNA
tttattgtttagtacttcgatg

SEQ ID NO: 102643 - DNA, 22 bp, synthetic construct
  misc_feature 1..22: note = chemically synthesized
  source 1..22: mol_type = other DNA
tattgtttagtacttcgatgtc

SEQ ID NO: 102644 - DNA, 22 bp, synthetic construct
  misc_feature 1..22: note = chemically synthesized
  source 1..22: mol_type = other DNA
attgtttagtacttcgatgtct

SEQ ID NO: 102645 - DNA, 22 bp, synthetic construct
  misc_feature 1..22: note = chemically synthesized
  source 1..22: mol_type = other DNA
ttgtttagtacttcgatgtctc

SEQ ID NO: 102646 - DNA, 22 bp, synthetic construct
  misc_feature 1..22: note = chemically synthesized
  source 1..22: mol_type = other DNA
tttagtacttcgatgtctctaa

SEQ ID NO: 102647 - DNA, 22 bp, synthetic construct
  misc_feature 1..22: note = chemically synthesized
  source 1..22: mol_type = other DNA
agtacttcgatgtctctaattt

SEQ ID NO: 102648 - DNA, 22 bp, synthetic construct
  misc_feature 1..22: note = chemically synthesized
  source 1..22: mol_type = other DNA
gtacttcgatgtctctaatttt

SEQ ID NO: 102649 - DNA, 22 bp, synthetic construct
  misc_feature 1..22: note = chemically synthesized
  source 1..22: mol_type = other DNA
cgatgtctctaatttttacatc

SEQ ID NO: 102650 - DNA, 22 bp, synthetic construct
  misc_feature 1..22: note = chemically synthesized
  source 1..22: mol_type = other DNA
gatgtctctaatttttacatca

SEQ ID NO: 102651 - DNA, 22 bp, synthetic construct
  misc_feature 1..22: note = chemically synthesized
  source 1..22: mol_type = other DNA
taatttttacatcaatcatggt

SEQ ID NO: 102652 - DNA, 22 bp, synthetic construct
  misc_feature 1..22: note = chemically synthesized
  source 1..22: mol_type = other DNA
atttttacatcaatcatggttc

SEQ ID NO: 102653 - DNA, 22 bp, synthetic construct
  misc_feature 1..22: note = chemically synthesized
  source 1..22: mol_type = other DNA
ttacatcaatcatggttcagag

SEQ ID NO: 102654 - DNA, 22 bp, synthetic construct
  misc_feature 1..22: note = chemically synthesized
  source 1..22: mol_type = other DNA
tacatcaatcatggttcagaga

SEQ ID NO: 102655 - DNA, 22 bp, synthetic construct
  misc_feature 1..22: note = chemically synthesized
  source 1..22: mol_type = other DNA
acatcaatcatggttcagagaa

SEQ ID NO: 102656 - DNA, 22 bp, synthetic construct
  misc_feature 1..22: note = chemically synthesized
  source 1..22: mol_type = other DNA
catcaatcatggttcagagaaa

SEQ ID NO: 102657 - DNA, 22 bp, synthetic construct
  misc_feature 1..22: note = chemically synthesized
  source 1..22: mol_type = other DNA
agagaaaaatccataacaacat

SEQ ID NO: 102658 - DNA, 22 bp, synthetic construct
  misc_feature 1..22: note = chemically synthesized
  source 1..22: mol_type = other DNA
tttgaagtttccttccttcctc

SEQ ID NO: 102659 - DNA, 22 bp, synthetic construct
  misc_feature 1..22: note = chemically synthesized
  source 1..22: mol_type = other DNA
ttgaagtttccttccttcctcc

SEQ ID NO: 102660 - DNA, 22 bp, synthetic construct
  misc_feature 1..22: note = chemically synthesized
  source 1..22: mol_type = other DNA
tgaagtttccttccttcctccc

SEQ ID NO: 102661 - DNA, 22 bp, synthetic construct
  misc_feature 1..22: note = chemically synthesized
  source 1..22: mol_type = other DNA
gaagtttccttccttcctccct

SEQ ID NO: 102662 - DNA, 22 bp, synthetic construct
  misc_feature 1..22: note = chemically synthesized
  source 1..22: mol_type = other DNA
aagtttccttccttcctccctc

SEQ ID NO: 102663 - DNA, 22 bp, synthetic construct
  misc_feature 1..22: note = chemically synthesized
  source 1..22: mol_type = other DNA
ccttccttcctccctccctccc

SEQ ID NO: 102664 - DNA, 22 bp, synthetic construct
  misc_feature 1..22: note = chemically synthesized
  source 1..22: mol_type = other DNA
cttccttcctccctccctccct

SEQ ID NO: 102665 - DNA, 22 bp, synthetic construct
  misc_feature 1..22: note = chemically synthesized
  source 1..22: mol_type = other DNA
ccttcctccctccctccctccc

SEQ ID NO: 102666 - DNA, 22 bp, synthetic construct
  misc_feature 1..22: note = chemically synthesized
  source 1..22: mol_type = other DNA
cttcctccctccctccctcccc

SEQ ID NO: 102667 - DNA, 22 bp, synthetic construct
  misc_feature 1..22: note = chemically synthesized
  source 1..22: mol_type = other DNA
cctccctccctccctccccctt

SEQ ID NO: 102668 - DNA, 22 bp, synthetic construct
  misc_feature 1..22: note = chemically synthesized
  source 1..22: mol_type = other DNA
ctccctccctccctcccccttc

SEQ ID NO: 102669 - DNA, 22 bp, synthetic construct
  misc_feature 1..22: note = chemically synthesized
  source 1..22: mol_type = other DNA
cctccctccctcccccttcccc

SEQ ID NO: 102670 - DNA, 22 bp, synthetic construct
  misc_feature 1..22: note = chemically synthesized
  source 1..22: mol_type = other DNA
cctccctcccccttcccccttc

SEQ ID NO: 102671 - DNA, 22 bp, synthetic construct
  misc_feature 1..22: note = chemically synthesized
  source 1..22: mol_type = other DNA
cctcccccttcccccttccccc

SEQ ID NO: 102672 - DNA, 22 bp, synthetic construct
  misc_feature 1..22: note = chemically synthesized
  source 1..22: mol_type = other DNA
ccccttcccccttcccccttcc

SEQ ID NO: 102673 - DNA, 22 bp, synthetic construct
  misc_feature 1..22: note = chemically synthesized
  source 1..22: mol_type = other DNA
cccccttcccccttccctcctt

SEQ ID NO: 102674 - DNA, 22 bp, synthetic construct
  misc_feature 1..22: note = chemically synthesized
  source 1..22: mol_type = other DNA
ccccttcccccttccctccttc

SEQ ID NO: 102675 - DNA, 22 bp, synthetic construct
  misc_feature 1..22: note = chemically synthesized
  source 1..22: mol_type = other DNA
cccccttccctccttccctcct

SEQ ID NO: 102676 - DNA, 22 bp, synthetic construct
  misc_feature 1..22: note = chemically synthesized
  source 1..22: mol_type = other DNA
ccccttccctccttccctcctt

SEQ ID NO: 102677 - DNA, 22 bp, synthetic construct
  misc_feature 1..22: note = chemically synthesized
  source 1..22: mol_type = other DNA
ccctccttccctccttccctca

SEQ ID NO: 102678 - DNA, 22 bp, synthetic construct
  misc_feature 1..22: note = chemically synthesized
  source 1..22: mol_type = other DNA
cctccttccctccttccctcat

SEQ ID NO: 102679 - DNA, 22 bp, synthetic construct
  misc_feature 1..22: note = chemically synthesized
  source 1..22: mol_type = other DNA
cttccctccttccctcattcct

SEQ ID NO: 102680 - DNA, 22 bp, synthetic construct
  misc_feature 1..22: note = chemically synthesized
  source 1..22: mol_type = other DNA
ccctccttccctcattccttcc

SEQ ID NO: 102681 - DNA, 22 bp, synthetic construct
  misc_feature 1..22: note = chemically synthesized
  source 1..22: mol_type = other DNA
cctccttccctcattccttcct

SEQ ID NO: 102682 - DNA, 22 bp, synthetic construct
  misc_feature 1..22: note = chemically synthesized
  source 1..22: mol_type = other DNA
cttccctcattccttcctttct

SEQ ID NO: 102683 - DNA, 22 bp, synthetic construct
  misc_feature 1..22: note = chemically synthesized
  source 1..22: mol_type = other DNA
ccctcattccttcctttctttt

SEQ ID NO: 102684 - DNA, 22 bp, synthetic construct
  misc_feature 1..22: note = chemically synthesized
  source 1..22: mol_type = other DNA
cctcattccttcctttcttttt

SEQ ID NO: 102685 - DNA, 22 bp, synthetic construct
  misc_feature 1..22: note = chemically synthesized
  source 1..22: mol_type = other DNA
attccttcctttcttttttctt

SEQ ID NO: 102686 - DNA, 22 bp, synthetic construct
  misc_feature 1..22: note = chemically synthesized
  source 1..22: mol_type = other DNA
cttcctttcttttttctttctt

SEQ ID NO: 102687 - DNA, 22 bp, synthetic construct
  misc_feature 1..22: note = chemically synthesized
  source 1..22: mol_type = other DNA
cctttcttttttctttctttcc

SEQ ID NO: 102688 - DNA, 22 bp, synthetic construct
  misc_feature 1..22: note = chemically synthesized
  source 1..22: mol_type = other DNA
ctttcttttttctttctttcct

SEQ ID NO: 102689 - DNA, 22 bp, synthetic construct
  misc_feature 1..22: note = chemically synthesized
  source 1..22: mol_type = other DNA
tcttttttctttctttccttat

SEQ ID NO: 102690 - DNA, 22 bp, synthetic construct
  misc_feature 1..22: note = chemically synthesized
  source 1..22: mol_type = other DNA
cttttttctttctttccttatt

SEQ ID NO: 102691 - DNA, 22 bp, synthetic construct
  misc_feature 1..22: note = chemically synthesized
  source 1..22: mol_type = other DNA
ttttttctttctttccttattt

SEQ ID NO: 102692 - DNA, 22 bp, synthetic construct
  misc_feature 1..22: note = chemically synthesized
  source 1..22: mol_type = other DNA
ttttctttctttccttatttct

SEQ ID NO: 102693 - DNA, 22 bp, synthetic construct
  misc_feature 1..22: note = chemically synthesized
  source 1..22: mol_type = other DNA
tttctttctttccttatttctc

SEQ ID NO: 102694 - DNA, 22 bp, synthetic construct
  misc_feature 1..22: note = chemically synthesized
  source 1..22: mol_type = other DNA
ttctttctttccttatttctct

SEQ ID NO: 102695 - DNA, 22 bp, synthetic construct
  misc_feature 1..22: note = chemically synthesized
  source 1..22: mol_type = other DNA
tctttctttccttatttctctc

SEQ ID NO: 102696 - DNA, 22 bp, synthetic construct
  misc_feature 1..22: note = chemically synthesized
  source 1..22: mol_type = other DNA
ctttctttccttatttctctct

SEQ ID NO: 102697 - DNA, 22 bp, synthetic construct
  misc_feature 1..22: note = chemically synthesized
  source 1..22: mol_type = other DNA
tttctttccttatttctctctc

SEQ ID NO: 102698 - DNA, 22 bp, synthetic construct
  misc_feature 1..22: note = chemically synthesized
  source 1..22: mol_type = other DNA
tctttccttatttctctctctc

SEQ ID NO: 102699 - DNA, 22 bp, synthetic construct
  misc_feature 1..22: note = chemically synthesized
  source 1..22: mol_type = other DNA
ctttccttatttctctctctct

SEQ ID NO: 102700 - DNA, 22 bp, synthetic construct
  misc_feature 1..22: note = chemically synthesized
  source 1..22: mol_type = other DNA
tttccttatttctctctctctt

SEQ ID NO: 102701 - DNA, 22 bp, synthetic construct
  misc_feature 1..22: note = chemically synthesized
  source 1..22: mol_type = other DNA
tccttatttctctctctctttt

SEQ ID NO: 102702 - DNA, 22 bp, synthetic construct
  misc_feature 1..22: note = chemically synthesized
  source 1..22: mol_type = other DNA
ccttatttctctctctcttttt

SEQ ID NO: 102703 - DNA, 22 bp, synthetic construct
  misc_feature 1..22: note = chemically synthesized
  source 1..22: mol_type = other DNA
cttatttctctctctctttttc

SEQ ID NO: 102704 - DNA, 22 bp, synthetic construct
  misc_feature 1..22: note = chemically synthesized
  source 1..22: mol_type = other DNA
atttctctctctctttttcttc

SEQ ID NO: 102705 - DNA, 22 bp, synthetic construct
  misc_feature 1..22: note = chemically synthesized
  source 1..22: mol_type = other DNA
tttctctctctctttttcttcc

SEQ ID NO: 102706 - DNA, 22 bp, synthetic construct
  misc_feature 1..22: note = chemically synthesized
  source 1..22: mol_type = other DNA
ctctctctctttttcttccttc

SEQ ID NO: 102707 - DNA, 22 bp, synthetic construct
  misc_feature 1..22: note = chemically synthesized
  source 1..22: mol_type = other DNA
tctctctctttttcttccttcc

SEQ ID NO: 102708 - DNA, 22 bp, synthetic construct
  misc_feature 1..22: note = chemically synthesized
  source 1..22: mol_type = other DNA
tctctctttttcttccttcctt

SEQ ID NO: 102709 - DNA, 22 bp, synthetic construct
  misc_feature 1..22: note = chemically synthesized
  source 1..22: mol_type = other DNA
tctctttttcttccttccttcc

SEQ ID NO: 102710 - DNA, 22 bp, synthetic construct
  misc_feature 1..22: note = chemically synthesized
  source 1..22: mol_type = other DNA
tctttttcttccttccttcctt

SEQ ID NO: 102711 - DNA, 22 bp, synthetic construct
  misc_feature 1..22: note = chemically synthesized
  source 1..22: mol_type = other DNA
tttttcttccttccttcctttc

SEQ ID NO: 102712 - DNA, 22 bp, synthetic construct
  misc_feature 1..22: note = chemically synthesized
  source 1..22: mol_type = other DNA
tttcttccttccttcctttctt

SEQ ID NO: 102713 - DNA, 22 bp, synthetic construct
  misc_feature 1..22: note = chemically synthesized
  source 1..22: mol_type = other DNA
ttcttccttccttcctttcttt

SEQ ID NO: 102714 - DNA, 22 bp, synthetic construct
  misc_feature 1..22: note = chemically synthesized
  source 1..22: mol_type = other DNA
tcttccttccttcctttctttc

SEQ ID NO: 102715 - DNA, 22 bp, synthetic construct
  misc_feature 1..22: note = chemically synthesized
  source 1..22: mol_type = other DNA
cttccttccttcctttctttct

SEQ ID NO: 102716 - DNA, 22 bp, synthetic construct
  misc_feature 1..22: note = chemically synthesized
  source 1..22: mol_type = other DNA
ttccttccttcctttctttctc

SEQ ID NO: 102717 - DNA, 22 bp, synthetic construct
  misc_feature 1..22: note = chemically synthesized
  source 1..22: mol_type = other DNA
ccttccttcctttctttctccc

SEQ ID NO: 102718 - DNA, 22 bp, synthetic construct
  misc_feature 1..22: note = chemically synthesized
  source 1..22: mol_type = other DNA
cttccttcctttctttctccct

SEQ ID NO: 102719 - DNA, 22 bp, synthetic construct
  misc_feature 1..22: note = chemically synthesized
  source 1..22: mol_type = other DNA
ccttcctttctttctccctttc

SEQ ID NO: 102720 - DNA, 22 bp, synthetic construct
  misc_feature 1..22: note = chemically synthesized
  source 1..22: mol_type = other DNA
cttcctttctttctccctttcc

SEQ ID NO: 102721 - DNA, 22 bp, synthetic construct
  misc_feature 1..22: note = chemically synthesized
  source 1..22: mol_type = other DNA
cctttctttctccctttccttt

SEQ ID NO: 102722 - DNA, 22 bp, synthetic construct
  misc_feature 1..22: note = chemically synthesized
  source 1..22: mol_type = other DNA
ctttctttctccctttcctttc

SEQ ID NO: 102723 - DNA, 22 bp, synthetic construct
  misc_feature 1..22: note = chemically synthesized
  source 1..22: mol_type = other DNA
tctttctccctttcctttcctt

SEQ ID NO: 102724 - DNA, 22 bp, synthetic construct
  misc_feature 1..22: note = chemically synthesized
  source 1..22: mol_type = other DNA
ctttctccctttcctttccttt

SEQ ID NO: 102725 - DNA, 22 bp, synthetic construct
  misc_feature 1..22: note = chemically synthesized
  source 1..22: mol_type = other DNA
tttctccctttcctttcctttc

SEQ ID NO: 102726 - DNA, 22 bp, synthetic construct
  misc_feature 1..22: note = chemically synthesized
  source 1..22: mol_type = other DNA
tctccctttcctttcctttcct

SEQ ID NO: 102727 - DNA, 22 bp, synthetic construct
  misc_feature 1..22: note = chemically synthesized
  source 1..22: mol_type = other DNA
ctccctttcctttcctttcctt

SEQ ID NO: 102728 - DNA, 22 bp, synthetic construct
  misc_feature 1..22: note = chemically synthesized
  source 1..22: mol_type = other DNA
tccctttcctttcctttccttt

SEQ ID NO: 102729 - DNA, 22 bp, synthetic construct
  misc_feature 1..22: note = chemically synthesized
  source 1..22: mol_type = other DNA
cctttcctttcctttcctttta

SEQ ID NO: 102730 - DNA, 22 bp, synthetic construct
  misc_feature 1..22: note = chemically synthesized
  source 1..22: mol_type = other DNA
tcctttcctttccttttattct

SEQ ID NO: 102731 - DNA, 22 bp, synthetic construct
  misc_feature 1..22: note = chemically synthesized
  source 1..22: mol_type = other DNA
cctttcctttccttttattctc

SEQ ID NO: 102732 - DNA, 22 bp, synthetic construct
  misc_feature 1..22: note = chemically synthesized
  source 1..22: mol_type = other DNA
ctttcctttccttttattctct

SEQ ID NO: 102733 - DNA, 22 bp, synthetic construct
  misc_feature 1..22: note = chemically synthesized
  source 1..22: mol_type = other DNA
tcctttccttttattctctttt

SEQ ID NO: 102734 - DNA, 22 bp, synthetic construct
  misc_feature 1..22: note = chemically synthesized
  source 1..22: mol_type = other DNA
cctttccttttattctcttttc

SEQ ID NO: 102735 - DNA, 22 bp, synthetic construct
  misc_feature 1..22: note = chemically synthesized
  source 1..22: mol_type = other DNA
ctttccttttattctcttttct

SEQ ID NO: 102736 - DNA, 22 bp, synthetic construct
  misc_feature 1..22: note = chemically synthesized
  source 1..22: mol_type = other DNA
tccttttattctcttttctttt

SEQ ID NO: 102737 - DNA, 22 bp, synthetic construct
  misc_feature 1..22: note = chemically synthesized
  source 1..22: mol_type = other DNA
ccttttattctcttttcttttc

SEQ ID NO: 102738 - DNA, 22 bp, synthetic construct
  misc_feature 1..22: note = chemically synthesized
  source 1..22: mol_type = other DNA
cttttattctcttttcttttct

SEQ ID NO: 102739 - DNA, 22 bp, synthetic construct
  misc_feature 1..22: note = chemically synthesized
  source 1..22: mol_type = other DNA
ttattctcttttcttttctttc

SEQ ID NO: 102740 - DNA, 22 bp, synthetic construct
  misc_feature 1..22: note = chemically synthesized
  source 1..22: mol_type = other DNA
tattctcttttcttttctttcc

SEQ ID NO: 102741 - DNA, 22 bp, synthetic construct
  misc_feature 1..22: note = chemically synthesized
  source 1..22: mol_type = other DNA
attctcttttcttttctttcct

SEQ ID NO: 102742 - DNA, 22 bp, synthetic construct
  misc_feature 1..22: note = chemically synthesized
  source 1..22: mol_type = other DNA
ttctcttttcttttctttcctc

SEQ ID NO: 102743 - DNA, 22 bp, synthetic construct
  misc_feature 1..22: note = chemically synthesized
  source 1..22: mol_type = other DNA
tcttttcttttctttcctctct

SEQ ID NO: 102744 - DNA, 22 bp, synthetic construct
  misc_feature 1..22: note = chemically synthesized
  source 1..22: mol_type = other DNA
ttttcttttctttcctctcttt

SEQ ID NO: 102745 - DNA, 22 bp, synthetic construct
  misc_feature 1..22: note = chemically synthesized
  source 1..22: mol_type = other DNA
ttcttttctttcctctcttttg

SEQ ID NO: 102746 - DNA, 22 bp, synthetic construct
  misc_feature 1..22: note = chemically synthesized
  source 1..22: mol_type = other DNA
tcttttctttcctctcttttga

SEQ ID NO: 102747 - DNA, 22 bp, synthetic construct
  misc_feature 1..22: note = chemically synthesized
  source 1..22: mol_type = other DNA
cttttctttcctctcttttgag

SEQ ID NO: 102748 - DNA, 22 bp, synthetic construct
  misc_feature 1..22: note = chemically synthesized
  source 1..22: mol_type = other DNA
ttttctttcctctcttttgaga

SEQ ID NO: 102749 - DNA, 22 bp, synthetic construct
  misc_feature 1..22: note = chemically synthesized
  source 1..22: mol_type = other DNA
ttctttcctctcttttgagaca

SEQ ID NO: 102750 - DNA, 22 bp, synthetic construct
  misc_feature 1..22: note = chemically synthesized
  source 1..22: mol_type = other DNA
tctttcctctcttttgagacag

SEQ ID NO: 102751 - DNA, 22 bp, synthetic construct
  misc_feature 1..22: note = chemically synthesized
  source 1..22: mol_type = other DNA
ctttcctctcttttgagacagt

SEQ ID NO: 102752 - DNA, 22 bp, synthetic construct
  misc_feature 1..22: note = chemically synthesized
  source 1..22: mol_type = other DNA
tttcctctcttttgagacagtg

SEQ ID NO: 102753 - DNA, 22 bp, synthetic construct
  misc_feature 1..22: note = chemically synthesized
  source 1..22: mol_type = other DNA
tcctctcttttgagacagtgtc

SEQ ID NO: 102754 - DNA, 22 bp, synthetic construct
  misc_feature 1..22: note = chemically synthesized
  source 1..22: mol_type = other DNA
cctctcttttgagacagtgtct

SEQ ID NO: 102755 - DNA, 22 bp, synthetic construct
  misc_feature 1..22: note = chemically synthesized
  source 1..22: mol_type = other DNA
ctctcttttgagacagtgtctt

SEQ ID NO: 102756 - DNA, 22 bp, synthetic construct
  misc_feature 1..22: note = chemically synthesized
  source 1..22: mol_type = other DNA
tcttttgagacagtgtcttgct

SEQ ID NO: 102757 - DNA, 22 bp, synthetic construct
  misc_feature 1..22: note = chemically synthesized
  source 1..22: mol_type = other DNA
ttttgagacagtgtcttgctct

SEQ ID NO: 102758 - DNA, 22 bp, synthetic construct
  misc_feature 1..22: note = chemically synthesized
  source 1..22: mol_type = other DNA
ttgagacagtgtcttgctctgt

SEQ ID NO: 102759 - DNA, 22 bp, synthetic construct
  misc_feature 1..22: note = chemically synthesized
  source 1..22: mol_type = other DNA
tgagacagtgtcttgctctgtc

SEQ ID NO: 102760 - DNA, 22 bp, synthetic construct
  misc_feature 1..22: note = chemically synthesized
  source 1..22: mol_type = other DNA
gagacagtgtcttgctctgtca

SEQ ID NO: 102761 - DNA, 22 bp, synthetic construct
  misc_feature 1..22: note = chemically synthesized
  source 1..22: mol_type = other DNA
agacagtgtcttgctctgtcac

SEQ ID NO: 102762 - DNA, 22 bp, synthetic construct
  misc_feature 1..22: note = chemically synthesized
  source 1..22: mol_type = other DNA
gctctgtcacccaggagggagt

SEQ ID NO: 102763 - DNA, 22 bp, synthetic construct
  misc_feature 1..22: note = chemically synthesized
  source 1..22: mol_type = other DNA
ctctgtcacccaggagggagtg

SEQ ID NO: 102764 - DNA, 22 bp, synthetic construct
  misc_feature 1..22: note = chemically synthesized
  source 1..22: mol_type = other DNA
tgtcacccaggagggagtgcag

SEQ ID NO: 102765 - DNA, 22 bp, synthetic construct
  misc_feature 1..22: note = chemically synthesized
  source 1..22: mol_type = other DNA
tcacccaggagggagtgcagtg

SEQ ID NO: 102766 - DNA, 22 bp, synthetic construct
  misc_feature 1..22: note = chemically synthesized
  source 1..22: mol_type = other DNA
actgcagcctcaagcttttagg

SEQ ID NO: 102767 - DNA, 22 bp, synthetic construct
  misc_feature 1..22: note = chemically synthesized
  source 1..22: mol_type = other DNA
ctgcagcctcaagcttttaggc

SEQ ID NO: 102768 - DNA, 22 bp, synthetic construct
  misc_feature 1..22: note = chemically synthesized
  source 1..22: mol_type = other DNA
cagcctcaagcttttaggctta

SEQ ID NO: 102769 - DNA, 22 bp, synthetic construct
  misc_feature 1..22: note = chemically synthesized
  source 1..22: mol_type = other DNA
aagcttttaggcttaagtgatt

SEQ ID NO: 102770 - DNA, 22 bp, synthetic construct
  misc_feature 1..22: note = chemically synthesized
  source 1..22: mol_type = other DNA
ttaggcttaagtgatttttaca

SEQ ID NO: 102771 - DNA, 22 bp, synthetic construct
  misc_feature 1..22: note = chemically synthesized
  source 1..22: mol_type = other DNA
taggcttaagtgatttttacac

SEQ ID NO: 102772 - DNA, 22 bp, synthetic construct
  misc_feature 1..22: note = chemically synthesized
  source 1..22: mol_type = other DNA
aggcttaagtgatttttacacc

SEQ ID NO: 102773 - DNA, 22 bp, synthetic construct
  misc_feature 1..22: note = chemically synthesized
  source 1..22: mol_type = other DNA
ggcttaagtgatttttacacct

SEQ ID NO: 102774 - DNA, 22 bp, synthetic construct
  misc_feature 1..22: note = chemically synthesized
  source 1..22: mol_type = other DNA
aagtgatttttacacctcagcc

SEQ ID NO: 102775 - DNA, 22 bp, synthetic construct
  misc_feature 1..22: note = chemically synthesized
  source 1..22: mol_type = other DNA
agtgatttttacacctcagcct

SEQ ID NO: 102776 - DNA, 22 bp, synthetic construct
  misc_feature 1..22: note = chemically synthesized
  source 1..22: mol_type = other DNA
ttacacctcagcctcccaaata

SEQ ID NO: 102777 - DNA, 22 bp, synthetic construct
  misc_feature 1..22: note = chemically synthesized
  source 1..22: mol_type = other DNA
tacacctcagcctcccaaatag

SEQ ID NO: 102778 - DNA, 22 bp, synthetic construct
  misc_feature 1..22: note = chemically synthesized
  source 1..22: mol_type = other DNA
acacctcagcctcccaaatagc

SEQ ID NO: 102779 - DNA, 22 bp, synthetic construct
  misc_feature 1..22: note = chemically synthesized
  source 1..22: mol_type = other DNA
cacctcagcctcccaaatagct

SEQ ID NO: 102780 - DNA, 22 bp, synthetic construct
  misc_feature 1..22: note = chemically synthesized
  source 1..22: mol_type = other DNA
agcctcccaaatagctgtgacc

SEQ ID NO: 102781 - DNA, 22 bp, synthetic construct
  misc_feature 1..22: note = chemically synthesized
  source 1..22: mol_type = other DNA
ccaaatagctgtgaccacatga

SEQ ID NO: 102782 - DNA, 22 bp, synthetic construct
  misc_feature 1..22: note = chemically synthesized
  source 1..22: mol_type = other DNA
tgaccacatgagaagagacatt

SEQ ID NO: 102783 - DNA, 22 bp, synthetic construct
  misc_feature 1..22: note = chemically synthesized
  source 1..22: mol_type = other DNA
atgtgtttttttccttcttagt

SEQ ID NO: 102784 - DNA, 22 bp, synthetic construct
  misc_feature 1..22: note = chemically synthesized
  source 1..22: mol_type = other DNA
tgtgtttttttccttcttagta

SEQ ID NO: 102785 - DNA, 22 bp, synthetic construct
  misc_feature 1..22: note = chemically synthesized
  source 1..22: mol_type = other DNA
ttttccttcttagtactttggc

SEQ ID NO: 102786 - DNA, 22 bp, synthetic construct
  misc_feature 1..22: note = chemically synthesized
  source 1..22: mol_type = other DNA
tttccttcttagtactttggct

SEQ ID NO: 102787 - DNA, 22 bp, synthetic construct
  misc_feature 1..22: note = chemically synthesized
  source 1..22: mol_type = other DNA
ttccttcttagtactttggctg

SEQ ID NO: 102788 - DNA, 22 bp, synthetic construct
  misc_feature 1..22: note = chemically synthesized
  source 1..22: mol_type = other DNA
tccttcttagtactttggctgc

SEQ ID NO: 102789 - DNA, 22 bp, synthetic construct
  misc_feature 1..22: note = chemically synthesized
  source 1..22: mol_type = other DNA
ccttcttagtactttggctgca

SEQ ID NO: 102790 - DNA, 22 bp, synthetic construct
  misc_feature 1..22: note = chemically synthesized
  source 1..22: mol_type = other DNA
cttcttagtactttggctgcaa

SEQ ID NO: 102791 - DNA, 22 bp, synthetic construct
  misc_feature 1..22: note = chemically synthesized
  source 1..22: mol_type = other DNA
cttagtactttggctgcaagtg

SEQ ID NO: 102792 - DNA, 22 bp, synthetic construct
  misc_feature 1..22: note = chemically synthesized
  source 1..22: mol_type = other DNA
ttagtactttggctgcaagtga

SEQ ID NO: 102793 - DNA, 22 bp, synthetic construct
  misc_feature 1..22: note = chemically synthesized
  source 1..22: mol_type = other DNA
agtactttggctgcaagtgagt

SEQ ID NO: 102794 - DNA, 22 bp, synthetic construct
  misc_feature 1..22: note = chemically synthesized
  source 1..22: mol_type = other DNA
gtactttggctgcaagtgagtc

SEQ ID NO: 102795 - DNA, 22 bp, synthetic construct
  misc_feature 1..22: note = chemically synthesized
  source 1..22: mol_type = other DNA
tggctgcaagtgagtctcaagg

SEQ ID NO: 102796 - DNA, 22 bp, synthetic construct
  misc_feature 1..22: note = chemically synthesized
  source 1..22: mol_type = other DNA
ggctgcaagtgagtctcaaggt

SEQ ID NO: 102797 - DNA, 22 bp, synthetic construct
  misc_feature 1..22: note = chemically synthesized
  source 1..22: mol_type = other DNA
gctgcaagtgagtctcaaggta

SEQ ID NO: 102798 - DNA, 22 bp, synthetic construct
  misc_feature 1..22: note = chemically synthesized
  source 1..22: mol_type = other DNA
caagtgagtctcaaggtaagat

SEQ ID NO: 102799 - DNA, 22 bp, synthetic construct
  misc_feature 1..22: note = chemically synthesized
  source 1..22: mol_type = other DNA
aaggtaagatgttttaaccact

SEQ ID NO: 102800 - DNA, 22 bp, synthetic construct
  misc_feature 1..22: note = chemically synthesized
  source 1..22: mol_type = other DNA
taaccacttatggaacttatat

SEQ ID NO: 102801 - DNA, 22 bp, synthetic construct
  misc_feature 1..22: note = chemically synthesized
  source 1..22: mol_type = other DNA
aaccacttatggaacttatatt

SEQ ID NO: 102802 - DNA, 22 bp, synthetic construct
  misc_feature 1..22: note = chemically synthesized
  source 1..22: mol_type = other DNA
accacttatggaacttatattc

SEQ ID NO: 102803 - DNA, 22 bp, synthetic construct
  misc_feature 1..22: note = chemically synthesized
  source 1..22: mol_type = other DNA
atggaacttatattctcccatt

SEQ ID NO: 102804 - DNA, 22 bp, synthetic construct
  misc_feature 1..22: note = chemically synthesized
  source 1..22: mol_type = other DNA
tggaacttatattctcccattc

SEQ ID NO: 102805 - DNA, 22 bp, synthetic construct
  misc_feature 1..22: note = chemically synthesized
  source 1..22: mol_type = other DNA
atattctcccattccaatgaaa

SEQ ID NO: 102806 - DNA, 22 bp, synthetic construct
  misc_feature 1..22: note = chemically synthesized
  source 1..22: mol_type = other DNA
tattctcccattccaatgaaaa

SEQ ID NO: 102807 - DNA, 22 bp, synthetic construct
  misc_feature 1..22: note = chemically synthesized
  source 1..22: mol_type = other DNA
tcccattccaatgaaaagacta

SEQ ID NO: 102808 - DNA, 22 bp, synthetic construct
  misc_feature 1..22: note = chemically synthesized
  source 1..22: mol_type = other DNA
ccattccaatgaaaagactact

SEQ ID NO: 102809 - DNA, 22 bp, synthetic construct
  misc_feature 1..22: note = chemically synthesized
  source 1..22: mol_type = other DNA
caatgaaaagactactttgaaa

SEQ ID NO: 102810 - DNA, 22 bp, synthetic construct
  misc_feature 1..22: note = chemically synthesized
  source 1..22: mol_type = other DNA
ctttgaaaatgtttttgttgat

SEQ ID NO: 102811 - DNA, 22 bp, synthetic construct
  misc_feature 1..22: note = chemically synthesized
  source 1..22: mol_type = other DNA
tgaaaatgtttttgttgatgtc

SEQ ID NO: 102812 - DNA, 22 bp, synthetic construct
  misc_feature 1..22: note = chemically synthesized
  source 1..22: mol_type = other DNA
gaaaatgtttttgttgatgtct

SEQ ID NO: 102813 - DNA, 22 bp, synthetic construct
  misc_feature 1..22: note = chemically synthesized
  source 1..22: mol_type = other DNA
aaaatgtttttgttgatgtcta

SEQ ID NO: 102814 - DNA, 22 bp, synthetic construct
  misc_feature 1..22: note = chemically synthesized
  source 1..22: mol_type = other DNA
ttgttgatgtctaaatacacca

SEQ ID NO: 102815 - DNA, 22 bp, synthetic construct
  misc_feature 1..22: note = chemically synthesized
  source 1..22: mol_type = other DNA
tgttgatgtctaaatacaccaa

SEQ ID NO: 102816 - DNA, 22 bp, synthetic construct
  misc_feature 1..22: note = chemically synthesized
  source 1..22: mol_type = other DNA
gttgatgtctaaatacaccaag

SEQ ID NO: 102817 - DNA, 22 bp, synthetic construct
  misc_feature 1..22: note = chemically synthesized
  source 1..22: mol_type = other DNA
ttgatgtctaaatacaccaagt

SEQ ID NO: 102818 - DNA, 22 bp, synthetic construct
  misc_feature 1..22: note = chemically synthesized
  source 1..22: mol_type = other DNA
atgtctaaatacaccaagtcta

SEQ ID NO: 102819 - DNA, 22 bp, synthetic construct
  misc_feature 1..22: note = chemically synthesized
  source 1..22: mol_type = other DNA
aatacaccaagtctacaatttc

SEQ ID NO: 102820 - DNA, 22 bp, synthetic construct
  misc_feature 1..22: note = chemically synthesized
  source 1..22: mol_type = other DNA
caatttcctgtgatctatctat

SEQ ID NO: 102821 - DNA, 22 bp, synthetic construct
  misc_feature 1..22: note = chemically synthesized
  source 1..22: mol_type = other DNA
cctgtgatctatctatactact

SEQ ID NO: 102822 - DNA, 22 bp, synthetic construct
  misc_feature 1..22: note = chemically synthesized
  source 1..22: mol_type = other DNA
ctgtgatctatctatactacta

SEQ ID NO: 102823 - DNA, 22 bp, synthetic construct
  misc_feature 1..22: note = chemically synthesized
  source 1..22: mol_type = other DNA
tgatctatctatactactaaat

SEQ ID NO: 102824 - DNA, 22 bp, synthetic construct
  misc_feature 1..22: note = chemically synthesized
  source 1..22: mol_type = other DNA
tctatactactaaatagctaga

SEQ ID NO: 102825 - DNA, 22 bp, synthetic construct
  misc_feature 1..22: note = chemically synthesized
  source 1..22: mol_type = other DNA
tactactaaatagctagaccaa

SEQ ID NO: 102826 - DNA, 22 bp, synthetic construct
  misc_feature 1..22: note = chemically synthesized
  source 1..22: mol_type = other DNA
ctaaatagctagaccaatacat

SEQ ID NO: 102827 - DNA, 22 bp, synthetic construct
  misc_feature 1..22: note = chemically synthesized
  source 1..22: mol_type = other DNA
aatagctagaccaatacatgaa

SEQ ID NO: 102828 - DNA, 22 bp, synthetic construct
  misc_feature 1..22: note = chemically synthesized
  source 1..22: mol_type = other DNA
gaccaatacatgaaaagaaact

SEQ ID NO: 102829 - DNA, 22 bp, synthetic construct
  misc_feature 1..22: note = chemically synthesized
  source 1..22: mol_type = other DNA
ttattctcaataaagaactgta

SEQ ID NO: 102830 - DNA, 22 bp, synthetic construct
  misc_feature 1..22: note = chemically synthesized
  source 1..22: mol_type = other DNA
attctcaataaagaactgtacc

SEQ ID NO: 102831 - DNA, 22 bp, synthetic construct
  misc_feature 1..22: note = chemically synthesized
  source 1..22: mol_type = other DNA
ttctcaataaagaactgtaccc

SEQ ID NO: 102832 - DNA, 22 bp, synthetic construct
  misc_feature 1..22: note = chemically synthesized
  source 1..22: mol_type = other DNA
tcaataaagaactgtaccccaa

SEQ ID NO: 102833 - DNA, 22 bp, synthetic construct
  misc_feature 1..22: note = chemically synthesized
  source 1..22: mol_type = other DNA
aataaagaactgtaccccaaca

SEQ ID NO: 102834 - DNA, 22 bp, synthetic construct
  misc_feature 1..22: note = chemically synthesized
  source 1..22: mol_type = other DNA
taccccaacaataatatatcag

SEQ ID NO: 102835 - DNA, 22 bp, synthetic construct
  misc_feature 1..22: note = chemically synthesized
  source 1..22: mol_type = other DNA
tatgtcttttttatcttctttg

SEQ ID NO: 102836 - DNA, 22 bp, synthetic construct
  misc_feature 1..22: note = chemically synthesized
  source 1..22: mol_type = other DNA
ttttatcttctttgtgtcttat

SEQ ID NO: 102837 - DNA, 22 bp, synthetic construct
  misc_feature 1..22: note = chemically synthesized
  source 1..22: mol_type = other DNA
tttatcttctttgtgtcttatc

SEQ ID NO: 102838 - DNA, 22 bp, synthetic construct
  misc_feature 1..22: note = chemically synthesized
  source 1..22: mol_type = other DNA
ttatcttctttgtgtcttatca

SEQ ID NO: 102839 - DNA, 22 bp, synthetic construct
  misc_feature 1..22: note = chemically synthesized
  source 1..22: mol_type = other DNA
tatcttctttgtgtcttatcag

SEQ ID NO: 102840 - DNA, 22 bp, synthetic construct
  misc_feature 1..22: note = chemically synthesized
  source 1..22: mol_type = other DNA
atcttctttgtgtcttatcagt

SEQ ID NO: 102841 - DNA, 22 bp, synthetic construct
  misc_feature 1..22: note = chemically synthesized
  source 1..22: mol_type = other DNA
tcttctttgtgtcttatcagtt

SEQ ID NO: 102842 - DNA, 22 bp, synthetic construct
  misc_feature 1..22: note = chemically synthesized
  source 1..22: mol_type = other DNA
ctttgtgtcttatcagttatgt

SEQ ID NO: 102843 - DNA, 22 bp, synthetic construct
  misc_feature 1..22: note = chemically synthesized
  source 1..22: mol_type = other DNA
tttgtgtcttatcagttatgtt

SEQ ID NO: 102844 - DNA, 22 bp, synthetic construct
  misc_feature 1..22: note = chemically synthesized
  source 1..22: mol_type = other DNA
tgtgtcttatcagttatgttac

SEQ ID NO: 102845 - DNA, 22 bp, synthetic construct
  misc_feature 1..22: note = chemically synthesized
  source 1..22: mol_type = other DNA
gtgtcttatcagttatgttacc

SEQ ID NO: 102846 - DNA, 22 bp, synthetic construct
  misc_feature 1..22: note = chemically synthesized
  source 1..22: mol_type = other DNA
tgtcttatcagttatgttacca

SEQ ID NO: 102847 - DNA, 22 bp, synthetic construct
  misc_feature 1..22: note = chemically synthesized
  source 1..22: mol_type = other DNA
atcagttatgttaccatatagg

SEQ ID NO: 102848 - DNA, 22 bp, synthetic construct
  misc_feature 1..22: note = chemically synthesized
  source 1..22: mol_type = other DNA
tcagttatgttaccatatagga

SEQ ID NO: 102849 - DNA, 22 bp, synthetic construct
  misc_feature 1..22: note = chemically synthesized
  source 1..22: mol_type = other DNA
tgttaccatataggaagagaaa

SEQ ID NO: 102850 - DNA, 22 bp, synthetic construct
  misc_feature 1..22: note = chemically synthesized
  source 1..22: mol_type = other DNA
ccatataggaagagaaagaaaa

SEQ ID NO: 102851 - DNA, 22 bp, synthetic construct
  misc_feature 1..22: note = chemically synthesized
  source 1..22: mol_type = other DNA
taagtgaaatcactgtgtacca

SEQ ID NO: 102852 - DNA, 22 bp, synthetic construct
  misc_feature 1..22: note = chemically synthesized
  source 1..22: mol_type = other DNA
tgtaccatctcacatctatgca

SEQ ID NO: 102853 - DNA, 22 bp, synthetic construct
  misc_feature 1..22: note = chemically synthesized
  source 1..22: mol_type = other DNA
acatctatgcaaggcaaatagg

SEQ ID NO: 102854 - DNA, 22 bp, synthetic construct
  misc_feature 1..22: note = chemically synthesized
  source 1..22: mol_type = other DNA
tgcaaggcaaataggactaata

SEQ ID NO: 102855 - DNA, 22 bp, synthetic construct
  misc_feature 1..22: note = chemically synthesized
  source 1..22: mol_type = other DNA
atagtacagggacaaggctgaa

SEQ ID NO: 102856 - DNA, 22 bp, synthetic construct
  misc_feature 1..22: note = chemically synthesized
  source 1..22: mol_type = other DNA
aaaggagacattttaaggttga

SEQ ID NO: 102857 - DNA, 22 bp, synthetic construct
  misc_feature 1..22: note = chemically synthesized
  source 1..22: mol_type = other DNA
taaggttgaaggtatgcagtaa

SEQ ID NO: 102858 - DNA, 22 bp, synthetic construct
  misc_feature 1..22: note = chemically synthesized
  source 1..22: mol_type = other DNA
aaggttgaaggtatgcagtaaa

SEQ ID NO: 102859 - DNA, 22 bp, synthetic construct
  misc_feature 1..22: note = chemically synthesized
  source 1..22: mol_type = other DNA
aggttgaaggtatgcagtaaaa

SEQ ID NO: 102860 - DNA, 22 bp, synthetic construct
  misc_feature 1..22: note = chemically synthesized
  source 1..22: mol_type = other DNA
aaggtatgcagtaaaacttgtt

SEQ ID NO: 102861 - DNA, 22 bp, synthetic construct
  misc_feature 1..22: note = chemically synthesized
  source 1..22: mol_type = other DNA
gttttctggagattacgttgaa

SEQ ID NO: 102862 - DNA, 22 bp, synthetic construct
  misc_feature 1..22: note = chemically synthesized
  source 1..22: mol_type = other DNA
ttttctggagattacgttgaaa

SEQ ID NO: 102863 - DNA, 22 bp, synthetic construct
  misc_feature 1..22: note = chemically synthesized
  source 1..22: mol_type = other DNA
tctggagattacgttgaaagaa

SEQ ID NO: 102864 - DNA, 22 bp, synthetic construct
  misc_feature 1..22: note = chemically synthesized
  source 1..22: mol_type = other DNA
ctggagattacgttgaaagaag

SEQ ID NO: 102865 - DNA, 22 bp, synthetic construct
  misc_feature 1..22: note = chemically synthesized
  source 1..22: mol_type = other DNA
tggagattacgttgaaagaagt

SEQ ID NO: 102866 - DNA, 22 bp, synthetic construct
  misc_feature 1..22: note = chemically synthesized
  source 1..22: mol_type = other DNA
gagattacgttgaaagaagtta

SEQ ID NO: 102867 - DNA, 22 bp, synthetic construct
  misc_feature 1..22: note = chemically synthesized
  source 1..22: mol_type = other DNA
cgttgaaagaagttacagtcag

SEQ ID NO: 102868 - DNA, 22 bp, synthetic construct
  misc_feature 1..22: note = chemically synthesized
  source 1..22: mol_type = other DNA
aaagaagttacagtcagtcaat

SEQ ID NO: 102869 - DNA, 22 bp, synthetic construct
  misc_feature 1..22: note = chemically synthesized
  source 1..22: mol_type = other DNA
cagtcagtcaatctaatgaggt

SEQ ID NO: 102870 - DNA, 22 bp, synthetic construct
  misc_feature 1..22: note = chemically synthesized
  source 1..22: mol_type = other DNA
atgaggttgtagaagatgaaac

SEQ ID NO: 102871 - DNA, 22 bp, synthetic construct
  misc_feature 1..22: note = chemically synthesized
  source 1..22: mol_type = other DNA
tagaagatgaaacaactaagct

SEQ ID NO: 102872 - DNA, 22 bp, synthetic construct
  misc_feature 1..22: note = chemically synthesized
  source 1..22: mol_type = other DNA
agctggtgctcctggtaatgac

SEQ ID NO: 102873 - DNA, 22 bp, synthetic construct
  misc_feature 1..22: note = chemically synthesized
  source 1..22: mol_type = other DNA
gtgctcctggtaatgacttgat

SEQ ID NO: 102874 - DNA, 22 bp, synthetic construct
  misc_feature 1..22: note = chemically synthesized
  source 1..22: mol_type = other DNA
ctggtaatgacttgatacctgc

SEQ ID NO: 102875 - DNA, 22 bp, synthetic construct
  misc_feature 1..22: note = chemically synthesized
  source 1..22: mol_type = other DNA
gtaatgacttgatacctgcgaa

SEQ ID NO: 102876 - DNA, 22 bp, synthetic construct
  misc_feature 1..22: note = chemically synthesized
  source 1..22: mol_type = other DNA
gatacctgcgaagtgtctaaat

SEQ ID NO: 102877 - DNA, 22 bp, synthetic construct
  misc_feature 1..22: note = chemically synthesized
  source 1..22: mol_type = other DNA
atacctgcgaagtgtctaaata

SEQ ID NO: 102878 - DNA, 22 bp, synthetic construct
  misc_feature 1..22: note = chemically synthesized
  source 1..22: mol_type = other DNA
cgaagtgtctaaatatgtatag

SEQ ID NO: 102879 - DNA, 22 bp, synthetic construct
  misc_feature 1..22: note = chemically synthesized
  source 1..22: mol_type = other DNA
aatatgtatagaggagttgata

SEQ ID NO: 102880 - DNA, 22 bp, synthetic construct
  misc_feature 1..22: note = chemically synthesized
  source 1..22: mol_type = other DNA
ataatatagaccaattgcactt

SEQ ID NO: 102881 - DNA, 22 bp, synthetic construct
  misc_feature 1..22: note = chemically synthesized
  source 1..22: mol_type = other DNA
cactttgggcccctgctgagta

SEQ ID NO: 102882 - DNA, 22 bp, synthetic construct
  misc_feature 1..22: note = chemically synthesized
  source 1..22: mol_type = other DNA
tgggcccctgctgagtaagatt

SEQ ID NO: 102883 - DNA, 22 bp, synthetic construct
  misc_feature 1..22: note = chemically synthesized
  source 1..22: mol_type = other DNA
gggcccctgctgagtaagattt

SEQ ID NO: 102884 - DNA, 22 bp, synthetic construct
  misc_feature 1..22: note = chemically synthesized
  source 1..22: mol_type = other DNA
ggcccctgctgagtaagatttt

SEQ ID NO: 102885 - DNA, 22 bp, synthetic construct
  misc_feature 1..22: note = chemically synthesized
  source 1..22: mol_type = other DNA
ctgagtaagattttgtgtcaac

SEQ ID NO: 102886 - DNA, 22 bp, synthetic construct
  misc_feature 1..22: note = chemically synthesized
  source 1..22: mol_type = other DNA
agtaagattttgtgtcaactaa

SEQ ID NO: 102887 - DNA, 22 bp, synthetic construct
  misc_feature 1..22: note = chemically synthesized
  source 1..22: mol_type = other DNA
tgtgtcaactaaacaaaacgat

SEQ ID NO: 102888 - DNA, 22 bp, synthetic construct
  misc_feature 1..22: note = chemically synthesized
  source 1..22: mol_type = other DNA
gtgtcaactaaacaaaacgata

SEQ ID NO: 102889 - DNA, 22 bp, synthetic construct
  misc_feature 1..22: note = chemically synthesized
  source 1..22: mol_type = other DNA
tgtcaactaaacaaaacgatag

SEQ ID NO: 102890 - DNA, 22 bp, synthetic construct
  misc_feature 1..22: note = chemically synthesized
  source 1..22: mol_type = other DNA
aacaaaacgataggaaattgta

SEQ ID NO: 102891 - DNA, 22 bp, synthetic construct
  misc_feature 1..22: note = chemically synthesized
  source 1..22: mol_type = other DNA
tatttccccaaagacattttgg

SEQ ID NO: 102892 - DNA, 22 bp, synthetic construct
  misc_feature 1..22: note = chemically synthesized
  source 1..22: mol_type = other DNA
ccccaaagacattttggaaacg

SEQ ID NO: 102893 - DNA, 22 bp, synthetic construct
  misc_feature 1..22: note = chemically synthesized
  source 1..22: mol_type = other DNA
cccaaagacattttggaaacgt

SEQ ID NO: 102894 - DNA, 22 bp, synthetic construct
  misc_feature 1..22: note = chemically synthesized
  source 1..22: mol_type = other DNA
tggaaacgttctccttcagcac

SEQ ID NO: 102895 - DNA, 22 bp, synthetic construct
  misc_feature 1..22: note = chemically synthesized
  source 1..22: mol_type = other DNA
ggaaacgttctccttcagcacc

SEQ ID NO: 102896 - DNA, 22 bp, synthetic construct
  misc_feature 1..22: note = chemically synthesized
  source 1..22: mol_type = other DNA
gaaacgttctccttcagcacca

SEQ ID NO: 102897 - DNA, 22 bp, synthetic construct
  misc_feature 1..22: note = chemically synthesized
  source 1..22: mol_type = other DNA
tccttcagcaccaatggtagca

SEQ ID NO: 102898 - DNA, 22 bp, synthetic construct
  misc_feature 1..22: note = chemically synthesized
  source 1..22: mol_type = other DNA
cttcagcaccaatggtagcacc

SEQ ID NO: 102899 - DNA, 22 bp, synthetic construct
  misc_feature 1..22: note = chemically synthesized
  source 1..22: mol_type = other DNA
cagcaccaatggtagcacctgg

SEQ ID NO: 102900 - DNA, 22 bp, synthetic construct
  misc_feature 1..22: note = chemically synthesized
  source 1..22: mol_type = other DNA
agcaccaatggtagcacctgga

SEQ ID NO: 102901 - DNA, 22 bp, synthetic construct
  misc_feature 1..22: note = chemically synthesized
  source 1..22: mol_type = other DNA
gaactgaccatccaacttccaa

SEQ ID NO: 102902 - DNA, 22 bp, synthetic construct
  misc_feature 1..22: note = chemically synthesized
  source 1..22: mol_type = other DNA
accatccaacttccaagccaaa

SEQ ID NO: 102903 - DNA, 22 bp, synthetic construct
  misc_feature 1..22: note = chemically synthesized
  source 1..22: mol_type = other DNA
ccaagccaaacaacttcaccca

SEQ ID NO: 102904 - DNA, 22 bp, synthetic construct
  misc_feature 1..22: note = chemically synthesized
  source 1..22: mol_type = other DNA
caagccaaacaacttcacccat

SEQ ID NO: 102905 - DNA, 22 bp, synthetic construct
  misc_feature 1..22: note = chemically synthesized
  source 1..22: mol_type = other DNA
cacccataaatctacattcctc

SEQ ID NO: 102906 - DNA, 22 bp, synthetic construct
  misc_feature 1..22: note = chemically synthesized
  source 1..22: mol_type = other DNA
acccataaatctacattcctcc

SEQ ID NO: 102907 - DNA, 22 bp, synthetic construct
  misc_feature 1..22: note = chemically synthesized
  source 1..22: mol_type = other DNA
cattcctccaatctctttcctc

SEQ ID NO: 102908 - DNA, 22 bp, synthetic construct
  misc_feature 1..22: note = chemically synthesized
  source 1..22: mol_type = other DNA
ctccaatctctttcctccatca

SEQ ID NO: 102909 - DNA, 22 bp, synthetic construct
  misc_feature 1..22: note = chemically synthesized
  source 1..22: mol_type = other DNA
caatctctttcctccatcatgg

SEQ ID NO: 102910 - DNA, 22 bp, synthetic construct
  misc_feature 1..22: note = chemically synthesized
  source 1..22: mol_type = other DNA
tttcctccatcatggaaacagc

SEQ ID NO: 102911 - DNA, 22 bp, synthetic construct
  misc_feature 1..22: note = chemically synthesized
  source 1..22: mol_type = other DNA
tcctccatcatggaaacagccc

SEQ ID NO: 102912 - DNA, 22 bp, synthetic construct
  misc_feature 1..22: note = chemically synthesized
  source 1..22: mol_type = other DNA
cctccatcatggaaacagccct

SEQ ID NO: 102913 - DNA, 22 bp, synthetic construct
  misc_feature 1..22: note = chemically synthesized
  source 1..22: mol_type = other DNA
ctccatcatggaaacagccctg

SEQ ID NO: 102914 - DNA, 22 bp, synthetic construct
  misc_feature 1..22: note = chemically synthesized
  source 1..22: mol_type = other DNA
catcatggaaacagccctgcat

SEQ ID NO: 102915 - DNA, 22 bp, synthetic construct
  misc_feature 1..22: note = chemically synthesized
  source 1..22: mol_type = other DNA
catattcaaaagtgagtgtccc

SEQ ID NO: 102916 - DNA, 22 bp, synthetic construct
  misc_feature 1..22: note = chemically synthesized
  source 1..22: mol_type = other DNA
aaaagtgagtgtccctctctta

SEQ ID NO: 102917 - DNA, 22 bp, synthetic construct
  misc_feature 1..22: note = chemically synthesized
  source 1..22: mol_type = other DNA
tcttatacctcgtcagagagat

SEQ ID NO: 102918 - DNA, 22 bp, synthetic construct
  misc_feature 1..22: note = chemically synthesized
  source 1..22: mol_type = other DNA
ttatacctcgtcagagagattc

SEQ ID NO: 102919 - DNA, 22 bp, synthetic construct
  misc_feature 1..22: note = chemically synthesized
  source 1..22: mol_type = other DNA
atacctcgtcagagagattcaa

SEQ ID NO: 102920 - DNA, 22 bp, synthetic construct
  misc_feature 1..22: note = chemically synthesized
  source 1..22: mol_type = other DNA
tacctcgtcagagagattcaaa

SEQ ID NO: 102921 - DNA, 22 bp, synthetic construct
  misc_feature 1..22: note = chemically synthesized
  source 1..22: mol_type = other DNA
gtcagagagattcaaatattgt

SEQ ID NO: 102922 - DNA, 22 bp, synthetic construct
  misc_feature 1..22: note = chemically synthesized
  source 1..22: mol_type = other DNA
aaatattgtcatattcacaatc

SEQ ID NO: 102923 - DNA, 22 bp, synthetic construct
  misc_feature 1..22: note = chemically synthesized
  source 1..22: mol_type = other DNA
tcatattcacaatccacaacag

SEQ ID NO: 102924 - DNA, 22 bp, synthetic construct
  misc_feature 1..22: note = chemically synthesized
  source 1..22: mol_type = other DNA
acaatccacaacaggcccagat

SEQ ID NO: 102925 - DNA, 22 bp, synthetic construct
  misc_feature 1..22: note = chemically synthesized
  source 1..22: mol_type = other DNA
agtgatgctggtcatcactgaa

SEQ ID NO: 102926 - DNA, 22 bp, synthetic construct
  misc_feature 1..22: note = chemically synthesized
  source 1..22: mol_type = other DNA
gtcatcactgaagatagattga

SEQ ID NO: 102927 - DNA, 22 bp, synthetic construct
  misc_feature 1..22: note = chemically synthesized
  source 1..22: mol_type = other DNA
aagatagattgaatcttccttt

SEQ ID NO: 102928 - DNA, 22 bp, synthetic construct
  misc_feature 1..22: note = chemically synthesized
  source 1..22: mol_type = other DNA
aatcttcctttcttcttggacg

SEQ ID NO: 102929 - DNA, 22 bp, synthetic construct
  misc_feature 1..22: note = chemically synthesized
  source 1..22: mol_type = other DNA
cctttcttcttggacgtaaatt

SEQ ID NO: 102930 - DNA, 22 bp, synthetic construct
  misc_feature 1..22: note = chemically synthesized
  source 1..22: mol_type = other DNA
ctttcttcttggacgtaaattg

SEQ ID NO: 102931 - DNA, 22 bp, synthetic construct
  misc_feature 1..22: note = chemically synthesized
  source 1..22: mol_type = other DNA
tcttcttggacgtaaattgcag

SEQ ID NO: 102932 - DNA, 22 bp, synthetic construct
  misc_feature 1..22: note = chemically synthesized
  source 1..22: mol_type = other DNA
cttcttggacgtaaattgcagg

SEQ ID NO: 102933 - DNA, 22 bp, synthetic construct
  misc_feature 1..22: note = chemically synthesized
  source 1..22: mol_type = other DNA
ttcttggacgtaaattgcaggt

SEQ ID NO: 102934 - DNA, 22 bp, synthetic construct
  misc_feature 1..22: note = chemically synthesized
  source 1..22: mol_type = other DNA
cttggacgtaaattgcaggtta

SEQ ID NO: 102935 - DNA, 22 bp, synthetic construct
  misc_feature 1..22: note = chemically synthesized
  source 1..22: mol_type = other DNA
ttggacgtaaattgcaggttat

SEQ ID NO: 102936 - DNA, 22 bp, synthetic construct
  misc_feature 1..22: note = chemically synthesized
  source 1..22: mol_type = other DNA
ggacgtaaattgcaggttattg

SEQ ID NO: 102937 - DNA, 22 bp, synthetic construct
  misc_feature 1..22: note = chemically synthesized
  source 1..22: mol_type = other DNA
gacgtaaattgcaggttattga

SEQ ID NO: 102938 - DNA, 22 bp, synthetic construct
  misc_feature 1..22: note = chemically synthesized
  source 1..22: mol_type = other DNA
caggttattgaaaaaactataa

SEQ ID NO: 102939 - DNA, 22 bp, synthetic construct
  misc_feature 1..22: note = chemically synthesized
  source 1..22: mol_type = other DNA
ttgaaaaaactataacttgaag

SEQ ID NO: 102940 - DNA, 22 bp, synthetic construct
  misc_feature 1..22: note = chemically synthesized
  source 1..22: mol_type = other DNA
aaaaaactataacttgaagttt

SEQ ID NO: 102941 - DNA, 22 bp, synthetic construct
  misc_feature 1..22: note = chemically synthesized
  source 1..22: mol_type = other DNA
taacttgaagtttcatagcaga

SEQ ID NO: 102942 - DNA, 22 bp, synthetic construct
  misc_feature 1..22: note = chemically synthesized
  source 1..22: mol_type = other DNA
gaagtttcatagcagaaagttg

SEQ ID NO: 102943 - DNA, 22 bp, synthetic construct
  misc_feature 1..22: note = chemically synthesized
  source 1..22: mol_type = other DNA
aagtttcatagcagaaagttgg

SEQ ID NO: 102944 - DNA, 22 bp, synthetic construct
  misc_feature 1..22: note = chemically synthesized
  source 1..22: mol_type = other DNA
catagcagaaagttggcatctt

SEQ ID NO: 102945 - DNA, 22 bp, synthetic construct
  misc_feature 1..22: note = chemically synthesized
  source 1..22: mol_type = other DNA
atagcagaaagttggcatcttt

SEQ ID NO: 102946 - DNA, 22 bp, synthetic construct
  misc_feature 1..22: note = chemically synthesized
  source 1..22: mol_type = other DNA
gcatctttctcactaagcatga

SEQ ID NO: 102947 - DNA, 22 bp, synthetic construct
  misc_feature 1..22: note = chemically synthesized
  source 1..22: mol_type = other DNA
tctcactaagcatgagaaaaac

SEQ ID NO: 102948 - DNA, 22 bp, synthetic construct
  misc_feature 1..22: note = chemically synthesized
  source 1..22: mol_type = other DNA
ctcactaagcatgagaaaaact

SEQ ID NO: 102949 - DNA, 22 bp, synthetic construct
  misc_feature 1..22: note = chemically synthesized
  source 1..22: mol_type = other DNA
tcactaagcatgagaaaaacta

SEQ ID NO: 102950 - DNA, 22 bp, synthetic construct
  misc_feature 1..22: note = chemically synthesized
  source 1..22: mol_type = other DNA
actaagcatgagaaaaactaac

SEQ ID NO: 102951 - DNA, 22 bp, synthetic construct
  misc_feature 1..22: note = chemically synthesized
  source 1..22: mol_type = other DNA
agcatgagaaaaactaacagag

SEQ ID NO: 102952 - DNA, 22 bp, synthetic construct
  misc_feature 1..22: note = chemically synthesized
  source 1..22: mol_type = other DNA
acagagttttaatttgaagggc

SEQ ID NO: 102953 - DNA, 22 bp, synthetic construct
  misc_feature 1..22: note = chemically synthesized
  source 1..22: mol_type = other DNA
taatttgaagggccttagccaa

SEQ ID NO: 102954 - DNA, 22 bp, synthetic construct
  misc_feature 1..22: note = chemically synthesized
  source 1..22: mol_type = other DNA
aatttgaagggccttagccaac

SEQ ID NO: 102955 - DNA, 22 bp, synthetic construct
  misc_feature 1..22: note = chemically synthesized
  source 1..22: mol_type = other DNA
atttgaagggccttagccaact

SEQ ID NO: 102956 - DNA, 22 bp, synthetic construct
  misc_feature 1..22: note = chemically synthesized
  source 1..22: mol_type = other DNA
gaagggccttagccaacttagc

SEQ ID NO: 102957 - DNA, 22 bp, synthetic construct
  misc_feature 1..22: note = chemically synthesized
  source 1..22: mol_type = other DNA
aagggccttagccaacttagct

SEQ ID NO: 102958 - DNA, 22 bp, synthetic construct
  misc_feature 1..22: note = chemically synthesized
  source 1..22: mol_type = other DNA
agccaacttagctgaagtccct

SEQ ID NO: 102959 - DNA, 22 bp, synthetic construct
  misc_feature 1..22: note = chemically synthesized
  source 1..22: mol_type = other DNA
gccaacttagctgaagtccctt

SEQ ID NO: 102960 - DNA, 22 bp, synthetic construct
  misc_feature 1..22: note = chemically synthesized
  source 1..22: mol_type = other DNA
agctgaagtcccttccacctaa

SEQ ID NO: 102961 - DNA, 22 bp, synthetic construct
  misc_feature 1..22: note = chemically synthesized
  source 1..22: mol_type = other DNA
gctgaagtcccttccacctaag

SEQ ID NO: 102962 - DNA, 22 bp, synthetic construct
  misc_feature 1..22: note = chemically synthesized
  source 1..22: mol_type = other DNA
aagtcccttccacctaagataa

SEQ ID NO: 102963 - DNA, 22 bp, synthetic construct
  misc_feature 1..22: note = chemically synthesized
  source 1..22: mol_type = other DNA
ccacctaagataaagctgtaaa

SEQ ID NO: 102964 - DNA, 22 bp, synthetic construct
  misc_feature 1..22: note = chemically synthesized
  source 1..22: mol_type = other DNA
cacctaagataaagctgtaaaa

SEQ ID NO: 102965 - DNA, 22 bp, synthetic construct
  misc_feature 1..22: note = chemically synthesized
  source 1..22: mol_type = other DNA
agataaagctgtaaaagaggag

SEQ ID NO: 102966 - DNA, 22 bp, synthetic construct
  misc_feature 1..22: note = chemically synthesized
  source 1..22: mol_type = other DNA
taaaagaggagcagatgtataa

SEQ ID NO: 102967 - DNA, 22 bp, synthetic construct
  misc_feature 1..22: note = chemically synthesized
  source 1..22: mol_type = other DNA
agatattggagcagcatgcagt

SEQ ID NO: 102968 - DNA, 22 bp, synthetic construct
  misc_feature 1..22: note = chemically synthesized
  source 1..22: mol_type = other DNA
gatattggagcagcatgcagta

SEQ ID NO: 102969 - DNA, 22 bp, synthetic construct
  misc_feature 1..22: note = chemically synthesized
  source 1..22: mol_type = other DNA
gagcagcatgcagtatcaaaat

SEQ ID NO: 102970 - DNA, 22 bp, synthetic construct
  misc_feature 1..22: note = chemically synthesized
  source 1..22: mol_type = other DNA
atgagcaccaaagaagccatat

SEQ ID NO: 102971 - DNA, 22 bp, synthetic construct
  misc_feature 1..22: note = chemically synthesized
  source 1..22: mol_type = other DNA
ttcacagtttctattcttccaa

SEQ ID NO: 102972 - DNA, 22 bp, synthetic construct
  misc_feature 1..22: note = chemically synthesized
  source 1..22: mol_type = other DNA
tcacagtttctattcttccaaa

SEQ ID NO: 102973 - DNA, 22 bp, synthetic construct
  misc_feature 1..22: note = chemically synthesized
  source 1..22: mol_type = other DNA
cacagtttctattcttccaaaa

SEQ ID NO: 102974 - DNA, 22 bp, synthetic construct
  misc_feature 1..22: note = chemically synthesized
  source 1..22: mol_type = other DNA
acagtttctattcttccaaaat

SEQ ID NO: 102975 - DNA, 22 bp, synthetic construct
  misc_feature 1..22: note = chemically synthesized
  source 1..22: mol_type = other DNA
ctattcttccaaaataacttac

SEQ ID NO: 102976 - DNA, 22 bp, synthetic construct
  misc_feature 1..22: note = chemically synthesized
  source 1..22: mol_type = other DNA
tattcttccaaaataacttaca

SEQ ID NO: 102977 - DNA, 22 bp, synthetic construct
  misc_feature 1..22: note = chemically synthesized
  source 1..22: mol_type = other DNA
ttcttccaaaataacttacaaa

SEQ ID NO: 102978 - DNA, 22 bp, synthetic construct
  misc_feature 1..22: note = chemically synthesized
  source 1..22: mol_type = other DNA
ttccaaaataacttacaaagac

SEQ ID NO: 102979 - DNA, 22 bp, synthetic construct
  misc_feature 1..22: note = chemically synthesized
  source 1..22: mol_type = other DNA
ccaaaataacttacaaagacag

SEQ ID NO: 102980 - DNA, 22 bp, synthetic construct
  misc_feature 1..22: note = chemically synthesized
  source 1..22: mol_type = other DNA
caaaataacttacaaagacagt

SEQ ID NO: 102981 - DNA, 22 bp, synthetic construct
  misc_feature 1..22: note = chemically synthesized
  source 1..22: mol_type = other DNA
acaaagacagtctttcctctgt

SEQ ID NO: 102982 - DNA, 22 bp, synthetic construct
  misc_feature 1..22: note = chemically synthesized
  source 1..22: mol_type = other DNA
caaagacagtctttcctctgtc

SEQ ID NO: 102983 - DNA, 22 bp, synthetic construct
  misc_feature 1..22: note = chemically synthesized
  source 1..22: mol_type = other DNA
tcctctgtcataagaacctgca

SEQ ID NO: 102984 - DNA, 22 bp, synthetic construct
  misc_feature 1..22: note = chemically synthesized
  source 1..22: mol_type = other DNA
cctctgtcataagaacctgcac

SEQ ID NO: 102985 - DNA, 22 bp, synthetic construct
  misc_feature 1..22: note = chemically synthesized
  source 1..22: mol_type = other DNA
ctctgtcataagaacctgcacc

SEQ ID NO: 102986 - DNA, 22 bp, synthetic construct
  misc_feature 1..22: note = chemically synthesized
  source 1..22: mol_type = other DNA
tgtcataagaacctgcacccag

SEQ ID NO: 102987 - DNA, 22 bp, synthetic construct
  misc_feature 1..22: note = chemically synthesized
  source 1..22: mol_type = other DNA
tcataagaacctgcacccaggt

SEQ ID NO: 102988 - DNA, 22 bp, synthetic construct
  misc_feature 1..22: note = chemically synthesized
  source 1..22: mol_type = other DNA
cacccaggtcagcaaatcaaga

SEQ ID NO: 102989 - DNA, 22 bp, synthetic construct
  misc_feature 1..22: note = chemically synthesized
  source 1..22: mol_type = other DNA
aaatttcctaccaacacactaa

SEQ ID NO: 102990 - DNA, 22 bp, synthetic construct
  misc_feature 1..22: note = chemically synthesized
  source 1..22: mol_type = other DNA
cctaccaacacactaataaaca

SEQ ID NO: 102991 - DNA, 22 bp, synthetic construct
  misc_feature 1..22: note = chemically synthesized
  source 1..22: mol_type = other DNA
ctaccaacacactaataaacat

SEQ ID NO: 102992 - DNA, 22 bp, synthetic construct
  misc_feature 1..22: note = chemically synthesized
  source 1..22: mol_type = other DNA
ccaacacactaataaacattag

SEQ ID NO: 102993 - DNA, 22 bp, synthetic construct
  misc_feature 1..22: note = chemically synthesized
  source 1..22: mol_type = other DNA
ataaacattaggaacttactgg

SEQ ID NO: 102994 - DNA, 22 bp, synthetic construct
  misc_feature 1..22: note = chemically synthesized
  source 1..22: mol_type = other DNA
ggaacttactgggcacattatg

SEQ ID NO: 102995 - DNA, 22 bp, synthetic construct
  misc_feature 1..22: note = chemically synthesized
  source 1..22: mol_type = other DNA
actgggcacattatgagaaaca

SEQ ID NO: 102996 - DNA, 22 bp, synthetic construct
  misc_feature 1..22: note = chemically synthesized
  source 1..22: mol_type = other DNA
ctgggcacattatgagaaacag

SEQ ID NO: 102997 - DNA, 22 bp, synthetic construct
  misc_feature 1..22: note = chemically synthesized
  source 1..22: mol_type = other DNA
ggcacattatgagaaacagagg

SEQ ID NO: 102998 - DNA, 22 bp, synthetic construct
  misc_feature 1..22: note = chemically synthesized
  source 1..22: mol_type = other DNA
tgagaaacagaggagtctttgg

SEQ ID NO: 102999 - DNA, 22 bp, synthetic construct
  misc_feature 1..22: note = chemically synthesized
  source 1..22: mol_type = other DNA
tgggggataaccagattttaag

SEQ ID NO: 103000 - DNA, 22 bp, synthetic construct
  misc_feature 1..22: note = chemically synthesized
  source 1..22: mol_type = other DNA
gggggataaccagattttaaga

SEQ ID NO: 103001 - DNA, 22 bp, synthetic construct
  misc_feature 1..22: note = chemically synthesized
  source 1..22: mol_type = other DNA
ggggataaccagattttaagat

SEQ ID NO: 103002 - DNA, 22 bp, synthetic construct
  misc_feature 1..22: note = chemically synthesized
  source 1..22: mol_type = other DNA
taagatttgtgtttatactcag

SEQ ID NO: 103003 - DNA, 22 bp, synthetic construct
  misc_feature 1..22: note = chemically synthesized
  source 1..22: mol_type = other DNA
aagatttgtgtttatactcagt

SEQ ID NO: 103004 - DNA, 22 bp, synthetic construct
  misc_feature 1..22: note = chemically synthesized
  source 1..22: mol_type = other DNA
agatttgtgtttatactcagta

SEQ ID NO: 103005 - DNA, 22 bp, synthetic construct
  misc_feature 1..22: note = chemically synthesized
  source 1..22: mol_type = other DNA
gtgtttatactcagtatcaata

SEQ ID NO: 103006 - DNA, 22 bp, synthetic construct
  misc_feature 1..22: note = chemically synthesized
  source 1..22: mol_type = other DNA
tgtttatactcagtatcaatag

SEQ ID NO: 103007 - DNA, 22 bp, synthetic construct
  misc_feature 1..22: note = chemically synthesized
  source 1..22: mol_type = other DNA
atactcagtatcaatagcttaa

SEQ ID NO: 103008 - DNA, 22 bp, synthetic construct
  misc_feature 1..22: note = chemically synthesized
  source 1..22: mol_type = other DNA
tactcagtatcaatagcttaaa

SEQ ID NO: 103009 - DNA, 22 bp, synthetic construct
  misc_feature 1..22: note = chemically synthesized
  source 1..22: mol_type = other DNA
agtatcaatagcttaaacattg

SEQ ID NO: 103010 - DNA, 22 bp, synthetic construct
  misc_feature 1..22: note = chemically synthesized
  source 1..22: mol_type = other DNA
aaacattgtactcaatagcata

SEQ ID NO: 103011 - DNA, 22 bp, synthetic construct
  misc_feature 1..22: note = chemically synthesized
  source 1..22: mol_type = other DNA
aacattgtactcaatagcatat

SEQ ID NO: 103012 - DNA, 22 bp, synthetic construct
  misc_feature 1..22: note = chemically synthesized
  source 1..22: mol_type = other DNA
tactcaatagcatataattttg

SEQ ID NO: 103013 - DNA, 22 bp, synthetic construct
  misc_feature 1..22: note = chemically synthesized
  source 1..22: mol_type = other DNA
aatagcatataattttgcttac

SEQ ID NO: 103014 - DNA, 22 bp, synthetic construct
  misc_feature 1..22: note = chemically synthesized
  source 1..22: mol_type = other DNA
tgcttacagcatgcattgggta

SEQ ID NO: 103015 - DNA, 22 bp, synthetic construct
  misc_feature 1..22: note = chemically synthesized
  source 1..22: mol_type = other DNA
gcttacagcatgcattgggtaa

SEQ ID NO: 103016 - DNA, 22 bp, synthetic construct
  misc_feature 1..22: note = chemically synthesized
  source 1..22: mol_type = other DNA
cttacagcatgcattgggtaaa

SEQ ID NO: 103017 - DNA, 22 bp, synthetic construct
  misc_feature 1..22: note = chemically synthesized
  source 1..22: mol_type = other DNA
acagcatgcattgggtaaataa

SEQ ID NO: 103018 - DNA, 22 bp, synthetic construct
  misc_feature 1..22: note = chemically synthesized
  source 1..22: mol_type = other DNA
cagcatgcattgggtaaataat

SEQ ID NO: 103019 - DNA, 22 bp, synthetic construct
  misc_feature 1..22: note = chemically synthesized
  source 1..22: mol_type = other DNA
ggtaaataatcggttttacaat

SEQ ID NO: 103020 - DNA, 22 bp, synthetic construct
  misc_feature 1..22: note = chemically synthesized
  source 1..22: mol_type = other DNA
tacaattgattcagtatgaaaa

SEQ ID NO: 103021 - DNA, 22 bp, synthetic construct
  misc_feature 1..22: note = chemically synthesized
  source 1..22: mol_type = other DNA
acaattgattcagtatgaaaaa

SEQ ID NO: 103022 - DNA, 22 bp, synthetic construct
  misc_feature 1..22: note = chemically synthesized
  source 1..22: mol_type = other DNA
caattgattcagtatgaaaaag

SEQ ID NO: 103023 - DNA, 22 bp, synthetic construct
  misc_feature 1..22: note = chemically synthesized
  source 1..22: mol_type = other DNA
attcagtatgaaaaagttttaa

SEQ ID NO: 103024 - DNA, 22 bp, synthetic construct
  misc_feature 1..22: note = chemically synthesized
  source 1..22: mol_type = other DNA
agtatgaaaaagttttaataca

SEQ ID NO: 103025 - DNA, 22 bp, synthetic construct
  misc_feature 1..22: note = chemically synthesized
  source 1..22: mol_type = other DNA
taatacaaggacatacagaaaa

SEQ ID NO: 103026 - DNA, 22 bp, synthetic construct
  misc_feature 1..22: note = chemically synthesized
  source 1..22: mol_type = other DNA
aatacaaggacatacagaaaac

SEQ ID NO: 103027 - DNA, 22 bp, synthetic construct
  misc_feature 1..22: note = chemically synthesized
  source 1..22: mol_type = other DNA
atacaaggacatacagaaaact

SEQ ID NO: 103028 - DNA, 22 bp, synthetic construct
  misc_feature 1..22: note = chemically synthesized
  source 1..22: mol_type = other DNA
gcgcctacacctatttttttaa

SEQ ID NO: 103029 - DNA, 22 bp, synthetic construct
  misc_feature 1..22: note = chemically synthesized
  source 1..22: mol_type = other DNA
cgcctacacctatttttttaag

SEQ ID NO: 103030 - DNA, 22 bp, synthetic construct
  misc_feature 1..22: note = chemically synthesized
  source 1..22: mol_type = other DNA
cacctatttttttaagcattcc

SEQ ID NO: 103031 - DNA, 22 bp, synthetic construct
  misc_feature 1..22: note = chemically synthesized
  source 1..22: mol_type = other DNA
tttttttaagcattccatagat

SEQ ID NO: 103032 - DNA, 22 bp, synthetic construct
  misc_feature 1..22: note = chemically synthesized
  source 1..22: mol_type = other DNA
ttttaagcattccatagattgg

SEQ ID NO: 103033 - DNA, 22 bp, synthetic construct
  misc_feature 1..22: note = chemically synthesized
  source 1..22: mol_type = other DNA
tttaagcattccatagattgga

SEQ ID NO: 103034 - DNA, 22 bp, synthetic construct
  misc_feature 1..22: note = chemically synthesized
  source 1..22: mol_type = other DNA
ttaagcattccatagattggat

SEQ ID NO: 103035 - DNA, 22 bp, synthetic construct
  misc_feature 1..22: note = chemically synthesized
  source 1..22: mol_type = other DNA
taagcattccatagattggatc

SEQ ID NO: 103036 - DNA, 22 bp, synthetic construct
  misc_feature 1..22: note = chemically synthesized
  source 1..22: mol_type = other DNA
aagcattccatagattggatct

SEQ ID NO: 103037 - DNA, 22 bp, synthetic construct
  misc_feature 1..22: note = chemically synthesized
  source 1..22: mol_type = other DNA
agcattccatagattggatctc

SEQ ID NO: 103038 - DNA, 22 bp, synthetic construct
  misc_feature 1..22: note = chemically synthesized
  source 1..22: mol_type = other DNA
catagattggatctcatttctc

SEQ ID NO: 103039 - DNA, 22 bp, synthetic construct
  misc_feature 1..22: note = chemically synthesized
  source 1..22: mol_type = other DNA
gatctcatttctctccacattt

SEQ ID NO: 103040 - DNA, 22 bp, synthetic construct
  misc_feature 1..22: note = chemically synthesized
  source 1..22: mol_type = other DNA
atttctctccacatttttatgt

SEQ ID NO: 103041 - DNA, 22 bp, synthetic construct
  misc_feature 1..22: note = chemically synthesized
  source 1..22: mol_type = other DNA
ctctccacatttttatgtcttc

SEQ ID NO: 103042 - DNA, 22 bp, synthetic construct
  misc_feature 1..22: note = chemically synthesized
  source 1..22: mol_type = other DNA
tctccacatttttatgtcttcc

SEQ ID NO: 103043 - DNA, 22 bp, synthetic construct
  misc_feature 1..22: note = chemically synthesized
  source 1..22: mol_type = other DNA
tccacatttttatgtcttccca

SEQ ID NO: 103044 - DNA, 22 bp, synthetic construct
  misc_feature 1..22: note = chemically synthesized
  source 1..22: mol_type = other DNA
cacatttttatgtcttcccaat

SEQ ID NO: 103045 - DNA, 22 bp, synthetic construct
  misc_feature 1..22: note = chemically synthesized
  source 1..22: mol_type = other DNA
ttatgtcttcccaatataaaac

SEQ ID NO: 103046 - DNA, 22 bp, synthetic construct
  misc_feature 1..22: note = chemically synthesized
  source 1..22: mol_type = other DNA
tatgtcttcccaatataaaact

SEQ ID NO: 103047 - DNA, 22 bp, synthetic construct
  misc_feature 1..22: note = chemically synthesized
  source 1..22: mol_type = other DNA
atgtcttcccaatataaaactt

SEQ ID NO: 103048 - DNA, 22 bp, synthetic construct
  misc_feature 1..22: note = chemically synthesized
  source 1..22: mol_type = other DNA
tgtcttcccaatataaaacttt

SEQ ID NO: 103049 - DNA, 22 bp, synthetic construct
  misc_feature 1..22: note = chemically synthesized
  source 1..22: mol_type = other DNA
cccaatataaaactttactcag

SEQ ID NO: 103050 - DNA, 22 bp, synthetic construct
  misc_feature 1..22: note = chemically synthesized
  source 1..22: mol_type = other DNA
ccaatataaaactttactcagg

SEQ ID NO: 103051 - DNA, 22 bp, synthetic construct
  misc_feature 1..22: note = chemically synthesized
  source 1..22: mol_type = other DNA
tactcaggccgggcgcggtggc

SEQ ID NO: 103052 - DNA, 22 bp, synthetic construct
  misc_feature 1..22: note = chemically synthesized
  source 1..22: mol_type = other DNA
actcaggccgggcgcggtggct

SEQ ID NO: 103053 - DNA, 22 bp, synthetic construct
  misc_feature 1..22: note = chemically synthesized
  source 1..22: mol_type = other DNA
ctcaggccgggcgcggtggctc

SEQ ID NO: 103054 - DNA, 22 bp, synthetic construct
  misc_feature 1..22: note = chemically synthesized
  source 1..22: mol_type = other DNA
aggccgggcgcggtggctcacg

SEQ ID NO: 103055 - DNA, 22 bp, synthetic construct
  misc_feature 1..22: note = chemically synthesized
  source 1..22: mol_type = other DNA
acgcctgtaatcccagcacttt

SEQ ID NO: 103056 - DNA, 22 bp, synthetic construct
  misc_feature 1..22: note = chemically synthesized
  source 1..22: mol_type = other DNA
taatcccagcactttgggaggc

SEQ ID NO: 103057 - DNA, 22 bp, synthetic construct
  misc_feature 1..22: note = chemically synthesized
  source 1..22: mol_type = other DNA
tgggaggccgaggcgggtggat

SEQ ID NO: 103058 - DNA, 22 bp, synthetic construct
  misc_feature 1..22: note = chemically synthesized
  source 1..22: mol_type = other DNA
gggaggccgaggcgggtggatc

SEQ ID NO: 103059 - DNA, 22 bp, synthetic construct
  misc_feature 1..22: note = chemically synthesized
  source 1..22: mol_type = other DNA
ggaggccgaggcgggtggatca

SEQ ID NO: 103060 - DNA, 22 bp, synthetic construct
  misc_feature 1..22: note = chemically synthesized
  source 1..22: mol_type = other DNA
gctaacacagtgaaaccccgtc

SEQ ID NO: 103061 - DNA, 22 bp, synthetic construct
  misc_feature 1..22: note = chemically synthesized
  source 1..22: mol_type = other DNA
acacagtgaaaccccgtctcta

SEQ ID NO: 103062 - DNA, 22 bp, synthetic construct
  misc_feature 1..22: note = chemically synthesized
  source 1..22: mol_type = other DNA
tactaaaaagacaaaaaaattt

SEQ ID NO: 103063 - DNA, 22 bp, synthetic construct
  misc_feature 1..22: note = chemically synthesized
  source 1..22: mol_type = other DNA
ctaaaaagacaaaaaaatttgc

SEQ ID NO: 103064 - DNA, 22 bp, synthetic construct
  misc_feature 1..22: note = chemically synthesized
  source 1..22: mol_type = other DNA
aaaagacaaaaaaatttgcctg

SEQ ID NO: 103065 - DNA, 22 bp, synthetic construct
  misc_feature 1..22: note = chemically synthesized
  source 1..22: mol_type = other DNA
gcctggcgtggtggcgggcgcc

SEQ ID NO: 103066 - DNA, 22 bp, synthetic construct
  misc_feature 1..22: note = chemically synthesized
  source 1..22: mol_type = other DNA
cctggcgtggtggcgggcgcct

SEQ ID NO: 103067 - DNA, 22 bp, synthetic construct
  misc_feature 1..22: note = chemically synthesized
  source 1..22: mol_type = other DNA
gcgtggtggcgggcgcctgtag

SEQ ID NO: 103068 - DNA, 22 bp, synthetic construct
  misc_feature 1..22: note = chemically synthesized
  source 1..22: mol_type = other DNA
tagtcccagctactcgggaggc

SEQ ID NO: 103069 - DNA, 22 bp, synthetic construct
  misc_feature 1..22: note = chemically synthesized
  source 1..22: mol_type = other DNA
ctcgggaggctgaggcaggaga

SEQ ID NO: 103070 - DNA, 22 bp, synthetic construct
  misc_feature 1..22: note = chemically synthesized
  source 1..22: mol_type = other DNA
gggaggctgaggcaggagaatg

SEQ ID NO: 103071 - DNA, 22 bp, synthetic construct
  misc_feature 1..22: note = chemically synthesized
  source 1..22: mol_type = other DNA
aggcaggagaatggcgtgaacc

SEQ ID NO: 103072 - DNA, 22 bp, synthetic construct
  misc_feature 1..22: note = chemically synthesized
  source 1..22: mol_type = other DNA
gcagtgagctgagatcacgcca

SEQ ID NO: 103073 - DNA, 22 bp, synthetic construct
  misc_feature 1..22: note = chemically synthesized
  source 1..22: mol_type = other DNA
cagtgagctgagatcacgccac

SEQ ID NO: 103074 - DNA, 22 bp, synthetic construct
  misc_feature 1..22: note = chemically synthesized
  source 1..22: mol_type = other DNA
agatcacgccactgcactccag

SEQ ID NO: 103075 - DNA, 22 bp, synthetic construct
  misc_feature 1..22: note = chemically synthesized
  source 1..22: mol_type = other DNA
cactccagcctgggcgacagag

SEQ ID NO: 103076 - DNA, 22 bp, synthetic construct
  misc_feature 1..22: note = chemically synthesized
  source 1..22: mol_type = other DNA
cagcctgggcgacagagcgaga

SEQ ID NO: 103077 - DNA, 22 bp, synthetic construct
  misc_feature 1..22: note = chemically synthesized
  source 1..22: mol_type = other DNA
ggcgacagagcgagactccatc

SEQ ID NO: 103078 - DNA, 22 bp, synthetic construct
  misc_feature 1..22: note = chemically synthesized
  source 1..22: mol_type = other DNA
catctcaaaaacaaaacaaaac

SEQ ID NO: 103079 - DNA, 22 bp, synthetic construct
  misc_feature 1..22: note = chemically synthesized
  source 1..22: mol_type = other DNA
aaaaacaaaacaaaacaaagca

SEQ ID NO: 103080 - DNA, 22 bp, synthetic construct
  misc_feature 1..22: note = chemically synthesized
  source 1..22: mol_type = other DNA
tactcagtgaagtccagagcaa

SEQ ID NO: 103081 - DNA, 22 bp, synthetic construct
  misc_feature 1..22: note = chemically synthesized
  source 1..22: mol_type = other DNA
actcagtgaagtccagagcaaa

SEQ ID NO: 103082 - DNA, 22 bp, synthetic construct
  misc_feature 1..22: note = chemically synthesized
  source 1..22: mol_type = other DNA
ctcagtgaagtccagagcaaag

SEQ ID NO: 103083 - DNA, 22 bp, synthetic construct
  misc_feature 1..22: note = chemically synthesized
  source 1..22: mol_type = other DNA
agtgaagtccagagcaaagatt

SEQ ID NO: 103084 - DNA, 22 bp, synthetic construct
  misc_feature 1..22: note = chemically synthesized
  source 1..22: mol_type = other DNA
gttgcaaacaaatcaccagttc

SEQ ID NO: 103085 - DNA, 22 bp, synthetic construct
  misc_feature 1..22: note = chemically synthesized
  source 1..22: mol_type = other DNA
ttgcaaacaaatcaccagttct

SEQ ID NO: 103086 - DNA, 22 bp, synthetic construct
  misc_feature 1..22: note = chemically synthesized
  source 1..22: mol_type = other DNA
caaacaaatcaccagttcttat

SEQ ID NO: 103087 - DNA, 22 bp, synthetic construct
  misc_feature 1..22: note = chemically synthesized
  source 1..22: mol_type = other DNA
ttatctttctccgtgaaaatgt

SEQ ID NO: 103088 - DNA, 22 bp, synthetic construct
  misc_feature 1..22: note = chemically synthesized
  source 1..22: mol_type = other DNA
atctttctccgtgaaaatgtac

SEQ ID NO: 103089 - DNA, 22 bp, synthetic construct
  misc_feature 1..22: note = chemically synthesized
  source 1..22: mol_type = other DNA
tctttctccgtgaaaatgtacc

SEQ ID NO: 103090 - DNA, 22 bp, synthetic construct
  misc_feature 1..22: note = chemically synthesized
  source 1..22: mol_type = other DNA
tctccgtgaaaatgtacctgta

SEQ ID NO: 103091 - DNA, 22 bp, synthetic construct
  misc_feature 1..22: note = chemically synthesized
  source 1..22: mol_type = other DNA
ctccgtgaaaatgtacctgtaa

SEQ ID NO: 103092 - DNA, 22 bp, synthetic construct
  misc_feature 1..22: note = chemically synthesized
  source 1..22: mol_type = other DNA
tccgtgaaaatgtacctgtaaa

SEQ ID NO: 103093 - DNA, 22 bp, synthetic construct
  misc_feature 1..22: note = chemically synthesized
  source 1..22: mol_type = other DNA
cgtgaaaatgtacctgtaaaat

SEQ ID NO: 103094 - DNA, 22 bp, synthetic construct
  misc_feature 1..22: note = chemically synthesized
  source 1..22: mol_type = other DNA
taaaatgtggatgccacatatt

SEQ ID NO: 103095 - DNA, 22 bp, synthetic construct
  misc_feature 1..22: note = chemically synthesized
  source 1..22: mol_type = other DNA
ttaggtctggaaggattgcatt

SEQ ID NO: 103096 - DNA, 22 bp, synthetic construct
  misc_feature 1..22: note = chemically synthesized
  source 1..22: mol_type = other DNA
taggtctggaaggattgcatta

SEQ ID NO: 103097 - DNA, 22 bp, synthetic construct
  misc_feature 1..22: note = chemically synthesized
  source 1..22: mol_type = other DNA
aggtctggaaggattgcattat

SEQ ID NO: 103098 - DNA, 22 bp, synthetic construct
  misc_feature 1..22: note = chemically synthesized
  source 1..22: mol_type = other DNA
ggtctggaaggattgcattatc

SEQ ID NO: 103099 - DNA, 22 bp, synthetic construct
  misc_feature 1..22: note = chemically synthesized
  source 1..22: mol_type = other DNA
gaaggattgcattatcttttat

SEQ ID NO: 103100 - DNA, 22 bp, synthetic construct
  misc_feature 1..22: note = chemically synthesized
  source 1..22: mol_type = other DNA
cattatcttttatctgtattgc

SEQ ID NO: 103101 - DNA, 22 bp, synthetic construct
  misc_feature 1..22: note = chemically synthesized
  source 1..22: mol_type = other DNA
tcttttatctgtattgcattat

SEQ ID NO: 103102 - DNA, 22 bp, synthetic construct
  misc_feature 1..22: note = chemically synthesized
  source 1..22: mol_type = other DNA
ttatctgtattgcattatcata

SEQ ID NO: 103103 - DNA, 22 bp, synthetic construct
  misc_feature 1..22: note = chemically synthesized
  source 1..22: mol_type = other DNA
tatctgtattgcattatcataa

SEQ ID NO: 103104 - DNA, 22 bp, synthetic construct
  misc_feature 1..22: note = chemically synthesized
  source 1..22: mol_type = other DNA
atctgtattgcattatcataaa

SEQ ID NO: 103105 - DNA, 22 bp, synthetic construct
  misc_feature 1..22: note = chemically synthesized
  source 1..22: mol_type = other DNA
tctgtattgcattatcataaaa

SEQ ID NO: 103106 - DNA, 22 bp, synthetic construct
  misc_feature 1..22: note = chemically synthesized
  source 1..22: mol_type = other DNA
tattgcattatcataaaatctc

SEQ ID NO: 103107 - DNA, 22 bp, synthetic construct
  misc_feature 1..22: note = chemically synthesized
  source 1..22: mol_type = other DNA
cattatcataaaatctctagtt

SEQ ID NO: 103108 - DNA, 22 bp, synthetic construct
  misc_feature 1..22: note = chemically synthesized
  source 1..22: mol_type = other DNA
tcataaaatctctagttgagtg

SEQ ID NO: 103109 - DNA, 22 bp, synthetic construct
  misc_feature 1..22: note = chemically synthesized
  source 1..22: mol_type = other DNA
tagttgagtgaaaaaatttgtt

SEQ ID NO: 103110 - DNA, 22 bp, synthetic construct
  misc_feature 1..22: note = chemically synthesized
  source 1..22: mol_type = other DNA
gttgagtgaaaaaatttgttaa

SEQ ID NO: 103111 - DNA, 22 bp, synthetic construct
  misc_feature 1..22: note = chemically synthesized
  source 1..22: mol_type = other DNA
agtgaaaaaatttgttaaatca

SEQ ID NO: 103112 - DNA, 22 bp, synthetic construct
  misc_feature 1..22: note = chemically synthesized
  source 1..22: mol_type = other DNA
gttaaatcatttctttaactga

SEQ ID NO: 103113 - DNA, 22 bp, synthetic construct
  misc_feature 1..22: note = chemically synthesized
  source 1..22: mol_type = other DNA
ttaaatcatttctttaactgaa

SEQ ID NO: 103114 - DNA, 22 bp, synthetic construct
  misc_feature 1..22: note = chemically synthesized
  source 1..22: mol_type = other DNA
aatcatttctttaactgaaaac

SEQ ID NO: 103115 - DNA, 22 bp, synthetic construct
  misc_feature 1..22: note = chemically synthesized
  source 1..22: mol_type = other DNA
ctttaactgaaaactgaaccca

SEQ ID NO: 103116 - DNA, 22 bp, synthetic construct
  misc_feature 1..22: note = chemically synthesized
  source 1..22: mol_type = other DNA
tttaactgaaaactgaacccag

SEQ ID NO: 103117 - DNA, 22 bp, synthetic construct
  misc_feature 1..22: note = chemically synthesized
  source 1..22: mol_type = other DNA
taactgaaaactgaacccagga

SEQ ID NO: 103118 - DNA, 22 bp, synthetic construct
  misc_feature 1..22: note = chemically synthesized
  source 1..22: mol_type = other DNA
aactgaaaactgaacccaggag

SEQ ID NO: 103119 - DNA, 22 bp, synthetic construct
  misc_feature 1..22: note = chemically synthesized
  source 1..22: mol_type = other DNA
actgaaaactgaacccaggagg

SEQ ID NO: 103120 - DNA, 22 bp, synthetic construct
  misc_feature 1..22: note = chemically synthesized
  source 1..22: mol_type = other DNA
aaaactgaacccaggaggcaga

SEQ ID NO: 103121 - DNA, 22 bp, synthetic construct
  misc_feature 1..22: note = chemically synthesized
  source 1..22: mol_type = other DNA
aacccaggaggcagaggttgca

SEQ ID NO: 103122 - DNA, 22 bp, synthetic construct
  misc_feature 1..22: note = chemically synthesized
  source 1..22: mol_type = other DNA
cagtcagccgagatcaaggcac

SEQ ID NO: 103123 - DNA, 22 bp, synthetic construct
  misc_feature 1..22: note = chemically synthesized
  source 1..22: mol_type = other DNA
aaaacttcctttctccagaaag

SEQ ID NO: 103124 - DNA, 22 bp, synthetic construct
  misc_feature 1..22: note = chemically synthesized
  source 1..22: mol_type = other DNA
cctttctccagaaagcttgtct

SEQ ID NO: 103125 - DNA, 22 bp, synthetic construct
  misc_feature 1..22: note = chemically synthesized
  source 1..22: mol_type = other DNA
ctttctccagaaagcttgtctc

SEQ ID NO: 103126 - DNA, 22 bp, synthetic construct
  misc_feature 1..22: note = chemically synthesized
  source 1..22: mol_type = other DNA
tctccagaaagcttgtctcatt

SEQ ID NO: 103127 - DNA, 22 bp, synthetic construct
  misc_feature 1..22: note = chemically synthesized
  source 1..22: mol_type = other DNA
ctccagaaagcttgtctcattt

SEQ ID NO: 103128 - DNA, 22 bp, synthetic construct
  misc_feature 1..22: note = chemically synthesized
  source 1..22: mol_type = other DNA
tccagaaagcttgtctcatttt

SEQ ID NO: 103129 - DNA, 22 bp, synthetic construct
  misc_feature 1..22: note = chemically synthesized
  source 1..22: mol_type = other DNA
cagaaagcttgtctcattttct

SEQ ID NO: 103130 - DNA, 22 bp, synthetic construct
  misc_feature 1..22: note = chemically synthesized
  source 1..22: mol_type = other DNA
gtctcattttcttcttccatgg

SEQ ID NO: 103131 - DNA, 22 bp, synthetic construct
  misc_feature 1..22: note = chemically synthesized
  source 1..22: mol_type = other DNA
tctcattttcttcttccatgga

SEQ ID NO: 103132 - DNA, 22 bp, synthetic construct
  misc_feature 1..22: note = chemically synthesized
  source 1..22: mol_type = other DNA
attttcttcttccatggaatat

SEQ ID NO: 103133 - DNA, 22 bp, synthetic construct
  misc_feature 1..22: note = chemically synthesized
  source 1..22: mol_type = other DNA
tcttcttccatggaatattcca

SEQ ID NO: 103134 - DNA, 22 bp, synthetic construct
  misc_feature 1..22: note = chemically synthesized
  source 1..22: mol_type = other DNA
cttcttccatggaatattccaa

SEQ ID NO: 103135 - DNA, 22 bp, synthetic construct
  misc_feature 1..22: note = chemically synthesized
  source 1..22: mol_type = other DNA
ttcttccatggaatattccaag

SEQ ID NO: 103136 - DNA, 22 bp, synthetic construct
  misc_feature 1..22: note = chemically synthesized
  source 1..22: mol_type = other DNA
cttccatggaatattccaagga

SEQ ID NO: 103137 - DNA, 22 bp, synthetic construct
  misc_feature 1..22: note = chemically synthesized
  source 1..22: mol_type = other DNA
ttccatggaatattccaaggaa

SEQ ID NO: 103138 - DNA, 22 bp, synthetic construct
  misc_feature 1..22: note = chemically synthesized
  source 1..22: mol_type = other DNA
ccatggaatattccaaggaata

SEQ ID NO: 103139 - DNA, 22 bp, synthetic construct
  misc_feature 1..22: note = chemically synthesized
  source 1..22: mol_type = other DNA
catggaatattccaaggaatat

SEQ ID NO: 103140 - DNA, 22 bp, synthetic construct
  misc_feature 1..22: note = chemically synthesized
  source 1..22: mol_type = other DNA
caaggaatattctttgaaaagc

SEQ ID NO: 103141 - DNA, 22 bp, synthetic construct
  misc_feature 1..22: note = chemically synthesized
  source 1..22: mol_type = other DNA
tttgaaaagcagaatattcaga

SEQ ID NO: 103142 - DNA, 22 bp, synthetic construct
  misc_feature 1..22: note = chemically synthesized
  source 1..22: mol_type = other DNA
tgaaaagcagaatattcagagt

SEQ ID NO: 103143 - DNA, 22 bp, synthetic construct
  misc_feature 1..22: note = chemically synthesized
  source 1..22: mol_type = other DNA
gaaaagcagaatattcagagtg

SEQ ID NO: 103144 - DNA, 22 bp, synthetic construct
  misc_feature 1..22: note = chemically synthesized
  source 1..22: mol_type = other DNA
aaaagcagaatattcagagtga

SEQ ID NO: 103145 - DNA, 22 bp, synthetic construct
  misc_feature 1..22: note = chemically synthesized
  source 1..22: mol_type = other DNA
agagtgagaggaagtagagaga

SEQ ID NO: 103146 - DNA, 22 bp, synthetic construct
  misc_feature 1..22: note = chemically synthesized
  source 1..22: mol_type = other DNA
aggtagaatctgggcatattga

SEQ ID NO: 103147 - DNA, 22 bp, synthetic construct
  misc_feature 1..22: note = chemically synthesized
  source 1..22: mol_type = other DNA
ggtagaatctgggcatattgaa

SEQ ID NO: 103148 - DNA, 22 bp, synthetic construct
  misc_feature 1..22: note = chemically synthesized
  source 1..22: mol_type = other DNA
ggcatattgaagggaagacatc

SEQ ID NO: 103149 - DNA, 22 bp, synthetic construct
  misc_feature 1..22: note = chemically synthesized
  source 1..22: mol_type = other DNA
aagggaagacatcaataattca

SEQ ID NO: 103150 - DNA, 22 bp, synthetic construct
  misc_feature 1..22: note = chemically synthesized
  source 1..22: mol_type = other DNA
acagtagccaaggaatagaaac

SEQ ID NO: 103151 - DNA, 22 bp, synthetic construct
  misc_feature 1..22: note = chemically synthesized
  source 1..22: mol_type = other DNA
tcaacagatgcgtatatcaaca

SEQ ID NO: 103152 - DNA, 22 bp, synthetic construct
  misc_feature 1..22: note = chemically synthesized
  source 1..22: mol_type = other DNA
atatatgtgatagaatattatt

SEQ ID NO: 103153 - DNA, 22 bp, synthetic construct
  misc_feature 1..22: note = chemically synthesized
  source 1..22: mol_type = other DNA
tatatgtgatagaatattattt

SEQ ID NO: 103154 - DNA, 22 bp, synthetic construct
  misc_feature 1..22: note = chemically synthesized
  source 1..22: mol_type = other DNA
tttatctataaaaagtaggtct

SEQ ID NO: 103155 - DNA, 22 bp, synthetic construct
  misc_feature 1..22: note = chemically synthesized
  source 1..22: mol_type = other DNA
atctataaaaagtaggtctgac

SEQ ID NO: 103156 - DNA, 22 bp, synthetic construct
  misc_feature 1..22: note = chemically synthesized
  source 1..22: mol_type = other DNA
tctataaaaagtaggtctgaca

SEQ ID NO: 103157 - DNA, 22 bp, synthetic construct
  misc_feature 1..22: note = chemically synthesized
  source 1..22: mol_type = other DNA
taaaaagtaggtctgacacatg

SEQ ID NO: 103158 - DNA, 22 bp, synthetic construct
  misc_feature 1..22: note = chemically synthesized
  source 1..22: mol_type = other DNA
acacatgctacaacatgaataa

SEQ ID NO: 103159 - DNA, 22 bp, synthetic construct
  misc_feature 1..22: note = chemically synthesized
  source 1..22: mol_type = other DNA
caacatgaataaaccttaaaaa

SEQ ID NO: 103160 - DNA, 22 bp, synthetic construct
  misc_feature 1..22: note = chemically synthesized
  source 1..22: mol_type = other DNA
aaaaaactatcctaagtgcaat

SEQ ID NO: 103161 - DNA, 22 bp, synthetic construct
  misc_feature 1..22: note = chemically synthesized
  source 1..22: mol_type = other DNA
aaaaactatcctaagtgcaata

SEQ ID NO: 103162 - DNA, 22 bp, synthetic construct
  misc_feature 1..22: note = chemically synthesized
  source 1..22: mol_type = other DNA
tcctaagtgcaataagtcatac

SEQ ID NO: 103163 - DNA, 22 bp, synthetic construct
  misc_feature 1..22: note = chemically synthesized
  source 1..22: mol_type = other DNA
agtgcaataagtcatacgcaaa

SEQ ID NO: 103164 - DNA, 22 bp, synthetic construct
  misc_feature 1..22: note = chemically synthesized
  source 1..22: mol_type = other DNA
tctgatttcacttacatgagct

SEQ ID NO: 103165 - DNA, 22 bp, synthetic construct
  misc_feature 1..22: note = chemically synthesized
  source 1..22: mol_type = other DNA
atttcacttacatgagctatct

SEQ ID NO: 103166 - DNA, 22 bp, synthetic construct
  misc_feature 1..22: note = chemically synthesized
  source 1..22: mol_type = other DNA
cacttacatgagctatctagaa

SEQ ID NO: 103167 - DNA, 22 bp, synthetic construct
  misc_feature 1..22: note = chemically synthesized
  source 1..22: mol_type = other DNA
acttacatgagctatctagaat

SEQ ID NO: 103168 - DNA, 22 bp, synthetic construct
  misc_feature 1..22: note = chemically synthesized
  source 1..22: mol_type = other DNA
acatgagctatctagaataggc

SEQ ID NO: 103169 - DNA, 22 bp, synthetic construct
  misc_feature 1..22: note = chemically synthesized
  source 1..22: mol_type = other DNA
catgagctatctagaataggca

SEQ ID NO: 103170 - DNA, 22 bp, synthetic construct
  misc_feature 1..22: note = chemically synthesized
  source 1..22: mol_type = other DNA
tctagaataggcaaattcatag

SEQ ID NO: 103171 - DNA, 22 bp, synthetic construct
  misc_feature 1..22: note = chemically synthesized
  source 1..22: mol_type = other DNA
gaataggcaaattcatagagac

SEQ ID NO: 103172 - DNA, 22 bp, synthetic construct
  misc_feature 1..22: note = chemically synthesized
  source 1..22: mol_type = other DNA
atagagacaaaaagtagattag

SEQ ID NO: 103173 - DNA, 22 bp, synthetic construct
  misc_feature 1..22: note = chemically synthesized
  source 1..22: mol_type = other DNA
gaagttaccagagtgtaggaag

SEQ ID NO: 103174 - DNA, 22 bp, synthetic construct
  misc_feature 1..22: note = chemically synthesized
  source 1..22: mol_type = other DNA
ccagagtgtaggaagaacatgg

SEQ ID NO: 103175 - DNA, 22 bp, synthetic construct
  misc_feature 1..22: note = chemically synthesized
  source 1..22: mol_type = other DNA
gggagtaactgattaatcaata

SEQ ID NO: 103176 - DNA, 22 bp, synthetic construct
  misc_feature 1..22: note = chemically synthesized
  source 1..22: mol_type = other DNA
attaatcaatatagagttttta

SEQ ID NO: 103177 - DNA, 22 bp, synthetic construct
  misc_feature 1..22: note = chemically synthesized
  source 1..22: mol_type = other DNA
atcaatatagagtttttatttg

SEQ ID NO: 103178 - DNA, 22 bp, synthetic construct
  misc_feature 1..22: note = chemically synthesized
  source 1..22: mol_type = other DNA
ttatttggtgtaatacaaaatt

SEQ ID NO: 103179 - DNA, 22 bp, synthetic construct
  misc_feature 1..22: note = chemically synthesized
  source 1..22: mol_type = other DNA
tatttggtgtaatacaaaattt

SEQ ID NO: 103180 - DNA, 22 bp, synthetic construct
  misc_feature 1..22: note = chemically synthesized
  source 1..22: mol_type = other DNA
atttggtgtaatacaaaatttt

SEQ ID NO: 103181 - DNA, 22 bp, synthetic construct
  misc_feature 1..22: note = chemically synthesized
  source 1..22: mol_type = other DNA
tttggtgtaatacaaaatttta

SEQ ID NO: 103182 - DNA, 22 bp, synthetic construct
  misc_feature 1..22: note = chemically synthesized
  source 1..22: mol_type = other DNA
ggtgtaatacaaaattttagaa

SEQ ID NO: 103183 - DNA, 22 bp, synthetic construct
  misc_feature 1..22: note = chemically synthesized
  source 1..22: mol_type = other DNA
gtgtaatacaaaattttagaaa

SEQ ID NO: 103184 - DNA, 22 bp, synthetic construct
  misc_feature 1..22: note = chemically synthesized
  source 1..22: mol_type = other DNA
tagaaatagtggtggtgattgc

SEQ ID NO: 103185 - DNA, 22 bp, synthetic construct
  misc_feature 1..22: note = chemically synthesized
  source 1..22: mol_type = other DNA
agaaatagtggtggtgattgca

SEQ ID NO: 103186 - DNA, 22 bp, synthetic construct
  misc_feature 1..22: note = chemically synthesized
  source 1..22: mol_type = other DNA
gaaatagtggtggtgattgcac

SEQ ID NO: 103187 - DNA, 22 bp, synthetic construct
  misc_feature 1..22: note = chemically synthesized
  source 1..22: mol_type = other DNA
cacaacatggcaaatgtaataa

SEQ ID NO: 103188 - DNA, 22 bp, synthetic construct
  misc_feature 1..22: note = chemically synthesized
  source 1..22: mol_type = other DNA
cattatacattataaaaaggct

SEQ ID NO: 103189 - DNA, 22 bp, synthetic construct
  misc_feature 1..22: note = chemically synthesized
  source 1..22: mol_type = other DNA
tacattataaaaaggctaaagt

SEQ ID NO: 103190 - DNA, 22 bp, synthetic construct
  misc_feature 1..22: note = chemically synthesized
  source 1..22: mol_type = other DNA
taaaaaggctaaagtggcaaat

SEQ ID NO: 103191 - DNA, 22 bp, synthetic construct
  misc_feature 1..22: note = chemically synthesized
  source 1..22: mol_type = other DNA
aagtggcaaattgtatatatta

SEQ ID NO: 103192 - DNA, 22 bp, synthetic construct
  misc_feature 1..22: note = chemically synthesized
  source 1..22: mol_type = other DNA
tatatattaccactataaaaat

SEQ ID NO: 103193 - DNA, 22 bp, synthetic construct
  misc_feature 1..22: note = chemically synthesized
  source 1..22: mol_type = other DNA
ccactataaaaataaaacaata

SEQ ID NO: 103194 - DNA, 22 bp, synthetic construct
  misc_feature 1..22: note = chemically synthesized
  source 1..22: mol_type = other DNA
taaaaataaaacaataaatgta

SEQ ID NO: 103195 - DNA, 22 bp, synthetic construct
  misc_feature 1..22: note = chemically synthesized
  source 1..22: mol_type = other DNA
caattcattaaatttattgtga

SEQ ID NO: 103196 - DNA, 22 bp, synthetic construct
  misc_feature 1..22: note = chemically synthesized
  source 1..22: mol_type = other DNA
aattcattaaatttattgtgaa

SEQ ID NO: 103197 - DNA, 22 bp, synthetic construct
  misc_feature 1..22: note = chemically synthesized
  source 1..22: mol_type = other DNA
attaaatttattgtgaaaggtt

SEQ ID NO: 103198 - DNA, 22 bp, synthetic construct
  misc_feature 1..22: note = chemically synthesized
  source 1..22: mol_type = other DNA
aatttattgtgaaaggtttaaa

SEQ ID NO: 103199 - DNA, 22 bp, synthetic construct
  misc_feature 1..22: note = chemically synthesized
  source 1..22: mol_type = other DNA
attgtgaaaggtttaaaaacaa

SEQ ID NO: 103200 - DNA, 22 bp, synthetic construct
  misc_feature 1..22: note = chemically synthesized
  source 1..22: mol_type = other DNA
ttgtgaaaggtttaaaaacaag

SEQ ID NO: 103201 - DNA, 22 bp, synthetic construct
  misc_feature 1..22: note = chemically synthesized
  source 1..22: mol_type = other DNA
tgaaaggtttaaaaacaagagt

SEQ ID NO: 103202 - DNA, 22 bp, synthetic construct
  misc_feature 1..22: note = chemically synthesized
  source 1..22: mol_type = other DNA
aaaaacaagagtttgaggttaa

SEQ ID NO: 103203 - DNA, 22 bp, synthetic construct
  misc_feature 1..22: note = chemically synthesized
  source 1..22: mol_type = other DNA
aaaacaagagtttgaggttaaa

SEQ ID NO: 103204 - DNA, 22 bp, synthetic construct
  misc_feature 1..22: note = chemically synthesized
  source 1..22: mol_type = other DNA
gaggttaaaaattatgtctaag

SEQ ID NO: 103205 - DNA, 22 bp, synthetic construct
  misc_feature 1..22: note = chemically synthesized
  source 1..22: mol_type = other DNA
aggttaaaaattatgtctaaga

SEQ ID NO: 103206 - DNA, 22 bp, synthetic construct
  misc_feature 1..22: note = chemically synthesized
  source 1..22: mol_type = other DNA
aaaattatgtctaagataaaat

SEQ ID NO: 103207 - DNA, 22 bp, synthetic construct
  misc_feature 1..22: note = chemically synthesized
  source 1..22: mol_type = other DNA
tgtctaagataaaatattaaaa

SEQ ID NO: 103208 - DNA, 22 bp, synthetic construct
  misc_feature 1..22: note = chemically synthesized
  source 1..22: mol_type = other DNA
agataaaatattaaaagattta

SEQ ID NO: 103209 - DNA, 22 bp, synthetic construct
  misc_feature 1..22: note = chemically synthesized
  source 1..22: mol_type = other DNA
aaagatttattccacatgtgca

SEQ ID NO: 103210 - DNA, 22 bp, synthetic construct
  misc_feature 1..22: note = chemically synthesized
  source 1..22: mol_type = other DNA
attccacatgtgcaggtgtcca

SEQ ID NO: 103211 - DNA, 22 bp, synthetic construct
  misc_feature 1..22: note = chemically synthesized
  source 1..22: mol_type = other DNA
ttccacatgtgcaggtgtccac

SEQ ID NO: 103212 - DNA, 22 bp, synthetic construct
  misc_feature 1..22: note = chemically synthesized
  source 1..22: mol_type = other DNA
cacatgtgcaggtgtccacaca

SEQ ID NO: 103213 - DNA, 22 bp, synthetic construct
  misc_feature 1..22: note = chemically synthesized
  source 1..22: mol_type = other DNA
tatatatacatactaggataaa

SEQ ID NO: 103214 - DNA, 22 bp, synthetic construct
  misc_feature 1..22: note = chemically synthesized
  source 1..22: mol_type = other DNA
ggataaagtctcttatatctta

SEQ ID NO: 103215 - DNA, 22 bp, synthetic construct
  misc_feature 1..22: note = chemically synthesized
  source 1..22: mol_type = other DNA
ttatatcttaaagaccatttat

SEQ ID NO: 103216 - DNA, 22 bp, synthetic construct
  misc_feature 1..22: note = chemically synthesized
  source 1..22: mol_type = other DNA
atatcttaaagaccatttattt

SEQ ID NO: 103217 - DNA, 22 bp, synthetic construct
  misc_feature 1..22: note = chemically synthesized
  source 1..22: mol_type = other DNA
tatcttaaagaccatttatttg

SEQ ID NO: 103218 - DNA, 22 bp, synthetic construct
  misc_feature 1..22: note = chemically synthesized
  source 1..22: mol_type = other DNA
aaagaccatttatttgatttta

SEQ ID NO: 103219 - DNA, 22 bp, synthetic construct
  misc_feature 1..22: note = chemically synthesized
  source 1..22: mol_type = other DNA
aagaccatttatttgattttaa

SEQ ID NO: 103220 - DNA, 22 bp, synthetic construct
  misc_feature 1..22: note = chemically synthesized
  source 1..22: mol_type = other DNA
atttgattttaataaatagaat

SEQ ID NO: 103221 - DNA, 22 bp, synthetic construct
  misc_feature 1..22: note = chemically synthesized
  source 1..22: mol_type = other DNA
tttgattttaataaatagaata

SEQ ID NO: 103222 - DNA, 22 bp, synthetic construct
  misc_feature 1..22: note = chemically synthesized
  source 1..22: mol_type = other DNA
gattttaataaatagaatagga

SEQ ID NO: 103223 - DNA, 22 bp, synthetic construct
  misc_feature 1..22: note = chemically synthesized
  source 1..22: mol_type = other DNA
attttaataaatagaataggat

SEQ ID NO: 103224 - DNA, 22 bp, synthetic construct
  misc_feature 1..22: note = chemically synthesized
  source 1..22: mol_type = other DNA
taataaatagaataggatggtt

SEQ ID NO: 103225 - DNA, 22 bp, synthetic construct
  misc_feature 1..22: note = chemically synthesized
  source 1..22: mol_type = other DNA
aataaatagaataggatggttg

SEQ ID NO: 103226 - DNA, 22 bp, synthetic construct
  misc_feature 1..22: note = chemically synthesized
  source 1..22: mol_type = other DNA
ataaatagaataggatggttga

SEQ ID NO: 103227 - DNA, 22 bp, synthetic construct
  misc_feature 1..22: note = chemically synthesized
  source 1..22: mol_type = other DNA
actcaacaatttcacttgagag

SEQ ID NO: 103228 - DNA, 22 bp, synthetic construct
  misc_feature 1..22: note = chemically synthesized
  source 1..22: mol_type = other DNA
aacaatttcacttgagagaaag

SEQ ID NO: 103229 - DNA, 22 bp, synthetic construct
  misc_feature 1..22: note = chemically synthesized
  source 1..22: mol_type = other DNA
cacttgagagaaagaatcaagc

SEQ ID NO: 103230 - DNA, 22 bp, synthetic construct
  misc_feature 1..22: note = chemically synthesized
  source 1..22: mol_type = other DNA
acttgagagaaagaatcaagca

SEQ ID NO: 103231 - DNA, 22 bp, synthetic construct
  misc_feature 1..22: note = chemically synthesized
  source 1..22: mol_type = other DNA
gagagaaagaatcaagcataga

SEQ ID NO: 103232 - DNA, 22 bp, synthetic construct
  misc_feature 1..22: note = chemically synthesized
  source 1..22: mol_type = other DNA
agagaaagaatcaagcatagat

SEQ ID NO: 103233 - DNA, 22 bp, synthetic construct
  misc_feature 1..22: note = chemically synthesized
  source 1..22: mol_type = other DNA
ttttcagttccatatggtcctc

SEQ ID NO: 103234 - DNA, 22 bp, synthetic construct
  misc_feature 1..22: note = chemically synthesized
  source 1..22: mol_type = other DNA
tcagttccatatggtcctcctc

SEQ ID NO: 103235 - DNA, 22 bp, synthetic construct
  misc_feature 1..22: note = chemically synthesized
  source 1..22: mol_type = other DNA
cagttccatatggtcctcctca

SEQ ID NO: 103236 - DNA, 22 bp, synthetic construct
  misc_feature 1..22: note = chemically synthesized
  source 1..22: mol_type = other DNA
agttccatatggtcctcctcaa

SEQ ID NO: 103237 - DNA, 22 bp, synthetic construct
  misc_feature 1..22: note = chemically synthesized
  source 1..22: mol_type = other DNA
catatggtcctcctcaaatatc

SEQ ID NO: 103238 - DNA, 22 bp, synthetic construct
  misc_feature 1..22: note = chemically synthesized
  source 1..22: mol_type = other DNA
ctcaaatatctatgattggaca

SEQ ID NO: 103239 - DNA, 22 bp, synthetic construct
  misc_feature 1..22: note = chemically synthesized
  source 1..22: mol_type = other DNA
aaatatctatgattggacatct

SEQ ID NO: 103240 - DNA, 22 bp, synthetic construct
  misc_feature 1..22: note = chemically synthesized
  source 1..22: mol_type = other DNA
tgattggacatctgtgaaggca

SEQ ID NO: 103241 - DNA, 22 bp, synthetic construct
  misc_feature 1..22: note = chemically synthesized
  source 1..22: mol_type = other DNA
gacatctgtgaaggcatgccgc

SEQ ID NO: 103242 - DNA, 22 bp, synthetic construct
  misc_feature 1..22: note = chemically synthesized
  source 1..22: mol_type = other DNA
tgaaggcatgccgcaaatctag

SEQ ID NO: 103243 - DNA, 22 bp, synthetic construct
  misc_feature 1..22: note = chemically synthesized
  source 1..22: mol_type = other DNA
gggtaactaacataagcactca

SEQ ID NO: 103244 - DNA, 22 bp, synthetic construct
  misc_feature 1..22: note = chemically synthesized
  source 1..22: mol_type = other DNA
acataagcactcatgaaaaaac

SEQ ID NO: 103245 - DNA, 22 bp, synthetic construct
  misc_feature 1..22: note = chemically synthesized
  source 1..22: mol_type = other DNA
atgaaaaaacttcatttttcaa

SEQ ID NO: 103246 - DNA, 22 bp, synthetic construct
  misc_feature 1..22: note = chemically synthesized
  source 1..22: mol_type = other DNA
catttttcaataaattcttgtt

SEQ ID NO: 103247 - DNA, 22 bp, synthetic construct
  misc_feature 1..22: note = chemically synthesized
  source 1..22: mol_type = other DNA
atttttcaataaattcttgtta

SEQ ID NO: 103248 - DNA, 22 bp, synthetic construct
  misc_feature 1..22: note = chemically synthesized
  source 1..22: mol_type = other DNA
ttcaataaattcttgttattta

SEQ ID NO: 103249 - DNA, 22 bp, synthetic construct
  misc_feature 1..22: note = chemically synthesized
  source 1..22: mol_type = other DNA
tcaataaattcttgttatttac

SEQ ID NO: 103250 - DNA, 22 bp, synthetic construct
  misc_feature 1..22: note = chemically synthesized
  source 1..22: mol_type = other DNA
caataaattcttgttatttact

SEQ ID NO: 103251 - DNA, 22 bp, synthetic construct
  misc_feature 1..22: note = chemically synthesized
  source 1..22: mol_type = other DNA
aataaattcttgttatttactc

SEQ ID NO: 103252 - DNA, 22 bp, synthetic construct
  misc_feature 1..22: note = chemically synthesized
  source 1..22: mol_type = other DNA
ttgttatttactcatctggtaa

SEQ ID NO: 103253 - DNA, 22 bp, synthetic construct
  misc_feature 1..22: note = chemically synthesized
  source 1..22: mol_type = other DNA
gttatttactcatctggtaatt

SEQ ID NO: 103254 - DNA, 22 bp, synthetic construct
  misc_feature 1..22: note = chemically synthesized
  source 1..22: mol_type = other DNA
ttatttactcatctggtaattc

SEQ ID NO: 103255 - DNA, 22 bp, synthetic construct
  misc_feature 1..22: note = chemically synthesized
  source 1..22: mol_type = other DNA
tttactcatctggtaattcaga

SEQ ID NO: 103256 - DNA, 22 bp, synthetic construct
  misc_feature 1..22: note = chemically synthesized
  source 1..22: mol_type = other DNA
actcatctggtaattcagaatt

SEQ ID NO: 103257 - DNA, 22 bp, synthetic construct
  misc_feature 1..22: note = chemically synthesized
  source 1..22: mol_type = other DNA
ctcatctggtaattcagaattt

SEQ ID NO: 103258 - DNA, 22 bp, synthetic construct
  misc_feature 1..22: note = chemically synthesized
  source 1..22: mol_type = other DNA
atctggtaattcagaatttagt

SEQ ID NO: 103259 - DNA, 22 bp, synthetic construct
  misc_feature 1..22: note = chemically synthesized
  source 1..22: mol_type = other DNA
gtaattcagaatttagttaatc

SEQ ID NO: 103260 - DNA, 22 bp, synthetic construct
  misc_feature 1..22: note = chemically synthesized
  source 1..22: mol_type = other DNA
agaatttagttaatccatcttc

SEQ ID NO: 103261 - DNA, 22 bp, synthetic construct
  misc_feature 1..22: note = chemically synthesized
  source 1..22: mol_type = other DNA
agttaatccatcttcctattta

SEQ ID NO: 103262 - DNA, 22 bp, synthetic construct
  misc_feature 1..22: note = chemically synthesized
  source 1..22: mol_type = other DNA
gttaatccatcttcctatttat

SEQ ID NO: 103263 - DNA, 22 bp, synthetic construct
  misc_feature 1..22: note = chemically synthesized
  source 1..22: mol_type = other DNA
atccatcttcctatttatgttt

SEQ ID NO: 103264 - DNA, 22 bp, synthetic construct
  misc_feature 1..22: note = chemically synthesized
  source 1..22: mol_type = other DNA
cctatttatgtttgtatcagat

SEQ ID NO: 103265 - DNA, 22 bp, synthetic construct
  misc_feature 1..22: note = chemically synthesized
  source 1..22: mol_type = other DNA
ctatttatgtttgtatcagatt

SEQ ID NO: 103266 - DNA, 22 bp, synthetic construct
  misc_feature 1..22: note = chemically synthesized
  source 1..22: mol_type = other DNA
tttatgtttgtatcagattatc

SEQ ID NO: 103267 - DNA, 22 bp, synthetic construct
  misc_feature 1..22: note = chemically synthesized
  source 1..22: mol_type = other DNA
atgtttgtatcagattatctgg

SEQ ID NO: 103268 - DNA, 22 bp, synthetic construct
  misc_feature 1..22: note = chemically synthesized
  source 1..22: mol_type = other DNA
tgtttgtatcagattatctggc

SEQ ID NO: 103269 - DNA, 22 bp, synthetic construct
  misc_feature 1..22: note = chemically synthesized
  source 1..22: mol_type = other DNA
gtatcagattatctggctctaa

SEQ ID NO: 103270 - DNA, 22 bp, synthetic construct
  misc_feature 1..22: note = chemically synthesized
  source 1..22: mol_type = other DNA
tatcagattatctggctctaac

SEQ ID NO: 103271 - DNA, 22 bp, synthetic construct
  misc_feature 1..22: note = chemically synthesized
  source 1..22: mol_type = other DNA
tctggctctaaccagttgtatc

SEQ ID NO: 103272 - DNA, 22 bp, synthetic construct
  misc_feature 1..22: note = chemically synthesized
  source 1..22: mol_type = other DNA
gctctaaccagttgtatcatat

SEQ ID NO: 103273 - DNA, 22 bp, synthetic construct
  misc_feature 1..22: note = chemically synthesized
  source 1..22: mol_type = other DNA
taaccagttgtatcatataatt

SEQ ID NO: 103274 - DNA, 22 bp, synthetic construct
  misc_feature 1..22: note = chemically synthesized
  source 1..22: mol_type = other DNA
accagttgtatcatataattga

SEQ ID NO: 103275 - DNA, 22 bp, synthetic construct
  misc_feature 1..22: note = chemically synthesized
  source 1..22: mol_type = other DNA
tatcatataattgatatattat

SEQ ID NO: 103276 - DNA, 22 bp, synthetic construct
  misc_feature 1..22: note = chemically synthesized
  source 1..22: mol_type = other DNA
atatattatctcacgtttggca

SEQ ID NO: 103277 - DNA, 22 bp, synthetic construct
  misc_feature 1..22: note = chemically synthesized
  source 1..22: mol_type = other DNA
tctcacgtttggcagtattttt

SEQ ID NO: 103278 - DNA, 22 bp, synthetic construct
  misc_feature 1..22: note = chemically synthesized
  source 1..22: mol_type = other DNA
acgtttggcagtattttttgga

SEQ ID NO: 103279 - DNA, 22 bp, synthetic construct
  misc_feature 1..22: note = chemically synthesized
  source 1..22: mol_type = other DNA
ggcagtattttttggactgcta

SEQ ID NO: 103280 - DNA, 22 bp, synthetic construct
  misc_feature 1..22: note = chemically synthesized
  source 1..22: mol_type = other DNA
gcagtattttttggactgctat

SEQ ID NO: 103281 - DNA, 22 bp, synthetic construct
  misc_feature 1..22: note = chemically synthesized
  source 1..22: mol_type = other DNA
tttggactgctattttaaaact

SEQ ID NO: 103282 - DNA, 22 bp, synthetic construct
  misc_feature 1..22: note = chemically synthesized
  source 1..22: mol_type = other DNA
ttggactgctattttaaaactg

SEQ ID NO: 103283 - DNA, 22 bp, synthetic construct
  misc_feature 1..22: note = chemically synthesized
  source 1..22: mol_type = other DNA
tggactgctattttaaaactgg

SEQ ID NO: 103284 - DNA, 22 bp, synthetic construct
  misc_feature 1..22: note = chemically synthesized
  source 1..22: mol_type = other DNA
ggactgctattttaaaactggg

SEQ ID NO: 103285 - DNA, 22 bp, synthetic construct
  misc_feature 1..22: note = chemically synthesized
  source 1..22: mol_type = other DNA
gactgctattttaaaactgggt

SEQ ID NO: 103286 - DNA, 22 bp, synthetic construct
  misc_feature 1..22: note = chemically synthesized
  source 1..22: mol_type = other DNA
ctattttaaaactgggtctact

SEQ ID NO: 103287 - DNA, 22 bp, synthetic construct
  misc_feature 1..22: note = chemically synthesized
  source 1..22: mol_type = other DNA
ttttaaaactgggtctacttca

SEQ ID NO: 103288 - DNA, 22 bp, synthetic construct
  misc_feature 1..22: note = chemically synthesized
  source 1..22: mol_type = other DNA
taaaactgggtctacttcagtg

SEQ ID NO: 103289 - DNA, 22 bp, synthetic construct
  misc_feature 1..22: note = chemically synthesized
  source 1..22: mol_type = other DNA
aaaactgggtctacttcagtga

SEQ ID NO: 103290 - DNA, 22 bp, synthetic construct
  misc_feature 1..22: note = chemically synthesized
  source 1..22: mol_type = other DNA
aaactgggtctacttcagtgaa

SEQ ID NO: 103291 - DNA, 22 bp, synthetic construct
  misc_feature 1..22: note = chemically synthesized
  source 1..22: mol_type = other DNA
ggtctacttcagtgaatgacac

SEQ ID NO: 103292 - DNA, 22 bp, synthetic construct
  misc_feature 1..22: note = chemically synthesized
  source 1..22: mol_type = other DNA
cttcagtgaatgacacccaaga

SEQ ID NO: 103293 - DNA, 22 bp, synthetic construct
  misc_feature 1..22: note = chemically synthesized
  source 1..22: mol_type = other DNA
cagtgaatgacacccaagaaaa

SEQ ID NO: 103294 - DNA, 22 bp, synthetic construct
  misc_feature 1..22: note = chemically synthesized
  source 1..22: mol_type = other DNA
agtgaatgacacccaagaaaaa

SEQ ID NO: 103295 - DNA, 22 bp, synthetic construct
  misc_feature 1..22: note = chemically synthesized
  source 1..22: mol_type = other DNA
tcctgctttctcctaggatagt

SEQ ID NO: 103296 - DNA, 22 bp, synthetic construct
  misc_feature 1..22: note = chemically synthesized
  source 1..22: mol_type = other DNA
ctttctcctaggatagtgagcc

SEQ ID NO: 103297 - DNA, 22 bp, synthetic construct
  misc_feature 1..22: note = chemically synthesized
  source 1..22: mol_type = other DNA
tctcctaggatagtgagccact

SEQ ID NO: 103298 - DNA, 22 bp, synthetic construct
  misc_feature 1..22: note = chemically synthesized
  source 1..22: mol_type = other DNA
ctcctaggatagtgagccactg

SEQ ID NO: 103299 - DNA, 22 bp, synthetic construct
  misc_feature 1..22: note = chemically synthesized
  source 1..22: mol_type = other DNA
tcctaggatagtgagccactgt

SEQ ID NO: 103300 - DNA, 22 bp, synthetic construct
  misc_feature 1..22: note = chemically synthesized
  source 1..22: mol_type = other DNA
ctaggatagtgagccactgttt

SEQ ID NO: 103301 - DNA, 22 bp, synthetic construct
  misc_feature 1..22: note = chemically synthesized
  source 1..22: mol_type = other DNA
ggatagtgagccactgtttcac

SEQ ID NO: 103302 - DNA, 22 bp, synthetic construct
  misc_feature 1..22: note = chemically synthesized
  source 1..22: mol_type = other DNA
tttcacttattctctgaccttc

SEQ ID NO: 103303 - DNA, 22 bp, synthetic construct
  misc_feature 1..22: note = chemically synthesized
  source 1..22: mol_type = other DNA
cacttattctctgaccttcttt

SEQ ID NO: 103304 - DNA, 22 bp, synthetic construct
  misc_feature 1..22: note = chemically synthesized
  source 1..22: mol_type = other DNA
acttattctctgaccttctttg

SEQ ID NO: 103305 - DNA, 22 bp, synthetic construct
  misc_feature 1..22: note = chemically synthesized
  source 1..22: mol_type = other DNA
attctctgaccttctttgggtg

SEQ ID NO: 103306 - DNA, 22 bp, synthetic construct
  misc_feature 1..22: note = chemically synthesized
  source 1..22: mol_type = other DNA
ttctctgaccttctttgggtgt

SEQ ID NO: 103307 - DNA, 22 bp, synthetic construct
  misc_feature 1..22: note = chemically synthesized
  source 1..22: mol_type = other DNA
tctgaccttctttgggtgtcat

SEQ ID NO: 103308 - DNA, 22 bp, synthetic construct
  misc_feature 1..22: note = chemically synthesized
  source 1..22: mol_type = other DNA
tgaccttctttgggtgtcatct

SEQ ID NO: 103309 - DNA, 22 bp, synthetic construct
  misc_feature 1..22: note = chemically synthesized
  source 1..22: mol_type = other DNA
accttctttgggtgtcatctgc

SEQ ID NO: 103310 - DNA, 22 bp, synthetic construct
  misc_feature 1..22: note = chemically synthesized
  source 1..22: mol_type = other DNA
ctttgggtgtcatctgcttcag

SEQ ID NO: 103311 - DNA, 22 bp, synthetic construct
  misc_feature 1..22: note = chemically synthesized
  source 1..22: mol_type = other DNA
tttgggtgtcatctgcttcagt

SEQ ID NO: 103312 - DNA, 22 bp, synthetic construct
  misc_feature 1..22: note = chemically synthesized
  source 1..22: mol_type = other DNA
tgggtgtcatctgcttcagttt

SEQ ID NO: 103313 - DNA, 22 bp, synthetic construct
  misc_feature 1..22: note = chemically synthesized
  source 1..22: mol_type = other DNA
gggtgtcatctgcttcagtttg

SEQ ID NO: 103314 - DNA, 22 bp, synthetic construct
  misc_feature 1..22: note = chemically synthesized
  source 1..22: mol_type = other DNA
ggtgtcatctgcttcagtttgt

SEQ ID NO: 103315 - DNA, 22 bp, synthetic construct
  misc_feature 1..22: note = chemically synthesized
  source 1..22: mol_type = other DNA
cttcagtttgtttctgttgtct

SEQ ID NO: 103316 - DNA, 22 bp, synthetic construct
  misc_feature 1..22: note = chemically synthesized
  source 1..22: mol_type = other DNA
cagtttgtttctgttgtcttgc

SEQ ID NO: 103317 - DNA, 22 bp, synthetic construct
  misc_feature 1..22: note = chemically synthesized
  source 1..22: mol_type = other DNA
agtttgtttctgttgtcttgca

SEQ ID NO: 103318 - DNA, 22 bp, synthetic construct
  misc_feature 1..22: note = chemically synthesized
  source 1..22: mol_type = other DNA
gtttctgttgtcttgcatctgt

SEQ ID NO: 103319 - DNA, 22 bp, synthetic construct
  misc_feature 1..22: note = chemically synthesized
  source 1..22: mol_type = other DNA
tttctgttgtcttgcatctgta

SEQ ID NO: 103320 - DNA, 22 bp, synthetic construct
  misc_feature 1..22: note = chemically synthesized
  source 1..22: mol_type = other DNA
ctgttgtcttgcatctgtaaat

SEQ ID NO: 103321 - DNA, 22 bp, synthetic construct
  misc_feature 1..22: note = chemically synthesized
  source 1..22: mol_type = other DNA
tgttgtcttgcatctgtaaatt

SEQ ID NO: 103322 - DNA, 22 bp, synthetic construct
  misc_feature 1..22: note = chemically synthesized
  source 1..22: mol_type = other DNA
ttgtcttgcatctgtaaattct

SEQ ID NO: 103323 - DNA, 22 bp, synthetic construct
  misc_feature 1..22: note = chemically synthesized
  source 1..22: mol_type = other DNA
tcttgcatctgtaaattctcat

SEQ ID NO: 103324 - DNA, 22 bp, synthetic construct
  misc_feature 1..22: note = chemically synthesized
  source 1..22: mol_type = other DNA
gcatctgtaaattctcatcatt

SEQ ID NO: 103325 - DNA, 22 bp, synthetic construct
  misc_feature 1..22: note = chemically synthesized
  source 1..22: mol_type = other DNA
catctgtaaattctcatcattt

SEQ ID NO: 103326 - DNA, 22 bp, synthetic construct
  misc_feature 1..22: note = chemically synthesized
  source 1..22: mol_type = other DNA
taaattctcatcattttctgac

SEQ ID NO: 103327 - DNA, 22 bp, synthetic construct
  misc_feature 1..22: note = chemically synthesized
  source 1..22: mol_type = other DNA
tcatcattttctgacatatgtc

SEQ ID NO: 103328 - DNA, 22 bp, synthetic construct
  misc_feature 1..22: note = chemically synthesized
  source 1..22: mol_type = other DNA
atcattttctgacatatgtctt

SEQ ID NO: 103329 - DNA, 22 bp, synthetic construct
  misc_feature 1..22: note = chemically synthesized
  source 1..22: mol_type = other DNA
tctgacatatgtcttgccttta

SEQ ID NO: 103330 - DNA, 22 bp, synthetic construct
  misc_feature 1..22: note = chemically synthesized
  source 1..22: mol_type = other DNA
ctgacatatgtcttgcctttac

SEQ ID NO: 103331 - DNA, 22 bp, synthetic construct
  misc_feature 1..22: note = chemically synthesized
  source 1..22: mol_type = other DNA
tgacatatgtcttgcctttact

SEQ ID NO: 103332 - DNA, 22 bp, synthetic construct
  misc_feature 1..22: note = chemically synthesized
  source 1..22: mol_type = other DNA
acatatgtcttgcctttactat

SEQ ID NO: 103333 - DNA, 22 bp, synthetic construct
  misc_feature 1..22: note = chemically synthesized
  source 1..22: mol_type = other DNA
gcctttactatgactcttcatg

SEQ ID NO: 103334 - DNA, 22 bp, synthetic construct
  misc_feature 1..22: note = chemically synthesized
  source 1..22: mol_type = other DNA
cctttactatgactcttcatga

SEQ ID NO: 103335 - DNA, 22 bp, synthetic construct
  misc_feature 1..22: note = chemically synthesized
  source 1..22: mol_type = other DNA
tactatgactcttcatgatcag

SEQ ID NO: 103336 - DNA, 22 bp, synthetic construct
  misc_feature 1..22: note = chemically synthesized
  source 1..22: mol_type = other DNA
actatgactcttcatgatcagg

SEQ ID NO: 103337 - DNA, 22 bp, synthetic construct
  misc_feature 1..22: note = chemically synthesized
  source 1..22: mol_type = other DNA
ctatgactcttcatgatcaggc

SEQ ID NO: 103338 - DNA, 22 bp, synthetic construct
  misc_feature 1..22: note = chemically synthesized
  source 1..22: mol_type = other DNA
tgactcttcatgatcaggcaaa

SEQ ID NO: 103339 - DNA, 22 bp, synthetic construct
  misc_feature 1..22: note = chemically synthesized
  source 1..22: mol_type = other DNA
ttcatgatcaggcaaaaagaaa

SEQ ID NO: 103340 - DNA, 22 bp, synthetic construct
  misc_feature 1..22: note = chemically synthesized
  source 1..22: mol_type = other DNA
catgatcaggcaaaaagaaata

SEQ ID NO: 103341 - DNA, 22 bp, synthetic construct
  misc_feature 1..22: note = chemically synthesized
  source 1..22: mol_type = other DNA
atgatcaggcaaaaagaaatac

SEQ ID NO: 103342 - DNA, 22 bp, synthetic construct
  misc_feature 1..22: note = chemically synthesized
  source 1..22: mol_type = other DNA
aaatgatttgaatgaatgattt

SEQ ID NO: 103343 - DNA, 22 bp, synthetic construct
  misc_feature 1..22: note = chemically synthesized
  source 1..22: mol_type = other DNA
gaatgaatgatttttttaatta

SEQ ID NO: 103344 - DNA, 22 bp, synthetic construct
  misc_feature 1..22: note = chemically synthesized
  source 1..22: mol_type = other DNA
aatgaatgatttttttaattat

SEQ ID NO: 103345 - DNA, 22 bp, synthetic construct
  misc_feature 1..22: note = chemically synthesized
  source 1..22: mol_type = other DNA
ttttaattattaagctaatatt

SEQ ID NO: 103346 - DNA, 22 bp, synthetic construct
  misc_feature 1..22: note = chemically synthesized
  source 1..22: mol_type = other DNA
tttaattattaagctaatattt

SEQ ID NO: 103347 - DNA, 22 bp, synthetic construct
  misc_feature 1..22: note = chemically synthesized
  source 1..22: mol_type = other DNA
ttaattattaagctaatatttt

SEQ ID NO: 103348 - DNA, 22 bp, synthetic construct
  misc_feature 1..22: note = chemically synthesized
  source 1..22: mol_type = other DNA
taattattaagctaatattttg

SEQ ID NO: 103349 - DNA, 22 bp, synthetic construct
  misc_feature 1..22: note = chemically synthesized
  source 1..22: mol_type = other DNA
aattattaagctaatattttgt

SEQ ID NO: 103350 - DNA, 22 bp, synthetic construct
  misc_feature 1..22: note = chemically synthesized
  source 1..22: mol_type = other DNA
attattaagctaatattttgtt

SEQ ID NO: 103351 - DNA, 22 bp, synthetic construct
  misc_feature 1..22: note = chemically synthesized
  source 1..22: mol_type = other DNA
ttaagctaatattttgttttta

SEQ ID NO: 103352 - DNA, 22 bp, synthetic construct
  misc_feature 1..22: note = chemically synthesized
  source 1..22: mol_type = other DNA
agctaatattttgtttttaaaa

SEQ ID NO: 103353 - DNA, 22 bp, synthetic construct
  misc_feature 1..22: note = chemically synthesized
  source 1..22: mol_type = other DNA
atattttgtttttaaaagtcta

SEQ ID NO: 103354 - DNA, 22 bp, synthetic construct
  misc_feature 1..22: note = chemically synthesized
  source 1..22: mol_type = other DNA
tgtttttaaaagtctagttcta

SEQ ID NO: 103355 - DNA, 22 bp, synthetic construct
  misc_feature 1..22: note = chemically synthesized
  source 1..22: mol_type = other DNA
gtttttaaaagtctagttctac

SEQ ID NO: 103356 - DNA, 22 bp, synthetic construct
  misc_feature 1..22: note = chemically synthesized
  source 1..22: mol_type = other DNA
tttttaaaagtctagttctaca

SEQ ID NO: 103357 - DNA, 22 bp, synthetic construct
  misc_feature 1..22: note = chemically synthesized
  source 1..22: mol_type = other DNA
ttaaaagtctagttctacagtt

SEQ ID NO: 103358 - DNA, 22 bp, synthetic construct
  misc_feature 1..22: note = chemically synthesized
  source 1..22: mol_type = other DNA
taaaagtctagttctacagttt

SEQ ID NO: 103359 - DNA, 22 bp, synthetic construct
  misc_feature 1..22: note = chemically synthesized
  source 1..22: mol_type = other DNA
aaaagtctagttctacagtttg

SEQ ID NO: 103360 - DNA, 22 bp, synthetic construct
  misc_feature 1..22: note = chemically synthesized
  source 1..22: mol_type = other DNA
aaagtctagttctacagtttga

SEQ ID NO: 103361 - DNA, 22 bp, synthetic construct
  misc_feature 1..22: note = chemically synthesized
  source 1..22: mol_type = other DNA
gttctacagtttgaaatacttc

SEQ ID NO: 103362 - DNA, 22 bp, synthetic construct
  misc_feature 1..22: note = chemically synthesized
  source 1..22: mol_type = other DNA
tacagtttgaaatacttccttc

SEQ ID NO: 103363 - DNA, 22 bp, synthetic construct
  misc_feature 1..22: note = chemically synthesized
  source 1..22: mol_type = other DNA
cagtttgaaatacttccttcaa

SEQ ID NO: 103364 - DNA, 22 bp, synthetic construct
  misc_feature 1..22: note = chemically synthesized
  source 1..22: mol_type = other DNA
gaaatacttccttcaattgctt

SEQ ID NO: 103365 - DNA, 22 bp, synthetic construct
  misc_feature 1..22: note = chemically synthesized
  source 1..22: mol_type = other DNA
aaatacttccttcaattgcttt

SEQ ID NO: 103366 - DNA, 22 bp, synthetic construct
  misc_feature 1..22: note = chemically synthesized
  source 1..22: mol_type = other DNA
ccttcaattgctttcttaaatc

SEQ ID NO: 103367 - DNA, 22 bp, synthetic construct
  misc_feature 1..22: note = chemically synthesized
  source 1..22: mol_type = other DNA
cttcaattgctttcttaaatca

SEQ ID NO: 103368 - DNA, 22 bp, synthetic construct
  misc_feature 1..22: note = chemically synthesized
  source 1..22: mol_type = other DNA
caattgctttcttaaatcacat

SEQ ID NO: 103369 - DNA, 22 bp, synthetic construct
  misc_feature 1..22: note = chemically synthesized
  source 1..22: mol_type = other DNA
aattgctttcttaaatcacatg

SEQ ID NO: 103370 - DNA, 22 bp, synthetic construct
  misc_feature 1..22: note = chemically synthesized
  source 1..22: mol_type = other DNA
ctttcttaaatcacatgtttat

SEQ ID NO: 103371 - DNA, 22 bp, synthetic construct
  misc_feature 1..22: note = chemically synthesized
  source 1..22: mol_type = other DNA
tcttaaatcacatgtttattat

SEQ ID NO: 103372 - DNA, 22 bp, synthetic construct
  misc_feature 1..22: note = chemically synthesized
  source 1..22: mol_type = other DNA
cttaaatcacatgtttattatt

SEQ ID NO: 103373 - DNA, 22 bp, synthetic construct
  misc_feature 1..22: note = chemically synthesized
  source 1..22: mol_type = other DNA
ttaaatcacatgtttattattt

SEQ ID NO: 103374 - DNA, 22 bp, synthetic construct
  misc_feature 1..22: note = chemically synthesized
  source 1..22: mol_type = other DNA
aaatcacatgtttattattttg

SEQ ID NO: 103375 - DNA, 22 bp, synthetic construct
  misc_feature 1..22: note = chemically synthesized
  source 1..22: mol_type = other DNA
aatcacatgtttattattttga

SEQ ID NO: 103376 - DNA, 22 bp, synthetic construct
  misc_feature 1..22: note = chemically synthesized
  source 1..22: mol_type = other DNA
attattttgactcattctcagt

SEQ ID NO: 103377 - DNA, 22 bp, synthetic construct
  misc_feature 1..22: note = chemically synthesized
  source 1..22: mol_type = other DNA
ttattttgactcattctcagtg

SEQ ID NO: 103378 - DNA, 22 bp, synthetic construct
  misc_feature 1..22: note = chemically synthesized
  source 1..22: mol_type = other DNA
ttttgactcattctcagtgtcc

SEQ ID NO: 103379 - DNA, 22 bp, synthetic construct
  misc_feature 1..22: note = chemically synthesized
  source 1..22: mol_type = other DNA
tgactcattctcagtgtcccac

SEQ ID NO: 103380 - DNA, 22 bp, synthetic construct
  misc_feature 1..22: note = chemically synthesized
  source 1..22: mol_type = other DNA
gactcattctcagtgtcccaca

SEQ ID NO: 103381 - DNA, 22 bp, synthetic construct
  misc_feature 1..22: note = chemically synthesized
  source 1..22: mol_type = other DNA
actcattctcagtgtcccacaa

SEQ ID NO: 103382 - DNA, 22 bp, synthetic construct
  misc_feature 1..22: note = chemically synthesized
  source 1..22: mol_type = other DNA
attctcagtgtcccacaacttt

SEQ ID NO: 103383 - DNA, 22 bp, synthetic construct
  misc_feature 1..22: note = chemically synthesized
  source 1..22: mol_type = other DNA
tcagtgtcccacaactttaaaa

SEQ ID NO: 103384 - DNA, 22 bp, synthetic construct
  misc_feature 1..22: note = chemically synthesized
  source 1..22: mol_type = other DNA
agtgtcccacaactttaaaaat

SEQ ID NO: 103385 - DNA, 22 bp, synthetic construct
  misc_feature 1..22: note = chemically synthesized
  source 1..22: mol_type = other DNA
taaaaattataatgattcttct

SEQ ID NO: 103386 - DNA, 22 bp, synthetic construct
  misc_feature 1..22: note = chemically synthesized
  source 1..22: mol_type = other DNA
aaaaattataatgattcttctt

SEQ ID NO: 103387 - DNA, 22 bp, synthetic construct
  misc_feature 1..22: note = chemically synthesized
  source 1..22: mol_type = other DNA
aaaattataatgattcttctta

SEQ ID NO: 103388 - DNA, 22 bp, synthetic construct
  misc_feature 1..22: note = chemically synthesized
  source 1..22: mol_type = other DNA
taatgattcttcttatttatag

SEQ ID NO: 103389 - DNA, 22 bp, synthetic construct
  misc_feature 1..22: note = chemically synthesized
  source 1..22: mol_type = other DNA
ttcttatttatagacaatacat

SEQ ID NO: 103390 - DNA, 22 bp, synthetic construct
  misc_feature 1..22: note = chemically synthesized
  source 1..22: mol_type = other DNA
cttatttatagacaatacataa

SEQ ID NO: 103391 - DNA, 22 bp, synthetic construct
  misc_feature 1..22: note = chemically synthesized
  source 1..22: mol_type = other DNA
ttatttatagacaatacataat

SEQ ID NO: 103392 - DNA, 22 bp, synthetic construct
  misc_feature 1..22: note = chemically synthesized
  source 1..22: mol_type = other DNA
atttatagacaatacataatca

SEQ ID NO: 103393 - DNA, 22 bp, synthetic construct
  misc_feature 1..22: note = chemically synthesized
  source 1..22: mol_type = other DNA
tttatagacaatacataatcag

SEQ ID NO: 103394 - DNA, 22 bp, synthetic construct
  misc_feature 1..22: note = chemically synthesized
  source 1..22: mol_type = other DNA
atagacaatacataatcagtga

SEQ ID NO: 103395 - DNA, 22 bp, synthetic construct
  misc_feature 1..22: note = chemically synthesized
  source 1..22: mol_type = other DNA
tagacaatacataatcagtgac

SEQ ID NO: 103396 - DNA, 22 bp, synthetic construct
  misc_feature 1..22: note = chemically synthesized
  source 1..22: mol_type = other DNA
cctttcttttggcactgccttt

SEQ ID NO: 103397 - DNA, 22 bp, synthetic construct
  misc_feature 1..22: note = chemically synthesized
  source 1..22: mol_type = other DNA
tcttttggcactgcctttcttc

SEQ ID NO: 103398 - DNA, 22 bp, synthetic construct
  misc_feature 1..22: note = chemically synthesized
  source 1..22: mol_type = other DNA
cttttggcactgcctttcttcc

SEQ ID NO: 103399 - DNA, 22 bp, synthetic construct
  misc_feature 1..22: note = chemically synthesized
  source 1..22: mol_type = other DNA
ttttggcactgcctttcttcca

SEQ ID NO: 103400 - DNA, 22 bp, synthetic construct
  misc_feature 1..22: note = chemically synthesized
  source 1..22: mol_type = other DNA
ttggcactgcctttcttccaag

SEQ ID NO: 103401 - DNA, 22 bp, synthetic construct
  misc_feature 1..22: note = chemically synthesized
  source 1..22: mol_type = other DNA
tggcactgcctttcttccaaga

SEQ ID NO: 103402 - DNA, 22 bp, synthetic construct
  misc_feature 1..22: note = chemically synthesized
  source 1..22: mol_type = other DNA
ggcactgcctttcttccaagaa

SEQ ID NO: 103403 - DNA, 22 bp, synthetic construct
  misc_feature 1..22: note = chemically synthesized
  source 1..22: mol_type = other DNA
gcactgcctttcttccaagaac

SEQ ID NO: 103404 - DNA, 22 bp, synthetic construct
  misc_feature 1..22: note = chemically synthesized
  source 1..22: mol_type = other DNA
cctttcttccaagaacatgtca

SEQ ID NO: 103405 - DNA, 22 bp, synthetic construct
  misc_feature 1..22: note = chemically synthesized
  source 1..22: mol_type = other DNA
tcttccaagaacatgtcagaaa

SEQ ID NO: 103406 - DNA, 22 bp, synthetic construct
  misc_feature 1..22: note = chemically synthesized
  source 1..22: mol_type = other DNA
cttccaagaacatgtcagaaat

SEQ ID NO: 103407 - DNA, 22 bp, synthetic construct
  misc_feature 1..22: note = chemically synthesized
  source 1..22: mol_type = other DNA
ttccaagaacatgtcagaaatt

SEQ ID NO: 103408 - DNA, 22 bp, synthetic construct
  misc_feature 1..22: note = chemically synthesized
  source 1..22: mol_type = other DNA
ccaagaacatgtcagaaattga

SEQ ID NO: 103409 - DNA, 22 bp, synthetic construct
  misc_feature 1..22: note = chemically synthesized
  source 1..22: mol_type = other DNA
caagaacatgtcagaaattgat

SEQ ID NO: 103410 - DNA, 22 bp, synthetic construct
  misc_feature 1..22: note = chemically synthesized
  source 1..22: mol_type = other DNA
atggtgatttttgctcctttcc

SEQ ID NO: 103411 - DNA, 22 bp, synthetic construct
  misc_feature 1..22: note = chemically synthesized
  source 1..22: mol_type = other DNA
ttgctcctttccaactctttct

SEQ ID NO: 103412 - DNA, 22 bp, synthetic construct
  misc_feature 1..22: note = chemically synthesized
  source 1..22: mol_type = other DNA
tgctcctttccaactctttctt

SEQ ID NO: 103413 - DNA, 22 bp, synthetic construct
  misc_feature 1..22: note = chemically synthesized
  source 1..22: mol_type = other DNA
gctcctttccaactctttcttt

SEQ ID NO: 103414 - DNA, 22 bp, synthetic construct
  misc_feature 1..22: note = chemically synthesized
  source 1..22: mol_type = other DNA
ctcctttccaactctttctttc

SEQ ID NO: 103415 - DNA, 22 bp, synthetic construct
  misc_feature 1..22: note = chemically synthesized
  source 1..22: mol_type = other DNA
ctttccaactctttctttcctc

SEQ ID NO: 103416 - DNA, 22 bp, synthetic construct
  misc_feature 1..22: note = chemically synthesized
  source 1..22: mol_type = other DNA
tccaactctttctttcctctgc

SEQ ID NO: 103417 - DNA, 22 bp, synthetic construct
  misc_feature 1..22: note = chemically synthesized
  source 1..22: mol_type = other DNA
ccaactctttctttcctctgct

SEQ ID NO: 103418 - DNA, 22 bp, synthetic construct
  misc_feature 1..22: note = chemically synthesized
  source 1..22: mol_type = other DNA
caactctttctttcctctgctt

SEQ ID NO: 103419 - DNA, 22 bp, synthetic construct
  misc_feature 1..22: note = chemically synthesized
  source 1..22: mol_type = other DNA
tttctttcctctgcttttctaa

SEQ ID NO: 103420 - DNA, 22 bp, synthetic construct
  misc_feature 1..22: note = chemically synthesized
  source 1..22: mol_type = other DNA
tctttcctctgcttttctaaat

SEQ ID NO: 103421 - DNA, 22 bp, synthetic construct
  misc_feature 1..22: note = chemically synthesized
  source 1..22: mol_type = other DNA
ctttcctctgcttttctaaata

SEQ ID NO: 103422 - DNA, 22 bp, synthetic construct
  misc_feature 1..22: note = chemically synthesized
  source 1..22: mol_type = other DNA
tttcctctgcttttctaaataa

SEQ ID NO: 103423 - DNA, 22 bp, synthetic construct
  misc_feature 1..22: note = chemically synthesized
  source 1..22: mol_type = other DNA
tcctctgcttttctaaataacc

SEQ ID NO: 103424 - DNA, 22 bp, synthetic construct
  misc_feature 1..22: note = chemically synthesized
  source 1..22: mol_type = other DNA
cctctgcttttctaaataacct

SEQ ID NO: 103425 - DNA, 22 bp, synthetic construct
  misc_feature 1..22: note = chemically synthesized
  source 1..22: mol_type = other DNA
ctctgcttttctaaataacctg

SEQ ID NO: 103426 - DNA, 22 bp, synthetic construct
  misc_feature 1..22: note = chemically synthesized
  source 1..22: mol_type = other DNA
tgcttttctaaataacctgtaa

SEQ ID NO: 103427 - DNA, 22 bp, synthetic construct
  misc_feature 1..22: note = chemically synthesized
  source 1..22: mol_type = other DNA
cttttctaaataacctgtaaac

SEQ ID NO: 103428 - DNA, 22 bp, synthetic construct
  misc_feature 1..22: note = chemically synthesized
  source 1..22: mol_type = other DNA
ttctaaataacctgtaaacctt

SEQ ID NO: 103429 - DNA, 22 bp, synthetic construct
  misc_feature 1..22: note = chemically synthesized
  source 1..22: mol_type = other DNA
tctaaataacctgtaaacctta

SEQ ID NO: 103430 - DNA, 22 bp, synthetic construct
  misc_feature 1..22: note = chemically synthesized
  source 1..22: mol_type = other DNA
ctaaataacctgtaaaccttat

SEQ ID NO: 103431 - DNA, 22 bp, synthetic construct
  misc_feature 1..22: note = chemically synthesized
  source 1..22: mol_type = other DNA
taaataacctgtaaaccttatt

SEQ ID NO: 103432 - DNA, 22 bp, synthetic construct
  misc_feature 1..22: note = chemically synthesized
  source 1..22: mol_type = other DNA
aataacctgtaaaccttattat

SEQ ID NO: 103433 - DNA, 22 bp, synthetic construct
  misc_feature 1..22: note = chemically synthesized
  source 1..22: mol_type = other DNA
taaaccttattatatttagacc

SEQ ID NO: 103434 - DNA, 22 bp, synthetic construct
  misc_feature 1..22: note = chemically synthesized
  source 1..22: mol_type = other DNA
attatatttagaccttaaatat

SEQ ID NO: 103435 - DNA, 22 bp, synthetic construct
  misc_feature 1..22: note = chemically synthesized
  source 1..22: mol_type = other DNA
ttatatttagaccttaaatatt

SEQ ID NO: 103436 - DNA, 22 bp, synthetic construct
  misc_feature 1..22: note = chemically synthesized
  source 1..22: mol_type = other DNA
tatttagaccttaaatatttgt

SEQ ID NO: 103437 - DNA, 22 bp, synthetic construct
  misc_feature 1..22: note = chemically synthesized
  source 1..22: mol_type = other DNA
agaccttaaatatttgtcatat

SEQ ID NO: 103438 - DNA, 22 bp, synthetic construct
  misc_feature 1..22: note = chemically synthesized
  source 1..22: mol_type = other DNA
gaccttaaatatttgtcatatc

SEQ ID NO: 103439 - DNA, 22 bp, synthetic construct
  misc_feature 1..22: note = chemically synthesized
  source 1..22: mol_type = other DNA
aaatatttgtcatatctctcca

SEQ ID NO: 103440 - DNA, 22 bp, synthetic construct
  misc_feature 1..22: note = chemically synthesized
  source 1..22: mol_type = other DNA
aatatttgtcatatctctccat

SEQ ID NO: 103441 - DNA, 22 bp, synthetic construct
  misc_feature 1..22: note = chemically synthesized
  source 1..22: mol_type = other DNA
gtcatatctctccattaccatt

SEQ ID NO: 103442 - DNA, 22 bp, synthetic construct
  misc_feature 1..22: note = chemically synthesized
  source 1..22: mol_type = other DNA
tcatatctctccattaccattt

SEQ ID NO: 103443 - DNA, 22 bp, synthetic construct
  misc_feature 1..22: note = chemically synthesized
  source 1..22: mol_type = other DNA
tccattaccatttccactttcc

SEQ ID NO: 103444 - DNA, 22 bp, synthetic construct
  misc_feature 1..22: note = chemically synthesized
  source 1..22: mol_type = other DNA
cattaccatttccactttccta

SEQ ID NO: 103445 - DNA, 22 bp, synthetic construct
  misc_feature 1..22: note = chemically synthesized
  source 1..22: mol_type = other DNA
ccatttccactttcctaaattg

SEQ ID NO: 103446 - DNA, 22 bp, synthetic construct
  misc_feature 1..22: note = chemically synthesized
  source 1..22: mol_type = other DNA
ccactttcctaaattgagttac

SEQ ID NO: 103447 - DNA, 22 bp, synthetic construct
  misc_feature 1..22: note = chemically synthesized
  source 1..22: mol_type = other DNA
cactttcctaaattgagttact

SEQ ID NO: 103448 - DNA, 22 bp, synthetic construct
  misc_feature 1..22: note = chemically synthesized
  source 1..22: mol_type = other DNA
tcctaaattgagttactattat

SEQ ID NO: 103449 - DNA, 22 bp, synthetic construct
  misc_feature 1..22: note = chemically synthesized
  source 1..22: mol_type = other DNA
cctaaattgagttactattatc

SEQ ID NO: 103450 - DNA, 22 bp, synthetic construct
  misc_feature 1..22: note = chemically synthesized
  source 1..22: mol_type = other DNA
ctaaattgagttactattatct

SEQ ID NO: 103451 - DNA, 22 bp, synthetic construct
  misc_feature 1..22: note = chemically synthesized
  source 1..22: mol_type = other DNA
aattgagttactattatctttc

SEQ ID NO: 103452 - DNA, 22 bp, synthetic construct
  misc_feature 1..22: note = chemically synthesized
  source 1..22: mol_type = other DNA
agttactattatctttcttcaa

SEQ ID NO: 103453 - DNA, 22 bp, synthetic construct
  misc_feature 1..22: note = chemically synthesized
  source 1..22: mol_type = other DNA
ctattatctttcttcaaattac

SEQ ID NO: 103454 - DNA, 22 bp, synthetic construct
  misc_feature 1..22: note = chemically synthesized
  source 1..22: mol_type = other DNA
ttatctttcttcaaattactct

SEQ ID NO: 103455 - DNA, 22 bp, synthetic construct
  misc_feature 1..22: note = chemically synthesized
  source 1..22: mol_type = other DNA
tctttcttcaaattactctaat

SEQ ID NO: 103456 - DNA, 22 bp, synthetic construct
  misc_feature 1..22: note = chemically synthesized
  source 1..22: mol_type = other DNA
tcttcaaattactctaatattc

SEQ ID NO: 103457 - DNA, 22 bp, synthetic construct
  misc_feature 1..22: note = chemically synthesized
  source 1..22: mol_type = other DNA
cttcaaattactctaatattct

SEQ ID NO: 103458 - DNA, 22 bp, synthetic construct
  misc_feature 1..22: note = chemically synthesized
  source 1..22: mol_type = other DNA
ttcaaattactctaatattctg

SEQ ID NO: 103459 - DNA, 22 bp, synthetic construct
  misc_feature 1..22: note = chemically synthesized
  source 1..22: mol_type = other DNA
caaattactctaatattctgcc

SEQ ID NO: 103460 - DNA, 22 bp, synthetic construct
  misc_feature 1..22: note = chemically synthesized
  source 1..22: mol_type = other DNA
aaattactctaatattctgccc

SEQ ID NO: 103461 - DNA, 22 bp, synthetic construct
  misc_feature 1..22: note = chemically synthesized
  source 1..22: mol_type = other DNA
ctctaatattctgccctttccc

SEQ ID NO: 103462 - DNA, 22 bp, synthetic construct
  misc_feature 1..22: note = chemically synthesized
  source 1..22: mol_type = other DNA
taatattctgccctttccctgc

SEQ ID NO: 103463 - DNA, 22 bp, synthetic construct
  misc_feature 1..22: note = chemically synthesized
  source 1..22: mol_type = other DNA
atattctgccctttccctgcct

SEQ ID NO: 103464 - DNA, 22 bp, synthetic construct
  misc_feature 1..22: note = chemically synthesized
  source 1..22: mol_type = other DNA
tgccctttccctgcctccctca

SEQ ID NO: 103465 - DNA, 22 bp, synthetic construct
  misc_feature 1..22: note = chemically synthesized
  source 1..22: mol_type = other DNA
ccctttccctgcctccctcaat

SEQ ID NO: 103466 - DNA, 22 bp, synthetic construct
  misc_feature 1..22: note = chemically synthesized
  source 1..22: mol_type = other DNA
tccctgcctccctcaattccat

SEQ ID NO: 103467 - DNA, 22 bp, synthetic construct
  misc_feature 1..22: note = chemically synthesized
  source 1..22: mol_type = other DNA
ccctgcctccctcaattccatt

SEQ ID NO: 103468 - DNA, 22 bp, synthetic construct
  misc_feature 1..22: note = chemically synthesized
  source 1..22: mol_type = other DNA
cctgcctccctcaattccattt

SEQ ID NO: 103469 - DNA, 22 bp, synthetic construct
  misc_feature 1..22: note = chemically synthesized
  source 1..22: mol_type = other DNA
cctccctcaattccattttata

SEQ ID NO: 103470 - DNA, 22 bp, synthetic construct
  misc_feature 1..22: note = chemically synthesized
  source 1..22: mol_type = other DNA
cctcaattccattttataaata

SEQ ID NO: 103471 - DNA, 22 bp, synthetic construct
  misc_feature 1..22: note = chemically synthesized
  source 1..22: mol_type = other DNA
aattccattttataaataatat

SEQ ID NO: 103472 - DNA, 22 bp, synthetic construct
  misc_feature 1..22: note = chemically synthesized
  source 1..22: mol_type = other DNA
cattttataaataatattgaag

SEQ ID NO: 103473 - DNA, 22 bp, synthetic construct
  misc_feature 1..22: note = chemically synthesized
  source 1..22: mol_type = other DNA
tataaataatattgaagtaatt

SEQ ID NO: 103474 - DNA, 22 bp, synthetic construct
  misc_feature 1..22: note = chemically synthesized
  source 1..22: mol_type = other DNA
ataaataatattgaagtaattt

SEQ ID NO: 103475 - DNA, 22 bp, synthetic construct
  misc_feature 1..22: note = chemically synthesized
  source 1..22: mol_type = other DNA
taaataatattgaagtaatttt

SEQ ID NO: 103476 - DNA, 22 bp, synthetic construct
  misc_feature 1..22: note = chemically synthesized
  source 1..22: mol_type = other DNA
aagtaattttaaaacatcaatg

SEQ ID NO: 103477 - DNA, 22 bp, synthetic construct
  misc_feature 1..22: note = chemically synthesized
  source 1..22: mol_type = other DNA
taaaacatcaatgaattatgca

SEQ ID NO: 103478 - DNA, 22 bp, synthetic construct
  misc_feature 1..22: note = chemically synthesized
  source 1..22: mol_type = other DNA
aaaacatcaatgaattatgcag

SEQ ID NO: 103479 - DNA, 22 bp, synthetic construct
  misc_feature 1..22: note = chemically synthesized
  source 1..22: mol_type = other DNA
aaacatcaatgaattatgcagc

SEQ ID NO: 103480 - DNA, 22 bp, synthetic construct
  misc_feature 1..22: note = chemically synthesized
  source 1..22: mol_type = other DNA
tgcagcttctttcagtagcttt

SEQ ID NO: 103481 - DNA, 22 bp, synthetic construct
  misc_feature 1..22: note = chemically synthesized
  source 1..22: mol_type = other DNA
ctttcagtagctttccatgact

SEQ ID NO: 103482 - DNA, 22 bp, synthetic construct
  misc_feature 1..22: note = chemically synthesized
  source 1..22: mol_type = other DNA
tttcagtagctttccatgactc

SEQ ID NO: 103483 - DNA, 22 bp, synthetic construct
  misc_feature 1..22: note = chemically synthesized
  source 1..22: mol_type = other DNA
tcagtagctttccatgactccg

SEQ ID NO: 103484 - DNA, 22 bp, synthetic construct
  misc_feature 1..22: note = chemically synthesized
  source 1..22: mol_type = other DNA
cagtagctttccatgactccga

SEQ ID NO: 103485 - DNA, 22 bp, synthetic construct
  misc_feature 1..22: note = chemically synthesized
  source 1..22: mol_type = other DNA
agtagctttccatgactccgag

SEQ ID NO: 103486 - DNA, 22 bp, synthetic construct
  misc_feature 1..22: note = chemically synthesized
  source 1..22: mol_type = other DNA
tccatgactccgagtagagact

SEQ ID NO: 103487 - DNA, 22 bp, synthetic construct
  misc_feature 1..22: note = chemically synthesized
  source 1..22: mol_type = other DNA
ccatgactccgagtagagactc

SEQ ID NO: 103488 - DNA, 22 bp, synthetic construct
  misc_feature 1..22: note = chemically synthesized
  source 1..22: mol_type = other DNA
catgactccgagtagagactca

SEQ ID NO: 103489 - DNA, 22 bp, synthetic construct
  misc_feature 1..22: note = chemically synthesized
  source 1..22: mol_type = other DNA
cgagtagagactcaaactctta

SEQ ID NO: 103490 - DNA, 22 bp, synthetic construct
  misc_feature 1..22: note = chemically synthesized
  source 1..22: mol_type = other DNA
aaactcttatgatgaccaataa

SEQ ID NO: 103491 - DNA, 22 bp, synthetic construct
  misc_feature 1..22: note = chemically synthesized
  source 1..22: mol_type = other DNA
ttatgatgaccaataaggccat

SEQ ID NO: 103492 - DNA, 22 bp, synthetic construct
  misc_feature 1..22: note = chemically synthesized
  source 1..22: mol_type = other DNA
atgatgaccaataaggccattc

SEQ ID NO: 103493 - DNA, 22 bp, synthetic construct
  misc_feature 1..22: note = chemically synthesized
  source 1..22: mol_type = other DNA
tgatgaccaataaggccattcc

SEQ ID NO: 103494 - DNA, 22 bp, synthetic construct
  misc_feature 1..22: note = chemically synthesized
  source 1..22: mol_type = other DNA
cttccctcttcagcctcttctc

SEQ ID NO: 103495 - DNA, 22 bp, synthetic construct
  misc_feature 1..22: note = chemically synthesized
  source 1..22: mol_type = other DNA
ccctcttcagcctcttctcaaa

SEQ ID NO: 103496 - DNA, 22 bp, synthetic construct
  misc_feature 1..22: note = chemically synthesized
  source 1..22: mol_type = other DNA
cctcttcagcctcttctcaaag

SEQ ID NO: 103497 - DNA, 22 bp, synthetic construct
  misc_feature 1..22: note = chemically synthesized
  source 1..22: mol_type = other DNA
ttcagcctcttctcaaagcaaa

SEQ ID NO: 103498 - DNA, 22 bp, synthetic construct
  misc_feature 1..22: note = chemically synthesized
  source 1..22: mol_type = other DNA
cagcctcttctcaaagcaaaca

SEQ ID NO: 103499 - DNA, 22 bp, synthetic construct
  misc_feature 1..22: note = chemically synthesized
  source 1..22: mol_type = other DNA
agcctcttctcaaagcaaacac

SEQ ID NO: 103500 - DNA, 22 bp, synthetic construct
  misc_feature 1..22: note = chemically synthesized
  source 1..22: mol_type = other DNA
ttctcaaagcaaacaccctctt

SEQ ID NO: 103501 - DNA, 22 bp, synthetic construct
  misc_feature 1..22: note = chemically synthesized
  source 1..22: mol_type = other DNA
ctcaaagcaaacaccctcttcc

SEQ ID NO: 103502 - DNA, 22 bp, synthetic construct
  misc_feature 1..22: note = chemically synthesized
  source 1..22: mol_type = other DNA
tcaaagcaaacaccctcttcca

SEQ ID NO: 103503 - DNA, 22 bp, synthetic construct
  misc_feature 1..22: note = chemically synthesized
  source 1..22: mol_type = other DNA
aaagcaaacaccctcttccagt

SEQ ID NO: 103504 - DNA, 22 bp, synthetic construct
  misc_feature 1..22: note = chemically synthesized
  source 1..22: mol_type = other DNA
ttccagtagccaccttccctaa

SEQ ID NO: 103505 - DNA, 22 bp, synthetic construct
  misc_feature 1..22: note = chemically synthesized
  source 1..22: mol_type = other DNA
ccagtagccaccttccctaata

SEQ ID NO: 103506 - DNA, 22 bp, synthetic construct
  misc_feature 1..22: note = chemically synthesized
  source 1..22: mol_type = other DNA
cagtagccaccttccctaatat

SEQ ID NO: 103507 - DNA, 22 bp, synthetic construct
  misc_feature 1..22: note = chemically synthesized
  source 1..22: mol_type = other DNA
ccctaatataaaccaacctagc

SEQ ID NO: 103508 - DNA, 22 bp, synthetic construct
  misc_feature 1..22: note = chemically synthesized
  source 1..22: mol_type = other DNA
cctaatataaaccaacctagct

SEQ ID NO: 103509 - DNA, 22 bp, synthetic construct
  misc_feature 1..22: note = chemically synthesized
  source 1..22: mol_type = other DNA
atataaaccaacctagctgagg

SEQ ID NO: 103510 - DNA, 22 bp, synthetic construct
  misc_feature 1..22: note = chemically synthesized
  source 1..22: mol_type = other DNA
gctgaggtctccacacacactc

SEQ ID NO: 103511 - DNA, 22 bp, synthetic construct
  misc_feature 1..22: note = chemically synthesized
  source 1..22: mol_type = other DNA
aggtctccacacacactccttc

SEQ ID NO: 103512 - DNA, 22 bp, synthetic construct
  misc_feature 1..22: note = chemically synthesized
  source 1..22: mol_type = other DNA
cacacacactccttcagtctta

SEQ ID NO: 103513 - DNA, 22 bp, synthetic construct
  misc_feature 1..22: note = chemically synthesized
  source 1..22: mol_type = other DNA
cttcagtcttagaatattcttg

SEQ ID NO: 103514 - DNA, 22 bp, synthetic construct
  misc_feature 1..22: note = chemically synthesized
  source 1..22: mol_type = other DNA
cagtcttagaatattcttgtct

SEQ ID NO: 103515 - DNA, 22 bp, synthetic construct
  misc_feature 1..22: note = chemically synthesized
  source 1..22: mol_type = other DNA
agtcttagaatattcttgtctg

SEQ ID NO: 103516 - DNA, 22 bp, synthetic construct
  misc_feature 1..22: note = chemically synthesized
  source 1..22: mol_type = other DNA
agaatattcttgtctgtatttt

SEQ ID NO: 103517 - DNA, 22 bp, synthetic construct
  misc_feature 1..22: note = chemically synthesized
  source 1..22: mol_type = other DNA
gaatattcttgtctgtattttc

SEQ ID NO: 103518 - DNA, 22 bp, synthetic construct
  misc_feature 1..22: note = chemically synthesized
  source 1..22: mol_type = other DNA
ttgtctgtattttcaccagtta

SEQ ID NO: 103519 - DNA, 22 bp, synthetic construct
  misc_feature 1..22: note = chemically synthesized
  source 1..22: mol_type = other DNA
gtctgtattttcaccagttagt

SEQ ID NO: 103520 - DNA, 22 bp, synthetic construct
  misc_feature 1..22: note = chemically synthesized
  source 1..22: mol_type = other DNA
tctgtattttcaccagttagtt

SEQ ID NO: 103521 - DNA, 22 bp, synthetic construct
  misc_feature 1..22: note = chemically synthesized
  source 1..22: mol_type = other DNA
tattttcaccagttagtttcta

SEQ ID NO: 103522 - DNA, 22 bp, synthetic construct
  misc_feature 1..22: note = chemically synthesized
  source 1..22: mol_type = other DNA
tcaccagttagtttctaatcca

SEQ ID NO: 103523 - DNA, 22 bp, synthetic construct
  misc_feature 1..22: note = chemically synthesized
  source 1..22: mol_type = other DNA
caccagttagtttctaatccat

SEQ ID NO: 103524 - DNA, 22 bp, synthetic construct
  misc_feature 1..22: note = chemically synthesized
  source 1..22: mol_type = other DNA
accagttagtttctaatccatt

SEQ ID NO: 103525 - DNA, 22 bp, synthetic construct
  misc_feature 1..22: note = chemically synthesized
  source 1..22: mol_type = other DNA
gtttctaatccattttcaggtc

SEQ ID NO: 103526 - DNA, 22 bp, synthetic construct
  misc_feature 1..22: note = chemically synthesized
  source 1..22: mol_type = other DNA
ctaatccattttcaggtctcag

SEQ ID NO: 103527 - DNA, 22 bp, synthetic construct
  misc_feature 1..22: note = chemically synthesized
  source 1..22: mol_type = other DNA
taatccattttcaggtctcagc

SEQ ID NO: 103528 - DNA, 22 bp, synthetic construct
  misc_feature 1..22: note = chemically synthesized
  source 1..22: mol_type = other DNA
atccattttcaggtctcagctg

SEQ ID NO: 103529 - DNA, 22 bp, synthetic construct
  misc_feature 1..22: note = chemically synthesized
  source 1..22: mol_type = other DNA
tcaggtctcagctgaagggaca

SEQ ID NO: 103530 - DNA, 22 bp, synthetic construct
  misc_feature 1..22: note = chemically synthesized
  source 1..22: mol_type = other DNA
caggtctcagctgaagggacac

SEQ ID NO: 103531 - DNA, 22 bp, synthetic construct
  misc_feature 1..22: note = chemically synthesized
  source 1..22: mol_type = other DNA
aggtctcagctgaagggacact

SEQ ID NO: 103532 - DNA, 22 bp, synthetic construct
  misc_feature 1..22: note = chemically synthesized
  source 1..22: mol_type = other DNA
agctgaagggacactttctcag

SEQ ID NO: 103533 - DNA, 22 bp, synthetic construct
  misc_feature 1..22: note = chemically synthesized
  source 1..22: mol_type = other DNA
aagggacactttctcagggaat

SEQ ID NO: 103534 - DNA, 22 bp, synthetic construct
  misc_feature 1..22: note = chemically synthesized
  source 1..22: mol_type = other DNA
tctcagggaatcttacccttat

SEQ ID NO: 103535 - DNA, 22 bp, synthetic construct
  misc_feature 1..22: note = chemically synthesized
  source 1..22: mol_type = other DNA
ctcagggaatcttacccttatt

SEQ ID NO: 103536 - DNA, 22 bp, synthetic construct
  misc_feature 1..22: note = chemically synthesized
  source 1..22: mol_type = other DNA
tcagggaatcttacccttattt

SEQ ID NO: 103537 - DNA, 22 bp, synthetic construct
  misc_feature 1..22: note = chemically synthesized
  source 1..22: mol_type = other DNA
agggaatcttacccttatttca

SEQ ID NO: 103538 - DNA, 22 bp, synthetic construct
  misc_feature 1..22: note = chemically synthesized
  source 1..22: mol_type = other DNA
acccttatttcaagccataacc

SEQ ID NO: 103539 - DNA, 22 bp, synthetic construct
  misc_feature 1..22: note = chemically synthesized
  source 1..22: mol_type = other DNA
cccttatttcaagccataacct

SEQ ID NO: 103540 - DNA, 22 bp, synthetic construct
  misc_feature 1..22: note = chemically synthesized
  source 1..22: mol_type = other DNA
atttcaagccataacctcaagc

SEQ ID NO: 103541 - DNA, 22 bp, synthetic construct
  misc_feature 1..22: note = chemically synthesized
  source 1..22: mol_type = other DNA
tttcaagccataacctcaagcc

SEQ ID NO: 103542 - DNA, 22 bp, synthetic construct
  misc_feature 1..22: note = chemically synthesized
  source 1..22: mol_type = other DNA
caagccataacctcaagccttt

SEQ ID NO: 103543 - DNA, 22 bp, synthetic construct
  misc_feature 1..22: note = chemically synthesized
  source 1..22: mol_type = other DNA
aagccataacctcaagcctttt

SEQ ID NO: 103544 - DNA, 22 bp, synthetic construct
  misc_feature 1..22: note = chemically synthesized
  source 1..22: mol_type = other DNA
aagccttttttgagacccacac

SEQ ID NO: 103545 - DNA, 22 bp, synthetic construct
  misc_feature 1..22: note = chemically synthesized
  source 1..22: mol_type = other DNA
ttttgagacccacactctccat

SEQ ID NO: 103546 - DNA, 22 bp, synthetic construct
  misc_feature 1..22: note = chemically synthesized
  source 1..22: mol_type = other DNA
tttgagacccacactctccatt

SEQ ID NO: 103547 - DNA, 22 bp, synthetic construct
  misc_feature 1..22: note = chemically synthesized
  source 1..22: mol_type = other DNA
ttgagacccacactctccattc

SEQ ID NO: 103548 - DNA, 22 bp, synthetic construct
  misc_feature 1..22: note = chemically synthesized
  source 1..22: mol_type = other DNA
tgagacccacactctccattca

SEQ ID NO: 103549 - DNA, 22 bp, synthetic construct
  misc_feature 1..22: note = chemically synthesized
  source 1..22: mol_type = other DNA
gagacccacactctccattcag

SEQ ID NO: 103550 - DNA, 22 bp, synthetic construct
  misc_feature 1..22: note = chemically synthesized
  source 1..22: mol_type = other DNA
agacccacactctccattcagt

SEQ ID NO: 103551 - DNA, 22 bp, synthetic construct
  misc_feature 1..22: note = chemically synthesized
  source 1..22: mol_type = other DNA
tccattcagtgtcttctttctg

SEQ ID NO: 103552 - DNA, 22 bp, synthetic construct
  misc_feature 1..22: note = chemically synthesized
  source 1..22: mol_type = other DNA
cattcagtgtcttctttctgct

SEQ ID NO: 103553 - DNA, 22 bp, synthetic construct
  misc_feature 1..22: note = chemically synthesized
  source 1..22: mol_type = other DNA
agtgtcttctttctgctttatg

SEQ ID NO: 103554 - DNA, 22 bp, synthetic construct
  misc_feature 1..22: note = chemically synthesized
  source 1..22: mol_type = other DNA
ctttctgctttatgattaatca

SEQ ID NO: 103555 - DNA, 22 bp, synthetic construct
  misc_feature 1..22: note = chemically synthesized
  source 1..22: mol_type = other DNA
tttctgctttatgattaatcac

SEQ ID NO: 103556 - DNA, 22 bp, synthetic construct
  misc_feature 1..22: note = chemically synthesized
  source 1..22: mol_type = other DNA
tctgctttatgattaatcacag

SEQ ID NO: 103557 - DNA, 22 bp, synthetic construct
  misc_feature 1..22: note = chemically synthesized
  source 1..22: mol_type = other DNA
ctgctttatgattaatcacagc

SEQ ID NO: 103558 - DNA, 22 bp, synthetic construct
  misc_feature 1..22: note = chemically synthesized
  source 1..22: mol_type = other DNA
tgctttatgattaatcacagca

SEQ ID NO: 103559 - DNA, 22 bp, synthetic construct
  misc_feature 1..22: note = chemically synthesized
  source 1..22: mol_type = other DNA
ctttatgattaatcacagcact

SEQ ID NO: 103560 - DNA, 22 bp, synthetic construct
  misc_feature 1..22: note = chemically synthesized
  source 1..22: mol_type = other DNA
tatgattaatcacagcacttgt

SEQ ID NO: 103561 - DNA, 22 bp, synthetic construct
  misc_feature 1..22: note = chemically synthesized
  source 1..22: mol_type = other DNA
atgattaatcacagcacttgtt

SEQ ID NO: 103562 - DNA, 22 bp, synthetic construct
  misc_feature 1..22: note = chemically synthesized
  source 1..22: mol_type = other DNA
tgattaatcacagcacttgttt

SEQ ID NO: 103563 - DNA, 22 bp, synthetic construct
  misc_feature 1..22: note = chemically synthesized
  source 1..22: mol_type = other DNA
atcacagcacttgttttaaatt

SEQ ID NO: 103564 - DNA, 22 bp, synthetic construct
  misc_feature 1..22: note = chemically synthesized
  source 1..22: mol_type = other DNA
gttttaaatttggatttctttt

SEQ ID NO: 103565 - DNA, 22 bp, synthetic construct
  misc_feature 1..22: note = chemically synthesized
  source 1..22: mol_type = other DNA
ttttaaatttggatttctttta

SEQ ID NO: 103566 - DNA, 22 bp, synthetic construct
  misc_feature 1..22: note = chemically synthesized
  source 1..22: mol_type = other DNA
taaatttggatttcttttattc

SEQ ID NO: 103567 - DNA, 22 bp, synthetic construct
  misc_feature 1..22: note = chemically synthesized
  source 1..22: mol_type = other DNA
aaatttggatttcttttattct

SEQ ID NO: 103568 - DNA, 22 bp, synthetic construct
  misc_feature 1..22: note = chemically synthesized
  source 1..22: mol_type = other DNA
aatttggatttcttttattctt

SEQ ID NO: 103569 - DNA, 22 bp, synthetic construct
  misc_feature 1..22: note = chemically synthesized
  source 1..22: mol_type = other DNA
ggatttcttttattctttgagt

SEQ ID NO: 103570 - DNA, 22 bp, synthetic construct
  misc_feature 1..22: note = chemically synthesized
  source 1..22: mol_type = other DNA
gatttcttttattctttgagtc

SEQ ID NO: 103571 - DNA, 22 bp, synthetic construct
  misc_feature 1..22: note = chemically synthesized
  source 1..22: mol_type = other DNA
cttttattctttgagtccccac

SEQ ID NO: 103572 - DNA, 22 bp, synthetic construct
  misc_feature 1..22: note = chemically synthesized
  source 1..22: mol_type = other DNA
ttttattctttgagtccccact

SEQ ID NO: 103573 - DNA, 22 bp, synthetic construct
  misc_feature 1..22: note = chemically synthesized
  source 1..22: mol_type = other DNA
ttattctttgagtccccactta

SEQ ID NO: 103574 - DNA, 22 bp, synthetic construct
  misc_feature 1..22: note = chemically synthesized
  source 1..22: mol_type = other DNA
tattctttgagtccccacttat

SEQ ID NO: 103575 - DNA, 22 bp, synthetic construct
  misc_feature 1..22: note = chemically synthesized
  source 1..22: mol_type = other DNA
attctttgagtccccacttatt

SEQ ID NO: 103576 - DNA, 22 bp, synthetic construct
  misc_feature 1..22: note = chemically synthesized
  source 1..22: mol_type = other DNA
ttctttgagtccccacttattt

SEQ ID NO: 103577 - DNA, 22 bp, synthetic construct
  misc_feature 1..22: note = chemically synthesized
  source 1..22: mol_type = other DNA
tttgagtccccacttatttgaa

SEQ ID NO: 103578 - DNA, 22 bp, synthetic construct
  misc_feature 1..22: note = chemically synthesized
  source 1..22: mol_type = other DNA
tgagtccccacttatttgaaga

SEQ ID NO: 103579 - DNA, 22 bp, synthetic construct
  misc_feature 1..22: note = chemically synthesized
  source 1..22: mol_type = other DNA
gagtccccacttatttgaagac

SEQ ID NO: 103580 - DNA, 22 bp, synthetic construct
  misc_feature 1..22: note = chemically synthesized
  source 1..22: mol_type = other DNA
agtccccacttatttgaagact

SEQ ID NO: 103581 - DNA, 22 bp, synthetic construct
  misc_feature 1..22: note = chemically synthesized
  source 1..22: mol_type = other DNA
atttgaagactttaagaagaaa

SEQ ID NO: 103582 - DNA, 22 bp, synthetic construct
  misc_feature 1..22: note = chemically synthesized
  source 1..22: mol_type = other DNA
tttgaagactttaagaagaaaa

SEQ ID NO: 103583 - DNA, 22 bp, synthetic construct
  misc_feature 1..22: note = chemically synthesized
  source 1..22: mol_type = other DNA
gaagactttaagaagaaaagtt

SEQ ID NO: 103584 - DNA, 22 bp, synthetic construct
  misc_feature 1..22: note = chemically synthesized
  source 1..22: mol_type = other DNA
aagactttaagaagaaaagttt

SEQ ID NO: 103585 - DNA, 22 bp, synthetic construct
  misc_feature 1..22: note = chemically synthesized
  source 1..22: mol_type = other DNA
taagaagaaaagtttgtctatt

SEQ ID NO: 103586 - DNA, 22 bp, synthetic construct
  misc_feature 1..22: note = chemically synthesized
  source 1..22: mol_type = other DNA
aagaagaaaagtttgtctattt

SEQ ID NO: 103587 - DNA, 22 bp, synthetic construct
  misc_feature 1..22: note = chemically synthesized
  source 1..22: mol_type = other DNA
agaagaaaagtttgtctatttg

SEQ ID NO: 103588 - DNA, 22 bp, synthetic construct
  misc_feature 1..22: note = chemically synthesized
  source 1..22: mol_type = other DNA
gtctatttgctctcttatatca

SEQ ID NO: 103589 - DNA, 22 bp, synthetic construct
  misc_feature 1..22: note = chemically synthesized
  source 1..22: mol_type = other DNA
tctatttgctctcttatatcat

SEQ ID NO: 103590 - DNA, 22 bp, synthetic construct
  misc_feature 1..22: note = chemically synthesized
  source 1..22: mol_type = other DNA
tttgctctcttatatcattttt

SEQ ID NO: 103591 - DNA, 22 bp, synthetic construct
  misc_feature 1..22: note = chemically synthesized
  source 1..22: mol_type = other DNA
gctctcttatatcatttttgct

SEQ ID NO: 103592 - DNA, 22 bp, synthetic construct
  misc_feature 1..22: note = chemically synthesized
  source 1..22: mol_type = other DNA
ctctcttatatcatttttgctt

SEQ ID NO: 103593 - DNA, 22 bp, synthetic construct
  misc_feature 1..22: note = chemically synthesized
  source 1..22: mol_type = other DNA
tcttatatcatttttgcttagc

SEQ ID NO: 103594 - DNA, 22 bp, synthetic construct
  misc_feature 1..22: note = chemically synthesized
  source 1..22: mol_type = other DNA
ttatatcatttttgcttagcaa

SEQ ID NO: 103595 - DNA, 22 bp, synthetic construct
  misc_feature 1..22: note = chemically synthesized
  source 1..22: mol_type = other DNA
atatcatttttgcttagcaagg

SEQ ID NO: 103596 - DNA, 22 bp, synthetic construct
  misc_feature 1..22: note = chemically synthesized
  source 1..22: mol_type = other DNA
tatcatttttgcttagcaaggt

SEQ ID NO: 103597 - DNA, 22 bp, synthetic construct
  misc_feature 1..22: note = chemically synthesized
  source 1..22: mol_type = other DNA
ttgcttagcaaggtgacccata

SEQ ID NO: 103598 - DNA, 22 bp, synthetic construct
  misc_feature 1..22: note = chemically synthesized
  source 1..22: mol_type = other DNA
tgcttagcaaggtgacccataa

SEQ ID NO: 103599 - DNA, 22 bp, synthetic construct
  misc_feature 1..22: note = chemically synthesized
  source 1..22: mol_type = other DNA
gcttagcaaggtgacccataat

SEQ ID NO: 103600 - DNA, 22 bp, synthetic construct
  misc_feature 1..22: note = chemically synthesized
  source 1..22: mol_type = other DNA
cttagcaaggtgacccataata

SEQ ID NO: 103601 - DNA, 22 bp, synthetic construct
  misc_feature 1..22: note = chemically synthesized
  source 1..22: mol_type = other DNA
agcaaggtgacccataatagtg

SEQ ID NO: 103602 - DNA, 22 bp, synthetic construct
  misc_feature 1..22: note = chemically synthesized
  source 1..22: mol_type = other DNA
gcaaggtgacccataatagtgc

SEQ ID NO: 103603 - DNA, 22 bp, synthetic construct
  misc_feature 1..22: note = chemically synthesized
  source 1..22: mol_type = other DNA
aaaaaattaaccaaaggaatga

SEQ ID NO: 103604 - DNA, 22 bp, synthetic construct
  misc_feature 1..22: note = chemically synthesized
  source 1..22: mol_type = other DNA
aaaaattaaccaaaggaatgat

SEQ ID NO: 103605 - DNA, 22 bp, synthetic construct
  misc_feature 1..22: note = chemically synthesized
  source 1..22: mol_type = other DNA
accaaaggaatgattaaatatt

SEQ ID NO: 103606 - DNA, 22 bp, synthetic construct
  misc_feature 1..22: note = chemically synthesized
  source 1..22: mol_type = other DNA
aatattagtggtgtttccacga

SEQ ID NO: 103607 - DNA, 22 bp, synthetic construct
  misc_feature 1..22: note = chemically synthesized
  source 1..22: mol_type = other DNA
gtggtgtttccacgaaaatagg

SEQ ID NO: 103608 - DNA, 22 bp, synthetic construct
  misc_feature 1..22: note = chemically synthesized
  source 1..22: mol_type = other DNA
ccacgaaaataggcacatgagg

SEQ ID NO: 103609 - DNA, 22 bp, synthetic construct
  misc_feature 1..22: note = chemically synthesized
  source 1..22: mol_type = other DNA
cacgaaaataggcacatgagga

SEQ ID NO: 103610 - DNA, 22 bp, synthetic construct
  misc_feature 1..22: note = chemically synthesized
  source 1..22: mol_type = other DNA
aaagtcctactctcctccaaac

SEQ ID NO: 103611 - DNA, 22 bp, synthetic construct
  misc_feature 1..22: note = chemically synthesized
  source 1..22: mol_type = other DNA
aagtcctactctcctccaaaca

SEQ ID NO: 103612 - DNA, 22 bp, synthetic construct
  misc_feature 1..22: note = chemically synthesized
  source 1..22: mol_type = other DNA
ctctcctccaaacacaaaccct

SEQ ID NO: 103613 - DNA, 22 bp, synthetic construct
  misc_feature 1..22: note = chemically synthesized
  source 1..22: mol_type = other DNA
tcctccaaacacaaaccctttt

SEQ ID NO: 103614 - DNA, 22 bp, synthetic construct
  misc_feature 1..22: note = chemically synthesized
  source 1..22: mol_type = other DNA
ctccaaacacaaacccttttaa

SEQ ID NO: 103615 - DNA, 22 bp, synthetic construct
  misc_feature 1..22: note = chemically synthesized
  source 1..22: mol_type = other DNA
caaacacaaacccttttaaaca

SEQ ID NO: 103616 - DNA, 22 bp, synthetic construct
  misc_feature 1..22: note = chemically synthesized
  source 1..22: mol_type = other DNA
ttaaacataggatatgtacaaa

SEQ ID NO: 103617 - DNA, 22 bp, synthetic construct
  misc_feature 1..22: note = chemically synthesized
  source 1..22: mol_type = other DNA
taaacataggatatgtacaaat

SEQ ID NO: 103618 - DNA, 22 bp, synthetic construct
  misc_feature 1..22: note = chemically synthesized
  source 1..22: mol_type = other DNA
aaacataggatatgtacaaata

SEQ ID NO: 103619 - DNA, 22 bp, synthetic construct
  misc_feature 1..22: note = chemically synthesized
  source 1..22: mol_type = other DNA
aacataggatatgtacaaataa

SEQ ID NO: 103620 - DNA, 22 bp, synthetic construct
  misc_feature 1..22: note = chemically synthesized
  source 1..22: mol_type = other DNA
ggcaaaagtataagaaaaagat

SEQ ID NO: 103621 - DNA, 22 bp, synthetic construct
  misc_feature 1..22: note = chemically synthesized
  source 1..22: mol_type = other DNA
aagtcagcaagggctttgatag

SEQ ID NO: 103622 - DNA, 22 bp, synthetic construct
  misc_feature 1..22: note = chemically synthesized
  source 1..22: mol_type = other DNA
tgatagtatggctccaatactt

SEQ ID NO: 103623 - DNA, 22 bp, synthetic construct
  misc_feature 1..22: note = chemically synthesized
  source 1..22: mol_type = other DNA
gatagtatggctccaatacttc

SEQ ID NO: 103624 - DNA, 22 bp, synthetic construct
  misc_feature 1..22: note = chemically synthesized
  source 1..22: mol_type = other DNA
atagtatggctccaatacttca

SEQ ID NO: 103625 - DNA, 22 bp, synthetic construct
  misc_feature 1..22: note = chemically synthesized
  source 1..22: mol_type = other DNA
caatacttcagtagataaagta

SEQ ID NO: 103626 - DNA, 22 bp, synthetic construct
  misc_feature 1..22: note = chemically synthesized
  source 1..22: mol_type = other DNA
cagtagataaagtaaataataa

SEQ ID NO: 103627 - DNA, 22 bp, synthetic construct
  misc_feature 1..22: note = chemically synthesized
  source 1..22: mol_type = other DNA
agtagataaagtaaataataaa

SEQ ID NO: 103628 - DNA, 22 bp, synthetic construct
  misc_feature 1..22: note = chemically synthesized
  source 1..22: mol_type = other DNA
ttaaattgtgtatatagcaaga

SEQ ID NO: 103629 - DNA, 22 bp, synthetic construct
  misc_feature 1..22: note = chemically synthesized
  source 1..22: mol_type = other DNA
taaattgtgtatatagcaagac

SEQ ID NO: 103630 - DNA, 22 bp, synthetic construct
  misc_feature 1..22: note = chemically synthesized
  source 1..22: mol_type = other DNA
aaattgtgtatatagcaagaca

SEQ ID NO: 103631 - DNA, 22 bp, synthetic construct
  misc_feature 1..22: note = chemically synthesized
  source 1..22: mol_type = other DNA
aattgtgtatatagcaagacaa

SEQ ID NO: 103632 - DNA, 22 bp, synthetic construct
  misc_feature 1..22: note = chemically synthesized
  source 1..22: mol_type = other DNA
tgtatatagcaagacaaacaga

SEQ ID NO: 103633 - DNA, 22 bp, synthetic construct
  misc_feature 1..22: note = chemically synthesized
  source 1..22: mol_type = other DNA
ggaaaatacgtacactaaaaat

SEQ ID NO: 103634 - DNA, 22 bp, synthetic construct
  misc_feature 1..22: note = chemically synthesized
  source 1..22: mol_type = other DNA
aaaataaaacactagagataat

SEQ ID NO: 103635 - DNA, 22 bp, synthetic construct
  misc_feature 1..22: note = chemically synthesized
  source 1..22: mol_type = other DNA
gagataatacataataaacttc

SEQ ID NO: 103636 - DNA, 22 bp, synthetic construct
  misc_feature 1..22: note = chemically synthesized
  source 1..22: mol_type = other DNA
cttaaaatcaattataaaagga

SEQ ID NO: 103637 - DNA, 22 bp, synthetic construct
  misc_feature 1..22: note = chemically synthesized
  source 1..22: mol_type = other DNA
ttaaaatcaattataaaaggat

SEQ ID NO: 103638 - DNA, 22 bp, synthetic construct
  misc_feature 1..22: note = chemically synthesized
  source 1..22: mol_type = other DNA
aaaatcaattataaaaggatga

SEQ ID NO: 103639 - DNA, 22 bp, synthetic construct
  misc_feature 1..22: note = chemically synthesized
  source 1..22: mol_type = other DNA
aaatcaattataaaaggatgaa

SEQ ID NO: 103640 - DNA, 22 bp, synthetic construct
  misc_feature 1..22: note = chemically synthesized
  source 1..22: mol_type = other DNA
taaaaggatgaaaattagcaaa

SEQ ID NO: 103641 - DNA, 22 bp, synthetic construct
  misc_feature 1..22: note = chemically synthesized
  source 1..22: mol_type = other DNA
gcaaaatatatgatcaaataaa

SEQ ID NO: 103642 - DNA, 22 bp, synthetic construct
  misc_feature 1..22: note = chemically synthesized
  source 1..22: mol_type = other DNA
gtgagatttccaagttgctgca

SEQ ID NO: 103643 - DNA, 22 bp, synthetic construct
  misc_feature 1..22: note = chemically synthesized
  source 1..22: mol_type = other DNA
ccaagttgctgcaacaaattga

SEQ ID NO: 103644 - DNA, 22 bp, synthetic construct
  misc_feature 1..22: note = chemically synthesized
  source 1..22: mol_type = other DNA
caagttgctgcaacaaattgag

SEQ ID NO: 103645 - DNA, 22 bp, synthetic construct
  misc_feature 1..22: note = chemically synthesized
  source 1..22: mol_type = other DNA
ctgcaacaaattgagatcactt

SEQ ID NO: 103646 - DNA, 22 bp, synthetic construct
  misc_feature 1..22: note = chemically synthesized
  source 1..22: mol_type = other DNA
caacaaattgagatcacttgtg

SEQ ID NO: 103647 - DNA, 22 bp, synthetic construct
  misc_feature 1..22: note = chemically synthesized
  source 1..22: mol_type = other DNA
agatcacttgtgatttattaga

SEQ ID NO: 103648 - DNA, 22 bp, synthetic construct
  misc_feature 1..22: note = chemically synthesized
  source 1..22: mol_type = other DNA
gtgatttattagaataaaaaat

SEQ ID NO: 103649 - DNA, 22 bp, synthetic construct
  misc_feature 1..22: note = chemically synthesized
  source 1..22: mol_type = other DNA
tgatttattagaataaaaaata

SEQ ID NO: 103650 - DNA, 22 bp, synthetic construct
  misc_feature 1..22: note = chemically synthesized
  source 1..22: mol_type = other DNA
attagaataaaaaataaattga

SEQ ID NO: 103651 - DNA, 22 bp, synthetic construct
  misc_feature 1..22: note = chemically synthesized
  source 1..22: mol_type = other DNA
ttagaataaaaaataaattgaa

SEQ ID NO: 103652 - DNA, 22 bp, synthetic construct
  misc_feature 1..22: note = chemically synthesized
  source 1..22: mol_type = other DNA
gaataaaaaataaattgaatat

SEQ ID NO: 103653 - DNA, 22 bp, synthetic construct
  misc_feature 1..22: note = chemically synthesized
  source 1..22: mol_type = other DNA
aatatacaaaaaggaaaatatc

SEQ ID NO: 103654 - DNA, 22 bp, synthetic construct
  misc_feature 1..22: note = chemically synthesized
  source 1..22: mol_type = other DNA
tatttcatctattggacatatc

SEQ ID NO: 103655 - DNA, 22 bp, synthetic construct
  misc_feature 1..22: note = chemically synthesized
  source 1..22: mol_type = other DNA
catctattggacatatcagaaa

SEQ ID NO: 103656 - DNA, 22 bp, synthetic construct
  misc_feature 1..22: note = chemically synthesized
  source 1..22: mol_type = other DNA
atctattggacatatcagaaat

SEQ ID NO: 103657 - DNA, 22 bp, synthetic construct
  misc_feature 1..22: note = chemically synthesized
  source 1..22: mol_type = other DNA
ttggacatatcagaaatgtttc

SEQ ID NO: 103658 - DNA, 22 bp, synthetic construct
  misc_feature 1..22: note = chemically synthesized
  source 1..22: mol_type = other DNA
gacatatcagaaatgtttctat

SEQ ID NO: 103659 - DNA, 22 bp, synthetic construct
  misc_feature 1..22: note = chemically synthesized
  source 1..22: mol_type = other DNA
ctatccagcatttagagagaac

SEQ ID NO: 103660 - DNA, 22 bp, synthetic construct
  misc_feature 1..22: note = chemically synthesized
  source 1..22: mol_type = other DNA
tatccagcatttagagagaaca

SEQ ID NO: 103661 - DNA, 22 bp, synthetic construct
  misc_feature 1..22: note = chemically synthesized
  source 1..22: mol_type = other DNA
tccagcatttagagagaacaca

SEQ ID NO: 103662 - DNA, 22 bp, synthetic construct
  misc_feature 1..22: note = chemically synthesized
  source 1..22: mol_type = other DNA
agagagaacacaagatcaaaag

SEQ ID NO: 103663 - DNA, 22 bp, synthetic construct
  misc_feature 1..22: note = chemically synthesized
  source 1..22: mol_type = other DNA
gagagaacacaagatcaaaaga

SEQ ID NO: 103664 - DNA, 22 bp, synthetic construct
  misc_feature 1..22: note = chemically synthesized
  source 1..22: mol_type = other DNA
actcatgaaatgagcaactagg

SEQ ID NO: 103665 - DNA, 22 bp, synthetic construct
  misc_feature 1..22: note = chemically synthesized
  source 1..22: mol_type = other DNA
atgaaatgagcaactaggaaat

SEQ ID NO: 103666 - DNA, 22 bp, synthetic construct
  misc_feature 1..22: note = chemically synthesized
  source 1..22: mol_type = other DNA
ggaaatttatgaatttagagag

SEQ ID NO: 103667 - DNA, 22 bp, synthetic construct
  misc_feature 1..22: note = chemically synthesized
  source 1..22: mol_type = other DNA
atgaatttagagagtctctact

SEQ ID NO: 103668 - DNA, 22 bp, synthetic construct
  misc_feature 1..22: note = chemically synthesized
  source 1..22: mol_type = other DNA
tgaatttagagagtctctactg

SEQ ID NO: 103669 - DNA, 22 bp, synthetic construct
  misc_feature 1..22: note = chemically synthesized
  source 1..22: mol_type = other DNA
agagagtctctactgtaaaact

SEQ ID NO: 103670 - DNA, 22 bp, synthetic construct
  misc_feature 1..22: note = chemically synthesized
  source 1..22: mol_type = other DNA
gagagtctctactgtaaaactt

SEQ ID NO: 103671 - DNA, 22 bp, synthetic construct
  misc_feature 1..22: note = chemically synthesized
  source 1..22: mol_type = other DNA
tactgtaaaactttatagatga

SEQ ID NO: 103672 - DNA, 22 bp, synthetic construct
  misc_feature 1..22: note = chemically synthesized
  source 1..22: mol_type = other DNA
ctgtaaaactttatagatgaca

SEQ ID NO: 103673 - DNA, 22 bp, synthetic construct
  misc_feature 1..22: note = chemically synthesized
  source 1..22: mol_type = other DNA
taaaactttatagatgacattg

SEQ ID NO: 103674 - DNA, 22 bp, synthetic construct
  misc_feature 1..22: note = chemically synthesized
  source 1..22: mol_type = other DNA
tatagatgacattgtatcattt

SEQ ID NO: 103675 - DNA, 22 bp, synthetic construct
  misc_feature 1..22: note = chemically synthesized
  source 1..22: mol_type = other DNA
atagatgacattgtatcatttt

SEQ ID NO: 103676 - DNA, 22 bp, synthetic construct
  misc_feature 1..22: note = chemically synthesized
  source 1..22: mol_type = other DNA
tagatgacattgtatcattttg

SEQ ID NO: 103677 - DNA, 22 bp, synthetic construct
  misc_feature 1..22: note = chemically synthesized
  source 1..22: mol_type = other DNA
tatcattttgaaagaaaactca

SEQ ID NO: 103678 - DNA, 22 bp, synthetic construct
  misc_feature 1..22: note = chemically synthesized
  source 1..22: mol_type = other DNA
tgaaagaaaactcaagacacca

SEQ ID NO: 103679 - DNA, 22 bp, synthetic construct
  misc_feature 1..22: note = chemically synthesized
  source 1..22: mol_type = other DNA
gaaagaaaactcaagacaccaa

SEQ ID NO: 103680 - DNA, 22 bp, synthetic construct
  misc_feature 1..22: note = chemically synthesized
  source 1..22: mol_type = other DNA
aaagaaaactcaagacaccaaa

SEQ ID NO: 103681 - DNA, 22 bp, synthetic construct
  misc_feature 1..22: note = chemically synthesized
  source 1..22: mol_type = other DNA
aagacaccaaaagcaactgcaa

SEQ ID NO: 103682 - DNA, 22 bp, synthetic construct
  misc_feature 1..22: note = chemically synthesized
  source 1..22: mol_type = other DNA
caaaaaaaaattgacaaatggg

SEQ ID NO: 103683 - DNA, 22 bp, synthetic construct
  misc_feature 1..22: note = chemically synthesized
  source 1..22: mol_type = other DNA
acaaatgggatctaattaaatt

SEQ ID NO: 103684 - DNA, 22 bp, synthetic construct
  misc_feature 1..22: note = chemically synthesized
  source 1..22: mol_type = other DNA
attaaattaaagagcttctgca

SEQ ID NO: 103685 - DNA, 22 bp, synthetic construct
  misc_feature 1..22: note = chemically synthesized
  source 1..22: mol_type = other DNA
aattaaagagcttctgcacagc

SEQ ID NO: 103686 - DNA, 22 bp, synthetic construct
  misc_feature 1..22: note = chemically synthesized
  source 1..22: mol_type = other DNA
aagagcttctgcacagcaaaag

SEQ ID NO: 103687 - DNA, 22 bp, synthetic construct
  misc_feature 1..22: note = chemically synthesized
  source 1..22: mol_type = other DNA
ctgcacagcaaaagaaactatc

SEQ ID NO: 103688 - DNA, 22 bp, synthetic construct
  misc_feature 1..22: note = chemically synthesized
  source 1..22: mol_type = other DNA
tgcacagcaaaagaaactatca

SEQ ID NO: 103689 - DNA, 22 bp, synthetic construct
  misc_feature 1..22: note = chemically synthesized
  source 1..22: mol_type = other DNA
cacagcaaaagaaactatcatc

SEQ ID NO: 103690 - DNA, 22 bp, synthetic construct
  misc_feature 1..22: note = chemically synthesized
  source 1..22: mol_type = other DNA
tcatcagagataacagacaacc

SEQ ID NO: 103691 - DNA, 22 bp, synthetic construct
  misc_feature 1..22: note = chemically synthesized
  source 1..22: mol_type = other DNA
cagaatagaagaaaatttttgc

SEQ ID NO: 103692 - DNA, 22 bp, synthetic construct
  misc_feature 1..22: note = chemically synthesized
  source 1..22: mol_type = other DNA
ttgcaatttctccatctgacaa

SEQ ID NO: 103693 - DNA, 22 bp, synthetic construct
  misc_feature 1..22: note = chemically synthesized
  source 1..22: mol_type = other DNA
tgcaatttctccatctgacaaa

SEQ ID NO: 103694 - DNA, 22 bp, synthetic construct
  misc_feature 1..22: note = chemically synthesized
  source 1..22: mol_type = other DNA
gcaatttctccatctgacaaaa

SEQ ID NO: 103695 - DNA, 22 bp, synthetic construct
  misc_feature 1..22: note = chemically synthesized
  source 1..22: mol_type = other DNA
caatttctccatctgacaaaag

SEQ ID NO: 103696 - DNA, 22 bp, synthetic construct
  misc_feature 1..22: note = chemically synthesized
  source 1..22: mol_type = other DNA
ctccatctgacaaaagtctaat

SEQ ID NO: 103697 - DNA, 22 bp, synthetic construct
  misc_feature 1..22: note = chemically synthesized
  source 1..22: mol_type = other DNA
tccatctgacaaaagtctaata

SEQ ID NO: 103698 - DNA, 22 bp, synthetic construct
  misc_feature 1..22: note = chemically synthesized
  source 1..22: mol_type = other DNA
catctgacaaaagtctaatatc

SEQ ID NO: 103699 - DNA, 22 bp, synthetic construct
  misc_feature 1..22: note = chemically synthesized
  source 1..22: mol_type = other DNA
acaaaagtctaatatctggagt

SEQ ID NO: 103700 - DNA, 22 bp, synthetic construct
  misc_feature 1..22: note = chemically synthesized
  source 1..22: mol_type = other DNA
atatctggagtctatgaggaac

SEQ ID NO: 103701 - DNA, 22 bp, synthetic construct
  misc_feature 1..22: note = chemically synthesized
  source 1..22: mol_type = other DNA
gagtctatgaggaactaaaaca

SEQ ID NO: 103702 - DNA, 22 bp, synthetic construct
  misc_feature 1..22: note = chemically synthesized
  source 1..22: mol_type = other DNA
tgaggaactaaaacaaatttac

SEQ ID NO: 103703 - DNA, 22 bp, synthetic construct
  misc_feature 1..22: note = chemically synthesized
  source 1..22: mol_type = other DNA
aaacaaatttacaagaaaaaaa

SEQ ID NO: 103704 - DNA, 22 bp, synthetic construct
  misc_feature 1..22: note = chemically synthesized
  source 1..22: mol_type = other DNA
acaagaaaaaaacaaccccatt

SEQ ID NO: 103705 - DNA, 22 bp, synthetic construct
  misc_feature 1..22: note = chemically synthesized
  source 1..22: mol_type = other DNA
caagaaaaaaacaaccccatta

SEQ ID NO: 103706 - DNA, 22 bp, synthetic construct
  misc_feature 1..22: note = chemically synthesized
  source 1..22: mol_type = other DNA
aaaagtggggaatgacatgaat

SEQ ID NO: 103707 - DNA, 22 bp, synthetic construct
  misc_feature 1..22: note = chemically synthesized
  source 1..22: mol_type = other DNA
ctctaaagaagacattcatgct

SEQ ID NO: 103708 - DNA, 22 bp, synthetic construct
  misc_feature 1..22: note = chemically synthesized
  source 1..22: mol_type = other DNA
tctaaagaagacattcatgctt

SEQ ID NO: 103709 - DNA, 22 bp, synthetic construct
  misc_feature 1..22: note = chemically synthesized
  source 1..22: mol_type = other DNA
taaagaagacattcatgcttct

SEQ ID NO: 103710 - DNA, 22 bp, synthetic construct
  misc_feature 1..22: note = chemically synthesized
  source 1..22: mol_type = other DNA
aagaagacattcatgcttctaa

SEQ ID NO: 103711 - DNA, 22 bp, synthetic construct
  misc_feature 1..22: note = chemically synthesized
  source 1..22: mol_type = other DNA
atgcttctaataaacatatgaa

SEQ ID NO: 103712 - DNA, 22 bp, synthetic construct
  misc_feature 1..22: note = chemically synthesized
  source 1..22: mol_type = other DNA
ctaataaacatatgaaaaaaaa

SEQ ID NO: 103713 - DNA, 22 bp, synthetic construct
  misc_feature 1..22: note = chemically synthesized
  source 1..22: mol_type = other DNA
taataaacatatgaaaaaaaaa

SEQ ID NO: 103714 - DNA, 22 bp, synthetic construct
  misc_feature 1..22: note = chemically synthesized
  source 1..22: mol_type = other DNA
ataaacatatgaaaaaaaaaaa

SEQ ID NO: 103715 - DNA, 22 bp, synthetic construct
  misc_feature 1..22: note = chemically synthesized
  source 1..22: mol_type = other DNA
aaccttactggtcattagaaaa

SEQ ID NO: 103716 - DNA, 22 bp, synthetic construct
  misc_feature 1..22: note = chemically synthesized
  source 1..22: mol_type = other DNA
actggtcattagaaaaatgcaa

SEQ ID NO: 103717 - DNA, 22 bp, synthetic construct
  misc_feature 1..22: note = chemically synthesized
  source 1..22: mol_type = other DNA
ctggtcattagaaaaatgcaaa

SEQ ID NO: 103718 - DNA, 22 bp, synthetic construct
  misc_feature 1..22: note = chemically synthesized
  source 1..22: mol_type = other DNA
gtcattagaaaaatgcaaatca

SEQ ID NO: 103719 - DNA, 22 bp, synthetic construct
  misc_feature 1..22: note = chemically synthesized
  source 1..22: mol_type = other DNA
gaaaaatgcaaatcaaaaccac

SEQ ID NO: 103720 - DNA, 22 bp, synthetic construct
  misc_feature 1..22: note = chemically synthesized
  source 1..22: mol_type = other DNA
acaccagtcagaatggcaatta

SEQ ID NO: 103721 - DNA, 22 bp, synthetic construct
  misc_feature 1..22: note = chemically synthesized
  source 1..22: mol_type = other DNA
ttaaaaagtcaagaaacaacag

SEQ ID NO: 103722 - DNA, 22 bp, synthetic construct
  misc_feature 1..22: note = chemically synthesized
  source 1..22: mol_type = other DNA
aaaagtcaagaaacaacagttg

SEQ ID NO: 103723 - DNA, 22 bp, synthetic construct
  misc_feature 1..22: note = chemically synthesized
  source 1..22: mol_type = other DNA
ctggcaaggttgcagagagaaa

SEQ ID NO: 103724 - DNA, 22 bp, synthetic construct
  misc_feature 1..22: note = chemically synthesized
  source 1..22: mol_type = other DNA
gcaaggttgcagagagaaagga

SEQ ID NO: 103725 - DNA, 22 bp, synthetic construct
  misc_feature 1..22: note = chemically synthesized
  source 1..22: mol_type = other DNA
cagagagaaaggaatggaatgc

SEQ ID NO: 103726 - DNA, 22 bp, synthetic construct
  misc_feature 1..22: note = chemically synthesized
  source 1..22: mol_type = other DNA
ttacactgttaacgggagagta

SEQ ID NO: 103727 - DNA, 22 bp, synthetic construct
  misc_feature 1..22: note = chemically synthesized
  source 1..22: mol_type = other DNA
tacactgttaacgggagagtaa

SEQ ID NO: 103728 - DNA, 22 bp, synthetic construct
  misc_feature 1..22: note = chemically synthesized
  source 1..22: mol_type = other DNA
acactgttaacgggagagtaaa

SEQ ID NO: 103729 - DNA, 22 bp, synthetic construct
  misc_feature 1..22: note = chemically synthesized
  source 1..22: mol_type = other DNA
cactgttaacgggagagtaaat

SEQ ID NO: 103730 - DNA, 22 bp, synthetic construct
  misc_feature 1..22: note = chemically synthesized
  source 1..22: mol_type = other DNA
ttaacgggagagtaaattagtt

SEQ ID NO: 103731 - DNA, 22 bp, synthetic construct
  misc_feature 1..22: note = chemically synthesized
  source 1..22: mol_type = other DNA
acgggagagtaaattagttcaa

SEQ ID NO: 103732 - DNA, 22 bp, synthetic construct
  misc_feature 1..22: note = chemically synthesized
  source 1..22: mol_type = other DNA
gttcaaacattgtggaagagag

SEQ ID NO: 103733 - DNA, 22 bp, synthetic construct
  misc_feature 1..22: note = chemically synthesized
  source 1..22: mol_type = other DNA
aaacattgtggaagagagtgta

SEQ ID NO: 103734 - DNA, 22 bp, synthetic construct
  misc_feature 1..22: note = chemically synthesized
  source 1..22: mol_type = other DNA
tggaagagagtgtagcctttcc

SEQ ID NO: 103735 - DNA, 22 bp, synthetic construct
  misc_feature 1..22: note = chemically synthesized
  source 1..22: mol_type = other DNA
tcctcaaagatgtagaagcaga

SEQ ID NO: 103736 - DNA, 22 bp, synthetic construct
  misc_feature 1..22: note = chemically synthesized
  source 1..22: mol_type = other DNA
cctcaaagatgtagaagcagaa

SEQ ID NO: 103737 - DNA, 22 bp, synthetic construct
  misc_feature 1..22: note = chemically synthesized
  source 1..22: mol_type = other DNA
ctcaaagatgtagaagcagaaa

SEQ ID NO: 103738 - DNA, 22 bp, synthetic construct
  misc_feature 1..22: note = chemically synthesized
  source 1..22: mol_type = other DNA
aaagatgtagaagcagaaatac

SEQ ID NO: 103739 - DNA, 22 bp, synthetic construct
  misc_feature 1..22: note = chemically synthesized
  source 1..22: mol_type = other DNA
gactcagcaatctcattactgg

SEQ ID NO: 103740 - DNA, 22 bp, synthetic construct
  misc_feature 1..22: note = chemically synthesized
  source 1..22: mol_type = other DNA
actcagcaatctcattactggg

SEQ ID NO: 103741 - DNA, 22 bp, synthetic construct
  misc_feature 1..22: note = chemically synthesized
  source 1..22: mol_type = other DNA
agcaatctcattactgggtata

SEQ ID NO: 103742 - DNA, 22 bp, synthetic construct
  misc_feature 1..22: note = chemically synthesized
  source 1..22: mol_type = other DNA
attactgggtatatacccaaag

SEQ ID NO: 103743 - DNA, 22 bp, synthetic construct
  misc_feature 1..22: note = chemically synthesized
  source 1..22: mol_type = other DNA
ctgggtatatacccaaaggaat

SEQ ID NO: 103744 - DNA, 22 bp, synthetic construct
  misc_feature 1..22: note = chemically synthesized
  source 1..22: mol_type = other DNA
ggtatatacccaaaggaatata

SEQ ID NO: 103745 - DNA, 22 bp, synthetic construct
  misc_feature 1..22: note = chemically synthesized
  source 1..22: mol_type = other DNA
ttataaaaatacaggcatgctt

SEQ ID NO: 103746 - DNA, 22 bp, synthetic construct
  misc_feature 1..22: note = chemically synthesized
  source 1..22: mol_type = other DNA
taaaaatacaggcatgcttatg

SEQ ID NO: 103747 - DNA, 22 bp, synthetic construct
  misc_feature 1..22: note = chemically synthesized
  source 1..22: mol_type = other DNA
atgttcattgcagcattattca

SEQ ID NO: 103748 - DNA, 22 bp, synthetic construct
  misc_feature 1..22: note = chemically synthesized
  source 1..22: mol_type = other DNA
tgttcattgcagcattattcat

SEQ ID NO: 103749 - DNA, 22 bp, synthetic construct
  misc_feature 1..22: note = chemically synthesized
  source 1..22: mol_type = other DNA
attgcagcattattcataatag

SEQ ID NO: 103750 - DNA, 22 bp, synthetic construct
  misc_feature 1..22: note = chemically synthesized
  source 1..22: mol_type = other DNA
cagcattattcataatagccaa

SEQ ID NO: 103751 - DNA, 22 bp, synthetic construct
  misc_feature 1..22: note = chemically synthesized
  source 1..22: mol_type = other DNA
ttcataatagccaagatgtgga

SEQ ID NO: 103752 - DNA, 22 bp, synthetic construct
  misc_feature 1..22: note = chemically synthesized
  source 1..22: mol_type = other DNA
ataatagccaagatgtggaatc

SEQ ID NO: 103753 - DNA, 22 bp, synthetic construct
  misc_feature 1..22: note = chemically synthesized
  source 1..22: mol_type = other DNA
tacagccataaaaaggaaaagg

SEQ ID NO: 103754 - DNA, 22 bp, synthetic construct
  misc_feature 1..22: note = chemically synthesized
  source 1..22: mol_type = other DNA
tgttccttgcagggacatgaat

SEQ ID NO: 103755 - DNA, 22 bp, synthetic construct
  misc_feature 1..22: note = chemically synthesized
  source 1..22: mol_type = other DNA
cttgcagggacatgaatggagc

SEQ ID NO: 103756 - DNA, 22 bp, synthetic construct
  misc_feature 1..22: note = chemically synthesized
  source 1..22: mol_type = other DNA
gcagggacatgaatggagctgg

SEQ ID NO: 103757 - DNA, 22 bp, synthetic construct
  misc_feature 1..22: note = chemically synthesized
  source 1..22: mol_type = other DNA
cagggacatgaatggagctgga

SEQ ID NO: 103758 - DNA, 22 bp, synthetic construct
  misc_feature 1..22: note = chemically synthesized
  source 1..22: mol_type = other DNA
gaagccattatcctcatcaaac

SEQ ID NO: 103759 - DNA, 22 bp, synthetic construct
  misc_feature 1..22: note = chemically synthesized
  source 1..22: mol_type = other DNA
tcctcatcaaactaacacagga

SEQ ID NO: 103760 - DNA, 22 bp, synthetic construct
  misc_feature 1..22: note = chemically synthesized
  source 1..22: mol_type = other DNA
atcaaactaacacaggaacaga

SEQ ID NO: 103761 - DNA, 22 bp, synthetic construct
  misc_feature 1..22: note = chemically synthesized
  source 1..22: mol_type = other DNA
acacaggaacagaaaaccaaac

SEQ ID NO: 103762 - DNA, 22 bp, synthetic construct
  misc_feature 1..22: note = chemically synthesized
  source 1..22: mol_type = other DNA
tcacacagaaatgggagctgaa

SEQ ID NO: 103763 - DNA, 22 bp, synthetic construct
  misc_feature 1..22: note = chemically synthesized
  source 1..22: mol_type = other DNA
acacagaaatgggagctgaaca

SEQ ID NO: 103764 - DNA, 22 bp, synthetic construct
  misc_feature 1..22: note = chemically synthesized
  source 1..22: mol_type = other DNA
aacagtgagaacacatggacac

SEQ ID NO: 103765 - DNA, 22 bp, synthetic construct
  misc_feature 1..22: note = chemically synthesized
  source 1..22: mol_type = other DNA
gtggggaacaacacacacaggg

SEQ ID NO: 103766 - DNA, 22 bp, synthetic construct
  misc_feature 1..22: note = chemically synthesized
  source 1..22: mol_type = other DNA
tggggaacaacacacacagggg

SEQ ID NO: 103767 - DNA, 22 bp, synthetic construct
  misc_feature 1..22: note = chemically synthesized
  source 1..22: mol_type = other DNA
tccggtagtgggtggggaggag

SEQ ID NO: 103768 - DNA, 22 bp, synthetic construct
  misc_feature 1..22: note = chemically synthesized
  source 1..22: mol_type = other DNA
acgaatgcagcaaacctgcatg

SEQ ID NO: 103769 - DNA, 22 bp, synthetic construct
  misc_feature 1..22: note = chemically synthesized
  source 1..22: mol_type = other DNA
catggcacacatttacctatgt

SEQ ID NO: 103770 - DNA, 22 bp, synthetic construct
  misc_feature 1..22: note = chemically synthesized
  source 1..22: mol_type = other DNA
acctatgtaataaacctgcaca

SEQ ID NO: 103771 - DNA, 22 bp, synthetic construct
  misc_feature 1..22: note = chemically synthesized
  source 1..22: mol_type = other DNA
cctatgtaataaacctgcacat

SEQ ID NO: 103772 - DNA, 22 bp, synthetic construct
  misc_feature 1..22: note = chemically synthesized
  source 1..22: mol_type = other DNA
tgtaataaacctgcacatcctg

SEQ ID NO: 103773 - DNA, 22 bp, synthetic construct
  misc_feature 1..22: note = chemically synthesized
  source 1..22: mol_type = other DNA
cacatcctgcacatgtgccctg

SEQ ID NO: 103774 - DNA, 22 bp, synthetic construct
  misc_feature 1..22: note = chemically synthesized
  source 1..22: mol_type = other DNA
cacatgtgccctggaacttaaa

SEQ ID NO: 103775 - DNA, 22 bp, synthetic construct
  misc_feature 1..22: note = chemically synthesized
  source 1..22: mol_type = other DNA
gaacttaaaatatattatgttg

SEQ ID NO: 103776 - DNA, 22 bp, synthetic construct
  misc_feature 1..22: note = chemically synthesized
  source 1..22: mol_type = other DNA
aaaatatattatgttggtacaa

SEQ ID NO: 103777 - DNA, 22 bp, synthetic construct
  misc_feature 1..22: note = chemically synthesized
  source 1..22: mol_type = other DNA
aaatatattatgttggtacaaa

SEQ ID NO: 103778 - DNA, 22 bp, synthetic construct
  misc_feature 1..22: note = chemically synthesized
  source 1..22: mol_type = other DNA
tgttggtacaaaagtaatttct

SEQ ID NO: 103779 - DNA, 22 bp, synthetic construct
  misc_feature 1..22: note = chemically synthesized
  source 1..22: mol_type = other DNA
gtacaaaagtaatttctgtgaa

SEQ ID NO: 103780 - DNA, 22 bp, synthetic construct
  misc_feature 1..22: note = chemically synthesized
  source 1..22: mol_type = other DNA
ctgtgaactgcaattacctttg

SEQ ID NO: 103781 - DNA, 22 bp, synthetic construct
  misc_feature 1..22: note = chemically synthesized
  source 1..22: mol_type = other DNA
tgtgaactgcaattacctttgc

SEQ ID NO: 103782 - DNA, 22 bp, synthetic construct
  misc_feature 1..22: note = chemically synthesized
  source 1..22: mol_type = other DNA
tgaactgcaattacctttgcac

SEQ ID NO: 103783 - DNA, 22 bp, synthetic construct
  misc_feature 1..22: note = chemically synthesized
  source 1..22: mol_type = other DNA
caattacctttgcacctaccta

SEQ ID NO: 103784 - DNA, 22 bp, synthetic construct
  misc_feature 1..22: note = chemically synthesized
  source 1..22: mol_type = other DNA
cctttgcacctacctaataagt

SEQ ID NO: 103785 - DNA, 22 bp, synthetic construct
  misc_feature 1..22: note = chemically synthesized
  source 1..22: mol_type = other DNA
tgcacctacctaataagttgaa

SEQ ID NO: 103786 - DNA, 22 bp, synthetic construct
  misc_feature 1..22: note = chemically synthesized
  source 1..22: mol_type = other DNA
gcacctacctaataagttgaag

SEQ ID NO: 103787 - DNA, 22 bp, synthetic construct
  misc_feature 1..22: note = chemically synthesized
  source 1..22: mol_type = other DNA
cacctacctaataagttgaagg

SEQ ID NO: 103788 - DNA, 22 bp, synthetic construct
  misc_feature 1..22: note = chemically synthesized
  source 1..22: mol_type = other DNA
cctaataagttgaaggaaaata

SEQ ID NO: 103789 - DNA, 22 bp, synthetic construct
  misc_feature 1..22: note = chemically synthesized
  source 1..22: mol_type = other DNA
ataagttgaaggaaaataaaat

SEQ ID NO: 103790 - DNA, 22 bp, synthetic construct
  misc_feature 1..22: note = chemically synthesized
  source 1..22: mol_type = other DNA
aaggaaaataaaatctatttta

SEQ ID NO: 103791 - DNA, 22 bp, synthetic construct
  misc_feature 1..22: note = chemically synthesized
  source 1..22: mol_type = other DNA
ttttaaaaaaaaaaaaaaaaaa

SEQ ID NO: 103792 - DNA, 22 bp, synthetic construct
  misc_feature 1..22: note = chemically synthesized
  source 1..22: mol_type = other DNA
taaaaaaaaaaaaaaaaaagga

SEQ ID NO: 103793 - DNA, 22 bp, synthetic construct
  misc_feature 1..22: note = chemically synthesized
  source 1..22: mol_type = other DNA
aaaaaaaaaaaaaaaaaaggaa

SEQ ID NO: 103794 - DNA, 22 bp, synthetic construct
  misc_feature 1..22: note = chemically synthesized
  source 1..22: mol_type = other DNA
aaaaaaaaaaaaaaaaaggaaa

SEQ ID NO: 103795 - DNA, 22 bp, synthetic construct
  misc_feature 1..22: note = chemically synthesized
  source 1..22: mol_type = other DNA
ccctgaaatagagtagttttga

SEQ ID NO: 103796 - DNA, 22 bp, synthetic construct
  misc_feature 1..22: note = chemically synthesized
  source 1..22: mol_type = other DNA
aaatagagtagttttgagatta

SEQ ID NO: 103797 - DNA, 22 bp, synthetic construct
  misc_feature 1..22: note = chemically synthesized
  source 1..22: mol_type = other DNA
tgagattatagtagagttccat

SEQ ID NO: 103798 - DNA, 22 bp, synthetic construct
  misc_feature 1..22: note = chemically synthesized
  source 1..22: mol_type = other DNA
gagattatagtagagttccatg

SEQ ID NO: 103799 - DNA, 22 bp, synthetic construct
  misc_feature 1..22: note = chemically synthesized
  source 1..22: mol_type = other DNA
agattatagtagagttccatga

SEQ ID NO: 103800 - DNA, 22 bp, synthetic construct
  misc_feature 1..22: note = chemically synthesized
  source 1..22: mol_type = other DNA
tagtagagttccatgacctcaa

SEQ ID NO: 103801 - DNA, 22 bp, synthetic construct
  misc_feature 1..22: note = chemically synthesized
  source 1..22: mol_type = other DNA
catgacctcaattcacatgcta

SEQ ID NO: 103802 - DNA, 22 bp, synthetic construct
  misc_feature 1..22: note = chemically synthesized
  source 1..22: mol_type = other DNA
aattcacatgctataattcatc

SEQ ID NO: 103803 - DNA, 22 bp, synthetic construct
  misc_feature 1..22: note = chemically synthesized
  source 1..22: mol_type = other DNA
acatgctataattcatctttat

SEQ ID NO: 103804 - DNA, 22 bp, synthetic construct
  misc_feature 1..22: note = chemically synthesized
  source 1..22: mol_type = other DNA
taattcatctttatatggccaa

SEQ ID NO: 103805 - DNA, 22 bp, synthetic construct
  misc_feature 1..22: note = chemically synthesized
  source 1..22: mol_type = other DNA
atctttatatggccaaaactag

SEQ ID NO: 103806 - DNA, 22 bp, synthetic construct
  misc_feature 1..22: note = chemically synthesized
  source 1..22: mol_type = other DNA
tatatggccaaaactagatctg

SEQ ID NO: 103807 - DNA, 22 bp, synthetic construct
  misc_feature 1..22: note = chemically synthesized
  source 1..22: mol_type = other DNA
atatggccaaaactagatctgc

SEQ ID NO: 103808 - DNA, 22 bp, synthetic construct
  misc_feature 1..22: note = chemically synthesized
  source 1..22: mol_type = other DNA
tatggccaaaactagatctgca

SEQ ID NO: 103809 - DNA, 22 bp, synthetic construct
  misc_feature 1..22: note = chemically synthesized
  source 1..22: mol_type = other DNA
gatctgcaattgcacatttttc

SEQ ID NO: 103810 - DNA, 22 bp, synthetic construct
  misc_feature 1..22: note = chemically synthesized
  source 1..22: mol_type = other DNA
caattgcacatttttccttctg

SEQ ID NO: 103811 - DNA, 22 bp, synthetic construct
  misc_feature 1..22: note = chemically synthesized
  source 1..22: mol_type = other DNA
cacatttttccttctgtaggct

SEQ ID NO: 103812 - DNA, 22 bp, synthetic construct
  misc_feature 1..22: note = chemically synthesized
  source 1..22: mol_type = other DNA
ttccttctgtaggctttggttg

SEQ ID NO: 103813 - DNA, 22 bp, synthetic construct
  misc_feature 1..22: note = chemically synthesized
  source 1..22: mol_type = other DNA
tccttctgtaggctttggttga

SEQ ID NO: 103814 - DNA, 22 bp, synthetic construct
  misc_feature 1..22: note = chemically synthesized
  source 1..22: mol_type = other DNA
ccttctgtaggctttggttgaa

SEQ ID NO: 103815 - DNA, 22 bp, synthetic construct
  misc_feature 1..22: note = chemically synthesized
  source 1..22: mol_type = other DNA
cttctgtaggctttggttgaac

SEQ ID NO: 103816 - DNA, 22 bp, synthetic construct
  misc_feature 1..22: note = chemically synthesized
  source 1..22: mol_type = other DNA
ctgtaggctttggttgaactag

SEQ ID NO: 103817 - DNA, 22 bp, synthetic construct
  misc_feature 1..22: note = chemically synthesized
  source 1..22: mol_type = other DNA
tgtaggctttggttgaactaga

SEQ ID NO: 103818 - DNA, 22 bp, synthetic construct
  misc_feature 1..22: note = chemically synthesized
  source 1..22: mol_type = other DNA
taggctttggttgaactagact

SEQ ID NO: 103819 - DNA, 22 bp, synthetic construct
  misc_feature 1..22: note = chemically synthesized
  source 1..22: mol_type = other DNA
tggttgaactagactggccact

SEQ ID NO: 103820 - DNA, 22 bp, synthetic construct
  misc_feature 1..22: note = chemically synthesized
  source 1..22: mol_type = other DNA
ggttgaactagactggccactt

SEQ ID NO: 103821 - DNA, 22 bp, synthetic construct
  misc_feature 1..22: note = chemically synthesized
  source 1..22: mol_type = other DNA
gttgaactagactggccacttg

SEQ ID NO: 103822 - DNA, 22 bp, synthetic construct
  misc_feature 1..22: note = chemically synthesized
  source 1..22: mol_type = other DNA
aactagactggccacttgactc

SEQ ID NO: 103823 - DNA, 22 bp, synthetic construct
  misc_feature 1..22: note = chemically synthesized
  source 1..22: mol_type = other DNA
gactggccacttgactcttcct

SEQ ID NO: 103824 - DNA, 22 bp, synthetic construct
  misc_feature 1..22: note = chemically synthesized
  source 1..22: mol_type = other DNA
gccacttgactcttcctaaaat

SEQ ID NO: 103825 - DNA, 22 bp, synthetic construct
  misc_feature 1..22: note = chemically synthesized
  source 1..22: mol_type = other DNA
gactcttcctaaaatggtactt

SEQ ID NO: 103826 - DNA, 22 bp, synthetic construct
  misc_feature 1..22: note = chemically synthesized
  source 1..22: mol_type = other DNA
actcttcctaaaatggtacttt

SEQ ID NO: 103827 - DNA, 22 bp, synthetic construct
  misc_feature 1..22: note = chemically synthesized
  source 1..22: mol_type = other DNA
ttcctaaaatggtactttcagt

SEQ ID NO: 103828 - DNA, 22 bp, synthetic construct
  misc_feature 1..22: note = chemically synthesized
  source 1..22: mol_type = other DNA
cctaaaatggtactttcagttc

SEQ ID NO: 103829 - DNA, 22 bp, synthetic construct
  misc_feature 1..22: note = chemically synthesized
  source 1..22: mol_type = other DNA
ctaaaatggtactttcagttct

SEQ ID NO: 103830 - DNA, 22 bp, synthetic construct
  misc_feature 1..22: note = chemically synthesized
  source 1..22: mol_type = other DNA
aaatggtactttcagttcttat

SEQ ID NO: 103831 - DNA, 22 bp, synthetic construct
  misc_feature 1..22: note = chemically synthesized
  source 1..22: mol_type = other DNA
tcagttcttatgaatacaggtt

SEQ ID NO: 103832 - DNA, 22 bp, synthetic construct
  misc_feature 1..22: note = chemically synthesized
  source 1..22: mol_type = other DNA
cagttcttatgaatacaggtta

SEQ ID NO: 103833 - DNA, 22 bp, synthetic construct
  misc_feature 1..22: note = chemically synthesized
  source 1..22: mol_type = other DNA
agttcttatgaatacaggttat

SEQ ID NO: 103834 - DNA, 22 bp, synthetic construct
  misc_feature 1..22: note = chemically synthesized
  source 1..22: mol_type = other DNA
ttatgaatacaggttatgaata

SEQ ID NO: 103835 - DNA, 22 bp, synthetic construct
  misc_feature 1..22: note = chemically synthesized
  source 1..22: mol_type = other DNA
atgaatacaggttatgaataac

SEQ ID NO: 103836 - DNA, 22 bp, synthetic construct
  misc_feature 1..22: note = chemically synthesized
  source 1..22: mol_type = other DNA
tgaatacaggttatgaataacc

SEQ ID NO: 103837 - DNA, 22 bp, synthetic construct
  misc_feature 1..22: note = chemically synthesized
  source 1..22: mol_type = other DNA
tgaataaccatattttccctga

SEQ ID NO: 103838 - DNA, 22 bp, synthetic construct
  misc_feature 1..22: note = chemically synthesized
  source 1..22: mol_type = other DNA
tccctgattattagggtattta

SEQ ID NO: 103839 - DNA, 22 bp, synthetic construct
  misc_feature 1..22: note = chemically synthesized
  source 1..22: mol_type = other DNA
ccctgattattagggtatttat

SEQ ID NO: 103840 - DNA, 22 bp, synthetic construct
  misc_feature 1..22: note = chemically synthesized
  source 1..22: mol_type = other DNA
cctgattattagggtatttatc

SEQ ID NO: 103841 - DNA, 22 bp, synthetic construct
  misc_feature 1..22: note = chemically synthesized
  source 1..22: mol_type = other DNA
attattagggtatttatctaca

SEQ ID NO: 103842 - DNA, 22 bp, synthetic construct
  misc_feature 1..22: note = chemically synthesized
  source 1..22: mol_type = other DNA
ttagggtatttatctacatgtt

SEQ ID NO: 103843 - DNA, 22 bp, synthetic construct
  misc_feature 1..22: note = chemically synthesized
  source 1..22: mol_type = other DNA
gggtatttatctacatgtttta

SEQ ID NO: 103844 - DNA, 22 bp, synthetic construct
  misc_feature 1..22: note = chemically synthesized
  source 1..22: mol_type = other DNA
atctacatgttttatctccata

SEQ ID NO: 103845 - DNA, 22 bp, synthetic construct
  misc_feature 1..22: note = chemically synthesized
  source 1..22: mol_type = other DNA
tctacatgttttatctccatat

SEQ ID NO: 103846 - DNA, 22 bp, synthetic construct
  misc_feature 1..22: note = chemically synthesized
  source 1..22: mol_type = other DNA
catgttttatctccatattcaa

SEQ ID NO: 103847 - DNA, 22 bp, synthetic construct
  misc_feature 1..22: note = chemically synthesized
  source 1..22: mol_type = other DNA
tatctccatattcaatagtatt

SEQ ID NO: 103848 - DNA, 22 bp, synthetic construct
  misc_feature 1..22: note = chemically synthesized
  source 1..22: mol_type = other DNA
atctccatattcaatagtattc

SEQ ID NO: 103849 - DNA, 22 bp, synthetic construct
  misc_feature 1..22: note = chemically synthesized
  source 1..22: mol_type = other DNA
tctccatattcaatagtattcc

SEQ ID NO: 103850 - DNA, 22 bp, synthetic construct
  misc_feature 1..22: note = chemically synthesized
  source 1..22: mol_type = other DNA
catattcaatagtattccactt

SEQ ID NO: 103851 - DNA, 22 bp, synthetic construct
  misc_feature 1..22: note = chemically synthesized
  source 1..22: mol_type = other DNA
aatagtattccactttcctagt

SEQ ID NO: 103852 - DNA, 22 bp, synthetic construct
  misc_feature 1..22: note = chemically synthesized
  source 1..22: mol_type = other DNA
cactttcctagtatctctcaat

SEQ ID NO: 103853 - DNA, 22 bp, synthetic construct
  misc_feature 1..22: note = chemically synthesized
  source 1..22: mol_type = other DNA
tcctagtatctctcaatagata

SEQ ID NO: 103854 - DNA, 22 bp, synthetic construct
  misc_feature 1..22: note = chemically synthesized
  source 1..22: mol_type = other DNA
cctagtatctctcaatagatag

SEQ ID NO: 103855 - DNA, 22 bp, synthetic construct
  misc_feature 1..22: note = chemically synthesized
  source 1..22: mol_type = other DNA
ctagtatctctcaatagatagg

SEQ ID NO: 103856 - DNA, 22 bp, synthetic construct
  misc_feature 1..22: note = chemically synthesized
  source 1..22: mol_type = other DNA
gtatctctcaatagataggtaa

SEQ ID NO: 103857 - DNA, 22 bp, synthetic construct
  misc_feature 1..22: note = chemically synthesized
  source 1..22: mol_type = other DNA
tcaatagataggtaaattatag

SEQ ID NO: 103858 - DNA, 22 bp, synthetic construct
  misc_feature 1..22: note = chemically synthesized
  source 1..22: mol_type = other DNA
aatagataggtaaattatagat

SEQ ID NO: 103859 - DNA, 22 bp, synthetic construct
  misc_feature 1..22: note = chemically synthesized
  source 1..22: mol_type = other DNA
tagatatatctccctcgataaa

SEQ ID NO: 103860 - DNA, 22 bp, synthetic construct
  misc_feature 1..22: note = chemically synthesized
  source 1..22: mol_type = other DNA
cctcgataaagctttacatcta

SEQ ID NO: 103861 - DNA, 22 bp, synthetic construct
  misc_feature 1..22: note = chemically synthesized
  source 1..22: mol_type = other DNA
gataaagctttacatctacata

SEQ ID NO: 103862 - DNA, 22 bp, synthetic construct
  misc_feature 1..22: note = chemically synthesized
  source 1..22: mol_type = other DNA
tacatctacatatgaatacatt

SEQ ID NO: 103863 - DNA, 22 bp, synthetic construct
  misc_feature 1..22: note = chemically synthesized
  source 1..22: mol_type = other DNA
acatctacatatgaatacattt

SEQ ID NO: 103864 - DNA, 22 bp, synthetic construct
  misc_feature 1..22: note = chemically synthesized
  source 1..22: mol_type = other DNA
catctacatatgaatacattta

SEQ ID NO: 103865 - DNA, 22 bp, synthetic construct
  misc_feature 1..22: note = chemically synthesized
  source 1..22: mol_type = other DNA
catatgaatacatttatacata

SEQ ID NO: 103866 - DNA, 22 bp, synthetic construct
  misc_feature 1..22: note = chemically synthesized
  source 1..22: mol_type = other DNA
atacatatatttatgtatttat

SEQ ID NO: 103867 - DNA, 22 bp, synthetic construct
  misc_feature 1..22: note = chemically synthesized
  source 1..22: mol_type = other DNA
tacatatatttatgtatttatc

SEQ ID NO: 103868 - DNA, 22 bp, synthetic construct
  misc_feature 1..22: note = chemically synthesized
  source 1..22: mol_type = other DNA
atgtatttatcaattgatcaat

SEQ ID NO: 103869 - DNA, 22 bp, synthetic construct
  misc_feature 1..22: note = chemically synthesized
  source 1..22: mol_type = other DNA
tgtatttatcaattgatcaatt

SEQ ID NO: 103870 - DNA, 22 bp, synthetic construct
  misc_feature 1..22: note = chemically synthesized
  source 1..22: mol_type = other DNA
atcaattgatcaattgatggat

SEQ ID NO: 103871 - DNA, 22 bp, synthetic construct
  misc_feature 1..22: note = chemically synthesized
  source 1..22: mol_type = other DNA
tcaattgatcaattgatggata

SEQ ID NO: 103872 - DNA, 22 bp, synthetic construct
  misc_feature 1..22: note = chemically synthesized
  source 1..22: mol_type = other DNA
atcaattgatggatacattcat

SEQ ID NO: 103873 - DNA, 22 bp, synthetic construct
  misc_feature 1..22: note = chemically synthesized
  source 1..22: mol_type = other DNA
atggatacattcattgtattat

SEQ ID NO: 103874 - DNA, 22 bp, synthetic construct
  misc_feature 1..22: note = chemically synthesized
  source 1..22: mol_type = other DNA
attgtattattgttccatgtag

SEQ ID NO: 103875 - DNA, 22 bp, synthetic construct
  misc_feature 1..22: note = chemically synthesized
  source 1..22: mol_type = other DNA
tattattgttccatgtagcttt

SEQ ID NO: 103876 - DNA, 22 bp, synthetic construct
  misc_feature 1..22: note = chemically synthesized
  source 1..22: mol_type = other DNA
ttgttccatgtagcttttcact

SEQ ID NO: 103877 - DNA, 22 bp, synthetic construct
  misc_feature 1..22: note = chemically synthesized
  source 1..22: mol_type = other DNA
ttccatgtagcttttcacttta

SEQ ID NO: 103878 - DNA, 22 bp, synthetic construct
  misc_feature 1..22: note = chemically synthesized
  source 1..22: mol_type = other DNA
catgtagcttttcactttagat

SEQ ID NO: 103879 - DNA, 22 bp, synthetic construct
  misc_feature 1..22: note = chemically synthesized
  source 1..22: mol_type = other DNA
ttcactttagataatagttaaa

SEQ ID NO: 103880 - DNA, 22 bp, synthetic construct
  misc_feature 1..22: note = chemically synthesized
  source 1..22: mol_type = other DNA
tcactttagataatagttaaag

SEQ ID NO: 103881 - DNA, 22 bp, synthetic construct
  misc_feature 1..22: note = chemically synthesized
  source 1..22: mol_type = other DNA
cactttagataatagttaaagc

SEQ ID NO: 103882 - DNA, 22 bp, synthetic construct
  misc_feature 1..22: note = chemically synthesized
  source 1..22: mol_type = other DNA
actttagataatagttaaagcc

SEQ ID NO: 103883 - DNA, 22 bp, synthetic construct
  misc_feature 1..22: note = chemically synthesized
  source 1..22: mol_type = other DNA
tagataatagttaaagcctatc

SEQ ID NO: 103884 - DNA, 22 bp, synthetic construct
  misc_feature 1..22: note = chemically synthesized
  source 1..22: mol_type = other DNA
agataatagttaaagcctatct

SEQ ID NO: 103885 - DNA, 22 bp, synthetic construct
  misc_feature 1..22: note = chemically synthesized
  source 1..22: mol_type = other DNA
gataatagttaaagcctatcta

SEQ ID NO: 103886 - DNA, 22 bp, synthetic construct
  misc_feature 1..22: note = chemically synthesized
  source 1..22: mol_type = other DNA
aagcctatctaacactgataca

SEQ ID NO: 103887 - DNA, 22 bp, synthetic construct
  misc_feature 1..22: note = chemically synthesized
  source 1..22: mol_type = other DNA
tctaacactgatacaagagata

SEQ ID NO: 103888 - DNA, 22 bp, synthetic construct
  misc_feature 1..22: note = chemically synthesized
  source 1..22: mol_type = other DNA
acactgatacaagagatattgg

SEQ ID NO: 103889 - DNA, 22 bp, synthetic construct
  misc_feature 1..22: note = chemically synthesized
  source 1..22: mol_type = other DNA
atacaagagatattgggtataa

SEQ ID NO: 103890 - DNA, 22 bp, synthetic construct
  misc_feature 1..22: note = chemically synthesized
  source 1..22: mol_type = other DNA
ggtataaaataagctcctttcc

SEQ ID NO: 103891 - DNA, 22 bp, synthetic construct
  misc_feature 1..22: note = chemically synthesized
  source 1..22: mol_type = other DNA
ctttccaattactcaaaaggcc

SEQ ID NO: 103892 - DNA, 22 bp, synthetic construct
  misc_feature 1..22: note = chemically synthesized
  source 1..22: mol_type = other DNA
tccaattactcaaaaggcccag

SEQ ID NO: 103893 - DNA, 22 bp, synthetic construct
  misc_feature 1..22: note = chemically synthesized
  source 1..22: mol_type = other DNA
ccaattactcaaaaggcccaga

SEQ ID NO: 103894 - DNA, 22 bp, synthetic construct
  misc_feature 1..22: note = chemically synthesized
  source 1..22: mol_type = other DNA
caattactcaaaaggcccagaa

SEQ ID NO: 103895 - DNA, 22 bp, synthetic construct
  misc_feature 1..22: note = chemically synthesized
  source 1..22: mol_type = other DNA
ctcaaaaggcccagaaatcatg

SEQ ID NO: 103896 - DNA, 22 bp, synthetic construct
  misc_feature 1..22: note = chemically synthesized
  source 1..22: mol_type = other DNA
aaaaggcccagaaatcatgaag

SEQ ID NO: 103897 - DNA, 22 bp, synthetic construct
  misc_feature 1..22: note = chemically synthesized
  source 1..22: mol_type = other DNA
tgaaaaaagggctcaagccatt

SEQ ID NO: 103898 - DNA, 22 bp, synthetic construct
  misc_feature 1..22: note = chemically synthesized
  source 1..22: mol_type = other DNA
aaaaaagggctcaagccattct

SEQ ID NO: 103899 - DNA, 22 bp, synthetic construct
  misc_feature 1..22: note = chemically synthesized
  source 1..22: mol_type = other DNA
aagccattctgtgcccagaaaa

SEQ ID NO: 103900 - DNA, 22 bp, synthetic construct
  misc_feature 1..22: note = chemically synthesized
  source 1..22: mol_type = other DNA
tgtgcccagaaaataggcgaac

SEQ ID NO: 103901 - DNA, 22 bp, synthetic construct
  misc_feature 1..22: note = chemically synthesized
  source 1..22: mol_type = other DNA
tgcccagaaaataggcgaacaa

SEQ ID NO: 103902 - DNA, 22 bp, synthetic construct
  misc_feature 1..22: note = chemically synthesized
  source 1..22: mol_type = other DNA
ctttggatctgcttggtttgat

SEQ ID NO: 103903 - DNA, 22 bp, synthetic construct
  misc_feature 1..22: note = chemically synthesized
  source 1..22: mol_type = other DNA
tttggatctgcttggtttgatg

SEQ ID NO: 103904 - DNA, 22 bp, synthetic construct
  misc_feature 1..22: note = chemically synthesized
  source 1..22: mol_type = other DNA
tggatctgcttggtttgatgct

SEQ ID NO: 103905 - DNA, 22 bp, synthetic construct
  misc_feature 1..22: note = chemically synthesized
  source 1..22: mol_type = other DNA
ggatctgcttggtttgatgctg

SEQ ID NO: 103906 - DNA, 22 bp, synthetic construct
  misc_feature 1..22: note = chemically synthesized
  source 1..22: mol_type = other DNA
gatctgcttggtttgatgctgt

SEQ ID NO: 103907 - DNA, 22 bp, synthetic construct
  misc_feature 1..22: note = chemically synthesized
  source 1..22: mol_type = other DNA
cttggtttgatgctgtatataa

SEQ ID NO: 103908 - DNA, 22 bp, synthetic construct
  misc_feature 1..22: note = chemically synthesized
  source 1..22: mol_type = other DNA
ggtttgatgctgtatataatag

SEQ ID NO: 103909 - DNA, 22 bp, synthetic construct
  misc_feature 1..22: note = chemically synthesized
  source 1..22: mol_type = other DNA
gtttgatgctgtatataatagg

SEQ ID NO: 103910 - DNA, 22 bp, synthetic construct
  misc_feature 1..22: note = chemically synthesized
  source 1..22: mol_type = other DNA
gatgctgtatataatagggttc

SEQ ID NO: 103911 - DNA, 22 bp, synthetic construct
  misc_feature 1..22: note = chemically synthesized
  source 1..22: mol_type = other DNA
atgctgtatataatagggttca

SEQ ID NO: 103912 - DNA, 22 bp, synthetic construct
  misc_feature 1..22: note = chemically synthesized
  source 1..22: mol_type = other DNA
tatataatagggttcatgaatg

SEQ ID NO: 103913 - DNA, 22 bp, synthetic construct
  misc_feature 1..22: note = chemically synthesized
  source 1..22: mol_type = other DNA
atgaatggaggaaaaagaaatg

SEQ ID NO: 103914 - DNA, 22 bp, synthetic construct
  misc_feature 1..22: note = chemically synthesized
  source 1..22: mol_type = other DNA
gctcacggtaatgtgcaccaca

SEQ ID NO: 103915 - DNA, 22 bp, synthetic construct
  misc_feature 1..22: note = chemically synthesized
  source 1..22: mol_type = other DNA
acggtaatgtgcaccacatgtg

SEQ ID NO: 103916 - DNA, 22 bp, synthetic construct
  misc_feature 1..22: note = chemically synthesized
  source 1..22: mol_type = other DNA
cccaaacctgtgaatgaaagtc

SEQ ID NO: 103917 - DNA, 22 bp, synthetic construct
  misc_feature 1..22: note = chemically synthesized
  source 1..22: mol_type = other DNA
ccaaacctgtgaatgaaagtct

SEQ ID NO: 103918 - DNA, 22 bp, synthetic construct
  misc_feature 1..22: note = chemically synthesized
  source 1..22: mol_type = other DNA
tgaatgaaagtctcactgatca

SEQ ID NO: 103919 - DNA, 22 bp, synthetic construct
  misc_feature 1..22: note = chemically synthesized
  source 1..22: mol_type = other DNA
actgatcacggtgatgtgaaat

SEQ ID NO: 103920 - DNA, 22 bp, synthetic construct
  misc_feature 1..22: note = chemically synthesized
  source 1..22: mol_type = other DNA
atcacggtgatgtgaaatacca

SEQ ID NO: 103921 - DNA, 22 bp, synthetic construct
  misc_feature 1..22: note = chemically synthesized
  source 1..22: mol_type = other DNA
atatgggagacacacatgttga

SEQ ID NO: 103922 - DNA, 22 bp, synthetic construct
  misc_feature 1..22: note = chemically synthesized
  source 1..22: mol_type = other DNA
agagctttggcttgctcttttc

SEQ ID NO: 103923 - DNA, 22 bp, synthetic construct
  misc_feature 1..22: note = chemically synthesized
  source 1..22: mol_type = other DNA
tggcttgctcttttctggaggc

SEQ ID NO: 103924 - DNA, 22 bp, synthetic construct
  misc_feature 1..22: note = chemically synthesized
  source 1..22: mol_type = other DNA
ggcttgctcttttctggaggca

SEQ ID NO: 103925 - DNA, 22 bp, synthetic construct
  misc_feature 1..22: note = chemically synthesized
  source 1..22: mol_type = other DNA
gcttgctcttttctggaggcaa

SEQ ID NO: 103926 - DNA, 22 bp, synthetic construct
  misc_feature 1..22: note = chemically synthesized
  source 1..22: mol_type = other DNA
gctcttttctggaggcaatacc

SEQ ID NO: 103927 - DNA, 22 bp, synthetic construct
  misc_feature 1..22: note = chemically synthesized
  source 1..22: mol_type = other DNA
ctcttttctggaggcaatacct

SEQ ID NO: 103928 - DNA, 22 bp, synthetic construct
  misc_feature 1..22: note = chemically synthesized
  source 1..22: mol_type = other DNA
ttttctggaggcaataccttta

SEQ ID NO: 103929 - DNA, 22 bp, synthetic construct
  misc_feature 1..22: note = chemically synthesized
  source 1..22: mol_type = other DNA
ttctggaggcaatacctttaac

SEQ ID NO: 103930 - DNA, 22 bp, synthetic construct
  misc_feature 1..22: note = chemically synthesized
  source 1..22: mol_type = other DNA
tctggaggcaatacctttaact

SEQ ID NO: 103931 - DNA, 22 bp, synthetic construct
  misc_feature 1..22: note = chemically synthesized
  source 1..22: mol_type = other DNA
ctggaggcaatacctttaactg

SEQ ID NO: 103932 - DNA, 22 bp, synthetic construct
  misc_feature 1..22: note = chemically synthesized
  source 1..22: mol_type = other DNA
tggaggcaatacctttaactgt

SEQ ID NO: 103933 - DNA, 22 bp, synthetic construct
  misc_feature 1..22: note = chemically synthesized
  source 1..22: mol_type = other DNA
gaggcaatacctttaactgttt

SEQ ID NO: 103934 - DNA, 22 bp, synthetic construct
  misc_feature 1..22: note = chemically synthesized
  source 1..22: mol_type = other DNA
taactgttttaaggatcaggat

SEQ ID NO: 103935 - DNA, 22 bp, synthetic construct
  misc_feature 1..22: note = chemically synthesized
  source 1..22: mol_type = other DNA
aactgttttaaggatcaggata

SEQ ID NO: 103936 - DNA, 22 bp, synthetic construct
  misc_feature 1..22: note = chemically synthesized
  source 1..22: mol_type = other DNA
actgttttaaggatcaggatat

SEQ ID NO: 103937 - DNA, 22 bp, synthetic construct
  misc_feature 1..22: note = chemically synthesized
  source 1..22: mol_type = other DNA
ttttaaggatcaggatataaga

SEQ ID NO: 103938 - DNA, 22 bp, synthetic construct
  misc_feature 1..22: note = chemically synthesized
  source 1..22: mol_type = other DNA
taaggatcaggatataagaaaa

SEQ ID NO: 103939 - DNA, 22 bp, synthetic construct
  misc_feature 1..22: note = chemically synthesized
  source 1..22: mol_type = other DNA
aaggatcaggatataagaaaag

SEQ ID NO: 103940 - DNA, 22 bp, synthetic construct
  misc_feature 1..22: note = chemically synthesized
  source 1..22: mol_type = other DNA
aggatcaggatataagaaaaga

SEQ ID NO: 103941 - DNA, 22 bp, synthetic construct
  misc_feature 1..22: note = chemically synthesized
  source 1..22: mol_type = other DNA
ggaagaaaatcaaagcaaccag

SEQ ID NO: 103942 - DNA, 22 bp, synthetic construct
  misc_feature 1..22: note = chemically synthesized
  source 1..22: mol_type = other DNA
ggtataagtgattgaatgtaat

SEQ ID NO: 103943 - DNA, 22 bp, synthetic construct
  misc_feature 1..22: note = chemically synthesized
  source 1..22: mol_type = other DNA
aatgtaatatcagcacaggcaa

SEQ ID NO: 103944 - DNA, 22 bp, synthetic construct
  misc_feature 1..22: note = chemically synthesized
  source 1..22: mol_type = other DNA
caggacatcttgatggagaaaa

SEQ ID NO: 103945 - DNA, 22 bp, synthetic construct
  misc_feature 1..22: note = chemically synthesized
  source 1..22: mol_type = other DNA
aggacatcttgatggagaaaaa

SEQ ID NO: 103946 - DNA, 22 bp, synthetic construct
  misc_feature 1..22: note = chemically synthesized
  source 1..22: mol_type = other DNA
gatggagaaaaaaggtgtggaa

SEQ ID NO: 103947 - DNA, 22 bp, synthetic construct
  misc_feature 1..22: note = chemically synthesized
  source 1..22: mol_type = other DNA
atggagaaaaaaggtgtggaag

SEQ ID NO: 103948 - DNA, 22 bp, synthetic construct
  misc_feature 1..22: note = chemically synthesized
  source 1..22: mol_type = other DNA
gaggcacgagggataaaaagtc

SEQ ID NO: 103949 - DNA, 22 bp, synthetic construct
  misc_feature 1..22: note = chemically synthesized
  source 1..22: mol_type = other DNA
ataaatagccacagttctatct

SEQ ID NO: 103950 - DNA, 22 bp, synthetic construct
  misc_feature 1..22: note = chemically synthesized
  source 1..22: mol_type = other DNA
tatcttcacccaagatttagta

SEQ ID NO: 103951 - DNA, 22 bp, synthetic construct
  misc_feature 1..22: note = chemically synthesized
  source 1..22: mol_type = other DNA
tcttcacccaagatttagtaga

SEQ ID NO: 103952 - DNA, 22 bp, synthetic construct
  misc_feature 1..22: note = chemically synthesized
  source 1..22: mol_type = other DNA
cacccaagatttagtagaaata

SEQ ID NO: 103953 - DNA, 22 bp, synthetic construct
  misc_feature 1..22: note = chemically synthesized
  source 1..22: mol_type = other DNA
acccaagatttagtagaaatag

SEQ ID NO: 103954 - DNA, 22 bp, synthetic construct
  misc_feature 1..22: note = chemically synthesized
  source 1..22: mol_type = other DNA
agtagaaatagttatacctgag

SEQ ID NO: 103955 - DNA, 22 bp, synthetic construct
  misc_feature 1..22: note = chemically synthesized
  source 1..22: mol_type = other DNA
gtagaaatagttatacctgaga

SEQ ID NO: 103956 - DNA, 22 bp, synthetic construct
  misc_feature 1..22: note = chemically synthesized
  source 1..22: mol_type = other DNA
tacctgagaagcatgtggatga

SEQ ID NO: 103957 - DNA, 22 bp, synthetic construct
  misc_feature 1..22: note = chemically synthesized
  source 1..22: mol_type = other DNA
agaagcatgtggatgataatga

SEQ ID NO: 103958 - DNA, 22 bp, synthetic construct
  misc_feature 1..22: note = chemically synthesized
  source 1..22: mol_type = other DNA
acaggagaatacctgattctgc

SEQ ID NO: 103959 - DNA, 22 bp, synthetic construct
  misc_feature 1..22: note = chemically synthesized
  source 1..22: mol_type = other DNA
attctgcaagtggataatggga

SEQ ID NO: 103960 - DNA, 22 bp, synthetic construct
  misc_feature 1..22: note = chemically synthesized
  source 1..22: mol_type = other DNA
tgcaagtggataatgggagtgg

SEQ ID NO: 103961 - DNA, 22 bp, synthetic construct
  misc_feature 1..22: note = chemically synthesized
  source 1..22: mol_type = other DNA
caagtggataatgggagtggat

SEQ ID NO: 103962 - DNA, 22 bp, synthetic construct
  misc_feature 1..22: note = chemically synthesized
  source 1..22: mol_type = other DNA
caagaagcaggccccatggata

SEQ ID NO: 103963 - DNA, 22 bp, synthetic construct
  misc_feature 1..22: note = chemically synthesized
  source 1..22: mol_type = other DNA
tttgtgattcatccacaagacg

SEQ ID NO: 103964 - DNA, 22 bp, synthetic construct
  misc_feature 1..22: note = chemically synthesized
  source 1..22: mol_type = other DNA
tgtgattcatccacaagacgcc

SEQ ID NO: 103965 - DNA, 22 bp, synthetic construct
  misc_feature 1..22: note = chemically synthesized
  source 1..22: mol_type = other DNA
gtgattcatccacaagacgccc

SEQ ID NO: 103966 - DNA, 22 bp, synthetic construct
  misc_feature 1..22: note = chemically synthesized
  source 1..22: mol_type = other DNA
tgattcatccacaagacgccca

SEQ ID NO: 103967 - DNA, 22 bp, synthetic construct
  misc_feature 1..22: note = chemically synthesized
  source 1..22: mol_type = other DNA
atccacaagacgcccattacag

SEQ ID NO: 103968 - DNA, 22 bp, synthetic construct
  misc_feature 1..22: note = chemically synthesized
  source 1..22: mol_type = other DNA
cagtgggcatcatggtcaattt

SEQ ID NO: 103969 - DNA, 22 bp, synthetic construct
  misc_feature 1..22: note = chemically synthesized
  source 1..22: mol_type = other DNA
caccatgaggtcttgcctcagt

SEQ ID NO: 103970 - DNA, 22 bp, synthetic construct
  misc_feature 1..22: note = chemically synthesized
  source 1..22: mol_type = other DNA
accatgaggtcttgcctcagtg

SEQ ID NO: 103971 - DNA, 22 bp, synthetic construct
  misc_feature 1..22: note = chemically synthesized
  source 1..22: mol_type = other DNA
gcctcagtgtggcaaggaaaca

SEQ ID NO: 103972 - DNA, 22 bp, synthetic construct
  misc_feature 1..22: note = chemically synthesized
  source 1..22: mol_type = other DNA
cctcagtgtggcaaggaaacag

SEQ ID NO: 103973 - DNA, 22 bp, synthetic construct
  misc_feature 1..22: note = chemically synthesized
  source 1..22: mol_type = other DNA
agtgtggcaaggaaacagtaca

SEQ ID NO: 103974 - DNA, 22 bp, synthetic construct
  misc_feature 1..22: note = chemically synthesized
  source 1..22: mol_type = other DNA
gtgaagactgtggtcatgcttg

SEQ ID NO: 103975 - DNA, 22 bp, synthetic construct
  misc_feature 1..22: note = chemically synthesized
  source 1..22: mol_type = other DNA
tggtcatgcttgatgaggtaga

SEQ ID NO: 103976 - DNA, 22 bp, synthetic construct
  misc_feature 1..22: note = chemically synthesized
  source 1..22: mol_type = other DNA
gatgaggtagaggagcttgcca

SEQ ID NO: 103977 - DNA, 22 bp, synthetic construct
  misc_feature 1..22: note = chemically synthesized
  source 1..22: mol_type = other DNA
atgaggtagaggagcttgccat

SEQ ID NO: 103978 - DNA, 22 bp, synthetic construct
  misc_feature 1..22: note = chemically synthesized
  source 1..22: mol_type = other DNA
gccattgccaagaaggacgcac

SEQ ID NO: 103979 - DNA, 22 bp, synthetic construct
  misc_feature 1..22: note = chemically synthesized
  source 1..22: mol_type = other DNA
ccattgccaagaaggacgcaca

SEQ ID NO: 103980 - DNA, 22 bp, synthetic construct
  misc_feature 1..22: note = chemically synthesized
  source 1..22: mol_type = other DNA
ccaagaaggacgcacacataaa

SEQ ID NO: 103981 - DNA, 22 bp, synthetic construct
  misc_feature 1..22: note = chemically synthesized
  source 1..22: mol_type = other DNA
cctccagtactgaaaagccagg

SEQ ID NO: 103982 - DNA, 22 bp, synthetic construct
  misc_feature 1..22: note = chemically synthesized
  source 1..22: mol_type = other DNA
cagtactgaaaagccaggcagc

SEQ ID NO: 103983 - DNA, 22 bp, synthetic construct
  misc_feature 1..22: note = chemically synthesized
  source 1..22: mol_type = other DNA
aaaagccaggcagcaaaaaagg

SEQ ID NO: 103984 - DNA, 22 bp, synthetic construct
  misc_feature 1..22: note = chemically synthesized
  source 1..22: mol_type = other DNA
tgtgttcacaagtggcaagtag

SEQ ID NO: 103985 - DNA, 22 bp, synthetic construct
  misc_feature 1..22: note = chemically synthesized
  source 1..22: mol_type = other DNA
acaagtggcaagtagctttata

SEQ ID NO: 103986 - DNA, 22 bp, synthetic construct
  misc_feature 1..22: note = chemically synthesized
  source 1..22: mol_type = other DNA
tatagaaactattacactgaaa

SEQ ID NO: 103987 - DNA, 22 bp, synthetic construct
  misc_feature 1..22: note = chemically synthesized
  source 1..22: mol_type = other DNA
atagaaactattacactgaaat

SEQ ID NO: 103988 - DNA, 22 bp, synthetic construct
  misc_feature 1..22: note = chemically synthesized
  source 1..22: mol_type = other DNA
tagaaactattacactgaaatc

SEQ ID NO: 103989 - DNA, 22 bp, synthetic construct
  misc_feature 1..22: note = chemically synthesized
  source 1..22: mol_type = other DNA
ttacactgaaatccctgcctta

SEQ ID NO: 103990 - DNA, 22 bp, synthetic construct
  misc_feature 1..22: note = chemically synthesized
  source 1..22: mol_type = other DNA
cactgaaatccctgccttatca

SEQ ID NO: 103991 - DNA, 22 bp, synthetic construct
  misc_feature 1..22: note = chemically synthesized
  source 1..22: mol_type = other DNA
aaatccctgccttatcagtttt

SEQ ID NO: 103992 - DNA, 22 bp, synthetic construct
  misc_feature 1..22: note = chemically synthesized
  source 1..22: mol_type = other DNA
ccttatcagtttttactacctt

SEQ ID NO: 103993 - DNA, 22 bp, synthetic construct
  misc_feature 1..22: note = chemically synthesized
  source 1..22: mol_type = other DNA
atcagtttttactaccttcttg

SEQ ID NO: 103994 - DNA, 22 bp, synthetic construct
  misc_feature 1..22: note = chemically synthesized
  source 1..22: mol_type = other DNA
tcagtttttactaccttcttgt

SEQ ID NO: 103995 - DNA, 22 bp, synthetic construct
  misc_feature 1..22: note = chemically synthesized
  source 1..22: mol_type = other DNA
ttactaccttcttgtgaaactg

SEQ ID NO: 103996 - DNA, 22 bp, synthetic construct
  misc_feature 1..22: note = chemically synthesized
  source 1..22: mol_type = other DNA
tactaccttcttgtgaaactgt

SEQ ID NO: 103997 - DNA, 22 bp, synthetic construct
  misc_feature 1..22: note = chemically synthesized
  source 1..22: mol_type = other DNA
actaccttcttgtgaaactgta

SEQ ID NO: 103998 - DNA, 22 bp, synthetic construct
  misc_feature 1..22: note = chemically synthesized
  source 1..22: mol_type = other DNA
ctaccttcttgtgaaactgtat

SEQ ID NO: 103999 - DNA, 22 bp, synthetic construct
  misc_feature 1..22: note = chemically synthesized
  source 1..22: mol_type = other DNA
ccttcttgtgaaactgtatttc

SEQ ID NO: 104000 - DNA, 22 bp, synthetic construct
  misc_feature 1..22: note = chemically synthesized
  source 1..22: mol_type = other DNA
cttgtgaaactgtatttctgca

SEQ ID NO: 104001 - DNA, 22 bp, synthetic construct
  misc_feature 1..22: note = chemically synthesized
  source 1..22: mol_type = other DNA
ttgtgaaactgtatttctgcag

SEQ ID NO: 104002 - DNA, 22 bp, synthetic construct
  misc_feature 1..22: note = chemically synthesized
  source 1..22: mol_type = other DNA
gtgaaactgtatttctgcagcc

SEQ ID NO: 104003 - DNA, 22 bp, synthetic construct
  misc_feature 1..22: note = chemically synthesized
  source 1..22: mol_type = other DNA
tgaaactgtatttctgcagcct

SEQ ID NO: 104004 - DNA, 22 bp, synthetic construct
  misc_feature 1..22: note = chemically synthesized
  source 1..22: mol_type = other DNA
tatttctgcagcctcaatccta

SEQ ID NO: 104005 - DNA, 22 bp, synthetic construct
  misc_feature 1..22: note = chemically synthesized
  source 1..22: mol_type = other DNA
ctgcagcctcaatcctaatatt

SEQ ID NO: 104006 - DNA, 22 bp, synthetic construct
  misc_feature 1..22: note = chemically synthesized
  source 1..22: mol_type = other DNA
tgcagcctcaatcctaatattc

SEQ ID NO: 104007 - DNA, 22 bp, synthetic construct
  misc_feature 1..22: note = chemically synthesized
  source 1..22: mol_type = other DNA
cagcctcaatcctaatattcat

SEQ ID NO: 104008 - DNA, 22 bp, synthetic construct
  misc_feature 1..22: note = chemically synthesized
  source 1..22: mol_type = other DNA
aatcctaatattcatatttagc

SEQ ID NO: 104009 - DNA, 22 bp, synthetic construct
  misc_feature 1..22: note = chemically synthesized
  source 1..22: mol_type = other DNA
atattcatatttagcaataatt

SEQ ID NO: 104010 - DNA, 22 bp, synthetic construct
  misc_feature 1..22: note = chemically synthesized
  source 1..22: mol_type = other DNA
atatttagcaataatttattgg

SEQ ID NO: 104011 - DNA, 22 bp, synthetic construct
  misc_feature 1..22: note = chemically synthesized
  source 1..22: mol_type = other DNA
agcaataatttattggtatatg

SEQ ID NO: 104012 - DNA, 22 bp, synthetic construct
  misc_feature 1..22: note = chemically synthesized
  source 1..22: mol_type = other DNA
gcaataatttattggtatatgc

SEQ ID NO: 104013 - DNA, 22 bp, synthetic construct
  misc_feature 1..22: note = chemically synthesized
  source 1..22: mol_type = other DNA
attggtatatgcatgaatgtgc

SEQ ID NO: 104014 - DNA, 22 bp, synthetic construct
  misc_feature 1..22: note = chemically synthesized
  source 1..22: mol_type = other DNA
ttggtatatgcatgaatgtgca

SEQ ID NO: 104015 - DNA, 22 bp, synthetic construct
  misc_feature 1..22: note = chemically synthesized
  source 1..22: mol_type = other DNA
gtatatgcatgaatgtgcaaca

SEQ ID NO: 104016 - DNA, 22 bp, synthetic construct
  misc_feature 1..22: note = chemically synthesized
  source 1..22: mol_type = other DNA
tcttatagaagagcaatacatt

SEQ ID NO: 104017 - DNA, 22 bp, synthetic construct
  misc_feature 1..22: note = chemically synthesized
  source 1..22: mol_type = other DNA
cttatagaagagcaatacattt

SEQ ID NO: 104018 - DNA, 22 bp, synthetic construct
  misc_feature 1..22: note = chemically synthesized
  source 1..22: mol_type = other DNA
ttatagaagagcaatacattta

SEQ ID NO: 104019 - DNA, 22 bp, synthetic construct
  misc_feature 1..22: note = chemically synthesized
  source 1..22: mol_type = other DNA
atagaagagcaatacatttata

SEQ ID NO: 104020 - DNA, 22 bp, synthetic construct
  misc_feature 1..22: note = chemically synthesized
  source 1..22: mol_type = other DNA
tagaagagcaatacatttatag

SEQ ID NO: 104021 - DNA, 22 bp, synthetic construct
  misc_feature 1..22: note = chemically synthesized
  source 1..22: mol_type = other DNA
atagactgtgctagagataagg

SEQ ID NO: 104022 - DNA, 22 bp, synthetic construct
  misc_feature 1..22: note = chemically synthesized
  source 1..22: mol_type = other DNA
tagactgtgctagagataagga

SEQ ID NO: 104023 - DNA, 22 bp, synthetic construct
  misc_feature 1..22: note = chemically synthesized
  source 1..22: mol_type = other DNA
tgctagagataaggaatgatga

SEQ ID NO: 104024 - DNA, 22 bp, synthetic construct
  misc_feature 1..22: note = chemically synthesized
  source 1..22: mol_type = other DNA
gagataaggaatgatgatcatt

SEQ ID NO: 104025 - DNA, 22 bp, synthetic construct
  misc_feature 1..22: note = chemically synthesized
  source 1..22: mol_type = other DNA
cttcagttatgaataattaagt

SEQ ID NO: 104026 - DNA, 22 bp, synthetic construct
  misc_feature 1..22: note = chemically synthesized
  source 1..22: mol_type = other DNA
ttcagttatgaataattaagta

SEQ ID NO: 104027 - DNA, 22 bp, synthetic construct
  misc_feature 1..22: note = chemically synthesized
  source 1..22: mol_type = other DNA
cagttatgaataattaagtagt

SEQ ID NO: 104028 - DNA, 22 bp, synthetic construct
  misc_feature 1..22: note = chemically synthesized
  source 1..22: mol_type = other DNA
agttatgaataattaagtagtt

SEQ ID NO: 104029 - DNA, 22 bp, synthetic construct
  misc_feature 1..22: note = chemically synthesized
  source 1..22: mol_type = other DNA
tgaataattaagtagttaagca

SEQ ID NO: 104030 - DNA, 22 bp, synthetic construct
  misc_feature 1..22: note = chemically synthesized
  source 1..22: mol_type = other DNA
agtagttaagcattcttaatct

SEQ ID NO: 104031 - DNA, 22 bp, synthetic construct
  misc_feature 1..22: note = chemically synthesized
  source 1..22: mol_type = other DNA
agcattcttaatctaaaaaaca

SEQ ID NO: 104032 - DNA, 22 bp, synthetic construct
  misc_feature 1..22: note = chemically synthesized
  source 1..22: mol_type = other DNA
ttaatctaaaaaacacatttta

SEQ ID NO: 104033 - DNA, 22 bp, synthetic construct
  misc_feature 1..22: note = chemically synthesized
  source 1..22: mol_type = other DNA
aatctaaaaaacacattttaaa

SEQ ID NO: 104034 - DNA, 22 bp, synthetic construct
  misc_feature 1..22: note = chemically synthesized
  source 1..22: mol_type = other DNA
atctaaaaaacacattttaaaa

SEQ ID NO: 104035 - DNA, 22 bp, synthetic construct
  misc_feature 1..22: note = chemically synthesized
  source 1..22: mol_type = other DNA
aaaaacacattttaaaaaatgc

SEQ ID NO: 104036 - DNA, 22 bp, synthetic construct
  misc_feature 1..22: note = chemically synthesized
  source 1..22: mol_type = other DNA
taaaaaatgcatcatgcccctc

SEQ ID NO: 104037 - DNA, 22 bp, synthetic construct
  misc_feature 1..22: note = chemically synthesized
  source 1..22: mol_type = other DNA
aaaaaatgcatcatgcccctct

SEQ ID NO: 104038 - DNA, 22 bp, synthetic construct
  misc_feature 1..22: note = chemically synthesized
  source 1..22: mol_type = other DNA
aaaaatgcatcatgcccctctg

SEQ ID NO: 104039 - DNA, 22 bp, synthetic construct
  misc_feature 1..22: note = chemically synthesized
  source 1..22: mol_type = other DNA
tgtggtgtgcttgctgcacaat

SEQ ID NO: 104040 - DNA, 22 bp, synthetic construct
  misc_feature 1..22: note = chemically synthesized
  source 1..22: mol_type = other DNA
tggtgtgcttgctgcacaatgt

SEQ ID NO: 104041 - DNA, 22 bp, synthetic construct
  misc_feature 1..22: note = chemically synthesized
  source 1..22: mol_type = other DNA
gctgcacaatgtttgaaccaat

SEQ ID NO: 104042 - DNA, 22 bp, synthetic construct
  misc_feature 1..22: note = chemically synthesized
  source 1..22: mol_type = other DNA
ctgcacaatgtttgaaccaata

SEQ ID NO: 104043 - DNA, 22 bp, synthetic construct
  misc_feature 1..22: note = chemically synthesized
  source 1..22: mol_type = other DNA
cacaatgtttgaaccaatagta

SEQ ID NO: 104044 - DNA, 22 bp, synthetic construct
  misc_feature 1..22: note = chemically synthesized
  source 1..22: mol_type = other DNA
gaaccaatagtaacaaaaaaga

SEQ ID NO: 104045 - DNA, 22 bp, synthetic construct
  misc_feature 1..22: note = chemically synthesized
  source 1..22: mol_type = other DNA
aaccaatagtaacaaaaaagaa

SEQ ID NO: 104046 - DNA, 22 bp, synthetic construct
  misc_feature 1..22: note = chemically synthesized
  source 1..22: mol_type = other DNA
gataataattgtacatagttaa

SEQ ID NO: 104047 - DNA, 22 bp, synthetic construct
  misc_feature 1..22: note = chemically synthesized
  source 1..22: mol_type = other DNA
tacatagttaacctgctgctta

SEQ ID NO: 104048 - DNA, 22 bp, synthetic construct
  misc_feature 1..22: note = chemically synthesized
  source 1..22: mol_type = other DNA
acctgctgcttagcttaattgc

SEQ ID NO: 104049 - DNA, 22 bp, synthetic construct
  misc_feature 1..22: note = chemically synthesized
  source 1..22: mol_type = other DNA
ctgcttagcttaattgcatatt

SEQ ID NO: 104050 - DNA, 22 bp, synthetic construct
  misc_feature 1..22: note = chemically synthesized
  source 1..22: mol_type = other DNA
cttagcttaattgcatatttgg

SEQ ID NO: 104051 - DNA, 22 bp, synthetic construct
  misc_feature 1..22: note = chemically synthesized
  source 1..22: mol_type = other DNA
agcttaattgcatatttggata

SEQ ID NO: 104052 - DNA, 22 bp, synthetic construct
  misc_feature 1..22: note = chemically synthesized
  source 1..22: mol_type = other DNA
gcttaattgcatatttggatac

SEQ ID NO: 104053 - DNA, 22 bp, synthetic construct
  misc_feature 1..22: note = chemically synthesized
  source 1..22: mol_type = other DNA
aattgcatatttggatacattt

SEQ ID NO: 104054 - DNA, 22 bp, synthetic construct
  misc_feature 1..22: note = chemically synthesized
  source 1..22: mol_type = other DNA
attgcatatttggatacattta

SEQ ID NO: 104055 - DNA, 22 bp, synthetic construct
  misc_feature 1..22: note = chemically synthesized
  source 1..22: mol_type = other DNA
catatttggatacatttaaact

SEQ ID NO: 104056 - DNA, 22 bp, synthetic construct
  misc_feature 1..22: note = chemically synthesized
  source 1..22: mol_type = other DNA
ggatacatttaaacttgatttt

SEQ ID NO: 104057 - DNA, 22 bp, synthetic construct
  misc_feature 1..22: note = chemically synthesized
  source 1..22: mol_type = other DNA
gatacatttaaacttgattttt

SEQ ID NO: 104058 - DNA, 22 bp, synthetic construct
  misc_feature 1..22: note = chemically synthesized
  source 1..22: mol_type = other DNA
aaacttgatttttattttatgt

SEQ ID NO: 104059 - DNA, 22 bp, synthetic construct
  misc_feature 1..22: note = chemically synthesized
  source 1..22: mol_type = other DNA
aacttgatttttattttatgtt

SEQ ID NO: 104060 - DNA, 22 bp, synthetic construct
  misc_feature 1..22: note = chemically synthesized
  source 1..22: mol_type = other DNA
gatttttattttatgtttcaca

SEQ ID NO: 104061 - DNA, 22 bp, synthetic construct
  misc_feature 1..22: note = chemically synthesized
  source 1..22: mol_type = other DNA
atttttattttatgtttcacaa

SEQ ID NO: 104062 - DNA, 22 bp, synthetic construct
  misc_feature 1..22: note = chemically synthesized
  source 1..22: mol_type = other DNA
ttattttatgtttcacaatcat

SEQ ID NO: 104063 - DNA, 22 bp, synthetic construct
  misc_feature 1..22: note = chemically synthesized
  source 1..22: mol_type = other DNA
tattttatgtttcacaatcatg

SEQ ID NO: 104064 - DNA, 22 bp, synthetic construct
  misc_feature 1..22: note = chemically synthesized
  source 1..22: mol_type = other DNA
attttatgtttcacaatcatga

SEQ ID NO: 104065 - DNA, 22 bp, synthetic construct
  misc_feature 1..22: note = chemically synthesized
  source 1..22: mol_type = other DNA
ttttatgtttcacaatcatgat

SEQ ID NO: 104066 - DNA, 22 bp, synthetic construct
  misc_feature 1..22: note = chemically synthesized
  source 1..22: mol_type = other DNA
tatgtttcacaatcatgatata

SEQ ID NO: 104067 - DNA, 22 bp, synthetic construct
  misc_feature 1..22: note = chemically synthesized
  source 1..22: mol_type = other DNA
atgtttcacaatcatgatatag

SEQ ID NO: 104068 - DNA, 22 bp, synthetic construct
  misc_feature 1..22: note = chemically synthesized
  source 1..22: mol_type = other DNA
tgtttcacaatcatgatataga

SEQ ID NO: 104069 - DNA, 22 bp, synthetic construct
  misc_feature 1..22: note = chemically synthesized
  source 1..22: mol_type = other DNA
cacaatcatgatatagacatag

SEQ ID NO: 104070 - DNA, 22 bp, synthetic construct
  misc_feature 1..22: note = chemically synthesized
  source 1..22: mol_type = other DNA
acaatcatgatatagacatagt

SEQ ID NO: 104071 - DNA, 22 bp, synthetic construct
  misc_feature 1..22: note = chemically synthesized
  source 1..22: mol_type = other DNA
tgttagaaaacttttctttgtt

SEQ ID NO: 104072 - DNA, 22 bp, synthetic construct
  misc_feature 1..22: note = chemically synthesized
  source 1..22: mol_type = other DNA
gttagaaaacttttctttgttt

SEQ ID NO: 104073 - DNA, 22 bp, synthetic construct
  misc_feature 1..22: note = chemically synthesized
  source 1..22: mol_type = other DNA
ttagaaaacttttctttgttta

SEQ ID NO: 104074 - DNA, 22 bp, synthetic construct
  misc_feature 1..22: note = chemically synthesized
  source 1..22: mol_type = other DNA
gaaaacttttctttgtttagtt

SEQ ID NO: 104075 - DNA, 22 bp, synthetic construct
  misc_feature 1..22: note = chemically synthesized
  source 1..22: mol_type = other DNA
ttctttgtttagttttgaaata

SEQ ID NO: 104076 - DNA, 22 bp, synthetic construct
  misc_feature 1..22: note = chemically synthesized
  source 1..22: mol_type = other DNA
tctttgtttagttttgaaatag

SEQ ID NO: 104077 - DNA, 22 bp, synthetic construct
  misc_feature 1..22: note = chemically synthesized
  source 1..22: mol_type = other DNA
ctttgtttagttttgaaataga

SEQ ID NO: 104078 - DNA, 22 bp, synthetic construct
  misc_feature 1..22: note = chemically synthesized
  source 1..22: mol_type = other DNA
tttgtttagttttgaaatagaa

SEQ ID NO: 104079 - DNA, 22 bp, synthetic construct
  misc_feature 1..22: note = chemically synthesized
  source 1..22: mol_type = other DNA
tgtttagttttgaaatagaatg

SEQ ID NO: 104080 - DNA, 22 bp, synthetic construct
  misc_feature 1..22: note = chemically synthesized
  source 1..22: mol_type = other DNA
gtttagttttgaaatagaatgt

SEQ ID NO: 104081 - DNA, 22 bp, synthetic construct
  misc_feature 1..22: note = chemically synthesized
  source 1..22: mol_type = other DNA
tttagttttgaaatagaatgtt

SEQ ID NO: 104082 - DNA, 22 bp, synthetic construct
  misc_feature 1..22: note = chemically synthesized
  source 1..22: mol_type = other DNA
agttttgaaatagaatgttaat

SEQ ID NO: 104083 - DNA, 22 bp, synthetic construct
  misc_feature 1..22: note = chemically synthesized
  source 1..22: mol_type = other DNA
gttttgaaatagaatgttaatg

SEQ ID NO: 104084 - DNA, 22 bp, synthetic construct
  misc_feature 1..22: note = chemically synthesized
  source 1..22: mol_type = other DNA
tgaaatagaatgttaatgtttt

SEQ ID NO: 104085 - DNA, 22 bp, synthetic construct
  misc_feature 1..22: note = chemically synthesized
  source 1..22: mol_type = other DNA
gaaatagaatgttaatgtttta

SEQ ID NO: 104086 - DNA, 22 bp, synthetic construct
  misc_feature 1..22: note = chemically synthesized
  source 1..22: mol_type = other DNA
aaatagaatgttaatgttttat

SEQ ID NO: 104087 - DNA, 22 bp, synthetic construct
  misc_feature 1..22: note = chemically synthesized
  source 1..22: mol_type = other DNA
atgttttatggaattctaacaa

SEQ ID NO: 104088 - DNA, 22 bp, synthetic construct
  misc_feature 1..22: note = chemically synthesized
  source 1..22: mol_type = other DNA
tatggaattctaacaaaagcca

SEQ ID NO: 104089 - DNA, 22 bp, synthetic construct
  misc_feature 1..22: note = chemically synthesized
  source 1..22: mol_type = other DNA
atggaattctaacaaaagccat

SEQ ID NO: 104090 - DNA, 22 bp, synthetic construct
  misc_feature 1..22: note = chemically synthesized
  source 1..22: mol_type = other DNA
tggaattctaacaaaagccatg

SEQ ID NO: 104091 - DNA, 22 bp, synthetic construct
  misc_feature 1..22: note = chemically synthesized
  source 1..22: mol_type = other DNA
taacaaaagccatgagccctct

SEQ ID NO: 104092 - DNA, 22 bp, synthetic construct
  misc_feature 1..22: note = chemically synthesized
  source 1..22: mol_type = other DNA
acaaaagccatgagccctctgt

SEQ ID NO: 104093 - DNA, 22 bp, synthetic construct
  misc_feature 1..22: note = chemically synthesized
  source 1..22: mol_type = other DNA
tgtggagaaaaatggacaaaag

SEQ ID NO: 104094 - DNA, 22 bp, synthetic construct
  misc_feature 1..22: note = chemically synthesized
  source 1..22: mol_type = other DNA
tggagaaaaatggacaaaagca

SEQ ID NO: 104095 - DNA, 22 bp, synthetic construct
  misc_feature 1..22: note = chemically synthesized
  source 1..22: mol_type = other DNA
agtctaaaaatattcacacgtt

SEQ ID NO: 104096 - DNA, 22 bp, synthetic construct
  misc_feature 1..22: note = chemically synthesized
  source 1..22: mol_type = other DNA
gtctaaaaatattcacacgttt

SEQ ID NO: 104097 - DNA, 22 bp, synthetic construct
  misc_feature 1..22: note = chemically synthesized
  source 1..22: mol_type = other DNA
aaaatattcacacgttttcctg

SEQ ID NO: 104098 - DNA, 22 bp, synthetic construct
  misc_feature 1..22: note = chemically synthesized
  source 1..22: mol_type = other DNA
acacgttttcctgaagctaatc

SEQ ID NO: 104099 - DNA, 22 bp, synthetic construct
  misc_feature 1..22: note = chemically synthesized
  source 1..22: mol_type = other DNA
tcctgaagctaatccatgagca

SEQ ID NO: 104100 - DNA, 22 bp, synthetic construct
  misc_feature 1..22: note = chemically synthesized
  source 1..22: mol_type = other DNA
cctgaagctaatccatgagcac

SEQ ID NO: 104101 - DNA, 22 bp, synthetic construct
  misc_feature 1..22: note = chemically synthesized
  source 1..22: mol_type = other DNA
ctgaagctaatccatgagcacc

SEQ ID NO: 104102 - DNA, 22 bp, synthetic construct
  misc_feature 1..22: note = chemically synthesized
  source 1..22: mol_type = other DNA
aagctaatccatgagcaccaca

SEQ ID NO: 104103 - DNA, 22 bp, synthetic construct
  misc_feature 1..22: note = chemically synthesized
  source 1..22: mol_type = other DNA
atccatgagcaccacatttgaa

SEQ ID NO: 104104 - DNA, 22 bp, synthetic construct
  misc_feature 1..22: note = chemically synthesized
  source 1..22: mol_type = other DNA
gaaacttcaagcctgccttgaa

SEQ ID NO: 104105 - DNA, 22 bp, synthetic construct
  misc_feature 1..22: note = chemically synthesized
  source 1..22: mol_type = other DNA
aaacttcaagcctgccttgaaa

SEQ ID NO: 104106 - DNA, 22 bp, synthetic construct
  misc_feature 1..22: note = chemically synthesized
  source 1..22: mol_type = other DNA
caagcctgccttgaaacatgtg

SEQ ID NO: 104107 - DNA, 22 bp, synthetic construct
  misc_feature 1..22: note = chemically synthesized
  source 1..22: mol_type = other DNA
aagcctgccttgaaacatgtgt

SEQ ID NO: 104108 - DNA, 22 bp, synthetic construct
  misc_feature 1..22: note = chemically synthesized
  source 1..22: mol_type = other DNA
ccttgaaacatgtgttgagatg

SEQ ID NO: 104109 - DNA, 22 bp, synthetic construct
  misc_feature 1..22: note = chemically synthesized
  source 1..22: mol_type = other DNA
gaaacatgtgttgagatgaaaa

SEQ ID NO: 104110 - DNA, 22 bp, synthetic construct
  misc_feature 1..22: note = chemically synthesized
  source 1..22: mol_type = other DNA
aaacatgtgttgagatgaaaaa

SEQ ID NO: 104111 - DNA, 22 bp, synthetic construct
  misc_feature 1..22: note = chemically synthesized
  source 1..22: mol_type = other DNA
agatgaaaaagtctgtgcttta

SEQ ID NO: 104112 - DNA, 22 bp, synthetic construct
  misc_feature 1..22: note = chemically synthesized
  source 1..22: mol_type = other DNA
tgctttaggtgttggtcatccc

SEQ ID NO: 104113 - DNA, 22 bp, synthetic construct
  misc_feature 1..22: note = chemically synthesized
  source 1..22: mol_type = other DNA
taggtgttggtcatcccagatg

SEQ ID NO: 104114 - DNA, 22 bp, synthetic construct
  misc_feature 1..22: note = chemically synthesized
  source 1..22: mol_type = other DNA
aggtgttggtcatcccagatgg

SEQ ID NO: 104115 - DNA, 22 bp, synthetic construct
  misc_feature 1..22: note = chemically synthesized
  source 1..22: mol_type = other DNA
ggtgttggtcatcccagatgga

SEQ ID NO: 104116 - DNA, 22 bp, synthetic construct
  misc_feature 1..22: note = chemically synthesized
  source 1..22: mol_type = other DNA
gtcatcccagatggagtatgtt

SEQ ID NO: 104117 - DNA, 22 bp, synthetic construct
  misc_feature 1..22: note = chemically synthesized
  source 1..22: mol_type = other DNA
tcctatgcagacctctgaaaat

SEQ ID NO: 104118 - DNA, 22 bp, synthetic construct
  misc_feature 1..22: note = chemically synthesized
  source 1..22: mol_type = other DNA
ctatgcagacctctgaaaatct

SEQ ID NO: 104119 - DNA, 22 bp, synthetic construct
  misc_feature 1..22: note = chemically synthesized
  source 1..22: mol_type = other DNA
tgcagacctctgaaaatcttcc

SEQ ID NO: 104120 - DNA, 22 bp, synthetic construct
  misc_feature 1..22: note = chemically synthesized
  source 1..22: mol_type = other DNA
tgaaaatcttcctatcttctct

SEQ ID NO: 104121 - DNA, 22 bp, synthetic construct
  misc_feature 1..22: note = chemically synthesized
  source 1..22: mol_type = other DNA
aaaatcttcctatcttctcttc

SEQ ID NO: 104122 - DNA, 22 bp, synthetic construct
  misc_feature 1..22: note = chemically synthesized
  source 1..22: mol_type = other DNA
cctatcttctcttcgctgcatc

SEQ ID NO: 104123 - DNA, 22 bp, synthetic construct
  misc_feature 1..22: note = chemically synthesized
  source 1..22: mol_type = other DNA
ctatcttctcttcgctgcatct

SEQ ID NO: 104124 - DNA, 22 bp, synthetic construct
  misc_feature 1..22: note = chemically synthesized
  source 1..22: mol_type = other DNA
tcttctcttcgctgcatctaac

SEQ ID NO: 104125 - DNA, 22 bp, synthetic construct
  misc_feature 1..22: note = chemically synthesized
  source 1..22: mol_type = other DNA
ctcttcgctgcatctaacataa

SEQ ID NO: 104126 - DNA, 22 bp, synthetic construct
  misc_feature 1..22: note = chemically synthesized
  source 1..22: mol_type = other DNA
tcttcgctgcatctaacataag

SEQ ID NO: 104127 - DNA, 22 bp, synthetic construct
  misc_feature 1..22: note = chemically synthesized
  source 1..22: mol_type = other DNA
ttcgctgcatctaacataagaa

SEQ ID NO: 104128 - DNA, 22 bp, synthetic construct
  misc_feature 1..22: note = chemically synthesized
  source 1..22: mol_type = other DNA
cgctgcatctaacataagaagg

SEQ ID NO: 104129 - DNA, 22 bp, synthetic construct
  misc_feature 1..22: note = chemically synthesized
  source 1..22: mol_type = other DNA
gctgcatctaacataagaagga

SEQ ID NO: 104130 - DNA, 22 bp, synthetic construct
  misc_feature 1..22: note = chemically synthesized
  source 1..22: mol_type = other DNA
catctaacataagaaggaagag

SEQ ID NO: 104131 - DNA, 22 bp, synthetic construct
  misc_feature 1..22: note = chemically synthesized
  source 1..22: mol_type = other DNA
acataagaaggaagaggaatca

SEQ ID NO: 104132 - DNA, 22 bp, synthetic construct
  misc_feature 1..22: note = chemically synthesized
  source 1..22: mol_type = other DNA
cttattcctgttcctggcactc

SEQ ID NO: 104133 - DNA, 22 bp, synthetic construct
  misc_feature 1..22: note = chemically synthesized
  source 1..22: mol_type = other DNA
attcctgttcctggcactcacc

SEQ ID NO: 104134 - DNA, 22 bp, synthetic construct
  misc_feature 1..22: note = chemically synthesized
  source 1..22: mol_type = other DNA
ttcctgttcctggcactcacct

SEQ ID NO: 104135 - DNA, 22 bp, synthetic construct
  misc_feature 1..22: note = chemically synthesized
  source 1..22: mol_type = other DNA
ctgttcctggcactcacctatg

SEQ ID NO: 104136 - DNA, 22 bp, synthetic construct
  misc_feature 1..22: note = chemically synthesized
  source 1..22: mol_type = other DNA
ttcctggcactcacctatgctg

SEQ ID NO: 104137 - DNA, 22 bp, synthetic construct
  misc_feature 1..22: note = chemically synthesized
  source 1..22: mol_type = other DNA
ctggcactcacctatgctgtca

SEQ ID NO: 104138 - DNA, 22 bp, synthetic construct
  misc_feature 1..22: note = chemically synthesized
  source 1..22: mol_type = other DNA
gcactcacctatgctgtcattt

SEQ ID NO: 104139 - DNA, 22 bp, synthetic construct
  misc_feature 1..22: note = chemically synthesized
  source 1..22: mol_type = other DNA
acctatgctgtcattttcttgc

SEQ ID NO: 104140 - DNA, 22 bp, synthetic construct
  misc_feature 1..22: note = chemically synthesized
  source 1..22: mol_type = other DNA
tgctgtcattttcttgctggaa

SEQ ID NO: 104141 - DNA, 22 bp, synthetic construct
  misc_feature 1..22: note = chemically synthesized
  source 1..22: mol_type = other DNA
tcattttcttgctggaataagg

SEQ ID NO: 104142 - DNA, 22 bp, synthetic construct
  misc_feature 1..22: note = chemically synthesized
  source 1..22: mol_type = other DNA
tcttgctggaataaggacccat

SEQ ID NO: 104143 - DNA, 22 bp, synthetic construct
  misc_feature 1..22: note = chemically synthesized
  source 1..22: mol_type = other DNA
cttgctggaataaggacccatt

SEQ ID NO: 104144 - DNA, 22 bp, synthetic construct
  misc_feature 1..22: note = chemically synthesized
  source 1..22: mol_type = other DNA
ttgctggaataaggacccattc

SEQ ID NO: 104145 - DNA, 22 bp, synthetic construct
  misc_feature 1..22: note = chemically synthesized
  source 1..22: mol_type = other DNA
gctggaataaggacccattcct

SEQ ID NO: 104146 - DNA, 22 bp, synthetic construct
  misc_feature 1..22: note = chemically synthesized
  source 1..22: mol_type = other DNA
ctggaataaggacccattcctg

SEQ ID NO: 104147 - DNA, 22 bp, synthetic construct
  misc_feature 1..22: note = chemically synthesized
  source 1..22: mol_type = other DNA
gaataaggacccattcctgctc

SEQ ID NO: 104148 - DNA, 22 bp, synthetic construct
  misc_feature 1..22: note = chemically synthesized
  source 1..22: mol_type = other DNA
ctgctctatttgaagactcagt

SEQ ID NO: 104149 - DNA, 22 bp, synthetic construct
  misc_feature 1..22: note = chemically synthesized
  source 1..22: mol_type = other DNA
ctctatttgaagactcagttca

SEQ ID NO: 104150 - DNA, 22 bp, synthetic construct
  misc_feature 1..22: note = chemically synthesized
  source 1..22: mol_type = other DNA
tatttgaagactcagttcagac

SEQ ID NO: 104151 - DNA, 22 bp, synthetic construct
  misc_feature 1..22: note = chemically synthesized
  source 1..22: mol_type = other DNA
tttgaagactcagttcagacac

SEQ ID NO: 104152 - DNA, 22 bp, synthetic construct
  misc_feature 1..22: note = chemically synthesized
  source 1..22: mol_type = other DNA
gaagactcagttcagacactca

SEQ ID NO: 104153 - DNA, 22 bp, synthetic construct
  misc_feature 1..22: note = chemically synthesized
  source 1..22: mol_type = other DNA
aagactcagttcagacactcac

SEQ ID NO: 104154 - DNA, 22 bp, synthetic construct
  misc_feature 1..22: note = chemically synthesized
  source 1..22: mol_type = other DNA
agttcagacactcacttctcaa

SEQ ID NO: 104155 - DNA, 22 bp, synthetic construct
  misc_feature 1..22: note = chemically synthesized
  source 1..22: mol_type = other DNA
agacactcacttctcaaagact

SEQ ID NO: 104156 - DNA, 22 bp, synthetic construct
  misc_feature 1..22: note = chemically synthesized
  source 1..22: mol_type = other DNA
acttctcaaagactattcaaga

SEQ ID NO: 104157 - DNA, 22 bp, synthetic construct
  misc_feature 1..22: note = chemically synthesized
  source 1..22: mol_type = other DNA
ctcaaagactattcaagaggcc

SEQ ID NO: 104158 - DNA, 22 bp, synthetic construct
  misc_feature 1..22: note = chemically synthesized
  source 1..22: mol_type = other DNA
tcaaagactattcaagaggcca

SEQ ID NO: 104159 - DNA, 22 bp, synthetic construct
  misc_feature 1..22: note = chemically synthesized
  source 1..22: mol_type = other DNA
aaagactattcaagaggccaaa

SEQ ID NO: 104160 - DNA, 22 bp, synthetic construct
  misc_feature 1..22: note = chemically synthesized
  source 1..22: mol_type = other DNA
ttcaagaggccaaattagagag

SEQ ID NO: 104161 - DNA, 22 bp, synthetic construct
  misc_feature 1..22: note = chemically synthesized
  source 1..22: mol_type = other DNA
aagaggccaaattagagagttt

SEQ ID NO: 104162 - DNA, 22 bp, synthetic construct
  misc_feature 1..22: note = chemically synthesized
  source 1..22: mol_type = other DNA
gagagtttatgtatgtggaaat

SEQ ID NO: 104163 - DNA, 22 bp, synthetic construct
  misc_feature 1..22: note = chemically synthesized
  source 1..22: mol_type = other DNA
atgtatgtggaaatcacttccc

SEQ ID NO: 104164 - DNA, 22 bp, synthetic construct
  misc_feature 1..22: note = chemically synthesized
  source 1..22: mol_type = other DNA
tgtatgtggaaatcacttcccc

SEQ ID NO: 104165 - DNA, 22 bp, synthetic construct
  misc_feature 1..22: note = chemically synthesized
  source 1..22: mol_type = other DNA
ccccagagtttcctctttccaa

SEQ ID NO: 104166 - DNA, 22 bp, synthetic construct
  misc_feature 1..22: note = chemically synthesized
  source 1..22: mol_type = other DNA
cccagagtttcctctttccaaa

SEQ ID NO: 104167 - DNA, 22 bp, synthetic construct
  misc_feature 1..22: note = chemically synthesized
  source 1..22: mol_type = other DNA
cctctttccaaatactcagaag

SEQ ID NO: 104168 - DNA, 22 bp, synthetic construct
  misc_feature 1..22: note = chemically synthesized
  source 1..22: mol_type = other DNA
ctctttccaaatactcagaaga

SEQ ID NO: 104169 - DNA, 22 bp, synthetic construct
  misc_feature 1..22: note = chemically synthesized
  source 1..22: mol_type = other DNA
tttccaaatactcagaagaacc

SEQ ID NO: 104170 - DNA, 22 bp, synthetic construct
  misc_feature 1..22: note = chemically synthesized
  source 1..22: mol_type = other DNA
tccaaatactcagaagaaccct

SEQ ID NO: 104171 - DNA, 22 bp, synthetic construct
  misc_feature 1..22: note = chemically synthesized
  source 1..22: mol_type = other DNA
ccaaatactcagaagaaccctt

SEQ ID NO: 104172 - DNA, 22 bp, synthetic construct
  misc_feature 1..22: note = chemically synthesized
  source 1..22: mol_type = other DNA
caaatactcagaagaacccttg

SEQ ID NO: 104173 - DNA, 22 bp, synthetic construct
  misc_feature 1..22: note = chemically synthesized
  source 1..22: mol_type = other DNA
agaagaacccttgatctcccct

SEQ ID NO: 104174 - DNA, 22 bp, synthetic construct
  misc_feature 1..22: note = chemically synthesized
  source 1..22: mol_type = other DNA
gatctcccctccctcctctgtc

SEQ ID NO: 104175 - DNA, 22 bp, synthetic construct
  misc_feature 1..22: note = chemically synthesized
  source 1..22: mol_type = other DNA
atctcccctccctcctctgtct

SEQ ID NO: 104176 - DNA, 22 bp, synthetic construct
  misc_feature 1..22: note = chemically synthesized
  source 1..22: mol_type = other DNA
ccctccctcctctgtctgggag

SEQ ID NO: 104177 - DNA, 22 bp, synthetic construct
  misc_feature 1..22: note = chemically synthesized
  source 1..22: mol_type = other DNA
cctcctctgtctgggagaagca

SEQ ID NO: 104178 - DNA, 22 bp, synthetic construct
  misc_feature 1..22: note = chemically synthesized
  source 1..22: mol_type = other DNA
ctctgtctgggagaagcaggga

SEQ ID NO: 104179 - DNA, 22 bp, synthetic construct
  misc_feature 1..22: note = chemically synthesized
  source 1..22: mol_type = other DNA
tgtctgggagaagcagggacgc

SEQ ID NO: 104180 - DNA, 22 bp, synthetic construct
  misc_feature 1..22: note = chemically synthesized
  source 1..22: mol_type = other DNA
tctgggagaagcagggacgctc

SEQ ID NO: 104181 - DNA, 22 bp, synthetic construct
  misc_feature 1..22: note = chemically synthesized
  source 1..22: mol_type = other DNA
ggagaagcagggacgctcaacc

SEQ ID NO: 104182 - DNA, 22 bp, synthetic construct
  misc_feature 1..22: note = chemically synthesized
  source 1..22: mol_type = other DNA
aaccaatgtcctcggaactttc

SEQ ID NO: 104183 - DNA, 22 bp, synthetic construct
  misc_feature 1..22: note = chemically synthesized
  source 1..22: mol_type = other DNA
ggaactttcaggtatttctcca

SEQ ID NO: 104184 - DNA, 22 bp, synthetic construct
  misc_feature 1..22: note = chemically synthesized
  source 1..22: mol_type = other DNA
tcaggtatttctccaaggatgg

SEQ ID NO: 104185 - DNA, 22 bp, synthetic construct
  misc_feature 1..22: note = chemically synthesized
  source 1..22: mol_type = other DNA
caggtatttctccaaggatgga

SEQ ID NO: 104186 - DNA, 22 bp, synthetic construct
  misc_feature 1..22: note = chemically synthesized
  source 1..22: mol_type = other DNA
aggtatttctccaaggatggat

SEQ ID NO: 104187 - DNA, 22 bp, synthetic construct
  misc_feature 1..22: note = chemically synthesized
  source 1..22: mol_type = other DNA
ctccaaggatggatgagaaaag

SEQ ID NO: 104188 - DNA, 22 bp, synthetic construct
  misc_feature 1..22: note = chemically synthesized
  source 1..22: mol_type = other DNA
tccaaggatggatgagaaaagc

SEQ ID NO: 104189 - DNA, 22 bp, synthetic construct
  misc_feature 1..22: note = chemically synthesized
  source 1..22: mol_type = other DNA
caaggatggatgagaaaagctg

SEQ ID NO: 104190 - DNA, 22 bp, synthetic construct
  misc_feature 1..22: note = chemically synthesized
  source 1..22: mol_type = other DNA
catactccaatgccacctctac

SEQ ID NO: 104191 - DNA, 22 bp, synthetic construct
  misc_feature 1..22: note = chemically synthesized
  source 1..22: mol_type = other DNA
caatgccacctctacattggga

SEQ ID NO: 104192 - DNA, 22 bp, synthetic construct
  misc_feature 1..22: note = chemically synthesized
  source 1..22: mol_type = other DNA
tacattgggatgccaggactta

SEQ ID NO: 104193 - DNA, 22 bp, synthetic construct
  misc_feature 1..22: note = chemically synthesized
  source 1..22: mol_type = other DNA
cattgggatgccaggacttaat

SEQ ID NO: 104194 - DNA, 22 bp, synthetic construct
  misc_feature 1..22: note = chemically synthesized
  source 1..22: mol_type = other DNA
ggatgccaggacttaattatgt

SEQ ID NO: 104195 - DNA, 22 bp, synthetic construct
  misc_feature 1..22: note = chemically synthesized
  source 1..22: mol_type = other DNA
aattatgtgacccttcaggacc

SEQ ID NO: 104196 - DNA, 22 bp, synthetic construct
  misc_feature 1..22: note = chemically synthesized
  source 1..22: mol_type = other DNA
attatgtgacccttcaggaccc

SEQ ID NO: 104197 - DNA, 22 bp, synthetic construct
  misc_feature 1..22: note = chemically synthesized
  source 1..22: mol_type = other DNA
tgtgacccttcaggaccctaag

SEQ ID NO: 104198 - DNA, 22 bp, synthetic construct
  misc_feature 1..22: note = chemically synthesized
  source 1..22: mol_type = other DNA
caggaccctaagcatcagtaca

SEQ ID NO: 104199 - DNA, 22 bp, synthetic construct
  misc_feature 1..22: note = chemically synthesized
  source 1..22: mol_type = other DNA
aggaccctaagcatcagtacac

SEQ ID NO: 104200 - DNA, 22 bp, synthetic construct
  misc_feature 1..22: note = chemically synthesized
  source 1..22: mol_type = other DNA
agcatcagtacacagtatatcc

SEQ ID NO: 104201 - DNA, 22 bp, synthetic construct
  misc_feature 1..22: note = chemically synthesized
  source 1..22: mol_type = other DNA
tgcattgtctgtctcaatacaa

SEQ ID NO: 104202 - DNA, 22 bp, synthetic construct
  misc_feature 1..22: note = chemically synthesized
  source 1..22: mol_type = other DNA
gcattgtctgtctcaatacaat

SEQ ID NO: 104203 - DNA, 22 bp, synthetic construct
  misc_feature 1..22: note = chemically synthesized
  source 1..22: mol_type = other DNA
cattgtctgtctcaatacaatg

SEQ ID NO: 104204 - DNA, 22 bp, synthetic construct
  misc_feature 1..22: note = chemically synthesized
  source 1..22: mol_type = other DNA
tctgtctcaatacaatgcaaag

SEQ ID NO: 104205 - DNA, 22 bp, synthetic construct
  misc_feature 1..22: note = chemically synthesized
  source 1..22: mol_type = other DNA
tctcaatacaatgcaaagtatt

SEQ ID NO: 104206 - DNA, 22 bp, synthetic construct
  misc_feature 1..22: note = chemically synthesized
  source 1..22: mol_type = other DNA
aatacaatgcaaagtattgaga

SEQ ID NO: 104207 - DNA, 22 bp, synthetic construct
  misc_feature 1..22: note = chemically synthesized
  source 1..22: mol_type = other DNA
agagatactagttgaatgcagg

SEQ ID NO: 104208 - DNA, 22 bp, synthetic construct
  misc_feature 1..22: note = chemically synthesized
  source 1..22: mol_type = other DNA
gttgaatgcagggtcacatgtg

SEQ ID NO: 104209 - DNA, 22 bp, synthetic construct
  misc_feature 1..22: note = chemically synthesized
  source 1..22: mol_type = other DNA
aatgcagggtcacatgtgtctt

SEQ ID NO: 104210 - DNA, 22 bp, synthetic construct
  misc_feature 1..22: note = chemically synthesized
  source 1..22: mol_type = other DNA
tgtcctggagtttatgcatttc

SEQ ID NO: 104211 - DNA, 22 bp, synthetic construct
  misc_feature 1..22: note = chemically synthesized
  source 1..22: mol_type = other DNA
gtcctggagtttatgcatttca

SEQ ID NO: 104212 - DNA, 22 bp, synthetic construct
  misc_feature 1..22: note = chemically synthesized
  source 1..22: mol_type = other DNA
tcctggagtttatgcatttcaa

SEQ ID NO: 104213 - DNA, 22 bp, synthetic construct
  misc_feature 1..22: note = chemically synthesized
  source 1..22: mol_type = other DNA
gagtttatgcatttcaattgca

SEQ ID NO: 104214 - DNA, 22 bp, synthetic construct
  misc_feature 1..22: note = chemically synthesized
  source 1..22: mol_type = other DNA
atgcatttcaattgcattgttg

SEQ ID NO: 104215 - DNA, 22 bp, synthetic construct
  misc_feature 1..22: note = chemically synthesized
  source 1..22: mol_type = other DNA
tgcatttcaattgcattgttgt

SEQ ID NO: 104216 - DNA, 22 bp, synthetic construct
  misc_feature 1..22: note = chemically synthesized
  source 1..22: mol_type = other DNA
caattgcattgttgtcttttct

SEQ ID NO: 104217 - DNA, 22 bp, synthetic construct
  misc_feature 1..22: note = chemically synthesized
  source 1..22: mol_type = other DNA
aattgcattgttgtcttttctg

SEQ ID NO: 104218 - DNA, 22 bp, synthetic construct
  misc_feature 1..22: note = chemically synthesized
  source 1..22: mol_type = other DNA
cattgttgtcttttctgatact

SEQ ID NO: 104219 - DNA, 22 bp, synthetic construct
  misc_feature 1..22: note = chemically synthesized
  source 1..22: mol_type = other DNA
ttgtcttttctgatactttggg

SEQ ID NO: 104220 - DNA, 22 bp, synthetic construct
  misc_feature 1..22: note = chemically synthesized
  source 1..22: mol_type = other DNA
tcttttctgatactttgggaaa

SEQ ID NO: 104221 - DNA, 22 bp, synthetic construct
  misc_feature 1..22: note = chemically synthesized
  source 1..22: mol_type = other DNA
ttctgatactttgggaaaatca

SEQ ID NO: 104222 - DNA, 22 bp, synthetic construct
  misc_feature 1..22: note = chemically synthesized
  source 1..22: mol_type = other DNA
tctgatactttgggaaaatcag

SEQ ID NO: 104223 - DNA, 22 bp, synthetic construct
  misc_feature 1..22: note = chemically synthesized
  source 1..22: mol_type = other DNA
ctgatactttgggaaaatcagt

SEQ ID NO: 104224 - DNA, 22 bp, synthetic construct
  misc_feature 1..22: note = chemically synthesized
  source 1..22: mol_type = other DNA
tgatactttgggaaaatcagtt

SEQ ID NO: 104225 - DNA, 22 bp, synthetic construct
  misc_feature 1..22: note = chemically synthesized
  source 1..22: mol_type = other DNA
atactttgggaaaatcagttct

SEQ ID NO: 104226 - DNA, 22 bp, synthetic construct
  misc_feature 1..22: note = chemically synthesized
  source 1..22: mol_type = other DNA
tgggaaaatcagttctgatcca

SEQ ID NO: 104227 - DNA, 22 bp, synthetic construct
  misc_feature 1..22: note = chemically synthesized
  source 1..22: mol_type = other DNA
gggaaaatcagttctgatccac

SEQ ID NO: 104228 - DNA, 22 bp, synthetic construct
  misc_feature 1..22: note = chemically synthesized
  source 1..22: mol_type = other DNA
ggaaaatcagttctgatccaca

SEQ ID NO: 104229 - DNA, 22 bp, synthetic construct
  misc_feature 1..22: note = chemically synthesized
  source 1..22: mol_type = other DNA
tgatccacaggaacctcaatgg

SEQ ID NO: 104230 - DNA, 22 bp, synthetic construct
  misc_feature 1..22: note = chemically synthesized
  source 1..22: mol_type = other DNA
atccacaggaacctcaatggat

SEQ ID NO: 104231 - DNA, 22 bp, synthetic construct
  misc_feature 1..22: note = chemically synthesized
  source 1..22: mol_type = other DNA
aatggatctattaatagccaag

SEQ ID NO: 104232 - DNA, 22 bp, synthetic construct
  misc_feature 1..22: note = chemically synthesized
  source 1..22: mol_type = other DNA
ttaatagccaagtaaatgaagg

SEQ ID NO: 104233 - DNA, 22 bp, synthetic construct
  misc_feature 1..22: note = chemically synthesized
  source 1..22: mol_type = other DNA
atagccaagtaaatgaagggcc

SEQ ID NO: 104234 - DNA, 22 bp, synthetic construct
  misc_feature 1..22: note = chemically synthesized
  source 1..22: mol_type = other DNA
ttatattttgtcttaaaataac

SEQ ID NO: 104235 - DNA, 22 bp, synthetic construct
  misc_feature 1..22: note = chemically synthesized
  source 1..22: mol_type = other DNA
tattttgtcttaaaataacttt

SEQ ID NO: 104236 - DNA, 22 bp, synthetic construct
  misc_feature 1..22: note = chemically synthesized
  source 1..22: mol_type = other DNA
tgtcttaaaataactttgttta

SEQ ID NO: 104237 - DNA, 22 bp, synthetic construct
  misc_feature 1..22: note = chemically synthesized
  source 1..22: mol_type = other DNA
gtcttaaaataactttgtttat

SEQ ID NO: 104238 - DNA, 22 bp, synthetic construct
  misc_feature 1..22: note = chemically synthesized
  source 1..22: mol_type = other DNA
tcttaaaataactttgtttata

SEQ ID NO: 104239 - DNA, 22 bp, synthetic construct
  misc_feature 1..22: note = chemically synthesized
  source 1..22: mol_type = other DNA
aaaataactttgtttatataaa

SEQ ID NO: 104240 - DNA, 22 bp, synthetic construct
  misc_feature 1..22: note = chemically synthesized
  source 1..22: mol_type = other DNA
aaataactttgtttatataaaa

SEQ ID NO: 104241 - DNA, 22 bp, synthetic construct
  misc_feature 1..22: note = chemically synthesized
  source 1..22: mol_type = other DNA
tgtttatataaaaatcactgcc

SEQ ID NO: 104242 - DNA, 22 bp, synthetic construct
  misc_feature 1..22: note = chemically synthesized
  source 1..22: mol_type = other DNA
gtttatataaaaatcactgccc

SEQ ID NO: 104243 - DNA, 22 bp, synthetic construct
  misc_feature 1..22: note = chemically synthesized
  source 1..22: mol_type = other DNA
tttatataaaaatcactgccca

SEQ ID NO: 104244 - DNA, 22 bp, synthetic construct
  misc_feature 1..22: note = chemically synthesized
  source 1..22: mol_type = other DNA
atataaaaatcactgcccattt

SEQ ID NO: 104245 - DNA, 22 bp, synthetic construct
  misc_feature 1..22: note = chemically synthesized
  source 1..22: mol_type = other DNA
tataaaaatcactgcccatttc

SEQ ID NO: 104246 - DNA, 22 bp, synthetic construct
  misc_feature 1..22: note = chemically synthesized
  source 1..22: mol_type = other DNA
cccatttcataccaggttcagg

SEQ ID NO: 104247 - DNA, 22 bp, synthetic construct
  misc_feature 1..22: note = chemically synthesized
  source 1..22: mol_type = other DNA
cataccaggttcaggatagact

SEQ ID NO: 104248 - DNA, 22 bp, synthetic construct
  misc_feature 1..22: note = chemically synthesized
  source 1..22: mol_type = other DNA
ataccaggttcaggatagactt

SEQ ID NO: 104249 - DNA, 22 bp, synthetic construct
  misc_feature 1..22: note = chemically synthesized
  source 1..22: mol_type = other DNA
aggatagacttgtttttattta

SEQ ID NO: 104250 - DNA, 22 bp, synthetic construct
  misc_feature 1..22: note = chemically synthesized
  source 1..22: mol_type = other DNA
gtttttatttatttgttttttc

SEQ ID NO: 104251 - DNA, 22 bp, synthetic construct
  misc_feature 1..22: note = chemically synthesized
  source 1..22: mol_type = other DNA
tttttatttatttgttttttct

SEQ ID NO: 104252 - DNA, 22 bp, synthetic construct
  misc_feature 1..22: note = chemically synthesized
  source 1..22: mol_type = other DNA
ttatttatttgttttttctttt

SEQ ID NO: 104253 - DNA, 22 bp, synthetic construct
  misc_feature 1..22: note = chemically synthesized
  source 1..22: mol_type = other DNA
tatttatttgttttttctttta

SEQ ID NO: 104254 - DNA, 22 bp, synthetic construct
  misc_feature 1..22: note = chemically synthesized
  source 1..22: mol_type = other DNA
atttatttgttttttcttttaa

SEQ ID NO: 104255 - DNA, 22 bp, synthetic construct
  misc_feature 1..22: note = chemically synthesized
  source 1..22: mol_type = other DNA
tttatttgttttttcttttaaa

SEQ ID NO: 104256 - DNA, 22 bp, synthetic construct
  misc_feature 1..22: note = chemically synthesized
  source 1..22: mol_type = other DNA
atttgttttttcttttaaattt

SEQ ID NO: 104257 - DNA, 22 bp, synthetic construct
  misc_feature 1..22: note = chemically synthesized
  source 1..22: mol_type = other DNA
tttgttttttcttttaaatttt

SEQ ID NO: 104258 - DNA, 22 bp, synthetic construct
  misc_feature 1..22: note = chemically synthesized
  source 1..22: mol_type = other DNA
gttttttcttttaaattttcaa

SEQ ID NO: 104259 - DNA, 22 bp, synthetic construct
  misc_feature 1..22: note = chemically synthesized
  source 1..22: mol_type = other DNA
ttttttcttttaaattttcaac

SEQ ID NO: 104260 - DNA, 22 bp, synthetic construct
  misc_feature 1..22: note = chemically synthesized
  source 1..22: mol_type = other DNA
tttcttttaaattttcaacatt

SEQ ID NO: 104261 - DNA, 22 bp, synthetic construct
  misc_feature 1..22: note = chemically synthesized
  source 1..22: mol_type = other DNA
ttcttttaaattttcaacattt

SEQ ID NO: 104262 - DNA, 22 bp, synthetic construct
  misc_feature 1..22: note = chemically synthesized
  source 1..22: mol_type = other DNA
tcttttaaattttcaacattta

SEQ ID NO: 104263 - DNA, 22 bp, synthetic construct
  misc_feature 1..22: note = chemically synthesized
  source 1..22: mol_type = other DNA
cttttaaattttcaacatttac

SEQ ID NO: 104264 - DNA, 22 bp, synthetic construct
  misc_feature 1..22: note = chemically synthesized
  source 1..22: mol_type = other DNA
ttttaaattttcaacatttact

SEQ ID NO: 104265 - DNA, 22 bp, synthetic construct
  misc_feature 1..22: note = chemically synthesized
  source 1..22: mol_type = other DNA
ttaaattttcaacatttacttt

SEQ ID NO: 104266 - DNA, 22 bp, synthetic construct
  misc_feature 1..22: note = chemically synthesized
  source 1..22: mol_type = other DNA
taaattttcaacatttacttta

SEQ ID NO: 104267 - DNA, 22 bp, synthetic construct
  misc_feature 1..22: note = chemically synthesized
  source 1..22: mol_type = other DNA
aaattttcaacatttactttag

SEQ ID NO: 104268 - DNA, 22 bp, synthetic construct
  misc_feature 1..22: note = chemically synthesized
  source 1..22: mol_type = other DNA
aattttcaacatttactttaga

SEQ ID NO: 104269 - DNA, 22 bp, synthetic construct
  misc_feature 1..22: note = chemically synthesized
  source 1..22: mol_type = other DNA
tcaacatttactttagatacag

SEQ ID NO: 104270 - DNA, 22 bp, synthetic construct
  misc_feature 1..22: note = chemically synthesized
  source 1..22: mol_type = other DNA
caacatttactttagatacagt

SEQ ID NO: 104271 - DNA, 22 bp, synthetic construct
  misc_feature 1..22: note = chemically synthesized
  source 1..22: mol_type = other DNA
aacatttactttagatacagtg

SEQ ID NO: 104272 - DNA, 22 bp, synthetic construct
  misc_feature 1..22: note = chemically synthesized
  source 1..22: mol_type = other DNA
actttagatacagtgggtactt

SEQ ID NO: 104273 - DNA, 22 bp, synthetic construct
  misc_feature 1..22: note = chemically synthesized
  source 1..22: mol_type = other DNA
ctttagatacagtgggtacttg

SEQ ID NO: 104274 - DNA, 22 bp, synthetic construct
  misc_feature 1..22: note = chemically synthesized
  source 1..22: mol_type = other DNA
tagatacagtgggtacttgtgc

SEQ ID NO: 104275 - DNA, 22 bp, synthetic construct
  misc_feature 1..22: note = chemically synthesized
  source 1..22: mol_type = other DNA
agatacagtgggtacttgtgca

SEQ ID NO: 104276 - DNA, 22 bp, synthetic construct
  misc_feature 1..22: note = chemically synthesized
  source 1..22: mol_type = other DNA
gatacagtgggtacttgtgcag

SEQ ID NO: 104277 - DNA, 22 bp, synthetic construct
  misc_feature 1..22: note = chemically synthesized
  source 1..22: mol_type = other DNA
gtgcaggttttttacatggata

SEQ ID NO: 104278 - DNA, 22 bp, synthetic construct
  misc_feature 1..22: note = chemically synthesized
  source 1..22: mol_type = other DNA
tgcaggttttttacatggatat

SEQ ID NO: 104279 - DNA, 22 bp, synthetic construct
  misc_feature 1..22: note = chemically synthesized
  source 1..22: mol_type = other DNA
tttacatggatatattgcatgc

SEQ ID NO: 104280 - DNA, 22 bp, synthetic construct
  misc_feature 1..22: note = chemically synthesized
  source 1..22: mol_type = other DNA
ttacatggatatattgcatgca

SEQ ID NO: 104281 - DNA, 22 bp, synthetic construct
  misc_feature 1..22: note = chemically synthesized
  source 1..22: mol_type = other DNA
tacatggatatattgcatgcag

SEQ ID NO: 104282 - DNA, 22 bp, synthetic construct
  misc_feature 1..22: note = chemically synthesized
  source 1..22: mol_type = other DNA
acatggatatattgcatgcagt

SEQ ID NO: 104283 - DNA, 22 bp, synthetic construct
  misc_feature 1..22: note = chemically synthesized
  source 1..22: mol_type = other DNA
catggatatattgcatgcagtg

SEQ ID NO: 104284 - DNA, 22 bp, synthetic construct
  misc_feature 1..22: note = chemically synthesized
  source 1..22: mol_type = other DNA
catgcagtggtgagcatactat

SEQ ID NO: 104285 - DNA, 22 bp, synthetic construct
  misc_feature 1..22: note = chemically synthesized
  source 1..22: mol_type = other DNA
tccaatagattttttaaccctc

SEQ ID NO: 104286 - DNA, 22 bp, synthetic construct
  misc_feature 1..22: note = chemically synthesized
  source 1..22: mol_type = other DNA
tttaaccctctcccgcatctct

SEQ ID NO: 104287 - DNA, 22 bp, synthetic construct
  misc_feature 1..22: note = chemically synthesized
  source 1..22: mol_type = other DNA
ttaaccctctcccgcatctctc

SEQ ID NO: 104288 - DNA, 22 bp, synthetic construct
  misc_feature 1..22: note = chemically synthesized
  source 1..22: mol_type = other DNA
taaccctctcccgcatctctcc

SEQ ID NO: 104289 - DNA, 22 bp, synthetic construct
  misc_feature 1..22: note = chemically synthesized
  source 1..22: mol_type = other DNA
aaccctctcccgcatctctccc

SEQ ID NO: 104290 - DNA, 22 bp, synthetic construct
  misc_feature 1..22: note = chemically synthesized
  source 1..22: mol_type = other DNA
accctctcccgcatctctccct

SEQ ID NO: 104291 - DNA, 22 bp, synthetic construct
  misc_feature 1..22: note = chemically synthesized
  source 1..22: mol_type = other DNA
tcccgcatctctccctgcccct

SEQ ID NO: 104292 - DNA, 22 bp, synthetic construct
  misc_feature 1..22: note = chemically synthesized
  source 1..22: mol_type = other DNA
ccgcatctctccctgccccttg

SEQ ID NO: 104293 - DNA, 22 bp, synthetic construct
  misc_feature 1..22: note = chemically synthesized
  source 1..22: mol_type = other DNA
tccctgccccttgtagtagttt

SEQ ID NO: 104294 - DNA, 22 bp, synthetic construct
  misc_feature 1..22: note = chemically synthesized
  source 1..22: mol_type = other DNA
cctgccccttgtagtagtttca

SEQ ID NO: 104295 - DNA, 22 bp, synthetic construct
  misc_feature 1..22: note = chemically synthesized
  source 1..22: mol_type = other DNA
ccccttgtagtagtttcaagtg

SEQ ID NO: 104296 - DNA, 22 bp, synthetic construct
  misc_feature 1..22: note = chemically synthesized
  source 1..22: mol_type = other DNA
gtagtagtttcaagtggctatt

SEQ ID NO: 104297 - DNA, 22 bp, synthetic construct
  misc_feature 1..22: note = chemically synthesized
  source 1..22: mol_type = other DNA
tagtagtttcaagtggctattg

SEQ ID NO: 104298 - DNA, 22 bp, synthetic construct
  misc_feature 1..22: note = chemically synthesized
  source 1..22: mol_type = other DNA
caagtggctattgttcccatgt

SEQ ID NO: 104299 - DNA, 22 bp, synthetic construct
  misc_feature 1..22: note = chemically synthesized
  source 1..22: mol_type = other DNA
aagtggctattgttcccatgtt

SEQ ID NO: 104300 - DNA, 22 bp, synthetic construct
  misc_feature 1..22: note = chemically synthesized
  source 1..22: mol_type = other DNA
ttgttcccatgtttatatccac

SEQ ID NO: 104301 - DNA, 22 bp, synthetic construct
  misc_feature 1..22: note = chemically synthesized
  source 1..22: mol_type = other DNA
ttcccatgtttatatccacgtg

SEQ ID NO: 104302 - DNA, 22 bp, synthetic construct
  misc_feature 1..22: note = chemically synthesized
  source 1..22: mol_type = other DNA
ccatgtttatatccacgtgtac

SEQ ID NO: 104303 - DNA, 22 bp, synthetic construct
  misc_feature 1..22: note = chemically synthesized
  source 1..22: mol_type = other DNA
atatccacgtgtactcaatgtt

SEQ ID NO: 104304 - DNA, 22 bp, synthetic construct
  misc_feature 1..22: note = chemically synthesized
  source 1..22: mol_type = other DNA
tatccacgtgtactcaatgttt

SEQ ID NO: 104305 - DNA, 22 bp, synthetic construct
  misc_feature 1..22: note = chemically synthesized
  source 1..22: mol_type = other DNA
aatgtttagcttccacttataa

SEQ ID NO: 104306 - DNA, 22 bp, synthetic construct
  misc_feature 1..22: note = chemically synthesized
  source 1..22: mol_type = other DNA
agcttccacttataaatgagaa

SEQ ID NO: 104307 - DNA, 22 bp, synthetic construct
  misc_feature 1..22: note = chemically synthesized
  source 1..22: mol_type = other DNA
gcttccacttataaatgagaat

SEQ ID NO: 104308 - DNA, 22 bp, synthetic construct
  misc_feature 1..22: note = chemically synthesized
  source 1..22: mol_type = other DNA
ccacttataaatgagaatatat

SEQ ID NO: 104309 - DNA, 22 bp, synthetic construct
  misc_feature 1..22: note = chemically synthesized
  source 1..22: mol_type = other DNA
cacttataaatgagaatatatg

SEQ ID NO: 104310 - DNA, 22 bp, synthetic construct
  misc_feature 1..22: note = chemically synthesized
  source 1..22: mol_type = other DNA
ataaatgagaatatatggtatt

SEQ ID NO: 104311 - DNA, 22 bp, synthetic construct
  misc_feature 1..22: note = chemically synthesized
  source 1..22: mol_type = other DNA
taaatgagaatatatggtattt

SEQ ID NO: 104312 - DNA, 22 bp, synthetic construct
  misc_feature 1..22: note = chemically synthesized
  source 1..22: mol_type = other DNA
gcttttgtgttcttgcgttaat

SEQ ID NO: 104313 - DNA, 22 bp, synthetic construct
  misc_feature 1..22: note = chemically synthesized
  source 1..22: mol_type = other DNA
cttttgtgttcttgcgttaatt

SEQ ID NO: 104314 - DNA, 22 bp, synthetic construct
  misc_feature 1..22: note = chemically synthesized
  source 1..22: mol_type = other DNA
ttgtgttcttgcgttaatttgc

SEQ ID NO: 104315 - DNA, 22 bp, synthetic construct
  misc_feature 1..22: note = chemically synthesized
  source 1..22: mol_type = other DNA
tgtgttcttgcgttaatttgct

SEQ ID NO: 104316 - DNA, 22 bp, synthetic construct
  misc_feature 1..22: note = chemically synthesized
  source 1..22: mol_type = other DNA
gtgttcttgcgttaatttgctt

SEQ ID NO: 104317 - DNA, 22 bp, synthetic construct
  misc_feature 1..22: note = chemically synthesized
  source 1..22: mol_type = other DNA
tgttcttgcgttaatttgctta

SEQ ID NO: 104318 - DNA, 22 bp, synthetic construct
  misc_feature 1..22: note = chemically synthesized
  source 1..22: mol_type = other DNA
ttgcgttaatttgcttaggatt

SEQ ID NO: 104319 - DNA, 22 bp, synthetic construct
  misc_feature 1..22: note = chemically synthesized
  source 1..22: mol_type = other DNA
gcgttaatttgcttaggattat

SEQ ID NO: 104320 - DNA, 22 bp, synthetic construct
  misc_feature 1..22: note = chemically synthesized
  source 1..22: mol_type = other DNA
cgttaatttgcttaggattata

SEQ ID NO: 104321 - DNA, 22 bp, synthetic construct
  misc_feature 1..22: note = chemically synthesized
  source 1..22: mol_type = other DNA
atttgcttaggattatagcctc

SEQ ID NO: 104322 - DNA, 22 bp, synthetic construct
  misc_feature 1..22: note = chemically synthesized
  source 1..22: mol_type = other DNA
gcttaggattatagcctccagc

SEQ ID NO: 104323 - DNA, 22 bp, synthetic construct
  misc_feature 1..22: note = chemically synthesized
  source 1..22: mol_type = other DNA
cttaggattatagcctccagct

SEQ ID NO: 104324 - DNA, 22 bp, synthetic construct
  misc_feature 1..22: note = chemically synthesized
  source 1..22: mol_type = other DNA
aggattatagcctccagctcca

SEQ ID NO: 104325 - DNA, 22 bp, synthetic construct
  misc_feature 1..22: note = chemically synthesized
  source 1..22: mol_type = other DNA
ggattatagcctccagctccac

SEQ ID NO: 104326 - DNA, 22 bp, synthetic construct
  misc_feature 1..22: note = chemically synthesized
  source 1..22: mol_type = other DNA
tagcctccagctccacccatgt

SEQ ID NO: 104327 - DNA, 22 bp, synthetic construct
  misc_feature 1..22: note = chemically synthesized
  source 1..22: mol_type = other DNA
cagctccacccatgttgctgaa

SEQ ID NO: 104328 - DNA, 22 bp, synthetic construct
  misc_feature 1..22: note = chemically synthesized
  source 1..22: mol_type = other DNA
cacccatgttgctgaaaaggac

SEQ ID NO: 104329 - DNA, 22 bp, synthetic construct
  misc_feature 1..22: note = chemically synthesized
  source 1..22: mol_type = other DNA
ctgaaaaggacatgatttcatt

SEQ ID NO: 104330 - DNA, 22 bp, synthetic construct
  misc_feature 1..22: note = chemically synthesized
  source 1..22: mol_type = other DNA
aaaaggacatgatttcatttgt

SEQ ID NO: 104331 - DNA, 22 bp, synthetic construct
  misc_feature 1..22: note = chemically synthesized
  source 1..22: mol_type = other DNA
catttgttcttattgccacata

SEQ ID NO: 104332 - DNA, 22 bp, synthetic construct
  misc_feature 1..22: note = chemically synthesized
  source 1..22: mol_type = other DNA
atttgttcttattgccacatag

SEQ ID NO: 104333 - DNA, 22 bp, synthetic construct
  misc_feature 1..22: note = chemically synthesized
  source 1..22: mol_type = other DNA
gttcttattgccacatagtggt

SEQ ID NO: 104334 - DNA, 22 bp, synthetic construct
  misc_feature 1..22: note = chemically synthesized
  source 1..22: mol_type = other DNA
ttcttattgccacatagtggtg

SEQ ID NO: 104335 - DNA, 22 bp, synthetic construct
  misc_feature 1..22: note = chemically synthesized
  source 1..22: mol_type = other DNA
ttattgccacatagtggtggtg

SEQ ID NO: 104336 - DNA, 22 bp, synthetic construct
  misc_feature 1..22: note = chemically synthesized
  source 1..22: mol_type = other DNA
attgccacatagtggtggtgta

SEQ ID NO: 104337 - DNA, 22 bp, synthetic construct
  misc_feature 1..22: note = chemically synthesized
  source 1..22: mol_type = other DNA
ttgccacatagtggtggtgtat

SEQ ID NO: 104338 - DNA, 22 bp, synthetic construct
  misc_feature 1..22: note = chemically synthesized
  source 1..22: mol_type = other DNA
ccacatagtggtggtgtatatg

SEQ ID NO: 104339 - DNA, 22 bp, synthetic construct
  misc_feature 1..22: note = chemically synthesized
  source 1..22: mol_type = other DNA
ctttatcccgtccgcctttgat

SEQ ID NO: 104340 - DNA, 22 bp, synthetic construct
  misc_feature 1..22: note = chemically synthesized
  source 1..22: mol_type = other DNA
tttatcccgtccgcctttgata

SEQ ID NO: 104341 - DNA, 22 bp, synthetic construct
  misc_feature 1..22: note = chemically synthesized
  source 1..22: mol_type = other DNA
tatcccgtccgcctttgataga

SEQ ID NO: 104342 - DNA, 22 bp, synthetic construct
  misc_feature 1..22: note = chemically synthesized
  source 1..22: mol_type = other DNA
atcccgtccgcctttgatagac

SEQ ID NO: 104343 - DNA, 22 bp, synthetic construct
  misc_feature 1..22: note = chemically synthesized
  source 1..22: mol_type = other DNA
tcccgtccgcctttgatagaca

SEQ ID NO: 104344 - DNA, 22 bp, synthetic construct
  misc_feature 1..22: note = chemically synthesized
  source 1..22: mol_type = other DNA
tgatagacacctaggccagtta

SEQ ID NO: 104345 - DNA, 22 bp, synthetic construct
  misc_feature 1..22: note = chemically synthesized
  source 1..22: mol_type = other DNA
gatagacacctaggccagttat

SEQ ID NO: 104346 - DNA, 22 bp, synthetic construct
  misc_feature 1..22: note = chemically synthesized
  source 1..22: mol_type = other DNA
atagacacctaggccagttatt

SEQ ID NO: 104347 - DNA, 22 bp, synthetic construct
  misc_feature 1..22: note = chemically synthesized
  source 1..22: mol_type = other DNA
ggccagttatttgtatttgcta

SEQ ID NO: 104348 - DNA, 22 bp, synthetic construct
  misc_feature 1..22: note = chemically synthesized
  source 1..22: mol_type = other DNA
tttgtatttgctattctaaaca

SEQ ID NO: 104349 - DNA, 22 bp, synthetic construct
  misc_feature 1..22: note = chemically synthesized
  source 1..22: mol_type = other DNA
gtatttgctattctaaacagca

SEQ ID NO: 104350 - DNA, 22 bp, synthetic construct
  misc_feature 1..22: note = chemically synthesized
  source 1..22: mol_type = other DNA
tatttgctattctaaacagcat

SEQ ID NO: 104351 - DNA, 22 bp, synthetic construct
  misc_feature 1..22: note = chemically synthesized
  source 1..22: mol_type = other DNA
gctattctaaacagcattacag

SEQ ID NO: 104352 - DNA, 22 bp, synthetic construct
  misc_feature 1..22: note = chemically synthesized
  source 1..22: mol_type = other DNA
ctattctaaacagcattacagt

SEQ ID NO: 104353 - DNA, 22 bp, synthetic construct
  misc_feature 1..22: note = chemically synthesized
  source 1..22: mol_type = other DNA
ttctaaacagcattacagtgaa

SEQ ID NO: 104354 - DNA, 22 bp, synthetic construct
  misc_feature 1..22: note = chemically synthesized
  source 1..22: mol_type = other DNA
taaacagcattacagtgaacat

SEQ ID NO: 104355 - DNA, 22 bp, synthetic construct
  misc_feature 1..22: note = chemically synthesized
  source 1..22: mol_type = other DNA
aacagcattacagtgaacatgc

SEQ ID NO: 104356 - DNA, 22 bp, synthetic construct
  misc_feature 1..22: note = chemically synthesized
  source 1..22: mol_type = other DNA
cagtgaacatgcaagtgcatgt

SEQ ID NO: 104357 - DNA, 22 bp, synthetic construct
  misc_feature 1..22: note = chemically synthesized
  source 1..22: mol_type = other DNA
gttggtctaatgctctgttttc

SEQ ID NO: 104358 - DNA, 22 bp, synthetic construct
  misc_feature 1..22: note = chemically synthesized
  source 1..22: mol_type = other DNA
gtctaatgctctgttttcctat

SEQ ID NO: 104359 - DNA, 22 bp, synthetic construct
  misc_feature 1..22: note = chemically synthesized
  source 1..22: mol_type = other DNA
atgctctgttttcctatggata

SEQ ID NO: 104360 - DNA, 22 bp, synthetic construct
  misc_feature 1..22: note = chemically synthesized
  source 1..22: mol_type = other DNA
tgttttcctatggatatatacc

SEQ ID NO: 104361 - DNA, 22 bp, synthetic construct
  misc_feature 1..22: note = chemically synthesized
  source 1..22: mol_type = other DNA
ttttcctatggatatataccca

SEQ ID NO: 104362 - DNA, 22 bp, synthetic construct
  misc_feature 1..22: note = chemically synthesized
  source 1..22: mol_type = other DNA
tcctatggatatatacccagta

SEQ ID NO: 104363 - DNA, 22 bp, synthetic construct
  misc_feature 1..22: note = chemically synthesized
  source 1..22: mol_type = other DNA
cctatggatatatacccagtag

SEQ ID NO: 104364 - DNA, 22 bp, synthetic construct
  misc_feature 1..22: note = chemically synthesized
  source 1..22: mol_type = other DNA
ctatggatatatacccagtagc

SEQ ID NO: 104365 - DNA, 22 bp, synthetic construct
  misc_feature 1..22: note = chemically synthesized
  source 1..22: mol_type = other DNA
tggatatatacccagtagcggg

SEQ ID NO: 104366 - DNA, 22 bp, synthetic construct
  misc_feature 1..22: note = chemically synthesized
  source 1..22: mol_type = other DNA
ctgtgtcaaattgtagctctgc

SEQ ID NO: 104367 - DNA, 22 bp, synthetic construct
  misc_feature 1..22: note = chemically synthesized
  source 1..22: mol_type = other DNA
tgtcaaattgtagctctgctta

SEQ ID NO: 104368 - DNA, 22 bp, synthetic construct
  misc_feature 1..22: note = chemically synthesized
  source 1..22: mol_type = other DNA
tagctctgcttaaagttctttg

SEQ ID NO: 104369 - DNA, 22 bp, synthetic construct
  misc_feature 1..22: note = chemically synthesized
  source 1..22: mol_type = other DNA
tgcttaaagttctttgaagact

SEQ ID NO: 104370 - DNA, 22 bp, synthetic construct
  misc_feature 1..22: note = chemically synthesized
  source 1..22: mol_type = other DNA
cttaaagttctttgaagactct

SEQ ID NO: 104371 - DNA, 22 bp, synthetic construct
  misc_feature 1..22: note = chemically synthesized
  source 1..22: mol_type = other DNA
aaagttctttgaagactctcca

SEQ ID NO: 104372 - DNA, 22 bp, synthetic construct
  misc_feature 1..22: note = chemically synthesized
  source 1..22: mol_type = other DNA
aagttctttgaagactctccaa

SEQ ID NO: 104373 - DNA, 22 bp, synthetic construct
  misc_feature 1..22: note = chemically synthesized
  source 1..22: mol_type = other DNA
tttgaagactctccaaactgtt

SEQ ID NO: 104374 - DNA, 22 bp, synthetic construct
  misc_feature 1..22: note = chemically synthesized
  source 1..22: mol_type = other DNA
tgaagactctccaaactgtttt

SEQ ID NO: 104375 - DNA, 22 bp, synthetic construct
  misc_feature 1..22: note = chemically synthesized
  source 1..22: mol_type = other DNA
gaagactctccaaactgttttc

SEQ ID NO: 104376 - DNA, 22 bp, synthetic construct
  misc_feature 1..22: note = chemically synthesized
  source 1..22: mol_type = other DNA
aagactctccaaactgttttct

SEQ ID NO: 104377 - DNA, 22 bp, synthetic construct
  misc_feature 1..22: note = chemically synthesized
  source 1..22: mol_type = other DNA
tccaaactgttttctgcagtgg

SEQ ID NO: 104378 - DNA, 22 bp, synthetic construct
  misc_feature 1..22: note = chemically synthesized
  source 1..22: mol_type = other DNA
caaactgttttctgcagtggtt

SEQ ID NO: 104379 - DNA, 22 bp, synthetic construct
  misc_feature 1..22: note = chemically synthesized
  source 1..22: mol_type = other DNA
ttttctgcagtggttgaactaa

SEQ ID NO: 104380 - DNA, 22 bp, synthetic construct
  misc_feature 1..22: note = chemically synthesized
  source 1..22: mol_type = other DNA
tctgcagtggttgaactaattt

SEQ ID NO: 104381 - DNA, 22 bp, synthetic construct
  misc_feature 1..22: note = chemically synthesized
  source 1..22: mol_type = other DNA
ctgcagtggttgaactaattta

SEQ ID NO: 104382 - DNA, 22 bp, synthetic construct
  misc_feature 1..22: note = chemically synthesized
  source 1..22: mol_type = other DNA
tgcagtggttgaactaatttac

SEQ ID NO: 104383 - DNA, 22 bp, synthetic construct
  misc_feature 1..22: note = chemically synthesized
  source 1..22: mol_type = other DNA
cagtggttgaactaatttacat

SEQ ID NO: 104384 - DNA, 22 bp, synthetic construct
  misc_feature 1..22: note = chemically synthesized
  source 1..22: mol_type = other DNA
aactaatttacatccccatcat

SEQ ID NO: 104385 - DNA, 22 bp, synthetic construct
  misc_feature 1..22: note = chemically synthesized
  source 1..22: mol_type = other DNA
atttacatccccatcatcattg

SEQ ID NO: 104386 - DNA, 22 bp, synthetic construct
  misc_feature 1..22: note = chemically synthesized
  source 1..22: mol_type = other DNA
acatccccatcatcattgtata

SEQ ID NO: 104387 - DNA, 22 bp, synthetic construct
  misc_feature 1..22: note = chemically synthesized
  source 1..22: mol_type = other DNA
catccccatcatcattgtataa

SEQ ID NO: 104388 - DNA, 22 bp, synthetic construct
  misc_feature 1..22: note = chemically synthesized
  source 1..22: mol_type = other DNA
tataagtgttcccttttctcca

SEQ ID NO: 104389 - DNA, 22 bp, synthetic construct
  misc_feature 1..22: note = chemically synthesized
  source 1..22: mol_type = other DNA
ccttttctccatagcctcatga

SEQ ID NO: 104390 - DNA, 22 bp, synthetic construct
  misc_feature 1..22: note = chemically synthesized
  source 1..22: mol_type = other DNA
ttctccatagcctcatgagaat

SEQ ID NO: 104391 - DNA, 22 bp, synthetic construct
  misc_feature 1..22: note = chemically synthesized
  source 1..22: mol_type = other DNA
tctccatagcctcatgagaatc

SEQ ID NO: 104392 - DNA, 22 bp, synthetic construct
  misc_feature 1..22: note = chemically synthesized
  source 1..22: mol_type = other DNA
ctccatagcctcatgagaatct

SEQ ID NO: 104393 - DNA, 22 bp, synthetic construct
  misc_feature 1..22: note = chemically synthesized
  source 1..22: mol_type = other DNA
tccatagcctcatgagaatctg

SEQ ID NO: 104394 - DNA, 22 bp, synthetic construct
  misc_feature 1..22: note = chemically synthesized
  source 1..22: mol_type = other DNA
catagcctcatgagaatctgtt

SEQ ID NO: 104395 - DNA, 22 bp, synthetic construct
  misc_feature 1..22: note = chemically synthesized
  source 1..22: mol_type = other DNA
atgagaatctgttttttggctt

SEQ ID NO: 104396 - DNA, 22 bp, synthetic construct
  misc_feature 1..22: note = chemically synthesized
  source 1..22: mol_type = other DNA
ttttttggctttttaaaaatag

SEQ ID NO: 104397 - DNA, 22 bp, synthetic construct
  misc_feature 1..22: note = chemically synthesized
  source 1..22: mol_type = other DNA
tttggctttttaaaaatagcta

SEQ ID NO: 104398 - DNA, 22 bp, synthetic construct
  misc_feature 1..22: note = chemically synthesized
  source 1..22: mol_type = other DNA
ttggctttttaaaaatagctat

SEQ ID NO: 104399 - DNA, 22 bp, synthetic construct
  misc_feature 1..22: note = chemically synthesized
  source 1..22: mol_type = other DNA
tggctttttaaaaatagctatt

SEQ ID NO: 104400 - DNA, 22 bp, synthetic construct
  misc_feature 1..22: note = chemically synthesized
  source 1..22: mol_type = other DNA
ggctttttaaaaatagctattc

SEQ ID NO: 104401 - DNA, 22 bp, synthetic construct
  misc_feature 1..22: note = chemically synthesized
  source 1..22: mol_type = other DNA
gctttttaaaaatagctattct

SEQ ID NO: 104402 - DNA, 22 bp, synthetic construct
  source 1..22: mol_type = other DNA
tttaaaaatagctattctgact

SEQ ID NO: 104403 - DNA, 22 bp, synthetic construct
  misc_feature 1..22: note = chemically synthesized
  source 1..22: mol_type = other DNA
ttaaaaatagctattctgactg

SEQ ID NO: 104404 - DNA, 22 bp, synthetic construct
  misc_feature 1..22: note = chemically synthesized
  source 1..22: mol_type = other DNA
taaaaatagctattctgactgg

SEQ ID NO: 104405 - DNA, 22 bp, synthetic construct
  misc_feature 1..22: note = chemically synthesized
  source 1..22: mol_type = other DNA
aaaaatagctattctgactggt

SEQ ID NO: 104406 - DNA, 22 bp, synthetic construct
  misc_feature 1..22: note = chemically synthesized
  source 1..22: mol_type = other DNA
aaaatagctattctgactggta

SEQ ID NO: 104407 - DNA, 22 bp, synthetic construct
  misc_feature 1..22: note = chemically synthesized
  source 1..22: mol_type = other DNA
ttctgactggtatgagatagta

SEQ ID NO: 104408 - DNA, 22 bp, synthetic construct
  misc_feature 1..22: note = chemically synthesized
  source 1..22: mol_type = other DNA
tgactggtatgagatagtatct

SEQ ID NO: 104409 - DNA, 22 bp, synthetic construct
  misc_feature 1..22: note = chemically synthesized
  source 1..22: mol_type = other DNA
actggtatgagatagtatctct

SEQ ID NO: 104410 - DNA, 22 bp, synthetic construct
  misc_feature 1..22: note = chemically synthesized
  source 1..22: mol_type = other DNA
gtatgagatagtatctcttgtg

SEQ ID NO: 104411 - DNA, 22 bp, synthetic construct
  misc_feature 1..22: note = chemically synthesized
  source 1..22: mol_type = other DNA
ttgtggttttgatttgcatttc

SEQ ID NO: 104412 - DNA, 22 bp, synthetic construct
  misc_feature 1..22: note = chemically synthesized
  source 1..22: mol_type = other DNA
gtggttttgatttgcatttctc

SEQ ID NO: 104413 - DNA, 22 bp, synthetic construct
  misc_feature 1..22: note = chemically synthesized
  source 1..22: mol_type = other DNA
tggttttgatttgcatttctct

SEQ ID NO: 104414 - DNA, 22 bp, synthetic construct
  misc_feature 1..22: note = chemically synthesized
  source 1..22: mol_type = other DNA
tgatttgcatttctctcattag

SEQ ID NO: 104415 - DNA, 22 bp, synthetic construct
  misc_feature 1..22: note = chemically synthesized
  source 1..22: mol_type = other DNA
gatttgcatttctctcattagt

SEQ ID NO: 104416 - DNA, 22 bp, synthetic construct
  misc_feature 1..22: note = chemically synthesized
  source 1..22: mol_type = other DNA
atttgcatttctctcattagtg

SEQ ID NO: 104417 - DNA, 22 bp, synthetic construct
  misc_feature 1..22: note = chemically synthesized
  source 1..22: mol_type = other DNA
gcatttctctcattagtgatga

SEQ ID NO: 104418 - DNA, 22 bp, synthetic construct
  misc_feature 1..22: note = chemically synthesized
  source 1..22: mol_type = other DNA
catttctctcattagtgatgat

SEQ ID NO: 104419 - DNA, 22 bp, synthetic construct
  misc_feature 1..22: note = chemically synthesized
  source 1..22: mol_type = other DNA
ctctcattagtgatgatgatca

SEQ ID NO: 104420 - DNA, 22 bp, synthetic construct
  misc_feature 1..22: note = chemically synthesized
  source 1..22: mol_type = other DNA
tctcattagtgatgatgatcat

SEQ ID NO: 104421 - DNA, 22 bp, synthetic construct
  misc_feature 1..22: note = chemically synthesized
  source 1..22: mol_type = other DNA
tcattagtgatgatgatcattt

SEQ ID NO: 104422 - DNA, 22 bp, synthetic construct
  misc_feature 1..22: note = chemically synthesized
  source 1..22: mol_type = other DNA
attagtgatgatgatcattttt

SEQ ID NO: 104423 - DNA, 22 bp, synthetic construct
  misc_feature 1..22: note = chemically synthesized
  source 1..22: mol_type = other DNA
gtgatgatgatcatttttgtat

SEQ ID NO: 104424 - DNA, 22 bp, synthetic construct
  misc_feature 1..22: note = chemically synthesized
  source 1..22: mol_type = other DNA
ttgtatatatttgttggctgcc

SEQ ID NO: 104425 - DNA, 22 bp, synthetic construct
  misc_feature 1..22: note = chemically synthesized
  source 1..22: mol_type = other DNA
tgtatatatttgttggctgcct

SEQ ID NO: 104426 - DNA, 22 bp, synthetic construct
  misc_feature 1..22: note = chemically synthesized
  source 1..22: mol_type = other DNA
gtatatatttgttggctgcctg

SEQ ID NO: 104427 - DNA, 22 bp, synthetic construct
  misc_feature 1..22: note = chemically synthesized
  source 1..22: mol_type = other DNA
tatatatttgttggctgcctgt

SEQ ID NO: 104428 - DNA, 22 bp, synthetic construct
  misc_feature 1..22: note = chemically synthesized
  source 1..22: mol_type = other DNA
gttggctgcctgtatgtcttct

SEQ ID NO: 104429 - DNA, 22 bp, synthetic construct
  misc_feature 1..22: note = chemically synthesized
  source 1..22: mol_type = other DNA
ttggctgcctgtatgtcttctc

SEQ ID NO: 104430 - DNA, 22 bp, synthetic construct
  misc_feature 1..22: note = chemically synthesized
  source 1..22: mol_type = other DNA
gctgcctgtatgtcttctcttg

SEQ ID NO: 104431 - DNA, 22 bp, synthetic construct
  misc_feature 1..22: note = chemically synthesized
  source 1..22: mol_type = other DNA
cctgtatgtcttctcttgagaa

SEQ ID NO: 104432 - DNA, 22 bp, synthetic construct
  misc_feature 1..22: note = chemically synthesized
  source 1..22: mol_type = other DNA
tatgtcttctcttgagaagagt

SEQ ID NO: 104433 - DNA, 22 bp, synthetic construct
  misc_feature 1..22: note = chemically synthesized
  source 1..22: mol_type = other DNA
ctcttgagaagagtctgttcgt

SEQ ID NO: 104434 - DNA, 22 bp, synthetic construct
  misc_feature 1..22: note = chemically synthesized
  source 1..22: mol_type = other DNA
tcttgagaagagtctgttcgtg

SEQ ID NO: 104435 - DNA, 22 bp, synthetic construct
  misc_feature 1..22: note = chemically synthesized
  source 1..22: mol_type = other DNA
ttgagaagagtctgttcgtgga

SEQ ID NO: 104436 - DNA, 22 bp, synthetic construct
  misc_feature 1..22: note = chemically synthesized
  source 1..22: mol_type = other DNA
gagaagagtctgttcgtggatt

SEQ ID NO: 104437 - DNA, 22 bp, synthetic construct
  misc_feature 1..22: note = chemically synthesized
  source 1..22: mol_type = other DNA
agaagagtctgttcgtggattt

SEQ ID NO: 104438 - DNA, 22 bp, synthetic construct
  misc_feature 1..22: note = chemically synthesized
  source 1..22: mol_type = other DNA
ttcgtggattttgcccattttt

SEQ ID NO: 104439 - DNA, 22 bp, synthetic construct
  misc_feature 1..22: note = chemically synthesized
  source 1..22: mol_type = other DNA
gtggattttgcccatttttaaa

SEQ ID NO: 104440 - DNA, 22 bp, synthetic construct
  misc_feature 1..22: note = chemically synthesized
  source 1..22: mol_type = other DNA
tgcccatttttaaatggaattg

SEQ ID NO: 104441 - DNA, 22 bp, synthetic construct
  misc_feature 1..22: note = chemically synthesized
  source 1..22: mol_type = other DNA
gcccatttttaaatggaattgt

SEQ ID NO: 104442 - DNA, 22 bp, synthetic construct
  misc_feature 1..22: note = chemically synthesized
  source 1..22: mol_type = other DNA
cccatttttaaatggaattgtt

SEQ ID NO: 104443 - DNA, 22 bp, synthetic construct
  misc_feature 1..22: note = chemically synthesized
  source 1..22: mol_type = other DNA
ttaaatggaattgtttgctttt

SEQ ID NO: 104444 - DNA, 22 bp, synthetic construct
  misc_feature 1..22: note = chemically synthesized
  source 1..22: mol_type = other DNA
taaatggaattgtttgcttttt

SEQ ID NO: 104445 - DNA, 22 bp, synthetic construct
  misc_feature 1..22: note = chemically synthesized
  source 1..22: mol_type = other DNA
aaatggaattgtttgctttttg

SEQ ID NO: 104446 - DNA, 22 bp, synthetic construct
  misc_feature 1..22: note = chemically synthesized
  source 1..22: mol_type = other DNA
aatggaattgtttgctttttgc

SEQ ID NO: 104447 - DNA, 22 bp, synthetic construct
  misc_feature 1..22: note = chemically synthesized
  source 1..22: mol_type = other DNA
tttgctttttgcttgctgatat

SEQ ID NO: 104448 - DNA, 22 bp, synthetic construct
  misc_feature 1..22: note = chemically synthesized
  source 1..22: mol_type = other DNA
gctttttgcttgctgatatgtt

SEQ ID NO: 104449 - DNA, 22 bp, synthetic construct
  misc_feature 1..22: note = chemically synthesized
  source 1..22: mol_type = other DNA
ctttttgcttgctgatatgttc

SEQ ID NO: 104450 - DNA, 22 bp, synthetic construct
  misc_feature 1..22: note = chemically synthesized
  source 1..22: mol_type = other DNA
tttgcttgctgatatgttcgaa

SEQ ID NO: 104451 - DNA, 22 bp, synthetic construct
  misc_feature 1..22: note = chemically synthesized
  source 1..22: mol_type = other DNA
ttgcttgctgatatgttcgaat

SEQ ID NO: 104452 - DNA, 22 bp, synthetic construct
  misc_feature 1..22: note = chemically synthesized
  source 1..22: mol_type = other DNA
tgcttgctgatatgttcgaatt

SEQ ID NO: 104453 - DNA, 22 bp, synthetic construct
  misc_feature 1..22: note = chemically synthesized
  source 1..22: mol_type = other DNA
gcttgctgatatgttcgaattc

SEQ ID NO: 104454 - DNA, 22 bp, synthetic construct
  misc_feature 1..22: note = chemically synthesized
  source 1..22: mol_type = other DNA
cttgctgatatgttcgaattcc

SEQ ID NO: 104455 - DNA, 22 bp, synthetic construct
  misc_feature 1..22: note = chemically synthesized
  source 1..22: mol_type = other DNA
gctgatatgttcgaattcctta

SEQ ID NO: 104456 - DNA, 22 bp, synthetic construct
  misc_feature 1..22: note = chemically synthesized
  source 1..22: mol_type = other DNA
ctgatatgttcgaattccttat

SEQ ID NO: 104457 - DNA, 22 bp, synthetic construct
  misc_feature 1..22: note = chemically synthesized
  source 1..22: mol_type = other DNA
atatgttcgaattccttataga

SEQ ID NO: 104458 - DNA, 22 bp, synthetic construct
  misc_feature 1..22: note = chemically synthesized
  source 1..22: mol_type = other DNA
gaattccttatagattctgaat

SEQ ID NO: 104459 - DNA, 22 bp, synthetic construct
  misc_feature 1..22: note = chemically synthesized
  source 1..22: mol_type = other DNA
cttatagattctgaatattaga

SEQ ID NO: 104460 - DNA, 22 bp, synthetic construct
  misc_feature 1..22: note = chemically synthesized
  source 1..22: mol_type = other DNA
atagattctgaatattagacct

SEQ ID NO: 104461 - DNA, 22 bp, synthetic construct
  misc_feature 1..22: note = chemically synthesized
  source 1..22: mol_type = other DNA
tagattctgaatattagacctt

SEQ ID NO: 104462 - DNA, 22 bp, synthetic construct
  misc_feature 1..22: note = chemically synthesized
  source 1..22: mol_type = other DNA
tgaatattagaccttttccaga

SEQ ID NO: 104463 - DNA, 22 bp, synthetic construct
  misc_feature 1..22: note = chemically synthesized
  source 1..22: mol_type = other DNA
aatattagaccttttccagatg

SEQ ID NO: 104464 - DNA, 22 bp, synthetic construct
  misc_feature 1..22: note = chemically synthesized
  source 1..22: mol_type = other DNA
gaccttttccagatgcacagtt

SEQ ID NO: 104465 - DNA, 22 bp, synthetic construct
  misc_feature 1..22: note = chemically synthesized
  source 1..22: mol_type = other DNA
ttccagatgcacagtttgtgaa

SEQ ID NO: 104466 - DNA, 22 bp, synthetic construct
  misc_feature 1..22: note = chemically synthesized
  source 1..22: mol_type = other DNA
tccagatgcacagtttgtgaat

SEQ ID NO: 104467 - DNA, 22 bp, synthetic construct
  misc_feature 1..22: note = chemically synthesized
  source 1..22: mol_type = other DNA
ccagatgcacagtttgtgaata

SEQ ID NO: 104468 - DNA, 22 bp, synthetic construct
  misc_feature 1..22: note = chemically synthesized
  source 1..22: mol_type = other DNA
cagatgcacagtttgtgaatag

SEQ ID NO: 104469 - DNA, 22 bp, synthetic construct
  misc_feature 1..22: note = chemically synthesized
  source 1..22: mol_type = other DNA
gtgaatagtttctcctatcctg

SEQ ID NO: 104470 - DNA, 22 bp, synthetic construct
  misc_feature 1..22: note = chemically synthesized
  source 1..22: mol_type = other DNA
tgaatagtttctcctatcctgt

SEQ ID NO: 104471 - DNA, 22 bp, synthetic construct
  misc_feature 1..22: note = chemically synthesized
  source 1..22: mol_type = other DNA
ctcctatcctgtagattgtcag

SEQ ID NO: 104472 - DNA, 22 bp, synthetic construct
  misc_feature 1..22: note = chemically synthesized
  source 1..22: mol_type = other DNA
tcctatcctgtagattgtcagt

SEQ ID NO: 104473 - DNA, 22 bp, synthetic construct
  misc_feature 1..22: note = chemically synthesized
  source 1..22: mol_type = other DNA
ctatcctgtagattgtcagttt

SEQ ID NO: 104474 - DNA, 22 bp, synthetic construct
  misc_feature 1..22: note = chemically synthesized
  source 1..22: mol_type = other DNA
tcctgtagattgtcagtttact

SEQ ID NO: 104475 - DNA, 22 bp, synthetic construct
  misc_feature 1..22: note = chemically synthesized
  source 1..22: mol_type = other DNA
tagattgtcagtttactctgtt

SEQ ID NO: 104476 - DNA, 22 bp, synthetic construct
  misc_feature 1..22: note = chemically synthesized
  source 1..22: mol_type = other DNA
tcagtttactctgttgatagtt

SEQ ID NO: 104477 - DNA, 22 bp, synthetic construct
  misc_feature 1..22: note = chemically synthesized
  source 1..22: mol_type = other DNA
actctgttgatagtttcttctg

SEQ ID NO: 104478 - DNA, 22 bp, synthetic construct
  misc_feature 1..22: note = chemically synthesized
  source 1..22: mol_type = other DNA
ctctgttgatagtttcttctgc

SEQ ID NO: 104479 - DNA, 22 bp, synthetic construct
  misc_feature 1..22: note = chemically synthesized
  source 1..22: mol_type = other DNA
tgttgatagtttcttctgctgc

SEQ ID NO: 104480 - DNA, 22 bp, synthetic construct
  misc_feature 1..22: note = chemically synthesized
  source 1..22: mol_type = other DNA
ttgatagtttcttctgctgcac

SEQ ID NO: 104481 - DNA, 22 bp, synthetic construct
  misc_feature 1..22: note = chemically synthesized
  source 1..22: mol_type = other DNA
atagtttcttctgctgcacaga

SEQ ID NO: 104482 - DNA, 22 bp, synthetic construct
  misc_feature 1..22: note = chemically synthesized
  source 1..22: mol_type = other DNA
cttctgctgcacagaagctctt

SEQ ID NO: 104483 - DNA, 22 bp, synthetic construct
  misc_feature 1..22: note = chemically synthesized
  source 1..22: mol_type = other DNA
ttctgctgcacagaagctcttt

SEQ ID NO: 104484 - DNA, 22 bp, synthetic construct
  misc_feature 1..22: note = chemically synthesized
  source 1..22: mol_type = other DNA
ctgctgcacagaagctcttttt

SEQ ID NO: 104485 - DNA, 22 bp, synthetic construct
  misc_feature 1..22: note = chemically synthesized
  source 1..22: mol_type = other DNA
tgctgcacagaagctcttttta

SEQ ID NO: 104486 - DNA, 22 bp, synthetic construct
  misc_feature 1..22: note = chemically synthesized
  source 1..22: mol_type = other DNA
ctgcacagaagctctttttatt

SEQ ID NO: 104487 - DNA, 22 bp, synthetic construct
  misc_feature 1..22: note = chemically synthesized
  source 1..22: mol_type = other DNA
cacagaagctctttttattatt

SEQ ID NO: 104488 - DNA, 22 bp, synthetic construct
  misc_feature 1..22: note = chemically synthesized
  source 1..22: mol_type = other DNA
tttttattattattattatact

SEQ ID NO: 104489 - DNA, 22 bp, synthetic construct
  misc_feature 1..22: note = chemically synthesized
  source 1..22: mol_type = other DNA
tttattattattattatacttt

SEQ ID NO: 104490 - DNA, 22 bp, synthetic construct
  misc_feature 1..22: note = chemically synthesized
  source 1..22: mol_type = other DNA
ttattattattattatacttta

SEQ ID NO: 104491 - DNA, 22 bp, synthetic construct
  misc_feature 1..22: note = chemically synthesized
  source 1..22: mol_type = other DNA
tattattattattatactttaa

SEQ ID NO: 104492 - DNA, 22 bp, synthetic construct
  misc_feature 1..22: note = chemically synthesized
  source 1..22: mol_type = other DNA
attattattattatactttaag

SEQ ID NO: 104493 - DNA, 22 bp, synthetic construct
  misc_feature 1..22: note = chemically synthesized
  source 1..22: mol_type = other DNA
ttattattattatactttaagt

SEQ ID NO: 104494 - DNA, 22 bp, synthetic construct
  misc_feature 1..22: note = chemically synthesized
  source 1..22: mol_type = other DNA
ttattattatactttaagttct

SEQ ID NO: 104495 - DNA, 22 bp, synthetic construct
  misc_feature 1..22: note = chemically synthesized
  source 1..22: mol_type = other DNA
ttattatactttaagttctagg

SEQ ID NO: 104496 - DNA, 22 bp, synthetic construct
  misc_feature 1..22: note = chemically synthesized
  source 1..22: mol_type = other DNA
ttatactttaagttctagggta

SEQ ID NO: 104497 - DNA, 22 bp, synthetic construct
  misc_feature 1..22: note = chemically synthesized
  source 1..22: mol_type = other DNA
tactttaagttctagggtacat

SEQ ID NO: 104498 - DNA, 22 bp, synthetic construct
  misc_feature 1..22: note = chemically synthesized
  source 1..22: mol_type = other DNA
taagttctagggtacatgtgcg

SEQ ID NO: 104499 - DNA, 22 bp, synthetic construct
  misc_feature 1..22: note = chemically synthesized
  source 1..22: mol_type = other DNA
aagttctagggtacatgtgcgc

SEQ ID NO: 104500 - DNA, 22 bp, synthetic construct
  misc_feature 1..22: note = chemically synthesized
  source 1..22: mol_type = other DNA
agttctagggtacatgtgcgca

SEQ ID NO: 104501 - DNA, 22 bp, synthetic construct
  misc_feature 1..22: note = chemically synthesized
  source 1..22: mol_type = other DNA
tagggtacatgtgcgcaacgtg

SEQ ID NO: 104502 - DNA, 22 bp, synthetic construct
  misc_feature 1..22: note = chemically synthesized
  source 1..22: mol_type = other DNA
gggtacatgtgcgcaacgtgca

SEQ ID NO: 104503 - DNA, 22 bp, synthetic construct
  misc_feature 1..22: note = chemically synthesized
  source 1..22: mol_type = other DNA
gttacatatgtatacatgtgcc

SEQ ID NO: 104504 - DNA, 22 bp, synthetic construct
  misc_feature 1..22: note = chemically synthesized
  source 1..22: mol_type = other DNA
ttacatatgtatacatgtgcca

SEQ ID NO: 104505 - DNA, 22 bp, synthetic construct
  misc_feature 1..22: note = chemically synthesized
  source 1..22: mol_type = other DNA
catatgtatacatgtgccatgt

SEQ ID NO: 104506 - DNA, 22 bp, synthetic construct
  misc_feature 1..22: note = chemically synthesized
  source 1..22: mol_type = other DNA
gtgtgctgcacccattaactca

SEQ ID NO: 104507 - DNA, 22 bp, synthetic construct
  misc_feature 1..22: note = chemically synthesized
  source 1..22: mol_type = other DNA
cacccattaactcatcatttac

SEQ ID NO: 104508 - DNA, 22 bp, synthetic construct
  misc_feature 1..22: note = chemically synthesized
  source 1..22: mol_type = other DNA
actcatcatttacattaggtat

SEQ ID NO: 104509 - DNA, 22 bp, synthetic construct
  misc_feature 1..22: note = chemically synthesized
  source 1..22: mol_type = other DNA
atcatttacattaggtatatct

SEQ ID NO: 104510 - DNA, 22 bp, synthetic construct
  misc_feature 1..22: note = chemically synthesized
  source 1..22: mol_type = other DNA
acattaggtatatctcctaatg

SEQ ID NO: 104511 - DNA, 22 bp, synthetic construct
  misc_feature 1..22: note = chemically synthesized
  source 1..22: mol_type = other DNA
cattaggtatatctcctaatgc

SEQ ID NO: 104512 - DNA, 22 bp, synthetic construct
  misc_feature 1..22: note = chemically synthesized
  source 1..22: mol_type = other DNA
ggtatatctcctaatgctatcc

SEQ ID NO: 104513 - DNA, 22 bp, synthetic construct
  misc_feature 1..22: note = chemically synthesized
  source 1..22: mol_type = other DNA
ctaatgctatccctctccaccc

SEQ ID NO: 104514 - DNA, 22 bp, synthetic construct
  misc_feature 1..22: note = chemically synthesized
  source 1..22: mol_type = other DNA
atgctatccctctccacccccc

SEQ ID NO: 104515 - DNA, 22 bp, synthetic construct
  misc_feature 1..22: note = chemically synthesized
  source 1..22: mol_type = other DNA
tccctctccaccccccaccccc

SEQ ID NO: 104516 - DNA, 22 bp, synthetic construct
  misc_feature 1..22: note = chemically synthesized
  source 1..22: mol_type = other DNA
tccaccccccacccccacccca

SEQ ID NO: 104517 - DNA, 22 bp, synthetic construct
  misc_feature 1..22: note = chemically synthesized
  source 1..22: mol_type = other DNA
caccccccacccccaccccaca

SEQ ID NO: 104518 - DNA, 22 bp, synthetic construct
  misc_feature 1..22: note = chemically synthesized
  source 1..22: mol_type = other DNA
gtgtgtgatgttccccttcctc

SEQ ID NO: 104519 - DNA, 22 bp, synthetic construct
  misc_feature 1..22: note = chemically synthesized
  source 1..22: mol_type = other DNA
cccttcctctgtccaagtgttc

SEQ ID NO: 104520 - DNA, 22 bp, synthetic construct
  misc_feature 1..22: note = chemically synthesized
  source 1..22: mol_type = other DNA
cctctgtccaagtgttctcatt

SEQ ID NO: 104521 - DNA, 22 bp, synthetic construct
  misc_feature 1..22: note = chemically synthesized
  source 1..22: mol_type = other DNA
ctctgtccaagtgttctcattg

SEQ ID NO: 104522 - DNA, 22 bp, synthetic construct
  misc_feature 1..22: note = chemically synthesized
  source 1..22: mol_type = other DNA
tgtccaagtgttctcattgttc

SEQ ID NO: 104523 - DNA, 22 bp, synthetic construct
  misc_feature 1..22: note = chemically synthesized
  source 1..22: mol_type = other DNA
tccaagtgttctcattgttcaa

SEQ ID NO: 104524 - DNA, 22 bp, synthetic construct
  misc_feature 1..22: note = chemically synthesized
  source 1..22: mol_type = other DNA
tcattgttcaattcccacctat

SEQ ID NO: 104525 - DNA, 22 bp, synthetic construct
  misc_feature 1..22: note = chemically synthesized
  source 1..22: mol_type = other DNA
attgttcaattcccacctataa

SEQ ID NO: 104526 - DNA, 22 bp, synthetic construct
  misc_feature 1..22: note = chemically synthesized
  source 1..22: mol_type = other DNA
ttcaattcccacctataagtga

SEQ ID NO: 104527 - DNA, 22 bp, synthetic construct
  misc_feature 1..22: note = chemically synthesized
  source 1..22: mol_type = other DNA
aattcccacctataagtgagaa

SEQ ID NO: 104528 - DNA, 22 bp, synthetic construct
  misc_feature 1..22: note = chemically synthesized
  source 1..22: mol_type = other DNA
ccacctataagtgagaacatgt

SEQ ID NO: 104529 - DNA, 22 bp, synthetic construct
  misc_feature 1..22: note = chemically synthesized
  source 1..22: mol_type = other DNA
taagtgagaacatgtggtattt

SEQ ID NO: 104530 - DNA, 22 bp, synthetic construct
  misc_feature 1..22: note = chemically synthesized
  source 1..22: mol_type = other DNA
ggttttttgtccttgtgatagt

SEQ ID NO: 104531 - DNA, 22 bp, synthetic construct
  misc_feature 1..22: note = chemically synthesized
  source 1..22: mol_type = other DNA
gttttttgtccttgtgatagtt

SEQ ID NO: 104532 - DNA, 22 bp, synthetic construct
  misc_feature 1..22: note = chemically synthesized
  source 1..22: mol_type = other DNA
tttgtccttgtgatagtttgct

SEQ ID NO: 104533 - DNA, 22 bp, synthetic construct
  misc_feature 1..22: note = chemically synthesized
  source 1..22: mol_type = other DNA
ttgtccttgtgatagtttgctg

SEQ ID NO: 104534 - DNA, 22 bp, synthetic construct
  misc_feature 1..22: note = chemically synthesized
  source 1..22: mol_type = other DNA
tgtccttgtgatagtttgctga

SEQ ID NO: 104535 - DNA, 22 bp, synthetic construct
  misc_feature 1..22: note = chemically synthesized
  source 1..22: mol_type = other DNA
gtccttgtgatagtttgctgag

SEQ ID NO: 104536 - DNA, 22 bp, synthetic construct
  misc_feature 1..22: note = chemically synthesized
  source 1..22: mol_type = other DNA
tccttgtgatagtttgctgaga

SEQ ID NO: 104537 - DNA, 22 bp, synthetic construct
  misc_feature 1..22: note = chemically synthesized
  source 1..22: mol_type = other DNA
gtgatagtttgctgagaatgat

SEQ ID NO: 104538 - DNA, 22 bp, synthetic construct
  misc_feature 1..22: note = chemically synthesized
  source 1..22: mol_type = other DNA
tgatagtttgctgagaatgatg

SEQ ID NO: 104539 - DNA, 22 bp, synthetic construct
  misc_feature 1..22: note = chemically synthesized
  source 1..22: mol_type = other DNA
gctgagaatgatggtttccagc

SEQ ID NO: 104540 - DNA, 22 bp, synthetic construct
  misc_feature 1..22: note = chemically synthesized
  source 1..22: mol_type = other DNA
ctgagaatgatggtttccagct

SEQ ID NO: 104541 - DNA, 22 bp, synthetic construct
  misc_feature 1..22: note = chemically synthesized
  source 1..22: mol_type = other DNA
agaatgatggtttccagcttca

SEQ ID NO: 104542 - DNA, 22 bp, synthetic construct
  misc_feature 1..22: note = chemically synthesized
  source 1..22: mol_type = other DNA
ccagcttcatccatgtccctac

SEQ ID NO: 104543 - DNA, 22 bp, synthetic construct
  misc_feature 1..22: note = chemically synthesized
  source 1..22: mol_type = other DNA
cagcttcatccatgtccctaca

SEQ ID NO: 104544 - DNA, 22 bp, synthetic construct
  misc_feature 1..22: note = chemically synthesized
  source 1..22: mol_type = other DNA
catccatgtccctacaaaggac

SEQ ID NO: 104545 - DNA, 22 bp, synthetic construct
  misc_feature 1..22: note = chemically synthesized
  source 1..22: mol_type = other DNA
atccatgtccctacaaaggaca

SEQ ID NO: 104546 - DNA, 22 bp, synthetic construct
  misc_feature 1..22: note = chemically synthesized
  source 1..22: mol_type = other DNA
caaaggacatgaactcatcatt

SEQ ID NO: 104547 - DNA, 22 bp, synthetic construct
  misc_feature 1..22: note = chemically synthesized
  source 1..22: mol_type = other DNA
atcattttttatggctgcatag

SEQ ID NO: 104548 - DNA, 22 bp, synthetic construct
  misc_feature 1..22: note = chemically synthesized
  source 1..22: mol_type = other DNA
tttatggctgcatagtattcca

SEQ ID NO: 104549 - DNA, 22 bp, synthetic construct
  misc_feature 1..22: note = chemically synthesized
  source 1..22: mol_type = other DNA
ttatggctgcatagtattccat

SEQ ID NO: 104550 - DNA, 22 bp, synthetic construct
  misc_feature 1..22: note = chemically synthesized
  source 1..22: mol_type = other DNA
tatggctgcatagtattccatg

SEQ ID NO: 104551 - DNA, 22 bp, synthetic construct
  misc_feature 1..22: note = chemically synthesized
  source 1..22: mol_type = other DNA
atggctgcatagtattccatgg

SEQ ID NO: 104552 - DNA, 22 bp, synthetic construct
  misc_feature 1..22: note = chemically synthesized
  source 1..22: mol_type = other DNA
tggctgcatagtattccatggt

SEQ ID NO: 104553 - DNA, 22 bp, synthetic construct
  misc_feature 1..22: note = chemically synthesized
  source 1..22: mol_type = other DNA
catagtattccatggtgtatat

SEQ ID NO: 104554 - DNA, 22 bp, synthetic construct
  misc_feature 1..22: note = chemically synthesized
  source 1..22: mol_type = other DNA
catggtgtatatgtgccacatt

SEQ ID NO: 104555 - DNA, 22 bp, synthetic construct
  misc_feature 1..22: note = chemically synthesized
  source 1..22: mol_type = other DNA
tcttaatccattctatcattgt

SEQ ID NO: 104556 - DNA, 22 bp, synthetic construct
  misc_feature 1..22: note = chemically synthesized
  source 1..22: mol_type = other DNA
cttaatccattctatcattgtt

SEQ ID NO: 104557 - DNA, 22 bp, synthetic construct
  misc_feature 1..22: note = chemically synthesized
  source 1..22: mol_type = other DNA
ttaatccattctatcattgttg

SEQ ID NO: 104558 - DNA, 22 bp, synthetic construct
  misc_feature 1..22: note = chemically synthesized
  source 1..22: mol_type = other DNA
aatccattctatcattgttgga

SEQ ID NO: 104559 - DNA, 22 bp, synthetic construct
  misc_feature 1..22: note = chemically synthesized
  source 1..22: mol_type = other DNA
atccattctatcattgttggac

SEQ ID NO: 104560 - DNA, 22 bp, synthetic construct
  misc_feature 1..22: note = chemically synthesized
  source 1..22: mol_type = other DNA
tatcattgttggacatttgggt

SEQ ID NO: 104561 - DNA, 22 bp, synthetic construct
  misc_feature 1..22: note = chemically synthesized
  source 1..22: mol_type = other DNA
tcattgttggacatttgggttg

SEQ ID NO: 104562 - DNA, 22 bp, synthetic construct
  misc_feature 1..22: note = chemically synthesized
  source 1..22: mol_type = other DNA
ttggacatttgggttggttcca

SEQ ID NO: 104563 - DNA, 22 bp, synthetic construct
  misc_feature 1..22: note = chemically synthesized
  source 1..22: mol_type = other DNA
gacatttgggttggttccaagt

SEQ ID NO: 104564 - DNA, 22 bp, synthetic construct
  misc_feature 1..22: note = chemically synthesized
  source 1..22: mol_type = other DNA
gggttggttccaagtctttgtt

SEQ ID NO: 104565 - DNA, 22 bp, synthetic construct
  misc_feature 1..22: note = chemically synthesized
  source 1..22: mol_type = other DNA
ggttggttccaagtctttgtta

SEQ ID NO: 104566 - DNA, 22 bp, synthetic construct
  misc_feature 1..22: note = chemically synthesized
  source 1..22: mol_type = other DNA
gttccaagtctttgttattgtg

SEQ ID NO: 104567 - DNA, 22 bp, synthetic construct
  misc_feature 1..22: note = chemically synthesized
  source 1..22: mol_type = other DNA
caagtctttgttattgtgaata

SEQ ID NO: 104568 - DNA, 22 bp, synthetic construct
  misc_feature 1..22: note = chemically synthesized
  source 1..22: mol_type = other DNA
tgttattgtgaatagtgaagct

SEQ ID NO: 104569 - DNA, 22 bp, synthetic construct
  misc_feature 1..22: note = chemically synthesized
  source 1..22: mol_type = other DNA
gttattgtgaatagtgaagctc

SEQ ID NO: 104570 - DNA, 22 bp, synthetic construct
  misc_feature 1..22: note = chemically synthesized
  source 1..22: mol_type = other DNA
ttattgtgaatagtgaagctct

SEQ ID NO: 104571 - DNA, 22 bp, synthetic construct
  misc_feature 1..22: note = chemically synthesized
  source 1..22: mol_type = other DNA
ttgtgaatagtgaagctcttta

SEQ ID NO: 104572 - DNA, 22 bp, synthetic construct
  misc_feature 1..22: note = chemically synthesized
  source 1..22: mol_type = other DNA
tgaatagtgaagctctttagtt

SEQ ID NO: 104573 - DNA, 22 bp, synthetic construct
  misc_feature 1..22: note = chemically synthesized
  source 1..22: mol_type = other DNA
tttagtttaattaggttccact

SEQ ID NO: 104574 - DNA, 22 bp, synthetic construct
  misc_feature 1..22: note = chemically synthesized
  source 1..22: mol_type = other DNA
tagtttaattaggttccacttg

SEQ ID NO: 104575 - DNA, 22 bp, synthetic construct
  misc_feature 1..22: note = chemically synthesized
  source 1..22: mol_type = other DNA
agtttaattaggttccacttgt

SEQ ID NO: 104576 - DNA, 22 bp, synthetic construct
  misc_feature 1..22: note = chemically synthesized
  source 1..22: mol_type = other DNA
gtttaattaggttccacttgtg

SEQ ID NO: 104577 - DNA, 22 bp, synthetic construct
  misc_feature 1..22: note = chemically synthesized
  source 1..22: mol_type = other DNA
aattaggttccacttgtgaatt

SEQ ID NO: 104578 - DNA, 22 bp, synthetic construct
  misc_feature 1..22: note = chemically synthesized
  source 1..22: mol_type = other DNA
attaggttccacttgtgaattt

SEQ ID NO: 104579 - DNA, 22 bp, synthetic construct
  misc_feature 1..22: note = chemically synthesized
  source 1..22: mol_type = other DNA
ggttccacttgtgaatttttct

SEQ ID NO: 104580 - DNA, 22 bp, synthetic construct
  misc_feature 1..22: note = chemically synthesized
  source 1..22: mol_type = other DNA
cacttgtgaatttttctttgca

SEQ ID NO: 104581 - DNA, 22 bp, synthetic construct
  misc_feature 1..22: note = chemically synthesized
  source 1..22: mol_type = other DNA
gtgaatttttctttgcattgca

SEQ ID NO: 104582 - DNA, 22 bp, synthetic construct
  misc_feature 1..22: note = chemically synthesized
  source 1..22: mol_type = other DNA
tgaatttttctttgcattgcaa

SEQ ID NO: 104583 - DNA, 22 bp, synthetic construct
  misc_feature 1..22: note = chemically synthesized
  source 1..22: mol_type = other DNA
ttctttgcattgcaattgcttt

SEQ ID NO: 104584 - DNA, 22 bp, synthetic construct
  misc_feature 1..22: note = chemically synthesized
  source 1..22: mol_type = other DNA
tctttgcattgcaattgctttt

SEQ ID NO: 104585 - DNA, 22 bp, synthetic construct
  misc_feature 1..22: note = chemically synthesized
  source 1..22: mol_type = other DNA
ctttgcattgcaattgcttttg

SEQ ID NO: 104586 - DNA, 22 bp, synthetic construct
  misc_feature 1..22: note = chemically synthesized
  source 1..22: mol_type = other DNA
tttgcattgcaattgcttttgg

SEQ ID NO: 104587 - DNA, 22 bp, synthetic construct
  misc_feature 1..22: note = chemically synthesized
  source 1..22: mol_type = other DNA
tgcattgcaattgcttttgggg

SEQ ID NO: 104588 - DNA, 22 bp, synthetic construct
  misc_feature 1..22: note = chemically synthesized
  source 1..22: mol_type = other DNA
gcattgcaattgcttttggggg

SEQ ID NO: 104589 - DNA, 22 bp, synthetic construct
  misc_feature 1..22: note = chemically synthesized
  source 1..22: mol_type = other DNA
cattgcaattgcttttgggggc

SEQ ID NO: 104590 - DNA, 22 bp, synthetic construct
  misc_feature 1..22: note = chemically synthesized
  source 1..22: mol_type = other DNA
caattgcttttgggggcttagc

SEQ ID NO: 104591 - DNA, 22 bp, synthetic construct
  misc_feature 1..22: note = chemically synthesized
  source 1..22: mol_type = other DNA
cttttgggggcttagccaaaaa

SEQ ID NO: 104592 - DNA, 22 bp, synthetic construct
  misc_feature 1..22: note = chemically synthesized
  source 1..22: mol_type = other DNA
ttgggggcttagccaaaaatgc

SEQ ID NO: 104593 - DNA, 22 bp, synthetic construct
  misc_feature 1..22: note = chemically synthesized
  source 1..22: mol_type = other DNA
tgggggcttagccaaaaatgca

SEQ ID NO: 104594 - DNA, 22 bp, synthetic construct
  misc_feature 1..22: note = chemically synthesized
  source 1..22: mol_type = other DNA
gggggcttagccaaaaatgcac

SEQ ID NO: 104595 - DNA, 22 bp, synthetic construct
  misc_feature 1..22: note = chemically synthesized
  source 1..22: mol_type = other DNA
ggggcttagccaaaaatgcact

SEQ ID NO: 104596 - DNA, 22 bp, synthetic construct
  misc_feature 1..22: note = chemically synthesized
  source 1..22: mol_type = other DNA
agccaaaaatgcactgccagtg

SEQ ID NO: 104597 - DNA, 22 bp, synthetic construct
  misc_feature 1..22: note = chemically synthesized
  source 1..22: mol_type = other DNA
gccaaaaatgcactgccagtgc

SEQ ID NO: 104598 - DNA, 22 bp, synthetic construct
  misc_feature 1..22: note = chemically synthesized
  source 1..22: mol_type = other DNA
ccagtgcaggtaagatttgaga

SEQ ID NO: 104599 - DNA, 22 bp, synthetic construct
  misc_feature 1..22: note = chemically synthesized
  source 1..22: mol_type = other DNA
gagatcttacatttaagttttg

SEQ ID NO: 104600 - DNA, 22 bp, synthetic construct
  misc_feature 1..22: note = chemically synthesized
  source 1..22: mol_type = other DNA
agatcttacatttaagttttga

SEQ ID NO: 104601 - DNA, 22 bp, synthetic construct
  misc_feature 1..22: note = chemically synthesized
  source 1..22: mol_type = other DNA
acatttaagttttgaattcatt

SEQ ID NO: 104602 - DNA, 22 bp, synthetic construct
  misc_feature 1..22: note = chemically synthesized
  source 1..22: mol_type = other DNA
catttaagttttgaattcattt

SEQ ID NO: 104603 - DNA, 22 bp, synthetic construct
  misc_feature 1..22: note = chemically synthesized
  source 1..22: mol_type = other DNA
aagttttgaattcattttcagt

SEQ ID NO: 104604 - DNA, 22 bp, synthetic construct
  misc_feature 1..22: note = chemically synthesized
  source 1..22: mol_type = other DNA
agttttgaattcattttcagtt

SEQ ID NO: 104605 - DNA, 22 bp, synthetic construct
  misc_feature 1..22: note = chemically synthesized
  source 1..22: mol_type = other DNA
tgaattcattttcagttgattt

SEQ ID NO: 104606 - DNA, 22 bp, synthetic construct
  misc_feature 1..22: note = chemically synthesized
  source 1..22: mol_type = other DNA
gaattcattttcagttgatttc

SEQ ID NO: 104607 - DNA, 22 bp, synthetic construct
  misc_feature 1..22: note = chemically synthesized
  source 1..22: mol_type = other DNA
aattcattttcagttgatttct

SEQ ID NO: 104608 - DNA, 22 bp, synthetic construct
  misc_feature 1..22: note = chemically synthesized
  source 1..22: mol_type = other DNA
attttcagttgatttctctaaa

SEQ ID NO: 104609 - DNA, 22 bp, synthetic construct
  misc_feature 1..22: note = chemically synthesized
  source 1..22: mol_type = other DNA
tcagttgatttctctaaatggt

SEQ ID NO: 104610 - DNA, 22 bp, synthetic construct
  misc_feature 1..22: note = chemically synthesized
  source 1..22: mol_type = other DNA
cagttgatttctctaaatggtg

SEQ ID NO: 104611 - DNA, 22 bp, synthetic construct
  misc_feature 1..22: note = chemically synthesized
  source 1..22: mol_type = other DNA
agttgatttctctaaatggtgt

SEQ ID NO: 104612 - DNA, 22 bp, synthetic construct
  misc_feature 1..22: note = chemically synthesized
  source 1..22: mol_type = other DNA
atttctctaaatggtgtaaggt

SEQ ID NO: 104613 - DNA, 22 bp, synthetic construct
  misc_feature 1..22: note = chemically synthesized
  source 1..22: mol_type = other DNA
ctctaaatggtgtaaggtaagg

SEQ ID NO: 104614 - DNA, 22 bp, synthetic construct
  misc_feature 1..22: note = chemically synthesized
  source 1..22: mol_type = other DNA
tctaaatggtgtaaggtaaggg

SEQ ID NO: 104615 - DNA, 22 bp, synthetic construct
  misc_feature 1..22: note = chemically synthesized
  source 1..22: mol_type = other DNA
taaatggtgtaaggtaagggtc

SEQ ID NO: 104616 - DNA, 22 bp, synthetic construct
  misc_feature 1..22: note = chemically synthesized
  source 1..22: mol_type = other DNA
aatggtgtaaggtaagggtcta

SEQ ID NO: 104617 - DNA, 22 bp, synthetic construct
  misc_feature 1..22: note = chemically synthesized
  source 1..22: mol_type = other DNA
gtttcattcttctgcatatggc

SEQ ID NO: 104618 - DNA, 22 bp, synthetic construct
  misc_feature 1..22: note = chemically synthesized
  source 1..22: mol_type = other DNA
cattcttctgcatatggctagc

SEQ ID NO: 104619 - DNA, 22 bp, synthetic construct
  misc_feature 1..22: note = chemically synthesized
  source 1..22: mol_type = other DNA
attcttctgcatatggctagcc

SEQ ID NO: 104620 - DNA, 22 bp, synthetic construct
  misc_feature 1..22: note = chemically synthesized
  source 1..22: mol_type = other DNA
ttctgcatatggctagccacgt

SEQ ID NO: 104621 - DNA, 22 bp, synthetic construct
  misc_feature 1..22: note = chemically synthesized
  source 1..22: mol_type = other DNA
ctgcatatggctagccacgtat

SEQ ID NO: 104622 - DNA, 22 bp, synthetic construct
  misc_feature 1..22: note = chemically synthesized
  source 1..22: mol_type = other DNA
tgcatatggctagccacgtatt

SEQ ID NO: 104623 - DNA, 22 bp, synthetic construct
  misc_feature 1..22: note = chemically synthesized
  source 1..22: mol_type = other DNA
catatggctagccacgtattcc

SEQ ID NO: 104624 - DNA, 22 bp, synthetic construct
  misc_feature 1..22: note = chemically synthesized
  source 1..22: mol_type = other DNA
gccacgtattccagcacagttt

SEQ ID NO: 104625 - DNA, 22 bp, synthetic construct
  misc_feature 1..22: note = chemically synthesized
  source 1..22: mol_type = other DNA
cagcacagtttattggataggt

SEQ ID NO: 104626 - DNA, 22 bp, synthetic construct
  misc_feature 1..22: note = chemically synthesized
  source 1..22: mol_type = other DNA
attggataggtagtccttttcc

SEQ ID NO: 104627 - DNA, 22 bp, synthetic construct
  misc_feature 1..22: note = chemically synthesized
  source 1..22: mol_type = other DNA
ttggataggtagtccttttccc

SEQ ID NO: 104628 - DNA, 22 bp, synthetic construct
  misc_feature 1..22: note = chemically synthesized
  source 1..22: mol_type = other DNA
gataggtagtccttttcccgct

SEQ ID NO: 104629 - DNA, 22 bp, synthetic construct
  misc_feature 1..22: note = chemically synthesized
  source 1..22: mol_type = other DNA
ttcccgctgcttgtttttgtca

SEQ ID NO: 104630 - DNA, 22 bp, synthetic construct
  misc_feature 1..22: note = chemically synthesized
  source 1..22: mol_type = other DNA
tcccgctgcttgtttttgtcag

SEQ ID NO: 104631 - DNA, 22 bp, synthetic construct
  misc_feature 1..22: note = chemically synthesized
  source 1..22: mol_type = other DNA
cccgctgcttgtttttgtcagt

SEQ ID NO: 104632 - DNA, 22 bp, synthetic construct
  misc_feature 1..22: note = chemically synthesized
  source 1..22: mol_type = other DNA
ccgctgcttgtttttgtcagtg

SEQ ID NO: 104633 - DNA, 22 bp, synthetic construct
  misc_feature 1..22: note = chemically synthesized
  source 1..22: mol_type = other DNA
cttgtttttgtcagtgttgttg

SEQ ID NO: 104634 - DNA, 22 bp, synthetic construct
  misc_feature 1..22: note = chemically synthesized
  source 1..22: mol_type = other DNA
gtttttgtcagtgttgttgaag

SEQ ID NO: 104635 - DNA, 22 bp, synthetic construct
  misc_feature 1..22: note = chemically synthesized
  source 1..22: mol_type = other DNA
tttttgtcagtgttgttgaaga

SEQ ID NO: 104636 - DNA, 22 bp, synthetic construct
  misc_feature 1..22: note = chemically synthesized
  source 1..22: mol_type = other DNA
ttgtcagtgttgttgaagatca

SEQ ID NO: 104637 - DNA, 22 bp, synthetic construct
  misc_feature 1..22: note = chemically synthesized
  source 1..22: mol_type = other DNA
tgtcagtgttgttgaagatcag

SEQ ID NO: 104638 - DNA, 22 bp, synthetic construct
  misc_feature 1..22: note = chemically synthesized
  source 1..22: mol_type = other DNA
gtcagtgttgttgaagatcaga

SEQ ID NO: 104639 - DNA, 22 bp, synthetic construct
  misc_feature 1..22: note = chemically synthesized
  source 1..22: mol_type = other DNA
tcagtgttgttgaagatcagat

SEQ ID NO: 104640 - DNA, 22 bp, synthetic construct
  misc_feature 1..22: note = chemically synthesized
  source 1..22: mol_type = other DNA
ttgaagatcagatggttgtaac

SEQ ID NO: 104641 - DNA, 22 bp, synthetic construct
  misc_feature 1..22: note = chemically synthesized
  source 1..22: mol_type = other DNA
aagatcagatggttgtaactat

SEQ ID NO: 104642 - DNA, 22 bp, synthetic construct
  misc_feature 1..22: note = chemically synthesized
  source 1..22: mol_type = other DNA
taactatgtagctttatttttg

SEQ ID NO: 104643 - DNA, 22 bp, synthetic construct
  misc_feature 1..22: note = chemically synthesized
  source 1..22: mol_type = other DNA
tgtagctttatttttgagtttt

SEQ ID NO: 104644 - DNA, 22 bp, synthetic construct
  misc_feature 1..22: note = chemically synthesized
  source 1..22: mol_type = other DNA
tatttttgagttttctattgtg

SEQ ID NO: 104645 - DNA, 22 bp, synthetic construct
  misc_feature 1..22: note = chemically synthesized
  source 1..22: mol_type = other DNA
atttttgagttttctattgtgt

SEQ ID NO: 104646 - DNA, 22 bp, synthetic construct
  misc_feature 1..22: note = chemically synthesized
  source 1..22: mol_type = other DNA
tttttgagttttctattgtgtt

SEQ ID NO: 104647 - DNA, 22 bp, synthetic construct
  misc_feature 1..22: note = chemically synthesized
  source 1..22: mol_type = other DNA
ttgagttttctattgtgtttcc

SEQ ID NO: 104648 - DNA, 22 bp, synthetic construct
  misc_feature 1..22: note = chemically synthesized
  source 1..22: mol_type = other DNA
tgagttttctattgtgtttcct

SEQ ID NO: 104649 - DNA, 22 bp, synthetic construct
  misc_feature 1..22: note = chemically synthesized
  source 1..22: mol_type = other DNA
gagttttctattgtgtttcctt

SEQ ID NO: 104650 - DNA, 22 bp, synthetic construct
  misc_feature 1..22: note = chemically synthesized
  source 1..22: mol_type = other DNA
agttttctattgtgtttcctta

SEQ ID NO: 104651 - DNA, 22 bp, synthetic construct
  misc_feature 1..22: note = chemically synthesized
  source 1..22: mol_type = other DNA
tctattgtgtttccttagtcaa

SEQ ID NO: 104652 - DNA, 22 bp, synthetic construct
  misc_feature 1..22: note = chemically synthesized
  source 1..22: mol_type = other DNA
ctattgtgtttccttagtcaat

SEQ ID NO: 104653 - DNA, 22 bp, synthetic construct
  misc_feature 1..22: note = chemically synthesized
  source 1..22: mol_type = other DNA
tattgtgtttccttagtcaatg

SEQ ID NO: 104654 - DNA, 22 bp, synthetic construct
  misc_feature 1..22: note = chemically synthesized
  source 1..22: mol_type = other DNA
ttgtgtttccttagtcaatgtg

SEQ ID NO: 104655 - DNA, 22 bp, synthetic construct
  misc_feature 1..22: note = chemically synthesized
  source 1..22: mol_type = other DNA
tgtttccttagtcaatgtgtct

SEQ ID NO: 104656 - DNA, 22 bp, synthetic construct
  misc_feature 1..22: note = chemically synthesized
  source 1..22: mol_type = other DNA
ccttagtcaatgtgtctatttt

SEQ ID NO: 104657 - DNA, 22 bp, synthetic construct
  misc_feature 1..22: note = chemically synthesized
  source 1..22: mol_type = other DNA
cttagtcaatgtgtctattttt

SEQ ID NO: 104658 - DNA, 22 bp, synthetic construct
  misc_feature 1..22: note = chemically synthesized
  source 1..22: mol_type = other DNA
agtcaatgtgtctatttttgta

SEQ ID NO: 104659 - DNA, 22 bp, synthetic construct
  misc_feature 1..22: note = chemically synthesized
  source 1..22: mol_type = other DNA
gtcaatgtgtctatttttgtaa

SEQ ID NO: 104660 - DNA, 22 bp, synthetic construct
  misc_feature 1..22: note = chemically synthesized
  source 1..22: mol_type = other DNA
tttttgtaacaatatcatgctg

SEQ ID NO: 104661 - DNA, 22 bp, synthetic construct
  misc_feature 1..22: note = chemically synthesized
  source 1..22: mol_type = other DNA
ttgtaacaatatcatgctgttt

SEQ ID NO: 104662 - DNA, 22 bp, synthetic construct
  misc_feature 1..22: note = chemically synthesized
  source 1..22: mol_type = other DNA
tgtaacaatatcatgctgtttg

SEQ ID NO: 104663 - DNA, 22 bp, synthetic construct
  misc_feature 1..22: note = chemically synthesized
  source 1..22: mol_type = other DNA
gtaacaatatcatgctgtttgg

SEQ ID NO: 104664 - DNA, 22 bp, synthetic construct
  misc_feature 1..22: note = chemically synthesized
  source 1..22: mol_type = other DNA
taacaatatcatgctgtttggg

SEQ ID NO: 104665 - DNA, 22 bp, synthetic construct
  misc_feature 1..22: note = chemically synthesized
  source 1..22: mol_type = other DNA
tttggggtactgtggccttata

SEQ ID NO: 104666 - DNA, 22 bp, synthetic construct
  misc_feature 1..22: note = chemically synthesized
  source 1..22: mol_type = other DNA
ggggtactgtggccttataatg

SEQ ID NO: 104667 - DNA, 22 bp, synthetic construct
  misc_feature 1..22: note = chemically synthesized
  source 1..22: mol_type = other DNA
gggtactgtggccttataatgt

SEQ ID NO: 104668 - DNA, 22 bp, synthetic construct
  misc_feature 1..22: note = chemically synthesized
  source 1..22: mol_type = other DNA
tggccttataatgtagtttctt

SEQ ID NO: 104669 - DNA, 22 bp, synthetic construct
  misc_feature 1..22: note = chemically synthesized
  source 1..22: mol_type = other DNA
ataatgtagtttctttcctttc

SEQ ID NO: 104670 - DNA, 22 bp, synthetic construct
  misc_feature 1..22: note = chemically synthesized
  source 1..22: mol_type = other DNA
taatgtagtttctttcctttct

SEQ ID NO: 104671 - DNA, 22 bp, synthetic construct
  misc_feature 1..22: note = chemically synthesized
  source 1..22: mol_type = other DNA
ctttcctttcttccctctcttt

SEQ ID NO: 104672 - DNA, 22 bp, synthetic construct
  misc_feature 1..22: note = chemically synthesized
  source 1..22: mol_type = other DNA
tttcctttcttccctctctttc

SEQ ID NO: 104673 - DNA, 22 bp, synthetic construct
  misc_feature 1..22: note = chemically synthesized
  source 1..22: mol_type = other DNA
tcctttcttccctctctttctt

SEQ ID NO: 104674 - DNA, 22 bp, synthetic construct
  misc_feature 1..22: note = chemically synthesized
  source 1..22: mol_type = other DNA
cctttcttccctctctttcttt

SEQ ID NO: 104675 - DNA, 22 bp, synthetic construct
  misc_feature 1..22: note = chemically synthesized
  source 1..22: mol_type = other DNA
ctttcttccctctctttctttc

SEQ ID NO: 104676 - DNA, 22 bp, synthetic construct
  misc_feature 1..22: note = chemically synthesized
  source 1..22: mol_type = other DNA
tcttccctctctttctttcttt

SEQ ID NO: 104677 - DNA, 22 bp, synthetic construct
  misc_feature 1..22: note = chemically synthesized
  source 1..22: mol_type = other DNA
cttccctctctttctttctttt

SEQ ID NO: 104678 - DNA, 22 bp, synthetic construct
  misc_feature 1..22: note = chemically synthesized
  source 1..22: mol_type = other DNA
ttccctctctttctttcttttc

SEQ ID NO: 104679 - DNA, 22 bp, synthetic construct
  misc_feature 1..22: note = chemically synthesized
  source 1..22: mol_type = other DNA
ccctctctttctttcttttctt

SEQ ID NO: 104680 - DNA, 22 bp, synthetic construct
  misc_feature 1..22: note = chemically synthesized
  source 1..22: mol_type = other DNA
cctctctttctttcttttcttt

SEQ ID NO: 104681 - DNA, 22 bp, synthetic construct
  misc_feature 1..22: note = chemically synthesized
  source 1..22: mol_type = other DNA
tctttctttcttttctttcttt

SEQ ID NO: 104682 - DNA, 22 bp, synthetic construct
  misc_feature 1..22: note = chemically synthesized
  source 1..22: mol_type = other DNA
tttctttcttttctttcttttt

SEQ ID NO: 104683 - DNA, 22 bp, synthetic construct
  misc_feature 1..22: note = chemically synthesized
  source 1..22: mol_type = other DNA
tctttcttttctttcttttttt

SEQ ID NO: 104684 - DNA, 22 bp, synthetic construct
  misc_feature 1..22: note = chemically synthesized
  source 1..22: mol_type = other DNA
ctttcttttctttcttttttta

SEQ ID NO: 104685 - DNA, 22 bp, synthetic construct
  misc_feature 1..22: note = chemically synthesized
  source 1..22: mol_type = other DNA
tttcttttctttctttttttat

SEQ ID NO: 104686 - DNA, 22 bp, synthetic construct
  misc_feature 1..22: note = chemically synthesized
  source 1..22: mol_type = other DNA
tcttttctttctttttttattt

SEQ ID NO: 104687 - DNA, 22 bp, synthetic construct
  misc_feature 1..22: note = chemically synthesized
  source 1..22: mol_type = other DNA
cttttctttctttttttatttt

SEQ ID NO: 104688 - DNA, 22 bp, synthetic construct
  misc_feature 1..22: note = chemically synthesized
  source 1..22: mol_type = other DNA
ttttctttctttttttattttt

SEQ ID NO: 104689 - DNA, 22 bp, synthetic construct
  misc_feature 1..22: note = chemically synthesized
  source 1..22: mol_type = other DNA
ttctttctttttttattttttc

SEQ ID NO: 104690 - DNA, 22 bp, synthetic construct
  misc_feature 1..22: note = chemically synthesized
  source 1..22: mol_type = other DNA
tctttctttttttattttttca

SEQ ID NO: 104691 - DNA, 22 bp, synthetic construct
  misc_feature 1..22: note = chemically synthesized
  source 1..22: mol_type = other DNA
ctttctttttttattttttcag

SEQ ID NO: 104692 - DNA, 22 bp, synthetic construct
  misc_feature 1..22: note = chemically synthesized
  source 1..22: mol_type = other DNA
tttctttttttattttttcaga

SEQ ID NO: 104693 - DNA, 22 bp, synthetic construct
  misc_feature 1..22: note = chemically synthesized
  source 1..22: mol_type = other DNA
tctttttttattttttcagagt

SEQ ID NO: 104694 - DNA, 22 bp, synthetic construct
  misc_feature 1..22: note = chemically synthesized
  source 1..22: mol_type = other DNA
ctttttttattttttcagagtt

SEQ ID NO: 104695 - DNA, 22 bp, synthetic construct
  misc_feature 1..22: note = chemically synthesized
  source 1..22: mol_type = other DNA
tttttttattttttcagagttt

SEQ ID NO: 104696 - DNA, 22 bp, synthetic construct
  misc_feature 1..22: note = chemically synthesized
  source 1..22: mol_type = other DNA
tttttattttttcagagtttca

SEQ ID NO: 104697 - DNA, 22 bp, synthetic construct
  misc_feature 1..22: note = chemically synthesized
  source 1..22: mol_type = other DNA
ttttattttttcagagtttcac

SEQ ID NO: 104698 - DNA, 22 bp, synthetic construct
  misc_feature 1..22: note = chemically synthesized
  source 1..22: mol_type = other DNA
tttattttttcagagtttcact

SEQ ID NO: 104699 - DNA, 22 bp, synthetic construct
  misc_feature 1..22: note = chemically synthesized
  source 1..22: mol_type = other DNA
ttattttttcagagtttcactc

SEQ ID NO: 104700 - DNA, 22 bp, synthetic construct
  misc_feature 1..22: note = chemically synthesized
  source 1..22: mol_type = other DNA
tattttttcagagtttcactct

SEQ ID NO: 104701 - DNA, 22 bp, synthetic construct
  misc_feature 1..22: note = chemically synthesized
  source 1..22: mol_type = other DNA
attttttcagagtttcactctg

SEQ ID NO: 104702 - DNA, 22 bp, synthetic construct
  misc_feature 1..22: note = chemically synthesized
  source 1..22: mol_type = other DNA
ttttttcagagtttcactctgt

SEQ ID NO: 104703 - DNA, 22 bp, synthetic construct
  misc_feature 1..22: note = chemically synthesized
  source 1..22: mol_type = other DNA
tttcagagtttcactctgtcac

SEQ ID NO: 104704 - DNA, 22 bp, synthetic construct
  misc_feature 1..22: note = chemically synthesized
  source 1..22: mol_type = other DNA
ttcagagtttcactctgtcacc

SEQ ID NO: 104705 - DNA, 22 bp, synthetic construct
  misc_feature 1..22: note = chemically synthesized
  source 1..22: mol_type = other DNA
tcagagtttcactctgtcaccc

SEQ ID NO: 104706 - DNA, 22 bp, synthetic construct
  misc_feature 1..22: note = chemically synthesized
  source 1..22: mol_type = other DNA
cagagtttcactctgtcaccca

SEQ ID NO: 104707 - DNA, 22 bp, synthetic construct
  misc_feature 1..22: note = chemically synthesized
  source 1..22: mol_type = other DNA
agagtttcactctgtcacccag

SEQ ID NO: 104708 - DNA, 22 bp, synthetic construct
  misc_feature 1..22: note = chemically synthesized
  source 1..22: mol_type = other DNA
cactctgtcacccaggctggag

SEQ ID NO: 104709 - DNA, 22 bp, synthetic construct
  misc_feature 1..22: note = chemically synthesized
  source 1..22: mol_type = other DNA
actctgtcacccaggctggagt

SEQ ID NO: 104710 - DNA, 22 bp, synthetic construct
  misc_feature 1..22: note = chemically synthesized
  source 1..22: mol_type = other DNA
tgtcacccaggctggagtgcag

SEQ ID NO: 104711 - DNA, 22 bp, synthetic construct
  misc_feature 1..22: note = chemically synthesized
  source 1..22: mol_type = other DNA
tcacccaggctggagtgcagtg

SEQ ID NO: 104712 - DNA, 22 bp, synthetic construct
  misc_feature 1..22: note = chemically synthesized
  source 1..22: mol_type = other DNA
gagtgcagtggtgcgatcttgg

SEQ ID NO: 104713 - DNA, 22 bp, synthetic construct
  misc_feature 1..22: note = chemically synthesized
  source 1..22: mol_type = other DNA
ggctcactgcaccgtctgcctc

SEQ ID NO: 104714 - DNA, 22 bp, synthetic construct
  misc_feature 1..22: note = chemically synthesized
  source 1..22: mol_type = other DNA
gctcactgcaccgtctgcctcc

SEQ ID NO: 104715 - DNA, 22 bp, synthetic construct
  misc_feature 1..22: note = chemically synthesized
  source 1..22: mol_type = other DNA
actgcaccgtctgcctccagag

SEQ ID NO: 104716 - DNA, 22 bp, synthetic construct
  misc_feature 1..22: note = chemically synthesized
  source 1..22: mol_type = other DNA
caccgtctgcctccagagttca

SEQ ID NO: 104717 - DNA, 22 bp, synthetic construct
  misc_feature 1..22: note = chemically synthesized
  source 1..22: mol_type = other DNA
cctccagagttcaagcaattct

SEQ ID NO: 104718 - DNA, 22 bp, synthetic construct
  misc_feature 1..22: note = chemically synthesized
  source 1..22: mol_type = other DNA
cagagttcaagcaattctcctg

SEQ ID NO: 104719 - DNA, 22 bp, synthetic construct
  misc_feature 1..22: note = chemically synthesized
  source 1..22: mol_type = other DNA
aagcaattctcctgcctcagcc

SEQ ID NO: 104720 - DNA, 22 bp, synthetic construct
  misc_feature 1..22: note = chemically synthesized
  source 1..22: mol_type = other DNA
tcctgcctcagccttccgagta

SEQ ID NO: 104721 - DNA, 22 bp, synthetic construct
  misc_feature 1..22: note = chemically synthesized
  source 1..22: mol_type = other DNA
ctgcctcagccttccgagtagc

SEQ ID NO: 104722 - DNA, 22 bp, synthetic construct
  misc_feature 1..22: note = chemically synthesized
  source 1..22: mol_type = other DNA
cctcagccttccgagtagctgg

SEQ ID NO: 104723 - DNA, 22 bp, synthetic construct
  misc_feature 1..22: note = chemically synthesized
  source 1..22: mol_type = other DNA
agccttccgagtagctgggatt

SEQ ID NO: 104724 - DNA, 22 bp, synthetic construct
  misc_feature 1..22: note = chemically synthesized
  source 1..22: mol_type = other DNA
ccgagtagctgggattacagcc

SEQ ID NO: 104725 - DNA, 22 bp, synthetic construct
  misc_feature 1..22: note = chemically synthesized
  source 1..22: mol_type = other DNA
cgagtagctgggattacagccc

SEQ ID NO: 104726 - DNA, 22 bp, synthetic construct
  misc_feature 1..22: note = chemically synthesized
  source 1..22: mol_type = other DNA
ggattacagcccccaccaccac

SEQ ID NO: 104727 - DNA, 22 bp, synthetic construct
  misc_feature 1..22: note = chemically synthesized
  source 1..22: mol_type = other DNA
cagcccccaccaccacagccgg

SEQ ID NO: 104728 - DNA, 22 bp, synthetic construct
  misc_feature 1..22: note = chemically synthesized
  source 1..22: mol_type = other DNA
attttgtatttttagtagagac

SEQ ID NO: 104729 - DNA, 22 bp, synthetic construct
  misc_feature 1..22: note = chemically synthesized
  source 1..22: mol_type = other DNA
tgtatttttagtagagacagtg

SEQ ID NO: 104730 - DNA, 22 bp, synthetic construct
  misc_feature 1..22: note = chemically synthesized
  source 1..22: mol_type = other DNA
gtatttttagtagagacagtgt

SEQ ID NO: 104731 - DNA, 22 bp, synthetic construct
  misc_feature 1..22: note = chemically synthesized
  source 1..22: mol_type = other DNA
tatttttagtagagacagtgtt

SEQ ID NO: 104732 - DNA, 22 bp, synthetic construct
  misc_feature 1..22: note = chemically synthesized
  source 1..22: mol_type = other DNA
ttagtagagacagtgtttcacc

SEQ ID NO: 104733 - DNA, 22 bp, synthetic construct
  misc_feature 1..22: note = chemically synthesized
  source 1..22: mol_type = other DNA
tagtagagacagtgtttcacca

SEQ ID NO: 104734 - DNA, 22 bp, synthetic construct
  misc_feature 1..22: note = chemically synthesized
  source 1..22: mol_type = other DNA
agtagagacagtgtttcaccat

SEQ ID NO: 104735 - DNA, 22 bp, synthetic construct
  misc_feature 1..22: note = chemically synthesized
  source 1..22: mol_type = other DNA
gtagagacagtgtttcaccatg

SEQ ID NO: 104736 - DNA, 22 bp, synthetic construct
  misc_feature 1..22: note = chemically synthesized
  source 1..22: mol_type = other DNA
caccatgttgaccaggctggtc

SEQ ID NO: 104737 - DNA, 22 bp, synthetic construct
  misc_feature 1..22: note = chemically synthesized
  source 1..22: mol_type = other DNA
accatgttgaccaggctggtct

SEQ ID NO: 104738 - DNA, 22 bp, synthetic construct
  misc_feature 1..22: note = chemically synthesized
  source 1..22: mol_type = other DNA
accaggctggtcttgaactcct

SEQ ID NO: 104739 - DNA, 22 bp, synthetic construct
  misc_feature 1..22: note = chemically synthesized
  source 1..22: mol_type = other DNA
gtcttgaactcctgacctcagg

SEQ ID NO: 104740 - DNA, 22 bp, synthetic construct
  misc_feature 1..22: note = chemically synthesized
  source 1..22: mol_type = other DNA
gaactcctgacctcaggtgata

SEQ ID NO: 104741 - DNA, 22 bp, synthetic construct
  misc_feature 1..22: note = chemically synthesized
  source 1..22: mol_type = other DNA
aactcctgacctcaggtgatac

SEQ ID NO: 104742 - DNA, 22 bp, synthetic construct
  misc_feature 1..22: note = chemically synthesized
  source 1..22: mol_type = other DNA
ctgacctcaggtgatacaccca

SEQ ID NO: 104743 - DNA, 22 bp, synthetic construct
  misc_feature 1..22: note = chemically synthesized
  source 1..22: mol_type = other DNA
acctcaggtgatacacccacct

SEQ ID NO: 104744 - DNA, 22 bp, synthetic construct
  misc_feature 1..22: note = chemically synthesized
  source 1..22: mol_type = other DNA
aggtgatacacccacctcagcc

SEQ ID NO: 104745 - DNA, 22 bp, synthetic construct
  misc_feature 1..22: note = chemically synthesized
  source 1..22: mol_type = other DNA
agccccctaaagtgctagagtt

SEQ ID NO: 104746 - DNA, 22 bp, synthetic construct
  misc_feature 1..22: note = chemically synthesized
  source 1..22: mol_type = other DNA
aagtgctagagttacaggcgtg

SEQ ID NO: 104747 - DNA, 22 bp, synthetic construct
  misc_feature 1..22: note = chemically synthesized
  source 1..22: mol_type = other DNA
gagttacaggcgtgagccaccg

SEQ ID NO: 104748 - DNA, 22 bp, synthetic construct
  misc_feature 1..22: note = chemically synthesized
  source 1..22: mol_type = other DNA
caggcgtgagccaccgtgcctg

SEQ ID NO: 104749 - DNA, 22 bp, synthetic construct
  misc_feature 1..22: note = chemically synthesized
  source 1..22: mol_type = other DNA
gcctgtagtttcaagtcaggtg

SEQ ID NO: 104750 - DNA, 22 bp, synthetic construct
  misc_feature 1..22: note = chemically synthesized
  source 1..22: mol_type = other DNA
tagtttcaagtcaggtggtgtg

SEQ ID NO: 104751 - DNA, 22 bp, synthetic construct
  misc_feature 1..22: note = chemically synthesized
  source 1..22: mol_type = other DNA
caagtcaggtggtgtggtgctt

SEQ ID NO: 104752 - DNA, 22 bp, synthetic construct
  misc_feature 1..22: note = chemically synthesized
  source 1..22: mol_type = other DNA
aagtcaggtggtgtggtgcttc

SEQ ID NO: 104753 - DNA, 22 bp, synthetic construct
  misc_feature 1..22: note = chemically synthesized
  source 1..22: mol_type = other DNA
ccaattttgttctttctgctta

SEQ ID NO: 104754 - DNA, 22 bp, synthetic construct
  misc_feature 1..22: note = chemically synthesized
  source 1..22: mol_type = other DNA
caattttgttctttctgcttaa

SEQ ID NO: 104755 - DNA, 22 bp, synthetic construct
  misc_feature 1..22: note = chemically synthesized
  source 1..22: mol_type = other DNA
tgttctttctgcttaagattgc

SEQ ID NO: 104756 - DNA, 22 bp, synthetic construct
  misc_feature 1..22: note = chemically synthesized
  source 1..22: mol_type = other DNA
gttctttctgcttaagattgct

SEQ ID NO: 104757 - DNA, 22 bp, synthetic construct
  misc_feature 1..22: note = chemically synthesized
  source 1..22: mol_type = other DNA
ttctttctgcttaagattgctt

SEQ ID NO: 104758 - DNA, 22 bp, synthetic construct
  misc_feature 1..22: note = chemically synthesized
  source 1..22: mol_type = other DNA
tttctgcttaagattgctttgc

SEQ ID NO: 104759 - DNA, 22 bp, synthetic construct
  misc_feature 1..22: note = chemically synthesized
  source 1..22: mol_type = other DNA
tctgcttaagattgctttgcct

SEQ ID NO: 104760 - DNA, 22 bp, synthetic construct
  misc_feature 1..22: note = chemically synthesized
  source 1..22: mol_type = other DNA
ctgcttaagattgctttgcctg

SEQ ID NO: 104761 - DNA, 22 bp, synthetic construct
  misc_feature 1..22: note = chemically synthesized
  source 1..22: mol_type = other DNA
tgcttaagattgctttgcctgt

SEQ ID NO: 104762 - DNA, 22 bp, synthetic construct
  misc_feature 1..22: note = chemically synthesized
  source 1..22: mol_type = other DNA
cttaagattgctttgcctgttc

SEQ ID NO: 104763 - DNA, 22 bp, synthetic construct
  misc_feature 1..22: note = chemically synthesized
  source 1..22: mol_type = other DNA
aagattgctttgcctgttcagg

SEQ ID NO: 104764 - DNA, 22 bp, synthetic construct
  misc_feature 1..22: note = chemically synthesized
  source 1..22: mol_type = other DNA
agattgctttgcctgttcaggc

SEQ ID NO: 104765 - DNA, 22 bp, synthetic construct
  misc_feature 1..22: note = chemically synthesized
  source 1..22: mol_type = other DNA
ctttgcctgttcaggctctttt

SEQ ID NO: 104766 - DNA, 22 bp, synthetic construct
  misc_feature 1..22: note = chemically synthesized
  source 1..22: mol_type = other DNA
tgcctgttcaggctctttttgg

SEQ ID NO: 104767 - DNA, 22 bp, synthetic construct
  misc_feature 1..22: note = chemically synthesized
  source 1..22: mol_type = other DNA
gcctgttcaggctctttttggt

SEQ ID NO: 104768 - DNA, 22 bp, synthetic construct
  misc_feature 1..22: note = chemically synthesized
  source 1..22: mol_type = other DNA
cctgttcaggctctttttggtt

SEQ ID NO: 104769 - DNA, 22 bp, synthetic construct
  misc_feature 1..22: note = chemically synthesized
  source 1..22: mol_type = other DNA
ttcaggctctttttggttccat

SEQ ID NO: 104770 - DNA, 22 bp, synthetic construct
  misc_feature 1..22: note = chemically synthesized
  source 1..22: mol_type = other DNA
aggctctttttggttccatatg

SEQ ID NO: 104771 - DNA, 22 bp, synthetic construct
  misc_feature 1..22: note = chemically synthesized
  source 1..22: mol_type = other DNA
tttttggttccatatgaatttt

SEQ ID NO: 104772 - DNA, 22 bp, synthetic construct
  misc_feature 1..22: note = chemically synthesized
  source 1..22: mol_type = other DNA
tttggttccatatgaattttaa

SEQ ID NO: 104773 - DNA, 22 bp, synthetic construct
  misc_feature 1..22: note = chemically synthesized
  source 1..22: mol_type = other DNA
ttggttccatatgaattttaaa

SEQ ID NO: 104774 - DNA, 22 bp, synthetic construct
  misc_feature 1..22: note = chemically synthesized
  source 1..22: mol_type = other DNA
tggttccatatgaattttaaac

SEQ ID NO: 104775 - DNA, 22 bp, synthetic construct
  misc_feature 1..22: note = chemically synthesized
  source 1..22: mol_type = other DNA
ggttccatatgaattttaaact

SEQ ID NO: 104776 - DNA, 22 bp, synthetic construct
  misc_feature 1..22: note = chemically synthesized
  source 1..22: mol_type = other DNA
gttccatatgaattttaaacta

SEQ ID NO: 104777 - DNA, 22 bp, synthetic construct
  misc_feature 1..22: note = chemically synthesized
  source 1..22: mol_type = other DNA
catatgaattttaaactagttt

SEQ ID NO: 104778 - DNA, 22 bp, synthetic construct
  misc_feature 1..22: note = chemically synthesized
  source 1..22: mol_type = other DNA
taaactagtttttctaatactg

SEQ ID NO: 104779 - DNA, 22 bp, synthetic construct
  misc_feature 1..22: note = chemically synthesized
  source 1..22: mol_type = other DNA
aaactagtttttctaatactgt

SEQ ID NO: 104780 - DNA, 22 bp, synthetic construct
  misc_feature 1..22: note = chemically synthesized
  source 1..22: mol_type = other DNA
aactagtttttctaatactgtg

SEQ ID NO: 104781 - DNA, 22 bp, synthetic construct
  misc_feature 1..22: note = chemically synthesized
  source 1..22: mol_type = other DNA
gtttttctaatactgtgaagaa

SEQ ID NO: 104782 - DNA, 22 bp, synthetic construct
  misc_feature 1..22: note = chemically synthesized
  source 1..22: mol_type = other DNA
ttctaatactgtgaagaatgac

SEQ ID NO: 104783 - DNA, 22 bp, synthetic construct
  misc_feature 1..22: note = chemically synthesized
  source 1..22: mol_type = other DNA
tctaatactgtgaagaatgaca

SEQ ID NO: 104784 - DNA, 22 bp, synthetic construct
  misc_feature 1..22: note = chemically synthesized
  source 1..22: mol_type = other DNA
ctaatactgtgaagaatgacat

SEQ ID NO: 104785 - DNA, 22 bp, synthetic construct
  misc_feature 1..22: note = chemically synthesized
  source 1..22: mol_type = other DNA
taatactgtgaagaatgacatt

SEQ ID NO: 104786 - DNA, 22 bp, synthetic construct
  misc_feature 1..22: note = chemically synthesized
  source 1..22: mol_type = other DNA
atactgtgaagaatgacattgg

SEQ ID NO: 104787 - DNA, 22 bp, synthetic construct
  misc_feature 1..22: note = chemically synthesized
  source 1..22: mol_type = other DNA
tgaagaatgacattggtaattg

SEQ ID NO: 104788 - DNA, 22 bp, synthetic construct
  misc_feature 1..22: note = chemically synthesized
  source 1..22: mol_type = other DNA
gtaattggatagaaattgcaat

SEQ ID NO: 104789 - DNA, 22 bp, synthetic construct
  misc_feature 1..22: note = chemically synthesized
  source 1..22: mol_type = other DNA
gatagaaattgcaatgaatgtc

SEQ ID NO: 104790 - DNA, 22 bp, synthetic construct
  misc_feature 1..22: note = chemically synthesized
  source 1..22: mol_type = other DNA
caatgaatgtctaaattgcttt

SEQ ID NO: 104791 - DNA, 22 bp, synthetic construct
  misc_feature 1..22: note = chemically synthesized
  source 1..22: mol_type = other DNA
aattgctttgagcagtatggcc

SEQ ID NO: 104792 - DNA, 22 bp, synthetic construct
  misc_feature 1..22: note = chemically synthesized
  source 1..22: mol_type = other DNA
ctttgagcagtatggccattta

SEQ ID NO: 104793 - DNA, 22 bp, synthetic construct
  misc_feature 1..22: note = chemically synthesized
  source 1..22: mol_type = other DNA
tgagcagtatggccatttaaat

SEQ ID NO: 104794 - DNA, 22 bp, synthetic construct
  misc_feature 1..22: note = chemically synthesized
  source 1..22: mol_type = other DNA
gagcagtatggccatttaaatt

SEQ ID NO: 104795 - DNA, 22 bp, synthetic construct
  misc_feature 1..22: note = chemically synthesized
  source 1..22: mol_type = other DNA
agcagtatggccatttaaattc

SEQ ID NO: 104796 - DNA, 22 bp, synthetic construct
  misc_feature 1..22: note = chemically synthesized
  source 1..22: mol_type = other DNA
aaattcatattgattcttccaa

SEQ ID NO: 104797 - DNA, 22 bp, synthetic construct
  misc_feature 1..22: note = chemically synthesized
  source 1..22: mol_type = other DNA
aattcatattgattcttccaat

SEQ ID NO: 104798 - DNA, 22 bp, synthetic construct
  misc_feature 1..22: note = chemically synthesized
  source 1..22: mol_type = other DNA
atattgattcttccaatccatg

SEQ ID NO: 104799 - DNA, 22 bp, synthetic construct
  misc_feature 1..22: note = chemically synthesized
  source 1..22: mol_type = other DNA
attcttccaatccatgagcctg

SEQ ID NO: 104800 - DNA, 22 bp, synthetic construct
  misc_feature 1..22: note = chemically synthesized
  source 1..22: mol_type = other DNA
ttccaatccatgagcctggaaa

SEQ ID NO: 104801 - DNA, 22 bp, synthetic construct
  misc_feature 1..22: note = chemically synthesized
  source 1..22: mol_type = other DNA
ccaatccatgagcctggaaagc

SEQ ID NO: 104802 - DNA, 22 bp, synthetic construct
  misc_feature 1..22: note = chemically synthesized
  source 1..22: mol_type = other DNA
caatccatgagcctggaaagct

SEQ ID NO: 104803 - DNA, 22 bp, synthetic construct
  misc_feature 1..22: note = chemically synthesized
  source 1..22: mol_type = other DNA
gaaagcttttatttatttattt

SEQ ID NO: 104804 - DNA, 22 bp, synthetic construct
  misc_feature 1..22: note = chemically synthesized
  source 1..22: mol_type = other DNA
ttatttatttatttgtgttgtt

SEQ ID NO: 104805 - DNA, 22 bp, synthetic construct
  misc_feature 1..22: note = chemically synthesized
  source 1..22: mol_type = other DNA
tatttatttatttgtgttgttt

SEQ ID NO: 104806 - DNA, 22 bp, synthetic construct
  misc_feature 1..22: note = chemically synthesized
  source 1..22: mol_type = other DNA
atttatttatttgtgttgtttc

SEQ ID NO: 104807 - DNA, 22 bp, synthetic construct
  misc_feature 1..22: note = chemically synthesized
  source 1..22: mol_type = other DNA
tttatttatttgtgttgtttct

SEQ ID NO: 104808 - DNA, 22 bp, synthetic construct
  misc_feature 1..22: note = chemically synthesized
  source 1..22: mol_type = other DNA
atttatttgtgttgtttctgat

SEQ ID NO: 104809 - DNA, 22 bp, synthetic construct
  misc_feature 1..22: note = chemically synthesized
  source 1..22: mol_type = other DNA
tttatttgtgttgtttctgatt

SEQ ID NO: 104810 - DNA, 22 bp, synthetic construct
  misc_feature 1..22: note = chemically synthesized
  source 1..22: mol_type = other DNA
atttgtgttgtttctgatttct

SEQ ID NO: 104811 - DNA, 22 bp, synthetic construct
  misc_feature 1..22: note = chemically synthesized
  source 1..22: mol_type = other DNA
tttgtgttgtttctgatttctt

SEQ ID NO: 104812 - DNA, 22 bp, synthetic construct
  misc_feature 1..22: note = chemically synthesized
  source 1..22: mol_type = other DNA
gtgttgtttctgatttctttca

SEQ ID NO: 104813 - DNA, 22 bp, synthetic construct
  misc_feature 1..22: note = chemically synthesized
  source 1..22: mol_type = other DNA
tgttgtttctgatttctttcag

SEQ ID NO: 104814 - DNA, 22 bp, synthetic construct
  misc_feature 1..22: note = chemically synthesized
  source 1..22: mol_type = other DNA
tttctgatttctttcagcagtg

SEQ ID NO: 104815 - DNA, 22 bp, synthetic construct
  misc_feature 1..22: note = chemically synthesized
  source 1..22: mol_type = other DNA
ctgatttctttcagcagtgttt

SEQ ID NO: 104816 - DNA, 22 bp, synthetic construct
  misc_feature 1..22: note = chemically synthesized
  source 1..22: mol_type = other DNA
tgatttctttcagcagtgtttt

SEQ ID NO: 104817 - DNA, 22 bp, synthetic construct
  misc_feature 1..22: note = chemically synthesized
  source 1..22: mol_type = other DNA
atttctttcagcagtgttttgt

SEQ ID NO: 104818 - DNA, 22 bp, synthetic construct
  misc_feature 1..22: note = chemically synthesized
  source 1..22: mol_type = other DNA
ctttcagcagtgttttgtagtt

SEQ ID NO: 104819 - DNA, 22 bp, synthetic construct
  misc_feature 1..22: note = chemically synthesized
  source 1..22: mol_type = other DNA
tttcagcagtgttttgtagttc

SEQ ID NO: 104820 - DNA, 22 bp, synthetic construct
  misc_feature 1..22: note = chemically synthesized
  source 1..22: mol_type = other DNA
tcagcagtgttttgtagttctc

SEQ ID NO: 104821 - DNA, 22 bp, synthetic construct
  misc_feature 1..22: note = chemically synthesized
  source 1..22: mol_type = other DNA
cagcagtgttttgtagttctcc

SEQ ID NO: 104822 - DNA, 22 bp, synthetic construct
  misc_feature 1..22: note = chemically synthesized
  source 1..22: mol_type = other DNA
agcagtgttttgtagttctcct

SEQ ID NO: 104823 - DNA, 22 bp, synthetic construct
  misc_feature 1..22: note = chemically synthesized
  source 1..22: mol_type = other DNA
tgtagttctccttgtagagatc

SEQ ID NO: 104824 - DNA, 22 bp, synthetic construct
  misc_feature 1..22: note = chemically synthesized
  source 1..22: mol_type = other DNA
gtagttctccttgtagagatct

SEQ ID NO: 104825 - DNA, 22 bp, synthetic construct
  misc_feature 1..22: note = chemically synthesized
  source 1..22: mol_type = other DNA
tagttctccttgtagagatctt

SEQ ID NO: 104826 - DNA, 22 bp, synthetic construct
  misc_feature 1..22: note = chemically synthesized
  source 1..22: mol_type = other DNA
tccttgtagagatctttcacct

SEQ ID NO: 104827 - DNA, 22 bp, synthetic construct
  misc_feature 1..22: note = chemically synthesized
  source 1..22: mol_type = other DNA
cttgtagagatctttcacctcc

SEQ ID NO: 104828 - DNA, 22 bp, synthetic construct
  misc_feature 1..22: note = chemically synthesized
  source 1..22: mol_type = other DNA
gtagagatctttcacctcccac

SEQ ID NO: 104829 - DNA, 22 bp, synthetic construct
  misc_feature 1..22: note = chemically synthesized
  source 1..22: mol_type = other DNA
tagagatctttcacctcccaca

SEQ ID NO: 104830 - DNA, 22 bp, synthetic construct
  misc_feature 1..22: note = chemically synthesized
  source 1..22: mol_type = other DNA
tcacctcccacaaaccatatga

SEQ ID NO: 104831 - DNA, 22 bp, synthetic construct
  misc_feature 1..22: note = chemically synthesized
  source 1..22: mol_type = other DNA
cacctcccacaaaccatatgat

SEQ ID NO: 104832 - DNA, 22 bp, synthetic construct
  misc_feature 1..22: note = chemically synthesized
  source 1..22: mol_type = other DNA
acctcccacaaaccatatgatc

SEQ ID NO: 104833 - DNA, 22 bp, synthetic construct
  misc_feature 1..22: note = chemically synthesized
  source 1..22: mol_type = other DNA
ccacaaaccatatgatcatctc

SEQ ID NO: 104834 - DNA, 22 bp, synthetic construct
  misc_feature 1..22: note = chemically synthesized
  source 1..22: mol_type = other DNA
aatagactgagaaaaacctttc

SEQ ID NO: 104835 - DNA, 22 bp, synthetic construct
  misc_feature 1..22: note = chemically synthesized
  source 1..22: mol_type = other DNA
agaaaaacctttcaataaaatt

SEQ ID NO: 104836 - DNA, 22 bp, synthetic construct
  misc_feature 1..22: note = chemically synthesized
  source 1..22: mol_type = other DNA
tcaataaaattcaacatccctt

SEQ ID NO: 104837 - DNA, 22 bp, synthetic construct
  misc_feature 1..22: note = chemically synthesized
  source 1..22: mol_type = other DNA
caataaaattcaacatcccttc

SEQ ID NO: 104838 - DNA, 22 bp, synthetic construct
  misc_feature 1..22: note = chemically synthesized
  source 1..22: mol_type = other DNA
aataaaattcaacatcccttca

SEQ ID NO: 104839 - DNA, 22 bp, synthetic construct
  misc_feature 1..22: note = chemically synthesized
  source 1..22: mol_type = other DNA
aacatcccttcatgataaaaac

SEQ ID NO: 104840 - DNA, 22 bp, synthetic construct
  misc_feature 1..22: note = chemically synthesized
  source 1..22: mol_type = other DNA
catgataaaaacctccaacaga

SEQ ID NO: 104841 - DNA, 22 bp, synthetic construct
  misc_feature 1..22: note = chemically synthesized
  source 1..22: mol_type = other DNA
atgataaaaacctccaacagac

SEQ ID NO: 104842 - DNA, 22 bp, synthetic construct
  misc_feature 1..22: note = chemically synthesized
  source 1..22: mol_type = other DNA
caacagactaggcatcaaagga

SEQ ID NO: 104843 - DNA, 22 bp, synthetic construct
  misc_feature 1..22: note = chemically synthesized
  source 1..22: mol_type = other DNA
ggcatcaaaggaacatacctca

SEQ ID NO: 104844 - DNA, 22 bp, synthetic construct
  misc_feature 1..22: note = chemically synthesized
  source 1..22: mol_type = other DNA
aaaagaataaaagccacgtatg

SEQ ID NO: 104845 - DNA, 22 bp, synthetic construct
  misc_feature 1..22: note = chemically synthesized
  source 1..22: mol_type = other DNA
aatgggcaaaagctggaactat

SEQ ID NO: 104846 - DNA, 22 bp, synthetic construct
  misc_feature 1..22: note = chemically synthesized
  source 1..22: mol_type = other DNA
gaactattctcctcgaaaactg

SEQ ID NO: 104847 - DNA, 22 bp, synthetic construct
  misc_feature 1..22: note = chemically synthesized
  source 1..22: mol_type = other DNA
ttctcctcgaaaactgcaacaa

SEQ ID NO: 104848 - DNA, 22 bp, synthetic construct
  misc_feature 1..22: note = chemically synthesized
  source 1..22: mol_type = other DNA
tcctcgaaaactgcaacaagac

SEQ ID NO: 104849 - DNA, 22 bp, synthetic construct
  misc_feature 1..22: note = chemically synthesized
  source 1..22: mol_type = other DNA
ctcgaaaactgcaacaagacaa

SEQ ID NO: 104850 - DNA, 22 bp, synthetic construct
  misc_feature 1..22: note = chemically synthesized
  source 1..22: mol_type = other DNA
gaaaactgcaacaagacaagga

SEQ ID NO: 104851 - DNA, 22 bp, synthetic construct
  misc_feature 1..22: note = chemically synthesized
  source 1..22: mol_type = other DNA
caacaagacaaggattcccatt

SEQ ID NO: 104852 - DNA, 22 bp, synthetic construct
  misc_feature 1..22: note = chemically synthesized
  source 1..22: mol_type = other DNA
ccattctcaccactcctagtga

SEQ ID NO: 104853 - DNA, 22 bp, synthetic construct
  misc_feature 1..22: note = chemically synthesized
  source 1..22: mol_type = other DNA
tcaccactcctagtgaacataa

SEQ ID NO: 104854 - DNA, 22 bp, synthetic construct
  misc_feature 1..22: note = chemically synthesized
  source 1..22: mol_type = other DNA
accactcctagtgaacataaaa

SEQ ID NO: 104855 - DNA, 22 bp, synthetic construct
  misc_feature 1..22: note = chemically synthesized
  source 1..22: mol_type = other DNA
ctagtgaacataaaattggaag

SEQ ID NO: 104856 - DNA, 22 bp, synthetic construct
  misc_feature 1..22: note = chemically synthesized
  source 1..22: mol_type = other DNA
gtgaacataaaattggaagtcc

SEQ ID NO: 104857 - DNA, 22 bp, synthetic construct
  misc_feature 1..22: note = chemically synthesized
  source 1..22: mol_type = other DNA
gaagtcctaaccagggcaatca

SEQ ID NO: 104858 - DNA, 22 bp, synthetic construct
  misc_feature 1..22: note = chemically synthesized
  source 1..22: mol_type = other DNA
accagggcaatcaggcgagaga

SEQ ID NO: 104859 - DNA, 22 bp, synthetic construct
  misc_feature 1..22: note = chemically synthesized
  source 1..22: mol_type = other DNA
tctctctttgctgatgatatga

SEQ ID NO: 104860 - DNA, 22 bp, synthetic construct
  misc_feature 1..22: note = chemically synthesized
  source 1..22: mol_type = other DNA
tctttgctgatgatatgactct

SEQ ID NO: 104861 - DNA, 22 bp, synthetic construct
  misc_feature 1..22: note = chemically synthesized
  source 1..22: mol_type = other DNA
tttgctgatgatatgactctat

SEQ ID NO: 104862 - DNA, 22 bp, synthetic construct
  misc_feature 1..22: note = chemically synthesized
  source 1..22: mol_type = other DNA
tgctgatgatatgactctatac

SEQ ID NO: 104863 - DNA, 22 bp, synthetic construct
  misc_feature 1..22: note = chemically synthesized
  source 1..22: mol_type = other DNA
gctgatgatatgactctatact

SEQ ID NO: 104864 - DNA, 22 bp, synthetic construct
  misc_feature 1..22: note = chemically synthesized
  source 1..22: mol_type = other DNA
ctgatgatatgactctatactt

SEQ ID NO: 104865 - DNA, 22 bp, synthetic construct
  misc_feature 1..22: note = chemically synthesized
  source 1..22: mol_type = other DNA
atgatatgactctatacttaga

SEQ ID NO: 104866 - DNA, 22 bp, synthetic construct
  misc_feature 1..22: note = chemically synthesized
  source 1..22: mol_type = other DNA
tatacttagaaaatcctacaga

SEQ ID NO: 104867 - DNA, 22 bp, synthetic construct
  misc_feature 1..22: note = chemically synthesized
  source 1..22: mol_type = other DNA
tacttagaaaatcctacagatt

SEQ ID NO: 104868 - DNA, 22 bp, synthetic construct
  misc_feature 1..22: note = chemically synthesized
  source 1..22: mol_type = other DNA
agaaaatcctacagattcttcc

SEQ ID NO: 104869 - DNA, 22 bp, synthetic construct
  misc_feature 1..22: note = chemically synthesized
  source 1..22: mol_type = other DNA
gaaaatcctacagattcttcca

SEQ ID NO: 104870 - DNA, 22 bp, synthetic construct
  misc_feature 1..22: note = chemically synthesized
  source 1..22: mol_type = other DNA
cagattcttccaaaaggctgct

SEQ ID NO: 104871 - DNA, 22 bp, synthetic construct
  misc_feature 1..22: note = chemically synthesized
  source 1..22: mol_type = other DNA
ttccaaaaggctgctagaactg

SEQ ID NO: 104872 - DNA, 22 bp, synthetic construct
  misc_feature 1..22: note = chemically synthesized
  source 1..22: mol_type = other DNA
ccaaaaggctgctagaactgat

SEQ ID NO: 104873 - DNA, 22 bp, synthetic construct
  misc_feature 1..22: note = chemically synthesized
  source 1..22: mol_type = other DNA
caaaaggctgctagaactgata

SEQ ID NO: 104874 - DNA, 22 bp, synthetic construct
  misc_feature 1..22: note = chemically synthesized
  source 1..22: mol_type = other DNA
ctagaactgataaacaatttta

SEQ ID NO: 104875 - DNA, 22 bp, synthetic construct
  misc_feature 1..22: note = chemically synthesized
  source 1..22: mol_type = other DNA
gaactgataaacaattttagca

SEQ ID NO: 104876 - DNA, 22 bp, synthetic construct
  misc_feature 1..22: note = chemically synthesized
  source 1..22: mol_type = other DNA
ataaacaattttagcaaggttt

SEQ ID NO: 104877 - DNA, 22 bp, synthetic construct
  misc_feature 1..22: note = chemically synthesized
  source 1..22: mol_type = other DNA
tagcaaggtttcaggatacaaa

SEQ ID NO: 104878 - DNA, 22 bp, synthetic construct
  misc_feature 1..22: note = chemically synthesized
  source 1..22: mol_type = other DNA
agcaaggtttcaggatacaaaa

SEQ ID NO: 104879 - DNA, 22 bp, synthetic construct
  misc_feature 1..22: note = chemically synthesized
  source 1..22: mol_type = other DNA
gcaaggtttcaggatacaaaat

SEQ ID NO: 104880 - DNA, 22 bp, synthetic construct
  misc_feature 1..22: note = chemically synthesized
  source 1..22: mol_type = other DNA
caggatacaaaatcacatacaa

SEQ ID NO: 104881 - DNA, 22 bp, synthetic construct
  misc_feature 1..22: note = chemically synthesized
  source 1..22: mol_type = other DNA
aggatacaaaatcacatacaaa

SEQ ID NO: 104882 - DNA, 22 bp, synthetic construct
  misc_feature 1..22: note = chemically synthesized
  source 1..22: mol_type = other DNA
ccatacaccaataaggcccagg

SEQ ID NO: 104883 - DNA, 22 bp, synthetic construct
  misc_feature 1..22: note = chemically synthesized
  source 1..22: mol_type = other DNA
catacaccaataaggcccaggc

SEQ ID NO: 104884 - DNA, 22 bp, synthetic construct
  misc_feature 1..22: note = chemically synthesized
  source 1..22: mol_type = other DNA
agagtcaaatcgagaacacaat

SEQ ID NO: 104885 - DNA, 22 bp, synthetic construct
  misc_feature 1..22: note = chemically synthesized
  source 1..22: mol_type = other DNA
agaacagccacaaagaaaatga

SEQ ID NO: 104886 - DNA, 22 bp, synthetic construct
  misc_feature 1..22: note = chemically synthesized
  source 1..22: mol_type = other DNA
ggacttgttctttttattgaaa

SEQ ID NO: 104887 - DNA, 22 bp, synthetic construct
  misc_feature 1..22: note = chemically synthesized
  source 1..22: mol_type = other DNA
gttctttttattgaaatttaaa

SEQ ID NO: 104888 - DNA, 22 bp, synthetic construct
  misc_feature 1..22: note = chemically synthesized
  source 1..22: mol_type = other DNA
ttctttttattgaaatttaaaa

SEQ ID NO: 104889 - DNA, 22 bp, synthetic construct
  misc_feature 1..22: note = chemically synthesized
  source 1..22: mol_type = other DNA
tttttattgaaatttaaaaccc

SEQ ID NO: 104890 - DNA, 22 bp, synthetic construct
  misc_feature 1..22: note = chemically synthesized
  source 1..22: mol_type = other DNA
tttattgaaatttaaaacccaa

SEQ ID NO: 104891 - DNA, 22 bp, synthetic construct
  misc_feature 1..22: note = chemically synthesized
  source 1..22: mol_type = other DNA
ttattgaaatttaaaacccaag

SEQ ID NO: 104892 - DNA, 22 bp, synthetic construct
  misc_feature 1..22: note = chemically synthesized
  source 1..22: mol_type = other DNA
tattgaaatttaaaacccaagc

SEQ ID NO: 104893 - DNA, 22 bp, synthetic construct
  misc_feature 1..22: note = chemically synthesized
  source 1..22: mol_type = other DNA
attgaaatttaaaacccaagca

SEQ ID NO: 104894 - DNA, 22 bp, synthetic construct
  misc_feature 1..22: note = chemically synthesized
  source 1..22: mol_type = other DNA
ttgaaatttaaaacccaagcag

SEQ ID NO: 104895 - DNA, 22 bp, synthetic construct
  misc_feature 1..22: note = chemically synthesized
  source 1..22: mol_type = other DNA
aaatttaaaacccaagcaggca

SEQ ID NO: 104896 - DNA, 22 bp, synthetic construct
  misc_feature 1..22: note = chemically synthesized
  source 1..22: mol_type = other DNA
aaaacccaagcaggcactagaa

SEQ ID NO: 104897 - DNA, 22 bp, synthetic construct
  misc_feature 1..22: note = chemically synthesized
  source 1..22: mol_type = other DNA
aaacccaagcaggcactagaaa

SEQ ID NO: 104898 - DNA, 22 bp, synthetic construct
  misc_feature 1..22: note = chemically synthesized
  source 1..22: mol_type = other DNA
gaaagaaaatatttaccatgaa

SEQ ID NO: 104899 - DNA, 22 bp, synthetic construct
  misc_feature 1..22: note = chemically synthesized
  source 1..22: mol_type = other DNA
accatgaattcatacaacacta

SEQ ID NO: 104900 - DNA, 22 bp, synthetic construct
  misc_feature 1..22: note = chemically synthesized
  source 1..22: mol_type = other DNA
ccatgaattcatacaacactat

SEQ ID NO: 104901 - DNA, 22 bp, synthetic construct
  misc_feature 1..22: note = chemically synthesized
  source 1..22: mol_type = other DNA
atacaacactatcattactacg

SEQ ID NO: 104902 - DNA, 22 bp, synthetic construct
  misc_feature 1..22: note = chemically synthesized
  source 1..22: mol_type = other DNA
tcattactacgtgaatattagt

SEQ ID NO: 104903 - DNA, 22 bp, synthetic construct
  misc_feature 1..22: note = chemically synthesized
  source 1..22: mol_type = other DNA
ctacgtgaatattagtgtgcta

SEQ ID NO: 104904 - DNA, 22 bp, synthetic construct
  misc_feature 1..22: note = chemically synthesized
  source 1..22: mol_type = other DNA
cgtgaatattagtgtgctatga

SEQ ID NO: 104905 - DNA, 22 bp, synthetic construct
  misc_feature 1..22: note = chemically synthesized
  source 1..22: mol_type = other DNA
gtgtgctatgagagacacatca

SEQ ID NO: 104906 - DNA, 22 bp, synthetic construct
  misc_feature 1..22: note = chemically synthesized
  source 1..22: mol_type = other DNA
tgagagacacatcaaataaatt

SEQ ID NO: 104907 - DNA, 22 bp, synthetic construct
  misc_feature 1..22: note = chemically synthesized
  source 1..22: mol_type = other DNA
ctgggatcagggaacattttcc

SEQ ID NO: 104908 - DNA, 22 bp, synthetic construct
  misc_feature 1..22: note = chemically synthesized
  source 1..22: mol_type = other DNA
tgggatcagggaacattttcca

SEQ ID NO: 104909 - DNA, 22 bp, synthetic construct
  misc_feature 1..22: note = chemically synthesized
  source 1..22: mol_type = other DNA
ggatcagggaacattttccaga

SEQ ID NO: 104910 - DNA, 22 bp, synthetic construct
  misc_feature 1..22: note = chemically synthesized
  source 1..22: mol_type = other DNA
tccagaagaaatgctacttaag

SEQ ID NO: 104911 - DNA, 22 bp, synthetic construct
  misc_feature 1..22: note = chemically synthesized
  source 1..22: mol_type = other DNA
ccagaagaaatgctacttaagc

SEQ ID NO: 104912 - DNA, 22 bp, synthetic construct
  misc_feature 1..22: note = chemically synthesized
  source 1..22: mol_type = other DNA
cagaagaaatgctacttaagct

SEQ ID NO: 104913 - DNA, 22 bp, synthetic construct
  misc_feature 1..22: note = chemically synthesized
  source 1..22: mol_type = other DNA
cttaagctgagaattaaatgct

SEQ ID NO: 104914 - DNA, 22 bp, synthetic construct
  misc_feature 1..22: note = chemically synthesized
  source 1..22: mol_type = other DNA
aagctgagaattaaatgctact

SEQ ID NO: 104915 - DNA, 22 bp, synthetic construct
  misc_feature 1..22: note = chemically synthesized
  source 1..22: mol_type = other DNA
agctgagaattaaatgctacta

SEQ ID NO: 104916 - DNA, 22 bp, synthetic construct
  misc_feature 1..22: note = chemically synthesized
  source 1..22: mol_type = other DNA
agaattaaatgctactatatta

SEQ ID NO: 104917 - DNA, 22 bp, synthetic construct
  misc_feature 1..22: note = chemically synthesized
  source 1..22: mol_type = other DNA
aatgctactatattagtagtgt

SEQ ID NO: 104918 - DNA, 22 bp, synthetic construct
  misc_feature 1..22: note = chemically synthesized
  source 1..22: mol_type = other DNA
ctatattagtagtgtagtagta

SEQ ID NO: 104919 - DNA, 22 bp, synthetic construct
  misc_feature 1..22: note = chemically synthesized
  source 1..22: mol_type = other DNA
tattagtagtgtagtagtattt

SEQ ID NO: 104920 - DNA, 22 bp, synthetic construct
  misc_feature 1..22: note = chemically synthesized
  source 1..22: mol_type = other DNA
gtagtgtagtagtatttggtgg

SEQ ID NO: 104921 - DNA, 22 bp, synthetic construct
  misc_feature 1..22: note = chemically synthesized
  source 1..22: mol_type = other DNA
ggtggggtagtgcaatcattgc

SEQ ID NO: 104922 - DNA, 22 bp, synthetic construct
  misc_feature 1..22: note = chemically synthesized
  source 1..22: mol_type = other DNA
gtggggtagtgcaatcattgcg

SEQ ID NO: 104923 - DNA, 22 bp, synthetic construct
  misc_feature 1..22: note = chemically synthesized
  source 1..22: mol_type = other DNA
cgtacaggtgaaaagaacaaac

SEQ ID NO: 104924 - DNA, 22 bp, synthetic construct
  misc_feature 1..22: note = chemically synthesized
  source 1..22: mol_type = other DNA
aagtttgtaaaatgtacattgg

SEQ ID NO: 104925 - DNA, 22 bp, synthetic construct
  misc_feature 1..22: note = chemically synthesized
  source 1..22: mol_type = other DNA
gtaaaatgtacattggtaatgg

SEQ ID NO: 104926 - DNA, 22 bp, synthetic construct
  misc_feature 1..22: note = chemically synthesized
  source 1..22: mol_type = other DNA
taaaatgtacattggtaatggg

SEQ ID NO: 104927 - DNA, 22 bp, synthetic construct
  misc_feature 1..22: note = chemically synthesized
  source 1..22: mol_type = other DNA
gtaatggggcaagattaaatac

SEQ ID NO: 104928 - DNA, 22 bp, synthetic construct
  misc_feature 1..22: note = chemically synthesized
  source 1..22: mol_type = other DNA
aatactataaattcaaataaaa

SEQ ID NO: 104929 - DNA, 22 bp, synthetic construct
  misc_feature 1..22: note = chemically synthesized
  source 1..22: mol_type = other DNA
taaattcaaataaaaataattt

SEQ ID NO: 104930 - DNA, 22 bp, synthetic construct
  misc_feature 1..22: note = chemically synthesized
  source 1..22: mol_type = other DNA
aaataaaaataattttattcaa

SEQ ID NO: 104931 - DNA, 22 bp, synthetic construct
  misc_feature 1..22: note = chemically synthesized
  source 1..22: mol_type = other DNA
tattcaaaatatacattaagga

SEQ ID NO: 104932 - DNA, 22 bp, synthetic construct
  misc_feature 1..22: note = chemically synthesized
  source 1..22: mol_type = other DNA
attcaaaatatacattaaggaa

SEQ ID NO: 104933 - DNA, 22 bp, synthetic construct
  misc_feature 1..22: note = chemically synthesized
  source 1..22: mol_type = other DNA
ttcaaaatatacattaaggaag

SEQ ID NO: 104934 - DNA, 22 bp, synthetic construct
  misc_feature 1..22: note = chemically synthesized
  source 1..22: mol_type = other DNA
aaaatatacattaaggaagtat

SEQ ID NO: 104935 - DNA, 22 bp, synthetic construct
  misc_feature 1..22: note = chemically synthesized
  source 1..22: mol_type = other DNA
aggaagtataatatctcttgaa

SEQ ID NO: 104936 - DNA, 22 bp, synthetic construct
  misc_feature 1..22: note = chemically synthesized
  source 1..22: mol_type = other DNA
ttgaacaacaatacatgaaaaa

SEQ ID NO: 104937 - DNA, 22 bp, synthetic construct
  misc_feature 1..22: note = chemically synthesized
  source 1..22: mol_type = other DNA
gaacaacaatacatgaaaaaaa

SEQ ID NO: 104938 - DNA, 22 bp, synthetic construct
  misc_feature 1..22: note = chemically synthesized
  source 1..22: mol_type = other DNA
aacaacaatacatgaaaaaaag

SEQ ID NO: 104939 - DNA, 22 bp, synthetic construct
  misc_feature 1..22: note = chemically synthesized
  source 1..22: mol_type = other DNA
gagagaaaatgaatctgtagta

SEQ ID NO: 104940 - DNA, 22 bp, synthetic construct
  misc_feature 1..22: note = chemically synthesized
  source 1..22: mol_type = other DNA
agagaaaatgaatctgtagtag

SEQ ID NO: 104941 - DNA, 22 bp, synthetic construct
  misc_feature 1..22: note = chemically synthesized
  source 1..22: mol_type = other DNA
tagtagtagcaggttctgatca

SEQ ID NO: 104942 - DNA, 22 bp, synthetic construct
  misc_feature 1..22: note = chemically synthesized
  source 1..22: mol_type = other DNA
tgatcacaatatatcttgcaaa

SEQ ID NO: 104943 - DNA, 22 bp, synthetic construct
  misc_feature 1..22: note = chemically synthesized
  source 1..22: mol_type = other DNA
atcacaatatatcttgcaaatc

SEQ ID NO: 104944 - DNA, 22 bp, synthetic construct
  misc_feature 1..22: note = chemically synthesized
  source 1..22: mol_type = other DNA
gcaaatcatgtaaaacattttg

SEQ ID NO: 104945 - DNA, 22 bp, synthetic construct
  misc_feature 1..22: note = chemically synthesized
  source 1..22: mol_type = other DNA
caaatcatgtaaaacattttga

SEQ ID NO: 104946 - DNA, 22 bp, synthetic construct
  misc_feature 1..22: note = chemically synthesized
  source 1..22: mol_type = other DNA
tgacattaccataagggaatga

SEQ ID NO: 104947 - DNA, 22 bp, synthetic construct
  misc_feature 1..22: note = chemically synthesized
  source 1..22: mol_type = other DNA
gacattaccataagggaatgaa

SEQ ID NO: 104948 - DNA, 22 bp, synthetic construct
  misc_feature 1..22: note = chemically synthesized
  source 1..22: mol_type = other DNA
acattaccataagggaatgaat

SEQ ID NO: 104949 - DNA, 22 bp, synthetic construct
  misc_feature 1..22: note = chemically synthesized
  source 1..22: mol_type = other DNA
ccataagggaatgaatataaaa

SEQ ID NO: 104950 - DNA, 22 bp, synthetic construct
  misc_feature 1..22: note = chemically synthesized
  source 1..22: mol_type = other DNA
ataatcaagtagttattgttta

SEQ ID NO: 104951 - DNA, 22 bp, synthetic construct
  misc_feature 1..22: note = chemically synthesized
  source 1..22: mol_type = other DNA
taatcaagtagttattgtttaa

SEQ ID NO: 104952 - DNA, 22 bp, synthetic construct
  misc_feature 1..22: note = chemically synthesized
  source 1..22: mol_type = other DNA
ttgtttaaagttactatggcta

SEQ ID NO: 104953 - DNA, 22 bp, synthetic construct
  misc_feature 1..22: note = chemically synthesized
  source 1..22: mol_type = other DNA
tttaaagttactatggctacag

SEQ ID NO: 104954 - DNA, 22 bp, synthetic construct
  misc_feature 1..22: note = chemically synthesized
  source 1..22: mol_type = other DNA
aaagttactatggctacagtat

SEQ ID NO: 104955 - DNA, 22 bp, synthetic construct
  misc_feature 1..22: note = chemically synthesized
  source 1..22: mol_type = other DNA
aagttactatggctacagtatg

SEQ ID NO: 104956 - DNA, 22 bp, synthetic construct
  misc_feature 1..22: note = chemically synthesized
  source 1..22: mol_type = other DNA
ctatggctacagtatgagaaac

SEQ ID NO: 104957 - DNA, 22 bp, synthetic construct
  misc_feature 1..22: note = chemically synthesized
  source 1..22: mol_type = other DNA
tggctacagtatgagaaacatg

SEQ ID NO: 104958 - DNA, 22 bp, synthetic construct
  misc_feature 1..22: note = chemically synthesized
  source 1..22: mol_type = other DNA
cagtatgagaaacatgttggaa

SEQ ID NO: 104959 - DNA, 22 bp, synthetic construct
  misc_feature 1..22: note = chemically synthesized
  source 1..22: mol_type = other DNA
gaaaagggggagaacaggtaaa

SEQ ID NO: 104960 - DNA, 22 bp, synthetic construct
  misc_feature 1..22: note = chemically synthesized
  source 1..22: mol_type = other DNA
tgttggtgtggttttgactagt

SEQ ID NO: 104961 - DNA, 22 bp, synthetic construct
  misc_feature 1..22: note = chemically synthesized
  source 1..22: mol_type = other DNA
gtgtggttttgactagttgtta

SEQ ID NO: 104962 - DNA, 22 bp, synthetic construct
  misc_feature 1..22: note = chemically synthesized
  source 1..22: mol_type = other DNA
tgactagttgttatcagtagca

SEQ ID NO: 104963 - DNA, 22 bp, synthetic construct
  misc_feature 1..22: note = chemically synthesized
  source 1..22: mol_type = other DNA
gactagttgttatcagtagcat

SEQ ID NO: 104964 - DNA, 22 bp, synthetic construct
  misc_feature 1..22: note = chemically synthesized
  source 1..22: mol_type = other DNA
actagttgttatcagtagcatt

SEQ ID NO: 104965 - DNA, 22 bp, synthetic construct
  misc_feature 1..22: note = chemically synthesized
  source 1..22: mol_type = other DNA
gttgttatcagtagcattagaa

SEQ ID NO: 104966 - DNA, 22 bp, synthetic construct
  misc_feature 1..22: note = chemically synthesized
  source 1..22: mol_type = other DNA
ttatcagtagcattagaaaggc

SEQ ID NO: 104967 - DNA, 22 bp, synthetic construct
  misc_feature 1..22: note = chemically synthesized
  source 1..22: mol_type = other DNA
tcagtagcattagaaaggcttg

SEQ ID NO: 104968 - DNA, 22 bp, synthetic construct
  misc_feature 1..22: note = chemically synthesized
  source 1..22: mol_type = other DNA
gaaaggcttgaatagaagagag

SEQ ID NO: 104969 - DNA, 22 bp, synthetic construct
  misc_feature 1..22: note = chemically synthesized
  source 1..22: mol_type = other DNA
gaatagaagagagattctatga

SEQ ID NO: 104970 - DNA, 22 bp, synthetic construct
  misc_feature 1..22: note = chemically synthesized
  source 1..22: mol_type = other DNA
aatagaagagagattctatgac

SEQ ID NO: 104971 - DNA, 22 bp, synthetic construct
  misc_feature 1..22: note = chemically synthesized
  source 1..22: mol_type = other DNA
tatgacttagaatagaactgag

SEQ ID NO: 104972 - DNA, 22 bp, synthetic construct
  misc_feature 1..22: note = chemically synthesized
  source 1..22: mol_type = other DNA
tgacttagaatagaactgagtg

SEQ ID NO: 104973 - DNA, 22 bp, synthetic construct
  misc_feature 1..22: note = chemically synthesized
  source 1..22: mol_type = other DNA
agaatagaactgagtgattgaa

SEQ ID NO: 104974 - DNA, 22 bp, synthetic construct
  misc_feature 1..22: note = chemically synthesized
  source 1..22: mol_type = other DNA
gaatagaactgagtgattgaag

SEQ ID NO: 104975 - DNA, 22 bp, synthetic construct
  misc_feature 1..22: note = chemically synthesized
  source 1..22: mol_type = other DNA
agtgattgaaggtagtagatta

SEQ ID NO: 104976 - DNA, 22 bp, synthetic construct
  misc_feature 1..22: note = chemically synthesized
  source 1..22: mol_type = other DNA
aaggtagtagattaaagagaaa

SEQ ID NO: 104977 - DNA, 22 bp, synthetic construct
  misc_feature 1..22: note = chemically synthesized
  source 1..22: mol_type = other DNA
aagagaaagaagcgtaagtaat

SEQ ID NO: 104978 - DNA, 22 bp, synthetic construct
  misc_feature 1..22: note = chemically synthesized
  source 1..22: mol_type = other DNA
aatttctgagttttgctgaatg

SEQ ID NO: 104979 - DNA, 22 bp, synthetic construct
  misc_feature 1..22: note = chemically synthesized
  source 1..22: mol_type = other DNA
ctgagttttgctgaatggagag

SEQ ID NO: 104980 - DNA, 22 bp, synthetic construct
  misc_feature 1..22: note = chemically synthesized
  source 1..22: mol_type = other DNA
tgagttttgctgaatggagagt

SEQ ID NO: 104981 - DNA, 22 bp, synthetic construct
  misc_feature 1..22: note = chemically synthesized
  source 1..22: mol_type = other DNA
agttttgctgaatggagagtag

SEQ ID NO: 104982 - DNA, 22 bp, synthetic construct
  misc_feature 1..22: note = chemically synthesized
  source 1..22: mol_type = other DNA
tgctgaatggagagtagttcca

SEQ ID NO: 104983 - DNA, 22 bp, synthetic construct
  misc_feature 1..22: note = chemically synthesized
  source 1..22: mol_type = other DNA
gctgaatggagagtagttccat

SEQ ID NO: 104984 - DNA, 22 bp, synthetic construct
  misc_feature 1..22: note = chemically synthesized
  source 1..22: mol_type = other DNA
ctgaatggagagtagttccatt

SEQ ID NO: 104985 - DNA, 22 bp, synthetic construct
  misc_feature 1..22: note = chemically synthesized
  source 1..22: mol_type = other DNA
aatggagagtagttccattgac

SEQ ID NO: 104986 - DNA, 22 bp, synthetic construct
  misc_feature 1..22: note = chemically synthesized
  source 1..22: mol_type = other DNA
cattgacttccatagttatcac

SEQ ID NO: 104987 - DNA, 22 bp, synthetic construct
  misc_feature 1..22: note = chemically synthesized
  source 1..22: mol_type = other DNA
acttccatagttatcacaagaa

SEQ ID NO: 104988 - DNA, 22 bp, synthetic construct
  misc_feature 1..22: note = chemically synthesized
  source 1..22: mol_type = other DNA
ccatagttatcacaagaagata

SEQ ID NO: 104989 - DNA, 22 bp, synthetic construct
  misc_feature 1..22: note = chemically synthesized
  source 1..22: mol_type = other DNA
catagttatcacaagaagataa

SEQ ID NO: 104990 - DNA, 22 bp, synthetic construct
  misc_feature 1..22: note = chemically synthesized
  source 1..22: mol_type = other DNA
tcacaagaagataatgacttta

SEQ ID NO: 104991 - DNA, 22 bp, synthetic construct
  misc_feature 1..22: note = chemically synthesized
  source 1..22: mol_type = other DNA
tattcactaatcaacagttatt

SEQ ID NO: 104992 - DNA, 22 bp, synthetic construct
  misc_feature 1..22: note = chemically synthesized
  source 1..22: mol_type = other DNA
attcactaatcaacagttattt

SEQ ID NO: 104993 - DNA, 22 bp, synthetic construct
  misc_feature 1..22: note = chemically synthesized
  source 1..22: mol_type = other DNA
ttcactaatcaacagttattta

SEQ ID NO: 104994 - DNA, 22 bp, synthetic construct
  misc_feature 1..22: note = chemically synthesized
  source 1..22: mol_type = other DNA
actaatcaacagttatttattg

SEQ ID NO: 104995 - DNA, 22 bp, synthetic construct
  misc_feature 1..22: note = chemically synthesized
  source 1..22: mol_type = other DNA
atcaacagttatttattgattg

SEQ ID NO: 104996 - DNA, 22 bp, synthetic construct
  misc_feature 1..22: note = chemically synthesized
  source 1..22: mol_type = other DNA
tttattgattggtcattgtaca

SEQ ID NO: 104997 - DNA, 22 bp, synthetic construct
  misc_feature 1..22: note = chemically synthesized
  source 1..22: mol_type = other DNA
attgattggtcattgtacatta

SEQ ID NO: 104998 - DNA, 22 bp, synthetic construct
  misc_feature 1..22: note = chemically synthesized
  source 1..22: mol_type = other DNA
ttgattggtcattgtacattaa

SEQ ID NO: 104999 - DNA, 22 bp, synthetic construct
  misc_feature 1..22: note = chemically synthesized
  source 1..22: mol_type = other DNA
attggtcattgtacattaatga

SEQ ID NO: 105000 - DNA, 22 bp, synthetic construct
  misc_feature 1..22: note = chemically synthesized
  source 1..22: mol_type = other DNA
gtcattgtacattaatgagtgt

SEQ ID NO: 105001 - DNA, 22 bp, synthetic construct
  misc_feature 1..22: note = chemically synthesized
  source 1..22: mol_type = other DNA
tacattaatgagtgttttacat

SEQ ID NO: 105002 - DNA, 22 bp, synthetic construct
  misc_feature 1..22: note = chemically synthesized
  source 1..22: mol_type = other DNA
atgagtgttttacatgctgact

SEQ ID NO: 105003 - DNA, 22 bp, synthetic construct
  misc_feature 1..22: note = chemically synthesized
  source 1..22: mol_type = other DNA
tacatgctgactttgtagaaaa

SEQ ID NO: 105004 - DNA, 22 bp, synthetic construct
  misc_feature 1..22: note = chemically synthesized
  source 1..22: mol_type = other DNA
acatgctgactttgtagaaaag

SEQ ID NO: 105005 - DNA, 22 bp, synthetic construct
  misc_feature 1..22: note = chemically synthesized
  source 1..22: mol_type = other DNA
catgctgactttgtagaaaaga

SEQ ID NO: 105006 - DNA, 22 bp, synthetic construct
  misc_feature 1..22: note = chemically synthesized
  source 1..22: mol_type = other DNA
actttgtagaaaagatgaagag

SEQ ID NO: 105007 - DNA, 22 bp, synthetic construct
  misc_feature 1..22: note = chemically synthesized
  source 1..22: mol_type = other DNA
tgtagaaaagatgaagagaatc

SEQ ID NO: 105008 - DNA, 22 bp, synthetic construct
  misc_feature 1..22: note = chemically synthesized
  source 1..22: mol_type = other DNA
gtagaaaagatgaagagaatca

SEQ ID NO: 105009 - DNA, 22 bp, synthetic construct
  misc_feature 1..22: note = chemically synthesized
  source 1..22: mol_type = other DNA
tagaaaagatgaagagaatcag

SEQ ID NO: 105010 - DNA, 22 bp, synthetic construct
  misc_feature 1..22: note = chemically synthesized
  source 1..22: mol_type = other DNA
caatgaagtgctttgcacaaag

SEQ ID NO: 105011 - DNA, 22 bp, synthetic construct
  misc_feature 1..22: note = chemically synthesized
  source 1..22: mol_type = other DNA
aatgaagtgctttgcacaaagg

SEQ ID NO: 105012 - DNA, 22 bp, synthetic construct
  misc_feature 1..22: note = chemically synthesized
  source 1..22: mol_type = other DNA
tgcacaaaggataccctggaga

SEQ ID NO: 105013 - DNA, 22 bp, synthetic construct
  misc_feature 1..22: note = chemically synthesized
  source 1..22: mol_type = other DNA
gcacaaaggataccctggagaa

SEQ ID NO: 105014 - DNA, 22 bp, synthetic construct
  misc_feature 1..22: note = chemically synthesized
  source 1..22: mol_type = other DNA
cacaaaggataccctggagaaa

SEQ ID NO: 105015 - DNA, 22 bp, synthetic construct
  misc_feature 1..22: note = chemically synthesized
  source 1..22: mol_type = other DNA
gagaaaattactcatatcattt

SEQ ID NO: 105016 - DNA, 22 bp, synthetic construct
  misc_feature 1..22: note = chemically synthesized
  source 1..22: mol_type = other DNA
ctcatatcattttcttttctaa

SEQ ID NO: 105017 - DNA, 22 bp, synthetic construct
  misc_feature 1..22: note = chemically synthesized
  source 1..22: mol_type = other DNA
atatcattttcttttctaacag

SEQ ID NO: 105018 - DNA, 22 bp, synthetic construct
  misc_feature 1..22: note = chemically synthesized
  source 1..22: mol_type = other DNA
tcttttctaacagtttcattaa

SEQ ID NO: 105019 - DNA, 22 bp, synthetic construct
  misc_feature 1..22: note = chemically synthesized
  source 1..22: mol_type = other DNA
cttttctaacagtttcattaac

SEQ ID NO: 105020 - DNA, 22 bp, synthetic construct
  misc_feature 1..22: note = chemically synthesized
  source 1..22: mol_type = other DNA
ttttctaacagtttcattaaca

SEQ ID NO: 105021 - DNA, 22 bp, synthetic construct
  misc_feature 1..22: note = chemically synthesized
  source 1..22: mol_type = other DNA
ttctaacagtttcattaacata

SEQ ID NO: 105022 - DNA, 22 bp, synthetic construct
  misc_feature 1..22: note = chemically synthesized
  source 1..22: mol_type = other DNA
tctaacagtttcattaacatat

SEQ ID NO: 105023 - DNA, 22 bp, synthetic construct
  misc_feature 1..22: note = chemically synthesized
  source 1..22: mol_type = other DNA
ctaacagtttcattaacatata

SEQ ID NO: 105024 - DNA, 22 bp, synthetic construct
  misc_feature 1..22: note = chemically synthesized
  source 1..22: mol_type = other DNA
taacagtttcattaacatatag

SEQ ID NO: 105025 - DNA, 22 bp, synthetic construct
  misc_feature 1..22: note = chemically synthesized
  source 1..22: mol_type = other DNA
acagtttcattaacatataggt

SEQ ID NO: 105026 - DNA, 22 bp, synthetic construct
  misc_feature 1..22: note = chemically synthesized
  source 1..22: mol_type = other DNA
cattaacatataggtaaagaca

SEQ ID NO: 105027 - DNA, 22 bp, synthetic construct
  misc_feature 1..22: note = chemically synthesized
  source 1..22: mol_type = other DNA
attaacatataggtaaagacag

SEQ ID NO: 105028 - DNA, 22 bp, synthetic construct
  misc_feature 1..22: note = chemically synthesized
  source 1..22: mol_type = other DNA
acatataggtaaagacaggata

SEQ ID NO: 105029 - DNA, 22 bp, synthetic construct
  misc_feature 1..22: note = chemically synthesized
  source 1..22: mol_type = other DNA
acatagtacagtgtcattaata

SEQ ID NO: 105030 - DNA, 22 bp, synthetic construct
  misc_feature 1..22: note = chemically synthesized
  source 1..22: mol_type = other DNA
ataggttaatcaggtcatgtgg

SEQ ID NO: 105031 - DNA, 22 bp, synthetic construct
  misc_feature 1..22: note = chemically synthesized
  source 1..22: mol_type = other DNA
atcaggtcatgtggtaaagtgg

SEQ ID NO: 105032 - DNA, 22 bp, synthetic construct
  misc_feature 1..22: note = chemically synthesized
  source 1..22: mol_type = other DNA
aataaggatattattttgtttt

SEQ ID NO: 105033 - DNA, 22 bp, synthetic construct
  misc_feature 1..22: note = chemically synthesized
  source 1..22: mol_type = other DNA
ttttgtttttagagaatttaaa

SEQ ID NO: 105034 - DNA, 22 bp, synthetic construct
  misc_feature 1..22: note = chemically synthesized
  source 1..22: mol_type = other DNA
tgtttttagagaatttaaagga

SEQ ID NO: 105035 - DNA, 22 bp, synthetic construct
  misc_feature 1..22: note = chemically synthesized
  source 1..22: mol_type = other DNA
gtttttagagaatttaaaggaa

SEQ ID NO: 105036 - DNA, 22 bp, synthetic construct
  misc_feature 1..22: note = chemically synthesized
  source 1..22: mol_type = other DNA
tttttagagaatttaaaggaag

SEQ ID NO: 105037 - DNA, 22 bp, synthetic construct
  misc_feature 1..22: note = chemically synthesized
  source 1..22: mol_type = other DNA
ttagagaatttaaaggaagctg

SEQ ID NO: 105038 - DNA, 22 bp, synthetic construct
  misc_feature 1..22: note = chemically synthesized
  source 1..22: mol_type = other DNA
tagagaatttaaaggaagctgt

SEQ ID NO: 105039 - DNA, 22 bp, synthetic construct
  misc_feature 1..22: note = chemically synthesized
  source 1..22: mol_type = other DNA
agagaatttaaaggaagctgtc

SEQ ID NO: 105040 - DNA, 22 bp, synthetic construct
  misc_feature 1..22: note = chemically synthesized
  source 1..22: mol_type = other DNA
gagaatttaaaggaagctgtcc

SEQ ID NO: 105041 - DNA, 22 bp, synthetic construct
  misc_feature 1..22: note = chemically synthesized
  source 1..22: mol_type = other DNA
aaaggaagctgtcctccttatt

SEQ ID NO: 105042 - DNA, 22 bp, synthetic construct
  misc_feature 1..22: note = chemically synthesized
  source 1..22: mol_type = other DNA
aaggaagctgtcctccttatta

SEQ ID NO: 105043 - DNA, 22 bp, synthetic construct
  misc_feature 1..22: note = chemically synthesized
  source 1..22: mol_type = other DNA
tcctccttattaaaaatatgac

SEQ ID NO: 105044 - DNA, 22 bp, synthetic construct
  misc_feature 1..22: note = chemically synthesized
  source 1..22: mol_type = other DNA
cttattaaaaatatgacagaag

SEQ ID NO: 105045 - DNA, 22 bp, synthetic construct
  misc_feature 1..22: note = chemically synthesized
  source 1..22: mol_type = other DNA
attaaaaatatgacagaagagt

SEQ ID NO: 105046 - DNA, 22 bp, synthetic construct
  misc_feature 1..22: note = chemically synthesized
  source 1..22: mol_type = other DNA
ttaaaaatatgacagaagagtg

SEQ ID NO: 105047 - DNA, 22 bp, synthetic construct
  misc_feature 1..22: note = chemically synthesized
  source 1..22: mol_type = other DNA
aaaatatgacagaagagtgata

SEQ ID NO: 105048 - DNA, 22 bp, synthetic construct
  misc_feature 1..22: note = chemically synthesized
  source 1..22: mol_type = other DNA
gtttggtttaatgaagtattgg

SEQ ID NO: 105049 - DNA, 22 bp, synthetic construct
  misc_feature 1..22: note = chemically synthesized
  source 1..22: mol_type = other DNA
ggtttaatgaagtattggcttg

SEQ ID NO: 105050 - DNA, 22 bp, synthetic construct
  misc_feature 1..22: note = chemically synthesized
  source 1..22: mol_type = other DNA
gtttaatgaagtattggcttgt

SEQ ID NO: 105051 - DNA, 22 bp, synthetic construct
  misc_feature 1..22: note = chemically synthesized
  source 1..22: mol_type = other DNA
aatgaagtattggcttgtgccc

SEQ ID NO: 105052 - DNA, 22 bp, synthetic construct
  misc_feature 1..22: note = chemically synthesized
  source 1..22: mol_type = other DNA
atgaagtattggcttgtgccct

SEQ ID NO: 105053 - DNA, 22 bp, synthetic construct
  misc_feature 1..22: note = chemically synthesized
  source 1..22: mol_type = other DNA
gcttgtgccctcagaagggact

SEQ ID NO: 105054 - DNA, 22 bp, synthetic construct
  misc_feature 1..22: note = chemically synthesized
  source 1..22: mol_type = other DNA
gtgccctcagaagggactgtgt

SEQ ID NO: 105055 - DNA, 22 bp, synthetic construct
  misc_feature 1..22: note = chemically synthesized
  source 1..22: mol_type = other DNA
tgccctcagaagggactgtgta

SEQ ID NO: 105056 - DNA, 22 bp, synthetic construct
  misc_feature 1..22: note = chemically synthesized
  source 1..22: mol_type = other DNA
agaagggactgtgtatctttta

SEQ ID NO: 105057 - DNA, 22 bp, synthetic construct
  misc_feature 1..22: note = chemically synthesized
  source 1..22: mol_type = other DNA
tgtatcttttatcatgaaagtt

SEQ ID NO: 105058 - DNA, 22 bp, synthetic construct
  misc_feature 1..22: note = chemically synthesized
  source 1..22: mol_type = other DNA
ttatcatgaaagttgatatttc

SEQ ID NO: 105059 - DNA, 22 bp, synthetic construct
  misc_feature 1..22: note = chemically synthesized
  source 1..22: mol_type = other DNA
tatcatgaaagttgatatttca

SEQ ID NO: 105060 - DNA, 22 bp, synthetic construct
  misc_feature 1..22: note = chemically synthesized
  source 1..22: mol_type = other DNA
atcatgaaagttgatatttcag

SEQ ID NO: 105061 - DNA, 22 bp, synthetic construct
  misc_feature 1..22: note = chemically synthesized
  source 1..22: mol_type = other DNA
tcatgaaagttgatatttcaga

SEQ ID NO: 105062 - DNA, 22 bp, synthetic construct
  misc_feature 1..22: note = chemically synthesized
  source 1..22: mol_type = other DNA
atatttcagagcactaataact

SEQ ID NO: 105063 - DNA, 22 bp, synthetic construct
  misc_feature 1..22: note = chemically synthesized
  source 1..22: mol_type = other DNA
cagagcactaataacttagttt

SEQ ID NO: 105064 - DNA, 22 bp, synthetic construct
  misc_feature 1..22: note = chemically synthesized
  source 1..22: mol_type = other DNA
agagcactaataacttagtttc

SEQ ID NO: 105065 - DNA, 22 bp, synthetic construct
  misc_feature 1..22: note = chemically synthesized
  source 1..22: mol_type = other DNA
ataacttagtttccttctatgt

SEQ ID NO: 105066 - DNA, 22 bp, synthetic construct
  misc_feature 1..22: note = chemically synthesized
  source 1..22: mol_type = other DNA
agtttccttctatgtaaaagat

SEQ ID NO: 105067 - DNA, 22 bp, synthetic construct
  misc_feature 1..22: note = chemically synthesized
  source 1..22: mol_type = other DNA
gtttccttctatgtaaaagatg

SEQ ID NO: 105068 - DNA, 22 bp, synthetic construct
  misc_feature 1..22: note = chemically synthesized
  source 1..22: mol_type = other DNA
ccttctatgtaaaagatgaaaa

SEQ ID NO: 105069 - DNA, 22 bp, synthetic construct
  misc_feature 1..22: note = chemically synthesized
  source 1..22: mol_type = other DNA
cttctatgtaaaagatgaaaag

SEQ ID NO: 105070 - DNA, 22 bp, synthetic construct
  misc_feature 1..22: note = chemically synthesized
  source 1..22: mol_type = other DNA
ctatgtaaaagatgaaaagtct

SEQ ID NO: 105071 - DNA, 22 bp, synthetic construct
  misc_feature 1..22: note = chemically synthesized
  source 1..22: mol_type = other DNA
tatgtaaaagatgaaaagtctc

SEQ ID NO: 105072 - DNA, 22 bp, synthetic construct
  misc_feature 1..22: note = chemically synthesized
  source 1..22: mol_type = other DNA
tgtaaaagatgaaaagtctcaa

SEQ ID NO: 105073 - DNA, 22 bp, synthetic construct
  misc_feature 1..22: note = chemically synthesized
  source 1..22: mol_type = other DNA
aatgaaataaaatgctagtgga

SEQ ID NO: 105074 - DNA, 22 bp, synthetic construct
  misc_feature 1..22: note = chemically synthesized
  source 1..22: mol_type = other DNA
gtggattcagatcaccctctta

SEQ ID NO: 105075 - DNA, 22 bp, synthetic construct
  misc_feature 1..22: note = chemically synthesized
  source 1..22: mol_type = other DNA
agatcaccctcttagaatcaat

SEQ ID NO: 105076 - DNA, 22 bp, synthetic construct
  misc_feature 1..22: note = chemically synthesized
  source 1..22: mol_type = other DNA
ttagaatcaatttgaaaaatat

SEQ ID NO: 105077 - DNA, 22 bp, synthetic construct
  misc_feature 1..22: note = chemically synthesized
  source 1..22: mol_type = other DNA
agaatcaatttgaaaaatattt

SEQ ID NO: 105078 - DNA, 22 bp, synthetic construct
  misc_feature 1..22: note = chemically synthesized
  source 1..22: mol_type = other DNA
gaatcaatttgaaaaatatttt

SEQ ID NO: 105079 - DNA, 22 bp, synthetic construct
  misc_feature 1..22: note = chemically synthesized
  source 1..22: mol_type = other DNA
gaaaaatattttctttaaacaa

SEQ ID NO: 105080 - DNA, 22 bp, synthetic construct
  misc_feature 1..22: note = chemically synthesized
  source 1..22: mol_type = other DNA
aaaaatattttctttaaacaac

SEQ ID NO: 105081 - DNA, 22 bp, synthetic construct
  misc_feature 1..22: note = chemically synthesized
  source 1..22: mol_type = other DNA
tctttaaacaaccatgaaggca

SEQ ID NO: 105082 - DNA, 22 bp, synthetic construct
  misc_feature 1..22: note = chemically synthesized
  source 1..22: mol_type = other DNA
ctttaaacaaccatgaaggcac

SEQ ID NO: 105083 - DNA, 22 bp, synthetic construct
  misc_feature 1..22: note = chemically synthesized
  source 1..22: mol_type = other DNA
tttaaacaaccatgaaggcacc

SEQ ID NO: 105084 - DNA, 22 bp, synthetic construct
  misc_feature 1..22: note = chemically synthesized
  source 1..22: mol_type = other DNA
taaacaaccatgaaggcaccaa

SEQ ID NO: 105085 - DNA, 22 bp, synthetic construct
  misc_feature 1..22: note = chemically synthesized
  source 1..22: mol_type = other DNA
aaacaaccatgaaggcaccaag

SEQ ID NO: 105086 - DNA, 22 bp, synthetic construct
  misc_feature 1..22: note = chemically synthesized
  source 1..22: mol_type = other DNA
aacaaccatgaaggcaccaaga

SEQ ID NO: 105087 - DNA, 22 bp, synthetic construct
  misc_feature 1..22: note = chemically synthesized
  source 1..22: mol_type = other DNA
aacgtctaaaccagtttaagga

SEQ ID NO: 105088 - DNA, 22 bp, synthetic construct
  misc_feature 1..22: note = chemically synthesized
  source 1..22: mol_type = other DNA
aaccagtttaaggacaacgtca

SEQ ID NO: 105089 - DNA, 22 bp, synthetic construct
  misc_feature 1..22: note = chemically synthesized
  source 1..22: mol_type = other DNA
aaggacaacgtcattaataata

SEQ ID NO: 105090 - DNA, 22 bp, synthetic construct
  misc_feature 1..22: note = chemically synthesized
  source 1..22: mol_type = other DNA
aggacaacgtcattaataataa

SEQ ID NO: 105091 - DNA, 22 bp, synthetic construct
  misc_feature 1..22: note = chemically synthesized
  source 1..22: mol_type = other DNA
ataataaacatatttcccaata

SEQ ID NO: 105092 - DNA, 22 bp, synthetic construct
  misc_feature 1..22: note = chemically synthesized
  source 1..22: mol_type = other DNA
cccaataatttgggcttctttc

SEQ ID NO: 105093 - DNA, 22 bp, synthetic construct
  misc_feature 1..22: note = chemically synthesized
  source 1..22: mol_type = other DNA
ccaataatttgggcttctttca

SEQ ID NO: 105094 - DNA, 22 bp, synthetic construct
  misc_feature 1..22: note = chemically synthesized
  source 1..22: mol_type = other DNA
gggcttctttcatcttggaaac

SEQ ID NO: 105095 - DNA, 22 bp, synthetic construct
  misc_feature 1..22: note = chemically synthesized
  source 1..22: mol_type = other DNA
ggcttctttcatcttggaaaca

SEQ ID NO: 105096 - DNA, 22 bp, synthetic construct
  misc_feature 1..22: note = chemically synthesized
  source 1..22: mol_type = other DNA
ctttcatcttggaaacaacact

SEQ ID NO: 105097 - DNA, 22 bp, synthetic construct
  misc_feature 1..22: note = chemically synthesized
  source 1..22: mol_type = other DNA
tttcatcttggaaacaacactg

SEQ ID NO: 105098 - DNA, 22 bp, synthetic construct
  misc_feature 1..22: note = chemically synthesized
  source 1..22: mol_type = other DNA
tcatcttggaaacaacactgct

SEQ ID NO: 105099 - DNA, 22 bp, synthetic construct
  misc_feature 1..22: note = chemically synthesized
  source 1..22: mol_type = other DNA
catcttggaaacaacactgctt

SEQ ID NO: 105100 - DNA, 22 bp, synthetic construct
  misc_feature 1..22: note = chemically synthesized
  source 1..22: mol_type = other DNA
atcttggaaacaacactgctta

SEQ ID NO: 105101 - DNA, 22 bp, synthetic construct
  misc_feature 1..22: note = chemically synthesized
  source 1..22: mol_type = other DNA
ggaaacaacactgcttatccaa

SEQ ID NO: 105102 - DNA, 22 bp, synthetic construct
  misc_feature 1..22: note = chemically synthesized
  source 1..22: mol_type = other DNA
gaaacaacactgcttatccaaa

SEQ ID NO: 105103 - DNA, 22 bp, synthetic construct
  misc_feature 1..22: note = chemically synthesized
  source 1..22: mol_type = other DNA
cttatccaaagtaagcacctcc

SEQ ID NO: 105104 - DNA, 22 bp, synthetic construct
  misc_feature 1..22: note = chemically synthesized
  source 1..22: mol_type = other DNA
atccaaagtaagcacctcctta

SEQ ID NO: 105105 - DNA, 22 bp, synthetic construct
  misc_feature 1..22: note = chemically synthesized
  source 1..22: mol_type = other DNA
tccaaagtaagcacctccttat

SEQ ID NO: 105106 - DNA, 22 bp, synthetic construct
  misc_feature 1..22: note = chemically synthesized
  source 1..22: mol_type = other DNA
cttatacctattcagtgaggct

SEQ ID NO: 105107 - DNA, 22 bp, synthetic construct
  misc_feature 1..22: note = chemically synthesized
  source 1..22: mol_type = other DNA
atacctattcagtgaggctgca

SEQ ID NO: 105108 - DNA, 22 bp, synthetic construct
  misc_feature 1..22: note = chemically synthesized
  source 1..22: mol_type = other DNA
tacctattcagtgaggctgcaa

SEQ ID NO: 105109 - DNA, 22 bp, synthetic construct
  misc_feature 1..22: note = chemically synthesized
  source 1..22: mol_type = other DNA
ttcagtgaggctgcaatattgc

SEQ ID NO: 105110 - DNA, 22 bp, synthetic construct
  misc_feature 1..22: note = chemically synthesized
  source 1..22: mol_type = other DNA
agtgaggctgcaatattgccat

SEQ ID NO: 105111 - DNA, 22 bp, synthetic construct
  misc_feature 1..22: note = chemically synthesized
  source 1..22: mol_type = other DNA
caatattgccatatcctcaacc

SEQ ID NO: 105112 - DNA, 22 bp, synthetic construct
  misc_feature 1..22: note = chemically synthesized
  source 1..22: mol_type = other DNA
ccatatcctcaacccaccatat

SEQ ID NO: 105113 - DNA, 22 bp, synthetic construct
  misc_feature 1..22: note = chemically synthesized
  source 1..22: mol_type = other DNA
aacccaccatatacacaaaagg

SEQ ID NO: 105114 - DNA, 22 bp, synthetic construct
  misc_feature 1..22: note = chemically synthesized
  source 1..22: mol_type = other DNA
ctccatcatggtttgaaacttc

SEQ ID NO: 105115 - DNA, 22 bp, synthetic construct
  misc_feature 1..22: note = chemically synthesized
  source 1..22: mol_type = other DNA
catcatggtttgaaacttcctt

SEQ ID NO: 105116 - DNA, 22 bp, synthetic construct
  misc_feature 1..22: note = chemically synthesized
  source 1..22: mol_type = other DNA
gaaacttccttatttctcacac

SEQ ID NO: 105117 - DNA, 22 bp, synthetic construct
  misc_feature 1..22: note = chemically synthesized
  source 1..22: mol_type = other DNA
aaacttccttatttctcacaca

SEQ ID NO: 105118 - DNA, 22 bp, synthetic construct
  misc_feature 1..22: note = chemically synthesized
  source 1..22: mol_type = other DNA
ccttatttctcacacatgtggc

SEQ ID NO: 105119 - DNA, 22 bp, synthetic construct
  misc_feature 1..22: note = chemically synthesized
  source 1..22: mol_type = other DNA
cttatttctcacacatgtggca

SEQ ID NO: 105120 - DNA, 22 bp, synthetic construct
  misc_feature 1..22: note = chemically synthesized
  source 1..22: mol_type = other DNA
atttctcacacatgtggcaggt

SEQ ID NO: 105121 - DNA, 22 bp, synthetic construct
  misc_feature 1..22: note = chemically synthesized
  source 1..22: mol_type = other DNA
tttctcacacatgtggcaggta

SEQ ID NO: 105122 - DNA, 22 bp, synthetic construct
  misc_feature 1..22: note = chemically synthesized
  source 1..22: mol_type = other DNA
ctcacacatgtggcaggtaatt

SEQ ID NO: 105123 - DNA, 22 bp, synthetic construct
  misc_feature 1..22: note = chemically synthesized
  source 1..22: mol_type = other DNA
tcacacatgtggcaggtaatta

SEQ ID NO: 105124 - DNA, 22 bp, synthetic construct
  misc_feature 1..22: note = chemically synthesized
  source 1..22: mol_type = other DNA
acacatgtggcaggtaattaaa

SEQ ID NO: 105125 - DNA, 22 bp, synthetic construct
  misc_feature 1..22: note = chemically synthesized
  source 1..22: mol_type = other DNA
aactatggcttgaagtcctggc

SEQ ID NO: 105126 - DNA, 22 bp, synthetic construct
  misc_feature 1..22: note = chemically synthesized
  source 1..22: mol_type = other DNA
tggcttgaagtcctggccttgg

SEQ ID NO: 105127 - DNA, 22 bp, synthetic construct
  misc_feature 1..22: note = chemically synthesized
  source 1..22: mol_type = other DNA
gaagtcctggccttggccagtt

SEQ ID NO: 105128 - DNA, 22 bp, synthetic construct
  misc_feature 1..22: note = chemically synthesized
  source 1..22: mol_type = other DNA
aagtcctggccttggccagtta

SEQ ID NO: 105129 - DNA, 22 bp, synthetic construct
  misc_feature 1..22: note = chemically synthesized
  source 1..22: mol_type = other DNA
gccttggccagttaaactaaga

SEQ ID NO: 105130 - DNA, 22 bp, synthetic construct
  misc_feature 1..22: note = chemically synthesized
  source 1..22: mol_type = other DNA
ggccagttaaactaagagtcct

SEQ ID NO: 105131 - DNA, 22 bp, synthetic construct
  misc_feature 1..22: note = chemically synthesized
  source 1..22: mol_type = other DNA
gccagttaaactaagagtcctt

SEQ ID NO: 105132 - DNA, 22 bp, synthetic construct
  misc_feature 1..22: note = chemically synthesized
  source 1..22: mol_type = other DNA
aactaagagtccttccatcaaa

SEQ ID NO: 105133 - DNA, 22 bp, synthetic construct
  misc_feature 1..22: note = chemically synthesized
  source 1..22: mol_type = other DNA
agagtccttccatcaaatgtat

SEQ ID NO: 105134 - DNA, 22 bp, synthetic construct
  misc_feature 1..22: note = chemically synthesized
  source 1..22: mol_type = other DNA
ccatcaaatgtatcactgtaaa

SEQ ID NO: 105135 - DNA, 22 bp, synthetic construct
  misc_feature 1..22: note = chemically synthesized
  source 1..22: mol_type = other DNA
catcaaatgtatcactgtaaaa

SEQ ID NO: 105136 - DNA, 22 bp, synthetic construct
  misc_feature 1..22: note = chemically synthesized
  source 1..22: mol_type = other DNA
taaaacagatagcctatcctca

SEQ ID NO: 105137 - DNA, 22 bp, synthetic construct
  misc_feature 1..22: note = chemically synthesized
  source 1..22: mol_type = other DNA
tcctcaaaatttagatatcaga

SEQ ID NO: 105138 - DNA, 22 bp, synthetic construct
  misc_feature 1..22: note = chemically synthesized
  source 1..22: mol_type = other DNA
aaaatttagatatcagatgggg

SEQ ID NO: 105139 - DNA, 22 bp, synthetic construct
  misc_feature 1..22: note = chemically synthesized
  source 1..22: mol_type = other DNA
agatatcagatggggatataat

SEQ ID NO: 105140 - DNA, 22 bp, synthetic construct
  misc_feature 1..22: note = chemically synthesized
  source 1..22: mol_type = other DNA
gatatcagatggggatataata

SEQ ID NO: 105141 - DNA, 22 bp, synthetic construct
  misc_feature 1..22: note = chemically synthesized
  source 1..22: mol_type = other DNA
gtgattaccacagcaacttgtg

SEQ ID NO: 105142 - DNA, 22 bp, synthetic construct
  misc_feature 1..22: note = chemically synthesized
  source 1..22: mol_type = other DNA
tgattaccacagcaacttgtga

SEQ ID NO: 105143 - DNA, 22 bp, synthetic construct
  misc_feature 1..22: note = chemically synthesized
  source 1..22: mol_type = other DNA
ccacagcaacttgtgatgtccc

SEQ ID NO: 105144 - DNA, 22 bp, synthetic construct
  misc_feature 1..22: note = chemically synthesized
  source 1..22: mol_type = other DNA
gtgatgtcccacagcttctgtt

SEQ ID NO: 105145 - DNA, 22 bp, synthetic construct
  misc_feature 1..22: note = chemically synthesized
  source 1..22: mol_type = other DNA
tgatgtcccacagcttctgttc

SEQ ID NO: 105146 - DNA, 22 bp, synthetic construct
  misc_feature 1..22: note = chemically synthesized
  source 1..22: mol_type = other DNA
ctgttctacaaagatgggaaac

SEQ ID NO: 105147 - DNA, 22 bp, synthetic construct
  misc_feature 1..22: note = chemically synthesized
  source 1..22: mol_type = other DNA
tgttctacaaagatgggaaaca

SEQ ID NO: 105148 - DNA, 22 bp, synthetic construct
  misc_feature 1..22: note = chemically synthesized
  source 1..22: mol_type = other DNA
ttctacaaagatgggaaacaaa

SEQ ID NO: 105149 - DNA, 22 bp, synthetic construct
  misc_feature 1..22: note = chemically synthesized
  source 1..22: mol_type = other DNA
tacaaagatgggaaacaaaggc

SEQ ID NO: 105150 - DNA, 22 bp, synthetic construct
  misc_feature 1..22: note = chemically synthesized
  source 1..22: mol_type = other DNA
caaagatgggaaacaaaggcag

SEQ ID NO: 105151 - DNA, 22 bp, synthetic construct
  misc_feature 1..22: note = chemically synthesized
  source 1..22: mol_type = other DNA
tcctcagctacaagaggttctg

SEQ ID NO: 105152 - DNA, 22 bp, synthetic construct
  misc_feature 1..22: note = chemically synthesized
  source 1..22: mol_type = other DNA
cctcagctacaagaggttctgc

SEQ ID NO: 105153 - DNA, 22 bp, synthetic construct
  misc_feature 1..22: note = chemically synthesized
  source 1..22: mol_type = other DNA
ctcagctacaagaggttctgca

SEQ ID NO: 105154 - DNA, 22 bp, synthetic construct
  misc_feature 1..22: note = chemically synthesized
  source 1..22: mol_type = other DNA
agctacaagaggttctgcatca

SEQ ID NO: 105155 - DNA, 22 bp, synthetic construct
  misc_feature 1..22: note = chemically synthesized
  source 1..22: mol_type = other DNA
caagaggttctgcatcaagata

SEQ ID NO: 105156 - DNA, 22 bp, synthetic construct
  misc_feature 1..22: note = chemically synthesized
  source 1..22: mol_type = other DNA
tgcatcaagatagcaaatcaag

SEQ ID NO: 105157 - DNA, 22 bp, synthetic construct
  misc_feature 1..22: note = chemically synthesized
  source 1..22: mol_type = other DNA
catcaagatagcaaatcaagat

SEQ ID NO: 105158 - DNA, 22 bp, synthetic construct
  misc_feature 1..22: note = chemically synthesized
  source 1..22: mol_type = other DNA
tccgaaatgagatttttccatt

SEQ ID NO: 105159 - DNA, 22 bp, synthetic construct
  misc_feature 1..22: note = chemically synthesized
  source 1..22: mol_type = other DNA
ttccattaagatgcctagatgt

SEQ ID NO: 105160 - DNA, 22 bp, synthetic construct
  misc_feature 1..22: note = chemically synthesized
  source 1..22: mol_type = other DNA
tccattaagatgcctagatgta

SEQ ID NO: 105161 - DNA, 22 bp, synthetic construct
  misc_feature 1..22: note = chemically synthesized
  source 1..22: mol_type = other DNA
ccattaagatgcctagatgtat

SEQ ID NO: 105162 - DNA, 22 bp, synthetic construct
  misc_feature 1..22: note = chemically synthesized
  source 1..22: mol_type = other DNA
cattaagatgcctagatgtatt

SEQ ID NO: 105163 - DNA, 22 bp, synthetic construct
  misc_feature 1..22: note = chemically synthesized
  source 1..22: mol_type = other DNA
agatgcctagatgtattataga

SEQ ID NO: 105164 - DNA, 22 bp, synthetic construct
  misc_feature 1..22: note = chemically synthesized
  source 1..22: mol_type = other DNA
gatgtattatagacctcatggt

SEQ ID NO: 105165 - DNA, 22 bp, synthetic construct
  misc_feature 1..22: note = chemically synthesized
  source 1..22: mol_type = other DNA
tagacctcatggtcacatataa

SEQ ID NO: 105166 - DNA, 22 bp, synthetic construct
  misc_feature 1..22: note = chemically synthesized
  source 1..22: mol_type = other DNA
atggtcacatataaggaacaga

SEQ ID NO: 105167 - DNA, 22 bp, synthetic construct
  misc_feature 1..22: note = chemically synthesized
  source 1..22: mol_type = other DNA
tggtagataactgacttttagg

SEQ ID NO: 105168 - DNA, 22 bp, synthetic construct
  misc_feature 1..22: note = chemically synthesized
  source 1..22: mol_type = other DNA
ggtagataactgacttttagga

SEQ ID NO: 105169 - DNA, 22 bp, synthetic construct
  misc_feature 1..22: note = chemically synthesized
  source 1..22: mol_type = other DNA
gtagataactgacttttaggat

SEQ ID NO: 105170 - DNA, 22 bp, synthetic construct
  misc_feature 1..22: note = chemically synthesized
  source 1..22: mol_type = other DNA
acttttaggatttgagtttata

SEQ ID NO: 105171 - DNA, 22 bp, synthetic construct
  misc_feature 1..22: note = chemically synthesized
  source 1..22: mol_type = other DNA
ttaggatttgagtttatattca

SEQ ID NO: 105172 - DNA, 22 bp, synthetic construct
  misc_feature 1..22: note = chemically synthesized
  source 1..22: mol_type = other DNA
taggatttgagtttatattcag

SEQ ID NO: 105173 - DNA, 22 bp, synthetic construct
  misc_feature 1..22: note = chemically synthesized
  source 1..22: mol_type = other DNA
aggatttgagtttatattcagc

SEQ ID NO: 105174 - DNA, 22 bp, synthetic construct
  misc_feature 1..22: note = chemically synthesized
  source 1..22: mol_type = other DNA
ggatttgagtttatattcagca

SEQ ID NO: 105175 - DNA, 22 bp, synthetic construct
  misc_feature 1..22: note = chemically synthesized
  source 1..22: mol_type = other DNA
gagtttatattcagcatcaata

SEQ ID NO: 105176 - DNA, 22 bp, synthetic construct
  misc_feature 1..22: note = chemically synthesized
  source 1..22: mol_type = other DNA
agtttatattcagcatcaataa

SEQ ID NO: 105177 - DNA, 22 bp, synthetic construct
  misc_feature 1..22: note = chemically synthesized
  source 1..22: mol_type = other DNA
atattcagcatcaataacttga

SEQ ID NO: 105178 - DNA, 22 bp, synthetic construct
  misc_feature 1..22: note = chemically synthesized
  source 1..22: mol_type = other DNA
tattcagcatcaataacttgaa

SEQ ID NO: 105179 - DNA, 22 bp, synthetic construct
  misc_feature 1..22: note = chemically synthesized
  source 1..22: mol_type = other DNA
agcatcaataacttgaacatta

SEQ ID NO: 105180 - DNA, 22 bp, synthetic construct
  misc_feature 1..22: note = chemically synthesized
  source 1..22: mol_type = other DNA
gaacattatactctgagatagg

SEQ ID NO: 105181 - DNA, 22 bp, synthetic construct
  misc_feature 1..22: note = chemically synthesized
  source 1..22: mol_type = other DNA
aacattatactctgagataggt

SEQ ID NO: 105182 - DNA, 22 bp, synthetic construct
  misc_feature 1..22: note = chemically synthesized
  source 1..22: mol_type = other DNA
tactctgagataggttttcccc

SEQ ID NO: 105183 - DNA, 22 bp, synthetic construct
  misc_feature 1..22: note = chemically synthesized
  source 1..22: mol_type = other DNA
tgagataggttttccccttttg

SEQ ID NO: 105184 - DNA, 22 bp, synthetic construct
  misc_feature 1..22: note = chemically synthesized
  source 1..22: mol_type = other DNA
agataggttttccccttttgaa

SEQ ID NO: 105185 - DNA, 22 bp, synthetic construct
  misc_feature 1..22: note = chemically synthesized
  source 1..22: mol_type = other DNA
tccccttttgaaatttgtggat

SEQ ID NO: 105186 - DNA, 22 bp, synthetic construct
  misc_feature 1..22: note = chemically synthesized
  source 1..22: mol_type = other DNA
ccccttttgaaatttgtggatg

SEQ ID NO: 105187 - DNA, 22 bp, synthetic construct
  misc_feature 1..22: note = chemically synthesized
  source 1..22: mol_type = other DNA
cccttttgaaatttgtggatga

SEQ ID NO: 105188 - DNA, 22 bp, synthetic construct
  misc_feature 1..22: note = chemically synthesized
  source 1..22: mol_type = other DNA
ttgaaatttgtggatgaaaatc

SEQ ID NO: 105189 - DNA, 22 bp, synthetic construct
  misc_feature 1..22: note = chemically synthesized
  source 1..22: mol_type = other DNA
tgaaatttgtggatgaaaatcc

SEQ ID NO: 105190 - DNA, 22 bp, synthetic construct
  misc_feature 1..22: note = chemically synthesized
  source 1..22: mol_type = other DNA
gaaatttgtggatgaaaatcct

SEQ ID NO: 105191 - DNA, 22 bp, synthetic construct
  misc_feature 1..22: note = chemically synthesized
  source 1..22: mol_type = other DNA
aaatttgtggatgaaaatcctg

SEQ ID NO: 105192 - DNA, 22 bp, synthetic construct
  misc_feature 1..22: note = chemically synthesized
  source 1..22: mol_type = other DNA
gtggatgaaaatcctgtttcac

SEQ ID NO: 105193 - DNA, 22 bp, synthetic construct
  misc_feature 1..22: note = chemically synthesized
  source 1..22: mol_type = other DNA
tggatgaaaatcctgtttcaca

SEQ ID NO: 105194 - DNA, 22 bp, synthetic construct
  misc_feature 1..22: note = chemically synthesized
  source 1..22: mol_type = other DNA
tttcacaattaaatcagtctaa

SEQ ID NO: 105195 - DNA, 22 bp, synthetic construct
  misc_feature 1..22: note = chemically synthesized
  source 1..22: mol_type = other DNA
cacaattaaatcagtctaaaag

SEQ ID NO: 105196 - DNA, 22 bp, synthetic construct
  misc_feature 1..22: note = chemically synthesized
  source 1..22: mol_type = other DNA
acaattaaatcagtctaaaaga

SEQ ID NO: 105197 - DNA, 22 bp, synthetic construct
  misc_feature 1..22: note = chemically synthesized
  source 1..22: mol_type = other DNA
aatcagtctaaaagaagctttt

SEQ ID NO: 105198 - DNA, 22 bp, synthetic construct
  misc_feature 1..22: note = chemically synthesized
  source 1..22: mol_type = other DNA
aaagaagcttttagtacacagt

SEQ ID NO: 105199 - DNA, 22 bp, synthetic construct
  misc_feature 1..22: note = chemically synthesized
  source 1..22: mol_type = other DNA
ttagtacacagtcacacaaaaa

SEQ ID NO: 105200 - DNA, 22 bp, synthetic construct
  misc_feature 1..22: note = chemically synthesized
  source 1..22: mol_type = other DNA
tagtacacagtcacacaaaaac

SEQ ID NO: 105201 - DNA, 22 bp, synthetic construct
  misc_feature 1..22: note = chemically synthesized
  source 1..22: mol_type = other DNA
agtacacagtcacacaaaaact

SEQ ID NO: 105202 - DNA, 22 bp, synthetic construct
  misc_feature 1..22: note = chemically synthesized
  source 1..22: mol_type = other DNA
gtacacagtcacacaaaaactc

SEQ ID NO: 105203 - DNA, 22 bp, synthetic construct
  misc_feature 1..22: note = chemically synthesized
  source 1..22: mol_type = other DNA
ctcccaccacaattttttagtc

SEQ ID NO: 105204 - DNA, 22 bp, synthetic construct
  misc_feature 1..22: note = chemically synthesized
  source 1..22: mol_type = other DNA
ccaccacaattttttagtcatt

SEQ ID NO: 105205 - DNA, 22 bp, synthetic construct
  misc_feature 1..22: note = chemically synthesized
  source 1..22: mol_type = other DNA
tttagtcattggatgaattgaa

SEQ ID NO: 105206 - DNA, 22 bp, synthetic construct
  misc_feature 1..22: note = chemically synthesized
  source 1..22: mol_type = other DNA
ttagtcattggatgaattgaaa

SEQ ID NO: 105207 - DNA, 22 bp, synthetic construct
  misc_feature 1..22: note = chemically synthesized
  source 1..22: mol_type = other DNA
tagtcattggatgaattgaaat

SEQ ID NO: 105208 - DNA, 22 bp, synthetic construct
  misc_feature 1..22: note = chemically synthesized
  source 1..22: mol_type = other DNA
agtcattggatgaattgaaatc

SEQ ID NO: 105209 - DNA, 22 bp, synthetic construct
  misc_feature 1..22: note = chemically synthesized
  source 1..22: mol_type = other DNA
gtcattggatgaattgaaatcc

SEQ ID NO: 105210 - DNA, 22 bp, synthetic construct
  misc_feature 1..22: note = chemically synthesized
  source 1..22: mol_type = other DNA
gatgaattgaaatccatttctc

SEQ ID NO: 105211 - DNA, 22 bp, synthetic construct
  misc_feature 1..22: note = chemically synthesized
  source 1..22: mol_type = other DNA
aaatccatttctctcaacattg

SEQ ID NO: 105212 - DNA, 22 bp, synthetic construct
  misc_feature 1..22: note = chemically synthesized
  source 1..22: mol_type = other DNA
ctctcaacattgttggtcttcc

SEQ ID NO: 105213 - DNA, 22 bp, synthetic construct
  misc_feature 1..22: note = chemically synthesized
  source 1..22: mol_type = other DNA
tctcaacattgttggtcttcct

SEQ ID NO: 105214 - DNA, 22 bp, synthetic construct
  misc_feature 1..22: note = chemically synthesized
  source 1..22: mol_type = other DNA
tcaacattgttggtcttcctaa

SEQ ID NO: 105215 - DNA, 22 bp, synthetic construct
  misc_feature 1..22: note = chemically synthesized
  source 1..22: mol_type = other DNA
aacattgttggtcttcctaata

SEQ ID NO: 105216 - DNA, 22 bp, synthetic construct
  misc_feature 1..22: note = chemically synthesized
  source 1..22: mol_type = other DNA
ttggtcttcctaatatagagag

SEQ ID NO: 105217 - DNA, 22 bp, synthetic construct
  misc_feature 1..22: note = chemically synthesized
  source 1..22: mol_type = other DNA
gtcttcctaatatagagagttt

SEQ ID NO: 105218 - DNA, 22 bp, synthetic construct
  misc_feature 1..22: note = chemically synthesized
  source 1..22: mol_type = other DNA
cctaatatagagagtttacagt

SEQ ID NO: 105219 - DNA, 22 bp, synthetic construct
  misc_feature 1..22: note = chemically synthesized
  source 1..22: mol_type = other DNA
ctaatatagagagtttacagta

SEQ ID NO: 105220 - DNA, 22 bp, synthetic construct
  misc_feature 1..22: note = chemically synthesized
  source 1..22: mol_type = other DNA
atatagagagtttacagtagat

SEQ ID NO: 105221 - DNA, 22 bp, synthetic construct
  misc_feature 1..22: note = chemically synthesized
  source 1..22: mol_type = other DNA
acagtagatgtcagagaaagta

SEQ ID NO: 105222 - DNA, 22 bp, synthetic construct
  misc_feature 1..22: note = chemically synthesized
  source 1..22: mol_type = other DNA
cagtagatgtcagagaaagtat

SEQ ID NO: 105223 - DNA, 22 bp, synthetic construct
  misc_feature 1..22: note = chemically synthesized
  source 1..22: mol_type = other DNA
atggcaaaagaatcaccatttc

SEQ ID NO: 105224 - DNA, 22 bp, synthetic construct
  misc_feature 1..22: note = chemically synthesized
  source 1..22: mol_type = other DNA
tggcaaaagaatcaccatttct

SEQ ID NO: 105225 - DNA, 22 bp, synthetic construct
  misc_feature 1..22: note = chemically synthesized
  source 1..22: mol_type = other DNA
ctaatttttccctctgaacata

SEQ ID NO: 105226 - DNA, 22 bp, synthetic construct
  misc_feature 1..22: note = chemically synthesized
  source 1..22: mol_type = other DNA
taatttttccctctgaacatat

SEQ ID NO: 105227 - DNA, 22 bp, synthetic construct
  misc_feature 1..22: note = chemically synthesized
  source 1..22: mol_type = other DNA
atttttccctctgaacatatat

SEQ ID NO: 105228 - DNA, 22 bp, synthetic construct
  misc_feature 1..22: note = chemically synthesized
  source 1..22: mol_type = other DNA
ttccctctgaacatatataaag

SEQ ID NO: 105229 - DNA, 22 bp, synthetic construct
  misc_feature 1..22: note = chemically synthesized
  source 1..22: mol_type = other DNA
tccctctgaacatatataaagt

SEQ ID NO: 105230 - DNA, 22 bp, synthetic construct
  misc_feature 1..22: note = chemically synthesized
  source 1..22: mol_type = other DNA
ccctctgaacatatataaagta

SEQ ID NO: 105231 - DNA, 22 bp, synthetic construct
  misc_feature 1..22: note = chemically synthesized
  source 1..22: mol_type = other DNA
cctctgaacatatataaagtat

SEQ ID NO: 105232 - DNA, 22 bp, synthetic construct
  misc_feature 1..22: note = chemically synthesized
  source 1..22: mol_type = other DNA
tgaacatatataaagtatatat

SEQ ID NO: 105233 - DNA, 22 bp, synthetic construct
  misc_feature 1..22: note = chemically synthesized
  source 1..22: mol_type = other DNA
aacatatataaagtatatataa

SEQ ID NO: 105234 - DNA, 22 bp, synthetic construct
  misc_feature 1..22: note = chemically synthesized
  source 1..22: mol_type = other DNA
gtgaagtaatgatgtctcatat

SEQ ID NO: 105235 - DNA, 22 bp, synthetic construct
  misc_feature 1..22: note = chemically synthesized
  source 1..22: mol_type = other DNA
tgaagtaatgatgtctcatatt

SEQ ID NO: 105236 - DNA, 22 bp, synthetic construct
  misc_feature 1..22: note = chemically synthesized
  source 1..22: mol_type = other DNA
atatttttcattctagaatggc

SEQ ID NO: 105237 - DNA, 22 bp, synthetic construct
  misc_feature 1..22: note = chemically synthesized
  source 1..22: mol_type = other DNA
ttcattctagaatggctatatt

SEQ ID NO: 105238 - DNA, 22 bp, synthetic construct
  misc_feature 1..22: note = chemically synthesized
  source 1..22: mol_type = other DNA
tcattctagaatggctatattt

SEQ ID NO: 105239 - DNA, 22 bp, synthetic construct
  misc_feature 1..22: note = chemically synthesized
  source 1..22: mol_type = other DNA
cattctagaatggctatatttt

SEQ ID NO: 105240 - DNA, 22 bp, synthetic construct
  misc_feature 1..22: note = chemically synthesized
  source 1..22: mol_type = other DNA
attctagaatggctatattttc

SEQ ID NO: 105241 - DNA, 22 bp, synthetic construct
  misc_feature 1..22: note = chemically synthesized
  source 1..22: mol_type = other DNA
tagaatggctatattttctatt

SEQ ID NO: 105242 - DNA, 22 bp, synthetic construct
  misc_feature 1..22: note = chemically synthesized
  source 1..22: mol_type = other DNA
gaatggctatattttctatttt

SEQ ID NO: 105243 - DNA, 22 bp, synthetic construct
  misc_feature 1..22: note = chemically synthesized
  source 1..22: mol_type = other DNA
tattttctatttttgaatagag

SEQ ID NO: 105244 - DNA, 22 bp, synthetic construct
  misc_feature 1..22: note = chemically synthesized
  source 1..22: mol_type = other DNA
tctatttttgaatagagccttg

SEQ ID NO: 105245 - DNA, 22 bp, synthetic construct
  misc_feature 1..22: note = chemically synthesized
  source 1..22: mol_type = other DNA
ctatttttgaatagagccttga

SEQ ID NO: 105246 - DNA, 22 bp, synthetic construct
  misc_feature 1..22: note = chemically synthesized
  source 1..22: mol_type = other DNA
tatttttgaatagagccttgac

SEQ ID NO: 105247 - DNA, 22 bp, synthetic construct
  misc_feature 1..22: note = chemically synthesized
  source 1..22: mol_type = other DNA
tttttgaatagagccttgaccc

SEQ ID NO: 105248 - DNA, 22 bp, synthetic construct
  misc_feature 1..22: note = chemically synthesized
  source 1..22: mol_type = other DNA
ttgaatagagccttgacccttc

SEQ ID NO: 105249 - DNA, 22 bp, synthetic construct
  misc_feature 1..22: note = chemically synthesized
  source 1..22: mol_type = other DNA
tgaatagagccttgacccttcc

SEQ ID NO: 105250 - DNA, 22 bp, synthetic construct
  misc_feature 1..22: note = chemically synthesized
  source 1..22: mol_type = other DNA
gaatagagccttgacccttcct

SEQ ID NO: 105251 - DNA, 22 bp, synthetic construct
  misc_feature 1..22: note = chemically synthesized
  source 1..22: mol_type = other DNA
aatagagccttgacccttccta

SEQ ID NO: 105252 - DNA, 22 bp, synthetic construct
  misc_feature 1..22: note = chemically synthesized
  source 1..22: mol_type = other DNA
gacccttcctattattaggcca

SEQ ID NO: 105253 - DNA, 22 bp, synthetic construct
  misc_feature 1..22: note = chemically synthesized
  source 1..22: mol_type = other DNA
acccttcctattattaggccaa

SEQ ID NO: 105254 - DNA, 22 bp, synthetic construct
  misc_feature 1..22: note = chemically synthesized
  source 1..22: mol_type = other DNA
cctattattaggccaagggaaa

SEQ ID NO: 105255 - DNA, 22 bp, synthetic construct
  misc_feature 1..22: note = chemically synthesized
  source 1..22: mol_type = other DNA
ctattattaggccaagggaaaa

SEQ ID NO: 105256 - DNA, 22 bp, synthetic construct
  misc_feature 1..22: note = chemically synthesized
  source 1..22: mol_type = other DNA
ttattaggccaagggaaaagta

SEQ ID NO: 105257 - DNA, 22 bp, synthetic construct
  misc_feature 1..22: note = chemically synthesized
  source 1..22: mol_type = other DNA
ttaggccaagggaaaagtatgt

SEQ ID NO: 105258 - DNA, 22 bp, synthetic construct
  misc_feature 1..22: note = chemically synthesized
  source 1..22: mol_type = other DNA
ggccaagggaaaagtatgttaa

SEQ ID NO: 105259 - DNA, 22 bp, synthetic construct
  misc_feature 1..22: note = chemically synthesized
  source 1..22: mol_type = other DNA
aaatcatctgaagagcaaacat

SEQ ID NO: 105260 - DNA, 22 bp, synthetic construct
  misc_feature 1..22: note = chemically synthesized
  source 1..22: mol_type = other DNA
aagagcaaacatactcttaaaa

SEQ ID NO: 105261 - DNA, 22 bp, synthetic construct
  misc_feature 1..22: note = chemically synthesized
  source 1..22: mol_type = other DNA
ttaaaaactcactttttacttt

SEQ ID NO: 105262 - DNA, 22 bp, synthetic construct
  misc_feature 1..22: note = chemically synthesized
  source 1..22: mol_type = other DNA
aaaaactcactttttacttttt

SEQ ID NO: 105263 - DNA, 22 bp, synthetic construct
  misc_feature 1..22: note = chemically synthesized
  source 1..22: mol_type = other DNA
aaaactcactttttactttttt

SEQ ID NO: 105264 - DNA, 22 bp, synthetic construct
  misc_feature 1..22: note = chemically synthesized
  source 1..22: mol_type = other DNA
actttttacttttttacgagct

SEQ ID NO: 105265 - DNA, 22 bp, synthetic construct
  misc_feature 1..22: note = chemically synthesized
  source 1..22: mol_type = other DNA
tttacttttttacgagctgaca

SEQ ID NO: 105266 - DNA, 22 bp, synthetic construct
  misc_feature 1..22: note = chemically synthesized
  source 1..22: mol_type = other DNA
ttacttttttacgagctgacaa

SEQ ID NO: 105267 - DNA, 22 bp, synthetic construct
  misc_feature 1..22: note = chemically synthesized
  source 1..22: mol_type = other DNA
tacttttttacgagctgacaag

SEQ ID NO: 105268 - DNA, 22 bp, synthetic construct
  misc_feature 1..22: note = chemically synthesized
  source 1..22: mol_type = other DNA
acttttttacgagctgacaaga

SEQ ID NO: 105269 - DNA, 22 bp, synthetic construct
  misc_feature 1..22: note = chemically synthesized
  source 1..22: mol_type = other DNA
cttttttacgagctgacaagaa

SEQ ID NO: 105270 - DNA, 22 bp, synthetic construct
  misc_feature 1..22: note = chemically synthesized
  source 1..22: mol_type = other DNA
ttttacgagctgacaagaagct

SEQ ID NO: 105271 - DNA, 22 bp, synthetic construct
  misc_feature 1..22: note = chemically synthesized
  source 1..22: mol_type = other DNA
tttacgagctgacaagaagctt

SEQ ID NO: 105272 - DNA, 22 bp, synthetic construct
  misc_feature 1..22: note = chemically synthesized
  source 1..22: mol_type = other DNA
ttacgagctgacaagaagcttg

SEQ ID NO: 105273 - DNA, 22 bp, synthetic construct
  misc_feature 1..22: note = chemically synthesized
  source 1..22: mol_type = other DNA
tacgagctgacaagaagcttgt

SEQ ID NO: 105274 - DNA, 22 bp, synthetic construct
  misc_feature 1..22: note = chemically synthesized
  source 1..22: mol_type = other DNA
acgagctgacaagaagcttgtc

SEQ ID NO: 105275 - DNA, 22 bp, synthetic construct
  misc_feature 1..22: note = chemically synthesized
  source 1..22: mol_type = other DNA
cgagctgacaagaagcttgtct

SEQ ID NO: 105276 - DNA, 22 bp, synthetic construct
  misc_feature 1..22: note = chemically synthesized
  source 1..22: mol_type = other DNA
acaagaagcttgtctaggtttt

SEQ ID NO: 105277 - DNA, 22 bp, synthetic construct
  misc_feature 1..22: note = chemically synthesized
  source 1..22: mol_type = other DNA
gtctaggtttttccttctaaga

SEQ ID NO: 105278 - DNA, 22 bp, synthetic construct
  misc_feature 1..22: note = chemically synthesized
  source 1..22: mol_type = other DNA
tctaggtttttccttctaagat

SEQ ID NO: 105279 - DNA, 22 bp, synthetic construct
  misc_feature 1..22: note = chemically synthesized
  source 1..22: mol_type = other DNA
ggtttttccttctaagattttt

SEQ ID NO: 105280 - DNA, 22 bp, synthetic construct
  misc_feature 1..22: note = chemically synthesized
  source 1..22: mol_type = other DNA
ttccttctaagatttttttggg

SEQ ID NO: 105281 - DNA, 22 bp, synthetic construct
  misc_feature 1..22: note = chemically synthesized
  source 1..22: mol_type = other DNA
tccttctaagatttttttgggc

SEQ ID NO: 105282 - DNA, 22 bp, synthetic construct
  misc_feature 1..22: note = chemically synthesized
  source 1..22: mol_type = other DNA
ccttctaagatttttttgggca

SEQ ID NO: 105283 - DNA, 22 bp, synthetic construct
  misc_feature 1..22: note = chemically synthesized
  source 1..22: mol_type = other DNA
cttctaagatttttttgggcaa

SEQ ID NO: 105284 - DNA, 22 bp, synthetic construct
  misc_feature 1..22: note = chemically synthesized
  source 1..22: mol_type = other DNA
ctaagatttttttgggcaaaag

SEQ ID NO: 105285 - DNA, 22 bp, synthetic construct
  misc_feature 1..22: note = chemically synthesized
  source 1..22: mol_type = other DNA
taagatttttttgggcaaaaga

SEQ ID NO: 105286 - DNA, 22 bp, synthetic construct
  misc_feature 1..22: note = chemically synthesized
  source 1..22: mol_type = other DNA
agatttttttgggcaaaagaat

SEQ ID NO: 105287 - DNA, 22 bp, synthetic construct
  misc_feature 1..22: note = chemically synthesized
  source 1..22: mol_type = other DNA
ttttgggcaaaagaatatttat

SEQ ID NO: 105288 - DNA, 22 bp, synthetic construct
  misc_feature 1..22: note = chemically synthesized
  source 1..22: mol_type = other DNA
tttgggcaaaagaatatttata

SEQ ID NO: 105289 - DNA, 22 bp, synthetic construct
  misc_feature 1..22: note = chemically synthesized
  source 1..22: mol_type = other DNA
ttgggcaaaagaatatttatag

SEQ ID NO: 105290 - DNA, 22 bp, synthetic construct
  misc_feature 1..22: note = chemically synthesized
  source 1..22: mol_type = other DNA
tgggcaaaagaatatttataga

SEQ ID NO: 105291 - DNA, 22 bp, synthetic construct
  misc_feature 1..22: note = chemically synthesized
  source 1..22: mol_type = other DNA
gggcaaaagaatatttatagaa

SEQ ID NO: 105292 - DNA, 22 bp, synthetic construct
  misc_feature 1..22: note = chemically synthesized
  source 1..22: mol_type = other DNA
ggcaaaagaatatttatagaag

SEQ ID NO: 105293 - DNA, 22 bp, synthetic construct
  misc_feature 1..22: note = chemically synthesized
  source 1..22: mol_type = other DNA
atagaagaatgaggtaaagaaa

SEQ ID NO: 105294 - DNA, 22 bp, synthetic construct
  misc_feature 1..22: note = chemically synthesized
  source 1..22: mol_type = other DNA
tagaagaatgaggtaaagaaat

SEQ ID NO: 105295 - DNA, 22 bp, synthetic construct
  misc_feature 1..22: note = chemically synthesized
  source 1..22: mol_type = other DNA
ttataaaatccagacatcctgc

SEQ ID NO: 105296 - DNA, 22 bp, synthetic construct
  misc_feature 1..22: note = chemically synthesized
  source 1..22: mol_type = other DNA
tataaaatccagacatcctgca

SEQ ID NO: 105297 - DNA, 22 bp, synthetic construct
  misc_feature 1..22: note = chemically synthesized
  source 1..22: mol_type = other DNA
ataaaatccagacatcctgcaa

SEQ ID NO: 105298 - DNA, 22 bp, synthetic construct
  misc_feature 1..22: note = chemically synthesized
  source 1..22: mol_type = other DNA
taaaatccagacatcctgcaag

SEQ ID NO: 105299 - DNA, 22 bp, synthetic construct
  misc_feature 1..22: note = chemically synthesized
  source 1..22: mol_type = other DNA
caaggaatgtattgaaaattaa

SEQ ID NO: 105300 - DNA, 22 bp, synthetic construct
  misc_feature 1..22: note = chemically synthesized
  source 1..22: mol_type = other DNA
aaaattaaaaagctcttattga

SEQ ID NO: 105301 - DNA, 22 bp, synthetic construct
  misc_feature 1..22: note = chemically synthesized
  source 1..22: mol_type = other DNA
aaaagctcttattgaaatactc

SEQ ID NO: 105302 - DNA, 22 bp, synthetic construct
  misc_feature 1..22: note = chemically synthesized
  source 1..22: mol_type = other DNA
ttattgaaatactctgtaagtg

SEQ ID NO: 105303 - DNA, 22 bp, synthetic construct
  misc_feature 1..22: note = chemically synthesized
  source 1..22: mol_type = other DNA
attgaaatactctgtaagtgac

SEQ ID NO: 105304 - DNA, 22 bp, synthetic construct
  misc_feature 1..22: note = chemically synthesized
  source 1..22: mol_type = other DNA
ttgaaatactctgtaagtgact

SEQ ID NO: 105305 - DNA, 22 bp, synthetic construct
  misc_feature 1..22: note = chemically synthesized
  source 1..22: mol_type = other DNA
aaatactctgtaagtgacttac

SEQ ID NO: 105306 - DNA, 22 bp, synthetic construct
  misc_feature 1..22: note = chemically synthesized
  source 1..22: mol_type = other DNA
tgtaagtgacttacgactgtat

SEQ ID NO: 105307 - DNA, 22 bp, synthetic construct
  misc_feature 1..22: note = chemically synthesized
  source 1..22: mol_type = other DNA
taagtgacttacgactgtattt

SEQ ID NO: 105308 - DNA, 22 bp, synthetic construct
  misc_feature 1..22: note = chemically synthesized
  source 1..22: mol_type = other DNA
acgactgtatttagaaaatatt

SEQ ID NO: 105309 - DNA, 22 bp, synthetic construct
  misc_feature 1..22: note = chemically synthesized
  source 1..22: mol_type = other DNA
cgactgtatttagaaaatatta

SEQ ID NO: 105310 - DNA, 22 bp, synthetic construct
  misc_feature 1..22: note = chemically synthesized
  source 1..22: mol_type = other DNA
tatttagaaaatattaaatgca

SEQ ID NO: 105311 - DNA, 22 bp, synthetic construct
  misc_feature 1..22: note = chemically synthesized
  source 1..22: mol_type = other DNA
agaaaatattaaatgcaaatca

SEQ ID NO: 105312 - DNA, 22 bp, synthetic construct
  misc_feature 1..22: note = chemically synthesized
  source 1..22: mol_type = other DNA
gaaaatattaaatgcaaatcat

SEQ ID NO: 105313 - DNA, 22 bp, synthetic construct
  misc_feature 1..22: note = chemically synthesized
  source 1..22: mol_type = other DNA
aatgcaaatcatggccctagag

SEQ ID NO: 105314 - DNA, 22 bp, synthetic construct
  misc_feature 1..22: note = chemically synthesized
  source 1..22: mol_type = other DNA
gagagtaccctaactcagggta

SEQ ID NO: 105315 - DNA, 22 bp, synthetic construct
  misc_feature 1..22: note = chemically synthesized
  source 1..22: mol_type = other DNA
actcagggtagaggacagttaa

SEQ ID NO: 105316 - DNA, 22 bp, synthetic construct
  misc_feature 1..22: note = chemically synthesized
  source 1..22: mol_type = other DNA
agggtagaggacagttaaaaga

SEQ ID NO: 105317 - DNA, 22 bp, synthetic construct
  misc_feature 1..22: note = chemically synthesized
  source 1..22: mol_type = other DNA
aaagataaccaacacttactta

SEQ ID NO: 105318 - DNA, 22 bp, synthetic construct
  misc_feature 1..22: note = chemically synthesized
  source 1..22: mol_type = other DNA
acttatttaaaagtaaatttaa

SEQ ID NO: 105319 - DNA, 22 bp, synthetic construct
  misc_feature 1..22: note = chemically synthesized
  source 1..22: mol_type = other DNA
cttatttaaaagtaaatttaaa

SEQ ID NO: 105320 - DNA, 22 bp, synthetic construct
  misc_feature 1..22: note = chemically synthesized
  source 1..22: mol_type = other DNA
atttaaaagtaaatttaaaatg

SEQ ID NO: 105321 - DNA, 22 bp, synthetic construct
  misc_feature 1..22: note = chemically synthesized
  source 1..22: mol_type = other DNA
tttaaaagtaaatttaaaatgt

SEQ ID NO: 105322 - DNA, 22 bp, synthetic construct
  misc_feature 1..22: note = chemically synthesized
  source 1..22: mol_type = other DNA
aaaagtaaatttaaaatgttag

SEQ ID NO: 105323 - DNA, 22 bp, synthetic construct
  misc_feature 1..22: note = chemically synthesized
  source 1..22: mol_type = other DNA
aaagtaaatttaaaatgttagt

SEQ ID NO: 105324 - DNA, 22 bp, synthetic construct
  misc_feature 1..22: note = chemically synthesized
  source 1..22: mol_type = other DNA
aaaatgttagtttcttatcact

SEQ ID NO: 105325 - DNA, 22 bp, synthetic construct
  misc_feature 1..22: note = chemically synthesized
  source 1..22: mol_type = other DNA
aaatgttagtttcttatcacta

SEQ ID NO: 105326 - DNA, 22 bp, synthetic construct
  misc_feature 1..22: note = chemically synthesized
  source 1..22: mol_type = other DNA
gtttcttatcactatatttgcc

SEQ ID NO: 105327 - DNA, 22 bp, synthetic construct
  misc_feature 1..22: note = chemically synthesized
  source 1..22: mol_type = other DNA
cttatcactatatttgccatga

SEQ ID NO: 105328 - DNA, 22 bp, synthetic construct
  misc_feature 1..22: note = chemically synthesized
  source 1..22: mol_type = other DNA
ttatcactatatttgccatgag

SEQ ID NO: 105329 - DNA, 22 bp, synthetic construct
  misc_feature 1..22: note = chemically synthesized
  source 1..22: mol_type = other DNA
atcactatatttgccatgagaa

SEQ ID NO: 105330 - DNA, 22 bp, synthetic construct
  misc_feature 1..22: note = chemically synthesized
  source 1..22: mol_type = other DNA
tcactatatttgccatgagaat

SEQ ID NO: 105331 - DNA, 22 bp, synthetic construct
  misc_feature 1..22: note = chemically synthesized
  source 1..22: mol_type = other DNA
tatttgccatgagaataatgaa

SEQ ID NO: 105332 - DNA, 22 bp, synthetic construct
  misc_feature 1..22: note = chemically synthesized
  source 1..22: mol_type = other DNA
gccatgagaataatgaaaattt

SEQ ID NO: 105333 - DNA, 22 bp, synthetic construct
  misc_feature 1..22: note = chemically synthesized
  source 1..22: mol_type = other DNA
ccatgagaataatgaaaatttt

SEQ ID NO: 105334 - DNA, 22 bp, synthetic construct
  misc_feature 1..22: note = chemically synthesized
  source 1..22: mol_type = other DNA
taaataagaatttatttctaga

SEQ ID NO: 105335 - DNA, 22 bp, synthetic construct
  misc_feature 1..22: note = chemically synthesized
  source 1..22: mol_type = other DNA
aaataagaatttatttctagag

SEQ ID NO: 105336 - DNA, 22 bp, synthetic construct
  misc_feature 1..22: note = chemically synthesized
  source 1..22: mol_type = other DNA
aataagaatttatttctagaga

SEQ ID NO: 105337 - DNA, 22 bp, synthetic construct
  misc_feature 1..22: note = chemically synthesized
  source 1..22: mol_type = other DNA
atttctagagaatgatgatcaa

SEQ ID NO: 105338 - DNA, 22 bp, synthetic construct
  misc_feature 1..22: note = chemically synthesized
  source 1..22: mol_type = other DNA
tttctagagaatgatgatcaac

SEQ ID NO: 105339 - DNA, 22 bp, synthetic construct
  misc_feature 1..22: note = chemically synthesized
  source 1..22: mol_type = other DNA
ctagagaatgatgatcaacttt

SEQ ID NO: 105340 - DNA, 22 bp, synthetic construct
  misc_feature 1..22: note = chemically synthesized
  source 1..22: mol_type = other DNA
tagagaatgatgatcaactttt

SEQ ID NO: 105341 - DNA, 22 bp, synthetic construct
  misc_feature 1..22: note = chemically synthesized
  source 1..22: mol_type = other DNA
gagaatgatgatcaactttttt

SEQ ID NO: 105342 - DNA, 22 bp, synthetic construct
  misc_feature 1..22: note = chemically synthesized
  source 1..22: mol_type = other DNA
ttttttttacacttgtgtgcat

SEQ ID NO: 105343 - DNA, 22 bp, synthetic construct
  misc_feature 1..22: note = chemically synthesized
  source 1..22: mol_type = other DNA
tttttttacacttgtgtgcatt

SEQ ID NO: 105344 - DNA, 22 bp, synthetic construct
  misc_feature 1..22: note = chemically synthesized
  source 1..22: mol_type = other DNA
ttttttacacttgtgtgcatta

SEQ ID NO: 105345 - DNA, 22 bp, synthetic construct
  misc_feature 1..22: note = chemically synthesized
  source 1..22: mol_type = other DNA
tttttacacttgtgtgcattag

SEQ ID NO: 105346 - DNA, 22 bp, synthetic construct
  misc_feature 1..22: note = chemically synthesized
  source 1..22: mol_type = other DNA
ttttacacttgtgtgcattagc

SEQ ID NO: 105347 - DNA, 22 bp, synthetic construct
  misc_feature 1..22: note = chemically synthesized
  source 1..22: mol_type = other DNA
tttacacttgtgtgcattagcc

SEQ ID NO: 105348 - DNA, 22 bp, synthetic construct
  misc_feature 1..22: note = chemically synthesized
  source 1..22: mol_type = other DNA
ttacacttgtgtgcattagcct

SEQ ID NO: 105349 - DNA, 22 bp, synthetic construct
  misc_feature 1..22: note = chemically synthesized
  source 1..22: mol_type = other DNA
tacacttgtgtgcattagccta

SEQ ID NO: 105350 - DNA, 22 bp, synthetic construct
  misc_feature 1..22: note = chemically synthesized
  source 1..22: mol_type = other DNA
acacttgtgtgcattagcctat

SEQ ID NO: 105351 - DNA, 22 bp, synthetic construct
  misc_feature 1..22: note = chemically synthesized
  source 1..22: mol_type = other DNA
cacttgtgtgcattagcctatg

SEQ ID NO: 105352 - DNA, 22 bp, synthetic construct
  misc_feature 1..22: note = chemically synthesized
  source 1..22: mol_type = other DNA
gtgtgcattagcctatgcaaac

SEQ ID NO: 105353 - DNA, 22 bp, synthetic construct
  misc_feature 1..22: note = chemically synthesized
  source 1..22: mol_type = other DNA
tgtgcattagcctatgcaaaca

SEQ ID NO: 105354 - DNA, 22 bp, synthetic construct
  misc_feature 1..22: note = chemically synthesized
  source 1..22: mol_type = other DNA
gcctatgcaaacacataaacat

SEQ ID NO: 105355 - DNA, 22 bp, synthetic construct
  misc_feature 1..22: note = chemically synthesized
  source 1..22: mol_type = other DNA
tgcaaacacataaacatgtatg

SEQ ID NO: 105356 - DNA, 22 bp, synthetic construct
  misc_feature 1..22: note = chemically synthesized
  source 1..22: mol_type = other DNA
aggcaaaagtttttcatagaga

SEQ ID NO: 105357 - DNA, 22 bp, synthetic construct
  misc_feature 1..22: note = chemically synthesized
  source 1..22: mol_type = other DNA
ttcatagagattatatgttctg

SEQ ID NO: 105358 - DNA, 22 bp, synthetic construct
  misc_feature 1..22: note = chemically synthesized
  source 1..22: mol_type = other DNA
tcatagagattatatgttctgc

SEQ ID NO: 105359 - DNA, 22 bp, synthetic construct
  misc_feature 1..22: note = chemically synthesized
  source 1..22: mol_type = other DNA
catagagattatatgttctgcc

SEQ ID NO: 105360 - DNA, 22 bp, synthetic construct
  misc_feature 1..22: note = chemically synthesized
  source 1..22: mol_type = other DNA
atagagattatatgttctgcct

SEQ ID NO: 105361 - DNA, 22 bp, synthetic construct
  misc_feature 1..22: note = chemically synthesized
  source 1..22: mol_type = other DNA
tatgttctgccttttcctcaaa

SEQ ID NO: 105362 - DNA, 22 bp, synthetic construct
  misc_feature 1..22: note = chemically synthesized
  source 1..22: mol_type = other DNA
tgccttttcctcaaatttcact

SEQ ID NO: 105363 - DNA, 22 bp, synthetic construct
  misc_feature 1..22: note = chemically synthesized
  source 1..22: mol_type = other DNA
ccttttcctcaaatttcactga

SEQ ID NO: 105364 - DNA, 22 bp, synthetic construct
  misc_feature 1..22: note = chemically synthesized
  source 1..22: mol_type = other DNA
ttcctcaaatttcactgaggtg

SEQ ID NO: 105365 - DNA, 22 bp, synthetic construct
  misc_feature 1..22: note = chemically synthesized
  source 1..22: mol_type = other DNA
tcctcaaatttcactgaggtgg

SEQ ID NO: 105366 - DNA, 22 bp, synthetic construct
  misc_feature 1..22: note = chemically synthesized
  source 1..22: mol_type = other DNA
cctcaaatttcactgaggtggc

SEQ ID NO: 105367 - DNA, 22 bp, synthetic construct
  misc_feature 1..22: note = chemically synthesized
  source 1..22: mol_type = other DNA
ctcaaatttcactgaggtggct

SEQ ID NO: 105368 - DNA, 22 bp, synthetic construct
  misc_feature 1..22: note = chemically synthesized
  source 1..22: mol_type = other DNA
aaatttcactgaggtggctaat

SEQ ID NO: 105369 - DNA, 22 bp, synthetic construct
  misc_feature 1..22: note = chemically synthesized
  source 1..22: mol_type = other DNA
cactgaggtggctaatttcagg

SEQ ID NO: 105370 - DNA, 22 bp, synthetic construct
  misc_feature 1..22: note = chemically synthesized
  source 1..22: mol_type = other DNA
actgaggtggctaatttcaggt

SEQ ID NO: 105371 - DNA, 22 bp, synthetic construct
  misc_feature 1..22: note = chemically synthesized
  source 1..22: mol_type = other DNA
aggtggctaatttcaggtgcat

SEQ ID NO: 105372 - DNA, 22 bp, synthetic construct
  misc_feature 1..22: note = chemically synthesized
  source 1..22: mol_type = other DNA
atttcaggtgcatttgaaagaa

SEQ ID NO: 105373 - DNA, 22 bp, synthetic construct
  misc_feature 1..22: note = chemically synthesized
  source 1..22: mol_type = other DNA
caggtgcatttgaaagaagaat

SEQ ID NO: 105374 - DNA, 22 bp, synthetic construct
  misc_feature 1..22: note = chemically synthesized
  source 1..22: mol_type = other DNA
aggtgcatttgaaagaagaatt

SEQ ID NO: 105375 - DNA, 22 bp, synthetic construct
  misc_feature 1..22: note = chemically synthesized
  source 1..22: mol_type = other DNA
gaaagaagaatttaaatataga

SEQ ID NO: 105376 - DNA, 22 bp, synthetic construct
  misc_feature 1..22: note = chemically synthesized
  source 1..22: mol_type = other DNA
aaagaagaatttaaatatagac

SEQ ID NO: 105377 - DNA, 22 bp, synthetic construct
  misc_feature 1..22: note = chemically synthesized
  source 1..22: mol_type = other DNA
aaatatagactttttcagttcc

SEQ ID NO: 105378 - DNA, 22 bp, synthetic construct
  misc_feature 1..22: note = chemically synthesized
  source 1..22: mol_type = other DNA
aatatagactttttcagttcca

SEQ ID NO: 105379 - DNA, 22 bp, synthetic construct
  misc_feature 1..22: note = chemically synthesized
  source 1..22: mol_type = other DNA
tttcagttccatatggtctatt

SEQ ID NO: 105380 - DNA, 22 bp, synthetic construct
  misc_feature 1..22: note = chemically synthesized
  source 1..22: mol_type = other DNA
ttcagttccatatggtctattc

SEQ ID NO: 105381 - DNA, 22 bp, synthetic construct
  misc_feature 1..22: note = chemically synthesized
  source 1..22: mol_type = other DNA
tcagttccatatggtctattca

SEQ ID NO: 105382 - DNA, 22 bp, synthetic construct
  misc_feature 1..22: note = chemically synthesized
  source 1..22: mol_type = other DNA
cagttccatatggtctattcag

SEQ ID NO: 105383 - DNA, 22 bp, synthetic construct
  misc_feature 1..22: note = chemically synthesized
  source 1..22: mol_type = other DNA
agttccatatggtctattcagt

SEQ ID NO: 105384 - DNA, 22 bp, synthetic construct
  misc_feature 1..22: note = chemically synthesized
  source 1..22: mol_type = other DNA
catatggtctattcagtgttct

SEQ ID NO: 105385 - DNA, 22 bp, synthetic construct
  misc_feature 1..22: note = chemically synthesized
  source 1..22: mol_type = other DNA
ttcagtgttctgtcaccagact

SEQ ID NO: 105386 - DNA, 22 bp, synthetic construct
  misc_feature 1..22: note = chemically synthesized
  source 1..22: mol_type = other DNA
agtgttctgtcaccagacttct

SEQ ID NO: 105387 - DNA, 22 bp, synthetic construct
  misc_feature 1..22: note = chemically synthesized
  source 1..22: mol_type = other DNA
tgtcaccagacttctcctaaga

SEQ ID NO: 105388 - DNA, 22 bp, synthetic construct
  misc_feature 1..22: note = chemically synthesized
  source 1..22: mol_type = other DNA
tcaccagacttctcctaagata

SEQ ID NO: 105389 - DNA, 22 bp, synthetic construct
  misc_feature 1..22: note = chemically synthesized
  source 1..22: mol_type = other DNA
ctcctaagatatgcccccaacc

SEQ ID NO: 105390 - DNA, 22 bp, synthetic construct
  misc_feature 1..22: note = chemically synthesized
  source 1..22: mol_type = other DNA
tcctaagatatgcccccaaccc

SEQ ID NO: 105391 - DNA, 22 bp, synthetic construct
  misc_feature 1..22: note = chemically synthesized
  source 1..22: mol_type = other DNA
ctaagatatgcccccaacccta

SEQ ID NO: 105392 - DNA, 22 bp, synthetic construct
  misc_feature 1..22: note = chemically synthesized
  source 1..22: mol_type = other DNA
agatatgcccccaaccctatgg

SEQ ID NO: 105393 - DNA, 22 bp, synthetic construct
  misc_feature 1..22: note = chemically synthesized
  source 1..22: mol_type = other DNA
tggtaaagtacttaagtccttg

SEQ ID NO: 105394 - DNA, 22 bp, synthetic construct
  misc_feature 1..22: note = chemically synthesized
  source 1..22: mol_type = other DNA
aagtccttgtgagtgacaacat

SEQ ID NO: 105395 - DNA, 22 bp, synthetic construct
  misc_feature 1..22: note = chemically synthesized
  source 1..22: mol_type = other DNA
agtccttgtgagtgacaacatt

SEQ ID NO: 105396 - DNA, 22 bp, synthetic construct
  misc_feature 1..22: note = chemically synthesized
  source 1..22: mol_type = other DNA
gtgagtgacaacattgtcttcc

SEQ ID NO: 105397 - DNA, 22 bp, synthetic construct
  misc_feature 1..22: note = chemically synthesized
  source 1..22: mol_type = other DNA
tgagtgacaacattgtcttcca

SEQ ID NO: 105398 - DNA, 22 bp, synthetic construct
  misc_feature 1..22: note = chemically synthesized
  source 1..22: mol_type = other DNA
tcttccagtatacccttgctct

SEQ ID NO: 105399 - DNA, 22 bp, synthetic construct
  misc_feature 1..22: note = chemically synthesized
  source 1..22: mol_type = other DNA
ccagtatacccttgctctttgc

SEQ ID NO: 105400 - DNA, 22 bp, synthetic construct
  misc_feature 1..22: note = chemically synthesized
  source 1..22: mol_type = other DNA
cagtatacccttgctctttgct

SEQ ID NO: 105401 - DNA, 22 bp, synthetic construct
  misc_feature 1..22: note = chemically synthesized
  source 1..22: mol_type = other DNA
gctctttgctaagaaagaactc

SEQ ID NO: 105402 - DNA, 22 bp, synthetic construct
  misc_feature 1..22: note = chemically synthesized
  source 1..22: mol_type = other DNA
ctctttgctaagaaagaactcc

SEQ ID NO: 105403 - DNA, 22 bp, synthetic construct
  misc_feature 1..22: note = chemically synthesized
  source 1..22: mol_type = other DNA
tttgctaagaaagaactccagg

SEQ ID NO: 105404 - DNA, 22 bp, synthetic construct
  misc_feature 1..22: note = chemically synthesized
  source 1..22: mol_type = other DNA
tgctaagaaagaactccaggct

SEQ ID NO: 105405 - DNA, 22 bp, synthetic construct
  misc_feature 1..22: note = chemically synthesized
  source 1..22: mol_type = other DNA
gctaagaaagaactccaggctt

SEQ ID NO: 105406 - DNA, 22 bp, synthetic construct
  misc_feature 1..22: note = chemically synthesized
  source 1..22: mol_type = other DNA
ctaagaaagaactccaggcttt

SEQ ID NO: 105407 - DNA, 22 bp, synthetic construct
  misc_feature 1..22: note = chemically synthesized
  source 1..22: mol_type = other DNA
agaaagaactccaggctttcat

SEQ ID NO: 105408 - DNA, 22 bp, synthetic construct
  misc_feature 1..22: note = chemically synthesized
  source 1..22: mol_type = other DNA
caggctttcatttttcattctg

SEQ ID NO: 105409 - DNA, 22 bp, synthetic construct
  misc_feature 1..22: note = chemically synthesized
  source 1..22: mol_type = other DNA
tcatttttcattctggcttcat

SEQ ID NO: 105410 - DNA, 22 bp, synthetic construct
  misc_feature 1..22: note = chemically synthesized
  source 1..22: mol_type = other DNA
catttttcattctggcttcatt

SEQ ID NO: 105411 - DNA, 22 bp, synthetic construct
  misc_feature 1..22: note = chemically synthesized
  source 1..22: mol_type = other DNA
atttttcattctggcttcattt

SEQ ID NO: 105412 - DNA, 22 bp, synthetic construct
  misc_feature 1..22: note = chemically synthesized
  source 1..22: mol_type = other DNA
ttcattctggcttcatttttat

SEQ ID NO: 105413 - DNA, 22 bp, synthetic construct
  misc_feature 1..22: note = chemically synthesized
  source 1..22: mol_type = other DNA
tcattctggcttcatttttatg

SEQ ID NO: 105414 - DNA, 22 bp, synthetic construct
  misc_feature 1..22: note = chemically synthesized
  source 1..22: mol_type = other DNA
cattctggcttcatttttatgt

SEQ ID NO: 105415 - DNA, 22 bp, synthetic construct
  misc_feature 1..22: note = chemically synthesized
  source 1..22: mol_type = other DNA
attctggcttcatttttatgtc

SEQ ID NO: 105416 - DNA, 22 bp, synthetic construct
  misc_feature 1..22: note = chemically synthesized
  source 1..22: mol_type = other DNA
tggcttcatttttatgtctgtg

SEQ ID NO: 105417 - DNA, 22 bp, synthetic construct
  misc_feature 1..22: note = chemically synthesized
  source 1..22: mol_type = other DNA
gcttcatttttatgtctgtgtc

SEQ ID NO: 105418 - DNA, 22 bp, synthetic construct
  misc_feature 1..22: note = chemically synthesized
  source 1..22: mol_type = other DNA
catttttatgtctgtgtctgat

SEQ ID NO: 105419 - DNA, 22 bp, synthetic construct
  misc_feature 1..22: note = chemically synthesized
  source 1..22: mol_type = other DNA
atttttatgtctgtgtctgatt

SEQ ID NO: 105420 - DNA, 22 bp, synthetic construct
  misc_feature 1..22: note = chemically synthesized
  source 1..22: mol_type = other DNA
ttatgtctgtgtctgattctcc

SEQ ID NO: 105421 - DNA, 22 bp, synthetic construct
  misc_feature 1..22: note = chemically synthesized
  source 1..22: mol_type = other DNA
tatgtctgtgtctgattctcca

SEQ ID NO: 105422 - DNA, 22 bp, synthetic construct
  misc_feature 1..22: note = chemically synthesized
  source 1..22: mol_type = other DNA
atgtctgtgtctgattctccag

SEQ ID NO: 105423 - DNA, 22 bp, synthetic construct
  misc_feature 1..22: note = chemically synthesized
  source 1..22: mol_type = other DNA
tgtctgtgtctgattctccaga

SEQ ID NO: 105424 - DNA, 22 bp, synthetic construct
  misc_feature 1..22: note = chemically synthesized
  source 1..22: mol_type = other DNA
tgtctgattctccagatccgag

SEQ ID NO: 105425 - DNA, 22 bp, synthetic construct
  misc_feature 1..22: note = chemically synthesized
  source 1..22: mol_type = other DNA
attctccagatccgagtttaac

SEQ ID NO: 105426 - DNA, 22 bp, synthetic construct
  misc_feature 1..22: note = chemically synthesized
  source 1..22: mol_type = other DNA
tccagatccgagtttaactact

SEQ ID NO: 105427 - DNA, 22 bp, synthetic construct
  misc_feature 1..22: note = chemically synthesized
  source 1..22: mol_type = other DNA
cagatccgagtttaactactaa

SEQ ID NO: 105428 - DNA, 22 bp, synthetic construct
  misc_feature 1..22: note = chemically synthesized
  source 1..22: mol_type = other DNA
aactactaaacctatgtttaga

SEQ ID NO: 105429 - DNA, 22 bp, synthetic construct
  misc_feature 1..22: note = chemically synthesized
  source 1..22: mol_type = other DNA
actactaaacctatgtttagat

SEQ ID NO: 105430 - DNA, 22 bp, synthetic construct
  misc_feature 1..22: note = chemically synthesized
  source 1..22: mol_type = other DNA
ctaaacctatgtttagataaaa

SEQ ID NO: 105431 - DNA, 22 bp, synthetic construct
  misc_feature 1..22: note = chemically synthesized
  source 1..22: mol_type = other DNA
aacctatgtttagataaaaggc

SEQ ID NO: 105432 - DNA, 22 bp, synthetic construct
  misc_feature 1..22: note = chemically synthesized
  source 1..22: mol_type = other DNA
tgtttagataaaaggcggataa

SEQ ID NO: 105433 - DNA, 22 bp, synthetic construct
  misc_feature 1..22: note = chemically synthesized
  source 1..22: mol_type = other DNA
agataaaaggcggataatgcca

SEQ ID NO: 105434 - DNA, 22 bp, synthetic construct
  misc_feature 1..22: note = chemically synthesized
  source 1..22: mol_type = other DNA
gataaaaggcggataatgccat

SEQ ID NO: 105435 - DNA, 22 bp, synthetic construct
  misc_feature 1..22: note = chemically synthesized
  source 1..22: mol_type = other DNA
tatttgcttggttttgatgctg

SEQ ID NO: 105436 - DNA, 22 bp, synthetic construct
  misc_feature 1..22: note = chemically synthesized
  source 1..22: mol_type = other DNA
gcttggttttgatgctgtagat

SEQ ID NO: 105437 - DNA, 22 bp, synthetic construct
  misc_feature 1..22: note = chemically synthesized
  source 1..22: mol_type = other DNA
cttggttttgatgctgtagatg

SEQ ID NO: 105438 - DNA, 22 bp, synthetic construct
  misc_feature 1..22: note = chemically synthesized
  source 1..22: mol_type = other DNA
ggttttgatgctgtagatgaca

SEQ ID NO: 105439 - DNA, 22 bp, synthetic construct
  misc_feature 1..22: note = chemically synthesized
  source 1..22: mol_type = other DNA
gttttgatgctgtagatgacag

SEQ ID NO: 105440 - DNA, 22 bp, synthetic construct
  misc_feature 1..22: note = chemically synthesized
  source 1..22: mol_type = other DNA
tgatgctgtagatgacagggtt

SEQ ID NO: 105441 - DNA, 22 bp, synthetic construct
  misc_feature 1..22: note = chemically synthesized
  source 1..22: mol_type = other DNA
gatgctgtagatgacagggttc

SEQ ID NO: 105442 - DNA, 22 bp, synthetic construct
  misc_feature 1..22: note = chemically synthesized
  source 1..22: mol_type = other DNA
atgctgtagatgacagggttca

SEQ ID NO: 105443 - DNA, 22 bp, synthetic construct
  misc_feature 1..22: note = chemically synthesized
  source 1..22: mol_type = other DNA
tagatgacagggttcattaaag

SEQ ID NO: 105444 - DNA, 22 bp, synthetic construct
  misc_feature 1..22: note = chemically synthesized
  source 1..22: mol_type = other DNA
attaaaggaggaaagaggaagt

SEQ ID NO: 105445 - DNA, 22 bp, synthetic construct
  misc_feature 1..22: note = chemically synthesized
  source 1..22: mol_type = other DNA
aaggaggaaagaggaagtagat

SEQ ID NO: 105446 - DNA, 22 bp, synthetic construct
  misc_feature 1..22: note = chemically synthesized
  source 1..22: mol_type = other DNA
atgataatgtggacaacctctg

SEQ ID NO: 105447 - DNA, 22 bp, synthetic construct
  misc_feature 1..22: note = chemically synthesized
  source 1..22: mol_type = other DNA
tggcacattcttcccaaatctg

SEQ ID NO: 105448 - DNA, 22 bp, synthetic construct
  misc_feature 1..22: note = chemically synthesized
  source 1..22: mol_type = other DNA
gcacattcttcccaaatctgta

SEQ ID NO: 105449 - DNA, 22 bp, synthetic construct
  misc_feature 1..22: note = chemically synthesized
  source 1..22: mol_type = other DNA
ttcccaaatctgtaaatgaatg

SEQ ID NO: 105450 - DNA, 22 bp, synthetic construct
  misc_feature 1..22: note = chemically synthesized
  source 1..22: mol_type = other DNA
cccaaatctgtaaatgaatgtc

SEQ ID NO: 105451 - DNA, 22 bp, synthetic construct
  misc_feature 1..22: note = chemically synthesized
  source 1..22: mol_type = other DNA
ccaaatctgtaaatgaatgtca

SEQ ID NO: 105452 - DNA, 22 bp, synthetic construct
  misc_feature 1..22: note = chemically synthesized
  source 1..22: mol_type = other DNA
taaatgaatgtcaaacccatca

SEQ ID NO: 105453 - DNA, 22 bp, synthetic construct
  misc_feature 1..22: note = chemically synthesized
  source 1..22: mol_type = other DNA
taacatagaagataagaacaca

SEQ ID NO: 105454 - DNA, 22 bp, synthetic construct
  misc_feature 1..22: note = chemically synthesized
  source 1..22: mol_type = other DNA
atgtgggagatacaggtattga

SEQ ID NO: 105455 - DNA, 22 bp, synthetic construct
  misc_feature 1..22: note = chemically synthesized
  source 1..22: mol_type = other DNA
agggctttggctctctcttcac

SEQ ID NO: 105456 - DNA, 22 bp, synthetic construct
  misc_feature 1..22: note = chemically synthesized
  source 1..22: mol_type = other DNA
tggctctctcttcaccagaagc

SEQ ID NO: 105457 - DNA, 22 bp, synthetic construct
  misc_feature 1..22: note = chemically synthesized
  source 1..22: mol_type = other DNA
ggctctctcttcaccagaagca

SEQ ID NO: 105458 - DNA, 22 bp, synthetic construct
  misc_feature 1..22: note = chemically synthesized
  source 1..22: mol_type = other DNA
gctctctcttcaccagaagcaa

SEQ ID NO: 105459 - DNA, 22 bp, synthetic construct
  misc_feature 1..22: note = chemically synthesized
  source 1..22: mol_type = other DNA
tctcttcaccagaagcaatgcc

SEQ ID NO: 105460 - DNA, 22 bp, synthetic construct
  misc_feature 1..22: note = chemically synthesized
  source 1..22: mol_type = other DNA
tcttcaccagaagcaatgccta

SEQ ID NO: 105461 - DNA, 22 bp, synthetic construct
  misc_feature 1..22: note = chemically synthesized
  source 1..22: mol_type = other DNA
ttcaccagaagcaatgcctatg

SEQ ID NO: 105462 - DNA, 22 bp, synthetic construct
  misc_feature 1..22: note = chemically synthesized
  source 1..22: mol_type = other DNA
caccagaagcaatgcctatgac

SEQ ID NO: 105463 - DNA, 22 bp, synthetic construct
  misc_feature 1..22: note = chemically synthesized
  source 1..22: mol_type = other DNA
accagaagcaatgcctatgaca

SEQ ID NO: 105464 - DNA, 22 bp, synthetic construct
  misc_feature 1..22: note = chemically synthesized
  source 1..22: mol_type = other DNA
tgacagtattaagaattagaat

SEQ ID NO: 105465 - DNA, 22 bp, synthetic construct
  misc_feature 1..22: note = chemically synthesized
  source 1..22: mol_type = other DNA
agaattagaatataggagaaga

SEQ ID NO: 105466 - DNA, 22 bp, synthetic construct
  misc_feature 1..22: note = chemically synthesized
  source 1..22: mol_type = other DNA
gaatataggagaagaggatgat

SEQ ID NO: 105467 - DNA, 22 bp, synthetic construct
  misc_feature 1..22: note = chemically synthesized
  source 1..22: mol_type = other DNA
ggaagattgttaaagagatcaa

SEQ ID NO: 105468 - DNA, 22 bp, synthetic construct
  misc_feature 1..22: note = chemically synthesized
  source 1..22: mol_type = other DNA
ttaaagagatcaaaattacagg

SEQ ID NO: 105469 - DNA, 22 bp, synthetic construct
  misc_feature 1..22: note = chemically synthesized
  source 1..22: mol_type = other DNA
aagagatcaaaattacagggta

SEQ ID NO: 105470 - DNA, 22 bp, synthetic construct
  misc_feature 1..22: note = chemically synthesized
  source 1..22: mol_type = other DNA
cagggtaaagtctattgaaagt

SEQ ID NO: 105471 - DNA, 22 bp, synthetic construct
  misc_feature 1..22: note = chemically synthesized
  source 1..22: mol_type = other DNA
ttgaaagttatgtcagcacaag

SEQ ID NO: 105472 - DNA, 22 bp, synthetic construct
  misc_feature 1..22: note = chemically synthesized
  source 1..22: mol_type = other DNA
aaagttatgtcagcacaagcca

SEQ ID NO: 105473 - DNA, 22 bp, synthetic construct
  misc_feature 1..22: note = chemically synthesized
  source 1..22: mol_type = other DNA
tgtcagcacaagccagtctcat

SEQ ID NO: 105474 - DNA, 22 bp, synthetic construct
  misc_feature 1..22: note = chemically synthesized
  source 1..22: mol_type = other DNA
atgatttcttggtggaggcaga

SEQ ID NO: 105475 - DNA, 22 bp, synthetic construct
  misc_feature 1..22: note = chemically synthesized
  source 1..22: mol_type = other DNA
cttggtggaggcagaaagcacg

SEQ ID NO: 105476 - DNA, 22 bp, synthetic construct
  misc_feature 1..22: note = chemically synthesized
  source 1..22: mol_type = other DNA
ttggtggaggcagaaagcacgt

SEQ ID NO: 105477 - DNA, 22 bp, synthetic construct
  misc_feature 1..22: note = chemically synthesized
  source 1..22: mol_type = other DNA
ggtggaggcagaaagcacgtgt

SEQ ID NO: 105478 - DNA, 22 bp, synthetic construct
  misc_feature 1..22: note = chemically synthesized
  source 1..22: mol_type = other DNA
gtggaggcagaaagcacgtgtg

SEQ ID NO: 105479 - DNA, 22 bp, synthetic construct
  misc_feature 1..22: note = chemically synthesized
  source 1..22: mol_type = other DNA
gcaatatgaaaatgaaaaaaga

SEQ ID NO: 105480 - DNA, 22 bp, synthetic construct
  misc_feature 1..22: note = chemically synthesized
  source 1..22: mol_type = other DNA
caatatgaaaatgaaaaaagac

SEQ ID NO: 105481 - DNA, 22 bp, synthetic construct
  misc_feature 1..22: note = chemically synthesized
  source 1..22: mol_type = other DNA
caggcaggatggatacaaaacc

SEQ ID NO: 105482 - DNA, 22 bp, synthetic construct
  misc_feature 1..22: note = chemically synthesized
  source 1..22: mol_type = other DNA
agaaacactcccactcctaacg

SEQ ID NO: 105483 - DNA, 22 bp, synthetic construct
  misc_feature 1..22: note = chemically synthesized
  source 1..22: mol_type = other DNA
gaaacactcccactcctaacgc

SEQ ID NO: 105484 - DNA, 22 bp, synthetic construct
  misc_feature 1..22: note = chemically synthesized
  source 1..22: mol_type = other DNA
ccactcctaacgctatgactct

SEQ ID NO: 105485 - DNA, 22 bp, synthetic construct
  misc_feature 1..22: note = chemically synthesized
  source 1..22: mol_type = other DNA
ctaacgctatgactctagtatt

SEQ ID NO: 105486 - DNA, 22 bp, synthetic construct
  misc_feature 1..22: note = chemically synthesized
  source 1..22: mol_type = other DNA
acgctatgactctagtattggt

SEQ ID NO: 105487 - DNA, 22 bp, synthetic construct
  misc_feature 1..22: note = chemically synthesized
  source 1..22: mol_type = other DNA
tgactctagtattggtgagaat

SEQ ID NO: 105488 - DNA, 22 bp, synthetic construct
  misc_feature 1..22: note = chemically synthesized
  source 1..22: mol_type = other DNA
tagtattggtgagaatggaagc

SEQ ID NO: 105489 - DNA, 22 bp, synthetic construct
  misc_feature 1..22: note = chemically synthesized
  source 1..22: mol_type = other DNA
gtattggtgagaatggaagcat

SEQ ID NO: 105490 - DNA, 22 bp, synthetic construct
  misc_feature 1..22: note = chemically synthesized
  source 1..22: mol_type = other DNA
gtgagaatggaagcatatctca

SEQ ID NO: 105491 - DNA, 22 bp, synthetic construct
  misc_feature 1..22: note = chemically synthesized
  source 1..22: mol_type = other DNA
aaaggattgcggatggcaatga

SEQ ID NO: 105492 - DNA, 22 bp, synthetic construct
  misc_feature 1..22: note = chemically synthesized
  source 1..22: mol_type = other DNA
cggatggcaatgaaacaatcat

SEQ ID NO: 105493 - DNA, 22 bp, synthetic construct
  misc_feature 1..22: note = chemically synthesized
  source 1..22: mol_type = other DNA
ccaggagggaacctgattccac

SEQ ID NO: 105494 - DNA, 22 bp, synthetic construct
  misc_feature 1..22: note = chemically synthesized
  source 1..22: mol_type = other DNA
attccacaacagaaagggagtg

SEQ ID NO: 105495 - DNA, 22 bp, synthetic construct
  misc_feature 1..22: note = chemically synthesized
  source 1..22: mol_type = other DNA
cacaacagaaagggagtgaata

SEQ ID NO: 105496 - DNA, 22 bp, synthetic construct
  misc_feature 1..22: note = chemically synthesized
  source 1..22: mol_type = other DNA
taggaagcagcccacactgcta

SEQ ID NO: 105497 - DNA, 22 bp, synthetic construct
  misc_feature 1..22: note = chemically synthesized
  source 1..22: mol_type = other DNA
ctaatctccctgtgattcaccc

SEQ ID NO: 105498 - DNA, 22 bp, synthetic construct
  misc_feature 1..22: note = chemically synthesized
  source 1..22: mol_type = other DNA
atctccctgtgattcacccata

SEQ ID NO: 105499 - DNA, 22 bp, synthetic construct
  misc_feature 1..22: note = chemically synthesized
  source 1..22: mol_type = other DNA
cctgtgattcacccataggatg

SEQ ID NO: 105500 - DNA, 22 bp, synthetic construct
  misc_feature 1..22: note = chemically synthesized
  source 1..22: mol_type = other DNA
tgattcacccataggatgccca

SEQ ID NO: 105501 - DNA, 22 bp, synthetic construct
  misc_feature 1..22: note = chemically synthesized
  source 1..22: mol_type = other DNA
acccataggatgcccattacag

SEQ ID NO: 105502 - DNA, 22 bp, synthetic construct
  misc_feature 1..22: note = chemically synthesized
  source 1..22: mol_type = other DNA
cagtaggcatcgtggtcaatgt

SEQ ID NO: 105503 - DNA, 22 bp, synthetic construct
  misc_feature 1..22: note = chemically synthesized
  source 1..22: mol_type = other DNA
tgcctgccagcatggtgaggaa

SEQ ID NO: 105504 - DNA, 22 bp, synthetic construct
  misc_feature 1..22: note = chemically synthesized
  source 1..22: mol_type = other DNA
ccagcatggtgaggaagtagta

SEQ ID NO: 105505 - DNA, 22 bp, synthetic construct
  misc_feature 1..22: note = chemically synthesized
  source 1..22: mol_type = other DNA
atgaagactgtggtcatgcttg

SEQ ID NO: 105506 - DNA, 22 bp, synthetic construct
  misc_feature 1..22: note = chemically synthesized
  source 1..22: mol_type = other DNA
tggtcatgcttgatgaggtaga

SEQ ID NO: 105507 - DNA, 22 bp, synthetic construct
  misc_feature 1..22: note = chemically synthesized
  source 1..22: mol_type = other DNA
gatgaggtagaggagcatgcca

SEQ ID NO: 105508 - DNA, 22 bp, synthetic construct
  misc_feature 1..22: note = chemically synthesized
  source 1..22: mol_type = other DNA
atgaggtagaggagcatgccat

SEQ ID NO: 105509 - DNA, 22 bp, synthetic construct
  misc_feature 1..22: note = chemically synthesized
  source 1..22: mol_type = other DNA
cccagaaggatgcacacataaa

SEQ ID NO: 105510 - DNA, 22 bp, synthetic construct
  misc_feature 1..22: note = chemically synthesized
  source 1..22: mol_type = other DNA
cctccagccctggaaagccagt

SEQ ID NO: 105511 - DNA, 22 bp, synthetic construct
  misc_feature 1..22: note = chemically synthesized
  source 1..22: mol_type = other DNA
cagccctggaaagccagtcagc

SEQ ID NO: 105512 - DNA, 22 bp, synthetic construct
  misc_feature 1..22: note = chemically synthesized
  source 1..22: mol_type = other DNA
gaaagccagtcagcaaaaaagg

SEQ ID NO: 105513 - DNA, 22 bp, synthetic construct
  misc_feature 1..22: note = chemically synthesized
  source 1..22: mol_type = other DNA
cagtaatattgggccacatagt

SEQ ID NO: 105514 - DNA, 22 bp, synthetic construct
  misc_feature 1..22: note = chemically synthesized
  source 1..22: mol_type = other DNA
ggccacatagtgtatccaccgg

SEQ ID NO: 105515 - DNA, 22 bp, synthetic construct
  misc_feature 1..22: note = chemically synthesized
  source 1..22: mol_type = other DNA
cttgaaaccttgaaaccaggag

SEQ ID NO: 105516 - DNA, 22 bp, synthetic construct
  misc_feature 1..22: note = chemically synthesized
  source 1..22: mol_type = other DNA
ttgaaaccttgaaaccaggagc

SEQ ID NO: 105517 - DNA, 22 bp, synthetic construct
  misc_feature 1..22: note = chemically synthesized
  source 1..22: mol_type = other DNA
gaaaccttgaaaccaggagcct

SEQ ID NO: 105518 - DNA, 22 bp, synthetic construct
  misc_feature 1..22: note = chemically synthesized
  source 1..22: mol_type = other DNA
aaaccttgaaaccaggagcctc

SEQ ID NO: 105519 - DNA, 22 bp, synthetic construct
  misc_feature 1..22: note = chemically synthesized
  source 1..22: mol_type = other DNA
gaaaccaggagcctccaatctt

SEQ ID NO: 105520 - DNA, 22 bp, synthetic construct
  misc_feature 1..22: note = chemically synthesized
  source 1..22: mol_type = other DNA
aaaccaggagcctccaatcttc

SEQ ID NO: 105521 - DNA, 22 bp, synthetic construct
  misc_feature 1..22: note = chemically synthesized
  source 1..22: mol_type = other DNA
caatcttcctgcttggagatga

SEQ ID NO: 105522 - DNA, 22 bp, synthetic construct
  misc_feature 1..22: note = chemically synthesized
  source 1..22: mol_type = other DNA
cctgcttggagatgattaactg

SEQ ID NO: 105523 - DNA, 22 bp, synthetic construct
  misc_feature 1..22: note = chemically synthesized
  source 1..22: mol_type = other DNA
ctgcttggagatgattaactgg

SEQ ID NO: 105524 - DNA, 22 bp, synthetic construct
  misc_feature 1..22: note = chemically synthesized
  source 1..22: mol_type = other DNA
cttggagatgattaactggtgt

SEQ ID NO: 105525 - DNA, 22 bp, synthetic construct
  misc_feature 1..22: note = chemically synthesized
  source 1..22: mol_type = other DNA
ggagatgattaactggtgtgat

SEQ ID NO: 105526 - DNA, 22 bp, synthetic construct
  misc_feature 1..22: note = chemically synthesized
  source 1..22: mol_type = other DNA
gagatgattaactggtgtgata

SEQ ID NO: 105527 - DNA, 22 bp, synthetic construct
  misc_feature 1..22: note = chemically synthesized
  source 1..22: mol_type = other DNA
actggtgtgataaatttgactc

SEQ ID NO: 105528 - DNA, 22 bp, synthetic construct
  misc_feature 1..22: note = chemically synthesized
  source 1..22: mol_type = other DNA
gtgtgataaatttgactctgca

SEQ ID NO: 105529 - DNA, 22 bp, synthetic construct
  misc_feature 1..22: note = chemically synthesized
  source 1..22: mol_type = other DNA
gactctgcaactattttcctga

SEQ ID NO: 105530 - DNA, 22 bp, synthetic construct
  misc_feature 1..22: note = chemically synthesized
  source 1..22: mol_type = other DNA
actctgcaactattttcctgaa

SEQ ID NO: 105531 - DNA, 22 bp, synthetic construct
  misc_feature 1..22: note = chemically synthesized
  source 1..22: mol_type = other DNA
tgcaactattttcctgaagaag

SEQ ID NO: 105532 - DNA, 22 bp, synthetic construct
  misc_feature 1..22: note = chemically synthesized
  source 1..22: mol_type = other DNA
caactattttcctgaagaagaa

SEQ ID NO: 105533 - DNA, 22 bp, synthetic construct
  misc_feature 1..22: note = chemically synthesized
  source 1..22: mol_type = other DNA
ttttcctgaagaagaatagcat

SEQ ID NO: 105534 - DNA, 22 bp, synthetic construct
  misc_feature 1..22: note = chemically synthesized
  source 1..22: mol_type = other DNA
tcctgaagaagaatagcatgta

SEQ ID NO: 105535 - DNA, 22 bp, synthetic construct
  misc_feature 1..22: note = chemically synthesized
  source 1..22: mol_type = other DNA
cctgaagaagaatagcatgtac

SEQ ID NO: 105536 - DNA, 22 bp, synthetic construct
  misc_feature 1..22: note = chemically synthesized
  source 1..22: mol_type = other DNA
ctgaagaagaatagcatgtaca

SEQ ID NO: 105537 - DNA, 22 bp, synthetic construct
  misc_feature 1..22: note = chemically synthesized
  source 1..22: mol_type = other DNA
aagaagaatagcatgtacagac

SEQ ID NO: 105538 - DNA, 22 bp, synthetic construct
  misc_feature 1..22: note = chemically synthesized
  source 1..22: mol_type = other DNA
tggttttttccctaattagaaa

SEQ ID NO: 105539 - DNA, 22 bp, synthetic construct
  misc_feature 1..22: note = chemically synthesized
  source 1..22: mol_type = other DNA
tttccctaattagaaaaaatac

SEQ ID NO: 105540 - DNA, 22 bp, synthetic construct
  misc_feature 1..22: note = chemically synthesized
  source 1..22: mol_type = other DNA
ttccctaattagaaaaaatact

SEQ ID NO: 105541 - DNA, 22 bp, synthetic construct
  misc_feature 1..22: note = chemically synthesized
  source 1..22: mol_type = other DNA
tccctaattagaaaaaatactg

SEQ ID NO: 105542 - DNA, 22 bp, synthetic construct
  misc_feature 1..22: note = chemically synthesized
  source 1..22: mol_type = other DNA
ccctaattagaaaaaatactga

SEQ ID NO: 105543 - DNA, 22 bp, synthetic construct
  misc_feature 1..22: note = chemically synthesized
  source 1..22: mol_type = other DNA
cctaattagaaaaaatactgag

SEQ ID NO: 105544 - DNA, 22 bp, synthetic construct
  misc_feature 1..22: note = chemically synthesized
  source 1..22: mol_type = other DNA
attagaaaaaatactgagttaa

SEQ ID NO: 105545 - DNA, 22 bp, synthetic construct
  misc_feature 1..22: note = chemically synthesized
  source 1..22: mol_type = other DNA
gaaaaaatactgagttaatggt

SEQ ID NO: 105546 - DNA, 22 bp, synthetic construct
  misc_feature 1..22: note = chemically synthesized
  source 1..22: mol_type = other DNA
agttaatggttcgatttttctc

SEQ ID NO: 105547 - DNA, 22 bp, synthetic construct
  misc_feature 1..22: note = chemically synthesized
  source 1..22: mol_type = other DNA
atggttcgatttttctcaaatt

SEQ ID NO: 105548 - DNA, 22 bp, synthetic construct
  misc_feature 1..22: note = chemically synthesized
  source 1..22: mol_type = other DNA
gatttttctcaaattcaaaaat

SEQ ID NO: 105549 - DNA, 22 bp, synthetic construct
  misc_feature 1..22: note = chemically synthesized
  source 1..22: mol_type = other DNA
ttctcaaattcaaaaatttttc

SEQ ID NO: 105550 - DNA, 22 bp, synthetic construct
  misc_feature 1..22: note = chemically synthesized
  source 1..22: mol_type = other DNA
tctcaaattcaaaaatttttca

SEQ ID NO: 105551 - DNA, 22 bp, synthetic construct
  misc_feature 1..22: note = chemically synthesized
  source 1..22: mol_type = other DNA
ctcaaattcaaaaatttttcat

SEQ ID NO: 105552 - DNA, 22 bp, synthetic construct
  misc_feature 1..22: note = chemically synthesized
  source 1..22: mol_type = other DNA
tcaaattcaaaaatttttcatt

SEQ ID NO: 105553 - DNA, 22 bp, synthetic construct
  misc_feature 1..22: note = chemically synthesized
  source 1..22: mol_type = other DNA
aaattcaaaaatttttcattaa

SEQ ID NO: 105554 - DNA, 22 bp, synthetic construct
  misc_feature 1..22: note = chemically synthesized
  source 1..22: mol_type = other DNA
aaaaatttttcattaattttaa

SEQ ID NO: 105555 - DNA, 22 bp, synthetic construct
  misc_feature 1..22: note = chemically synthesized
  source 1..22: mol_type = other DNA
ttcattaattttaaatatatta

SEQ ID NO: 105556 - DNA, 22 bp, synthetic construct
  misc_feature 1..22: note = chemically synthesized
  source 1..22: mol_type = other DNA
tcattaattttaaatatattat

SEQ ID NO: 105557 - DNA, 22 bp, synthetic construct
  misc_feature 1..22: note = chemically synthesized
  source 1..22: mol_type = other DNA
cattaattttaaatatattatc

SEQ ID NO: 105558 - DNA, 22 bp, synthetic construct
  misc_feature 1..22: note = chemically synthesized
  source 1..22: mol_type = other DNA
attaattttaaatatattatcc

SEQ ID NO: 105559 - DNA, 22 bp, synthetic construct
  misc_feature 1..22: note = chemically synthesized
  source 1..22: mol_type = other DNA
attttaaatatattatccgcaa

SEQ ID NO: 105560 - DNA, 22 bp, synthetic construct
  misc_feature 1..22: note = chemically synthesized
  source 1..22: mol_type = other DNA
taaatatattatccgcaactat

SEQ ID NO: 105561 - DNA, 22 bp, synthetic construct
  misc_feature 1..22: note = chemically synthesized
  source 1..22: mol_type = other DNA
aaatatattatccgcaactatt

SEQ ID NO: 105562 - DNA, 22 bp, synthetic construct
  misc_feature 1..22: note = chemically synthesized
  source 1..22: mol_type = other DNA
aatatattatccgcaactattt

SEQ ID NO: 105563 - DNA, 22 bp, synthetic construct
  misc_feature 1..22: note = chemically synthesized
  source 1..22: mol_type = other DNA
tccgcaactattttgagggtac

SEQ ID NO: 105564 - DNA, 22 bp, synthetic construct
  misc_feature 1..22: note = chemically synthesized
  source 1..22: mol_type = other DNA
ttttgagggtacttataaatat

SEQ ID NO: 105565 - DNA, 22 bp, synthetic construct
  misc_feature 1..22: note = chemically synthesized
  source 1..22: mol_type = other DNA
tgagggtacttataaatatttg

SEQ ID NO: 105566 - DNA, 22 bp, synthetic construct
  misc_feature 1..22: note = chemically synthesized
  source 1..22: mol_type = other DNA
gagggtacttataaatatttgc

SEQ ID NO: 105567 - DNA, 22 bp, synthetic construct
  misc_feature 1..22: note = chemically synthesized
  source 1..22: mol_type = other DNA
agggtacttataaatatttgca

SEQ ID NO: 105568 - DNA, 22 bp, synthetic construct
  misc_feature 1..22: note = chemically synthesized
  source 1..22: mol_type = other DNA
ataaatatttgcaacaacagtg

SEQ ID NO: 105569 - DNA, 22 bp, synthetic construct
  misc_feature 1..22: note = chemically synthesized
  source 1..22: mol_type = other DNA
taaatatttgcaacaacagtga

SEQ ID NO: 105570 - DNA, 22 bp, synthetic construct
  misc_feature 1..22: note = chemically synthesized
  source 1..22: mol_type = other DNA
gcaacaacagtgataacaaaaa

SEQ ID NO: 105571 - DNA, 22 bp, synthetic construct
  misc_feature 1..22: note = chemically synthesized
  source 1..22: mol_type = other DNA
caacaacagtgataacaaaaac

SEQ ID NO: 105572 - DNA, 22 bp, synthetic construct
  misc_feature 1..22: note = chemically synthesized
  source 1..22: mol_type = other DNA
gcttagttgtcttcttgctgtg

SEQ ID NO: 105573 - DNA, 22 bp, synthetic construct
  misc_feature 1..22: note = chemically synthesized
  source 1..22: mol_type = other DNA
agttgtcttcttgctgtgatta

SEQ ID NO: 105574 - DNA, 22 bp, synthetic construct
  misc_feature 1..22: note = chemically synthesized
  source 1..22: mol_type = other DNA
gttgtcttcttgctgtgattac

SEQ ID NO: 105575 - DNA, 22 bp, synthetic construct
  misc_feature 1..22: note = chemically synthesized
  source 1..22: mol_type = other DNA
tcttcttgctgtgattactgac

SEQ ID NO: 105576 - DNA, 22 bp, synthetic construct
  misc_feature 1..22: note = chemically synthesized
  source 1..22: mol_type = other DNA
cttgctgtgattactgaccatt

SEQ ID NO: 105577 - DNA, 22 bp, synthetic construct
  misc_feature 1..22: note = chemically synthesized
  source 1..22: mol_type = other DNA
ttgctgtgattactgaccattt

SEQ ID NO: 105578 - DNA, 22 bp, synthetic construct
  misc_feature 1..22: note = chemically synthesized
  source 1..22: mol_type = other DNA
gctgtgattactgaccatttgg

SEQ ID NO: 105579 - DNA, 22 bp, synthetic construct
  misc_feature 1..22: note = chemically synthesized
  source 1..22: mol_type = other DNA
ctgtgattactgaccatttgga

SEQ ID NO: 105580 - DNA, 22 bp, synthetic construct
  misc_feature 1..22: note = chemically synthesized
  source 1..22: mol_type = other DNA
tgattactgaccatttggaaat

SEQ ID NO: 105581 - DNA, 22 bp, synthetic construct
  misc_feature 1..22: note = chemically synthesized
  source 1..22: mol_type = other DNA
ctgaccatttggaaatgattgt

SEQ ID NO: 105582 - DNA, 22 bp, synthetic construct
  misc_feature 1..22: note = chemically synthesized
  source 1..22: mol_type = other DNA
accatttggaaatgattgttgt

SEQ ID NO: 105583 - DNA, 22 bp, synthetic construct
  misc_feature 1..22: note = chemically synthesized
  source 1..22: mol_type = other DNA
ggaaatgattgttgtaatttta

SEQ ID NO: 105584 - DNA, 22 bp, synthetic construct
  misc_feature 1..22: note = chemically synthesized
  source 1..22: mol_type = other DNA
gaaatgattgttgtaattttac

SEQ ID NO: 105585 - DNA, 22 bp, synthetic construct
  misc_feature 1..22: note = chemically synthesized
  source 1..22: mol_type = other DNA
ttgtaattttacatttcacgat

SEQ ID NO: 105586 - DNA, 22 bp, synthetic construct
  misc_feature 1..22: note = chemically synthesized
  source 1..22: mol_type = other DNA
taattttacatttcacgattat

SEQ ID NO: 105587 - DNA, 22 bp, synthetic construct
  misc_feature 1..22: note = chemically synthesized
  source 1..22: mol_type = other DNA
tacatttcacgattatgatgaa

SEQ ID NO: 105588 - DNA, 22 bp, synthetic construct
  misc_feature 1..22: note = chemically synthesized
  source 1..22: mol_type = other DNA
acatttcacgattatgatgaag

SEQ ID NO: 105589 - DNA, 22 bp, synthetic construct
  misc_feature 1..22: note = chemically synthesized
  source 1..22: mol_type = other DNA
catttcacgattatgatgaaga

SEQ ID NO: 105590 - DNA, 22 bp, synthetic construct
  misc_feature 1..22: note = chemically synthesized
  source 1..22: mol_type = other DNA
cacgattatgatgaagacagtt

SEQ ID NO: 105591 - DNA, 22 bp, synthetic construct
  misc_feature 1..22: note = chemically synthesized
  source 1..22: mol_type = other DNA
acgattatgatgaagacagttt

SEQ ID NO: 105592 - DNA, 22 bp, synthetic construct
  misc_feature 1..22: note = chemically synthesized
  source 1..22: mol_type = other DNA
tgatgaagacagttttttcagt

SEQ ID NO: 105593 - DNA, 22 bp, synthetic construct
  misc_feature 1..22: note = chemically synthesized
  source 1..22: mol_type = other DNA
tttcagttaatgcagtttttct

SEQ ID NO: 105594 - DNA, 22 bp, synthetic construct
  misc_feature 1..22: note = chemically synthesized
  source 1..22: mol_type = other DNA
ttcagttaatgcagtttttctc

SEQ ID NO: 105595 - DNA, 22 bp, synthetic construct
  misc_feature 1..22: note = chemically synthesized
  source 1..22: mol_type = other DNA
tcagttaatgcagtttttctca

SEQ ID NO: 105596 - DNA, 22 bp, synthetic construct
  misc_feature 1..22: note = chemically synthesized
  source 1..22: mol_type = other DNA
cagttaatgcagtttttctcat

SEQ ID NO: 105597 - DNA, 22 bp, synthetic construct
  misc_feature 1..22: note = chemically synthesized
  source 1..22: mol_type = other DNA
agttaatgcagtttttctcatt

SEQ ID NO: 105598 - DNA, 22 bp, synthetic construct
  misc_feature 1..22: note = chemically synthesized
  source 1..22: mol_type = other DNA
atgcagtttttctcattttttt

SEQ ID NO: 105599 - DNA, 22 bp, synthetic construct
  misc_feature 1..22: note = chemically synthesized
  source 1..22: mol_type = other DNA
ttctcattttttttggaaattg

SEQ ID NO: 105600 - DNA, 22 bp, synthetic construct
  misc_feature 1..22: note = chemically synthesized
  source 1..22: mol_type = other DNA
tctcattttttttggaaattga

SEQ ID NO: 105601 - DNA, 22 bp, synthetic construct
  misc_feature 1..22: note = chemically synthesized
  source 1..22: mol_type = other DNA
ctcattttttttggaaattgaa

SEQ ID NO: 105602 - DNA, 22 bp, synthetic construct
  misc_feature 1..22: note = chemically synthesized
  source 1..22: mol_type = other DNA
tcattttttttggaaattgaat

SEQ ID NO: 105603 - DNA, 22 bp, synthetic construct
  misc_feature 1..22: note = chemically synthesized
  source 1..22: mol_type = other DNA
attttttttggaaattgaatgt

SEQ ID NO: 105604 - DNA, 22 bp, synthetic construct
  misc_feature 1..22: note = chemically synthesized
  source 1..22: mol_type = other DNA
tttttggaaattgaatgtcagt

SEQ ID NO: 105605 - DNA, 22 bp, synthetic construct
  misc_feature 1..22: note = chemically synthesized
  source 1..22: mol_type = other DNA
ttttggaaattgaatgtcagtg

SEQ ID NO: 105606 - DNA, 22 bp, synthetic construct
  misc_feature 1..22: note = chemically synthesized
  source 1..22: mol_type = other DNA
tttggaaattgaatgtcagtgt

SEQ ID NO: 105607 - DNA, 22 bp, synthetic construct
  misc_feature 1..22: note = chemically synthesized
  source 1..22: mol_type = other DNA
ttggaaattgaatgtcagtgtt

SEQ ID NO: 105608 - DNA, 22 bp, synthetic construct
  misc_feature 1..22: note = chemically synthesized
  source 1..22: mol_type = other DNA
tggaaattgaatgtcagtgttt

SEQ ID NO: 105609 - DNA, 22 bp, synthetic construct
  misc_feature 1..22: note = chemically synthesized
  source 1..22: mol_type = other DNA
ggaaattgaatgtcagtgtttt

SEQ ID NO: 105610 - DNA, 22 bp, synthetic construct
  misc_feature 1..22: note = chemically synthesized
  source 1..22: mol_type = other DNA
gaaattgaatgtcagtgtttta

SEQ ID NO: 105611 - DNA, 22 bp, synthetic construct
  misc_feature 1..22: note = chemically synthesized
  source 1..22: mol_type = other DNA
aatgtcagtgttttatgcacta

SEQ ID NO: 105612 - DNA, 22 bp, synthetic construct
  misc_feature 1..22: note = chemically synthesized
  source 1..22: mol_type = other DNA
tatgcactatagcgtgcatcac

SEQ ID NO: 105613 - DNA, 22 bp, synthetic construct
  misc_feature 1..22: note = chemically synthesized
  source 1..22: mol_type = other DNA
atgcactatagcgtgcatcacc

SEQ ID NO: 105614 - DNA, 22 bp, synthetic construct
  misc_feature 1..22: note = chemically synthesized
  source 1..22: mol_type = other DNA
tgcactatagcgtgcatcacca

SEQ ID NO: 105615 - DNA, 22 bp, synthetic construct
  misc_feature 1..22: note = chemically synthesized
  source 1..22: mol_type = other DNA
tagcgtgcatcaccatcactac

SEQ ID NO: 105616 - DNA, 22 bp, synthetic construct
  misc_feature 1..22: note = chemically synthesized
  source 1..22: mol_type = other DNA
ccaatgaacggctttgtcactc

SEQ ID NO: 105617 - DNA, 22 bp, synthetic construct
  misc_feature 1..22: note = chemically synthesized
  source 1..22: mol_type = other DNA
tgtcactctaacagttacttga

SEQ ID NO: 105618 - DNA, 22 bp, synthetic construct
  misc_feature 1..22: note = chemically synthesized
  source 1..22: mol_type = other DNA
gtcactctaacagttacttgag

SEQ ID NO: 105619 - DNA, 22 bp, synthetic construct
  misc_feature 1..22: note = chemically synthesized
  source 1..22: mol_type = other DNA
tcactctaacagttacttgagc

SEQ ID NO: 105620 - DNA, 22 bp, synthetic construct
  misc_feature 1..22: note = chemically synthesized
  source 1..22: mol_type = other DNA
taacagttacttgagcttggcc

SEQ ID NO: 105621 - DNA, 22 bp, synthetic construct
  misc_feature 1..22: note = chemically synthesized
  source 1..22: mol_type = other DNA
acagttacttgagcttggccac

SEQ ID NO: 105622 - DNA, 22 bp, synthetic construct
  misc_feature 1..22: note = chemically synthesized
  source 1..22: mol_type = other DNA
cttgagcttggccaccagagtt

SEQ ID NO: 105623 - DNA, 22 bp, synthetic construct
  misc_feature 1..22: note = chemically synthesized
  source 1..22: mol_type = other DNA
gagcttggccaccagagttgtg

SEQ ID NO: 105624 - DNA, 22 bp, synthetic construct
  misc_feature 1..22: note = chemically synthesized
  source 1..22: mol_type = other DNA
agcttggccaccagagttgtgg

SEQ ID NO: 105625 - DNA, 22 bp, synthetic construct
  misc_feature 1..22: note = chemically synthesized
  source 1..22: mol_type = other DNA
ggccaccagagttgtggatcac

SEQ ID NO: 105626 - DNA, 22 bp, synthetic construct
  misc_feature 1..22: note = chemically synthesized
  source 1..22: mol_type = other DNA
gccaccagagttgtggatcaca

SEQ ID NO: 105627 - DNA, 22 bp, synthetic construct
  misc_feature 1..22: note = chemically synthesized
  source 1..22: mol_type = other DNA
tggatcacagactagacgcagc

SEQ ID NO: 105628 - DNA, 22 bp, synthetic construct
  misc_feature 1..22: note = chemically synthesized
  source 1..22: mol_type = other DNA
gacgcagctaacaagcagcggg

SEQ ID NO: 105629 - DNA, 22 bp, synthetic construct
  misc_feature 1..22: note = chemically synthesized
  source 1..22: mol_type = other DNA
acaagcagcgggcttgttaggc

SEQ ID NO: 105630 - DNA, 22 bp, synthetic construct
  misc_feature 1..22: note = chemically synthesized
  source 1..22: mol_type = other DNA
gttaggcatgcagcctcagatt

SEQ ID NO: 105631 - DNA, 22 bp, synthetic construct
  misc_feature 1..22: note = chemically synthesized
  source 1..22: mol_type = other DNA
ttaggcatgcagcctcagattc

SEQ ID NO: 105632 - DNA, 22 bp, synthetic construct
  misc_feature 1..22: note = chemically synthesized
  source 1..22: mol_type = other DNA
ggcatgcagcctcagattctgc

SEQ ID NO: 105633 - DNA, 22 bp, synthetic construct
  misc_feature 1..22: note = chemically synthesized
  source 1..22: mol_type = other DNA
agattctgccccttccaacatt

SEQ ID NO: 105634 - DNA, 22 bp, synthetic construct
  misc_feature 1..22: note = chemically synthesized
  source 1..22: mol_type = other DNA
tgccccttccaacattctgaat

SEQ ID NO: 105635 - DNA, 22 bp, synthetic construct
  misc_feature 1..22: note = chemically synthesized
  source 1..22: mol_type = other DNA
ccccttccaacattctgaatca

SEQ ID NO: 105636 - DNA, 22 bp, synthetic construct
  misc_feature 1..22: note = chemically synthesized
  source 1..22: mol_type = other DNA
ccaacattctgaatcaaattcg

SEQ ID NO: 105637 - DNA, 22 bp, synthetic construct
  misc_feature 1..22: note = chemically synthesized
  source 1..22: mol_type = other DNA
caacattctgaatcaaattcgc

SEQ ID NO: 105638 - DNA, 22 bp, synthetic construct
  misc_feature 1..22: note = chemically synthesized
  source 1..22: mol_type = other DNA
tgaatcaaattcgcttttttca

SEQ ID NO: 105639 - DNA, 22 bp, synthetic construct
  misc_feature 1..22: note = chemically synthesized
  source 1..22: mol_type = other DNA
aatcaaattcgcttttttcagg

SEQ ID NO: 105640 - DNA, 22 bp, synthetic construct
  misc_feature 1..22: note = chemically synthesized
  source 1..22: mol_type = other DNA
gcttttttcaggtcctcaggtg

SEQ ID NO: 105641 - DNA, 22 bp, synthetic construct
  misc_feature 1..22: note = chemically synthesized
  source 1..22: mol_type = other DNA
ttttcaggtcctcaggtgattc

SEQ ID NO: 105642 - DNA, 22 bp, synthetic construct
  misc_feature 1..22: note = chemically synthesized
  source 1..22: mol_type = other DNA
tttcaggtcctcaggtgattcc

SEQ ID NO: 105643 - DNA, 22 bp, synthetic construct
  misc_feature 1..22: note = chemically synthesized
  source 1..22: mol_type = other DNA
ttcaggtcctcaggtgattcca

SEQ ID NO: 105644 - DNA, 22 bp, synthetic construct
  misc_feature 1..22: note = chemically synthesized
  source 1..22: mol_type = other DNA
tcaggtcctcaggtgattccag

SEQ ID NO: 105645 - DNA, 22 bp, synthetic construct
  misc_feature 1..22: note = chemically synthesized
  source 1..22: mol_type = other DNA
caggtcctcaggtgattccagt

SEQ ID NO: 105646 - DNA, 22 bp, synthetic construct
  misc_feature 1..22: note = chemically synthesized
  source 1..22: mol_type = other DNA
aggtcctcaggtgattccagtg

SEQ ID NO: 105647 - DNA, 22 bp, synthetic construct
  misc_feature 1..22: note = chemically synthesized
  source 1..22: mol_type = other DNA
aggtgattccagtgcaaaacaa

SEQ ID NO: 105648 - DNA, 22 bp, synthetic construct
  misc_feature 1..22: note = chemically synthesized
  source 1..22: mol_type = other DNA
cagtgcaaaacaatgtctgggc

SEQ ID NO: 105649 - DNA, 22 bp, synthetic construct
  misc_feature 1..22: note = chemically synthesized
  source 1..22: mol_type = other DNA
ggcatcactgctataagcattt

SEQ ID NO: 105650 - DNA, 22 bp, synthetic construct
  misc_feature 1..22: note = chemically synthesized
  source 1..22: mol_type = other DNA
ctataagcatttcatacctaat

SEQ ID NO: 105651 - DNA, 22 bp, synthetic construct
  misc_feature 1..22: note = chemically synthesized
  source 1..22: mol_type = other DNA
taagcatttcatacctaatcca

SEQ ID NO: 105652 - DNA, 22 bp, synthetic construct
  misc_feature 1..22: note = chemically synthesized
  source 1..22: mol_type = other DNA
catacctaatccatctttcgag

SEQ ID NO: 105653 - DNA, 22 bp, synthetic construct
  misc_feature 1..22: note = chemically synthesized
  source 1..22: mol_type = other DNA
atacctaatccatctttcgaga

SEQ ID NO: 105654 - DNA, 22 bp, synthetic construct
  misc_feature 1..22: note = chemically synthesized
  source 1..22: mol_type = other DNA
atccatctttcgagatagaaac

SEQ ID NO: 105655 - DNA, 22 bp, synthetic construct
  misc_feature 1..22: note = chemically synthesized
  source 1..22: mol_type = other DNA
tcgagatagaaaccttttaatg

SEQ ID NO: 105656 - DNA, 22 bp, synthetic construct
  misc_feature 1..22: note = chemically synthesized
  source 1..22: mol_type = other DNA
cgagatagaaaccttttaatgc

SEQ ID NO: 105657 - DNA, 22 bp, synthetic construct
  misc_feature 1..22: note = chemically synthesized
  source 1..22: mol_type = other DNA
gagatagaaaccttttaatgct

SEQ ID NO: 105658 - DNA, 22 bp, synthetic construct
  misc_feature 1..22: note = chemically synthesized
  source 1..22: mol_type = other DNA
ttaatgcttccatccagttgat

SEQ ID NO: 105659 - DNA, 22 bp, synthetic construct
  misc_feature 1..22: note = chemically synthesized
  source 1..22: mol_type = other DNA
taatgcttccatccagttgatt

SEQ ID NO: 105660 - DNA, 22 bp, synthetic construct
  misc_feature 1..22: note = chemically synthesized
  source 1..22: mol_type = other DNA
aatgcttccatccagttgattt

SEQ ID NO: 105661 - DNA, 22 bp, synthetic construct
  misc_feature 1..22: note = chemically synthesized
  source 1..22: mol_type = other DNA
atgcttccatccagttgatttt

SEQ ID NO: 105662 - DNA, 22 bp, synthetic construct
  misc_feature 1..22: note = chemically synthesized
  source 1..22: mol_type = other DNA
ccatccagttgattttctcatt

SEQ ID NO: 105663 - DNA, 22 bp, synthetic construct
  misc_feature 1..22: note = chemically synthesized
  source 1..22: mol_type = other DNA
catccagttgattttctcattt

SEQ ID NO: 105664 - DNA, 22 bp, synthetic construct
  misc_feature 1..22: note = chemically synthesized
  source 1..22: mol_type = other DNA
attttctcattttctccaaata

SEQ ID NO: 105665 - DNA, 22 bp, synthetic construct
  misc_feature 1..22: note = chemically synthesized
  source 1..22: mol_type = other DNA
tctcattttctccaaatatctt

SEQ ID NO: 105666 - DNA, 22 bp, synthetic construct
  misc_feature 1..22: note = chemically synthesized
  source 1..22: mol_type = other DNA
ctcattttctccaaatatcttc

SEQ ID NO: 105667 - DNA, 22 bp, synthetic construct
  misc_feature 1..22: note = chemically synthesized
  source 1..22: mol_type = other DNA
tcattttctccaaatatcttca

SEQ ID NO: 105668 - DNA, 22 bp, synthetic construct
  misc_feature 1..22: note = chemically synthesized
  source 1..22: mol_type = other DNA
attttctccaaatatcttcata

SEQ ID NO: 105669 - DNA, 22 bp, synthetic construct
  misc_feature 1..22: note = chemically synthesized
  source 1..22: mol_type = other DNA
tctccaaatatcttcatacaat

SEQ ID NO: 105670 - DNA, 22 bp, synthetic construct
  misc_feature 1..22: note = chemically synthesized
  source 1..22: mol_type = other DNA
ctccaaatatcttcatacaatt

SEQ ID NO: 105671 - DNA, 22 bp, synthetic construct
  misc_feature 1..22: note = chemically synthesized
  source 1..22: mol_type = other DNA
tccaaatatcttcatacaatta

SEQ ID NO: 105672 - DNA, 22 bp, synthetic construct
  misc_feature 1..22: note = chemically synthesized
  source 1..22: mol_type = other DNA
caaatatcttcatacaattatc

SEQ ID NO: 105673 - DNA, 22 bp, synthetic construct
  misc_feature 1..22: note = chemically synthesized
  source 1..22: mol_type = other DNA
catacaattatcttttttatgt

SEQ ID NO: 105674 - DNA, 22 bp, synthetic construct
  misc_feature 1..22: note = chemically synthesized
  source 1..22: mol_type = other DNA
atacaattatcttttttatgtt

SEQ ID NO: 105675 - DNA, 22 bp, synthetic construct
  misc_feature 1..22: note = chemically synthesized
  source 1..22: mol_type = other DNA
tcttttttatgtttctttcacc

SEQ ID NO: 105676 - DNA, 22 bp, synthetic construct
  misc_feature 1..22: note = chemically synthesized
  source 1..22: mol_type = other DNA
ttttatgtttctttcaccattt

SEQ ID NO: 105677 - DNA, 22 bp, synthetic construct
  misc_feature 1..22: note = chemically synthesized
  source 1..22: mol_type = other DNA
tttatgtttctttcaccattta

SEQ ID NO: 105678 - DNA, 22 bp, synthetic construct
  misc_feature 1..22: note = chemically synthesized
  source 1..22: mol_type = other DNA
ttatgtttctttcaccatttac

SEQ ID NO: 105679 - DNA, 22 bp, synthetic construct
  misc_feature 1..22: note = chemically synthesized
  source 1..22: mol_type = other DNA
tatgtttctttcaccatttact

SEQ ID NO: 105680 - DNA, 22 bp, synthetic construct
  misc_feature 1..22: note = chemically synthesized
  source 1..22: mol_type = other DNA
atgtttctttcaccatttactg

SEQ ID NO: 105681 - DNA, 22 bp, synthetic construct
  misc_feature 1..22: note = chemically synthesized
  source 1..22: mol_type = other DNA
tgtttctttcaccatttactgg

SEQ ID NO: 105682 - DNA, 22 bp, synthetic construct
  misc_feature 1..22: note = chemically synthesized
  source 1..22: mol_type = other DNA
ctttcaccatttactggctttc

SEQ ID NO: 105683 - DNA, 22 bp, synthetic construct
  misc_feature 1..22: note = chemically synthesized
  source 1..22: mol_type = other DNA
tttcaccatttactggctttct

SEQ ID NO: 105684 - DNA, 22 bp, synthetic construct
  misc_feature 1..22: note = chemically synthesized
  source 1..22: mol_type = other DNA
tcaccatttactggctttcttt

SEQ ID NO: 105685 - DNA, 22 bp, synthetic construct
  misc_feature 1..22: note = chemically synthesized
  source 1..22: mol_type = other DNA
caccatttactggctttctttc

SEQ ID NO: 105686 - DNA, 22 bp, synthetic construct
  misc_feature 1..22: note = chemically synthesized
  source 1..22: mol_type = other DNA
accatttactggctttctttct

SEQ ID NO: 105687 - DNA, 22 bp, synthetic construct
  misc_feature 1..22: note = chemically synthesized
  source 1..22: mol_type = other DNA
actggctttctttctgccactt

SEQ ID NO: 105688 - DNA, 22 bp, synthetic construct
  misc_feature 1..22: note = chemically synthesized
  source 1..22: mol_type = other DNA
ctggctttctttctgccacttg

SEQ ID NO: 105689 - DNA, 22 bp, synthetic construct
  misc_feature 1..22: note = chemically synthesized
  source 1..22: mol_type = other DNA
gctttctttctgccacttgccc

SEQ ID NO: 105690 - DNA, 22 bp, synthetic construct
  misc_feature 1..22: note = chemically synthesized
  source 1..22: mol_type = other DNA
tctttctgccacttgccctttc

SEQ ID NO: 105691 - DNA, 22 bp, synthetic construct
  misc_feature 1..22: note = chemically synthesized
  source 1..22: mol_type = other DNA
ctttctgccacttgccctttcc

SEQ ID NO: 105692 - DNA, 22 bp, synthetic construct
  misc_feature 1..22: note = chemically synthesized
  source 1..22: mol_type = other DNA
tttctgccacttgccctttcca

SEQ ID NO: 105693 - DNA, 22 bp, synthetic construct
  misc_feature 1..22: note = chemically synthesized
  source 1..22: mol_type = other DNA
tctgccacttgccctttccaac

SEQ ID NO: 105694 - DNA, 22 bp, synthetic construct
  misc_feature 1..22: note = chemically synthesized
  source 1..22: mol_type = other DNA
ctgccacttgccctttccaaca

SEQ ID NO: 105695 - DNA, 22 bp, synthetic construct
  misc_feature 1..22: note = chemically synthesized
  source 1..22: mol_type = other DNA
tgccacttgccctttccaacat

SEQ ID NO: 105696 - DNA, 22 bp, synthetic construct
  misc_feature 1..22: note = chemically synthesized
  source 1..22: mol_type = other DNA
ccacttgccctttccaacatta

SEQ ID NO: 105697 - DNA, 22 bp, synthetic construct
  misc_feature 1..22: note = chemically synthesized
  source 1..22: mol_type = other DNA
gccctttccaacattatttccc

SEQ ID NO: 105698 - DNA, 22 bp, synthetic construct
  misc_feature 1..22: note = chemically synthesized
  source 1..22: mol_type = other DNA
ccctttccaacattatttccca

SEQ ID NO: 105699 - DNA, 22 bp, synthetic construct
  misc_feature 1..22: note = chemically synthesized
  source 1..22: mol_type = other DNA
tccaacattatttcccataatt

SEQ ID NO: 105700 - DNA, 22 bp, synthetic construct
  misc_feature 1..22: note = chemically synthesized
  source 1..22: mol_type = other DNA
ccaacattatttcccataatta

SEQ ID NO: 105701 - DNA, 22 bp, synthetic construct
  misc_feature 1..22: note = chemically synthesized
  source 1..22: mol_type = other DNA
caacattatttcccataattaa

SEQ ID NO: 105702 - DNA, 22 bp, synthetic construct
  misc_feature 1..22: note = chemically synthesized
  source 1..22: mol_type = other DNA
tttcccataattaaatacttag

SEQ ID NO: 105703 - DNA, 22 bp, synthetic construct
  misc_feature 1..22: note = chemically synthesized
  source 1..22: mol_type = other DNA
cccataattaaatacttagctg

SEQ ID NO: 105704 - DNA, 22 bp, synthetic construct
  misc_feature 1..22: note = chemically synthesized
  source 1..22: mol_type = other DNA
ccataattaaatacttagctgg

SEQ ID NO: 105705 - DNA, 22 bp, synthetic construct
  misc_feature 1..22: note = chemically synthesized
  source 1..22: mol_type = other DNA
aatacttagctggttttctgtc

SEQ ID NO: 105706 - DNA, 22 bp, synthetic construct
  misc_feature 1..22: note = chemically synthesized
  source 1..22: mol_type = other DNA
agctggttttctgtccttctta

SEQ ID NO: 105707 - DNA, 22 bp, synthetic construct
  misc_feature 1..22: note = chemically synthesized
  source 1..22: mol_type = other DNA
gctggttttctgtccttcttac

SEQ ID NO: 105708 - DNA, 22 bp, synthetic construct
  misc_feature 1..22: note = chemically synthesized
  source 1..22: mol_type = other DNA
gttttctgtccttcttacctct

SEQ ID NO: 105709 - DNA, 22 bp, synthetic construct
  misc_feature 1..22: note = chemically synthesized
  source 1..22: mol_type = other DNA
tctgtccttcttacctctctct

SEQ ID NO: 105710 - DNA, 22 bp, synthetic construct
  misc_feature 1..22: note = chemically synthesized
  source 1..22: mol_type = other DNA
ctgtccttcttacctctctctg

SEQ ID NO: 105711 - DNA, 22 bp, synthetic construct
  misc_feature 1..22: note = chemically synthesized
  source 1..22: mol_type = other DNA
tgtccttcttacctctctctgc

SEQ ID NO: 105712 - DNA, 22 bp, synthetic construct
  misc_feature 1..22: note = chemically synthesized
  source 1..22: mol_type = other DNA
tccttcttacctctctctgctt

SEQ ID NO: 105713 - DNA, 22 bp, synthetic construct
  misc_feature 1..22: note = chemically synthesized
  source 1..22: mol_type = other DNA
cttacctctctctgcttttcca

SEQ ID NO: 105714 - DNA, 22 bp, synthetic construct
  misc_feature 1..22: note = chemically synthesized
  source 1..22: mol_type = other DNA
ttacctctctctgcttttccat

SEQ ID NO: 105715 - DNA, 22 bp, synthetic construct
  misc_feature 1..22: note = chemically synthesized
  source 1..22: mol_type = other DNA
acctctctctgcttttccatca

SEQ ID NO: 105716 - DNA, 22 bp, synthetic construct
  misc_feature 1..22: note = chemically synthesized
  source 1..22: mol_type = other DNA
cctctctctgcttttccatcaa

SEQ ID NO: 105717 - DNA, 22 bp, synthetic construct
  misc_feature 1..22: note = chemically synthesized
  source 1..22: mol_type = other DNA
tctctgcttttccatcaactcc

SEQ ID NO: 105718 - DNA, 22 bp, synthetic construct
  misc_feature 1..22: note = chemically synthesized
  source 1..22: mol_type = other DNA
tctgcttttccatcaactccaa

SEQ ID NO: 105719 - DNA, 22 bp, synthetic construct
  misc_feature 1..22: note = chemically synthesized
  source 1..22: mol_type = other DNA
tgcttttccatcaactccaaac

SEQ ID NO: 105720 - DNA, 22 bp, synthetic construct
  misc_feature 1..22: note = chemically synthesized
  source 1..22: mol_type = other DNA
cttttccatcaactccaaactc

SEQ ID NO: 105721 - DNA, 22 bp, synthetic construct
  misc_feature 1..22: note = chemically synthesized
  source 1..22: mol_type = other DNA
ttccatcaactccaaactcctg

SEQ ID NO: 105722 - DNA, 22 bp, synthetic construct
  misc_feature 1..22: note = chemically synthesized
  source 1..22: mol_type = other DNA
tccatcaactccaaactcctga

SEQ ID NO: 105723 - DNA, 22 bp, synthetic construct
  misc_feature 1..22: note = chemically synthesized
  source 1..22: mol_type = other DNA
ccatcaactccaaactcctgag

SEQ ID NO: 105724 - DNA, 22 bp, synthetic construct
  misc_feature 1..22: note = chemically synthesized
  source 1..22: mol_type = other DNA
catcaactccaaactcctgagg

SEQ ID NO: 105725 - DNA, 22 bp, synthetic construct
  misc_feature 1..22: note = chemically synthesized
  source 1..22: mol_type = other DNA
caaactcctgaggaactgttgc

SEQ ID NO: 105726 - DNA, 22 bp, synthetic construct
  misc_feature 1..22: note = chemically synthesized
  source 1..22: mol_type = other DNA
ctgaggaactgttgcagttctg

SEQ ID NO: 105727 - DNA, 22 bp, synthetic construct
  misc_feature 1..22: note = chemically synthesized
  source 1..22: mol_type = other DNA
aggaactgttgcagttctgtaa

SEQ ID NO: 105728 - DNA, 22 bp, synthetic construct
  misc_feature 1..22: note = chemically synthesized
  source 1..22: mol_type = other DNA
ttgcagttctgtaacaggtaaa

SEQ ID NO: 105729 - DNA, 22 bp, synthetic construct
  misc_feature 1..22: note = chemically synthesized
  source 1..22: mol_type = other DNA
cagttctgtaacaggtaaaatt

SEQ ID NO: 105730 - DNA, 22 bp, synthetic construct
  misc_feature 1..22: note = chemically synthesized
  source 1..22: mol_type = other DNA
tgtaacaggtaaaattataatg

SEQ ID NO: 105731 - DNA, 22 bp, synthetic construct
  misc_feature 1..22: note = chemically synthesized
  source 1..22: mol_type = other DNA
taacaggtaaaattataatgtt

SEQ ID NO: 105732 - DNA, 22 bp, synthetic construct
  misc_feature 1..22: note = chemically synthesized
  source 1..22: mol_type = other DNA
taatgtttccacagcctaagga

SEQ ID NO: 105733 - DNA, 22 bp, synthetic construct
  misc_feature 1..22: note = chemically synthesized
  source 1..22: mol_type = other DNA
ccacagcctaaggatgccagcc

SEQ ID NO: 105734 - DNA, 22 bp, synthetic construct
  misc_feature 1..22: note = chemically synthesized
  source 1..22: mol_type = other DNA
cacagcctaaggatgccagcca

SEQ ID NO: 105735 - DNA, 22 bp, synthetic construct
  misc_feature 1..22: note = chemically synthesized
  source 1..22: mol_type = other DNA
aggatgccagccatcactactg

SEQ ID NO: 105736 - DNA, 22 bp, synthetic construct
  misc_feature 1..22: note = chemically synthesized
  source 1..22: mol_type = other DNA
ctgtttctgttttcttggttgc

SEQ ID NO: 105737 - DNA, 22 bp, synthetic construct
  misc_feature 1..22: note = chemically synthesized
  source 1..22: mol_type = other DNA
tttctgttttcttggttgccac

SEQ ID NO: 105738 - DNA, 22 bp, synthetic construct
  misc_feature 1..22: note = chemically synthesized
  source 1..22: mol_type = other DNA
ctgttttcttggttgccacgat

SEQ ID NO: 105739 - DNA, 22 bp, synthetic construct
  misc_feature 1..22: note = chemically synthesized
  source 1..22: mol_type = other DNA
tgttttcttggttgccacgatc

SEQ ID NO: 105740 - DNA, 22 bp, synthetic construct
  misc_feature 1..22: note = chemically synthesized
  source 1..22: mol_type = other DNA
ttttcttggttgccacgatcca

SEQ ID NO: 105741 - DNA, 22 bp, synthetic construct
  misc_feature 1..22: note = chemically synthesized
  source 1..22: mol_type = other DNA
tcttggttgccacgatccaaga

SEQ ID NO: 105742 - DNA, 22 bp, synthetic construct
  misc_feature 1..22: note = chemically synthesized
  source 1..22: mol_type = other DNA
cttggttgccacgatccaagag

SEQ ID NO: 105743 - DNA, 22 bp, synthetic construct
  misc_feature 1..22: note = chemically synthesized
  source 1..22: mol_type = other DNA
ttggttgccacgatccaagagg

SEQ ID NO: 105744 - DNA, 22 bp, synthetic construct
  misc_feature 1..22: note = chemically synthesized
  source 1..22: mol_type = other DNA
ggttgccacgatccaagagggg

SEQ ID NO: 105745 - DNA, 22 bp, synthetic construct
  misc_feature 1..22: note = chemically synthesized
  source 1..22: mol_type = other DNA
gttgccacgatccaagaggggt

SEQ ID NO: 105746 - DNA, 22 bp, synthetic construct
  misc_feature 1..22: note = chemically synthesized
  source 1..22: mol_type = other DNA
ccacgatccaagaggggtatgg

SEQ ID NO: 105747 - DNA, 22 bp, synthetic construct
  misc_feature 1..22: note = chemically synthesized
  source 1..22: mol_type = other DNA
attaccagctctgctgcagtct

SEQ ID NO: 105748 - DNA, 22 bp, synthetic construct
  misc_feature 1..22: note = chemically synthesized
  source 1..22: mol_type = other DNA
ttaccagctctgctgcagtctt

SEQ ID NO: 105749 - DNA, 22 bp, synthetic construct
  misc_feature 1..22: note = chemically synthesized
  source 1..22: mol_type = other DNA
ccagctctgctgcagtcttatt

SEQ ID NO: 105750 - DNA, 22 bp, synthetic construct
  misc_feature 1..22: note = chemically synthesized
  source 1..22: mol_type = other DNA
tgctgcagtcttatttaacgag

SEQ ID NO: 105751 - DNA, 22 bp, synthetic construct
  misc_feature 1..22: note = chemically synthesized
  source 1..22: mol_type = other DNA
ctgcagtcttatttaacgagaa

SEQ ID NO: 105752 - DNA, 22 bp, synthetic construct
  misc_feature 1..22: note = chemically synthesized
  source 1..22: mol_type = other DNA
cagtcttatttaacgagaaatt

SEQ ID NO: 105753 - DNA, 22 bp, synthetic construct
  misc_feature 1..22: note = chemically synthesized
  source 1..22: mol_type = other DNA
atttaacgagaaattcagaatc

SEQ ID NO: 105754 - DNA, 22 bp, synthetic construct
  misc_feature 1..22: note = chemically synthesized
  source 1..22: mol_type = other DNA
tttaacgagaaattcagaatcc

SEQ ID NO: 105755 - DNA, 22 bp, synthetic construct
  misc_feature 1..22: note = chemically synthesized
  source 1..22: mol_type = other DNA
aacgagaaattcagaatcctgg

SEQ ID NO: 105756 - DNA, 22 bp, synthetic construct
  misc_feature 1..22: note = chemically synthesized
  source 1..22: mol_type = other DNA
acgagaaattcagaatcctgga

SEQ ID NO: 105757 - DNA, 22 bp, synthetic construct
  misc_feature 1..22: note = chemically synthesized
  source 1..22: mol_type = other DNA
agaatcctggaggcaagtcttt

SEQ ID NO: 105758 - DNA, 22 bp, synthetic construct
  misc_feature 1..22: note = chemically synthesized
  source 1..22: mol_type = other DNA
gaggcaagtctttagcacctag

SEQ ID NO: 105759 - DNA, 22 bp, synthetic construct
  misc_feature 1..22: note = chemically synthesized
  source 1..22: mol_type = other DNA
tagcacctagcagttttcttca

SEQ ID NO: 105760 - DNA, 22 bp, synthetic construct
  misc_feature 1..22: note = chemically synthesized
  source 1..22: mol_type = other DNA
agcacctagcagttttcttcat

SEQ ID NO: 105761 - DNA, 22 bp, synthetic construct
  misc_feature 1..22: note = chemically synthesized
  source 1..22: mol_type = other DNA
gcacctagcagttttcttcata

SEQ ID NO: 105762 - DNA, 22 bp, synthetic construct
  misc_feature 1..22: note = chemically synthesized
  source 1..22: mol_type = other DNA
gcagttttcttcataaaatggc

SEQ ID NO: 105763 - DNA, 22 bp, synthetic construct
  misc_feature 1..22: note = chemically synthesized
  source 1..22: mol_type = other DNA
tcttcataaaatggcctcagta

SEQ ID NO: 105764 - DNA, 22 bp, synthetic construct
  misc_feature 1..22: note = chemically synthesized
  source 1..22: mol_type = other DNA
cttcataaaatggcctcagtat

SEQ ID NO: 105765 - DNA, 22 bp, synthetic construct
  misc_feature 1..22: note = chemically synthesized
  source 1..22: mol_type = other DNA
ttcataaaatggcctcagtatc

SEQ ID NO: 105766 - DNA, 22 bp, synthetic construct
  misc_feature 1..22: note = chemically synthesized
  source 1..22: mol_type = other DNA
cataaaatggcctcagtatcaa

SEQ ID NO: 105767 - DNA, 22 bp, synthetic construct
  misc_feature 1..22: note = chemically synthesized
  source 1..22: mol_type = other DNA
ataaaatggcctcagtatcaaa

SEQ ID NO: 105768 - DNA, 22 bp, synthetic construct
  misc_feature 1..22: note = chemically synthesized
  source 1..22: mol_type = other DNA
agtatcaaaaataaatcagaat

SEQ ID NO: 105769 - DNA, 22 bp, synthetic construct
  misc_feature 1..22: note = chemically synthesized
  source 1..22: mol_type = other DNA
catattgtataaggaaatgttc

SEQ ID NO: 105770 - DNA, 22 bp, synthetic construct
  misc_feature 1..22: note = chemically synthesized
  source 1..22: mol_type = other DNA
atattgtataaggaaatgttct

SEQ ID NO: 105771 - DNA, 22 bp, synthetic construct
  misc_feature 1..22: note = chemically synthesized
  source 1..22: mol_type = other DNA
tataaggaaatgttctgatgct

SEQ ID NO: 105772 - DNA, 22 bp, synthetic construct
  misc_feature 1..22: note = chemically synthesized
  source 1..22: mol_type = other DNA
tgatgctacctctgtatcagct

SEQ ID NO: 105773 - DNA, 22 bp, synthetic construct
  misc_feature 1..22: note = chemically synthesized
  source 1..22: mol_type = other DNA
atgctacctctgtatcagctcc

SEQ ID NO: 105774 - DNA, 22 bp, synthetic construct
  misc_feature 1..22: note = chemically synthesized
  source 1..22: mol_type = other DNA
cctctgtatcagctcctgtgag

SEQ ID NO: 105775 - DNA, 22 bp, synthetic construct
  misc_feature 1..22: note = chemically synthesized
  source 1..22: mol_type = other DNA
tgtatcagctcctgtgagtcag

SEQ ID NO: 105776 - DNA, 22 bp, synthetic construct
  misc_feature 1..22: note = chemically synthesized
  source 1..22: mol_type = other DNA
tatcagctcctgtgagtcagga

SEQ ID NO: 105777 - DNA, 22 bp, synthetic construct
  misc_feature 1..22: note = chemically synthesized
  source 1..22: mol_type = other DNA
ctgtgagtcaggattactaact

SEQ ID NO: 105778 - DNA, 22 bp, synthetic construct
  misc_feature 1..22: note = chemically synthesized
  source 1..22: mol_type = other DNA
tgagtcaggattactaacttac

SEQ ID NO: 105779 - DNA, 22 bp, synthetic construct
  misc_feature 1..22: note = chemically synthesized
  source 1..22: mol_type = other DNA
ctaacttactgagattgaaatc

SEQ ID NO: 105780 - DNA, 22 bp, synthetic construct
  misc_feature 1..22: note = chemically synthesized
  source 1..22: mol_type = other DNA
acttactgagattgaaatcacc

SEQ ID NO: 105781 - DNA, 22 bp, synthetic construct
  misc_feature 1..22: note = chemically synthesized
  source 1..22: mol_type = other DNA
actgagattgaaatcaccaaca

SEQ ID NO: 105782 - DNA, 22 bp, synthetic construct
  misc_feature 1..22: note = chemically synthesized
  source 1..22: mol_type = other DNA
ctgagattgaaatcaccaacac

SEQ ID NO: 105783 - DNA, 22 bp, synthetic construct
  misc_feature 1..22: note = chemically synthesized
  source 1..22: mol_type = other DNA
agattgaaatcaccaacactag

SEQ ID NO: 105784 - DNA, 22 bp, synthetic construct
  misc_feature 1..22: note = chemically synthesized
  source 1..22: mol_type = other DNA
aaatcaccaacactagggaatc

SEQ ID NO: 105785 - DNA, 22 bp, synthetic construct
  misc_feature 1..22: note = chemically synthesized
  source 1..22: mol_type = other DNA
gggaatccctaaaattaaatca

SEQ ID NO: 105786 - DNA, 22 bp, synthetic construct
  misc_feature 1..22: note = chemically synthesized
  source 1..22: mol_type = other DNA
aaattaaatcacattgaattca

SEQ ID NO: 105787 - DNA, 22 bp, synthetic construct
  misc_feature 1..22: note = chemically synthesized
  source 1..22: mol_type = other DNA
aatcacattgaattcatataga

SEQ ID NO: 105788 - DNA, 22 bp, synthetic construct
  misc_feature 1..22: note = chemically synthesized
  source 1..22: mol_type = other DNA
aattcatatagaagactgaatt

SEQ ID NO: 105789 - DNA, 22 bp, synthetic construct
  misc_feature 1..22: note = chemically synthesized
  source 1..22: mol_type = other DNA
atatagaagactgaattataat

SEQ ID NO: 105790 - DNA, 22 bp, synthetic construct
  misc_feature 1..22: note = chemically synthesized
  source 1..22: mol_type = other DNA
aattataattattacacaaatg

SEQ ID NO: 105791 - DNA, 22 bp, synthetic construct
  misc_feature 1..22: note = chemically synthesized
  source 1..22: mol_type = other DNA
taattattacacaaatgttgtt

SEQ ID NO: 105792 - DNA, 22 bp, synthetic construct
  misc_feature 1..22: note = chemically synthesized
  source 1..22: mol_type = other DNA
ttacacaaatgttgttctacct

SEQ ID NO: 105793 - DNA, 22 bp, synthetic construct
  misc_feature 1..22: note = chemically synthesized
  source 1..22: mol_type = other DNA
cacaaatgttgttctaccttcg

SEQ ID NO: 105794 - DNA, 22 bp, synthetic construct
  misc_feature 1..22: note = chemically synthesized
  source 1..22: mol_type = other DNA
ttctaccttcgaaagatccttc

SEQ ID NO: 105795 - DNA, 22 bp, synthetic construct
  misc_feature 1..22: note = chemically synthesized
  source 1..22: mol_type = other DNA
taccttcgaaagatccttcatg

SEQ ID NO: 105796 - DNA, 22 bp, synthetic construct
  misc_feature 1..22: note = chemically synthesized
  source 1..22: mol_type = other DNA
ccttcgaaagatccttcatgct

SEQ ID NO: 105797 - DNA, 22 bp, synthetic construct
  misc_feature 1..22: note = chemically synthesized
  source 1..22: mol_type = other DNA
cgaaagatccttcatgcttaaa

SEQ ID NO: 105798 - DNA, 22 bp, synthetic construct
  misc_feature 1..22: note = chemically synthesized
  source 1..22: mol_type = other DNA
gaaagatccttcatgcttaaaa

SEQ ID NO: 105799 - DNA, 22 bp, synthetic construct
  misc_feature 1..22: note = chemically synthesized
  source 1..22: mol_type = other DNA
catgcttaaaaacacagattga

SEQ ID NO: 105800 - DNA, 22 bp, synthetic construct
  misc_feature 1..22: note = chemically synthesized
  source 1..22: mol_type = other DNA
atgcttaaaaacacagattgag

SEQ ID NO: 105801 - DNA, 22 bp, synthetic construct
  misc_feature 1..22: note = chemically synthesized
  source 1..22: mol_type = other DNA
aaaaacacagattgaggaataa

SEQ ID NO: 105802 - DNA, 22 bp, synthetic construct
  misc_feature 1..22: note = chemically synthesized
  source 1..22: mol_type = other DNA
aaaacacagattgaggaataag

SEQ ID NO: 105803 - DNA, 22 bp, synthetic construct
  misc_feature 1..22: note = chemically synthesized
  source 1..22: mol_type = other DNA
aggaataagaggatgtacggaa

SEQ ID NO: 105804 - DNA, 22 bp, synthetic construct
  misc_feature 1..22: note = chemically synthesized
  source 1..22: mol_type = other DNA
gagaaaggacaaattggtgaca

SEQ ID NO: 105805 - DNA, 22 bp, synthetic construct
  misc_feature 1..22: note = chemically synthesized
  source 1..22: mol_type = other DNA
gtgacacatattctgaagggta

SEQ ID NO: 105806 - DNA, 22 bp, synthetic construct
  misc_feature 1..22: note = chemically synthesized
  source 1..22: mol_type = other DNA
tgaagggtaaacatagaagaaa

SEQ ID NO: 105807 - DNA, 22 bp, synthetic construct
  misc_feature 1..22: note = chemically synthesized
  source 1..22: mol_type = other DNA
aagggtaaacatagaagaaagt

SEQ ID NO: 105808 - DNA, 22 bp, synthetic construct
  misc_feature 1..22: note = chemically synthesized
  source 1..22: mol_type = other DNA
aaattttttttaattaaagttt

SEQ ID NO: 105809 - DNA, 22 bp, synthetic construct
  misc_feature 1..22: note = chemically synthesized
  source 1..22: mol_type = other DNA
tttttaattaaagttttaaaaa

SEQ ID NO: 105810 - DNA, 22 bp, synthetic construct
  misc_feature 1..22: note = chemically synthesized
  source 1..22: mol_type = other DNA
ttttaattaaagttttaaaaaa

SEQ ID NO: 105811 - DNA, 22 bp, synthetic construct
  misc_feature 1..22: note = chemically synthesized
  source 1..22: mol_type = other DNA
tttaattaaagttttaaaaaat

SEQ ID NO: 105812 - DNA, 22 bp, synthetic construct
  misc_feature 1..22: note = chemically synthesized
  source 1..22: mol_type = other DNA
ttaattaaagttttaaaaaatt

SEQ ID NO: 105813 - DNA, 22 bp, synthetic construct
  misc_feature 1..22: note = chemically synthesized
  source 1..22: mol_type = other DNA
taattaaagttttaaaaaattt

SEQ ID NO: 105814 - DNA, 22 bp, synthetic construct
  misc_feature 1..22: note = chemically synthesized
  source 1..22: mol_type = other DNA
aattaaagttttaaaaaatttt

SEQ ID NO: 105815 - DNA, 22 bp, synthetic construct
  misc_feature 1..22: note = chemically synthesized
  source 1..22: mol_type = other DNA
attaaagttttaaaaaatttta

SEQ ID NO: 105816 - DNA, 22 bp, synthetic construct
  misc_feature 1..22: note = chemically synthesized
  source 1..22: mol_type = other DNA
aagttttaaaaaattttaaaaa

SEQ ID NO: 105817 - DNA, 22 bp, synthetic construct
  misc_feature 1..22: note = chemically synthesized
  source 1..22: mol_type = other DNA
taaaaaattttaaaaataaaaa

SEQ ID NO: 105818 - DNA, 22 bp, synthetic construct
  misc_feature 1..22: note = chemically synthesized
  source 1..22: mol_type = other DNA
aaaaaattttaaaaataaaaaa

SEQ ID NO: 105819 - DNA, 22 bp, synthetic construct
  misc_feature 1..22: note = chemically synthesized
  source 1..22: mol_type = other DNA
aaaaattttaaaaataaaaaat

SEQ ID NO: 105820 - DNA, 22 bp, synthetic construct
  misc_feature 1..22: note = chemically synthesized
  source 1..22: mol_type = other DNA
taaaaataaaaaatttttaaaa

SEQ ID NO: 105821 - DNA, 22 bp, synthetic construct
  misc_feature 1..22: note = chemically synthesized
  source 1..22: mol_type = other DNA
aaaaataaaaaatttttaaaaa

SEQ ID NO: 105822 - DNA, 22 bp, synthetic construct
  misc_feature 1..22: note = chemically synthesized
  source 1..22: mol_type = other DNA
aaaataaaaaatttttaaaaag

SEQ ID NO: 105823 - DNA, 22 bp, synthetic construct
  misc_feature 1..22: note = chemically synthesized
  source 1..22: mol_type = other DNA
ttaaaaagaaagccataaaatc

SEQ ID NO: 105824 - DNA, 22 bp, synthetic construct
  misc_feature 1..22: note = chemically synthesized
  source 1..22: mol_type = other DNA
taaaaagaaagccataaaatct

SEQ ID NO: 105825 - DNA, 22 bp, synthetic construct
  misc_feature 1..22: note = chemically synthesized
  source 1..22: mol_type = other DNA
aaaaagaaagccataaaatctg

SEQ ID NO: 105826 - DNA, 22 bp, synthetic construct
  misc_feature 1..22: note = chemically synthesized
  source 1..22: mol_type = other DNA
aaaagaaagccataaaatctgg

SEQ ID NO: 105827 - DNA, 22 bp, synthetic construct
  misc_feature 1..22: note = chemically synthesized
  source 1..22: mol_type = other DNA
ggattcctttaaaaaaaattgt

SEQ ID NO: 105828 - DNA, 22 bp, synthetic construct
  misc_feature 1..22: note = chemically synthesized
  source 1..22: mol_type = other DNA
ctttaaaaaaaattgtgtaagg

SEQ ID NO: 105829 - DNA, 22 bp, synthetic construct
  misc_feature 1..22: note = chemically synthesized
  source 1..22: mol_type = other DNA
taaaaaaaattgtgtaaggatc

SEQ ID NO: 105830 - DNA, 22 bp, synthetic construct
  misc_feature 1..22: note = chemically synthesized
  source 1..22: mol_type = other DNA
aaaaaaaattgtgtaaggatca

SEQ ID NO: 105831 - DNA, 22 bp, synthetic construct
  misc_feature 1..22: note = chemically synthesized
  source 1..22: mol_type = other DNA
aaaaaaattgtgtaaggatcaa

SEQ ID NO: 105832 - DNA, 22 bp, synthetic construct
  misc_feature 1..22: note = chemically synthesized
  source 1..22: mol_type = other DNA
tgtaaggatcaaactagatttc

SEQ ID NO: 105833 - DNA, 22 bp, synthetic construct
  misc_feature 1..22: note = chemically synthesized
  source 1..22: mol_type = other DNA
gatttccagagcacaagtactt

SEQ ID NO: 105834 - DNA, 22 bp, synthetic construct
  misc_feature 1..22: note = chemically synthesized
  source 1..22: mol_type = other DNA
ccagagcacaagtactttttaa

SEQ ID NO: 105835 - DNA, 22 bp, synthetic construct
  misc_feature 1..22: note = chemically synthesized
  source 1..22: mol_type = other DNA
cagagcacaagtactttttaaa

SEQ ID NO: 105836 - DNA, 22 bp, synthetic construct
  misc_feature 1..22: note = chemically synthesized
  source 1..22: mol_type = other DNA
tttaaaatgtttgtgagctttt

SEQ ID NO: 105837 - DNA, 22 bp, synthetic construct
  misc_feature 1..22: note = chemically synthesized
  source 1..22: mol_type = other DNA
ttaaaatgtttgtgagcttttc

SEQ ID NO: 105838 - DNA, 22 bp, synthetic construct
  misc_feature 1..22: note = chemically synthesized
  source 1..22: mol_type = other DNA
taaaatgtttgtgagcttttcc

SEQ ID NO: 105839 - DNA, 22 bp, synthetic construct
  misc_feature 1..22: note = chemically synthesized
  source 1..22: mol_type = other DNA
aaaatgtttgtgagcttttcct

SEQ ID NO: 105840 - DNA, 22 bp, synthetic construct
  misc_feature 1..22: note = chemically synthesized
  source 1..22: mol_type = other DNA
aaatgtttgtgagcttttcctt

SEQ ID NO: 105841 - DNA, 22 bp, synthetic construct
  misc_feature 1..22: note = chemically synthesized
  source 1..22: mol_type = other DNA
gtgagcttttccttaaaaaaca

SEQ ID NO: 105842 - DNA, 22 bp, synthetic construct
  misc_feature 1..22: note = chemically synthesized
  source 1..22: mol_type = other DNA
tgagcttttccttaaaaaacaa

SEQ ID NO: 105843 - DNA, 22 bp, synthetic construct
  misc_feature 1..22: note = chemically synthesized
  source 1..22: mol_type = other DNA
ttccttaaaaaacaataacgtc

SEQ ID NO: 105844 - DNA, 22 bp, synthetic construct
  misc_feature 1..22: note = chemically synthesized
  source 1..22: mol_type = other DNA
tccttaaaaaacaataacgtct

SEQ ID NO: 105845 - DNA, 22 bp, synthetic construct
  misc_feature 1..22: note = chemically synthesized
  source 1..22: mol_type = other DNA
ccttaaaaaacaataacgtctt

SEQ ID NO: 105846 - DNA, 22 bp, synthetic construct
  misc_feature 1..22: note = chemically synthesized
  source 1..22: mol_type = other DNA
cttaaaaaacaataacgtcttt

SEQ ID NO: 105847 - DNA, 22 bp, synthetic construct
  misc_feature 1..22: note = chemically synthesized
  source 1..22: mol_type = other DNA
aaaaaacaataacgtctttaga

SEQ ID NO: 105848 - DNA, 22 bp, synthetic construct
  misc_feature 1..22: note = chemically synthesized
  source 1..22: mol_type = other DNA
aaaaacaataacgtctttagag

SEQ ID NO: 105849 - DNA, 22 bp, synthetic construct
  misc_feature 1..22: note = chemically synthesized
  source 1..22: mol_type = other DNA
tagagaaattggccataaaaca

SEQ ID NO: 105850 - DNA, 22 bp, synthetic construct
  misc_feature 1..22: note = chemically synthesized
  source 1..22: mol_type = other DNA
agagaaattggccataaaacac

SEQ ID NO: 105851 - DNA, 22 bp, synthetic construct
  misc_feature 1..22: note = chemically synthesized
  source 1..22: mol_type = other DNA
gagaaattggccataaaacact

SEQ ID NO: 105852 - DNA, 22 bp, synthetic construct
  misc_feature 1..22: note = chemically synthesized
  source 1..22: mol_type = other DNA
gccataaaacacttgaaaccaa

SEQ ID NO: 105853 - DNA, 22 bp, synthetic construct
  misc_feature 1..22: note = chemically synthesized
  source 1..22: mol_type = other DNA
gaaaccaaaaaagaaagttttt

SEQ ID NO: 105854 - DNA, 22 bp, synthetic construct
  misc_feature 1..22: note = chemically synthesized
  source 1..22: mol_type = other DNA
aaaccaaaaaagaaagtttttt

SEQ ID NO: 105855 - DNA, 22 bp, synthetic construct
  misc_feature 1..22: note = chemically synthesized
  source 1..22: mol_type = other DNA
tttattatatttatgagcagaa

SEQ ID NO: 105856 - DNA, 22 bp, synthetic construct
  misc_feature 1..22: note = chemically synthesized
  source 1..22: mol_type = other DNA
ttattatatttatgagcagaaa

SEQ ID NO: 105857 - DNA, 22 bp, synthetic construct
  misc_feature 1..22: note = chemically synthesized
  source 1..22: mol_type = other DNA
tattatatttatgagcagaaaa

SEQ ID NO: 105858 - DNA, 22 bp, synthetic construct
  misc_feature 1..22: note = chemically synthesized
  source 1..22: mol_type = other DNA
attatatttatgagcagaaaaa

SEQ ID NO: 105859 - DNA, 22 bp, synthetic construct
  misc_feature 1..22: note = chemically synthesized
  source 1..22: mol_type = other DNA
ttatatttatgagcagaaaaaa

SEQ ID NO: 105860 - DNA, 22 bp, synthetic construct
  misc_feature 1..22: note = chemically synthesized
  source 1..22: mol_type = other DNA
tatttatgagcagaaaaaaatg

SEQ ID NO: 105861 - DNA, 22 bp, synthetic construct
  misc_feature 1..22: note = chemically synthesized
  source 1..22: mol_type = other DNA
atgagcagaaaaaaatgtttac

SEQ ID NO: 105862 - DNA, 22 bp, synthetic construct
  misc_feature 1..22: note = chemically synthesized
  source 1..22: mol_type = other DNA
tgagcagaaaaaaatgtttaca

SEQ ID NO: 105863 - DNA, 22 bp, synthetic construct
  misc_feature 1..22: note = chemically synthesized
  source 1..22: mol_type = other DNA
acagtcatatctccctccatct

SEQ ID NO: 105864 - DNA, 22 bp, synthetic construct
  misc_feature 1..22: note = chemically synthesized
  source 1..22: mol_type = other DNA
cagtcatatctccctccatctc

SEQ ID NO: 105865 - DNA, 22 bp, synthetic construct
  misc_feature 1..22: note = chemically synthesized
  source 1..22: mol_type = other DNA
cctccatctctaagcttgggtc

SEQ ID NO: 105866 - DNA, 22 bp, synthetic construct
  misc_feature 1..22: note = chemically synthesized
  source 1..22: mol_type = other DNA
catctctaagcttgggtcatta

SEQ ID NO: 105867 - DNA, 22 bp, synthetic construct
  misc_feature 1..22: note = chemically synthesized
  source 1..22: mol_type = other DNA
taagcttgggtcattaaaagta

SEQ ID NO: 105868 - DNA, 22 bp, synthetic construct
  misc_feature 1..22: note = chemically synthesized
  source 1..22: mol_type = other DNA
agcttgggtcattaaaagtaag

SEQ ID NO: 105869 - DNA, 22 bp, synthetic construct
  misc_feature 1..22: note = chemically synthesized
  source 1..22: mol_type = other DNA
gggtcattaaaagtaagacagg

SEQ ID NO: 105870 - DNA, 22 bp, synthetic construct
  misc_feature 1..22: note = chemically synthesized
  source 1..22: mol_type = other DNA
ggtcattaaaagtaagacaggg

SEQ ID NO: 105871 - DNA, 22 bp, synthetic construct
  misc_feature 1..22: note = chemically synthesized
  source 1..22: mol_type = other DNA
aaagtaagacagggaaggttat

SEQ ID NO: 105872 - DNA, 22 bp, synthetic construct
  misc_feature 1..22: note = chemically synthesized
  source 1..22: mol_type = other DNA
tggtacctcaaagaaaatgaaa

SEQ ID NO: 105873 - DNA, 22 bp, synthetic construct
  misc_feature 1..22: note = chemically synthesized
  source 1..22: mol_type = other DNA
aaagaaaatgaaaggtaaatca

SEQ ID NO: 105874 - DNA, 22 bp, synthetic construct
  misc_feature 1..22: note = chemically synthesized
  source 1..22: mol_type = other DNA
agattttgggaataaaaagaaa

SEQ ID NO: 105875 - DNA, 22 bp, synthetic construct
  misc_feature 1..22: note = chemically synthesized
  source 1..22: mol_type = other DNA
tgggaataaaaagaaacacaaa

SEQ ID NO: 105876 - DNA, 22 bp, synthetic construct
  misc_feature 1..22: note = chemically synthesized
  source 1..22: mol_type = other DNA
gggaataaaaagaaacacaaaa

SEQ ID NO: 105877 - DNA, 22 bp, synthetic construct
  misc_feature 1..22: note = chemically synthesized
  source 1..22: mol_type = other DNA
ggaataaaaagaaacacaaaag

SEQ ID NO: 105878 - DNA, 22 bp, synthetic construct
  misc_feature 1..22: note = chemically synthesized
  source 1..22: mol_type = other DNA
cccaacactgggaagccgttga

SEQ ID NO: 105879 - DNA, 22 bp, synthetic construct
  misc_feature 1..22: note = chemically synthesized
  source 1..22: mol_type = other DNA
ggaagccgttgatatttaccca

SEQ ID NO: 105880 - DNA, 22 bp, synthetic construct
  misc_feature 1..22: note = chemically synthesized
  source 1..22: mol_type = other DNA
atatttacccagaggcaggcgt

SEQ ID NO: 105881 - DNA, 22 bp, synthetic construct
  misc_feature 1..22: note = chemically synthesized
  source 1..22: mol_type = other DNA
acccagaggcaggcgtgtgggg

SEQ ID NO: 105882 - DNA, 22 bp, synthetic construct
  misc_feature 1..22: note = chemically synthesized
  source 1..22: mol_type = other DNA
cccagaggcaggcgtgtgggga

SEQ ID NO: 105883 - DNA, 22 bp, synthetic construct
  misc_feature 1..22: note = chemically synthesized
  source 1..22: mol_type = other DNA
taggagagctagatactgtcat

SEQ ID NO: 105884 - DNA, 22 bp, synthetic construct
  misc_feature 1..22: note = chemically synthesized
  source 1..22: mol_type = other DNA
ggagagctagatactgtcatca

SEQ ID NO: 105885 - DNA, 22 bp, synthetic construct
  misc_feature 1..22: note = chemically synthesized
  source 1..22: mol_type = other DNA
gatactgtcatcaaactgaggc

SEQ ID NO: 105886 - DNA, 22 bp, synthetic construct
  misc_feature 1..22: note = chemically synthesized
  source 1..22: mol_type = other DNA
tcatcaaactgaggcccactat

SEQ ID NO: 105887 - DNA, 22 bp, synthetic construct
  misc_feature 1..22: note = chemically synthesized
  source 1..22: mol_type = other DNA
aggcccactataagcagtgtca

SEQ ID NO: 105888 - DNA, 22 bp, synthetic construct
  misc_feature 1..22: note = chemically synthesized
  source 1..22: mol_type = other DNA
taagcagtgtcaccagagatga

SEQ ID NO: 105889 - DNA, 22 bp, synthetic construct
  misc_feature 1..22: note = chemically synthesized
  source 1..22: mol_type = other DNA
tatgcatgctcccaaggctgca

SEQ ID NO: 105890 - DNA, 22 bp, synthetic construct
  misc_feature 1..22: note = chemically synthesized
  source 1..22: mol_type = other DNA
ccaaggctgcactatgtggcaa

SEQ ID NO: 105891 - DNA, 22 bp, synthetic construct
  misc_feature 1..22: note = chemically synthesized
  source 1..22: mol_type = other DNA
cactatgtggcaaaattccatt

SEQ ID NO: 105892 - DNA, 22 bp, synthetic construct
  misc_feature 1..22: note = chemically synthesized
  source 1..22: mol_type = other DNA
tgtggcaaaattccattcagat

SEQ ID NO: 105893 - DNA, 22 bp, synthetic construct
  misc_feature 1..22: note = chemically synthesized
  source 1..22: mol_type = other DNA
cattcagatggcttagctatta

SEQ ID NO: 105894 - DNA, 22 bp, synthetic construct
  misc_feature 1..22: note = chemically synthesized
  source 1..22: mol_type = other DNA
agatggcttagctattaacaag

SEQ ID NO: 105895 - DNA, 22 bp, synthetic construct
  misc_feature 1..22: note = chemically synthesized
  source 1..22: mol_type = other DNA
agctattaacaagtgttaagaa

SEQ ID NO: 105896 - DNA, 22 bp, synthetic construct
  misc_feature 1..22: note = chemically synthesized
  source 1..22: mol_type = other DNA
gctattaacaagtgttaagaaa

SEQ ID NO: 105897 - DNA, 22 bp, synthetic construct
  misc_feature 1..22: note = chemically synthesized
  source 1..22: mol_type = other DNA
ttaacaagtgttaagaaaatta

SEQ ID NO: 105898 - DNA, 22 bp, synthetic construct
  misc_feature 1..22: note = chemically synthesized
  source 1..22: mol_type = other DNA
acaagtgttaagaaaattatac

SEQ ID NO: 105899 - DNA, 22 bp, synthetic construct
  misc_feature 1..22: note = chemically synthesized
  source 1..22: mol_type = other DNA
agaaaattatactagaagcaca

SEQ ID NO: 105900 - DNA, 22 bp, synthetic construct
  misc_feature 1..22: note = chemically synthesized
  source 1..22: mol_type = other DNA
tactagaagcacaagaactagt

SEQ ID NO: 105901 - DNA, 22 bp, synthetic construct
  misc_feature 1..22: note = chemically synthesized
  source 1..22: mol_type = other DNA
gaagcacaagaactagtttttc

SEQ ID NO: 105902 - DNA, 22 bp, synthetic construct
  misc_feature 1..22: note = chemically synthesized
  source 1..22: mol_type = other DNA
gtttttctggataaaggtggag

SEQ ID NO: 105903 - DNA, 22 bp, synthetic construct
  misc_feature 1..22: note = chemically synthesized
  source 1..22: mol_type = other DNA
ttctggataaaggtggagcagc

SEQ ID NO: 105904 - DNA, 22 bp, synthetic construct
  misc_feature 1..22: note = chemically synthesized
  source 1..22: mol_type = other DNA
tctggataaaggtggagcagct

SEQ ID NO: 105905 - DNA, 22 bp, synthetic construct
  misc_feature 1..22: note = chemically synthesized
  source 1..22: mol_type = other DNA
ctggataaaggtggagcagcta

SEQ ID NO: 105906 - DNA, 22 bp, synthetic construct
  misc_feature 1..22: note = chemically synthesized
  source 1..22: mol_type = other DNA
tggataaaggtggagcagctat

SEQ ID NO: 105907 - DNA, 22 bp, synthetic construct
  misc_feature 1..22: note = chemically synthesized
  source 1..22: mol_type = other DNA
gataaaggtggagcagctatgg

SEQ ID NO: 105908 - DNA, 22 bp, synthetic construct
  misc_feature 1..22: note = chemically synthesized
  source 1..22: mol_type = other DNA
tggctgtgaaattgataggcag

SEQ ID NO: 105909 - DNA, 22 bp, synthetic construct
  misc_feature 1..22: note = chemically synthesized
  source 1..22: mol_type = other DNA
tgaaattgataggcagctctca

SEQ ID NO: 105910 - DNA, 22 bp, synthetic construct
  misc_feature 1..22: note = chemically synthesized
  source 1..22: mol_type = other DNA
ataggcagctctcaactcagaa

SEQ ID NO: 105911 - DNA, 22 bp, synthetic construct
  misc_feature 1..22: note = chemically synthesized
  source 1..22: mol_type = other DNA
tcaactcagaacataaatgttt

SEQ ID NO: 105912 - DNA, 22 bp, synthetic construct
  misc_feature 1..22: note = chemically synthesized
  source 1..22: mol_type = other DNA
aactcagaacataaatgtttag

SEQ ID NO: 105913 - DNA, 22 bp, synthetic construct
  misc_feature 1..22: note = chemically synthesized
  source 1..22: mol_type = other DNA
agaacataaatgtttagtgatt

SEQ ID NO: 105914 - DNA, 22 bp, synthetic construct
  misc_feature 1..22: note = chemically synthesized
  source 1..22: mol_type = other DNA
agtgatttcctaaggatctggg

SEQ ID NO: 105915 - DNA, 22 bp, synthetic construct
  misc_feature 1..22: note = chemically synthesized
  source 1..22: mol_type = other DNA
gtgatttcctaaggatctgggg

SEQ ID NO: 105916 - DNA, 22 bp, synthetic construct
  misc_feature 1..22: note = chemically synthesized
  source 1..22: mol_type = other DNA
cctaaggatctggggtcctgac

SEQ ID NO: 105917 - DNA, 22 bp, synthetic construct
  misc_feature 1..22: note = chemically synthesized
  source 1..22: mol_type = other DNA
ctaaggatctggggtcctgact

SEQ ID NO: 105918 - DNA, 22 bp, synthetic construct
  misc_feature 1..22: note = chemically synthesized
  source 1..22: mol_type = other DNA
aggatctggggtcctgacttga

SEQ ID NO: 105919 - DNA, 22 bp, synthetic construct
  misc_feature 1..22: note = chemically synthesized
  source 1..22: mol_type = other DNA
gggtcctgacttgatgtgtgat

SEQ ID NO: 105920 - DNA, 22 bp, synthetic construct
  misc_feature 1..22: note = chemically synthesized
  source 1..22: mol_type = other DNA
acttgatgtgtgatgatttttc

SEQ ID NO: 105921 - DNA, 22 bp, synthetic construct
  misc_feature 1..22: note = chemically synthesized
  source 1..22: mol_type = other DNA
gatgtgtgatgatttttccttg

SEQ ID NO: 105922 - DNA, 22 bp, synthetic construct
  misc_feature 1..22: note = chemically synthesized
  source 1..22: mol_type = other DNA
atgtgtgatgatttttccttga

SEQ ID NO: 105923 - DNA, 22 bp, synthetic construct
  misc_feature 1..22: note = chemically synthesized
  source 1..22: mol_type = other DNA
ttccttgaactgatatatcata

SEQ ID NO: 105924 - DNA, 22 bp, synthetic construct
  misc_feature 1..22: note = chemically synthesized
  source 1..22: mol_type = other DNA
tccttgaactgatatatcatat

SEQ ID NO: 105925 - DNA, 22 bp, synthetic construct
  misc_feature 1..22: note = chemically synthesized
  source 1..22: mol_type = other DNA
ccttgaactgatatatcatata

SEQ ID NO: 105926 - DNA, 22 bp, synthetic construct
  misc_feature 1..22: note = chemically synthesized
  source 1..22: mol_type = other DNA
cttgaactgatatatcatatat

SEQ ID NO: 105927 - DNA, 22 bp, synthetic construct
  misc_feature 1..22: note = chemically synthesized
  source 1..22: mol_type = other DNA
gaactgatatatcatatatgaa

SEQ ID NO: 105928 - DNA, 22 bp, synthetic construct
  misc_feature 1..22: note = chemically synthesized
  source 1..22: mol_type = other DNA
aactgatatatcatatatgaag

SEQ ID NO: 105929 - DNA, 22 bp, synthetic construct
  misc_feature 1..22: note = chemically synthesized
  source 1..22: mol_type = other DNA
atatatcatatatgaagatata

SEQ ID NO: 105930 - DNA, 22 bp, synthetic construct
  misc_feature 1..22: note = chemically synthesized
  source 1..22: mol_type = other DNA
taggagctccattcaccaatac

SEQ ID NO: 105931 - DNA, 22 bp, synthetic construct
  misc_feature 1..22: note = chemically synthesized
  source 1..22: mol_type = other DNA
cattcaccaataccatctggga

SEQ ID NO: 105932 - DNA, 22 bp, synthetic construct
  misc_feature 1..22: note = chemically synthesized
  source 1..22: mol_type = other DNA
accaataccatctgggacaagt

SEQ ID NO: 105933 - DNA, 22 bp, synthetic construct
  misc_feature 1..22: note = chemically synthesized
  source 1..22: mol_type = other DNA
ggacaagttggaaaatgactat

SEQ ID NO: 105934 - DNA, 22 bp, synthetic construct
  misc_feature 1..22: note = chemically synthesized
  source 1..22: mol_type = other DNA
gaaaatgactattttgagtcag

SEQ ID NO: 105935 - DNA, 22 bp, synthetic construct
  misc_feature 1..22: note = chemically synthesized
  source 1..22: mol_type = other DNA
ttttgagtcagcacagaattgg

SEQ ID NO: 105936 - DNA, 22 bp, synthetic construct
  misc_feature 1..22: note = chemically synthesized
  source 1..22: mol_type = other DNA
tgagtcagcacagaattggtga

SEQ ID NO: 105937 - DNA, 22 bp, synthetic construct
  misc_feature 1..22: note = chemically synthesized
  source 1..22: mol_type = other DNA
gagtcagcacagaattggtgag

SEQ ID NO: 105938 - DNA, 22 bp, synthetic construct
  misc_feature 1..22: note = chemically synthesized
  source 1..22: mol_type = other DNA
agtcagcacagaattggtgagc

SEQ ID NO: 105939 - DNA, 22 bp, synthetic construct
  misc_feature 1..22: note = chemically synthesized
  source 1..22: mol_type = other DNA
gtgagcacatgccacacaactg

SEQ ID NO: 105940 - DNA, 22 bp, synthetic construct
  misc_feature 1..22: note = chemically synthesized
  source 1..22: mol_type = other DNA
cactgtgtttagttctaaataa

SEQ ID NO: 105941 - DNA, 22 bp, synthetic construct
  misc_feature 1..22: note = chemically synthesized
  source 1..22: mol_type = other DNA
tgtttagttctaaataaccatg

SEQ ID NO: 105942 - DNA, 22 bp, synthetic construct
  misc_feature 1..22: note = chemically synthesized
  source 1..22: mol_type = other DNA
agttctaaataaccatgtaata

SEQ ID NO: 105943 - DNA, 22 bp, synthetic construct
  misc_feature 1..22: note = chemically synthesized
  source 1..22: mol_type = other DNA
gttctaaataaccatgtaataa

SEQ ID NO: 105944 - DNA, 22 bp, synthetic construct
  misc_feature 1..22: note = chemically synthesized
  source 1..22: mol_type = other DNA
taaataaccatgtaataagcac

SEQ ID NO: 105945 - DNA, 22 bp, synthetic construct
  misc_feature 1..22: note = chemically synthesized
  source 1..22: mol_type = other DNA
aataaccatgtaataagcacag

SEQ ID NO: 105946 - DNA, 22 bp, synthetic construct
  misc_feature 1..22: note = chemically synthesized
  source 1..22: mol_type = other DNA
ctcttaagaagctctcaatatg

SEQ ID NO: 105947 - DNA, 22 bp, synthetic construct
  misc_feature 1..22: note = chemically synthesized
  source 1..22: mol_type = other DNA
ttaagaagctctcaatatggcc

SEQ ID NO: 105948 - DNA, 22 bp, synthetic construct
  misc_feature 1..22: note = chemically synthesized
  source 1..22: mol_type = other DNA
aagaagctctcaatatggccta

SEQ ID NO: 105949 - DNA, 22 bp, synthetic construct
  misc_feature 1..22: note = chemically synthesized
  source 1..22: mol_type = other DNA
agaagctctcaatatggcctat

SEQ ID NO: 105950 - DNA, 22 bp, synthetic construct
  misc_feature 1..22: note = chemically synthesized
  source 1..22: mol_type = other DNA
tcaatatggcctatgagtttat

SEQ ID NO: 105951 - DNA, 22 bp, synthetic construct
  misc_feature 1..22: note = chemically synthesized
  source 1..22: mol_type = other DNA
aatatggcctatgagtttataa

SEQ ID NO: 105952 - DNA, 22 bp, synthetic construct
  misc_feature 1..22: note = chemically synthesized
  source 1..22: mol_type = other DNA
tgagtttataatagtgcttaat

SEQ ID NO: 105953 - DNA, 22 bp, synthetic construct
  misc_feature 1..22: note = chemically synthesized
  source 1..22: mol_type = other DNA
ataatagtgcttaatattctcc

SEQ ID NO: 105954 - DNA, 22 bp, synthetic construct
  misc_feature 1..22: note = chemically synthesized
  source 1..22: mol_type = other DNA
taatagtgcttaatattctccc

SEQ ID NO: 105955 - DNA, 22 bp, synthetic construct
  misc_feature 1..22: note = chemically synthesized
  source 1..22: mol_type = other DNA
aatattctcccttcaattttat

SEQ ID NO: 105956 - DNA, 22 bp, synthetic construct
  misc_feature 1..22: note = chemically synthesized
  source 1..22: mol_type = other DNA
atattctcccttcaattttatg

SEQ ID NO: 105957 - DNA, 22 bp, synthetic construct
  misc_feature 1..22: note = chemically synthesized
  source 1..22: mol_type = other DNA
tcccttcaattttatgcagaat

SEQ ID NO: 105958 - DNA, 22 bp, synthetic construct
  misc_feature 1..22: note = chemically synthesized
  source 1..22: mol_type = other DNA
ccttcaattttatgcagaatat

SEQ ID NO: 105959 - DNA, 22 bp, synthetic construct
  misc_feature 1..22: note = chemically synthesized
  source 1..22: mol_type = other DNA
caattttatgcagaatattgcc

SEQ ID NO: 105960 - DNA, 22 bp, synthetic construct
  misc_feature 1..22: note = chemically synthesized
  source 1..22: mol_type = other DNA
aattttatgcagaatattgccc

SEQ ID NO: 105961 - DNA, 22 bp, synthetic construct
  misc_feature 1..22: note = chemically synthesized
  source 1..22: mol_type = other DNA
tatgcagaatattgcccttgaa

SEQ ID NO: 105962 - DNA, 22 bp, synthetic construct
  misc_feature 1..22: note = chemically synthesized
  source 1..22: mol_type = other DNA
atgcagaatattgcccttgaat

SEQ ID NO: 105963 - DNA, 22 bp, synthetic construct
  misc_feature 1..22: note = chemically synthesized
  source 1..22: mol_type = other DNA
tgcagaatattgcccttgaatg

SEQ ID NO: 105964 - DNA, 22 bp, synthetic construct
  misc_feature 1..22: note = chemically synthesized
  source 1..22: mol_type = other DNA
cccttgaatgtctcaacaggat

SEQ ID NO: 105965 - DNA, 22 bp, synthetic construct
  misc_feature 1..22: note = chemically synthesized
  source 1..22: mol_type = other DNA
gaatgtctcaacaggatccata

SEQ ID NO: 105966 - DNA, 22 bp, synthetic construct
  misc_feature 1..22: note = chemically synthesized
  source 1..22: mol_type = other DNA
aatgtctcaacaggatccataa

SEQ ID NO: 105967 - DNA, 22 bp, synthetic construct
  misc_feature 1..22: note = chemically synthesized
  source 1..22: mol_type = other DNA
aacaggatccataatgctgaaa

SEQ ID NO: 105968 - DNA, 22 bp, synthetic construct
  misc_feature 1..22: note = chemically synthesized
  source 1..22: mol_type = other DNA
aaaacttgagaaaaatcataga

SEQ ID NO: 105969 - DNA, 22 bp, synthetic construct
  misc_feature 1..22: note = chemically synthesized
  source 1..22: mol_type = other DNA
gagaaaaatcatagatctaagc

SEQ ID NO: 105970 - DNA, 22 bp, synthetic construct
  misc_feature 1..22: note = chemically synthesized
  source 1..22: mol_type = other DNA
agaaaaatcatagatctaagcc

SEQ ID NO: 105971 - DNA, 22 bp, synthetic construct
  misc_feature 1..22: note = chemically synthesized
  source 1..22: mol_type = other DNA
agccctgcttcattctagcttc

SEQ ID NO: 105972 - DNA, 22 bp, synthetic construct
  misc_feature 1..22: note = chemically synthesized
  source 1..22: mol_type = other DNA
cttcattctagcttcattctag

SEQ ID NO: 105973 - DNA, 22 bp, synthetic construct
  misc_feature 1..22: note = chemically synthesized
  source 1..22: mol_type = other DNA
cattctagcttcattctagatg

SEQ ID NO: 105974 - DNA, 22 bp, synthetic construct
  misc_feature 1..22: note = chemically synthesized
  source 1..22: mol_type = other DNA
attctagcttcattctagatgt

SEQ ID NO: 105975 - DNA, 22 bp, synthetic construct
  misc_feature 1..22: note = chemically synthesized
  source 1..22: mol_type = other DNA
tagcttcattctagatgttcta

SEQ ID NO: 105976 - DNA, 22 bp, synthetic construct
  misc_feature 1..22: note = chemically synthesized
  source 1..22: mol_type = other DNA
gcttcattctagatgttctatt

SEQ ID NO: 105977 - DNA, 22 bp, synthetic construct
  misc_feature 1..22: note = chemically synthesized
  source 1..22: mol_type = other DNA
cattctagatgttctattgacc

SEQ ID NO: 105978 - DNA, 22 bp, synthetic construct
  misc_feature 1..22: note = chemically synthesized
  source 1..22: mol_type = other DNA
attctagatgttctattgacct

SEQ ID NO: 105979 - DNA, 22 bp, synthetic construct
  misc_feature 1..22: note = chemically synthesized
  source 1..22: mol_type = other DNA
tagatgttctattgacctgaat

SEQ ID NO: 105980 - DNA, 22 bp, synthetic construct
  misc_feature 1..22: note = chemically synthesized
  source 1..22: mol_type = other DNA
gatgttctattgacctgaattt

SEQ ID NO: 105981 - DNA, 22 bp, synthetic construct
  misc_feature 1..22: note = chemically synthesized
  source 1..22: mol_type = other DNA
tattgacctgaatttcacatga

SEQ ID NO: 105982 - DNA, 22 bp, synthetic construct
  misc_feature 1..22: note = chemically synthesized
  source 1..22: mol_type = other DNA
ttgacctgaatttcacatgatg

SEQ ID NO: 105983 - DNA, 22 bp, synthetic construct
  misc_feature 1..22: note = chemically synthesized
  source 1..22: mol_type = other DNA
acctgaatttcacatgatgata

SEQ ID NO: 105984 - DNA, 22 bp, synthetic construct
  misc_feature 1..22: note = chemically synthesized
  source 1..22: mol_type = other DNA
aatttcacatgatgatatattt

SEQ ID NO: 105985 - DNA, 22 bp, synthetic construct
  misc_feature 1..22: note = chemically synthesized
  source 1..22: mol_type = other DNA
cacatgatgatatatttctaga

SEQ ID NO: 105986 - DNA, 22 bp, synthetic construct
  misc_feature 1..22: note = chemically synthesized
  source 1..22: mol_type = other DNA
acatgatgatatatttctagat

SEQ ID NO: 105987 - DNA, 22 bp, synthetic construct
  misc_feature 1..22: note = chemically synthesized
  source 1..22: mol_type = other DNA
ctagatgaataagattcctata

SEQ ID NO: 105988 - DNA, 22 bp, synthetic construct
  misc_feature 1..22: note = chemically synthesized
  source 1..22: mol_type = other DNA
tagatgaataagattcctatac

SEQ ID NO: 105989 - DNA, 22 bp, synthetic construct
  misc_feature 1..22: note = chemically synthesized
  source 1..22: mol_type = other DNA
gatgaataagattcctatactt

SEQ ID NO: 105990 - DNA, 22 bp, synthetic construct
  misc_feature 1..22: note = chemically synthesized
  source 1..22: mol_type = other DNA
ctatacttgtagcaacactctc

SEQ ID NO: 105991 - DNA, 22 bp, synthetic construct
  misc_feature 1..22: note = chemically synthesized
  source 1..22: mol_type = other DNA
tacttgtagcaacactctcacc

SEQ ID NO: 105992 - DNA, 22 bp, synthetic construct
  misc_feature 1..22: note = chemically synthesized
  source 1..22: mol_type = other DNA
gtagcaacactctcaccaagat

SEQ ID NO: 105993 - DNA, 22 bp, synthetic construct
  misc_feature 1..22: note = chemically synthesized
  source 1..22: mol_type = other DNA
tagcaacactctcaccaagatg

SEQ ID NO: 105994 - DNA, 22 bp, synthetic construct
  misc_feature 1..22: note = chemically synthesized
  source 1..22: mol_type = other DNA
tcaccaagatgcataaatacat

SEQ ID NO: 105995 - DNA, 22 bp, synthetic construct
  misc_feature 1..22: note = chemically synthesized
  source 1..22: mol_type = other DNA
accaagatgcataaatacatac

SEQ ID NO: 105996 - DNA, 22 bp, synthetic construct
  misc_feature 1..22: note = chemically synthesized
  source 1..22: mol_type = other DNA
tcatgctcactttgagaacata

SEQ ID NO: 105997 - DNA, 22 bp, synthetic construct
  misc_feature 1..22: note = chemically synthesized
  source 1..22: mol_type = other DNA
actttgagaacataatttgaat

SEQ ID NO: 105998 - DNA, 22 bp, synthetic construct
  misc_feature 1..22: note = chemically synthesized
  source 1..22: mol_type = other DNA
tgagaacataatttgaatgtta

SEQ ID NO: 105999 - DNA, 22 bp, synthetic construct
  misc_feature 1..22: note = chemically synthesized
  source 1..22: mol_type = other DNA
gagaacataatttgaatgttac

SEQ ID NO: 106000 - DNA, 22 bp, synthetic construct
  misc_feature 1..22: note = chemically synthesized
  source 1..22: mol_type = other DNA
agaacataatttgaatgttacc

SEQ ID NO: 106001 - DNA, 22 bp, synthetic construct
  misc_feature 1..22: note = chemically synthesized
  source 1..22: mol_type = other DNA
gaatgttaccagatacaaggga

SEQ ID NO: 106002 - DNA, 22 bp, synthetic construct
  misc_feature 1..22: note = chemically synthesized
  source 1..22: mol_type = other DNA
aatgttaccagatacaagggag

SEQ ID NO: 106003 - DNA, 22 bp, synthetic construct
  misc_feature 1..22: note = chemically synthesized
  source 1..22: mol_type = other DNA
ccagatacaagggagtaaagga

SEQ ID NO: 106004 - DNA, 22 bp, synthetic construct
  misc_feature 1..22: note = chemically synthesized
  source 1..22: mol_type = other DNA
tgtagtatgaagaaggaacaga

SEQ ID NO: 106005 - DNA, 22 bp, synthetic construct
  misc_feature 1..22: note = chemically synthesized
  source 1..22: mol_type = other DNA
gtagtatgaagaaggaacagac

SEQ ID NO: 106006 - DNA, 22 bp, synthetic construct
  misc_feature 1..22: note = chemically synthesized
  source 1..22: mol_type = other DNA
tagtatgaagaaggaacagaca

SEQ ID NO: 106007 - DNA, 22 bp, synthetic construct
  misc_feature 1..22: note = chemically synthesized
  source 1..22: mol_type = other DNA
ttagcctcaagaaaatgtagta

SEQ ID NO: 106008 - DNA, 22 bp, synthetic construct
  misc_feature 1..22: note = chemically synthesized
  source 1..22: mol_type = other DNA
gcctcaagaaaatgtagtaaat

SEQ ID NO: 106009 - DNA, 22 bp, synthetic construct
  misc_feature 1..22: note = chemically synthesized
  source 1..22: mol_type = other DNA
aagaaaatgtagtaaatagtga

SEQ ID NO: 106010 - DNA, 22 bp, synthetic construct
  misc_feature 1..22: note = chemically synthesized
  source 1..22: mol_type = other DNA
ttatacagtctacataaacaag

SEQ ID NO: 106011 - DNA, 22 bp, synthetic construct
  misc_feature 1..22: note = chemically synthesized
  source 1..22: mol_type = other DNA
tacagtctacataaacaagtga

SEQ ID NO: 106012 - DNA, 22 bp, synthetic construct
  misc_feature 1..22: note = chemically synthesized
  source 1..22: mol_type = other DNA
cataaacaagtgaaagaggaaa

SEQ ID NO: 106013 - DNA, 22 bp, synthetic construct
  misc_feature 1..22: note = chemically synthesized
  source 1..22: mol_type = other DNA
ctcctttccctcatcttctcat

SEQ ID NO: 106014 - DNA, 22 bp, synthetic construct
  misc_feature 1..22: note = chemically synthesized
  source 1..22: mol_type = other DNA
ctttccctcatcttctcatttc

SEQ ID NO: 106015 - DNA, 22 bp, synthetic construct
  misc_feature 1..22: note = chemically synthesized
  source 1..22: mol_type = other DNA
tccctcatcttctcatttccta

SEQ ID NO: 106016 - DNA, 22 bp, synthetic construct
  misc_feature 1..22: note = chemically synthesized
  source 1..22: mol_type = other DNA
ccctcatcttctcatttcctac

SEQ ID NO: 106017 - DNA, 22 bp, synthetic construct
  misc_feature 1..22: note = chemically synthesized
  source 1..22: mol_type = other DNA
cctcatcttctcatttcctact

SEQ ID NO: 106018 - DNA, 22 bp, synthetic construct
  misc_feature 1..22: note = chemically synthesized
  source 1..22: mol_type = other DNA
atcttctcatttcctactctgc

SEQ ID NO: 106019 - DNA, 22 bp, synthetic construct
  misc_feature 1..22: note = chemically synthesized
  source 1..22: mol_type = other DNA
ctcatttcctactctgccctcc

SEQ ID NO: 106020 - DNA, 22 bp, synthetic construct
  misc_feature 1..22: note = chemically synthesized
  source 1..22: mol_type = other DNA
tcatttcctactctgccctcct

SEQ ID NO: 106021 - DNA, 22 bp, synthetic construct
  misc_feature 1..22: note = chemically synthesized
  source 1..22: mol_type = other DNA
atttcctactctgccctccttc

SEQ ID NO: 106022 - DNA, 22 bp, synthetic construct
  misc_feature 1..22: note = chemically synthesized
  source 1..22: mol_type = other DNA
cctactctgccctccttctgag

SEQ ID NO: 106023 - DNA, 22 bp, synthetic construct
  misc_feature 1..22: note = chemically synthesized
  source 1..22: mol_type = other DNA
ctactctgccctccttctgagt

SEQ ID NO: 106024 - DNA, 22 bp, synthetic construct
  misc_feature 1..22: note = chemically synthesized
  source 1..22: mol_type = other DNA
ctctgccctccttctgagttgg

SEQ ID NO: 106025 - DNA, 22 bp, synthetic construct
  misc_feature 1..22: note = chemically synthesized
  source 1..22: mol_type = other DNA
tgccctccttctgagttggatg

SEQ ID NO: 106026 - DNA, 22 bp, synthetic construct
  misc_feature 1..22: note = chemically synthesized
  source 1..22: mol_type = other DNA
ccctccttctgagttggatgga

SEQ ID NO: 106027 - DNA, 22 bp, synthetic construct
  misc_feature 1..22: note = chemically synthesized
  source 1..22: mol_type = other DNA
cttctgagttggatggaagatg

SEQ ID NO: 106028 - DNA, 22 bp, synthetic construct
  misc_feature 1..22: note = chemically synthesized
  source 1..22: mol_type = other DNA
ctgagttggatggaagatgtgt

SEQ ID NO: 106029 - DNA, 22 bp, synthetic construct
  misc_feature 1..22: note = chemically synthesized
  source 1..22: mol_type = other DNA
tgagttggatggaagatgtgtc

SEQ ID NO: 106030 - DNA, 22 bp, synthetic construct
  misc_feature 1..22: note = chemically synthesized
  source 1..22: mol_type = other DNA
agttggatggaagatgtgtccc

SEQ ID NO: 106031 - DNA, 22 bp, synthetic construct
  misc_feature 1..22: note = chemically synthesized
  source 1..22: mol_type = other DNA
gatggaagatgtgtccccgcac

SEQ ID NO: 106032 - DNA, 22 bp, synthetic construct
  misc_feature 1..22: note = chemically synthesized
  source 1..22: mol_type = other DNA
cctaaggagatgggccctgtct

SEQ ID NO: 106033 - DNA, 22 bp, synthetic construct
  misc_feature 1..22: note = chemically synthesized
  source 1..22: mol_type = other DNA
ctaaggagatgggccctgtctc

SEQ ID NO: 106034 - DNA, 22 bp, synthetic construct
  misc_feature 1..22: note = chemically synthesized
  source 1..22: mol_type = other DNA
aggagatgggccctgtctctag

SEQ ID NO: 106035 - DNA, 22 bp, synthetic construct
  misc_feature 1..22: note = chemically synthesized
  source 1..22: mol_type = other DNA
tctctagaatttttctagtgag

SEQ ID NO: 106036 - DNA, 22 bp, synthetic construct
  misc_feature 1..22: note = chemically synthesized
  source 1..22: mol_type = other DNA
tagaatttttctagtgagtccc

SEQ ID NO: 106037 - DNA, 22 bp, synthetic construct
  misc_feature 1..22: note = chemically synthesized
  source 1..22: mol_type = other DNA
gaatttttctagtgagtcccac

SEQ ID NO: 106038 - DNA, 22 bp, synthetic construct
  misc_feature 1..22: note = chemically synthesized
  source 1..22: mol_type = other DNA
ttctagtgagtcccactgacta

SEQ ID NO: 106039 - DNA, 22 bp, synthetic construct
  misc_feature 1..22: note = chemically synthesized
  source 1..22: mol_type = other DNA
tctagtgagtcccactgactac

SEQ ID NO: 106040 - DNA, 22 bp, synthetic construct
  misc_feature 1..22: note = chemically synthesized
  source 1..22: mol_type = other DNA
ctagtgagtcccactgactact

SEQ ID NO: 106041 - DNA, 22 bp, synthetic construct
  misc_feature 1..22: note = chemically synthesized
  source 1..22: mol_type = other DNA
tagtgagtcccactgactactc

SEQ ID NO: 106042 - DNA, 22 bp, synthetic construct
  misc_feature 1..22: note = chemically synthesized
  source 1..22: mol_type = other DNA
gtgagtcccactgactactcat

SEQ ID NO: 106043 - DNA, 22 bp, synthetic construct
  misc_feature 1..22: note = chemically synthesized
  source 1..22: mol_type = other DNA
actactcatgccatctcttaga

SEQ ID NO: 106044 - DNA, 22 bp, synthetic construct
  misc_feature 1..22: note = chemically synthesized
  source 1..22: mol_type = other DNA
ctcatgccatctcttagagcag

SEQ ID NO: 106045 - DNA, 22 bp, synthetic construct
  misc_feature 1..22: note = chemically synthesized
  source 1..22: mol_type = other DNA
atgccatctcttagagcagttc

SEQ ID NO: 106046 - DNA, 22 bp, synthetic construct
  misc_feature 1..22: note = chemically synthesized
  source 1..22: mol_type = other DNA
ttagagcagttcttcaaacaaa

SEQ ID NO: 106047 - DNA, 22 bp, synthetic construct
  misc_feature 1..22: note = chemically synthesized
  source 1..22: mol_type = other DNA
agagcagttcttcaaacaaaca

SEQ ID NO: 106048 - DNA, 22 bp, synthetic construct
  misc_feature 1..22: note = chemically synthesized
  source 1..22: mol_type = other DNA
gagcagttcttcaaacaaacac

SEQ ID NO: 106049 - DNA, 22 bp, synthetic construct
  misc_feature 1..22: note = chemically synthesized
  source 1..22: mol_type = other DNA
ttcaaacaaacacacagacaca

SEQ ID NO: 106050 - DNA, 22 bp, synthetic construct
  misc_feature 1..22: note = chemically synthesized
  source 1..22: mol_type = other DNA
caaacaaacacacagacacaca

SEQ ID NO: 106051 - DNA, 22 bp, synthetic construct
  misc_feature 1..22: note = chemically synthesized
  source 1..22: mol_type = other DNA
aaacaaacacacagacacacat

SEQ ID NO: 106052 - DNA, 22 bp, synthetic construct
  misc_feature 1..22: note = chemically synthesized
  source 1..22: mol_type = other DNA
caaggggtgttgtttggatctt

SEQ ID NO: 106053 - DNA, 22 bp, synthetic construct
  misc_feature 1..22: note = chemically synthesized
  source 1..22: mol_type = other DNA
aaggggtgttgtttggatctta

SEQ ID NO: 106054 - DNA, 22 bp, synthetic construct
  misc_feature 1..22: note = chemically synthesized
  source 1..22: mol_type = other DNA
tttggatcttataaattaaatt

SEQ ID NO: 106055 - DNA, 22 bp, synthetic construct
  misc_feature 1..22: note = chemically synthesized
  source 1..22: mol_type = other DNA
ggatcttataaattaaattgtt

SEQ ID NO: 106056 - DNA, 22 bp, synthetic construct
  misc_feature 1..22: note = chemically synthesized
  source 1..22: mol_type = other DNA
gatcttataaattaaattgtta

SEQ ID NO: 106057 - DNA, 22 bp, synthetic construct
  misc_feature 1..22: note = chemically synthesized
  source 1..22: mol_type = other DNA
ataaattaaattgttatatgtt

SEQ ID NO: 106058 - DNA, 22 bp, synthetic construct
  misc_feature 1..22: note = chemically synthesized
  source 1..22: mol_type = other DNA
taaattaaattgttatatgtta

SEQ ID NO: 106059 - DNA, 22 bp, synthetic construct
  misc_feature 1..22: note = chemically synthesized
  source 1..22: mol_type = other DNA
aattgttatatgttaaaatggt

SEQ ID NO: 106060 - DNA, 22 bp, synthetic construct
  misc_feature 1..22: note = chemically synthesized
  source 1..22: mol_type = other DNA
ttatatgttaaaatggtgactt

SEQ ID NO: 106061 - DNA, 22 bp, synthetic construct
  misc_feature 1..22: note = chemically synthesized
  source 1..22: mol_type = other DNA
tatgttaaaatggtgacttttc

SEQ ID NO: 106062 - DNA, 22 bp, synthetic construct
  misc_feature 1..22: note = chemically synthesized
  source 1..22: mol_type = other DNA
aaatggtgacttttctttctat

SEQ ID NO: 106063 - DNA, 22 bp, synthetic construct
  misc_feature 1..22: note = chemically synthesized
  source 1..22: mol_type = other DNA
ttctttctataaatttcaggat

SEQ ID NO: 106064 - DNA, 22 bp, synthetic construct
  misc_feature 1..22: note = chemically synthesized
  source 1..22: mol_type = other DNA
tctttctataaatttcaggatc

SEQ ID NO: 106065 - DNA, 22 bp, synthetic construct
  misc_feature 1..22: note = chemically synthesized
  source 1..22: mol_type = other DNA
ctttctataaatttcaggatct

SEQ ID NO: 106066 - DNA, 22 bp, synthetic construct
  misc_feature 1..22: note = chemically synthesized
  source 1..22: mol_type = other DNA
tttctataaatttcaggatctt

SEQ ID NO: 106067 - DNA, 22 bp, synthetic construct
  misc_feature 1..22: note = chemically synthesized
  source 1..22: mol_type = other DNA
tctataaatttcaggatcttag

SEQ ID NO: 106068 - DNA, 22 bp, synthetic construct
  misc_feature 1..22: note = chemically synthesized
  source 1..22: mol_type = other DNA
ctataaatttcaggatcttagc

SEQ ID NO: 106069 - DNA, 22 bp, synthetic construct
  misc_feature 1..22: note = chemically synthesized
  source 1..22: mol_type = other DNA
tataaatttcaggatcttagca

SEQ ID NO: 106070 - DNA, 22 bp, synthetic construct
  misc_feature 1..22: note = chemically synthesized
  source 1..22: mol_type = other DNA
taaatttcaggatcttagcaga

SEQ ID NO: 106071 - DNA, 22 bp, synthetic construct
  misc_feature 1..22: note = chemically synthesized
  source 1..22: mol_type = other DNA
caggatcttagcagagtgcaga

SEQ ID NO: 106072 - DNA, 22 bp, synthetic construct
  misc_feature 1..22: note = chemically synthesized
  source 1..22: mol_type = other DNA
aggatcttagcagagtgcagaa

SEQ ID NO: 106073 - DNA, 22 bp, synthetic construct
  misc_feature 1..22: note = chemically synthesized
  source 1..22: mol_type = other DNA
agcagagtgcagaagctcagcc

SEQ ID NO: 106074 - DNA, 22 bp, synthetic construct
  misc_feature 1..22: note = chemically synthesized
  source 1..22: mol_type = other DNA
gcagagtgcagaagctcagcct

SEQ ID NO: 106075 - DNA, 22 bp, synthetic construct
  misc_feature 1..22: note = chemically synthesized
  source 1..22: mol_type = other DNA
agcctgtttaggttcagaactc

SEQ ID NO: 106076 - DNA, 22 bp, synthetic construct
  misc_feature 1..22: note = chemically synthesized
  source 1..22: mol_type = other DNA
tttaggttcagaactccgtgct

SEQ ID NO: 106077 - DNA, 22 bp, synthetic construct
  misc_feature 1..22: note = chemically synthesized
  source 1..22: mol_type = other DNA
aggttcagaactccgtgctctc

SEQ ID NO: 106078 - DNA, 22 bp, synthetic construct
  misc_feature 1..22: note = chemically synthesized
  source 1..22: mol_type = other DNA
ggttcagaactccgtgctctca

SEQ ID NO: 106079 - DNA, 22 bp, synthetic construct
  misc_feature 1..22: note = chemically synthesized
  source 1..22: mol_type = other DNA
agaactccgtgctctcacgcat

SEQ ID NO: 106080 - DNA, 22 bp, synthetic construct
  misc_feature 1..22: note = chemically synthesized
  source 1..22: mol_type = other DNA
cgtgctctcacgcattgtcttt

SEQ ID NO: 106081 - DNA, 22 bp, synthetic construct
  misc_feature 1..22: note = chemically synthesized
  source 1..22: mol_type = other DNA
tcacgcattgtctttaatcttc

SEQ ID NO: 106082 - DNA, 22 bp, synthetic construct
  misc_feature 1..22: note = chemically synthesized
  source 1..22: mol_type = other DNA
acgcattgtctttaatcttcaa

SEQ ID NO: 106083 - DNA, 22 bp, synthetic construct
  misc_feature 1..22: note = chemically synthesized
  source 1..22: mol_type = other DNA
tctttaatcttcaaaaaagtga

SEQ ID NO: 106084 - DNA, 22 bp, synthetic construct
  misc_feature 1..22: note = chemically synthesized
  source 1..22: mol_type = other DNA
taatcttcaaaaaagtgagtcc

SEQ ID NO: 106085 - DNA, 22 bp, synthetic construct
  misc_feature 1..22: note = chemically synthesized
  source 1..22: mol_type = other DNA
aatcttcaaaaaagtgagtcct

SEQ ID NO: 106086 - DNA, 22 bp, synthetic construct
  misc_feature 1..22: note = chemically synthesized
  source 1..22: mol_type = other DNA
atcttcaaaaaagtgagtcctc

SEQ ID NO: 106087 - DNA, 22 bp, synthetic construct
  misc_feature 1..22: note = chemically synthesized
  source 1..22: mol_type = other DNA
caaaaaagtgagtcctccattt

SEQ ID NO: 106088 - DNA, 22 bp, synthetic construct
  misc_feature 1..22: note = chemically synthesized
  source 1..22: mol_type = other DNA
aaaaaagtgagtcctccatttg

SEQ ID NO: 106089 - DNA, 22 bp, synthetic construct
  misc_feature 1..22: note = chemically synthesized
  source 1..22: mol_type = other DNA
catttggccccagtcctgaggg

SEQ ID NO: 106090 - DNA, 22 bp, synthetic construct
  misc_feature 1..22: note = chemically synthesized
  source 1..22: mol_type = other DNA
ggccccagtcctgagggcctga

SEQ ID NO: 106091 - DNA, 22 bp, synthetic construct
  misc_feature 1..22: note = chemically synthesized
  source 1..22: mol_type = other DNA
gccccagtcctgagggcctgac

SEQ ID NO: 106092 - DNA, 22 bp, synthetic construct
  misc_feature 1..22: note = chemically synthesized
  source 1..22: mol_type = other DNA
agggcctgacagttgggactac

SEQ ID NO: 106093 - DNA, 22 bp, synthetic construct
  misc_feature 1..22: note = chemically synthesized
  source 1..22: mol_type = other DNA
acagttgggactacccaactct

SEQ ID NO: 106094 - DNA, 22 bp, synthetic construct
  misc_feature 1..22: note = chemically synthesized
  source 1..22: mol_type = other DNA
ggactacccaactctcagattt

SEQ ID NO: 106095 - DNA, 22 bp, synthetic construct
  misc_feature 1..22: note = chemically synthesized
  source 1..22: mol_type = other DNA
cccaactctcagatttctattg

SEQ ID NO: 106096 - DNA, 22 bp, synthetic construct
  misc_feature 1..22: note = chemically synthesized
  source 1..22: mol_type = other DNA
tcagatttctattgtccacaag

SEQ ID NO: 106097 - DNA, 22 bp, synthetic construct
  misc_feature 1..22: note = chemically synthesized
  source 1..22: mol_type = other DNA
agatttctattgtccacaagtt

SEQ ID NO: 106098 - DNA, 22 bp, synthetic construct
  misc_feature 1..22: note = chemically synthesized
  source 1..22: mol_type = other DNA
ctattgtccacaagttaaattc

SEQ ID NO: 106099 - DNA, 22 bp, synthetic construct
  misc_feature 1..22: note = chemically synthesized
  source 1..22: mol_type = other DNA
tattgtccacaagttaaattcc

SEQ ID NO: 106100 - DNA, 22 bp, synthetic construct
  misc_feature 1..22: note = chemically synthesized
  source 1..22: mol_type = other DNA
ttgtccacaagttaaattcctc

SEQ ID NO: 106101 - DNA, 22 bp, synthetic construct
  misc_feature 1..22: note = chemically synthesized
  source 1..22: mol_type = other DNA
tccacaagttaaattcctcctg

SEQ ID NO: 106102 - DNA, 22 bp, synthetic construct
  misc_feature 1..22: note = chemically synthesized
  source 1..22: mol_type = other DNA
aattcctcctgccttctccaac

SEQ ID NO: 106103 - DNA, 22 bp, synthetic construct
  misc_feature 1..22: note = chemically synthesized
  source 1..22: mol_type = other DNA
ctcctgccttctccaacccagt

SEQ ID NO: 106104 - DNA, 22 bp, synthetic construct
  misc_feature 1..22: note = chemically synthesized
  source 1..22: mol_type = other DNA
ctgccttctccaacccagtcca

SEQ ID NO: 106105 - DNA, 22 bp, synthetic construct
  misc_feature 1..22: note = chemically synthesized
  source 1..22: mol_type = other DNA
ccttctccaacccagtccaata

SEQ ID NO: 106106 - DNA, 22 bp, synthetic construct
  misc_feature 1..22: note = chemically synthesized
  source 1..22: mol_type = other DNA
ctccaacccagtccaatatatt

SEQ ID NO: 106107 - DNA, 22 bp, synthetic construct
  misc_feature 1..22: note = chemically synthesized
  source 1..22: mol_type = other DNA
tccaacccagtccaatatatta

SEQ ID NO: 106108 - DNA, 22 bp, synthetic construct
  misc_feature 1..22: note = chemically synthesized
  source 1..22: mol_type = other DNA
caacccagtccaatatattatc

SEQ ID NO: 106109 - DNA, 22 bp, synthetic construct
  misc_feature 1..22: note = chemically synthesized
  source 1..22: mol_type = other DNA
tcatctgccatcaatatgattt

SEQ ID NO: 106110 - DNA, 22 bp, synthetic construct
  misc_feature 1..22: note = chemically synthesized
  source 1..22: mol_type = other DNA
ccatcaatatgatttcattttc

SEQ ID NO: 106111 - DNA, 22 bp, synthetic construct
  misc_feature 1..22: note = chemically synthesized
  source 1..22: mol_type = other DNA
cattttcaatccaatttgcttt

SEQ ID NO: 106112 - DNA, 22 bp, synthetic construct
  misc_feature 1..22: note = chemically synthesized
  source 1..22: mol_type = other DNA
attttcaatccaatttgctttc

SEQ ID NO: 106113 - DNA, 22 bp, synthetic construct
  misc_feature 1..22: note = chemically synthesized
  source 1..22: mol_type = other DNA
tcaatccaatttgctttcttag

SEQ ID NO: 106114 - DNA, 22 bp, synthetic construct
  misc_feature 1..22: note = chemically synthesized
  source 1..22: mol_type = other DNA
caatccaatttgctttcttaga

SEQ ID NO: 106115 - DNA, 22 bp, synthetic construct
  misc_feature 1..22: note = chemically synthesized
  source 1..22: mol_type = other DNA
aatccaatttgctttcttagat

SEQ ID NO: 106116 - DNA, 22 bp, synthetic construct
  misc_feature 1..22: note = chemically synthesized
  source 1..22: mol_type = other DNA
gctttcttagatcttaatttgg

SEQ ID NO: 106117 - DNA, 22 bp, synthetic construct
  misc_feature 1..22: note = chemically synthesized
  source 1..22: mol_type = other DNA
ctttcttagatcttaatttggc

SEQ ID NO: 106118 - DNA, 22 bp, synthetic construct
  misc_feature 1..22: note = chemically synthesized
  source 1..22: mol_type = other DNA
tcttagatcttaatttggctgc

SEQ ID NO: 106119 - DNA, 22 bp, synthetic construct
  misc_feature 1..22: note = chemically synthesized
  source 1..22: mol_type = other DNA
cttagatcttaatttggctgcc

SEQ ID NO: 106120 - DNA, 22 bp, synthetic construct
  misc_feature 1..22: note = chemically synthesized
  source 1..22: mol_type = other DNA
ttagatcttaatttggctgccc

SEQ ID NO: 106121 - DNA, 22 bp, synthetic construct
  misc_feature 1..22: note = chemically synthesized
  source 1..22: mol_type = other DNA
agatcttaatttggctgccctt

SEQ ID NO: 106122 - DNA, 22 bp, synthetic construct
  misc_feature 1..22: note = chemically synthesized
  source 1..22: mol_type = other DNA
gatcttaatttggctgcccttt

SEQ ID NO: 106123 - DNA, 22 bp, synthetic construct
  misc_feature 1..22: note = chemically synthesized
  source 1..22: mol_type = other DNA
aatttggctgcccttttctaag

SEQ ID NO: 106124 - DNA, 22 bp, synthetic construct
  misc_feature 1..22: note = chemically synthesized
  source 1..22: mol_type = other DNA
atttggctgcccttttctaagc

SEQ ID NO: 106125 - DNA, 22 bp, synthetic construct
  misc_feature 1..22: note = chemically synthesized
  source 1..22: mol_type = other DNA
ggctgcccttttctaagccttt

SEQ ID NO: 106126 - DNA, 22 bp, synthetic construct
  misc_feature 1..22: note = chemically synthesized
  source 1..22: mol_type = other DNA
gctgcccttttctaagcctttc

SEQ ID NO: 106127 - DNA, 22 bp, synthetic construct
  misc_feature 1..22: note = chemically synthesized
  source 1..22: mol_type = other DNA
cccttttctaagcctttcaact

SEQ ID NO: 106128 - DNA, 22 bp, synthetic construct
  misc_feature 1..22: note = chemically synthesized
  source 1..22: mol_type = other DNA
ttctaagcctttcaactcgatt

SEQ ID NO: 106129 - DNA, 22 bp, synthetic construct
  misc_feature 1..22: note = chemically synthesized
  source 1..22: mol_type = other DNA
tctaagcctttcaactcgattc

SEQ ID NO: 106130 - DNA, 22 bp, synthetic construct
  misc_feature 1..22: note = chemically synthesized
  source 1..22: mol_type = other DNA
ctaagcctttcaactcgattca

SEQ ID NO: 106131 - DNA, 22 bp, synthetic construct
  misc_feature 1..22: note = chemically synthesized
  source 1..22: mol_type = other DNA
taagcctttcaactcgattcag

SEQ ID NO: 106132 - DNA, 22 bp, synthetic construct
  misc_feature 1..22: note = chemically synthesized
  source 1..22: mol_type = other DNA
agcctttcaactcgattcagaa

SEQ ID NO: 106133 - DNA, 22 bp, synthetic construct
  misc_feature 1..22: note = chemically synthesized
  source 1..22: mol_type = other DNA
tcaactcgattcagaatttttt

SEQ ID NO: 106134 - DNA, 22 bp, synthetic construct
  misc_feature 1..22: note = chemically synthesized
  source 1..22: mol_type = other DNA
caactcgattcagaattttttg

SEQ ID NO: 106135 - DNA, 22 bp, synthetic construct
  misc_feature 1..22: note = chemically synthesized
  source 1..22: mol_type = other DNA
aactcgattcagaattttttgt

SEQ ID NO: 106136 - DNA, 22 bp, synthetic construct
  misc_feature 1..22: note = chemically synthesized
  source 1..22: mol_type = other DNA
gattcagaattttttgtctact

SEQ ID NO: 106137 - DNA, 22 bp, synthetic construct
  misc_feature 1..22: note = chemically synthesized
  source 1..22: mol_type = other DNA
agaattttttgtctactcttca

SEQ ID NO: 106138 - DNA, 22 bp, synthetic construct
  misc_feature 1..22: note = chemically synthesized
  source 1..22: mol_type = other DNA
tttgtctactcttcagagaaaa

SEQ ID NO: 106139 - DNA, 22 bp, synthetic construct
  misc_feature 1..22: note = chemically synthesized
  source 1..22: mol_type = other DNA
ttgtctactcttcagagaaaaa

SEQ ID NO: 106140 - DNA, 22 bp, synthetic construct
  misc_feature 1..22: note = chemically synthesized
  source 1..22: mol_type = other DNA
tgtctactcttcagagaaaaac

SEQ ID NO: 106141 - DNA, 22 bp, synthetic construct
  misc_feature 1..22: note = chemically synthesized
  source 1..22: mol_type = other DNA
gtctactcttcagagaaaaact

SEQ ID NO: 106142 - DNA, 22 bp, synthetic construct
  misc_feature 1..22: note = chemically synthesized
  source 1..22: mol_type = other DNA
tctactcttcagagaaaaacta

SEQ ID NO: 106143 - DNA, 22 bp, synthetic construct
  misc_feature 1..22: note = chemically synthesized
  source 1..22: mol_type = other DNA
ctcttcagagaaaaactatcaa

SEQ ID NO: 106144 - DNA, 22 bp, synthetic construct
  misc_feature 1..22: note = chemically synthesized
  source 1..22: mol_type = other DNA
ttcagagaaaaactatcaacaa

SEQ ID NO: 106145 - DNA, 22 bp, synthetic construct
  misc_feature 1..22: note = chemically synthesized
  source 1..22: mol_type = other DNA
cagagaaaaactatcaacaaaa

SEQ ID NO: 106146 - DNA, 22 bp, synthetic construct
  misc_feature 1..22: note = chemically synthesized
  source 1..22: mol_type = other DNA
agagaaaaactatcaacaaaaa

SEQ ID NO: 106147 - DNA, 22 bp, synthetic construct
  misc_feature 1..22: note = chemically synthesized
  source 1..22: mol_type = other DNA
tcaacaaaaaatcctctgaaca

SEQ ID NO: 106148 - DNA, 22 bp, synthetic construct
  misc_feature 1..22: note = chemically synthesized
  source 1..22: mol_type = other DNA
tgaacaggaaagttatcaataa

SEQ ID NO: 106149 - DNA, 22 bp, synthetic construct
  misc_feature 1..22: note = chemically synthesized
  source 1..22: mol_type = other DNA
aacaggaaagttatcaataaaa

SEQ ID NO: 106150 - DNA, 22 bp, synthetic construct
  misc_feature 1..22: note = chemically synthesized
  source 1..22: mol_type = other DNA
tcaataaaaaataaacgtaaaa

SEQ ID NO: 106151 - DNA, 22 bp, synthetic construct
  misc_feature 1..22: note = chemically synthesized
  source 1..22: mol_type = other DNA
tctggataaacaaaaactgagt

SEQ ID NO: 106152 - DNA, 22 bp, synthetic construct
  misc_feature 1..22: note = chemically synthesized
  source 1..22: mol_type = other DNA
ctggataaacaaaaactgagtt

SEQ ID NO: 106153 - DNA, 22 bp, synthetic construct
  misc_feature 1..22: note = chemically synthesized
  source 1..22: mol_type = other DNA
tggataaacaaaaactgagttg

SEQ ID NO: 106154 - DNA, 22 bp, synthetic construct
  misc_feature 1..22: note = chemically synthesized
  source 1..22: mol_type = other DNA
gataaacaaaaactgagttgat

SEQ ID NO: 106155 - DNA, 22 bp, synthetic construct
  misc_feature 1..22: note = chemically synthesized
  source 1..22: mol_type = other DNA
agttgatttcaactaagttgaa

SEQ ID NO: 106156 - DNA, 22 bp, synthetic construct
  misc_feature 1..22: note = chemically synthesized
  source 1..22: mol_type = other DNA
atttcaactaagttgaaaccaa

SEQ ID NO: 106157 - DNA, 22 bp, synthetic construct
  misc_feature 1..22: note = chemically synthesized
  source 1..22: mol_type = other DNA
caactaagttgaaaccaaatga

SEQ ID NO: 106158 - DNA, 22 bp, synthetic construct
  misc_feature 1..22: note = chemically synthesized
  source 1..22: mol_type = other DNA
aactaagttgaaaccaaatgac

SEQ ID NO: 106159 - DNA, 22 bp, synthetic construct
  misc_feature 1..22: note = chemically synthesized
  source 1..22: mol_type = other DNA
agttgaaaccaaatgaccaaag

SEQ ID NO: 106160 - DNA, 22 bp, synthetic construct
  misc_feature 1..22: note = chemically synthesized
  source 1..22: mol_type = other DNA
aaaccaaatgaccaaagatgat

SEQ ID NO: 106161 - DNA, 22 bp, synthetic construct
  misc_feature 1..22: note = chemically synthesized
  source 1..22: mol_type = other DNA
gaatctacataaaatgacaaaa

SEQ ID NO: 106162 - DNA, 22 bp, synthetic construct
  misc_feature 1..22: note = chemically synthesized
  source 1..22: mol_type = other DNA
aatctacataaaatgacaaaag

SEQ ID NO: 106163 - DNA, 22 bp, synthetic construct
  misc_feature 1..22: note = chemically synthesized
  source 1..22: mol_type = other DNA
cataaaatgacaaaagcaccag

SEQ ID NO: 106164 - DNA, 22 bp, synthetic construct
  misc_feature 1..22: note = chemically synthesized
  source 1..22: mol_type = other DNA
tagaagacattatgcatacata

SEQ ID NO: 106165 - DNA, 22 bp, synthetic construct
  misc_feature 1..22: note = chemically synthesized
  source 1..22: mol_type = other DNA
tgcatacatattcctttctgct

SEQ ID NO: 106166 - DNA, 22 bp, synthetic construct
  misc_feature 1..22: note = chemically synthesized
  source 1..22: mol_type = other DNA
ctttctgcttcttattttcaaa

SEQ ID NO: 106167 - DNA, 22 bp, synthetic construct
  misc_feature 1..22: note = chemically synthesized
  source 1..22: mol_type = other DNA
tctgcttcttattttcaaaaat

SEQ ID NO: 106168 - DNA, 22 bp, synthetic construct
  misc_feature 1..22: note = chemically synthesized
  source 1..22: mol_type = other DNA
ctgcttcttattttcaaaaatg

SEQ ID NO: 106169 - DNA, 22 bp, synthetic construct
  misc_feature 1..22: note = chemically synthesized
  source 1..22: mol_type = other DNA
tgcttcttattttcaaaaatga

SEQ ID NO: 106170 - DNA, 22 bp, synthetic construct
  misc_feature 1..22: note = chemically synthesized
  source 1..22: mol_type = other DNA
cttcttattttcaaaaatgaat

SEQ ID NO: 106171 - DNA, 22 bp, synthetic construct
  misc_feature 1..22: note = chemically synthesized
  source 1..22: mol_type = other DNA
cttattttcaaaaatgaatgta

SEQ ID NO: 106172 - DNA, 22 bp, synthetic construct
  misc_feature 1..22: note = chemically synthesized
  source 1..22: mol_type = other DNA
ttattttcaaaaatgaatgtat

SEQ ID NO: 106173 - DNA, 22 bp, synthetic construct
  misc_feature 1..22: note = chemically synthesized
  source 1..22: mol_type = other DNA
attttcaaaaatgaatgtatta

SEQ ID NO: 106174 - DNA, 22 bp, synthetic construct
  misc_feature 1..22: note = chemically synthesized
  source 1..22: mol_type = other DNA
ttttcaaaaatgaatgtattac

SEQ ID NO: 106175 - DNA, 22 bp, synthetic construct
  misc_feature 1..22: note = chemically synthesized
  source 1..22: mol_type = other DNA
tcaaaaatgaatgtattacaat

SEQ ID NO: 106176 - DNA, 22 bp, synthetic construct
  misc_feature 1..22: note = chemically synthesized
  source 1..22: mol_type = other DNA
caaaaatgaatgtattacaata

SEQ ID NO: 106177 - DNA, 22 bp, synthetic construct
  misc_feature 1..22: note = chemically synthesized
  source 1..22: mol_type = other DNA
aaaaatgaatgtattacaataa

SEQ ID NO: 106178 - DNA, 22 bp, synthetic construct
  misc_feature 1..22: note = chemically synthesized
  source 1..22: mol_type = other DNA
caataaaaaatagaattgcatt

SEQ ID NO: 106179 - DNA, 22 bp, synthetic construct
  misc_feature 1..22: note = chemically synthesized
  source 1..22: mol_type = other DNA
cattgctggaactattacaaat

SEQ ID NO: 106180 - DNA, 22 bp, synthetic construct
  misc_feature 1..22: note = chemically synthesized
  source 1..22: mol_type = other DNA
ctggaactattacaaatataaa

SEQ ID NO: 106181 - DNA, 22 bp, synthetic construct
  misc_feature 1..22: note = chemically synthesized
  source 1..22: mol_type = other DNA
gaactattacaaatataaatgt

SEQ ID NO: 106182 - DNA, 22 bp, synthetic construct
  misc_feature 1..22: note = chemically synthesized
  source 1..22: mol_type = other DNA
ttacaaatataaatgtaatata

SEQ ID NO: 106183 - DNA, 22 bp, synthetic construct
  misc_feature 1..22: note = chemically synthesized
  source 1..22: mol_type = other DNA
caaatataaatgtaatatattt

SEQ ID NO: 106184 - DNA, 22 bp, synthetic construct
  misc_feature 1..22: note = chemically synthesized
  source 1..22: mol_type = other DNA
accaataactgaacaaaggagg

SEQ ID NO: 106185 - DNA, 22 bp, synthetic construct
  misc_feature 1..22: note = chemically synthesized
  source 1..22: mol_type = other DNA
ccaataactgaacaaaggaggt

SEQ ID NO: 106186 - DNA, 22 bp, synthetic construct
  misc_feature 1..22: note = chemically synthesized
  source 1..22: mol_type = other DNA
aacaaaggaggtgagtgataac

SEQ ID NO: 106187 - DNA, 22 bp, synthetic construct
  misc_feature 1..22: note = chemically synthesized
  source 1..22: mol_type = other DNA
ttttggaatgaagaaatattct

SEQ ID NO: 106188 - DNA, 22 bp, synthetic construct
  misc_feature 1..22: note = chemically synthesized
  source 1..22: mol_type = other DNA
tggaatgaagaaatattctctg

SEQ ID NO: 106189 - DNA, 22 bp, synthetic construct
  misc_feature 1..22: note = chemically synthesized
  source 1..22: mol_type = other DNA
ggaatgaagaaatattctctga

SEQ ID NO: 106190 - DNA, 22 bp, synthetic construct
  misc_feature 1..22: note = chemically synthesized
  source 1..22: mol_type = other DNA
gaatgaagaaatattctctgaa

SEQ ID NO: 106191 - DNA, 22 bp, synthetic construct
  misc_feature 1..22: note = chemically synthesized
  source 1..22: mol_type = other DNA
tctgaaaaaaaagctataaaca

SEQ ID NO: 106192 - DNA, 22 bp, synthetic construct
  misc_feature 1..22: note = chemically synthesized
  source 1..22: mol_type = other DNA
tgaaaaaaaagctataaacatc

SEQ ID NO: 106193 - DNA, 22 bp, synthetic construct
  misc_feature 1..22: note = chemically synthesized
  source 1..22: mol_type = other DNA
aaaaaaaagctataaacatcta

SEQ ID NO: 106194 - DNA, 22 bp, synthetic construct
  misc_feature 1..22: note = chemically synthesized
  source 1..22: mol_type = other DNA
taaacatctacatagaaaaatg

SEQ ID NO: 106195 - DNA, 22 bp, synthetic construct
  misc_feature 1..22: note = chemically synthesized
  source 1..22: mol_type = other DNA
catagaaaaatgagtaagaatg

SEQ ID NO: 106196 - DNA, 22 bp, synthetic construct
  misc_feature 1..22: note = chemically synthesized
  source 1..22: mol_type = other DNA
tgagcattaacaattatactta

SEQ ID NO: 106197 - DNA, 22 bp, synthetic construct
  misc_feature 1..22: note = chemically synthesized
  source 1..22: mol_type = other DNA
agcattaacaattatacttatg

SEQ ID NO: 106198 - DNA, 22 bp, synthetic construct
  misc_feature 1..22: note = chemically synthesized
  source 1..22: mol_type = other DNA
acaattatacttatgccaatcc

SEQ ID NO: 106199 - DNA, 22 bp, synthetic construct
  misc_feature 1..22: note = chemically synthesized
  source 1..22: mol_type = other DNA
tacttatgccaatccaagggtc

SEQ ID NO: 106200 - DNA, 22 bp, synthetic construct
  misc_feature 1..22: note = chemically synthesized
  source 1..22: mol_type = other DNA
atgccaatccaagggtcccaga

SEQ ID NO: 106201 - DNA, 22 bp, synthetic construct
  misc_feature 1..22: note = chemically synthesized
  source 1..22: mol_type = other DNA
tgccaatccaagggtcccagat

SEQ ID NO: 106202 - DNA, 22 bp, synthetic construct
  misc_feature 1..22: note = chemically synthesized
  source 1..22: mol_type = other DNA
gaaaacctaaatctatcacagt

SEQ ID NO: 106203 - DNA, 22 bp, synthetic construct
  misc_feature 1..22: note = chemically synthesized
  source 1..22: mol_type = other DNA
aatctatcacagttccttaaat

SEQ ID NO: 106204 - DNA, 22 bp, synthetic construct
  misc_feature 1..22: note = chemically synthesized
  source 1..22: mol_type = other DNA
tcacagttccttaaatactctt

SEQ ID NO: 106205 - DNA, 22 bp, synthetic construct
  misc_feature 1..22: note = chemically synthesized
  source 1..22: mol_type = other DNA
cttaaatactctttcaaaaaag

SEQ ID NO: 106206 - DNA, 22 bp, synthetic construct
  misc_feature 1..22: note = chemically synthesized
  source 1..22: mol_type = other DNA
aaatactctttcaaaaaagaaa

SEQ ID NO: 106207 - DNA, 22 bp, synthetic construct
  misc_feature 1..22: note = chemically synthesized
  source 1..22: mol_type = other DNA
aatactctttcaaaaaagaaaa

SEQ ID NO: 106208 - DNA, 22 bp, synthetic construct
  misc_feature 1..22: note = chemically synthesized
  source 1..22: mol_type = other DNA
tttcaaaaaagaaaaaaaaaaa

SEQ ID NO: 106209 - DNA, 22 bp, synthetic construct
  misc_feature 1..22: note = chemically synthesized
  source 1..22: mol_type = other DNA
tcaaaaaagaaaaaaaaaaatc

SEQ ID NO: 106210 - DNA, 22 bp, synthetic construct
  misc_feature 1..22: note = chemically synthesized
  source 1..22: mol_type = other DNA
caaaaaagaaaaaaaaaaatct

SEQ ID NO: 106211 - DNA, 22 bp, synthetic construct
  misc_feature 1..22: note = chemically synthesized
  source 1..22: mol_type = other DNA
aaaaaagaaaaaaaaaaatctg

SEQ ID NO: 106212 - DNA, 22 bp, synthetic construct
  misc_feature 1..22: note = chemically synthesized
  source 1..22: mol_type = other DNA
tgctgtaggatatcccacctca

SEQ ID NO: 106213 - DNA, 22 bp, synthetic construct
  misc_feature 1..22: note = chemically synthesized
  source 1..22: mol_type = other DNA
taggatatcccacctcagctgt

SEQ ID NO: 106214 - DNA, 22 bp, synthetic construct
  misc_feature 1..22: note = chemically synthesized
  source 1..22: mol_type = other DNA
agctgtgatctttacctctagg

SEQ ID NO: 106215 - DNA, 22 bp, synthetic construct
  misc_feature 1..22: note = chemically synthesized
  source 1..22: mol_type = other DNA
tgatctttacctctaggcagac

SEQ ID NO: 106216 - DNA, 22 bp, synthetic construct
  misc_feature 1..22: note = chemically synthesized
  source 1..22: mol_type = other DNA
tacctctaggcagacctctgga

SEQ ID NO: 106217 - DNA, 22 bp, synthetic construct
  misc_feature 1..22: note = chemically synthesized
  source 1..22: mol_type = other DNA
acctctaggcagacctctggaa

SEQ ID NO: 106218 - DNA, 22 bp, synthetic construct
  misc_feature 1..22: note = chemically synthesized
  source 1..22: mol_type = other DNA
cctctaggcagacctctggaaa

SEQ ID NO: 106219 - DNA, 22 bp, synthetic construct
  misc_feature 1..22: note = chemically synthesized
  source 1..22: mol_type = other DNA
taggcagacctctggaaaacct

SEQ ID NO: 106220 - DNA, 22 bp, synthetic construct
  misc_feature 1..22: note = chemically synthesized
  source 1..22: mol_type = other DNA
ggcagacctctggaaaaccttc

SEQ ID NO: 106221 - DNA, 22 bp, synthetic construct
  misc_feature 1..22: note = chemically synthesized
  source 1..22: mol_type = other DNA
tggaaaaccttcttatatgctt

SEQ ID NO: 106222 - DNA, 22 bp, synthetic construct
  misc_feature 1..22: note = chemically synthesized
  source 1..22: mol_type = other DNA
gaaaaccttcttatatgctttc

SEQ ID NO: 106223 - DNA, 22 bp, synthetic construct
  misc_feature 1..22: note = chemically synthesized
  source 1..22: mol_type = other DNA
cttatatgctttccttgagtgc

SEQ ID NO: 106224 - DNA, 22 bp, synthetic construct
  misc_feature 1..22: note = chemically synthesized
  source 1..22: mol_type = other DNA
ttatatgctttccttgagtgca

SEQ ID NO: 106225 - DNA, 22 bp, synthetic construct
  misc_feature 1..22: note = chemically synthesized
  source 1..22: mol_type = other DNA
atatgctttccttgagtgcatc

SEQ ID NO: 106226 - DNA, 22 bp, synthetic construct
  misc_feature 1..22: note = chemically synthesized
  source 1..22: mol_type = other DNA
tatgctttccttgagtgcatct

SEQ ID NO: 106227 - DNA, 22 bp, synthetic construct
  misc_feature 1..22: note = chemically synthesized
  source 1..22: mol_type = other DNA
tccttgagtgcatctcacatca

SEQ ID NO: 106228 - DNA, 22 bp, synthetic construct
  misc_feature 1..22: note = chemically synthesized
  source 1..22: mol_type = other DNA
ccttgagtgcatctcacatcag

SEQ ID NO: 106229 - DNA, 22 bp, synthetic construct
  misc_feature 1..22: note = chemically synthesized
  source 1..22: mol_type = other DNA
cttgagtgcatctcacatcaga

SEQ ID NO: 106230 - DNA, 22 bp, synthetic construct
  misc_feature 1..22: note = chemically synthesized
  source 1..22: mol_type = other DNA
gagtgcatctcacatcagaaga

SEQ ID NO: 106231 - DNA, 22 bp, synthetic construct
  misc_feature 1..22: note = chemically synthesized
  source 1..22: mol_type = other DNA
agtgcatctcacatcagaagag

SEQ ID NO: 106232 - DNA, 22 bp, synthetic construct
  misc_feature 1..22: note = chemically synthesized
  source 1..22: mol_type = other DNA
acatcagaagagagaggaatca

SEQ ID NO: 106233 - DNA, 22 bp, synthetic construct
  misc_feature 1..22: note = chemically synthesized
  source 1..22: mol_type = other DNA
catattcaagttcctggcactc

SEQ ID NO: 106234 - DNA, 22 bp, synthetic construct
  misc_feature 1..22: note = chemically synthesized
  source 1..22: mol_type = other DNA
aagttcctggcactcacccact

SEQ ID NO: 106235 - DNA, 22 bp, synthetic construct
  misc_feature 1..22: note = chemically synthesized
  source 1..22: mol_type = other DNA
ctggcactcacccactcacagt

SEQ ID NO: 106236 - DNA, 22 bp, synthetic construct
  misc_feature 1..22: note = chemically synthesized
  source 1..22: mol_type = other DNA
gcactcacccactcacagtatt

SEQ ID NO: 106237 - DNA, 22 bp, synthetic construct
  misc_feature 1..22: note = chemically synthesized
  source 1..22: mol_type = other DNA
acccactcacagtattgtggct

SEQ ID NO: 106238 - DNA, 22 bp, synthetic construct
  misc_feature 1..22: note = chemically synthesized
  source 1..22: mol_type = other DNA
acagtattgtggctaaaatagg

SEQ ID NO: 106239 - DNA, 22 bp, synthetic construct
  misc_feature 1..22: note = chemically synthesized
  source 1..22: mol_type = other DNA
tggctaaaataggaacctattc

SEQ ID NO: 106240 - DNA, 22 bp, synthetic construct
  misc_feature 1..22: note = chemically synthesized
  source 1..22: mol_type = other DNA
aaataggaacctattcctgtcc

SEQ ID NO: 106241 - DNA, 22 bp, synthetic construct
  misc_feature 1..22: note = chemically synthesized
  source 1..22: mol_type = other DNA
ttcctgtcctctttgaggactc

SEQ ID NO: 106242 - DNA, 22 bp, synthetic construct
  misc_feature 1..22: note = chemically synthesized
  source 1..22: mol_type = other DNA
ctgtcctctttgaggactcagt

SEQ ID NO: 106243 - DNA, 22 bp, synthetic construct
  misc_feature 1..22: note = chemically synthesized
  source 1..22: mol_type = other DNA
tcctctttgaggactcagttca

SEQ ID NO: 106244 - DNA, 22 bp, synthetic construct
  misc_feature 1..22: note = chemically synthesized
  source 1..22: mol_type = other DNA
tttgaggactcagttcagatca

SEQ ID NO: 106245 - DNA, 22 bp, synthetic construct
  misc_feature 1..22: note = chemically synthesized
  source 1..22: mol_type = other DNA
tgaggactcagttcagatcatt

SEQ ID NO: 106246 - DNA, 22 bp, synthetic construct
  misc_feature 1..22: note = chemically synthesized
  source 1..22: mol_type = other DNA
gaggactcagttcagatcattc

SEQ ID NO: 106247 - DNA, 22 bp, synthetic construct
  misc_feature 1..22: note = chemically synthesized
  source 1..22: mol_type = other DNA
aggactcagttcagatcattca

SEQ ID NO: 106248 - DNA, 22 bp, synthetic construct
  misc_feature 1..22: note = chemically synthesized
  source 1..22: mol_type = other DNA
agttcagatcattcactcacag

SEQ ID NO: 106249 - DNA, 22 bp, synthetic construct
  misc_feature 1..22: note = chemically synthesized
  source 1..22: mol_type = other DNA
agatcattcactcacagacctc

SEQ ID NO: 106250 - DNA, 22 bp, synthetic construct
  misc_feature 1..22: note = chemically synthesized
  source 1..22: mol_type = other DNA
actcacagacctctcatgaggc

SEQ ID NO: 106251 - DNA, 22 bp, synthetic construct
  misc_feature 1..22: note = chemically synthesized
  source 1..22: mol_type = other DNA
acagacctctcatgaggcctca

SEQ ID NO: 106252 - DNA, 22 bp, synthetic construct
  misc_feature 1..22: note = chemically synthesized
  source 1..22: mol_type = other DNA
tcatgaggcctcattttaaagc

SEQ ID NO: 106253 - DNA, 22 bp, synthetic construct
  misc_feature 1..22: note = chemically synthesized
  source 1..22: mol_type = other DNA
atgaggcctcattttaaagctt

SEQ ID NO: 106254 - DNA, 22 bp, synthetic construct
  misc_feature 1..22: note = chemically synthesized
  source 1..22: mol_type = other DNA
attttaaagcttatgcatgtgg

SEQ ID NO: 106255 - DNA, 22 bp, synthetic construct
  misc_feature 1..22: note = chemically synthesized
  source 1..22: mol_type = other DNA
taaagcttatgcatgtggaaat

SEQ ID NO: 106256 - DNA, 22 bp, synthetic construct
  misc_feature 1..22: note = chemically synthesized
  source 1..22: mol_type = other DNA
aaagcttatgcatgtggaaatc

SEQ ID NO: 106257 - DNA, 22 bp, synthetic construct
  misc_feature 1..22: note = chemically synthesized
  source 1..22: mol_type = other DNA
aagcttatgcatgtggaaatca

SEQ ID NO: 106258 - DNA, 22 bp, synthetic construct
  misc_feature 1..22: note = chemically synthesized
  source 1..22: mol_type = other DNA
atgcatgtggaaatcacctccc

SEQ ID NO: 106259 - DNA, 22 bp, synthetic construct
  misc_feature 1..22: note = chemically synthesized
  source 1..22: mol_type = other DNA
tgcatgtggaaatcacctcccc

SEQ ID NO: 106260 - DNA, 22 bp, synthetic construct
  misc_feature 1..22: note = chemically synthesized
  source 1..22: mol_type = other DNA
ccctgagtttcatctttctagc

SEQ ID NO: 106261 - DNA, 22 bp, synthetic construct
  misc_feature 1..22: note = chemically synthesized
  source 1..22: mol_type = other DNA
agtttcatctttctagcatctc

SEQ ID NO: 106262 - DNA, 22 bp, synthetic construct
  misc_feature 1..22: note = chemically synthesized
  source 1..22: mol_type = other DNA
catctttctagcatctcaggag

SEQ ID NO: 106263 - DNA, 22 bp, synthetic construct
  misc_feature 1..22: note = chemically synthesized
  source 1..22: mol_type = other DNA
atctttctagcatctcaggaga

SEQ ID NO: 106264 - DNA, 22 bp, synthetic construct
  misc_feature 1..22: note = chemically synthesized
  source 1..22: mol_type = other DNA
tctagcatctcaggagacccct

SEQ ID NO: 106265 - DNA, 22 bp, synthetic construct
  misc_feature 1..22: note = chemically synthesized
  source 1..22: mol_type = other DNA
ctagcatctcaggagacccctt

SEQ ID NO: 106266 - DNA, 22 bp, synthetic construct
  misc_feature 1..22: note = chemically synthesized
  source 1..22: mol_type = other DNA
tagcatctcaggagaccccttg

SEQ ID NO: 106267 - DNA, 22 bp, synthetic construct
  misc_feature 1..22: note = chemically synthesized
  source 1..22: mol_type = other DNA
gcatctcaggagaccccttgat

SEQ ID NO: 106268 - DNA, 22 bp, synthetic construct
  misc_feature 1..22: note = chemically synthesized
  source 1..22: mol_type = other DNA
aggagaccccttgatctccctt

SEQ ID NO: 106269 - DNA, 22 bp, synthetic construct
  misc_feature 1..22: note = chemically synthesized
  source 1..22: mol_type = other DNA
gatctcccttccctctcttctc

SEQ ID NO: 106270 - DNA, 22 bp, synthetic construct
  misc_feature 1..22: note = chemically synthesized
  source 1..22: mol_type = other DNA
atctcccttccctctcttctct

SEQ ID NO: 106271 - DNA, 22 bp, synthetic construct
  misc_feature 1..22: note = chemically synthesized
  source 1..22: mol_type = other DNA
ccttccctctcttctctgttcg

SEQ ID NO: 106272 - DNA, 22 bp, synthetic construct
  misc_feature 1..22: note = chemically synthesized
  source 1..22: mol_type = other DNA
ccctctcttctctgttcgggag

SEQ ID NO: 106273 - DNA, 22 bp, synthetic construct
  misc_feature 1..22: note = chemically synthesized
  source 1..22: mol_type = other DNA
cctctcttctctgttcgggagg

SEQ ID NO: 106274 - DNA, 22 bp, synthetic construct
  misc_feature 1..22: note = chemically synthesized
  source 1..22: mol_type = other DNA
tcttctctgttcgggaggaaca

SEQ ID NO: 106275 - DNA, 22 bp, synthetic construct
  misc_feature 1..22: note = chemically synthesized
  source 1..22: mol_type = other DNA
ttctctgttcgggaggaacagg

SEQ ID NO: 106276 - DNA, 22 bp, synthetic construct
  misc_feature 1..22: note = chemically synthesized
  source 1..22: mol_type = other DNA
ctctgttcgggaggaacagggc

SEQ ID NO: 106277 - DNA, 22 bp, synthetic construct
  misc_feature 1..22: note = chemically synthesized
  source 1..22: mol_type = other DNA
tctgttcgggaggaacagggcc

SEQ ID NO: 106278 - DNA, 22 bp, synthetic construct
  misc_feature 1..22: note = chemically synthesized
  source 1..22: mol_type = other DNA
tgttcgggaggaacagggcccc

SEQ ID NO: 106279 - DNA, 22 bp, synthetic construct
  misc_feature 1..22: note = chemically synthesized
  source 1..22: mol_type = other DNA
ttcgggaggaacagggccccac

SEQ ID NO: 106280 - DNA, 22 bp, synthetic construct
  misc_feature 1..22: note = chemically synthesized
  source 1..22: mol_type = other DNA
gggaggaacagggccccacaac

SEQ ID NO: 106281 - DNA, 22 bp, synthetic construct
  misc_feature 1..22: note = chemically synthesized
  source 1..22: mol_type = other DNA
atgtcctcgggattttcaggtg

SEQ ID NO: 106282 - DNA, 22 bp, synthetic construct
  misc_feature 1..22: note = chemically synthesized
  source 1..22: mol_type = other DNA
gggattttcaggtgtttcctga

SEQ ID NO: 106283 - DNA, 22 bp, synthetic construct
  misc_feature 1..22: note = chemically synthesized
  source 1..22: mol_type = other DNA
tcaggtgtttcctgaagaatgg

SEQ ID NO: 106284 - DNA, 22 bp, synthetic construct
  misc_feature 1..22: note = chemically synthesized
  source 1..22: mol_type = other DNA
caggtgtttcctgaagaatggg

SEQ ID NO: 106285 - DNA, 22 bp, synthetic construct
  misc_feature 1..22: note = chemically synthesized
  source 1..22: mol_type = other DNA
aggtgtttcctgaagaatgggg

SEQ ID NO: 106286 - DNA, 22 bp, synthetic construct
  misc_feature 1..22: note = chemically synthesized
  source 1..22: mol_type = other DNA
cctgaagaatggggtgaggaaa

SEQ ID NO: 106287 - DNA, 22 bp, synthetic construct
  misc_feature 1..22: note = chemically synthesized
  source 1..22: mol_type = other DNA
ctgaagaatggggtgaggaaaa

SEQ ID NO: 106288 - DNA, 22 bp, synthetic construct
  misc_feature 1..22: note = chemically synthesized
  source 1..22: mol_type = other DNA
aagaatggggtgaggaaaattt

SEQ ID NO: 106289 - DNA, 22 bp, synthetic construct
  misc_feature 1..22: note = chemically synthesized
  source 1..22: mol_type = other DNA
gaaattcaaaaaccagctgatg

SEQ ID NO: 106290 - DNA, 22 bp, synthetic construct
  misc_feature 1..22: note = chemically synthesized
  source 1..22: mol_type = other DNA
aaattcaaaaaccagctgatgt

SEQ ID NO: 106291 - DNA, 22 bp, synthetic construct
  misc_feature 1..22: note = chemically synthesized
  source 1..22: mol_type = other DNA
aaaaaccagctgatgtaagata

SEQ ID NO: 106292 - DNA, 22 bp, synthetic construct
  misc_feature 1..22: note = chemically synthesized
  source 1..22: mol_type = other DNA
atgtaagatagggataccaggg

SEQ ID NO: 106293 - DNA, 22 bp, synthetic construct
  misc_feature 1..22: note = chemically synthesized
  source 1..22: mol_type = other DNA
ggttatgtgacccaaggaggct

SEQ ID NO: 106294 - DNA, 22 bp, synthetic construct
  misc_feature 1..22: note = chemically synthesized
  source 1..22: mol_type = other DNA
gttatgtgacccaaggaggctc

SEQ ID NO: 106295 - DNA, 22 bp, synthetic construct
  misc_feature 1..22: note = chemically synthesized
  source 1..22: mol_type = other DNA
tgtgacccaaggaggctcagca

SEQ ID NO: 106296 - DNA, 22 bp, synthetic construct
  misc_feature 1..22: note = chemically synthesized
  source 1..22: mol_type = other DNA
agcatcataacttagtttattt

SEQ ID NO: 106297 - DNA, 22 bp, synthetic construct
  misc_feature 1..22: note = chemically synthesized
  source 1..22: mol_type = other DNA
agtttatttgaaagggttaggg

SEQ ID NO: 106298 - DNA, 22 bp, synthetic construct
  misc_feature 1..22: note = chemically synthesized
  source 1..22: mol_type = other DNA
gtttatttgaaagggttagggg

SEQ ID NO: 106299 - DNA, 22 bp, synthetic construct
  misc_feature 1..22: note = chemically synthesized
  source 1..22: mol_type = other DNA
atttgaaagggttaggggatat

SEQ ID NO: 106300 - DNA, 22 bp, synthetic construct
  misc_feature 1..22: note = chemically synthesized
  source 1..22: mol_type = other DNA
tttgaaagggttaggggatatc

SEQ ID NO: 106301 - DNA, 22 bp, synthetic construct
  misc_feature 1..22: note = chemically synthesized
  source 1..22: mol_type = other DNA
gaaagggttaggggatatcggt

SEQ ID NO: 106302 - DNA, 22 bp, synthetic construct
  misc_feature 1..22: note = chemically synthesized
  source 1..22: mol_type = other DNA
aaagggttaggggatatcggtt

SEQ ID NO: 106303 - DNA, 22 bp, synthetic construct
  misc_feature 1..22: note = chemically synthesized
  source 1..22: mol_type = other DNA
ggggatatcggttgtcttcagg

SEQ ID NO: 106304 - DNA, 22 bp, synthetic construct
  misc_feature 1..22: note = chemically synthesized
  source 1..22: mol_type = other DNA
tcttcagggatcatatgtacct

SEQ ID NO: 106305 - DNA, 22 bp, synthetic construct
  misc_feature 1..22: note = chemically synthesized
  source 1..22: mol_type = other DNA
cagggatcatatgtacctctac

SEQ ID NO: 106306 - DNA, 22 bp, synthetic construct
  misc_feature 1..22: note = chemically synthesized
  source 1..22: mol_type = other DNA
agggatcatatgtacctctacg

SEQ ID NO: 106307 - DNA, 22 bp, synthetic construct
  misc_feature 1..22: note = chemically synthesized
  source 1..22: mol_type = other DNA
tacgggtcctagagcttatgaa

SEQ ID NO: 106308 - DNA, 22 bp, synthetic construct
  misc_feature 1..22: note = chemically synthesized
  source 1..22: mol_type = other DNA
cgggtcctagagcttatgaatt

SEQ ID NO: 106309 - DNA, 22 bp, synthetic construct
  misc_feature 1..22: note = chemically synthesized
  source 1..22: mol_type = other DNA
gagcttatgaattccaattgcg

SEQ ID NO: 106310 - DNA, 22 bp, synthetic construct
  misc_feature 1..22: note = chemically synthesized
  source 1..22: mol_type = other DNA
atgaattccaattgcgtttttg

SEQ ID NO: 106311 - DNA, 22 bp, synthetic construct
  misc_feature 1..22: note = chemically synthesized
  source 1..22: mol_type = other DNA
tgaattccaattgcgtttttgt

SEQ ID NO: 106312 - DNA, 22 bp, synthetic construct
  misc_feature 1..22: note = chemically synthesized
  source 1..22: mol_type = other DNA
caattgcgtttttgtctttcct

SEQ ID NO: 106313 - DNA, 22 bp, synthetic construct
  misc_feature 1..22: note = chemically synthesized
  source 1..22: mol_type = other DNA
cgtttttgtctttcctgttact

SEQ ID NO: 106314 - DNA, 22 bp, synthetic construct
  misc_feature 1..22: note = chemically synthesized
  source 1..22: mol_type = other DNA
ttgtctttcctgttactttggt

SEQ ID NO: 106315 - DNA, 22 bp, synthetic construct
  misc_feature 1..22: note = chemically synthesized
  source 1..22: mol_type = other DNA
tgtctttcctgttactttggta

SEQ ID NO: 106316 - DNA, 22 bp, synthetic construct
  misc_feature 1..22: note = chemically synthesized
  source 1..22: mol_type = other DNA
gtctttcctgttactttggtaa

SEQ ID NO: 106317 - DNA, 22 bp, synthetic construct
  misc_feature 1..22: note = chemically synthesized
  source 1..22: mol_type = other DNA
tctttcctgttactttggtaaa

SEQ ID NO: 106318 - DNA, 22 bp, synthetic construct
  misc_feature 1..22: note = chemically synthesized
  source 1..22: mol_type = other DNA
tcctgttactttggtaaaattt

SEQ ID NO: 106319 - DNA, 22 bp, synthetic construct
  misc_feature 1..22: note = chemically synthesized
  source 1..22: mol_type = other DNA
cctgttactttggtaaaatttg

SEQ ID NO: 106320 - DNA, 22 bp, synthetic construct
  misc_feature 1..22: note = chemically synthesized
  source 1..22: mol_type = other DNA
ctgttactttggtaaaatttgt

SEQ ID NO: 106321 - DNA, 22 bp, synthetic construct
  misc_feature 1..22: note = chemically synthesized
  source 1..22: mol_type = other DNA
ttactttggtaaaatttgttct

SEQ ID NO: 106322 - DNA, 22 bp, synthetic construct
  misc_feature 1..22: note = chemically synthesized
  source 1..22: mol_type = other DNA
ctttggtaaaatttgttcttat

SEQ ID NO: 106323 - DNA, 22 bp, synthetic construct
  misc_feature 1..22: note = chemically synthesized
  source 1..22: mol_type = other DNA
tggtaaaatttgttcttatcta

SEQ ID NO: 106324 - DNA, 22 bp, synthetic construct
  misc_feature 1..22: note = chemically synthesized
  source 1..22: mol_type = other DNA
ggtaaaatttgttcttatctac

SEQ ID NO: 106325 - DNA, 22 bp, synthetic construct
  misc_feature 1..22: note = chemically synthesized
  source 1..22: mol_type = other DNA
gtaaaatttgttcttatctact

SEQ ID NO: 106326 - DNA, 22 bp, synthetic construct
  misc_feature 1..22: note = chemically synthesized
  source 1..22: mol_type = other DNA
gttcttatctactggaacttca

SEQ ID NO: 106327 - DNA, 22 bp, synthetic construct
  misc_feature 1..22: note = chemically synthesized
  source 1..22: mol_type = other DNA
ttcttatctactggaacttcaa

SEQ ID NO: 106328 - DNA, 22 bp, synthetic construct
  misc_feature 1..22: note = chemically synthesized
  source 1..22: mol_type = other DNA
ttatctactggaacttcaatgg

SEQ ID NO: 106329 - DNA, 22 bp, synthetic construct
  misc_feature 1..22: note = chemically synthesized
  source 1..22: mol_type = other DNA
atctactggaacttcaatggat

SEQ ID NO: 106330 - DNA, 22 bp, synthetic construct
  misc_feature 1..22: note = chemically synthesized
  source 1..22: mol_type = other DNA
tctactggaacttcaatggatc

SEQ ID NO: 106331 - DNA, 22 bp, synthetic construct
  misc_feature 1..22: note = chemically synthesized
  source 1..22: mol_type = other DNA
ctggaacttcaatggatctgtt

SEQ ID NO: 106332 - DNA, 22 bp, synthetic construct
  misc_feature 1..22: note = chemically synthesized
  source 1..22: mol_type = other DNA
gaacttcaatggatctgttaat

SEQ ID NO: 106333 - DNA, 22 bp, synthetic construct
  misc_feature 1..22: note = chemically synthesized
  source 1..22: mol_type = other DNA
caatggatctgttaatagtcat

SEQ ID NO: 106334 - DNA, 22 bp, synthetic construct
  misc_feature 1..22: note = chemically synthesized
  source 1..22: mol_type = other DNA
aatggatctgttaatagtcatg

SEQ ID NO: 106335 - DNA, 22 bp, synthetic construct
  misc_feature 1..22: note = chemically synthesized
  source 1..22: mol_type = other DNA
ttaatagtcatgcagattcatg

SEQ ID NO: 106336 - DNA, 22 bp, synthetic construct
  misc_feature 1..22: note = chemically synthesized
  source 1..22: mol_type = other DNA
atagtcatgcagattcatgaca

SEQ ID NO: 106337 - DNA, 22 bp, synthetic construct
  misc_feature 1..22: note = chemically synthesized
  source 1..22: mol_type = other DNA
atgacattcagctttttttttt

SEQ ID NO: 106338 - DNA, 22 bp, synthetic construct
  misc_feature 1..22: note = chemically synthesized
  source 1..22: mol_type = other DNA
agcttttttttttttttttttt

SEQ ID NO: 106339 - DNA, 22 bp, synthetic construct
  misc_feature 1..22: note = chemically synthesized
  source 1..22: mol_type = other DNA
tttttttttttttttttttttt

SEQ ID NO: 106340 - DNA, 22 bp, synthetic construct
  misc_feature 1..22: note = chemically synthesized
  source 1..22: mol_type = other DNA
tttttttttttttttttttttt

SEQ ID NO: 106341 - DNA, 22 bp, synthetic construct
  misc_feature 1..22: note = chemically synthesized
  source 1..22: mol_type = other DNA
tttttttttttttttttttttt

SEQ ID NO: 106342 - DNA, 22 bp, synthetic construct
  misc_feature 1..22: note = chemically synthesized
  source 1..22: mol_type = other DNA
tttttttttttttttttttttt

SEQ ID NO: 106343 - DNA, 22 bp, synthetic construct
  misc_feature 1..22: note = chemically synthesized
  source 1..22: mol_type = other DNA
tttttttttttttttttttttt

SEQ ID NO: 106344 - DNA, 22 bp, synthetic construct
  misc_feature 1..22: note = chemically synthesized
  source 1..22: mol_type = other DNA
ttttttttttttttttttttta

SEQ ID NO: 106345 - DNA, 22 bp, synthetic construct
  misc_feature 1..22: note = chemically synthesized
  source 1..22: mol_type = other DNA
ttttttttttttttttttttag

SEQ ID NO: 106346 - DNA, 22 bp, synthetic construct
  misc_feature 1..22: note = chemically synthesized
  source 1..22: mol_type = other DNA
tttttttttttttttttttaga

SEQ ID NO: 106347 - DNA, 22 bp, synthetic construct
  misc_feature 1..22: note = chemically synthesized
  source 1..22: mol_type = other DNA
ttttttttttttttttttagat

SEQ ID NO: 106348 - DNA, 22 bp, synthetic construct
  misc_feature 1..22: note = chemically synthesized
  source 1..22: mol_type = other DNA
tttttttttttttttttagata

SEQ ID NO: 106349 - DNA, 22 bp, synthetic construct
  misc_feature 1..22: note = chemically synthesized
  source 1..22: mol_type = other DNA
ttttttttttttttttagatag

SEQ ID NO: 106350 - DNA, 22 bp, synthetic construct
  misc_feature 1..22: note = chemically synthesized
  source 1..22: mol_type = other DNA
tttttttttttttttagataga

SEQ ID NO: 106351 - DNA, 22 bp, synthetic construct
  misc_feature 1..22: note = chemically synthesized
  source 1..22: mol_type = other DNA
ttttttttttttttagatagag

SEQ ID NO: 106352 - DNA, 22 bp, synthetic construct
  misc_feature 1..22: note = chemically synthesized
  source 1..22: mol_type = other DNA
tttttttttttttagatagagt

SEQ ID NO: 106353 - DNA, 22 bp, synthetic construct
  misc_feature 1..22: note = chemically synthesized
  source 1..22: mol_type = other DNA
ttttttttttttagatagagtc

SEQ ID NO: 106354 - DNA, 22 bp, synthetic construct
  misc_feature 1..22: note = chemically synthesized
  source 1..22: mol_type = other DNA
tttttttttttagatagagtct

SEQ ID NO: 106355 - DNA, 22 bp, synthetic construct
  misc_feature 1..22: note = chemically synthesized
  source 1..22: mol_type = other DNA
ttttttttttagatagagtctc

SEQ ID NO: 106356 - DNA, 22 bp, synthetic construct
  misc_feature 1..22: note = chemically synthesized
  source 1..22: mol_type = other DNA
tttttttttagatagagtctca

SEQ ID NO: 106357 - DNA, 22 bp, synthetic construct
  misc_feature 1..22: note = chemically synthesized
  source 1..22: mol_type = other DNA
ttttttttagatagagtctcac

SEQ ID NO: 106358 - DNA, 22 bp, synthetic construct
  misc_feature 1..22: note = chemically synthesized
  source 1..22: mol_type = other DNA
tttttttagatagagtctcact

SEQ ID NO: 106359 - DNA, 22 bp, synthetic construct
  misc_feature 1..22: note = chemically synthesized
  source 1..22: mol_type = other DNA
ttttttagatagagtctcactc

SEQ ID NO: 106360 - DNA, 22 bp, synthetic construct
  misc_feature 1..22: note = chemically synthesized
  source 1..22: mol_type = other DNA
tttttagatagagtctcactct

SEQ ID NO: 106361 - DNA, 22 bp, synthetic construct
  misc_feature 1..22: note = chemically synthesized
  source 1..22: mol_type = other DNA
ttttagatagagtctcactctg

SEQ ID NO: 106362 - DNA, 22 bp, synthetic construct
  misc_feature 1..22: note = chemically synthesized
  source 1..22: mol_type = other DNA
tttagatagagtctcactctgt

SEQ ID NO: 106363 - DNA, 22 bp, synthetic construct
  misc_feature 1..22: note = chemically synthesized
  source 1..22: mol_type = other DNA
ttagatagagtctcactctgtc

SEQ ID NO: 106364 - DNA, 22 bp, synthetic construct
  misc_feature 1..22: note = chemically synthesized
  source 1..22: mol_type = other DNA
tagatagagtctcactctgtcg

SEQ ID NO: 106365 - DNA, 22 bp, synthetic construct
  misc_feature 1..22: note = chemically synthesized
  source 1..22: mol_type = other DNA
agatagagtctcactctgtcgc

SEQ ID NO: 106366 - DNA, 22 bp, synthetic construct
  misc_feature 1..22: note = chemically synthesized
  source 1..22: mol_type = other DNA
gatagagtctcactctgtcgcc

SEQ ID NO: 106367 - DNA, 22 bp, synthetic construct
  misc_feature 1..22: note = chemically synthesized
  source 1..22: mol_type = other DNA
actctgtcgccaggctggagtg

SEQ ID NO: 106368 - DNA, 22 bp, synthetic construct
  misc_feature 1..22: note = chemically synthesized
  source 1..22: mol_type = other DNA
tgtcgccaggctggagtgcagt

SEQ ID NO: 106369 - DNA, 22 bp, synthetic construct
  misc_feature 1..22: note = chemically synthesized
  source 1..22: mol_type = other DNA
tcgccaggctggagtgcagtag

SEQ ID NO: 106370 - DNA, 22 bp, synthetic construct
  misc_feature 1..22: note = chemically synthesized
  source 1..22: mol_type = other DNA
gagtgcagtagcacaatctcag

SEQ ID NO: 106371 - DNA, 22 bp, synthetic construct
  misc_feature 1..22: note = chemically synthesized
  source 1..22: mol_type = other DNA
agctcactgcaaactccacctc

SEQ ID NO: 106372 - DNA, 22 bp, synthetic construct
  misc_feature 1..22: note = chemically synthesized
  source 1..22: mol_type = other DNA
actgcaaactccacctcccagg

SEQ ID NO: 106373 - DNA, 22 bp, synthetic construct
  misc_feature 1..22: note = chemically synthesized
  source 1..22: mol_type = other DNA
caaactccacctcccaggttca

SEQ ID NO: 106374 - DNA, 22 bp, synthetic construct
  misc_feature 1..22: note = chemically synthesized
  source 1..22: mol_type = other DNA
cacctcccaggttcaagtgatt

SEQ ID NO: 106375 - DNA, 22 bp, synthetic construct
  misc_feature 1..22: note = chemically synthesized
  source 1..22: mol_type = other DNA
ccaggttcaagtgattctcctg

SEQ ID NO: 106376 - DNA, 22 bp, synthetic construct
  misc_feature 1..22: note = chemically synthesized
  source 1..22: mol_type = other DNA
aagtgattctcctgccacagcc

SEQ ID NO: 106377 - DNA, 22 bp, synthetic construct
  misc_feature 1..22: note = chemically synthesized
  source 1..22: mol_type = other DNA
tcctgccacagcctcctgagaa

SEQ ID NO: 106378 - DNA, 22 bp, synthetic construct
  misc_feature 1..22: note = chemically synthesized
  source 1..22: mol_type = other DNA
ctgccacagcctcctgagaagc

SEQ ID NO: 106379 - DNA, 22 bp, synthetic construct
  misc_feature 1..22: note = chemically synthesized
  source 1..22: mol_type = other DNA
ccacagcctcctgagaagctgg

SEQ ID NO: 106380 - DNA, 22 bp, synthetic construct
  misc_feature 1..22: note = chemically synthesized
  source 1..22: mol_type = other DNA
ctgagaagctgggactacagta

SEQ ID NO: 106381 - DNA, 22 bp, synthetic construct
  misc_feature 1..22: note = chemically synthesized
  source 1..22: mol_type = other DNA
agaagctgggactacagtagcg

SEQ ID NO: 106382 - DNA, 22 bp, synthetic construct
  misc_feature 1..22: note = chemically synthesized
  source 1..22: mol_type = other DNA
ggactacagtagcgcgtcacca

SEQ ID NO: 106383 - DNA, 22 bp, synthetic construct
  misc_feature 1..22: note = chemically synthesized
  source 1..22: mol_type = other DNA
cagtagcgcgtcaccacaccca

SEQ ID NO: 106384 - DNA, 22 bp, synthetic construct
  misc_feature 1..22: note = chemically synthesized
  source 1..22: mol_type = other DNA
atttttgtatttttagtagaca

SEQ ID NO: 106385 - DNA, 22 bp, synthetic construct
  misc_feature 1..22: note = chemically synthesized
  source 1..22: mol_type = other DNA
ttgtatttttagtagacacggg

SEQ ID NO: 106386 - DNA, 22 bp, synthetic construct
  misc_feature 1..22: note = chemically synthesized
  source 1..22: mol_type = other DNA
tgtatttttagtagacacgggg

SEQ ID NO: 106387 - DNA, 22 bp, synthetic construct
  misc_feature 1..22: note = chemically synthesized
  source 1..22: mol_type = other DNA
gtatttttagtagacacggggt

SEQ ID NO: 106388 - DNA, 22 bp, synthetic construct
  misc_feature 1..22: note = chemically synthesized
  source 1..22: mol_type = other DNA
tatttttagtagacacggggtt

SEQ ID NO: 106389 - DNA, 22 bp, synthetic construct
  misc_feature 1..22: note = chemically synthesized
  source 1..22: mol_type = other DNA
ttagtagacacggggtttcacc

SEQ ID NO: 106390 - DNA, 22 bp, synthetic construct
  misc_feature 1..22: note = chemically synthesized
  source 1..22: mol_type = other DNA
tagtagacacggggtttcacca

SEQ ID NO: 106391 - DNA, 22 bp, synthetic construct
  misc_feature 1..22: note = chemically synthesized
  source 1..22: mol_type = other DNA
agtagacacggggtttcaccat

SEQ ID NO: 106392 - DNA, 22 bp, synthetic construct
  misc_feature 1..22: note = chemically synthesized
  source 1..22: mol_type = other DNA
gtagacacggggtttcaccata

SEQ ID NO: 106393 - DNA, 22 bp, synthetic construct
  misc_feature 1..22: note = chemically synthesized
  source 1..22: mol_type = other DNA
caccatattggccaggatggtc

SEQ ID NO: 106394 - DNA, 22 bp, synthetic construct
  misc_feature 1..22: note = chemically synthesized
  source 1..22: mol_type = other DNA
accatattggccaggatggtct

SEQ ID NO: 106395 - DNA, 22 bp, synthetic construct
  misc_feature 1..22: note = chemically synthesized
  source 1..22: mol_type = other DNA
gccaggatggtctcgatctctt

SEQ ID NO: 106396 - DNA, 22 bp, synthetic construct
  misc_feature 1..22: note = chemically synthesized
  source 1..22: mol_type = other DNA
gatctcttgacctcgtgatcca

SEQ ID NO: 106397 - DNA, 22 bp, synthetic construct
  misc_feature 1..22: note = chemically synthesized
  source 1..22: mol_type = other DNA
ttgacctcgtgatccaccctcc

SEQ ID NO: 106398 - DNA, 22 bp, synthetic construct
  misc_feature 1..22: note = chemically synthesized
  source 1..22: mol_type = other DNA
gacctcgtgatccaccctcctt

SEQ ID NO: 106399 - DNA, 22 bp, synthetic construct
  misc_feature 1..22: note = chemically synthesized
  source 1..22: mol_type = other DNA
acctcgtgatccaccctccttg

SEQ ID NO: 106400 - DNA, 22 bp, synthetic construct
  misc_feature 1..22: note = chemically synthesized
  source 1..22: mol_type = other DNA
gtgatccaccctccttggcctc

SEQ ID NO: 106401 - DNA, 22 bp, synthetic construct
  misc_feature 1..22: note = chemically synthesized
  source 1..22: mol_type = other DNA
cttggcctcccaaagtgctggg

SEQ ID NO: 106402 - DNA, 22 bp, synthetic construct
  misc_feature 1..22: note = chemically synthesized
  source 1..22: mol_type = other DNA
ggcctcccaaagtgctgggatt

SEQ ID NO: 106403 - DNA, 22 bp, synthetic construct
  misc_feature 1..22: note = chemically synthesized
  source 1..22: mol_type = other DNA
gcctcccaaagtgctgggattg

SEQ ID NO: 106404 - DNA, 22 bp, synthetic construct
  misc_feature 1..22: note = chemically synthesized
  source 1..22: mol_type = other DNA
ccaaagtgctgggattgcaggt

SEQ ID NO: 106405 - DNA, 22 bp, synthetic construct
  misc_feature 1..22: note = chemically synthesized
  source 1..22: mol_type = other DNA
ggattgcaggtgtgagtcactg

SEQ ID NO: 106406 - DNA, 22 bp, synthetic construct
  misc_feature 1..22: note = chemically synthesized
  source 1..22: mol_type = other DNA
caggtgtgagtcactgcgcccg

SEQ ID NO: 106407 - DNA, 22 bp, synthetic construct
  misc_feature 1..22: note = chemically synthesized
  source 1..22: mol_type = other DNA
cgcccggctgacattcagcttt

SEQ ID NO: 106408 - DNA, 22 bp, synthetic construct
  misc_feature 1..22: note = chemically synthesized
  source 1..22: mol_type = other DNA
acattcagctttttatcttaaa

SEQ ID NO: 106409 - DNA, 22 bp, synthetic construct
  misc_feature 1..22: note = chemically synthesized
  source 1..22: mol_type = other DNA
agctttttatcttaaaattata

SEQ ID NO: 106410 - DNA, 22 bp, synthetic construct
  misc_feature 1..22: note = chemically synthesized
  source 1..22: mol_type = other DNA
tttatcttaaaattatattact

SEQ ID NO: 106411 - DNA, 22 bp, synthetic construct
  misc_feature 1..22: note = chemically synthesized
  source 1..22: mol_type = other DNA
ttatcttaaaattatattactt

SEQ ID NO: 106412 - DNA, 22 bp, synthetic construct
  misc_feature 1..22: note = chemically synthesized
  source 1..22: mol_type = other DNA
tatcttaaaattatattacttg

SEQ ID NO: 106413 - DNA, 22 bp, synthetic construct
  misc_feature 1..22: note = chemically synthesized
  source 1..22: mol_type = other DNA
atcttaaaattatattacttgt

SEQ ID NO: 106414 - DNA, 22 bp, synthetic construct
  misc_feature 1..22: note = chemically synthesized
  source 1..22: mol_type = other DNA
tcttaaaattatattacttgta

SEQ ID NO: 106415 - DNA, 22 bp, synthetic construct
  misc_feature 1..22: note = chemically synthesized
  source 1..22: mol_type = other DNA
aaaattatattacttgtagctc

SEQ ID NO: 106416 - DNA, 22 bp, synthetic construct
  misc_feature 1..22: note = chemically synthesized
  source 1..22: mol_type = other DNA
aaattatattacttgtagctca

SEQ ID NO: 106417 - DNA, 22 bp, synthetic construct
  misc_feature 1..22: note = chemically synthesized
  source 1..22: mol_type = other DNA
tattacttgtagctcattgccc

SEQ ID NO: 106418 - DNA, 22 bp, synthetic construct
  misc_feature 1..22: note = chemically synthesized
  source 1..22: mol_type = other DNA
cttgtagctcattgcccttttt

SEQ ID NO: 106419 - DNA, 22 bp, synthetic construct
  misc_feature 1..22: note = chemically synthesized
  source 1..22: mol_type = other DNA
gtagctcattgccctttttttt

SEQ ID NO: 106420 - DNA, 22 bp, synthetic construct
  misc_feature 1..22: note = chemically synthesized
  source 1..22: mol_type = other DNA
tagctcattgcccttttttttt

SEQ ID NO: 106421 - DNA, 22 bp, synthetic construct
  misc_feature 1..22: note = chemically synthesized
  source 1..22: mol_type = other DNA
attgcccttttttttttttttt

SEQ ID NO: 106422 - DNA, 22 bp, synthetic construct
  misc_feature 1..22: note = chemically synthesized
  source 1..22: mol_type = other DNA
ccctttttttttttttttgcca

SEQ ID NO: 106423 - DNA, 22 bp, synthetic construct
  misc_feature 1..22: note = chemically synthesized
  source 1..22: mol_type = other DNA
tttttttttttttgccagatac

SEQ ID NO: 106424 - DNA, 22 bp, synthetic construct
  misc_feature 1..22: note = chemically synthesized
  source 1..22: mol_type = other DNA
ttttttttttttgccagataca

SEQ ID NO: 106425 - DNA, 22 bp, synthetic construct
  misc_feature 1..22: note = chemically synthesized
  source 1..22: mol_type = other DNA
tttttttttttgccagatacac

SEQ ID NO: 106426 - DNA, 22 bp, synthetic construct
  misc_feature 1..22: note = chemically synthesized
  source 1..22: mol_type = other DNA
ttttttttttgccagatacaca

SEQ ID NO: 106427 - DNA, 22 bp, synthetic construct
  misc_feature 1..22: note = chemically synthesized
  source 1..22: mol_type = other DNA
tttttttttgccagatacacaa

SEQ ID NO: 106428 - DNA, 22 bp, synthetic construct
  misc_feature 1..22: note = chemically synthesized
  source 1..22: mol_type = other DNA
ttttttttgccagatacacaat

SEQ ID NO: 106429 - DNA, 22 bp, synthetic construct
  misc_feature 1..22: note = chemically synthesized
  source 1..22: mol_type = other DNA
tttttttgccagatacacaatg

SEQ ID NO: 106430 - DNA, 22 bp, synthetic construct
  misc_feature 1..22: note = chemically synthesized
  source 1..22: mol_type = other DNA
ttttttgccagatacacaatga

SEQ ID NO: 106431 - DNA, 22 bp, synthetic construct
  misc_feature 1..22: note = chemically synthesized
  source 1..22: mol_type = other DNA
tttttgccagatacacaatgag

SEQ ID NO: 106432 - DNA, 22 bp, synthetic construct
  misc_feature 1..22: note = chemically synthesized
  source 1..22: mol_type = other DNA
ttttgccagatacacaatgagg

SEQ ID NO: 106433 - DNA, 22 bp, synthetic construct
  misc_feature 1..22: note = chemically synthesized
  source 1..22: mol_type = other DNA
tttgccagatacacaatgagga

SEQ ID NO: 106434 - DNA, 22 bp, synthetic construct
  misc_feature 1..22: note = chemically synthesized
  source 1..22: mol_type = other DNA
ttgccagatacacaatgaggag

SEQ ID NO: 106435 - DNA, 22 bp, synthetic construct
  misc_feature 1..22: note = chemically synthesized
  source 1..22: mol_type = other DNA
tgccagatacacaatgaggagc

SEQ ID NO: 106436 - DNA, 22 bp, synthetic construct
  misc_feature 1..22: note = chemically synthesized
  source 1..22: mol_type = other DNA
gccagatacacaatgaggagca

SEQ ID NO: 106437 - DNA, 22 bp, synthetic construct
  misc_feature 1..22: note = chemically synthesized
  source 1..22: mol_type = other DNA
ccagatacacaatgaggagcat

SEQ ID NO: 106438 - DNA, 22 bp, synthetic construct
  misc_feature 1..22: note = chemically synthesized
  source 1..22: mol_type = other DNA
tattcacagaatgtaaatagtg

SEQ ID NO: 106439 - DNA, 22 bp, synthetic construct
  misc_feature 1..22: note = chemically synthesized
  source 1..22: mol_type = other DNA
attcacagaatgtaaatagtgt

SEQ ID NO: 106440 - DNA, 22 bp, synthetic construct
  misc_feature 1..22: note = chemically synthesized
  source 1..22: mol_type = other DNA
ttcacagaatgtaaatagtgtg

SEQ ID NO: 106441 - DNA, 22 bp, synthetic construct
  misc_feature 1..22: note = chemically synthesized
  source 1..22: mol_type = other DNA
acagaatgtaaatagtgtgtaa

SEQ ID NO: 106442 - DNA, 22 bp, synthetic construct
  misc_feature 1..22: note = chemically synthesized
  source 1..22: mol_type = other DNA
ccacaaattttcatagcactat

SEQ ID NO: 106443 - DNA, 22 bp, synthetic construct
  misc_feature 1..22: note = chemically synthesized
  source 1..22: mol_type = other DNA
tcatagcactatcattactgca

SEQ ID NO: 106444 - DNA, 22 bp, synthetic construct
  misc_feature 1..22: note = chemically synthesized
  source 1..22: mol_type = other DNA
catagcactatcattactgcat

SEQ ID NO: 106445 - DNA, 22 bp, synthetic construct
  misc_feature 1..22: note = chemically synthesized
  source 1..22: mol_type = other DNA
atagcactatcattactgcata

SEQ ID NO: 106446 - DNA, 22 bp, synthetic construct
  misc_feature 1..22: note = chemically synthesized
  source 1..22: mol_type = other DNA
tcattactgcatagatggtagc

SEQ ID NO: 106447 - DNA, 22 bp, synthetic construct
  misc_feature 1..22: note = chemically synthesized
  source 1..22: mol_type = other DNA
ctgcatagatggtagcatgcta

SEQ ID NO: 106448 - DNA, 22 bp, synthetic construct
  misc_feature 1..22: note = chemically synthesized
  source 1..22: mol_type = other DNA
catagatggtagcatgctaaag

SEQ ID NO: 106449 - DNA, 22 bp, synthetic construct
  misc_feature 1..22: note = chemically synthesized
  source 1..22: mol_type = other DNA
aagggagcccacagaaagcatc

SEQ ID NO: 106450 - DNA, 22 bp, synthetic construct
  misc_feature 1..22: note = chemically synthesized
  source 1..22: mol_type = other DNA
tggggcaggggaaaatttctca

SEQ ID NO: 106451 - DNA, 22 bp, synthetic construct
  misc_feature 1..22: note = chemically synthesized
  source 1..22: mol_type = other DNA
ggggcaggggaaaatttctcaa

SEQ ID NO: 106452 - DNA, 22 bp, synthetic construct
  misc_feature 1..22: note = chemically synthesized
  source 1..22: mol_type = other DNA
gggcaggggaaaatttctcaaa

SEQ ID NO: 106453 - DNA, 22 bp, synthetic construct
  misc_feature 1..22: note = chemically synthesized
  source 1..22: mol_type = other DNA
ctcaaaagaaatattatttaag

SEQ ID NO: 106454 - DNA, 22 bp, synthetic construct
  misc_feature 1..22: note = chemically synthesized
  source 1..22: mol_type = other DNA
tcaaaagaaatattatttaagc

SEQ ID NO: 106455 - DNA, 22 bp, synthetic construct
  misc_feature 1..22: note = chemically synthesized
  source 1..22: mol_type = other DNA
aaaagaaatattatttaagcta

SEQ ID NO: 106456 - DNA, 22 bp, synthetic construct
  misc_feature 1..22: note = chemically synthesized
  source 1..22: mol_type = other DNA
tttaagctaataattgaaaaac

SEQ ID NO: 106457 - DNA, 22 bp, synthetic construct
  misc_feature 1..22: note = chemically synthesized
  source 1..22: mol_type = other DNA
aagctaataattgaaaaacaag

SEQ ID NO: 106458 - DNA, 22 bp, synthetic construct
  misc_feature 1..22: note = chemically synthesized
  source 1..22: mol_type = other DNA
agctaataattgaaaaacaagg

SEQ ID NO: 106459 - DNA, 22 bp, synthetic construct
  misc_feature 1..22: note = chemically synthesized
  source 1..22: mol_type = other DNA
ataattgaaaaacaaggaaggt

SEQ ID NO: 106460 - DNA, 22 bp, synthetic construct
  misc_feature 1..22: note = chemically synthesized
  source 1..22: mol_type = other DNA
aaaaacaaggaaggtaacaaat

SEQ ID NO: 106461 - DNA, 22 bp, synthetic construct
  misc_feature 1..22: note = chemically synthesized
  source 1..22: mol_type = other DNA
gtataagtggggtacagtttat

SEQ ID NO: 106462 - DNA, 22 bp, synthetic construct
  misc_feature 1..22: note = chemically synthesized
  source 1..22: mol_type = other DNA
tataagtggggtacagtttata

SEQ ID NO: 106463 - DNA, 22 bp, synthetic construct
  misc_feature 1..22: note = chemically synthesized
  source 1..22: mol_type = other DNA
ataaaggaagaaaaaatacaca

SEQ ID NO: 106464 - DNA, 22 bp, synthetic construct
  misc_feature 1..22: note = chemically synthesized
  source 1..22: mol_type = other DNA
taaaggaagaaaaaatacacag

SEQ ID NO: 106465 - DNA, 22 bp, synthetic construct
  misc_feature 1..22: note = chemically synthesized
  source 1..22: mol_type = other DNA
tggggaaagagaaaatatgaca

SEQ ID NO: 106466 - DNA, 22 bp, synthetic construct
  misc_feature 1..22: note = chemically synthesized
  source 1..22: mol_type = other DNA
aaatcaagagaattctagcaga

SEQ ID NO: 106467 - DNA, 22 bp, synthetic construct
  misc_feature 1..22: note = chemically synthesized
  source 1..22: mol_type = other DNA
tagcagagccagaataacaaaa

SEQ ID NO: 106468 - DNA, 22 bp, synthetic construct
  misc_feature 1..22: note = chemically synthesized
  source 1..22: mol_type = other DNA
gcagagccagaataacaaaaca

SEQ ID NO: 106469 - DNA, 22 bp, synthetic construct
  misc_feature 1..22: note = chemically synthesized
  source 1..22: mol_type = other DNA
aacacaaagagaatctgtggta

SEQ ID NO: 106470 - DNA, 22 bp, synthetic construct
  misc_feature 1..22: note = chemically synthesized
  source 1..22: mol_type = other DNA
tggtagcctgttggtttttgtt

SEQ ID NO: 106471 - DNA, 22 bp, synthetic construct
  misc_feature 1..22: note = chemically synthesized
  source 1..22: mol_type = other DNA
ttggtttttgttaatccaaaat

SEQ ID NO: 106472 - DNA, 22 bp, synthetic construct
  misc_feature 1..22: note = chemically synthesized
  source 1..22: mol_type = other DNA
gtttttgttaatccaaaataat

SEQ ID NO: 106473 - DNA, 22 bp, synthetic construct
  misc_feature 1..22: note = chemically synthesized
  source 1..22: mol_type = other DNA
ttgttaatccaaaataatgtat

SEQ ID NO: 106474 - DNA, 22 bp, synthetic construct
  misc_feature 1..22: note = chemically synthesized
  source 1..22: mol_type = other DNA
tgttaatccaaaataatgtatt

SEQ ID NO: 106475 - DNA, 22 bp, synthetic construct
  misc_feature 1..22: note = chemically synthesized
  source 1..22: mol_type = other DNA
gttaatccaaaataatgtattt

SEQ ID NO: 106476 - DNA, 22 bp, synthetic construct
  misc_feature 1..22: note = chemically synthesized
  source 1..22: mol_type = other DNA
ttaatccaaaataatgtatttt

SEQ ID NO: 106477 - DNA, 22 bp, synthetic construct
  misc_feature 1..22: note = chemically synthesized
  source 1..22: mol_type = other DNA
atccaaaataatgtatttttat

SEQ ID NO: 106478 - DNA, 22 bp, synthetic construct
  misc_feature 1..22: note = chemically synthesized
  source 1..22: mol_type = other DNA
ttattattattattattatact

SEQ ID NO: 106479 - DNA, 22 bp, synthetic construct
  misc_feature 1..22: note = chemically synthesized
  source 1..22: mol_type = other DNA
tattattattattattatactt

SEQ ID NO: 106480 - DNA, 22 bp, synthetic construct
  misc_feature 1..22: note = chemically synthesized
  source 1..22: mol_type = other DNA
attattattattattatacttt

SEQ ID NO: 106481 - DNA, 22 bp, synthetic construct
  misc_feature 1..22: note = chemically synthesized
  source 1..22: mol_type = other DNA
ttattattattattatacttta

SEQ ID NO: 106482 - DNA, 22 bp, synthetic construct
  misc_feature 1..22: note = chemically synthesized
  source 1..22: mol_type = other DNA
ttattattattatactttaagt

SEQ ID NO: 106483 - DNA, 22 bp, synthetic construct
  misc_feature 1..22: note = chemically synthesized
  source 1..22: mol_type = other DNA
ttattattatactttaagtttt

SEQ ID NO: 106484 - DNA, 22 bp, synthetic construct
  misc_feature 1..22: note = chemically synthesized
  source 1..22: mol_type = other DNA
ttattatactttaagttttagg

SEQ ID NO: 106485 - DNA, 22 bp, synthetic construct
  misc_feature 1..22: note = chemically synthesized
  source 1..22: mol_type = other DNA
ttatactttaagttttagggta

SEQ ID NO: 106486 - DNA, 22 bp, synthetic construct
  misc_feature 1..22: note = chemically synthesized
  source 1..22: mol_type = other DNA
tactttaagttttagggtacat

SEQ ID NO: 106487 - DNA, 22 bp, synthetic construct
  misc_feature 1..22: note = chemically synthesized
  source 1..22: mol_type = other DNA
taagttttagggtacatgtgca

SEQ ID NO: 106488 - DNA, 22 bp, synthetic construct
  misc_feature 1..22: note = chemically synthesized
  source 1..22: mol_type = other DNA
aagttttagggtacatgtgcac

SEQ ID NO: 106489 - DNA, 22 bp, synthetic construct
  misc_feature 1..22: note = chemically synthesized
  source 1..22: mol_type = other DNA
agttttagggtacatgtgcaca

SEQ ID NO: 106490 - DNA, 22 bp, synthetic construct
  misc_feature 1..22: note = chemically synthesized
  source 1..22: mol_type = other DNA
tagggtacatgtgcacaatgtg

SEQ ID NO: 106491 - DNA, 22 bp, synthetic construct
  misc_feature 1..22: note = chemically synthesized
  source 1..22: mol_type = other DNA
agggtacatgtgcacaatgtgc

SEQ ID NO: 106492 - DNA, 22 bp, synthetic construct
  misc_feature 1..22: note = chemically synthesized
  source 1..22: mol_type = other DNA
gggtacatgtgcacaatgtgca

SEQ ID NO: 106493 - DNA, 22 bp, synthetic construct
  misc_feature 1..22: note = chemically synthesized
  source 1..22: mol_type = other DNA
gttacatatgtatacatgtgcc

SEQ ID NO: 106494 - DNA, 22 bp, synthetic construct
  misc_feature 1..22: note = chemically synthesized
  source 1..22: mol_type = other DNA
ttacatatgtatacatgtgcca

SEQ ID NO: 106495 - DNA, 22 bp, synthetic construct
  misc_feature 1..22: note = chemically synthesized
  source 1..22: mol_type = other DNA
catatgtatacatgtgccatgt

SEQ ID NO: 106496 - DNA, 22 bp, synthetic construct
  misc_feature 1..22: note = chemically synthesized
  source 1..22: mol_type = other DNA
gtgtgctgcacccattaacttg

SEQ ID NO: 106497 - DNA, 22 bp, synthetic construct
  misc_feature 1..22: note = chemically synthesized
  source 1..22: mol_type = other DNA
cacccattaacttgtcacttag

SEQ ID NO: 106498 - DNA, 22 bp, synthetic construct
  misc_feature 1..22: note = chemically synthesized
  source 1..22: mol_type = other DNA
acttgtcacttagcattaggta

SEQ ID NO: 106499 - DNA, 22 bp, synthetic construct
  misc_feature 1..22: note = chemically synthesized
  source 1..22: mol_type = other DNA
gtcacttagcattaggtatatc

SEQ ID NO: 106500 - DNA, 22 bp, synthetic construct
  misc_feature 1..22: note = chemically synthesized
  source 1..22: mol_type = other DNA
tcacttagcattaggtatatct

SEQ ID NO: 106501 - DNA, 22 bp, synthetic construct
  misc_feature 1..22: note = chemically synthesized
  source 1..22: mol_type = other DNA
agcattaggtatatctcctaat

SEQ ID NO: 106502 - DNA, 22 bp, synthetic construct
  misc_feature 1..22: note = chemically synthesized
  source 1..22: mol_type = other DNA
gcattaggtatatctcctaatg

SEQ ID NO: 106503 - DNA, 22 bp, synthetic construct
  misc_feature 1..22: note = chemically synthesized
  source 1..22: mol_type = other DNA
ggtatatctcctaatgctctct

SEQ ID NO: 106504 - DNA, 22 bp, synthetic construct
  misc_feature 1..22: note = chemically synthesized
  source 1..22: mol_type = other DNA
ctaatgctctctctcccccttc

SEQ ID NO: 106505 - DNA, 22 bp, synthetic construct
  misc_feature 1..22: note = chemically synthesized
  source 1..22: mol_type = other DNA
atgctctctctcccccttcccc

SEQ ID NO: 106506 - DNA, 22 bp, synthetic construct
  misc_feature 1..22: note = chemically synthesized
  source 1..22: mol_type = other DNA
tctctcccccttccccccacct

SEQ ID NO: 106507 - DNA, 22 bp, synthetic construct
  misc_feature 1..22: note = chemically synthesized
  source 1..22: mol_type = other DNA
tctcccccttccccccacctca

SEQ ID NO: 106508 - DNA, 22 bp, synthetic construct
  misc_feature 1..22: note = chemically synthesized
  source 1..22: mol_type = other DNA
tcccccttccccccacctcaca

SEQ ID NO: 106509 - DNA, 22 bp, synthetic construct
  misc_feature 1..22: note = chemically synthesized
  source 1..22: mol_type = other DNA
ccccttccccccacctcacaac

SEQ ID NO: 106510 - DNA, 22 bp, synthetic construct
  misc_feature 1..22: note = chemically synthesized
  source 1..22: mol_type = other DNA
ccccccacctcacaacagtccc

SEQ ID NO: 106511 - DNA, 22 bp, synthetic construct
  misc_feature 1..22: note = chemically synthesized
  source 1..22: mol_type = other DNA
cccccacctcacaacagtcccc

SEQ ID NO: 106512 - DNA, 22 bp, synthetic construct
  misc_feature 1..22: note = chemically synthesized
  source 1..22: mol_type = other DNA
acaacagtccccggagtgtgtt

SEQ ID NO: 106513 - DNA, 22 bp, synthetic construct
  misc_feature 1..22: note = chemically synthesized
  source 1..22: mol_type = other DNA
ttccccttcctgtgtccatgtg

SEQ ID NO: 106514 - DNA, 22 bp, synthetic construct
  misc_feature 1..22: note = chemically synthesized
  source 1..22: mol_type = other DNA
cccttcctgtgtccatgtgttc

SEQ ID NO: 106515 - DNA, 22 bp, synthetic construct
  misc_feature 1..22: note = chemically synthesized
  source 1..22: mol_type = other DNA
cctgtgtccatgtgttctcatt

SEQ ID NO: 106516 - DNA, 22 bp, synthetic construct
  misc_feature 1..22: note = chemically synthesized
  source 1..22: mol_type = other DNA
ctgtgtccatgtgttctcattg

SEQ ID NO: 106517 - DNA, 22 bp, synthetic construct
  misc_feature 1..22: note = chemically synthesized
  source 1..22: mol_type = other DNA
tgtccatgtgttctcattgttc

SEQ ID NO: 106518 - DNA, 22 bp, synthetic construct
  misc_feature 1..22: note = chemically synthesized
  source 1..22: mol_type = other DNA
tcattgttcaattcccacctat

SEQ ID NO: 106519 - DNA, 22 bp, synthetic construct
  misc_feature 1..22: note = chemically synthesized
  source 1..22: mol_type = other DNA
attgttcaattcccacctatga

SEQ ID NO: 106520 - DNA, 22 bp, synthetic construct
  misc_feature 1..22: note = chemically synthesized
  source 1..22: mol_type = other DNA
ttcaattcccacctatgagtga

SEQ ID NO: 106521 - DNA, 22 bp, synthetic construct
  misc_feature 1..22: note = chemically synthesized
  source 1..22: mol_type = other DNA
aattcccacctatgagtgagaa

SEQ ID NO: 106522 - DNA, 22 bp, synthetic construct
  misc_feature 1..22: note = chemically synthesized
  source 1..22: mol_type = other DNA
ccacctatgagtgagaacatgc

SEQ ID NO: 106523 - DNA, 22 bp, synthetic construct
  misc_feature 1..22: note = chemically synthesized
  source 1..22: mol_type = other DNA
tgagtgagaacatgcagtgctt

SEQ ID NO: 106524 - DNA, 22 bp, synthetic construct
  misc_feature 1..22: note = chemically synthesized
  source 1..22: mol_type = other DNA
ggttttttgtccttgcgatagt

SEQ ID NO: 106525 - DNA, 22 bp, synthetic construct
  misc_feature 1..22: note = chemically synthesized
  source 1..22: mol_type = other DNA
gttttttgtccttgcgatagtt

SEQ ID NO: 106526 - DNA, 22 bp, synthetic construct
  misc_feature 1..22: note = chemically synthesized
  source 1..22: mol_type = other DNA
tttgtccttgcgatagtttgct

SEQ ID NO: 106527 - DNA, 22 bp, synthetic construct
  misc_feature 1..22: note = chemically synthesized
  source 1..22: mol_type = other DNA
ttgtccttgcgatagtttgctg

SEQ ID NO: 106528 - DNA, 22 bp, synthetic construct
  misc_feature 1..22: note = chemically synthesized
  source 1..22: mol_type = other DNA
tgtccttgcgatagtttgctga

SEQ ID NO: 106529 - DNA, 22 bp, synthetic construct
  misc_feature 1..22: note = chemically synthesized
  source 1..22: mol_type = other DNA
gtccttgcgatagtttgctgag

SEQ ID NO: 106530 - DNA, 22 bp, synthetic construct
  misc_feature 1..22: note = chemically synthesized
  source 1..22: mol_type = other DNA
tccttgcgatagtttgctgaga

SEQ ID NO: 106531 - DNA, 22 bp, synthetic construct
  misc_feature 1..22: note = chemically synthesized
  source 1..22: mol_type = other DNA
gcgatagtttgctgagaatgat

SEQ ID NO: 106532 - DNA, 22 bp, synthetic construct
  misc_feature 1..22: note = chemically synthesized
  source 1..22: mol_type = other DNA
cgatagtttgctgagaatgatg

SEQ ID NO: 106533 - DNA, 22 bp, synthetic construct
  misc_feature 1..22: note = chemically synthesized
  source 1..22: mol_type = other DNA
gctgagaatgatggtttccagt

SEQ ID NO: 106534 - DNA, 22 bp, synthetic construct
  misc_feature 1..22: note = chemically synthesized
  source 1..22: mol_type = other DNA
ctgagaatgatggtttccagtt

SEQ ID NO: 106535 - DNA, 22 bp, synthetic construct
  misc_feature 1..22: note = chemically synthesized
  source 1..22: mol_type = other DNA
agaatgatggtttccagtttca

SEQ ID NO: 106536 - DNA, 22 bp, synthetic construct
  misc_feature 1..22: note = chemically synthesized
  source 1..22: mol_type = other DNA
ccagtttcatccatgtccctac

SEQ ID NO: 106537 - DNA, 22 bp, synthetic construct
  misc_feature 1..22: note = chemically synthesized
  source 1..22: mol_type = other DNA
cagtttcatccatgtccctaca

SEQ ID NO: 106538 - DNA, 22 bp, synthetic construct
  misc_feature 1..22: note = chemically synthesized
  source 1..22: mol_type = other DNA
catccatgtccctacaaatgac

SEQ ID NO: 106539 - DNA, 22 bp, synthetic construct
  misc_feature 1..22: note = chemically synthesized
  source 1..22: mol_type = other DNA
atccatgtccctacaaatgaca

SEQ ID NO: 106540 - DNA, 22 bp, synthetic construct
  misc_feature 1..22: note = chemically synthesized
  source 1..22: mol_type = other DNA
caaatgacatgaactcttcatt

SEQ ID NO: 106541 - DNA, 22 bp, synthetic construct
  misc_feature 1..22: note = chemically synthesized
  source 1..22: mol_type = other DNA
ttcattttttatggctgcatag

SEQ ID NO: 106542 - DNA, 22 bp, synthetic construct
  misc_feature 1..22: note = chemically synthesized
  source 1..22: mol_type = other DNA
cattttttatggctgcatagta

SEQ ID NO: 106543 - DNA, 22 bp, synthetic construct
  misc_feature 1..22: note = chemically synthesized
  source 1..22: mol_type = other DNA
attttttatggctgcatagtat

SEQ ID NO: 106544 - DNA, 22 bp, synthetic construct
  misc_feature 1..22: note = chemically synthesized
  source 1..22: mol_type = other DNA
tttatggctgcatagtattcca

SEQ ID NO: 106545 - DNA, 22 bp, synthetic construct
  misc_feature 1..22: note = chemically synthesized
  source 1..22: mol_type = other DNA
ttatggctgcatagtattccat

SEQ ID NO: 106546 - DNA, 22 bp, synthetic construct
  misc_feature 1..22: note = chemically synthesized
  source 1..22: mol_type = other DNA
tatggctgcatagtattccatg

SEQ ID NO: 106547 - DNA, 22 bp, synthetic construct
  misc_feature 1..22: note = chemically synthesized
  source 1..22: mol_type = other DNA
atggctgcatagtattccatgg

SEQ ID NO: 106548 - DNA, 22 bp, synthetic construct
  misc_feature 1..22: note = chemically synthesized
  source 1..22: mol_type = other DNA
tggctgcatagtattccatggt

SEQ ID NO: 106549 - DNA, 22 bp, synthetic construct
  misc_feature 1..22: note = chemically synthesized
  source 1..22: mol_type = other DNA
catagtattccatggtgtatat

SEQ ID NO: 106550 - DNA, 22 bp, synthetic construct
  misc_feature 1..22: note = chemically synthesized
  source 1..22: mol_type = other DNA
catggtgtatatgtgccacatt

SEQ ID NO: 106551 - DNA, 22 bp, synthetic construct
  misc_feature 1..22: note = chemically synthesized
  source 1..22: mol_type = other DNA
tcttaattcagtctatcattgt

SEQ ID NO: 106552 - DNA, 22 bp, synthetic construct
  misc_feature 1..22: note = chemically synthesized
  source 1..22: mol_type = other DNA
cttaattcagtctatcattgtt

SEQ ID NO: 106553 - DNA, 22 bp, synthetic construct
  misc_feature 1..22: note = chemically synthesized
  source 1..22: mol_type = other DNA
ttaattcagtctatcattgttg

SEQ ID NO: 106554 - DNA, 22 bp, synthetic construct
  misc_feature 1..22: note = chemically synthesized
  source 1..22: mol_type = other DNA
aattcagtctatcattgttgga

SEQ ID NO: 106555 - DNA, 22 bp, synthetic construct
  misc_feature 1..22: note = chemically synthesized
  source 1..22: mol_type = other DNA
attcagtctatcattgttggac

SEQ ID NO: 106556 - DNA, 22 bp, synthetic construct
  misc_feature 1..22: note = chemically synthesized
  source 1..22: mol_type = other DNA
agtctatcattgttggacattt

SEQ ID NO: 106557 - DNA, 22 bp, synthetic construct
  misc_feature 1..22: note = chemically synthesized
  source 1..22: mol_type = other DNA
tcattgttggacatttgggttg

SEQ ID NO: 106558 - DNA, 22 bp, synthetic construct
  misc_feature 1..22: note = chemically synthesized
  source 1..22: mol_type = other DNA
ttggacatttgggttggttcca

SEQ ID NO: 106559 - DNA, 22 bp, synthetic construct
  misc_feature 1..22: note = chemically synthesized
  source 1..22: mol_type = other DNA
gacatttgggttggttccaagt

SEQ ID NO: 106560 - DNA, 22 bp, synthetic construct
  misc_feature 1..22: note = chemically synthesized
  source 1..22: mol_type = other DNA
gggttggttccaagtctttgct

SEQ ID NO: 106561 - DNA, 22 bp, synthetic construct
  misc_feature 1..22: note = chemically synthesized
  source 1..22: mol_type = other DNA
ggttggttccaagtctttgcta

SEQ ID NO: 106562 - DNA, 22 bp, synthetic construct
  misc_feature 1..22: note = chemically synthesized
  source 1..22: mol_type = other DNA
gttccaagtctttgctattgtg

SEQ ID NO: 106563 - DNA, 22 bp, synthetic construct
  misc_feature 1..22: note = chemically synthesized
  source 1..22: mol_type = other DNA
caagtctttgctattgtgaata

SEQ ID NO: 106564 - DNA, 22 bp, synthetic construct
  misc_feature 1..22: note = chemically synthesized
  source 1..22: mol_type = other DNA
tgctattgtgaatagtgccaca

SEQ ID NO: 106565 - DNA, 22 bp, synthetic construct
  misc_feature 1..22: note = chemically synthesized
  source 1..22: mol_type = other DNA
gctattgtgaatagtgccacag

SEQ ID NO: 106566 - DNA, 22 bp, synthetic construct
  misc_feature 1..22: note = chemically synthesized
  source 1..22: mol_type = other DNA
ctattgtgaatagtgccacagt

SEQ ID NO: 106567 - DNA, 22 bp, synthetic construct
  misc_feature 1..22: note = chemically synthesized
  source 1..22: mol_type = other DNA
ttgtgaatagtgccacagtaaa

SEQ ID NO: 106568 - DNA, 22 bp, synthetic construct
  misc_feature 1..22: note = chemically synthesized
  source 1..22: mol_type = other DNA
tgaatagtgccacagtaaacat

SEQ ID NO: 106569 - DNA, 22 bp, synthetic construct
  misc_feature 1..22: note = chemically synthesized
  source 1..22: mol_type = other DNA
tatagcagcatgatttataatc

SEQ ID NO: 106570 - DNA, 22 bp, synthetic construct
  misc_feature 1..22: note = chemically synthesized
  source 1..22: mol_type = other DNA
atagcagcatgatttataatcc

SEQ ID NO: 106571 - DNA, 22 bp, synthetic construct
  misc_feature 1..22: note = chemically synthesized
  source 1..22: mol_type = other DNA
tagcagcatgatttataatccg

SEQ ID NO: 106572 - DNA, 22 bp, synthetic construct
  misc_feature 1..22: note = chemically synthesized
  source 1..22: mol_type = other DNA
ataatccgttgggtatataccc

SEQ ID NO: 106573 - DNA, 22 bp, synthetic construct
  misc_feature 1..22: note = chemically synthesized
  source 1..22: mol_type = other DNA
taatccgttgggtatataccca

SEQ ID NO: 106574 - DNA, 22 bp, synthetic construct
  misc_feature 1..22: note = chemically synthesized
  source 1..22: mol_type = other DNA
ggtatatacccagtaatgggat

SEQ ID NO: 106575 - DNA, 22 bp, synthetic construct
  misc_feature 1..22: note = chemically synthesized
  source 1..22: mol_type = other DNA
ggtcaaatggtatttctagttc

SEQ ID NO: 106576 - DNA, 22 bp, synthetic construct
  misc_feature 1..22: note = chemically synthesized
  source 1..22: mol_type = other DNA
ctagttctagatccctgaggaa

SEQ ID NO: 106577 - DNA, 22 bp, synthetic construct
  misc_feature 1..22: note = chemically synthesized
  source 1..22: mol_type = other DNA
tagttctagatccctgaggaat

SEQ ID NO: 106578 - DNA, 22 bp, synthetic construct
  misc_feature 1..22: note = chemically synthesized
  source 1..22: mol_type = other DNA
gttctagatccctgaggaatcg

SEQ ID NO: 106579 - DNA, 22 bp, synthetic construct
  misc_feature 1..22: note = chemically synthesized
  source 1..22: mol_type = other DNA
tagatccctgaggaatcgccac

SEQ ID NO: 106580 - DNA, 22 bp, synthetic construct
  misc_feature 1..22: note = chemically synthesized
  source 1..22: mol_type = other DNA
gatccctgaggaatcgccacac

SEQ ID NO: 106581 - DNA, 22 bp, synthetic construct
  misc_feature 1..22: note = chemically synthesized
  source 1..22: mol_type = other DNA
aggaatcgccacactgacttcc

SEQ ID NO: 106582 - DNA, 22 bp, synthetic construct
  misc_feature 1..22: note = chemically synthesized
  source 1..22: mol_type = other DNA
acttccacaatggttgaactag

SEQ ID NO: 106583 - DNA, 22 bp, synthetic construct
  misc_feature 1..22: note = chemically synthesized
  source 1..22: mol_type = other DNA
ccacaatggttgaactagttta

SEQ ID NO: 106584 - DNA, 22 bp, synthetic construct
  misc_feature 1..22: note = chemically synthesized
  source 1..22: mol_type = other DNA
cacaatggttgaactagtttac

SEQ ID NO: 106585 - DNA, 22 bp, synthetic construct
  misc_feature 1..22: note = chemically synthesized
  source 1..22: mol_type = other DNA
aactagtttacagtcccaccaa

SEQ ID NO: 106586 - DNA, 22 bp, synthetic construct
  misc_feature 1..22: note = chemically synthesized
  source 1..22: mol_type = other DNA
gtttacagtcccaccaagagtg

SEQ ID NO: 106587 - DNA, 22 bp, synthetic construct
  misc_feature 1..22: note = chemically synthesized
  source 1..22: mol_type = other DNA
acagtcccaccaagagtgtaaa

SEQ ID NO: 106588 - DNA, 22 bp, synthetic construct
  misc_feature 1..22: note = chemically synthesized
  source 1..22: mol_type = other DNA
cagtcccaccaagagtgtaaaa

SEQ ID NO: 106589 - DNA, 22 bp, synthetic construct
  misc_feature 1..22: note = chemically synthesized
  source 1..22: mol_type = other DNA
ctatttctccacatcctctcca

SEQ ID NO: 106590 - DNA, 22 bp, synthetic construct
  misc_feature 1..22: note = chemically synthesized
  source 1..22: mol_type = other DNA
tttctccacatcctctccagca

SEQ ID NO: 106591 - DNA, 22 bp, synthetic construct
  misc_feature 1..22: note = chemically synthesized
  source 1..22: mol_type = other DNA
ctccacatcctctccagcacct

SEQ ID NO: 106592 - DNA, 22 bp, synthetic construct
  misc_feature 1..22: note = chemically synthesized
  source 1..22: mol_type = other DNA
tccacatcctctccagcacctg

SEQ ID NO: 106593 - DNA, 22 bp, synthetic construct
  misc_feature 1..22: note = chemically synthesized
  source 1..22: mol_type = other DNA
cacatcctctccagcacctgtt

SEQ ID NO: 106594 - DNA, 22 bp, synthetic construct
  misc_feature 1..22: note = chemically synthesized
  source 1..22: mol_type = other DNA
tccagcacctgttgttccctga

SEQ ID NO: 106595 - DNA, 22 bp, synthetic construct
  misc_feature 1..22: note = chemically synthesized
  source 1..22: mol_type = other DNA
cagcacctgttgttccctgact

SEQ ID NO: 106596 - DNA, 22 bp, synthetic construct
  misc_feature 1..22: note = chemically synthesized
  source 1..22: mol_type = other DNA
ttgttccctgactttttaatga

SEQ ID NO: 106597 - DNA, 22 bp, synthetic construct
  misc_feature 1..22: note = chemically synthesized
  source 1..22: mol_type = other DNA
ttccctgactttttaatgattg

SEQ ID NO: 106598 - DNA, 22 bp, synthetic construct
  misc_feature 1..22: note = chemically synthesized
  source 1..22: mol_type = other DNA
cctgactttttaatgattgcca

SEQ ID NO: 106599 - DNA, 22 bp, synthetic construct
  misc_feature 1..22: note = chemically synthesized
  source 1..22: mol_type = other DNA
actttttaatgattgccattct

SEQ ID NO: 106600 - DNA, 22 bp, synthetic construct
  misc_feature 1..22: note = chemically synthesized
  source 1..22: mol_type = other DNA
tttaatgattgccattctaact

SEQ ID NO: 106601 - DNA, 22 bp, synthetic construct
  misc_feature 1..22: note = chemically synthesized
  source 1..22: mol_type = other DNA
ttaatgattgccattctaactg

SEQ ID NO: 106602 - DNA, 22 bp, synthetic construct
  misc_feature 1..22: note = chemically synthesized
  source 1..22: mol_type = other DNA
taatgattgccattctaactgg

SEQ ID NO: 106603 - DNA, 22 bp, synthetic construct
  misc_feature 1..22: note = chemically synthesized
  source 1..22: mol_type = other DNA
aatgattgccattctaactggt

SEQ ID NO: 106604 - DNA, 22 bp, synthetic construct
  misc_feature 1..22: note = chemically synthesized
  source 1..22: mol_type = other DNA
atgattgccattctaactggtg

SEQ ID NO: 106605 - DNA, 22 bp, synthetic construct
  misc_feature 1..22: note = chemically synthesized
  source 1..22: mol_type = other DNA
ccattctaactggtgtgagatg

SEQ ID NO: 106606 - DNA, 22 bp, synthetic construct
  misc_feature 1..22: note = chemically synthesized
  source 1..22: mol_type = other DNA
taactggtgtgagatggtatct

SEQ ID NO: 106607 - DNA, 22 bp, synthetic construct
  misc_feature 1..22: note = chemically synthesized
  source 1..22: mol_type = other DNA
actggtgtgagatggtatctct

SEQ ID NO: 106608 - DNA, 22 bp, synthetic construct
  misc_feature 1..22: note = chemically synthesized
  source 1..22: mol_type = other DNA
gtgtgagatggtatctctttgt

SEQ ID NO: 106609 - DNA, 22 bp, synthetic construct
  misc_feature 1..22: note = chemically synthesized
  source 1..22: mol_type = other DNA
tttgtggttttgatttgcattg

SEQ ID NO: 106610 - DNA, 22 bp, synthetic construct
  misc_feature 1..22: note = chemically synthesized
  source 1..22: mol_type = other DNA
tgtggttttgatttgcattgtg

SEQ ID NO: 106611 - DNA, 22 bp, synthetic construct
  misc_feature 1..22: note = chemically synthesized
  source 1..22: mol_type = other DNA
gtggttttgatttgcattgtga

SEQ ID NO: 106612 - DNA, 22 bp, synthetic construct
  misc_feature 1..22: note = chemically synthesized
  source 1..22: mol_type = other DNA
tggttttgatttgcattgtgac

SEQ ID NO: 106613 - DNA, 22 bp, synthetic construct
  misc_feature 1..22: note = chemically synthesized
  source 1..22: mol_type = other DNA
tgatttgcattgtgacgtgtta

SEQ ID NO: 106614 - DNA, 22 bp, synthetic construct
  misc_feature 1..22: note = chemically synthesized
  source 1..22: mol_type = other DNA
gatttgcattgtgacgtgttag

SEQ ID NO: 106615 - DNA, 22 bp, synthetic construct
  misc_feature 1..22: note = chemically synthesized
  source 1..22: mol_type = other DNA
atttgcattgtgacgtgttagt

SEQ ID NO: 106616 - DNA, 22 bp, synthetic construct
  misc_feature 1..22: note = chemically synthesized
  source 1..22: mol_type = other DNA
gcattgtgacgtgttagtttta

SEQ ID NO: 106617 - DNA, 22 bp, synthetic construct
  misc_feature 1..22: note = chemically synthesized
  source 1..22: mol_type = other DNA
cattgtgacgtgttagttttaa

SEQ ID NO: 106618 - DNA, 22 bp, synthetic construct
  misc_feature 1..22: note = chemically synthesized
  source 1..22: mol_type = other DNA
tgacgtgttagttttaaagtat

SEQ ID NO: 106619 - DNA, 22 bp, synthetic construct
  misc_feature 1..22: note = chemically synthesized
  source 1..22: mol_type = other DNA
gttttaaagtatgtgtgaaata

SEQ ID NO: 106620 - DNA, 22 bp, synthetic construct
  misc_feature 1..22: note = chemically synthesized
  source 1..22: mol_type = other DNA
taaagtatgtgtgaaataattt

SEQ ID NO: 106621 - DNA, 22 bp, synthetic construct
  misc_feature 1..22: note = chemically synthesized
  source 1..22: mol_type = other DNA
aaagtatgtgtgaaataatttt

SEQ ID NO: 106622 - DNA, 22 bp, synthetic construct
  misc_feature 1..22: note = chemically synthesized
  source 1..22: mol_type = other DNA
aagtatgtgtgaaataattttt

SEQ ID NO: 106623 - DNA, 22 bp, synthetic construct
  misc_feature 1..22: note = chemically synthesized
  source 1..22: mol_type = other DNA
ttattcttaacatttttttgat

SEQ ID NO: 106624 - DNA, 22 bp, synthetic construct
  misc_feature 1..22: note = chemically synthesized
  source 1..22: mol_type = other DNA
tattcttaacatttttttgatg

SEQ ID NO: 106625 - DNA, 22 bp, synthetic construct
  misc_feature 1..22: note = chemically synthesized
  source 1..22: mol_type = other DNA
attcttaacatttttttgatga

SEQ ID NO: 106626 - DNA, 22 bp, synthetic construct
  misc_feature 1..22: note = chemically synthesized
  source 1..22: mol_type = other DNA
ttcttaacatttttttgatgaa

SEQ ID NO: 106627 - DNA, 22 bp, synthetic construct
  misc_feature 1..22: note = chemically synthesized
  source 1..22: mol_type = other DNA
ttaacatttttttgatgaagca

SEQ ID NO: 106628 - DNA, 22 bp, synthetic construct
  misc_feature 1..22: note = chemically synthesized
  source 1..22: mol_type = other DNA
aacatttttttgatgaagcaca

SEQ ID NO: 106629 - DNA, 22 bp, synthetic construct
  misc_feature 1..22: note = chemically synthesized
  source 1..22: mol_type = other DNA
acatttttttgatgaagcacag

SEQ ID NO: 106630 - DNA, 22 bp, synthetic construct
  misc_feature 1..22: note = chemically synthesized
  source 1..22: mol_type = other DNA
ttttgatgaagcacagtgtctg

SEQ ID NO: 106631 - DNA, 22 bp, synthetic construct
  misc_feature 1..22: note = chemically synthesized
  source 1..22: mol_type = other DNA
tttgatgaagcacagtgtctga

SEQ ID NO: 106632 - DNA, 22 bp, synthetic construct
  misc_feature 1..22: note = chemically synthesized
  source 1..22: mol_type = other DNA
ttgatgaagcacagtgtctgaa

SEQ ID NO: 106633 - DNA, 22 bp, synthetic construct
  misc_feature 1..22: note = chemically synthesized
  source 1..22: mol_type = other DNA
tgatgaagcacagtgtctgaaa

SEQ ID NO: 106634 - DNA, 22 bp, synthetic construct
  misc_feature 1..22: note = chemically synthesized
  source 1..22: mol_type = other DNA
gatgaagcacagtgtctgaaag

SEQ ID NO: 106635 - DNA, 22 bp, synthetic construct
  misc_feature 1..22: note = chemically synthesized
  source 1..22: mol_type = other DNA
atgaagcacagtgtctgaaagg

SEQ ID NO: 106636 - DNA, 22 bp, synthetic construct
  misc_feature 1..22: note = chemically synthesized
  source 1..22: mol_type = other DNA
aaagggtggtagcccaatcaag

SEQ ID NO: 106637 - DNA, 22 bp, synthetic construct
  misc_feature 1..22: note = chemically synthesized
  source 1..22: mol_type = other DNA
aaaaccagaacacagctaatgt

SEQ ID NO: 106638 - DNA, 22 bp, synthetic construct
  misc_feature 1..22: note = chemically synthesized
  source 1..22: mol_type = other DNA
atgtgagaaatacaagtattta

SEQ ID NO: 106639 - DNA, 22 bp, synthetic construct
  misc_feature 1..22: note = chemically synthesized
  source 1..22: mol_type = other DNA
agggccttagtctgctccttgt

SEQ ID NO: 106640 - DNA, 22 bp, synthetic construct
  misc_feature 1..22: note = chemically synthesized
  source 1..22: mol_type = other DNA
gggccttagtctgctccttgtc

SEQ ID NO: 106641 - DNA, 22 bp, synthetic construct
  misc_feature 1..22: note = chemically synthesized
  source 1..22: mol_type = other DNA
agtctgctccttgtctgaggca

SEQ ID NO: 106642 - DNA, 22 bp, synthetic construct
  misc_feature 1..22: note = chemically synthesized
  source 1..22: mol_type = other DNA
gtctgctccttgtctgaggcaa

SEQ ID NO: 106643 - DNA, 22 bp, synthetic construct
  misc_feature 1..22: note = chemically synthesized
  source 1..22: mol_type = other DNA
ctccttgtctgaggcaattccc

SEQ ID NO: 106644 - DNA, 22 bp, synthetic construct
  misc_feature 1..22: note = chemically synthesized
  source 1..22: mol_type = other DNA
cttgtctgaggcaattcccatg

SEQ ID NO: 106645 - DNA, 22 bp, synthetic construct
  misc_feature 1..22: note = chemically synthesized
  source 1..22: mol_type = other DNA
gtctgaggcaattcccatgacc

SEQ ID NO: 106646 - DNA, 22 bp, synthetic construct
  misc_feature 1..22: note = chemically synthesized
  source 1..22: mol_type = other DNA
tctgaggcaattcccatgacct

SEQ ID NO: 106647 - DNA, 22 bp, synthetic construct
  misc_feature 1..22: note = chemically synthesized
  source 1..22: mol_type = other DNA
aggcaattcccatgaccttctt

SEQ ID NO: 106648 - DNA, 22 bp, synthetic construct
  misc_feature 1..22: note = chemically synthesized
  source 1..22: mol_type = other DNA
ccatgaccttcttaaggatcag

SEQ ID NO: 106649 - DNA, 22 bp, synthetic construct
  misc_feature 1..22: note = chemically synthesized
  source 1..22: mol_type = other DNA
cttaaggatcagaatgtaagag

SEQ ID NO: 106650 - DNA, 22 bp, synthetic construct
  misc_feature 1..22: note = chemically synthesized
  source 1..22: mol_type = other DNA
ttaaggatcagaatgtaagaga

SEQ ID NO: 106651 - DNA, 22 bp, synthetic construct
  misc_feature 1..22: note = chemically synthesized
  source 1..22: mol_type = other DNA
aaggatcagaatgtaagagata

SEQ ID NO: 106652 - DNA, 22 bp, synthetic construct
  misc_feature 1..22: note = chemically synthesized
  source 1..22: mol_type = other DNA
aggatcagaatgtaagagataa

SEQ ID NO: 106653 - DNA, 22 bp, synthetic construct
  misc_feature 1..22: note = chemically synthesized
  source 1..22: mol_type = other DNA
atgagaccaggactataggata

SEQ ID NO: 106654 - DNA, 22 bp, synthetic construct
  misc_feature 1..22: note = chemically synthesized
  source 1..22: mol_type = other DNA
taggataaagtctattaaaggt

SEQ ID NO: 106655 - DNA, 22 bp, synthetic construct
  misc_feature 1..22: note = chemically synthesized
  source 1..22: mol_type = other DNA
ttaaaggtgatgtctgcacagg

SEQ ID NO: 106656 - DNA, 22 bp, synthetic construct
  misc_feature 1..22: note = chemically synthesized
  source 1..22: mol_type = other DNA
aaggtgatgtctgcacaggcca

SEQ ID NO: 106657 - DNA, 22 bp, synthetic construct
  misc_feature 1..22: note = chemically synthesized
  source 1..22: mol_type = other DNA
cacaggccagtttgatcacatc

SEQ ID NO: 106658 - DNA, 22 bp, synthetic construct
  misc_feature 1..22: note = chemically synthesized
  source 1..22: mol_type = other DNA
gatcacatctggtgcaggcaga

SEQ ID NO: 106659 - DNA, 22 bp, synthetic construct
  misc_feature 1..22: note = chemically synthesized
  source 1..22: mol_type = other DNA
atcacatctggtgcaggcagaa

SEQ ID NO: 106660 - DNA, 22 bp, synthetic construct
  misc_feature 1..22: note = chemically synthesized
  source 1..22: mol_type = other DNA
gtgcaggcagaaagcatgggag

SEQ ID NO: 106661 - DNA, 22 bp, synthetic construct
  misc_feature 1..22: note = chemically synthesized
  source 1..22: mol_type = other DNA
acagtaggggaatccagagagg

SEQ ID NO: 106662 - DNA, 22 bp, synthetic construct
  misc_feature 1..22: note = chemically synthesized
  source 1..22: mol_type = other DNA
tgggcacaattagcataacaaa

SEQ ID NO: 106663 - DNA, 22 bp, synthetic construct
  misc_feature 1..22: note = chemically synthesized
  source 1..22: mol_type = other DNA
gcataacaaatcccctcatttg

SEQ ID NO: 106664 - DNA, 22 bp, synthetic construct
  misc_feature 1..22: note = chemically synthesized
  source 1..22: mol_type = other DNA
atttgaacccccagatctatct

SEQ ID NO: 106665 - DNA, 22 bp, synthetic construct
  misc_feature 1..22: note = chemically synthesized
  source 1..22: mol_type = other DNA
gaacccccagatctatcttcac

SEQ ID NO: 106666 - DNA, 22 bp, synthetic construct
  misc_feature 1..22: note = chemically synthesized
  source 1..22: mol_type = other DNA
aacccccagatctatcttcacc

SEQ ID NO: 106667 - DNA, 22 bp, synthetic construct
  misc_feature 1..22: note = chemically synthesized
  source 1..22: mol_type = other DNA
tcttcaccaccttagcattggt

SEQ ID NO: 106668 - DNA, 22 bp, synthetic construct
  misc_feature 1..22: note = chemically synthesized
  source 1..22: mol_type = other DNA
caccaccttagcattggtgaga

SEQ ID NO: 106669 - DNA, 22 bp, synthetic construct
  misc_feature 1..22: note = chemically synthesized
  source 1..22: mol_type = other DNA
accaccttagcattggtgagaa

SEQ ID NO: 106670 - DNA, 22 bp, synthetic construct
  misc_feature 1..22: note = chemically synthesized
  source 1..22: mol_type = other DNA
agcattggtgagaatggaggtg

SEQ ID NO: 106671 - DNA, 22 bp, synthetic construct
  misc_feature 1..22: note = chemically synthesized
  source 1..22: mol_type = other DNA
gcattggtgagaatggaggtgt

SEQ ID NO: 106672 - DNA, 22 bp, synthetic construct
  misc_feature 1..22: note = chemically synthesized
  source 1..22: mol_type = other DNA
gtgagaatggaggtgtatctca

SEQ ID NO: 106673 - DNA, 22 bp, synthetic construct
  misc_feature 1..22: note = chemically synthesized
  source 1..22: mol_type = other DNA
aggggattatggatgccaataa

SEQ ID NO: 106674 - DNA, 22 bp, synthetic construct
  misc_feature 1..22: note = chemically synthesized
  source 1..22: mol_type = other DNA
tggatgccaataaaacagtcat

SEQ ID NO: 106675 - DNA, 22 bp, synthetic construct
  misc_feature 1..22: note = chemically synthesized
  source 1..22: mol_type = other DNA
tggactccacgatagagaggga

SEQ ID NO: 106676 - DNA, 22 bp, synthetic construct
  misc_feature 1..22: note = chemically synthesized
  source 1..22: mol_type = other DNA
gactccacgatagagagggagt

SEQ ID NO: 106677 - DNA, 22 bp, synthetic construct
  misc_feature 1..22: note = chemically synthesized
  source 1..22: mol_type = other DNA
cacgatagagagggagtggatt

SEQ ID NO: 106678 - DNA, 22 bp, synthetic construct
  misc_feature 1..22: note = chemically synthesized
  source 1..22: mol_type = other DNA
gataggcctggaggaagcaggc

SEQ ID NO: 106679 - DNA, 22 bp, synthetic construct
  misc_feature 1..22: note = chemically synthesized
  source 1..22: mol_type = other DNA
gaggaagcaggctccatggctc

SEQ ID NO: 106680 - DNA, 22 bp, synthetic construct
  misc_feature 1..22: note = chemically synthesized
  source 1..22: mol_type = other DNA
catggctcattttcctgtgatc

SEQ ID NO: 106681 - DNA, 22 bp, synthetic construct
  misc_feature 1..22: note = chemically synthesized
  source 1..22: mol_type = other DNA
attttcctgtgatctagccaga

SEQ ID NO: 106682 - DNA, 22 bp, synthetic construct
  misc_feature 1..22: note = chemically synthesized
  source 1..22: mol_type = other DNA
tcctgtgatctagccagagaac

SEQ ID NO: 106683 - DNA, 22 bp, synthetic construct
  misc_feature 1..22: note = chemically synthesized
  source 1..22: mol_type = other DNA
cctgtgatctagccagagaaca

SEQ ID NO: 106684 - DNA, 22 bp, synthetic construct
  misc_feature 1..22: note = chemically synthesized
  source 1..22: mol_type = other DNA
ctgtgatctagccagagaacac

SEQ ID NO: 106685 - DNA, 22 bp, synthetic construct
  misc_feature 1..22: note = chemically synthesized
  source 1..22: mol_type = other DNA
tgatctagccagagaacaccaa

SEQ ID NO: 106686 - DNA, 22 bp, synthetic construct
  misc_feature 1..22: note = chemically synthesized
  source 1..22: mol_type = other DNA
gccagagaacaccaaggacagt

SEQ ID NO: 106687 - DNA, 22 bp, synthetic construct
  misc_feature 1..22: note = chemically synthesized
  source 1..22: mol_type = other DNA
ttgtcaaagttacaccaaggtc

SEQ ID NO: 106688 - DNA, 22 bp, synthetic construct
  misc_feature 1..22: note = chemically synthesized
  source 1..22: mol_type = other DNA
tcaaagttacaccaaggtctat

SEQ ID NO: 106689 - DNA, 22 bp, synthetic construct
  misc_feature 1..22: note = chemically synthesized
  source 1..22: mol_type = other DNA
caccaaggtctatggctgccag

SEQ ID NO: 106690 - DNA, 22 bp, synthetic construct
  misc_feature 1..22: note = chemically synthesized
  source 1..22: mol_type = other DNA
tggctgccagtatagtcagaga

SEQ ID NO: 106691 - DNA, 22 bp, synthetic construct
  misc_feature 1..22: note = chemically synthesized
  source 1..22: mol_type = other DNA
ccagtatagtcagagagtagta

SEQ ID NO: 106692 - DNA, 22 bp, synthetic construct
  misc_feature 1..22: note = chemically synthesized
  source 1..22: mol_type = other DNA
atgaagagtgcagtcttctctg

SEQ ID NO: 106693 - DNA, 22 bp, synthetic construct
  misc_feature 1..22: note = chemically synthesized
  source 1..22: mol_type = other DNA
ctctgataaagaggaggaggct

SEQ ID NO: 106694 - DNA, 22 bp, synthetic construct
  misc_feature 1..22: note = chemically synthesized
  source 1..22: mol_type = other DNA
tctgataaagaggaggaggctg

SEQ ID NO: 106695 - DNA, 22 bp, synthetic construct
  misc_feature 1..22: note = chemically synthesized
  source 1..22: mol_type = other DNA
tgataaagaggaggaggctgcc

SEQ ID NO: 106696 - DNA, 22 bp, synthetic construct
  misc_feature 1..22: note = chemically synthesized
  source 1..22: mol_type = other DNA
ataaagaggaggaggctgccat

SEQ ID NO: 106697 - DNA, 22 bp, synthetic construct
  misc_feature 1..22: note = chemically synthesized
  source 1..22: mol_type = other DNA
ccattgccaaggactgtagaga

SEQ ID NO: 106698 - DNA, 22 bp, synthetic construct
  misc_feature 1..22: note = chemically synthesized
  source 1..22: mol_type = other DNA
ccaaggactgtagagacataga

SEQ ID NO: 106699 - DNA, 22 bp, synthetic construct
  misc_feature 1..22: note = chemically synthesized
  source 1..22: mol_type = other DNA
tagagacatagatgataaagaa

SEQ ID NO: 106700 - DNA, 22 bp, synthetic construct
  misc_feature 1..22: note = chemically synthesized
  source 1..22: mol_type = other DNA
caaggatgaaatctctccagac

SEQ ID NO: 106701 - DNA, 22 bp, synthetic construct
  misc_feature 1..22: note = chemically synthesized
  source 1..22: mol_type = other DNA
tccagacctggaaagccagtga

SEQ ID NO: 106702 - DNA, 22 bp, synthetic construct
  misc_feature 1..22: note = chemically synthesized
  source 1..22: mol_type = other DNA
cagacctggaaagccagtgagg

SEQ ID NO: 106703 - DNA, 22 bp, synthetic construct
  misc_feature 1..22: note = chemically synthesized
  source 1..22: mol_type = other DNA
gaaagccagtgaggagaaaagg

SEQ ID NO: 106704 - DNA, 22 bp, synthetic construct
  misc_feature 1..22: note = chemically synthesized
  source 1..22: mol_type = other DNA
aggagaaacaaacaaacaaaac

SEQ ID NO: 106705 - DNA, 22 bp, synthetic construct
  misc_feature 1..22: note = chemically synthesized
  source 1..22: mol_type = other DNA
tctagaccagcactatgtggtg

SEQ ID NO: 106706 - DNA, 22 bp, synthetic construct
  misc_feature 1..22: note = chemically synthesized
  source 1..22: mol_type = other DNA
tagaccagcactatgtggtgga

SEQ ID NO: 106707 - DNA, 22 bp, synthetic construct
  misc_feature 1..22: note = chemically synthesized
  source 1..22: mol_type = other DNA
gaccagcactatgtggtggaaa

SEQ ID NO: 106708 - DNA, 22 bp, synthetic construct
  misc_feature 1..22: note = chemically synthesized
  source 1..22: mol_type = other DNA
tgtggtggaaatataattagag

SEQ ID NO: 106709 - DNA, 22 bp, synthetic construct
  misc_feature 1..22: note = chemically synthesized
  source 1..22: mol_type = other DNA
gagctaaatatgtgatgttaaa

SEQ ID NO: 106710 - DNA, 22 bp, synthetic construct
  misc_feature 1..22: note = chemically synthesized
  source 1..22: mol_type = other DNA
aatatgtgatgttaaatgttct

SEQ ID NO: 106711 - DNA, 22 bp, synthetic construct
  misc_feature 1..22: note = chemically synthesized
  source 1..22: mol_type = other DNA
aatgttctggtagtcacattaa

SEQ ID NO: 106712 - DNA, 22 bp, synthetic construct
  misc_feature 1..22: note = chemically synthesized
  source 1..22: mol_type = other DNA
tggtagtcacattaaaaggagt

SEQ ID NO: 106713 - DNA, 22 bp, synthetic construct
  misc_feature 1..22: note = chemically synthesized
  source 1..22: mol_type = other DNA
gtagtcacattaaaaggagtaa

SEQ ID NO: 106714 - DNA, 22 bp, synthetic construct
  misc_feature 1..22: note = chemically synthesized
  source 1..22: mol_type = other DNA
aaaggagtaaaaagaaaagtgg

SEQ ID NO: 106715 - DNA, 22 bp, synthetic construct
  misc_feature 1..22: note = chemically synthesized
  source 1..22: mol_type = other DNA
atattagtatgtcttatttaag

SEQ ID NO: 106716 - DNA, 22 bp, synthetic construct
  misc_feature 1..22: note = chemically synthesized
  source 1..22: mol_type = other DNA
gtatgtcttatttaagctacta

SEQ ID NO: 106717 - DNA, 22 bp, synthetic construct
  misc_feature 1..22: note = chemically synthesized
  source 1..22: mol_type = other DNA
atttaagctactatatcaaaaa

SEQ ID NO: 106718 - DNA, 22 bp, synthetic construct
  misc_feature 1..22: note = chemically synthesized
  source 1..22: mol_type = other DNA
tttaagctactatatcaaaaat

SEQ ID NO: 106719 - DNA, 22 bp, synthetic construct
  misc_feature 1..22: note = chemically synthesized
  source 1..22: mol_type = other DNA
aagctactatatcaaaaatatt

SEQ ID NO: 106720 - DNA, 22 bp, synthetic construct
  misc_feature 1..22: note = chemically synthesized
  source 1..22: mol_type = other DNA
agctactatatcaaaaatatta

SEQ ID NO: 106721 - DNA, 22 bp, synthetic construct
  misc_feature 1..22: note = chemically synthesized
  source 1..22: mol_type = other DNA
ctatatcaaaaatattatcatt

SEQ ID NO: 106722 - DNA, 22 bp, synthetic construct
  misc_feature 1..22: note = chemically synthesized
  source 1..22: mol_type = other DNA
tatcaaaaatattatcatttta

SEQ ID NO: 106723 - DNA, 22 bp, synthetic construct
  misc_feature 1..22: note = chemically synthesized
  source 1..22: mol_type = other DNA
tcattttaatagataatcagca

SEQ ID NO: 106724 - DNA, 22 bp, synthetic construct
  misc_feature 1..22: note = chemically synthesized
  source 1..22: mol_type = other DNA
taatagataatcagcataaaaa

SEQ ID NO: 106725 - DNA, 22 bp, synthetic construct
  misc_feature 1..22: note = chemically synthesized
  source 1..22: mol_type = other DNA
aatagataatcagcataaaaat

SEQ ID NO: 106726 - DNA, 22 bp, synthetic construct
  misc_feature 1..22: note = chemically synthesized
  source 1..22: mol_type = other DNA
atagataatcagcataaaaatc

SEQ ID NO: 106727 - DNA, 22 bp, synthetic construct
  misc_feature 1..22: note = chemically synthesized
  source 1..22: mol_type = other DNA
ccacgatttttttttggtacaa

SEQ ID NO: 106728 - DNA, 22 bp, synthetic construct
  misc_feature 1..22: note = chemically synthesized
  source 1..22: mol_type = other DNA
ttttttggtacaaattcttcaa

SEQ ID NO: 106729 - DNA, 22 bp, synthetic construct
  misc_feature 1..22: note = chemically synthesized
  source 1..22: mol_type = other DNA
tttttggtacaaattcttcaaa

SEQ ID NO: 106730 - DNA, 22 bp, synthetic construct
  misc_feature 1..22: note = chemically synthesized
  source 1..22: mol_type = other DNA
ttttggtacaaattcttcaaaa

SEQ ID NO: 106731 - DNA, 22 bp, synthetic construct
  misc_feature 1..22: note = chemically synthesized
  source 1..22: mol_type = other DNA
tttggtacaaattcttcaaaat

SEQ ID NO: 106732 - DNA, 22 bp, synthetic construct
  misc_feature 1..22: note = chemically synthesized
  source 1..22: mol_type = other DNA
ttggtacaaattcttcaaaatc

SEQ ID NO: 106733 - DNA, 22 bp, synthetic construct
  misc_feature 1..22: note = chemically synthesized
  source 1..22: mol_type = other DNA
tggtacaaattcttcaaaatcg

SEQ ID NO: 106734 - DNA, 22 bp, synthetic construct
  misc_feature 1..22: note = chemically synthesized
  source 1..22: mol_type = other DNA
ggtacaaattcttcaaaatcga

SEQ ID NO: 106735 - DNA, 22 bp, synthetic construct
  misc_feature 1..22: note = chemically synthesized
  source 1..22: mol_type = other DNA
gtacaaattcttcaaaatcgag

SEQ ID NO: 106736 - DNA, 22 bp, synthetic construct
  misc_feature 1..22: note = chemically synthesized
  source 1..22: mol_type = other DNA
ttcaaaatcgagtgtttacact

SEQ ID NO: 106737 - DNA, 22 bp, synthetic construct
  misc_feature 1..22: note = chemically synthesized
  source 1..22: mol_type = other DNA
caaaatcgagtgtttacactta

SEQ ID NO: 106738 - DNA, 22 bp, synthetic construct
  misc_feature 1..22: note = chemically synthesized
  source 1..22: mol_type = other DNA
aaaatcgagtgtttacacttac

SEQ ID NO: 106739 - DNA, 22 bp, synthetic construct
  misc_feature 1..22: note = chemically synthesized
  source 1..22: mol_type = other DNA
acacttacagaaaattctgact

SEQ ID NO: 106740 - DNA, 22 bp, synthetic construct
  misc_feature 1..22: note = chemically synthesized
  source 1..22: mol_type = other DNA
cacttacagaaaattctgactc

SEQ ID NO: 106741 - DNA, 22 bp, synthetic construct
  misc_feature 1..22: note = chemically synthesized
  source 1..22: mol_type = other DNA
acagaaaattctgactcaagct

SEQ ID NO: 106742 - DNA, 22 bp, synthetic construct
  misc_feature 1..22: note = chemically synthesized
  source 1..22: mol_type = other DNA
cagaaaattctgactcaagcta

SEQ ID NO: 106743 - DNA, 22 bp, synthetic construct
  misc_feature 1..22: note = chemically synthesized
  source 1..22: mol_type = other DNA
tgactcaagctaaccagatgct

SEQ ID NO: 106744 - DNA, 22 bp, synthetic construct
  misc_feature 1..22: note = chemically synthesized
  source 1..22: mol_type = other DNA
actcaagctaaccagatgctac

SEQ ID NO: 106745 - DNA, 22 bp, synthetic construct
  misc_feature 1..22: note = chemically synthesized
  source 1..22: mol_type = other DNA
aagctaaccagatgctactgtt

SEQ ID NO: 106746 - DNA, 22 bp, synthetic construct
  misc_feature 1..22: note = chemically synthesized
  source 1..22: mol_type = other DNA
accagatgctactgttttggac

SEQ ID NO: 106747 - DNA, 22 bp, synthetic construct
  misc_feature 1..22: note = chemically synthesized
  source 1..22: mol_type = other DNA
ctgttttggacagcacagctct

SEQ ID NO: 106748 - DNA, 22 bp, synthetic construct
  misc_feature 1..22: note = chemically synthesized
  source 1..22: mol_type = other DNA
ttttggacagcacagctctaga

SEQ ID NO: 106749 - DNA, 22 bp, synthetic construct
  misc_feature 1..22: note = chemically synthesized
  source 1..22: mol_type = other DNA
tggacagcacagctctagacta

SEQ ID NO: 106750 - DNA, 22 bp, synthetic construct
  misc_feature 1..22: note = chemically synthesized
  source 1..22: mol_type = other DNA
ggacagcacagctctagactat

SEQ ID NO: 106751 - DNA, 22 bp, synthetic construct
  misc_feature 1..22: note = chemically synthesized
  source 1..22: mol_type = other DNA
gacagcacagctctagactata

SEQ ID NO: 106752 - DNA, 22 bp, synthetic construct
  misc_feature 1..22: note = chemically synthesized
  source 1..22: mol_type = other DNA
tagactatacgacttcatcctc

SEQ ID NO: 106753 - DNA, 22 bp, synthetic construct
  misc_feature 1..22: note = chemically synthesized
  source 1..22: mol_type = other DNA
gactatacgacttcatcctcag

SEQ ID NO: 106754 - DNA, 22 bp, synthetic construct
  misc_feature 1..22: note = chemically synthesized
  source 1..22: mol_type = other DNA
tacgacttcatcctcagtttcg

SEQ ID NO: 106755 - DNA, 22 bp, synthetic construct
  misc_feature 1..22: note = chemically synthesized
  source 1..22: mol_type = other DNA
catcctcagtttcgactccagc

SEQ ID NO: 106756 - DNA, 22 bp, synthetic construct
  misc_feature 1..22: note = chemically synthesized
  source 1..22: mol_type = other DNA
atcctcagtttcgactccagct

SEQ ID NO: 106757 - DNA, 22 bp, synthetic construct
  misc_feature 1..22: note = chemically synthesized
  source 1..22: mol_type = other DNA
agtttcgactccagctgctttc

SEQ ID NO: 106758 - DNA, 22 bp, synthetic construct
  misc_feature 1..22: note = chemically synthesized
  source 1..22: mol_type = other DNA
cgactccagctgctttctacca

SEQ ID NO: 106759 - DNA, 22 bp, synthetic construct
  misc_feature 1..22: note = chemically synthesized
  source 1..22: mol_type = other DNA
gactccagctgctttctaccac

SEQ ID NO: 106760 - DNA, 22 bp, synthetic construct
  misc_feature 1..22: note = chemically synthesized
  source 1..22: mol_type = other DNA
cagctgctttctaccacccttt

SEQ ID NO: 106761 - DNA, 22 bp, synthetic construct
  misc_feature 1..22: note = chemically synthesized
  source 1..22: mol_type = other DNA
ctttctaccaccctttcagaca

SEQ ID NO: 106762 - DNA, 22 bp, synthetic construct
  misc_feature 1..22: note = chemically synthesized
  source 1..22: mol_type = other DNA
tctaccaccctttcagacattg

SEQ ID NO: 106763 - DNA, 22 bp, synthetic construct
  misc_feature 1..22: note = chemically synthesized
  source 1..22: mol_type = other DNA
ctaccaccctttcagacattgt

SEQ ID NO: 106764 - DNA, 22 bp, synthetic construct
  misc_feature 1..22: note = chemically synthesized
  source 1..22: mol_type = other DNA
taccaccctttcagacattgtg

SEQ ID NO: 106765 - DNA, 22 bp, synthetic construct
  misc_feature 1..22: note = chemically synthesized
  source 1..22: mol_type = other DNA
ccaccctttcagacattgtgct

SEQ ID NO: 106766 - DNA, 22 bp, synthetic construct
  misc_feature 1..22: note = chemically synthesized
  source 1..22: mol_type = other DNA
tcagacattgtgcttcatcaaa

SEQ ID NO: 106767 - DNA, 22 bp, synthetic construct
  misc_feature 1..22: note = chemically synthesized
  source 1..22: mol_type = other DNA
cagacattgtgcttcatcaaaa

SEQ ID NO: 106768 - DNA, 22 bp, synthetic construct
  misc_feature 1..22: note = chemically synthesized
  source 1..22: mol_type = other DNA
agacattgtgcttcatcaaaaa

SEQ ID NO: 106769 - DNA, 22 bp, synthetic construct
  misc_feature 1..22: note = chemically synthesized
  source 1..22: mol_type = other DNA
tgcttcatcaaaaaaatgttaa

SEQ ID NO: 106770 - DNA, 22 bp, synthetic construct
  misc_feature 1..22: note = chemically synthesized
  source 1..22: mol_type = other DNA
catcaaaaaaatgttaagaata

SEQ ID NO: 106771 - DNA, 22 bp, synthetic construct
  misc_feature 1..22: note = chemically synthesized
  source 1..22: mol_type = other DNA
atcaaaaaaatgttaagaataa

SEQ ID NO: 106772 - DNA, 22 bp, synthetic construct
  misc_feature 1..22: note = chemically synthesized
  source 1..22: mol_type = other DNA
agaataaaaattatttcacaca

SEQ ID NO: 106773 - DNA, 22 bp, synthetic construct
  misc_feature 1..22: note = chemically synthesized
  source 1..22: mol_type = other DNA
tttcacacatactttaaaacta

SEQ ID NO: 106774 - DNA, 22 bp, synthetic construct
  misc_feature 1..22: note = chemically synthesized
  source 1..22: mol_type = other DNA
cacacatactttaaaactaaca

SEQ ID NO: 106775 - DNA, 22 bp, synthetic construct
  misc_feature 1..22: note = chemically synthesized
  source 1..22: mol_type = other DNA
acacatactttaaaactaacac

SEQ ID NO: 106776 - DNA, 22 bp, synthetic construct
  misc_feature 1..22: note = chemically synthesized
  source 1..22: mol_type = other DNA
taaaactaacacatatattgga

SEQ ID NO: 106777 - DNA, 22 bp, synthetic construct
  misc_feature 1..22: note = chemically synthesized
  source 1..22: mol_type = other DNA
aaaactaacacatatattggaa

SEQ ID NO: 106778 - DNA, 22 bp, synthetic construct
  misc_feature 1..22: note = chemically synthesized
  source 1..22: mol_type = other DNA
aaactaacacatatattggaaa

SEQ ID NO: 106779 - DNA, 22 bp, synthetic construct
  misc_feature 1..22: note = chemically synthesized
  source 1..22: mol_type = other DNA
acacatatattggaaaagaaag

SEQ ID NO: 106780 - DNA, 22 bp, synthetic construct
  misc_feature 1..22: note = chemically synthesized
  source 1..22: mol_type = other DNA
gaaaagaaagtctcctctctca

SEQ ID NO: 106781 - DNA, 22 bp, synthetic construct
  misc_feature 1..22: note = chemically synthesized
  source 1..22: mol_type = other DNA
ctctctcactagctatttttta

SEQ ID NO: 106782 - DNA, 22 bp, synthetic construct
  misc_feature 1..22: note = chemically synthesized
  source 1..22: mol_type = other DNA
tctcactagctattttttaaat

SEQ ID NO: 106783 - DNA, 22 bp, synthetic construct
  misc_feature 1..22: note = chemically synthesized
  source 1..22: mol_type = other DNA
tcactagctattttttaaatgg

SEQ ID NO: 106784 - DNA, 22 bp, synthetic construct
  misc_feature 1..22: note = chemically synthesized
  source 1..22: mol_type = other DNA
actagctattttttaaatggtg

SEQ ID NO: 106785 - DNA, 22 bp, synthetic construct
  misc_feature 1..22: note = chemically synthesized
  source 1..22: mol_type = other DNA
gctattttttaaatggtgtgat

SEQ ID NO: 106786 - DNA, 22 bp, synthetic construct
  misc_feature 1..22: note = chemically synthesized
  source 1..22: mol_type = other DNA
ttttttaaatggtgtgataggc

SEQ ID NO: 106787 - DNA, 22 bp, synthetic construct
  misc_feature 1..22: note = chemically synthesized
  source 1..22: mol_type = other DNA
tttaaatggtgtgataggcata

SEQ ID NO: 106788 - DNA, 22 bp, synthetic construct
  misc_feature 1..22: note = chemically synthesized
  source 1..22: mol_type = other DNA
ttaaatggtgtgataggcataa

SEQ ID NO: 106789 - DNA, 22 bp, synthetic construct
  misc_feature 1..22: note = chemically synthesized
  source 1..22: mol_type = other DNA
taaatggtgtgataggcataat

SEQ ID NO: 106790 - DNA, 22 bp, synthetic construct
  misc_feature 1..22: note = chemically synthesized
  source 1..22: mol_type = other DNA
aaatggtgtgataggcataatt

SEQ ID NO: 106791 - DNA, 22 bp, synthetic construct
  misc_feature 1..22: note = chemically synthesized
  source 1..22: mol_type = other DNA
aatggtgtgataggcataattt

SEQ ID NO: 106792 - DNA, 22 bp, synthetic construct
  misc_feature 1..22: note = chemically synthesized
  source 1..22: mol_type = other DNA
taaaaacctttctaccacaaga

SEQ ID NO: 106793 - DNA, 22 bp, synthetic construct
  misc_feature 1..22: note = chemically synthesized
  source 1..22: mol_type = other DNA
aaaaacctttctaccacaagat

SEQ ID NO: 106794 - DNA, 22 bp, synthetic construct
  misc_feature 1..22: note = chemically synthesized
  source 1..22: mol_type = other DNA
aaaacctttctaccacaagatt

SEQ ID NO: 106795 - DNA, 22 bp, synthetic construct
  misc_feature 1..22: note = chemically synthesized
  source 1..22: mol_type = other DNA
tctaccacaagatttcctatcc

SEQ ID NO: 106796 - DNA, 22 bp, synthetic construct
  misc_feature 1..22: note = chemically synthesized
  source 1..22: mol_type = other DNA
ctaccacaagatttcctatcct

SEQ ID NO: 106797 - DNA, 22 bp, synthetic construct
  misc_feature 1..22: note = chemically synthesized
  source 1..22: mol_type = other DNA
taccacaagatttcctatccta

SEQ ID NO: 106798 - DNA, 22 bp, synthetic construct
  misc_feature 1..22: note = chemically synthesized
  source 1..22: mol_type = other DNA
ccacaagatttcctatcctaat

SEQ ID NO: 106799 - DNA, 22 bp, synthetic construct
  misc_feature 1..22: note = chemically synthesized
  source 1..22: mol_type = other DNA
cctatcctaatttctaggactg

SEQ ID NO: 106800 - DNA, 22 bp, synthetic construct
  misc_feature 1..22: note = chemically synthesized
  source 1..22: mol_type = other DNA
ctatcctaatttctaggactgt

SEQ ID NO: 106801 - DNA, 22 bp, synthetic construct
  misc_feature 1..22: note = chemically synthesized
  source 1..22: mol_type = other DNA
tcctaatttctaggactgtgaa

SEQ ID NO: 106802 - DNA, 22 bp, synthetic construct
  misc_feature 1..22: note = chemically synthesized
  source 1..22: mol_type = other DNA
atttctaggactgtgaatatga

SEQ ID NO: 106803 - DNA, 22 bp, synthetic construct
  misc_feature 1..22: note = chemically synthesized
  source 1..22: mol_type = other DNA
ctaggactgtgaatatgataca

SEQ ID NO: 106804 - DNA, 22 bp, synthetic construct
  misc_feature 1..22: note = chemically synthesized
  source 1..22: mol_type = other DNA
taggactgtgaatatgatacaa

SEQ ID NO: 106805 - DNA, 22 bp, synthetic construct
  misc_feature 1..22: note = chemically synthesized
  source 1..22: mol_type = other DNA
ggactgtgaatatgatacaata

SEQ ID NO: 106806 - DNA, 22 bp, synthetic construct
  misc_feature 1..22: note = chemically synthesized
  source 1..22: mol_type = other DNA
tgaatatgatacaatatcatgc

SEQ ID NO: 106807 - DNA, 22 bp, synthetic construct
  misc_feature 1..22: note = chemically synthesized
  source 1..22: mol_type = other DNA
ggggttatacagatgtaattaa

SEQ ID NO: 106808 - DNA, 22 bp, synthetic construct
  misc_feature 1..22: note = chemically synthesized
  source 1..22: mol_type = other DNA
gggttatacagatgtaattaaa

SEQ ID NO: 106809 - DNA, 22 bp, synthetic construct
  misc_feature 1..22: note = chemically synthesized
  source 1..22: mol_type = other DNA
tacagatgtaattaaagttgct

SEQ ID NO: 106810 - DNA, 22 bp, synthetic construct
  misc_feature 1..22: note = chemically synthesized
  source 1..22: mol_type = other DNA
aagttgctgatctattgacttt

SEQ ID NO: 106811 - DNA, 22 bp, synthetic construct
  misc_feature 1..22: note = chemically synthesized
  source 1..22: mol_type = other DNA
ctgatctattgactttgagtta

SEQ ID NO: 106812 - DNA, 22 bp, synthetic construct
  misc_feature 1..22: note = chemically synthesized
  source 1..22: mol_type = other DNA
atctattgactttgagttaatt

SEQ ID NO: 106813 - DNA, 22 bp, synthetic construct
  misc_feature 1..22: note = chemically synthesized
  source 1..22: mol_type = other DNA
ttgactttgagttaattgaaaa

SEQ ID NO: 106814 - DNA, 22 bp, synthetic construct
  misc_feature 1..22: note = chemically synthesized
  source 1..22: mol_type = other DNA
actttgagttaattgaaaagga

SEQ ID NO: 106815 - DNA, 22 bp, synthetic construct
  misc_feature 1..22: note = chemically synthesized
  source 1..22: mol_type = other DNA
tgagttaattgaaaaggaaatt

SEQ ID NO: 106816 - DNA, 22 bp, synthetic construct
  misc_feature 1..22: note = chemically synthesized
  source 1..22: mol_type = other DNA
gagttaattgaaaaggaaatta

SEQ ID NO: 106817 - DNA, 22 bp, synthetic construct
  misc_feature 1..22: note = chemically synthesized
  source 1..22: mol_type = other DNA
agttaattgaaaaggaaattac

SEQ ID NO: 106818 - DNA, 22 bp, synthetic construct
  misc_feature 1..22: note = chemically synthesized
  source 1..22: mol_type = other DNA
attgaaaaggaaattactcagg

SEQ ID NO: 106819 - DNA, 22 bp, synthetic construct
  misc_feature 1..22: note = chemically synthesized
  source 1..22: mol_type = other DNA
aaaaggaaattactcaggggaa

SEQ ID NO: 106820 - DNA, 22 bp, synthetic construct
  misc_feature 1..22: note = chemically synthesized
  source 1..22: mol_type = other DNA
ctcaggggaacctagtctaatt

SEQ ID NO: 106821 - DNA, 22 bp, synthetic construct
  misc_feature 1..22: note = chemically synthesized
  source 1..22: mol_type = other DNA
aggggaacctagtctaattcca

SEQ ID NO: 106822 - DNA, 22 bp, synthetic construct
  misc_feature 1..22: note = chemically synthesized
  source 1..22: mol_type = other DNA
gtctaattccatgagcccctaa

SEQ ID NO: 106823 - DNA, 22 bp, synthetic construct
  misc_feature 1..22: note = chemically synthesized
  source 1..22: mol_type = other DNA
attccatgagcccctaaaagca

SEQ ID NO: 106824 - DNA, 22 bp, synthetic construct
  misc_feature 1..22: note = chemically synthesized
  source 1..22: mol_type = other DNA
catgagcccctaaaagcagagt

SEQ ID NO: 106825 - DNA, 22 bp, synthetic construct
  misc_feature 1..22: note = chemically synthesized
  source 1..22: mol_type = other DNA
aaagcagagttttcaccaagta

SEQ ID NO: 106826 - DNA, 22 bp, synthetic construct
  misc_feature 1..22: note = chemically synthesized
  source 1..22: mol_type = other DNA
tcaccaagtagtaggagaatag

SEQ ID NO: 106827 - DNA, 22 bp, synthetic construct
  misc_feature 1..22: note = chemically synthesized
  source 1..22: mol_type = other DNA
caccaagtagtaggagaatagg

SEQ ID NO: 106828 - DNA, 22 bp, synthetic construct
  misc_feature 1..22: note = chemically synthesized
  source 1..22: mol_type = other DNA
accaagtagtaggagaatagga

SEQ ID NO: 106829 - DNA, 22 bp, synthetic construct
  misc_feature 1..22: note = chemically synthesized
  source 1..22: mol_type = other DNA
aaaatttgagaaaggttcatgg

SEQ ID NO: 106830 - DNA, 22 bp, synthetic construct
  misc_feature 1..22: note = chemically synthesized
  source 1..22: mol_type = other DNA
gagaaaggttcatgggtcagtt

SEQ ID NO: 106831 - DNA, 22 bp, synthetic construct
  misc_feature 1..22: note = chemically synthesized
  source 1..22: mol_type = other DNA
agaaaggttcatgggtcagttg

SEQ ID NO: 106832 - DNA, 22 bp, synthetic construct
  misc_feature 1..22: note = chemically synthesized
  source 1..22: mol_type = other DNA
atgggtcagttgctggtttgaa

SEQ ID NO: 106833 - DNA, 22 bp, synthetic construct
  misc_feature 1..22: note = chemically synthesized
  source 1..22: mol_type = other DNA
ctggtttgaaatataaggaggt

SEQ ID NO: 106834 - DNA, 22 bp, synthetic construct
  misc_feature 1..22: note = chemically synthesized
  source 1..22: mol_type = other DNA
gtttgaaatataaggaggtcac

SEQ ID NO: 106835 - DNA, 22 bp, synthetic construct
  misc_feature 1..22: note = chemically synthesized
  source 1..22: mol_type = other DNA
gaaatataaggaggtcacaaaa

SEQ ID NO: 106836 - DNA, 22 bp, synthetic construct
  misc_feature 1..22: note = chemically synthesized
  source 1..22: mol_type = other DNA
aaatataaggaggtcacaaaag

SEQ ID NO: 106837 - DNA, 22 bp, synthetic construct
  misc_feature 1..22: note = chemically synthesized
  source 1..22: mol_type = other DNA
ggtacagaacgggcatcctagc

SEQ ID NO: 106838 - DNA, 22 bp, synthetic construct
  misc_feature 1..22: note = chemically synthesized
  source 1..22: mol_type = other DNA
gctaacagcctgcaaacaaaca

SEQ ID NO: 106839 - DNA, 22 bp, synthetic construct
  misc_feature 1..22: note = chemically synthesized
  source 1..22: mol_type = other DNA
acagcctgcaaacaaacaaaca

SEQ ID NO: 106840 - DNA, 22 bp, synthetic construct
  misc_feature 1..22: note = chemically synthesized
  source 1..22: mol_type = other DNA
caaacaaacaaacaaaaaacaa

SEQ ID NO: 106841 - DNA, 22 bp, synthetic construct
  misc_feature 1..22: note = chemically synthesized
  source 1..22: mol_type = other DNA
cagagttcagcagtaggaaact

SEQ ID NO: 106842 - DNA, 22 bp, synthetic construct
  misc_feature 1..22: note = chemically synthesized
  source 1..22: mol_type = other DNA
agagttcagcagtaggaaactg

SEQ ID NO: 106843 - DNA, 22 bp, synthetic construct
  misc_feature 1..22: note = chemically synthesized
  source 1..22: mol_type = other DNA
agcagtaggaaactgaactctg

SEQ ID NO: 106844 - DNA, 22 bp, synthetic construct
  misc_feature 1..22: note = chemically synthesized
  source 1..22: mol_type = other DNA
aactctgacagccgggtgcaat

SEQ ID NO: 106845 - DNA, 22 bp, synthetic construct
  misc_feature 1..22: note = chemically synthesized
  source 1..22: mol_type = other DNA
tgacagccgggtgcaatggctc

SEQ ID NO: 106846 - DNA, 22 bp, synthetic construct
  misc_feature 1..22: note = chemically synthesized
  source 1..22: mol_type = other DNA
acagccgggtgcaatggctcat

SEQ ID NO: 106847 - DNA, 22 bp, synthetic construct
  misc_feature 1..22: note = chemically synthesized
  source 1..22: mol_type = other DNA
attcaagcctgtaatcccagca

SEQ ID NO: 106848 - DNA, 22 bp, synthetic construct
  misc_feature 1..22: note = chemically synthesized
  source 1..22: mol_type = other DNA
aagcctgtaatcccagcacttt

SEQ ID NO: 106849 - DNA, 22 bp, synthetic construct
  misc_feature 1..22: note = chemically synthesized
  source 1..22: mol_type = other DNA
taatcccagcactttgggaggc

SEQ ID NO: 106850 - DNA, 22 bp, synthetic construct
  misc_feature 1..22: note = chemically synthesized
  source 1..22: mol_type = other DNA
tgggaggccaaggcgggcggat

SEQ ID NO: 106851 - DNA, 22 bp, synthetic construct
  misc_feature 1..22: note = chemically synthesized
  source 1..22: mol_type = other DNA
gggaggccaaggcgggcggatc

SEQ ID NO: 106852 - DNA, 22 bp, synthetic construct
  misc_feature 1..22: note = chemically synthesized
  source 1..22: mol_type = other DNA
ggaggccaaggcgggcggatca

SEQ ID NO: 106853 - DNA, 22 bp, synthetic construct
  misc_feature 1..22: note = chemically synthesized
  source 1..22: mol_type = other DNA
aggtcaggagttccagaccagc

SEQ ID NO: 106854 - DNA, 22 bp, synthetic construct
  misc_feature 1..22: note = chemically synthesized
  source 1..22: mol_type = other DNA
cagaccagcctggccaacatgg

SEQ ID NO: 106855 - DNA, 22 bp, synthetic construct
  misc_feature 1..22: note = chemically synthesized
  source 1..22: mol_type = other DNA
gccaacatggtgaaattccatc

SEQ ID NO: 106856 - DNA, 22 bp, synthetic construct
  misc_feature 1..22: note = chemically synthesized
  source 1..22: mol_type = other DNA
catccctaccaaaaaatataaa

SEQ ID NO: 106857 - DNA, 22 bp, synthetic construct
  misc_feature 1..22: note = chemically synthesized
  source 1..22: mol_type = other DNA
ccaaaaaatataaaaattagcc

SEQ ID NO: 106858 - DNA, 22 bp, synthetic construct
  misc_feature 1..22: note = chemically synthesized
  source 1..22: mol_type = other DNA
gccaggtgtggttgcagttgcc

SEQ ID NO: 106859 - DNA, 22 bp, synthetic construct
  misc_feature 1..22: note = chemically synthesized
  source 1..22: mol_type = other DNA
cagttgcctgtagttccagcta

SEQ ID NO: 106860 - DNA, 22 bp, synthetic construct
  misc_feature 1..22: note = chemically synthesized
  source 1..22: mol_type = other DNA
cctgtagttccagctacttggg

SEQ ID NO: 106861 - DNA, 22 bp, synthetic construct
  misc_feature 1..22: note = chemically synthesized
  source 1..22: mol_type = other DNA
tagttccagctacttgggaaac

SEQ ID NO: 106862 - DNA, 22 bp, synthetic construct
  misc_feature 1..22: note = chemically synthesized
  source 1..22: mol_type = other DNA
cagctacttgggaaactgaggc

SEQ ID NO: 106863 - DNA, 22 bp, synthetic construct
  misc_feature 1..22: note = chemically synthesized
  source 1..22: mol_type = other DNA
cttgggaaactgaggcaggaga

SEQ ID NO: 106864 - DNA, 22 bp, synthetic construct
  misc_feature 1..22: note = chemically synthesized
  source 1..22: mol_type = other DNA
gggaaactgaggcaggagaatt

SEQ ID NO: 106865 - DNA, 22 bp, synthetic construct
  misc_feature 1..22: note = chemically synthesized
  source 1..22: mol_type = other DNA
ggaaactgaggcaggagaattg

SEQ ID NO: 106866 - DNA, 22 bp, synthetic construct
  misc_feature 1..22: note = chemically synthesized
  source 1..22: mol_type = other DNA
aggcaggagaattgcttgaacc

SEQ ID NO: 106867 - DNA, 22 bp, synthetic construct
  misc_feature 1..22: note = chemically synthesized
  source 1..22: mol_type = other DNA
cttgaacccgggaggcacaggt

SEQ ID NO: 106868 - DNA, 22 bp, synthetic construct
  misc_feature 1..22: note = chemically synthesized
  source 1..22: mol_type = other DNA
gaacccgggaggcacaggttgc

SEQ ID NO: 106869 - DNA, 22 bp, synthetic construct
  misc_feature 1..22: note = chemically synthesized
  source 1..22: mol_type = other DNA
aacccgggaggcacaggttgca

SEQ ID NO: 106870 - DNA, 22 bp, synthetic construct
  misc_feature 1..22: note = chemically synthesized
  source 1..22: mol_type = other DNA
cagggagcaagagattgtgcca

SEQ ID NO: 106871 - DNA, 22 bp, synthetic construct
  misc_feature 1..22: note = chemically synthesized
  source 1..22: mol_type = other DNA
tgccactgcactccaggctggg

SEQ ID NO: 106872 - DNA, 22 bp, synthetic construct
  misc_feature 1..22: note = chemically synthesized
  source 1..22: mol_type = other DNA
cactccaggctgggtgacagag

SEQ ID NO: 106873 - DNA, 22 bp, synthetic construct
  misc_feature 1..22: note = chemically synthesized
  source 1..22: mol_type = other DNA
caggctgggtgacagagcgaga

SEQ ID NO: 106874 - DNA, 22 bp, synthetic construct
  misc_feature 1..22: note = chemically synthesized
  source 1..22: mol_type = other DNA
ggtgacagagcgagactccatc

SEQ ID NO: 106875 - DNA, 22 bp, synthetic construct
  misc_feature 1..22: note = chemically synthesized
  source 1..22: mol_type = other DNA
catctcaaaaaaaaaaaaaaaa

SEQ ID NO: 106876 - DNA, 22 bp, synthetic construct
  misc_feature 1..22: note = chemically synthesized
  source 1..22: mol_type = other DNA
aaaaaaaaaaaaaaaaaaaaga

SEQ ID NO: 106877 - DNA, 22 bp, synthetic construct
  misc_feature 1..22: note = chemically synthesized
  source 1..22: mol_type = other DNA
agctctgactacaatctgaatg

SEQ ID NO: 106878 - DNA, 22 bp, synthetic construct
  misc_feature 1..22: note = chemically synthesized
  source 1..22: mol_type = other DNA
tgactacaatctgaatgaacgt

SEQ ID NO: 106879 - DNA, 22 bp, synthetic construct
  misc_feature 1..22: note = chemically synthesized
  source 1..22: mol_type = other DNA
actacaatctgaatgaacgtgg

SEQ ID NO: 106880 - DNA, 22 bp, synthetic construct
  misc_feature 1..22: note = chemically synthesized
  source 1..22: mol_type = other DNA
caatctgaatgaacgtggaagc

SEQ ID NO: 106881 - DNA, 22 bp, synthetic construct
  misc_feature 1..22: note = chemically synthesized
  source 1..22: mol_type = other DNA
aatgaacgtggaagcgaattct

SEQ ID NO: 106882 - DNA, 22 bp, synthetic construct
  misc_feature 1..22: note = chemically synthesized
  source 1..22: mol_type = other DNA
ttccccagagcctttggataag

SEQ ID NO: 106883 - DNA, 22 bp, synthetic construct
  misc_feature 1..22: note = chemically synthesized
  source 1..22: mol_type = other DNA
ccccagagcctttggataagag

SEQ ID NO: 106884 - DNA, 22 bp, synthetic construct
  misc_feature 1..22: note = chemically synthesized
  source 1..22: mol_type = other DNA
cccagagcctttggataagagc

SEQ ID NO: 106885 - DNA, 22 bp, synthetic construct
  misc_feature 1..22: note = chemically synthesized
  source 1..22: mol_type = other DNA
tggataagagcccagccctccc

SEQ ID NO: 106886 - DNA, 22 bp, synthetic construct
  misc_feature 1..22: note = chemically synthesized
  source 1..22: mol_type = other DNA
ggataagagcccagccctcccg

SEQ ID NO: 106887 - DNA, 22 bp, synthetic construct
  misc_feature 1..22: note = chemically synthesized
  source 1..22: mol_type = other DNA
gataagagcccagccctcccga

SEQ ID NO: 106888 - DNA, 22 bp, synthetic construct
  misc_feature 1..22: note = chemically synthesized
  source 1..22: mol_type = other DNA
ccgatattttgaatttgacctt

SEQ ID NO: 106889 - DNA, 22 bp, synthetic construct
  misc_feature 1..22: note = chemically synthesized
  source 1..22: mol_type = other DNA
tgaatttgaccttatgataccc

SEQ ID NO: 106890 - DNA, 22 bp, synthetic construct
  misc_feature 1..22: note = chemically synthesized
  source 1..22: mol_type = other DNA
gaatttgaccttatgataccct

SEQ ID NO: 106891 - DNA, 22 bp, synthetic construct
  misc_feature 1..22: note = chemically synthesized
  source 1..22: mol_type = other DNA
aatttgaccttatgatacccta

SEQ ID NO: 106892 - DNA, 22 bp, synthetic construct
  misc_feature 1..22: note = chemically synthesized
  source 1..22: mol_type = other DNA
gaccttatgataccctaagcag

SEQ ID NO: 106893 - DNA, 22 bp, synthetic construct
  misc_feature 1..22: note = chemically synthesized
  source 1..22: mol_type = other DNA
accttatgataccctaagcaga

SEQ ID NO: 106894 - DNA, 22 bp, synthetic construct
  misc_feature 1..22: note = chemically synthesized
  source 1..22: mol_type = other DNA
atgataccctaagcagagaact

SEQ ID NO: 106895 - DNA, 22 bp, synthetic construct
  misc_feature 1..22: note = chemically synthesized
  source 1..22: mol_type = other DNA
tgataccctaagcagagaactc

SEQ ID NO: 106896 - DNA, 22 bp, synthetic construct
  misc_feature 1..22: note = chemically synthesized
  source 1..22: mol_type = other DNA
agcagagaactcagttaagcct

SEQ ID NO: 106897 - DNA, 22 bp, synthetic construct
  misc_feature 1..22: note = chemically synthesized
  source 1..22: mol_type = other DNA
agttaagcctatgagagtgcag

SEQ ID NO: 106898 - DNA, 22 bp, synthetic construct
  misc_feature 1..22: note = chemically synthesized
  source 1..22: mol_type = other DNA
agcctatgagagtgcagaccta

SEQ ID NO: 106899 - DNA, 22 bp, synthetic construct
  misc_feature 1..22: note = chemically synthesized
  source 1..22: mol_type = other DNA
tgagagtgcagacctatagaaa

SEQ ID NO: 106900 - DNA, 22 bp, synthetic construct
  misc_feature 1..22: note = chemically synthesized
  source 1..22: mol_type = other DNA
tagaaatgtgatataataaact

SEQ ID NO: 106901 - DNA, 22 bp, synthetic construct
  misc_feature 1..22: note = chemically synthesized
  source 1..22: mol_type = other DNA
ataatgtttgaagcagctcaag

SEQ ID NO: 106902 - DNA, 22 bp, synthetic construct
  misc_feature 1..22: note = chemically synthesized
  source 1..22: mol_type = other DNA
gaagcagctcaagttgcagtaa

SEQ ID NO: 106903 - DNA, 22 bp, synthetic construct
  misc_feature 1..22: note = chemically synthesized
  source 1..22: mol_type = other DNA
aagcagctcaagttgcagtaat

SEQ ID NO: 106904 - DNA, 22 bp, synthetic construct
  misc_feature 1..22: note = chemically synthesized
  source 1..22: mol_type = other DNA
aagttgcagtaatttatgtata

SEQ ID NO: 106905 - DNA, 22 bp, synthetic construct
  misc_feature 1..22: note = chemically synthesized
  source 1..22: mol_type = other DNA
cagtaatttatgtataacaata

SEQ ID NO: 106906 - DNA, 22 bp, synthetic construct
  misc_feature 1..22: note = chemically synthesized
  source 1..22: mol_type = other DNA
atgtataacaatagaaaactaa

SEQ ID NO: 106907 - DNA, 22 bp, synthetic construct
  misc_feature 1..22: note = chemically synthesized
  source 1..22: mol_type = other DNA
tgtataacaatagaaaactaat

SEQ ID NO: 106908 - DNA, 22 bp, synthetic construct
  misc_feature 1..22: note = chemically synthesized
  source 1..22: mol_type = other DNA
atgcaaagtattactattatcc

SEQ ID NO: 106909 - DNA, 22 bp, synthetic construct
  misc_feature 1..22: note = chemically synthesized
  source 1..22: mol_type = other DNA
ctattatccatattttattaag

SEQ ID NO: 106910 - DNA, 22 bp, synthetic construct
  misc_feature 1..22: note = chemically synthesized
  source 1..22: mol_type = other DNA
ttatccatattttattaagagt

SEQ ID NO: 106911 - DNA, 22 bp, synthetic construct
  misc_feature 1..22: note = chemically synthesized
  source 1..22: mol_type = other DNA
tccatattttattaagagttta

SEQ ID NO: 106912 - DNA, 22 bp, synthetic construct
  misc_feature 1..22: note = chemically synthesized
  source 1..22: mol_type = other DNA
tattaagagtttatagagttct

SEQ ID NO: 106913 - DNA, 22 bp, synthetic construct
  misc_feature 1..22: note = chemically synthesized
  source 1..22: mol_type = other DNA
attaagagtttatagagttcta

SEQ ID NO: 106914 - DNA, 22 bp, synthetic construct
  misc_feature 1..22: note = chemically synthesized
  source 1..22: mol_type = other DNA
ttaagagtttatagagttctat

SEQ ID NO: 106915 - DNA, 22 bp, synthetic construct
  misc_feature 1..22: note = chemically synthesized
  source 1..22: mol_type = other DNA
agagtttatagagttctataat

SEQ ID NO: 106916 - DNA, 22 bp, synthetic construct
  misc_feature 1..22: note = chemically synthesized
  source 1..22: mol_type = other DNA
atagagttctataataaactaa

SEQ ID NO: 106917 - DNA, 22 bp, synthetic construct
  misc_feature 1..22: note = chemically synthesized
  source 1..22: mol_type = other DNA
tagagttctataataaactaat

SEQ ID NO: 106918 - DNA, 22 bp, synthetic construct
  misc_feature 1..22: note = chemically synthesized
  source 1..22: mol_type = other DNA
tataataaactaatatttacag

SEQ ID NO: 106919 - DNA, 22 bp, synthetic construct
  misc_feature 1..22: note = chemically synthesized
  source 1..22: mol_type = other DNA
taataaactaatatttacaggg

SEQ ID NO: 106920 - DNA, 22 bp, synthetic construct
  misc_feature 1..22: note = chemically synthesized
  source 1..22: mol_type = other DNA
atatttacagggtttatgtaaa

SEQ ID NO: 106921 - DNA, 22 bp, synthetic construct
  misc_feature 1..22: note = chemically synthesized
  source 1..22: mol_type = other DNA
acagggtttatgtaaattattg

SEQ ID NO: 106922 - DNA, 22 bp, synthetic construct
  misc_feature 1..22: note = chemically synthesized
  source 1..22: mol_type = other DNA
cagggtttatgtaaattattgt

SEQ ID NO: 106923 - DNA, 22 bp, synthetic construct
  misc_feature 1..22: note = chemically synthesized
  source 1..22: mol_type = other DNA
atgtaaattattgtatcattta

SEQ ID NO: 106924 - DNA, 22 bp, synthetic construct
  misc_feature 1..22: note = chemically synthesized
  source 1..22: mol_type = other DNA
tgtaaattattgtatcatttat

SEQ ID NO: 106925 - DNA, 22 bp, synthetic construct
  misc_feature 1..22: note = chemically synthesized
  source 1..22: mol_type = other DNA
ttgtatcatttatctattatca

SEQ ID NO: 106926 - DNA, 22 bp, synthetic construct
  misc_feature 1..22: note = chemically synthesized
  source 1..22: mol_type = other DNA
tatcatttatctattatcacag

SEQ ID NO: 106927 - DNA, 22 bp, synthetic construct
  misc_feature 1..22: note = chemically synthesized
  source 1..22: mol_type = other DNA
atctattatcacagaattgtca

SEQ ID NO: 106928 - DNA, 22 bp, synthetic construct
  misc_feature 1..22: note = chemically synthesized
  source 1..22: mol_type = other DNA
tctattatcacagaattgtcac

SEQ ID NO: 106929 - DNA, 22 bp, synthetic construct
  misc_feature 1..22: note = chemically synthesized
  source 1..22: mol_type = other DNA
ttatcacagaattgtcacatca

SEQ ID NO: 106930 - DNA, 22 bp, synthetic construct
  misc_feature 1..22: note = chemically synthesized
  source 1..22: mol_type = other DNA
tcacagaattgtcacatcacaa

SEQ ID NO: 106931 - DNA, 22 bp, synthetic construct
  misc_feature 1..22: note = chemically synthesized
  source 1..22: mol_type = other DNA
tcacatcacaaagccctgtata

SEQ ID NO: 106932 - DNA, 22 bp, synthetic construct
  misc_feature 1..22: note = chemically synthesized
  source 1..22: mol_type = other DNA
tatagcatcagtggctgacaac

SEQ ID NO: 106933 - DNA, 22 bp, synthetic construct
  misc_feature 1..22: note = chemically synthesized
  source 1..22: mol_type = other DNA
acaacattaaacatttattttt

SEQ ID NO: 106934 - DNA, 22 bp, synthetic construct
  misc_feature 1..22: note = chemically synthesized
  source 1..22: mol_type = other DNA
aacatttatttttcactctaat

SEQ ID NO: 106935 - DNA, 22 bp, synthetic construct
  misc_feature 1..22: note = chemically synthesized
  source 1..22: mol_type = other DNA
atttttcactctaatgcatggt

SEQ ID NO: 106936 - DNA, 22 bp, synthetic construct
  misc_feature 1..22: note = chemically synthesized
  source 1..22: mol_type = other DNA
tttttcactctaatgcatggtt

SEQ ID NO: 106937 - DNA, 22 bp, synthetic construct
  misc_feature 1..22: note = chemically synthesized
  source 1..22: mol_type = other DNA
ttcactctaatgcatggttcaa

SEQ ID NO: 106938 - DNA, 22 bp, synthetic construct
  misc_feature 1..22: note = chemically synthesized
  source 1..22: mol_type = other DNA
tcactctaatgcatggttcaac

SEQ ID NO: 106939 - DNA, 22 bp, synthetic construct
  misc_feature 1..22: note = chemically synthesized
  source 1..22: mol_type = other DNA
cactctaatgcatggttcaact

SEQ ID NO: 106940 - DNA, 22 bp, synthetic construct
  misc_feature 1..22: note = chemically synthesized
  source 1..22: mol_type = other DNA
actctaatgcatggttcaactt

SEQ ID NO: 106941 - DNA, 22 bp, synthetic construct
  misc_feature 1..22: note = chemically synthesized
  source 1..22: mol_type = other DNA
taatgcatggttcaacttattt

SEQ ID NO: 106942 - DNA, 22 bp, synthetic construct
  misc_feature 1..22: note = chemically synthesized
  source 1..22: mol_type = other DNA
atgcatggttcaacttatttag

SEQ ID NO: 106943 - DNA, 22 bp, synthetic construct
  misc_feature 1..22: note = chemically synthesized
  source 1..22: mol_type = other DNA
aacttatttaggctgggcttgg

SEQ ID NO: 106944 - DNA, 22 bp, synthetic construct
  misc_feature 1..22: note = chemically synthesized
  source 1..22: mol_type = other DNA
atttaggctgggcttggctggg

SEQ ID NO: 106945 - DNA, 22 bp, synthetic construct
  misc_feature 1..22: note = chemically synthesized
  source 1..22: mol_type = other DNA
tttaggctgggcttggctgggc

SEQ ID NO: 106946 - DNA, 22 bp, synthetic construct
  misc_feature 1..22: note = chemically synthesized
  source 1..22: mol_type = other DNA
aggctgggcttggctgggcagc

SEQ ID NO: 106947 - DNA, 22 bp, synthetic construct
  misc_feature 1..22: note = chemically synthesized
  source 1..22: mol_type = other DNA
ggctgggcttggctgggcagca

SEQ ID NO: 106948 - DNA, 22 bp, synthetic construct
  misc_feature 1..22: note = chemically synthesized
  source 1..22: mol_type = other DNA
ggcttggctgggcagcactgat

SEQ ID NO: 106949 - DNA, 22 bp, synthetic construct
  misc_feature 1..22: note = chemically synthesized
  source 1..22: mol_type = other DNA
ggctgggcagcactgatcattt

SEQ ID NO: 106950 - DNA, 22 bp, synthetic construct
  misc_feature 1..22: note = chemically synthesized
  source 1..22: mol_type = other DNA
gctgggcagcactgatcatttc

SEQ ID NO: 106951 - DNA, 22 bp, synthetic construct
  misc_feature 1..22: note = chemically synthesized
  source 1..22: mol_type = other DNA
ggcagcactgatcatttctgca

SEQ ID NO: 106952 - DNA, 22 bp, synthetic construct
  misc_feature 1..22: note = chemically synthesized
  source 1..22: mol_type = other DNA
atcatttctgcaccatctgctc

SEQ ID NO: 106953 - DNA, 22 bp, synthetic construct
  misc_feature 1..22: note = chemically synthesized
  source 1..22: mol_type = other DNA
ctgcaccatctgctcaggtaca

SEQ ID NO: 106954 - DNA, 22 bp, synthetic construct
  misc_feature 1..22: note = chemically synthesized
  source 1..22: mol_type = other DNA
tgcaccatctgctcaggtacat

SEQ ID NO: 106955 - DNA, 22 bp, synthetic construct
  misc_feature 1..22: note = chemically synthesized
  source 1..22: mol_type = other DNA
caccatctgctcaggtacatag

SEQ ID NO: 106956 - DNA, 22 bp, synthetic construct
  misc_feature 1..22: note = chemically synthesized
  source 1..22: mol_type = other DNA
ctcaggtacatagggtgcagct

SEQ ID NO: 106957 - DNA, 22 bp, synthetic construct
  misc_feature 1..22: note = chemically synthesized
  source 1..22: mol_type = other DNA
aggtacatagggtgcagctgta

SEQ ID NO: 106958 - DNA, 22 bp, synthetic construct
  misc_feature 1..22: note = chemically synthesized
  source 1..22: mol_type = other DNA
tacgtcatccctatcctattgt

SEQ ID NO: 106959 - DNA, 22 bp, synthetic construct
  misc_feature 1..22: note = chemically synthesized
  source 1..22: mol_type = other DNA
tcctattgttttcctgtgtcgt

SEQ ID NO: 106960 - DNA, 22 bp, synthetic construct
  misc_feature 1..22: note = chemically synthesized
  source 1..22: mol_type = other DNA
ttgttttcctgtgtcgttcttc

SEQ ID NO: 106961 - DNA, 22 bp, synthetic construct
  misc_feature 1..22: note = chemically synthesized
  source 1..22: mol_type = other DNA
ttttcctgtgtcgttcttccta

SEQ ID NO: 106962 - DNA, 22 bp, synthetic construct
  misc_feature 1..22: note = chemically synthesized
  source 1..22: mol_type = other DNA
tcctgtgtcgttcttcctatat

SEQ ID NO: 106963 - DNA, 22 bp, synthetic construct
  misc_feature 1..22: note = chemically synthesized
  source 1..22: mol_type = other DNA
cctgtgtcgttcttcctatatc

SEQ ID NO: 106964 - DNA, 22 bp, synthetic construct
  misc_feature 1..22: note = chemically synthesized
  source 1..22: mol_type = other DNA
ctgtgtcgttcttcctatatcc

SEQ ID NO: 106965 - DNA, 22 bp, synthetic construct
  misc_feature 1..22: note = chemically synthesized
  source 1..22: mol_type = other DNA
tgtcgttcttcctatatccatc

SEQ ID NO: 106966 - DNA, 22 bp, synthetic construct
  misc_feature 1..22: note = chemically synthesized
  source 1..22: mol_type = other DNA
ttcctatatccatcaccctttt

SEQ ID NO: 106967 - DNA, 22 bp, synthetic construct
  misc_feature 1..22: note = chemically synthesized
  source 1..22: mol_type = other DNA
cctatatccatcacccttttgt

SEQ ID NO: 106968 - DNA, 22 bp, synthetic construct
  misc_feature 1..22: note = chemically synthesized
  source 1..22: mol_type = other DNA
ctatatccatcacccttttgtt

SEQ ID NO: 106969 - DNA, 22 bp, synthetic construct
  misc_feature 1..22: note = chemically synthesized
  source 1..22: mol_type = other DNA
tatccatcacccttttgttgta

SEQ ID NO: 106970 - DNA, 22 bp, synthetic construct
  misc_feature 1..22: note = chemically synthesized
  source 1..22: mol_type = other DNA
ttgttgtatctatttctatatt

SEQ ID NO: 106971 - DNA, 22 bp, synthetic construct
  misc_feature 1..22: note = chemically synthesized
  source 1..22: mol_type = other DNA
tgttgtatctatttctatattg

SEQ ID NO: 106972 - DNA, 22 bp, synthetic construct
  misc_feature 1..22: note = chemically synthesized
  source 1..22: mol_type = other DNA
gttgtatctatttctatattgt

SEQ ID NO: 106973 - DNA, 22 bp, synthetic construct
  misc_feature 1..22: note = chemically synthesized
  source 1..22: mol_type = other DNA
ttgtatctatttctatattgtc

SEQ ID NO: 106974 - DNA, 22 bp, synthetic construct
  misc_feature 1..22: note = chemically synthesized
  source 1..22: mol_type = other DNA
tatctatttctatattgtctct

SEQ ID NO: 106975 - DNA, 22 bp, synthetic construct
  misc_feature 1..22: note = chemically synthesized
  source 1..22: mol_type = other DNA
tttctatattgtctcttatttt

SEQ ID NO: 106976 - DNA, 22 bp, synthetic construct
  misc_feature 1..22: note = chemically synthesized
  source 1..22: mol_type = other DNA
ctatattgtctcttattttgcc

SEQ ID NO: 106977 - DNA, 22 bp, synthetic construct
  misc_feature 1..22: note = chemically synthesized
  source 1..22: mol_type = other DNA
tatattgtctcttattttgccc

SEQ ID NO: 106978 - DNA, 22 bp, synthetic construct
  misc_feature 1..22: note = chemically synthesized
  source 1..22: mol_type = other DNA
tattgtctcttattttgccctc

SEQ ID NO: 106979 - DNA, 22 bp, synthetic construct
  misc_feature 1..22: note = chemically synthesized
  source 1..22: mol_type = other DNA
tctcttattttgccctctctaa

SEQ ID NO: 106980 - DNA, 22 bp, synthetic construct
  misc_feature 1..22: note = chemically synthesized
  source 1..22: mol_type = other DNA
ttattttgccctctctaactaa

SEQ ID NO: 106981 - DNA, 22 bp, synthetic construct
  misc_feature 1..22: note = chemically synthesized
  source 1..22: mol_type = other DNA
attttgccctctctaactaaac

SEQ ID NO: 106982 - DNA, 22 bp, synthetic construct
  misc_feature 1..22: note = chemically synthesized
  source 1..22: mol_type = other DNA
ttttgccctctctaactaaacc

SEQ ID NO: 106983 - DNA, 22 bp, synthetic construct
  misc_feature 1..22: note = chemically synthesized
  source 1..22: mol_type = other DNA
tgccctctctaactaaacccca

SEQ ID NO: 106984 - DNA, 22 bp, synthetic construct
  misc_feature 1..22: note = chemically synthesized
  source 1..22: mol_type = other DNA
gccctctctaactaaaccccag

SEQ ID NO: 106985 - DNA, 22 bp, synthetic construct
  misc_feature 1..22: note = chemically synthesized
  source 1..22: mol_type = other DNA
ccctctctaactaaaccccaga

SEQ ID NO: 106986 - DNA, 22 bp, synthetic construct
  misc_feature 1..22: note = chemically synthesized
  source 1..22: mol_type = other DNA
tctaactaaaccccagatgtct

SEQ ID NO: 106987 - DNA, 22 bp, synthetic construct
  misc_feature 1..22: note = chemically synthesized
  source 1..22: mol_type = other DNA
taactaaaccccagatgtctct

SEQ ID NO: 106988 - DNA, 22 bp, synthetic construct
  misc_feature 1..22: note = chemically synthesized
  source 1..22: mol_type = other DNA
actaaaccccagatgtctcttt

SEQ ID NO: 106989 - DNA, 22 bp, synthetic construct
  misc_feature 1..22: note = chemically synthesized
  source 1..22: mol_type = other DNA
aaccccagatgtctcttttgca

SEQ ID NO: 106990 - DNA, 22 bp, synthetic construct
  misc_feature 1..22: note = chemically synthesized
  source 1..22: mol_type = other DNA
ttttgcatcacccagactttag

SEQ ID NO: 106991 - DNA, 22 bp, synthetic construct
  misc_feature 1..22: note = chemically synthesized
  source 1..22: mol_type = other DNA
ttgcatcacccagactttagca

SEQ ID NO: 106992 - DNA, 22 bp, synthetic construct
  misc_feature 1..22: note = chemically synthesized
  source 1..22: mol_type = other DNA
tgcatcacccagactttagcat

SEQ ID NO: 106993 - DNA, 22 bp, synthetic construct
  misc_feature 1..22: note = chemically synthesized
  source 1..22: mol_type = other DNA
gcatcacccagactttagcata

SEQ ID NO: 106994 - DNA, 22 bp, synthetic construct
  misc_feature 1..22: note = chemically synthesized
  source 1..22: mol_type = other DNA
catcacccagactttagcataa

SEQ ID NO: 106995 - DNA, 22 bp, synthetic construct
  misc_feature 1..22: note = chemically synthesized
  source 1..22: mol_type = other DNA
tagcataaaacttagcacaaaa

SEQ ID NO: 106996 - DNA, 22 bp, synthetic construct
  misc_feature 1..22: note = chemically synthesized
  source 1..22: mol_type = other DNA
agcataaaacttagcacaaaat

SEQ ID NO: 106997 - DNA, 22 bp, synthetic construct
  misc_feature 1..22: note = chemically synthesized
  source 1..22: mol_type = other DNA
gcataaaacttagcacaaaatt

SEQ ID NO: 106998 - DNA, 22 bp, synthetic construct
  misc_feature 1..22: note = chemically synthesized
  source 1..22: mol_type = other DNA
agcacaaaatttttactgttta

SEQ ID NO: 106999 - DNA, 22 bp, synthetic construct
  misc_feature 1..22: note = chemically synthesized
  source 1..22: mol_type = other DNA
gcacaaaatttttactgtttac

SEQ ID NO: 107000 - DNA, 22 bp, synthetic construct
  misc_feature 1..22: note = chemically synthesized
  source 1..22: mol_type = other DNA
ttactgtttacattcttttact

SEQ ID NO: 107001 - DNA, 22 bp, synthetic construct
  misc_feature 1..22: note = chemically synthesized
  source 1..22: mol_type = other DNA
tactgtttacattcttttacta

SEQ ID NO: 107002 - DNA, 22 bp, synthetic construct
  misc_feature 1..22: note = chemically synthesized
  source 1..22: mol_type = other DNA
actgtttacattcttttactag

SEQ ID NO: 107003 - DNA, 22 bp, synthetic construct
  misc_feature 1..22: note = chemically synthesized
  source 1..22: mol_type = other DNA
ctgtttacattcttttactagt

SEQ ID NO: 107004 - DNA, 22 bp, synthetic construct
  misc_feature 1..22: note = chemically synthesized
  source 1..22: mol_type = other DNA
tttacattcttttactagtctc

SEQ ID NO: 107005 - DNA, 22 bp, synthetic construct
  misc_feature 1..22: note = chemically synthesized
  source 1..22: mol_type = other DNA
acattcttttactagtctctca

SEQ ID NO: 107006 - DNA, 22 bp, synthetic construct
  misc_feature 1..22: note = chemically synthesized
  source 1..22: mol_type = other DNA
cattcttttactagtctctcag

SEQ ID NO: 107007 - DNA, 22 bp, synthetic construct
  misc_feature 1..22: note = chemically synthesized
  source 1..22: mol_type = other DNA
ttttactagtctctcagaccta

SEQ ID NO: 107008 - DNA, 22 bp, synthetic construct
  misc_feature 1..22: note = chemically synthesized
  source 1..22: mol_type = other DNA
ttactagtctctcagacctagt

SEQ ID NO: 107009 - DNA, 22 bp, synthetic construct
  misc_feature 1..22: note = chemically synthesized
  source 1..22: mol_type = other DNA
tactagtctctcagacctagtg

SEQ ID NO: 107010 - DNA, 22 bp, synthetic construct
  misc_feature 1..22: note = chemically synthesized
  source 1..22: mol_type = other DNA
actagtctctcagacctagtgg

SEQ ID NO: 107011 - DNA, 22 bp, synthetic construct
  misc_feature 1..22: note = chemically synthesized
  source 1..22: mol_type = other DNA
ctagtctctcagacctagtggc

SEQ ID NO: 107012 - DNA, 22 bp, synthetic construct
  misc_feature 1..22: note = chemically synthesized
  source 1..22: mol_type = other DNA
gtctctcagacctagtggctct

SEQ ID NO: 107013 - DNA, 22 bp, synthetic construct
  misc_feature 1..22: note = chemically synthesized
  source 1..22: mol_type = other DNA
tcagacctagtggctctaactc

SEQ ID NO: 107014 - DNA, 22 bp, synthetic construct
  misc_feature 1..22: note = chemically synthesized
  source 1..22: mol_type = other DNA
agacctagtggctctaactcat

SEQ ID NO: 107015 - DNA, 22 bp, synthetic construct
  misc_feature 1..22: note = chemically synthesized
  source 1..22: mol_type = other DNA
gtggctctaactcattgtagta

SEQ ID NO: 107016 - DNA, 22 bp, synthetic construct
  misc_feature 1..22: note = chemically synthesized
  source 1..22: mol_type = other DNA
taactcattgtagtaaaaaaca

SEQ ID NO: 107017 - DNA, 22 bp, synthetic construct
  misc_feature 1..22: note = chemically synthesized
  source 1..22: mol_type = other DNA
actcattgtagtaaaaaacacg

SEQ ID NO: 107018 - DNA, 22 bp, synthetic construct
  misc_feature 1..22: note = chemically synthesized
  source 1..22: mol_type = other DNA
attgtagtaaaaaacacggttc

SEQ ID NO: 107019 - DNA, 22 bp, synthetic construct
  misc_feature 1..22: note = chemically synthesized
  source 1..22: mol_type = other DNA
tagtaaaaaacacggttctact

SEQ ID NO: 107020 - DNA, 22 bp, synthetic construct
  misc_feature 1..22: note = chemically synthesized
  source 1..22: mol_type = other DNA
tactcccactccaacactaaca

SEQ ID NO: 107021 - DNA, 22 bp, synthetic construct
  misc_feature 1..22: note = chemically synthesized
  source 1..22: mol_type = other DNA
ctcccactccaacactaacatt

SEQ ID NO: 107022 - DNA, 22 bp, synthetic construct
  misc_feature 1..22: note = chemically synthesized
  source 1..22: mol_type = other DNA
ccactccaacactaacattgct

SEQ ID NO: 107023 - DNA, 22 bp, synthetic construct
  misc_feature 1..22: note = chemically synthesized
  source 1..22: mol_type = other DNA
caacactaacattgcttacttt

SEQ ID NO: 107024 - DNA, 22 bp, synthetic construct
  misc_feature 1..22: note = chemically synthesized
  source 1..22: mol_type = other DNA
acattgcttactttactaagtg

SEQ ID NO: 107025 - DNA, 22 bp, synthetic construct
  misc_feature 1..22: note = chemically synthesized
  source 1..22: mol_type = other DNA
cttactttactaagtgttgtat

SEQ ID NO: 107026 - DNA, 22 bp, synthetic construct
  misc_feature 1..22: note = chemically synthesized
  source 1..22: mol_type = other DNA
actttactaagtgttgtattaa

SEQ ID NO: 107027 - DNA, 22 bp, synthetic construct
  misc_feature 1..22: note = chemically synthesized
  source 1..22: mol_type = other DNA
ctttactaagtgttgtattaac

SEQ ID NO: 107028 - DNA, 22 bp, synthetic construct
  misc_feature 1..22: note = chemically synthesized
  source 1..22: mol_type = other DNA
tactaagtgttgtattaacaca

SEQ ID NO: 107029 - DNA, 22 bp, synthetic construct
  misc_feature 1..22: note = chemically synthesized
  source 1..22: mol_type = other DNA
actaagtgttgtattaacacac

SEQ ID NO: 107030 - DNA, 22 bp, synthetic construct
  misc_feature 1..22: note = chemically synthesized
  source 1..22: mol_type = other DNA
ctaagtgttgtattaacacacc

SEQ ID NO: 107031 - DNA, 22 bp, synthetic construct
  misc_feature 1..22: note = chemically synthesized
  source 1..22: mol_type = other DNA
agtgttgtattaacacaccaat

SEQ ID NO: 107032 - DNA, 22 bp, synthetic construct
  misc_feature 1..22: note = chemically synthesized
  source 1..22: mol_type = other DNA
tattaacacaccaatggccctg

SEQ ID NO: 107033 - DNA, 22 bp, synthetic construct
  misc_feature 1..22: note = chemically synthesized
  source 1..22: mol_type = other DNA
acacaccaatggccctggaagc

SEQ ID NO: 107034 - DNA, 22 bp, synthetic construct
  misc_feature 1..22: note = chemically synthesized
  source 1..22: mol_type = other DNA
gaagcaatgacagagtttgaca

SEQ ID NO: 107035 - DNA, 22 bp, synthetic construct
  misc_feature 1..22: note = chemically synthesized
  source 1..22: mol_type = other DNA
gacatattgattgtaaggttat

SEQ ID NO: 107036 - DNA, 22 bp, synthetic construct
  misc_feature 1..22: note = chemically synthesized
  source 1..22: mol_type = other DNA
acatattgattgtaaggttatt

SEQ ID NO: 107037 - DNA, 22 bp, synthetic construct
  misc_feature 1..22: note = chemically synthesized
  source 1..22: mol_type = other DNA
attgtaaggttatttataaaat

SEQ ID NO: 107038 - DNA, 22 bp, synthetic construct
  misc_feature 1..22: note = chemically synthesized
  source 1..22: mol_type = other DNA
taaggttatttataaaatttta

SEQ ID NO: 107039 - DNA, 22 bp, synthetic construct
  misc_feature 1..22: note = chemically synthesized
  source 1..22: mol_type = other DNA
tttataaaattttaattacttt

SEQ ID NO: 107040 - DNA, 22 bp, synthetic construct
  misc_feature 1..22: note = chemically synthesized
  source 1..22: mol_type = other DNA
ataaaattttaattactttatg

SEQ ID NO: 107041 - DNA, 22 bp, synthetic construct
  misc_feature 1..22: note = chemically synthesized
  source 1..22: mol_type = other DNA
taaaattttaattactttatga

SEQ ID NO: 107042 - DNA, 22 bp, synthetic construct
  misc_feature 1..22: note = chemically synthesized
  source 1..22: mol_type = other DNA
taattactttatgattaacaca

SEQ ID NO: 107043 - DNA, 22 bp, synthetic construct
  misc_feature 1..22: note = chemically synthesized
  source 1..22: mol_type = other DNA
aattactttatgattaacacat

SEQ ID NO: 107044 - DNA, 22 bp, synthetic construct
  misc_feature 1..22: note = chemically synthesized
  source 1..22: mol_type = other DNA
attactttatgattaacacatt

SEQ ID NO: 107045 - DNA, 22 bp, synthetic construct
  misc_feature 1..22: note = chemically synthesized
  source 1..22: mol_type = other DNA
ctttatgattaacacattgatc

SEQ ID NO: 107046 - DNA, 22 bp, synthetic construct
  misc_feature 1..22: note = chemically synthesized
  source 1..22: mol_type = other DNA
tatgattaacacattgatcact

SEQ ID NO: 107047 - DNA, 22 bp, synthetic construct
  misc_feature 1..22: note = chemically synthesized
  source 1..22: mol_type = other DNA
atgattaacacattgatcacta

SEQ ID NO: 107048 - DNA, 22 bp, synthetic construct
  misc_feature 1..22: note = chemically synthesized
  source 1..22: mol_type = other DNA
tgattaacacattgatcactaa

SEQ ID NO: 107049 - DNA, 22 bp, synthetic construct
  misc_feature 1..22: note = chemically synthesized
  source 1..22: mol_type = other DNA
acacattgatcactaactgact

SEQ ID NO: 107050 - DNA, 22 bp, synthetic construct
  misc_feature 1..22: note = chemically synthesized
  source 1..22: mol_type = other DNA
atcactaactgactggtatgct

SEQ ID NO: 107051 - DNA, 22 bp, synthetic construct
  misc_feature 1..22: note = chemically synthesized
  source 1..22: mol_type = other DNA
actgactggtatgctgattgtt

SEQ ID NO: 107052 - DNA, 22 bp, synthetic construct
  misc_feature 1..22: note = chemically synthesized
  source 1..22: mol_type = other DNA
actggtatgctgattgttaaac

SEQ ID NO: 107053 - DNA, 22 bp, synthetic construct
  misc_feature 1..22: note = chemically synthesized
  source 1..22: mol_type = other DNA
gtatgctgattgttaaactgac

SEQ ID NO: 107054 - DNA, 22 bp, synthetic construct
  misc_feature 1..22: note = chemically synthesized
  source 1..22: mol_type = other DNA
attgttaaactgacttaggtaa

SEQ ID NO: 107055 - DNA, 22 bp, synthetic construct
  misc_feature 1..22: note = chemically synthesized
  source 1..22: mol_type = other DNA
ttaaactgacttaggtaagaac

SEQ ID NO: 107056 - DNA, 22 bp, synthetic construct
  misc_feature 1..22: note = chemically synthesized
  source 1..22: mol_type = other DNA
aactgacttaggtaagaacagt

SEQ ID NO: 107057 - DNA, 22 bp, synthetic construct
  misc_feature 1..22: note = chemically synthesized
  source 1..22: mol_type = other DNA
acttaggtaagaacagtgactt

SEQ ID NO: 107058 - DNA, 22 bp, synthetic construct
  misc_feature 1..22: note = chemically synthesized
  source 1..22: mol_type = other DNA
aggtaagaacagtgacttcaaa

SEQ ID NO: 107059 - DNA, 22 bp, synthetic construct
  misc_feature 1..22: note = chemically synthesized
  source 1..22: mol_type = other DNA
ggtaagaacagtgacttcaaaa

SEQ ID NO: 107060 - DNA, 22 bp, synthetic construct
  misc_feature 1..22: note = chemically synthesized
  source 1..22: mol_type = other DNA
caaaatattactaatatactaa

SEQ ID NO: 107061 - DNA, 22 bp, synthetic construct
  misc_feature 1..22: note = chemically synthesized
  source 1..22: mol_type = other DNA
aaaatattactaatatactaat

SEQ ID NO: 107062 - DNA, 22 bp, synthetic construct
  misc_feature 1..22: note = chemically synthesized
  source 1..22: mol_type = other DNA
ctaatatactaattggctaata

SEQ ID NO: 107063 - DNA, 22 bp, synthetic construct
  misc_feature 1..22: note = chemically synthesized
  source 1..22: mol_type = other DNA
atatactaattggctaatatat

SEQ ID NO: 107064 - DNA, 22 bp, synthetic construct
  misc_feature 1..22: note = chemically synthesized
  source 1..22: mol_type = other DNA
attggctaatatataagctgaa

SEQ ID NO: 107065 - DNA, 22 bp, synthetic construct
  misc_feature 1..22: note = chemically synthesized
  source 1..22: mol_type = other DNA
gctaatatataagctgaaaatg

SEQ ID NO: 107066 - DNA, 22 bp, synthetic construct
  misc_feature 1..22: note = chemically synthesized
  source 1..22: mol_type = other DNA
atatataagctgaaaatgtggg

SEQ ID NO: 107067 - DNA, 22 bp, synthetic construct
  misc_feature 1..22: note = chemically synthesized
  source 1..22: mol_type = other DNA
aaaatgtgggagctacaaagta

SEQ ID NO: 107068 - DNA, 22 bp, synthetic construct
  misc_feature 1..22: note = chemically synthesized
  source 1..22: mol_type = other DNA
caaagtagaggaggaagaaggc

SEQ ID NO: 107069 - DNA, 22 bp, synthetic construct
  misc_feature 1..22: note = chemically synthesized
  source 1..22: mol_type = other DNA
agcctagagaactgcatcaaga

SEQ ID NO: 107070 - DNA, 22 bp, synthetic construct
  misc_feature 1..22: note = chemically synthesized
  source 1..22: mol_type = other DNA
gagaactgcatcaagaggagga

SEQ ID NO: 107071 - DNA, 22 bp, synthetic construct
  misc_feature 1..22: note = chemically synthesized
  source 1..22: mol_type = other DNA
catcaagaggaggaggagaggt

SEQ ID NO: 107072 - DNA, 22 bp, synthetic construct
  misc_feature 1..22: note = chemically synthesized
  source 1..22: mol_type = other DNA
caggtgtcatggtgaccccacc

SEQ ID NO: 107073 - DNA, 22 bp, synthetic construct
  misc_feature 1..22: note = chemically synthesized
  source 1..22: mol_type = other DNA
cacattcactcccagagtcagt

SEQ ID NO: 107074 - DNA, 22 bp, synthetic construct
  misc_feature 1..22: note = chemically synthesized
  source 1..22: mol_type = other DNA
actcccagagtcagtctctttc

SEQ ID NO: 107075 - DNA, 22 bp, synthetic construct
  misc_feature 1..22: note = chemically synthesized
  source 1..22: mol_type = other DNA
ccagagtcagtctctttcctct

SEQ ID NO: 107076 - DNA, 22 bp, synthetic construct
  misc_feature 1..22: note = chemically synthesized
  source 1..22: mol_type = other DNA
tttcctctcctgcctcttccaa

SEQ ID NO: 107077 - DNA, 22 bp, synthetic construct
  misc_feature 1..22: note = chemically synthesized
  source 1..22: mol_type = other DNA
tcctctcctgcctcttccaaag

SEQ ID NO: 107078 - DNA, 22 bp, synthetic construct
  misc_feature 1..22: note = chemically synthesized
  source 1..22: mol_type = other DNA
cctctcctgcctcttccaaaga

SEQ ID NO: 107079 - DNA, 22 bp, synthetic construct
  misc_feature 1..22: note = chemically synthesized
  source 1..22: mol_type = other DNA
ctctcctgcctcttccaaagaa

SEQ ID NO: 107080 - DNA, 22 bp, synthetic construct
  misc_feature 1..22: note = chemically synthesized
  source 1..22: mol_type = other DNA
tcctgcctcttccaaagaaaat

SEQ ID NO: 107081 - DNA, 22 bp, synthetic construct
  misc_feature 1..22: note = chemically synthesized
  source 1..22: mol_type = other DNA
ctgcctcttccaaagaaaattt

SEQ ID NO: 107082 - DNA, 22 bp, synthetic construct
  misc_feature 1..22: note = chemically synthesized
  source 1..22: mol_type = other DNA
cctcttccaaagaaaatttcta

SEQ ID NO: 107083 - DNA, 22 bp, synthetic construct
  misc_feature 1..22: note = chemically synthesized
  source 1..22: mol_type = other DNA
ttccaaagaaaatttctattgt

SEQ ID NO: 107084 - DNA, 22 bp, synthetic construct
  misc_feature 1..22: note = chemically synthesized
  source 1..22: mol_type = other DNA
ccaaagaaaatttctattgtag

SEQ ID NO: 107085 - DNA, 22 bp, synthetic construct
  misc_feature 1..22: note = chemically synthesized
  source 1..22: mol_type = other DNA
caaagaaaatttctattgtagg

SEQ ID NO: 107086 - DNA, 22 bp, synthetic construct
  misc_feature 1..22: note = chemically synthesized
  source 1..22: mol_type = other DNA
ctattgtaggaaaagtgttctt

SEQ ID NO: 107087 - DNA, 22 bp, synthetic construct
  misc_feature 1..22: note = chemically synthesized
  source 1..22: mol_type = other DNA
tattgtaggaaaagtgttctta

SEQ ID NO: 107088 - DNA, 22 bp, synthetic construct
  misc_feature 1..22: note = chemically synthesized
  source 1..22: mol_type = other DNA
ttgtaggaaaagtgttcttaat

SEQ ID NO: 107089 - DNA, 22 bp, synthetic construct
  misc_feature 1..22: note = chemically synthesized
  source 1..22: mol_type = other DNA
taggaaaagtgttcttaatagc

SEQ ID NO: 107090 - DNA, 22 bp, synthetic construct
  misc_feature 1..22: note = chemically synthesized
  source 1..22: mol_type = other DNA
ttaatagcgctgagctaacaag

SEQ ID NO: 107091 - DNA, 22 bp, synthetic construct
  misc_feature 1..22: note = chemically synthesized
  source 1..22: mol_type = other DNA
aatagcgctgagctaacaagaa

SEQ ID NO: 107092 - DNA, 22 bp, synthetic construct
  misc_feature 1..22: note = chemically synthesized
  source 1..22: mol_type = other DNA
atagcgctgagctaacaagaac

SEQ ID NO: 107093 - DNA, 22 bp, synthetic construct
  misc_feature 1..22: note = chemically synthesized
  source 1..22: mol_type = other DNA
agctaacaagaacttctagata

SEQ ID NO: 107094 - DNA, 22 bp, synthetic construct
  misc_feature 1..22: note = chemically synthesized
  source 1..22: mol_type = other DNA
acaagaacttctagatatcaac

SEQ ID NO: 107095 - DNA, 22 bp, synthetic construct
  misc_feature 1..22: note = chemically synthesized
  source 1..22: mol_type = other DNA
ctagatatcaactcagaactct

SEQ ID NO: 107096 - DNA, 22 bp, synthetic construct
  misc_feature 1..22: note = chemically synthesized
  source 1..22: mol_type = other DNA
tagatatcaactcagaactctt

SEQ ID NO: 107097 - DNA, 22 bp, synthetic construct
  misc_feature 1..22: note = chemically synthesized
  source 1..22: mol_type = other DNA
gatatcaactcagaactcttaa

SEQ ID NO: 107098 - DNA, 22 bp, synthetic construct
  misc_feature 1..22: note = chemically synthesized
  source 1..22: mol_type = other DNA
agaactcttaattattcatgta

SEQ ID NO: 107099 - DNA, 22 bp, synthetic construct
  misc_feature 1..22: note = chemically synthesized
  source 1..22: mol_type = other DNA
ttaattattcatgtaagcaccc

SEQ ID NO: 107100 - DNA, 22 bp, synthetic construct
  misc_feature 1..22: note = chemically synthesized
  source 1..22: mol_type = other DNA
aattattcatgtaagcacccat

SEQ ID NO: 107101 - DNA, 22 bp, synthetic construct
  misc_feature 1..22: note = chemically synthesized
  source 1..22: mol_type = other DNA
attattcatgtaagcacccatc

SEQ ID NO: 107102 - DNA, 22 bp, synthetic construct
  misc_feature 1..22: note = chemically synthesized
  source 1..22: mol_type = other DNA
ttcatgtaagcacccatcacat

SEQ ID NO: 107103 - DNA, 22 bp, synthetic construct
  misc_feature 1..22: note = chemically synthesized
  source 1..22: mol_type = other DNA
atgtaagcacccatcacataaa

SEQ ID NO: 107104 - DNA, 22 bp, synthetic construct
  misc_feature 1..22: note = chemically synthesized
  source 1..22: mol_type = other DNA
ctgtttttatttcagagttaac

SEQ ID NO: 107105 - DNA, 22 bp, synthetic construct
  misc_feature 1..22: note = chemically synthesized
  source 1..22: mol_type = other DNA
tttttatttcagagttaacatt

SEQ ID NO: 107106 - DNA, 22 bp, synthetic construct
  misc_feature 1..22: note = chemically synthesized
  source 1..22: mol_type = other DNA
ttatttcagagttaacatttgc

SEQ ID NO: 107107 - DNA, 22 bp, synthetic construct
  misc_feature 1..22: note = chemically synthesized
  source 1..22: mol_type = other DNA
tatttcagagttaacatttgct

SEQ ID NO: 107108 - DNA, 22 bp, synthetic construct
  misc_feature 1..22: note = chemically synthesized
  source 1..22: mol_type = other DNA
atttcagagttaacatttgcta

SEQ ID NO: 107109 - DNA, 22 bp, synthetic construct
  misc_feature 1..22: note = chemically synthesized
  source 1..22: mol_type = other DNA
tttcagagttaacatttgctag

SEQ ID NO: 107110 - DNA, 22 bp, synthetic construct
  misc_feature 1..22: note = chemically synthesized
  source 1..22: mol_type = other DNA
cagagttaacatttgctaggaa

SEQ ID NO: 107111 - DNA, 22 bp, synthetic construct
  misc_feature 1..22: note = chemically synthesized
  source 1..22: mol_type = other DNA
agagttaacatttgctaggaag

SEQ ID NO: 107112 - DNA, 22 bp, synthetic construct
  misc_feature 1..22: note = chemically synthesized
  source 1..22: mol_type = other DNA
acatttgctaggaagttgaact

SEQ ID NO: 107113 - DNA, 22 bp, synthetic construct
  misc_feature 1..22: note = chemically synthesized
  source 1..22: mol_type = other DNA
gctaggaagttgaacttttatg

SEQ ID NO: 107114 - DNA, 22 bp, synthetic construct
  misc_feature 1..22: note = chemically synthesized
  source 1..22: mol_type = other DNA
ctaggaagttgaacttttatgt

SEQ ID NO: 107115 - DNA, 22 bp, synthetic construct
  misc_feature 1..22: note = chemically synthesized
  source 1..22: mol_type = other DNA
ggaagttgaacttttatgttgg

SEQ ID NO: 107116 - DNA, 22 bp, synthetic construct
  misc_feature 1..22: note = chemically synthesized
  source 1..22: mol_type = other DNA
aacttttatgttggaggttgat

SEQ ID NO: 107117 - DNA, 22 bp, synthetic construct
  misc_feature 1..22: note = chemically synthesized
  source 1..22: mol_type = other DNA
ttatgttggaggttgatacacc

SEQ ID NO: 107118 - DNA, 22 bp, synthetic construct
  misc_feature 1..22: note = chemically synthesized
  source 1..22: mol_type = other DNA
tatgttggaggttgatacaccc

SEQ ID NO: 107119 - DNA, 22 bp, synthetic construct
  misc_feature 1..22: note = chemically synthesized
  source 1..22: mol_type = other DNA
atgttggaggttgatacacccg

SEQ ID NO: 107120 - DNA, 22 bp, synthetic construct
  misc_feature 1..22: note = chemically synthesized
  source 1..22: mol_type = other DNA
tgttggaggttgatacacccgg

SEQ ID NO: 107121 - DNA, 22 bp, synthetic construct
  misc_feature 1..22: note = chemically synthesized
  source 1..22: mol_type = other DNA
gaggttgatacacccggcagaa

SEQ ID NO: 107122 - DNA, 22 bp, synthetic construct
  misc_feature 1..22: note = chemically synthesized
  source 1..22: mol_type = other DNA
atacacccggcagaatctgtag

SEQ ID NO: 107123 - DNA, 22 bp, synthetic construct
  misc_feature 1..22: note = chemically synthesized
  source 1..22: mol_type = other DNA
tagatacagatatcttgcctct

SEQ ID NO: 107124 - DNA, 22 bp, synthetic construct
  misc_feature 1..22: note = chemically synthesized
  source 1..22: mol_type = other DNA
gcctcttttctctatttaccct

SEQ ID NO: 107125 - DNA, 22 bp, synthetic construct
  misc_feature 1..22: note = chemically synthesized
  source 1..22: mol_type = other DNA
cctcttttctctatttaccctc

SEQ ID NO: 107126 - DNA, 22 bp, synthetic construct
  misc_feature 1..22: note = chemically synthesized
  source 1..22: mol_type = other DNA
ttttctctatttaccctcttgc

SEQ ID NO: 107127 - DNA, 22 bp, synthetic construct
  misc_feature 1..22: note = chemically synthesized
  source 1..22: mol_type = other DNA
ttctctatttaccctcttgcaa

SEQ ID NO: 107128 - DNA, 22 bp, synthetic construct
  misc_feature 1..22: note = chemically synthesized
  source 1..22: mol_type = other DNA
tctctatttaccctcttgcaac

SEQ ID NO: 107129 - DNA, 22 bp, synthetic construct
  misc_feature 1..22: note = chemically synthesized
  source 1..22: mol_type = other DNA
ctctatttaccctcttgcaaca

SEQ ID NO: 107130 - DNA, 22 bp, synthetic construct
  misc_feature 1..22: note = chemically synthesized
  source 1..22: mol_type = other DNA
tctatttaccctcttgcaacaa

SEQ ID NO: 107131 - DNA, 22 bp, synthetic construct
  misc_feature 1..22: note = chemically synthesized
  source 1..22: mol_type = other DNA
tatttaccctcttgcaacaact

SEQ ID NO: 107132 - DNA, 22 bp, synthetic construct
  misc_feature 1..22: note = chemically synthesized
  source 1..22: mol_type = other DNA
tttaccctcttgcaacaactat

SEQ ID NO: 107133 - DNA, 22 bp, synthetic construct
  misc_feature 1..22: note = chemically synthesized
  source 1..22: mol_type = other DNA
accctcttgcaacaactatgtg

SEQ ID NO: 107134 - DNA, 22 bp, synthetic construct
  misc_feature 1..22: note = chemically synthesized
  source 1..22: mol_type = other DNA
ccctcttgcaacaactatgtgg

SEQ ID NO: 107135 - DNA, 22 bp, synthetic construct
  misc_feature 1..22: note = chemically synthesized
  source 1..22: mol_type = other DNA
ttgcaacaactatgtggtggaa

SEQ ID NO: 107136 - DNA, 22 bp, synthetic construct
  misc_feature 1..22: note = chemically synthesized
  source 1..22: mol_type = other DNA
gcaacaactatgtggtggaaga

SEQ ID NO: 107137 - DNA, 22 bp, synthetic construct
  misc_feature 1..22: note = chemically synthesized
  source 1..22: mol_type = other DNA
caacaactatgtggtggaagag

SEQ ID NO: 107138 - DNA, 22 bp, synthetic construct
  misc_feature 1..22: note = chemically synthesized
  source 1..22: mol_type = other DNA
tgtggtggaagagaatccaaga

SEQ ID NO: 107139 - DNA, 22 bp, synthetic construct
  misc_feature 1..22: note = chemically synthesized
  source 1..22: mol_type = other DNA
gtctttattttcctctcaatta

SEQ ID NO: 107140 - DNA, 22 bp, synthetic construct
  misc_feature 1..22: note = chemically synthesized
  source 1..22: mol_type = other DNA
tattttcctctcaattaccttc

SEQ ID NO: 107141 - DNA, 22 bp, synthetic construct
  misc_feature 1..22: note = chemically synthesized
  source 1..22: mol_type = other DNA
attttcctctcaattaccttca

SEQ ID NO: 107142 - DNA, 22 bp, synthetic construct
  misc_feature 1..22: note = chemically synthesized
  source 1..22: mol_type = other DNA
ttttcctctcaattaccttcat

SEQ ID NO: 107143 - DNA, 22 bp, synthetic construct
  misc_feature 1..22: note = chemically synthesized
  source 1..22: mol_type = other DNA
tcctctcaattaccttcattcc

SEQ ID NO: 107144 - DNA, 22 bp, synthetic construct
  misc_feature 1..22: note = chemically synthesized
  source 1..22: mol_type = other DNA
cctctcaattaccttcattcca

SEQ ID NO: 107145 - DNA, 22 bp, synthetic construct
  misc_feature 1..22: note = chemically synthesized
  source 1..22: mol_type = other DNA
ctctcaattaccttcattccat

SEQ ID NO: 107146 - DNA, 22 bp, synthetic construct
  misc_feature 1..22: note = chemically synthesized
  source 1..22: mol_type = other DNA
tcaattaccttcattccattct

SEQ ID NO: 107147 - DNA, 22 bp, synthetic construct
  misc_feature 1..22: note = chemically synthesized
  source 1..22: mol_type = other DNA
aattaccttcattccattctcc

SEQ ID NO: 107148 - DNA, 22 bp, synthetic construct
  misc_feature 1..22: note = chemically synthesized
  source 1..22: mol_type = other DNA
ccttcattccattctcccatag

SEQ ID NO: 107149 - DNA, 22 bp, synthetic construct
  misc_feature 1..22: note = chemically synthesized
  source 1..22: mol_type = other DNA
cattccattctcccatagtcac

SEQ ID NO: 107150 - DNA, 22 bp, synthetic construct
  misc_feature 1..22: note = chemically synthesized
  source 1..22: mol_type = other DNA
attccattctcccatagtcact

SEQ ID NO: 107151 - DNA, 22 bp, synthetic construct
  misc_feature 1..22: note = chemically synthesized
  source 1..22: mol_type = other DNA
cattctcccatagtcactagag

SEQ ID NO: 107152 - DNA, 22 bp, synthetic construct
  misc_feature 1..22: note = chemically synthesized
  source 1..22: mol_type = other DNA
tcccatagtcactagagcctga

SEQ ID NO: 107153 - DNA, 22 bp, synthetic construct
  misc_feature 1..22: note = chemically synthesized
  source 1..22: mol_type = other DNA
ccatagtcactagagcctgacc

SEQ ID NO: 107154 - DNA, 22 bp, synthetic construct
  misc_feature 1..22: note = chemically synthesized
  source 1..22: mol_type = other DNA
gagcctgacctggggtatcaga

SEQ ID NO: 107155 - DNA, 22 bp, synthetic construct
  misc_feature 1..22: note = chemically synthesized
  source 1..22: mol_type = other DNA
acctggggtatcagaaattaag

SEQ ID NO: 107156 - DNA, 22 bp, synthetic construct
  misc_feature 1..22: note = chemically synthesized
  source 1..22: mol_type = other DNA
gggtatcagaaattaaggggag

SEQ ID NO: 107157 - DNA, 22 bp, synthetic construct
  misc_feature 1..22: note = chemically synthesized
  source 1..22: mol_type = other DNA
aggggagaggtaattgctgagt

SEQ ID NO: 107158 - DNA, 22 bp, synthetic construct
  misc_feature 1..22: note = chemically synthesized
  source 1..22: mol_type = other DNA
ctgagtcctggtgtagaaattg

SEQ ID NO: 107159 - DNA, 22 bp, synthetic construct
  misc_feature 1..22: note = chemically synthesized
  source 1..22: mol_type = other DNA
agtcctggtgtagaaattggtt

SEQ ID NO: 107160 - DNA, 22 bp, synthetic construct
  misc_feature 1..22: note = chemically synthesized
  source 1..22: mol_type = other DNA
gtgtagaaattggtttaaatgg

SEQ ID NO: 107161 - DNA, 22 bp, synthetic construct
  misc_feature 1..22: note = chemically synthesized
  source 1..22: mol_type = other DNA
gtttaaatggtatctctgaaga

SEQ ID NO: 107162 - DNA, 22 bp, synthetic construct
  misc_feature 1..22: note = chemically synthesized
  source 1..22: mol_type = other DNA
aaatggtatctctgaagactgc

SEQ ID NO: 107163 - DNA, 22 bp, synthetic construct
  misc_feature 1..22: note = chemically synthesized
  source 1..22: mol_type = other DNA
aatggtatctctgaagactgct

SEQ ID NO: 107164 - DNA, 22 bp, synthetic construct
  misc_feature 1..22: note = chemically synthesized
  source 1..22: mol_type = other DNA
tgaagactgctaacagggttaa

SEQ ID NO: 107165 - DNA, 22 bp, synthetic construct
  misc_feature 1..22: note = chemically synthesized
  source 1..22: mol_type = other DNA
aagactgctaacagggttaatt

SEQ ID NO: 107166 - DNA, 22 bp, synthetic construct
  misc_feature 1..22: note = chemically synthesized
  source 1..22: mol_type = other DNA
ctaacagggttaatttgtgagg

SEQ ID NO: 107167 - DNA, 22 bp, synthetic construct
  misc_feature 1..22: note = chemically synthesized
  source 1..22: mol_type = other DNA
acagggttaatttgtgaggtta

SEQ ID NO: 107168 - DNA, 22 bp, synthetic construct
  misc_feature 1..22: note = chemically synthesized
  source 1..22: mol_type = other DNA
atttgtgaggttatttgtattc

SEQ ID NO: 107169 - DNA, 22 bp, synthetic construct
  misc_feature 1..22: note = chemically synthesized
  source 1..22: mol_type = other DNA
gtgaggttatttgtattcaaaa

SEQ ID NO: 107170 - DNA, 22 bp, synthetic construct
  misc_feature 1..22: note = chemically synthesized
  source 1..22: mol_type = other DNA
tgaggttatttgtattcaaaat

SEQ ID NO: 107171 - DNA, 22 bp, synthetic construct
  misc_feature 1..22: note = chemically synthesized
  source 1..22: mol_type = other DNA
tttgtattcaaaattgttcccc

SEQ ID NO: 107172 - DNA, 22 bp, synthetic construct
  misc_feature 1..22: note = chemically synthesized
  source 1..22: mol_type = other DNA
gtattcaaaattgttccccagt

SEQ ID NO: 107173 - DNA, 22 bp, synthetic construct
  misc_feature 1..22: note = chemically synthesized
  source 1..22: mol_type = other DNA
tattcaaaattgttccccagta

SEQ ID NO: 107174 - DNA, 22 bp, synthetic construct
  misc_feature 1..22: note = chemically synthesized
  source 1..22: mol_type = other DNA
aaaattgttccccagtatctgt

SEQ ID NO: 107175 - DNA, 22 bp, synthetic construct
  misc_feature 1..22: note = chemically synthesized
  source 1..22: mol_type = other DNA
ttccccagtatctgtcttgatg

SEQ ID NO: 107176 - DNA, 22 bp, synthetic construct
  misc_feature 1..22: note = chemically synthesized
  source 1..22: mol_type = other DNA
cccagtatctgtcttgatgctg

SEQ ID NO: 107177 - DNA, 22 bp, synthetic construct
  misc_feature 1..22: note = chemically synthesized
  source 1..22: mol_type = other DNA
tcttgatgctggataattaggc

SEQ ID NO: 107178 - DNA, 22 bp, synthetic construct
  misc_feature 1..22: note = chemically synthesized
  source 1..22: mol_type = other DNA
gatgctggataattaggctact

SEQ ID NO: 107179 - DNA, 22 bp, synthetic construct
  misc_feature 1..22: note = chemically synthesized
  source 1..22: mol_type = other DNA
atgctggataattaggctactg

SEQ ID NO: 107180 - DNA, 22 bp, synthetic construct
  misc_feature 1..22: note = chemically synthesized
  source 1..22: mol_type = other DNA
gataattaggctactgggatat

SEQ ID NO: 107181 - DNA, 22 bp, synthetic construct
  misc_feature 1..22: note = chemically synthesized
  source 1..22: mol_type = other DNA
ggctactgggatattttttttc

SEQ ID NO: 107182 - DNA, 22 bp, synthetic construct
  misc_feature 1..22: note = chemically synthesized
  source 1..22: mol_type = other DNA
ctgggatattttttttcaagcc

SEQ ID NO: 107183 - DNA, 22 bp, synthetic construct
  misc_feature 1..22: note = chemically synthesized
  source 1..22: mol_type = other DNA
ggatattttttttcaagcctcc

SEQ ID NO: 107184 - DNA, 22 bp, synthetic construct
  misc_feature 1..22: note = chemically synthesized
  source 1..22: mol_type = other DNA
tttttcaagcctcctttggaga

SEQ ID NO: 107185 - DNA, 22 bp, synthetic construct
  misc_feature 1..22: note = chemically synthesized
  source 1..22: mol_type = other DNA
ttttcaagcctcctttggagaa

SEQ ID NO: 107186 - DNA, 22 bp, synthetic construct
  misc_feature 1..22: note = chemically synthesized
  source 1..22: mol_type = other DNA
tttcaagcctcctttggagaag

SEQ ID NO: 107187 - DNA, 22 bp, synthetic construct
  misc_feature 1..22: note = chemically synthesized
  source 1..22: mol_type = other DNA
ttcaagcctcctttggagaagg

SEQ ID NO: 107188 - DNA, 22 bp, synthetic construct
  misc_feature 1..22: note = chemically synthesized
  source 1..22: mol_type = other DNA
tcaagcctcctttggagaagga

SEQ ID NO: 107189 - DNA, 22 bp, synthetic construct
  misc_feature 1..22: note = chemically synthesized
  source 1..22: mol_type = other DNA
caagcctcctttggagaaggaa

SEQ ID NO: 107190 - DNA, 22 bp, synthetic construct
  misc_feature 1..22: note = chemically synthesized
  source 1..22: mol_type = other DNA
aagcctcctttggagaaggaag

SEQ ID NO: 107191 - DNA, 22 bp, synthetic construct
  misc_feature 1..22: note = chemically synthesized
  source 1..22: mol_type = other DNA
ctttggagaaggaagtgggctc

SEQ ID NO: 107192 - DNA, 22 bp, synthetic construct
  misc_feature 1..22: note = chemically synthesized
  source 1..22: mol_type = other DNA
tggagaaggaagtgggctccag

SEQ ID NO: 107193 - DNA, 22 bp, synthetic construct
  misc_feature 1..22: note = chemically synthesized
  source 1..22: mol_type = other DNA
ggagaaggaagtgggctccaga

SEQ ID NO: 107194 - DNA, 22 bp, synthetic construct
  misc_feature 1..22: note = chemically synthesized
  source 1..22: mol_type = other DNA
gagaaggaagtgggctccagaa

SEQ ID NO: 107195 - DNA, 22 bp, synthetic construct
  misc_feature 1..22: note = chemically synthesized
  source 1..22: mol_type = other DNA
cagaactgtgttcttaaagccc

SEQ ID NO: 107196 - DNA, 22 bp, synthetic construct
  misc_feature 1..22: note = chemically synthesized
  source 1..22: mol_type = other DNA
tgttcttaaagccccatatttt

SEQ ID NO: 107197 - DNA, 22 bp, synthetic construct
  misc_feature 1..22: note = chemically synthesized
  source 1..22: mol_type = other DNA
ttaaagccccatattttctttg

SEQ ID NO: 107198 - DNA, 22 bp, synthetic construct
  misc_feature 1..22: note = chemically synthesized
  source 1..22: mol_type = other DNA
aaagccccatattttctttgca

SEQ ID NO: 107199 - DNA, 22 bp, synthetic construct
  misc_feature 1..22: note = chemically synthesized
  source 1..22: mol_type = other DNA
aagccccatattttctttgcaa

SEQ ID NO: 107200 - DNA, 22 bp, synthetic construct
  misc_feature 1..22: note = chemically synthesized
  source 1..22: mol_type = other DNA
tctttgcaaaaagaaaacagaa

SEQ ID NO: 107201 - DNA, 22 bp, synthetic construct
  misc_feature 1..22: note = chemically synthesized
  source 1..22: mol_type = other DNA
ctttgcaaaaagaaaacagaat

SEQ ID NO: 107202 - DNA, 22 bp, synthetic construct
  misc_feature 1..22: note = chemically synthesized
  source 1..22: mol_type = other DNA
tttgcaaaaagaaaacagaatt

SEQ ID NO: 107203 - DNA, 22 bp, synthetic construct
  misc_feature 1..22: note = chemically synthesized
  source 1..22: mol_type = other DNA
tgcaaaaagaaaacagaattgt

SEQ ID NO: 107204 - DNA, 22 bp, synthetic construct
  misc_feature 1..22: note = chemically synthesized
  source 1..22: mol_type = other DNA
gcaaaaagaaaacagaattgta

SEQ ID NO: 107205 - DNA, 22 bp, synthetic construct
  misc_feature 1..22: note = chemically synthesized
  source 1..22: mol_type = other DNA
caaaaagaaaacagaattgtag

SEQ ID NO: 107206 - DNA, 22 bp, synthetic construct
  misc_feature 1..22: note = chemically synthesized
  source 1..22: mol_type = other DNA
tagcttcatccagcacatggaa

SEQ ID NO: 107207 - DNA, 22 bp, synthetic construct
  misc_feature 1..22: note = chemically synthesized
  source 1..22: mol_type = other DNA
catccagcacatggaagtcatg

SEQ ID NO: 107208 - DNA, 22 bp, synthetic construct
  misc_feature 1..22: note = chemically synthesized
  source 1..22: mol_type = other DNA
atccagcacatggaagtcatgc

SEQ ID NO: 107209 - DNA, 22 bp, synthetic construct
  misc_feature 1..22: note = chemically synthesized
  source 1..22: mol_type = other DNA
tctaactacctttgccttgtat

SEQ ID NO: 107210 - DNA, 22 bp, synthetic construct
  misc_feature 1..22: note = chemically synthesized
  source 1..22: mol_type = other DNA
actacctttgccttgtatgatt

SEQ ID NO: 107211 - DNA, 22 bp, synthetic construct
  misc_feature 1..22: note = chemically synthesized
  source 1..22: mol_type = other DNA
cctttgccttgtatgattcccc

SEQ ID NO: 107212 - DNA, 22 bp, synthetic construct
  misc_feature 1..22: note = chemically synthesized
  source 1..22: mol_type = other DNA
tgccttgtatgattccccacct

SEQ ID NO: 107213 - DNA, 22 bp, synthetic construct
  misc_feature 1..22: note = chemically synthesized
  source 1..22: mol_type = other DNA
gccttgtatgattccccacctc

SEQ ID NO: 107214 - DNA, 22 bp, synthetic construct
  misc_feature 1..22: note = chemically synthesized
  source 1..22: mol_type = other DNA
ccttgtatgattccccacctca

SEQ ID NO: 107215 - DNA, 22 bp, synthetic construct
  misc_feature 1..22: note = chemically synthesized
  source 1..22: mol_type = other DNA
gtatgattccccacctcaaaaa

SEQ ID NO: 107216 - DNA, 22 bp, synthetic construct
  misc_feature 1..22: note = chemically synthesized
  source 1..22: mol_type = other DNA
tatgattccccacctcaaaaag

SEQ ID NO: 107217 - DNA, 22 bp, synthetic construct
  misc_feature 1..22: note = chemically synthesized
  source 1..22: mol_type = other DNA
cccacctcaaaaagaagatacc

SEQ ID NO: 107218 - DNA, 22 bp, synthetic construct
  misc_feature 1..22: note = chemically synthesized
  source 1..22: mol_type = other DNA
aaaaagaagataccgtgaagcc

SEQ ID NO: 107219 - DNA, 22 bp, synthetic construct
  misc_feature 1..22: note = chemically synthesized
  source 1..22: mol_type = other DNA
cttttgttattccttaaccctg

SEQ ID NO: 107220 - DNA, 22 bp, synthetic construct
  misc_feature 1..22: note = chemically synthesized
  source 1..22: mol_type = other DNA
ttgttattccttaaccctgtag

SEQ ID NO: 107221 - DNA, 22 bp, synthetic construct
  misc_feature 1..22: note = chemically synthesized
  source 1..22: mol_type = other DNA
tgttattccttaaccctgtagc

SEQ ID NO: 107222 - DNA, 22 bp, synthetic construct
  misc_feature 1..22: note = chemically synthesized
  source 1..22: mol_type = other DNA
gttattccttaaccctgtagcc

SEQ ID NO: 107223 - DNA, 22 bp, synthetic construct
  misc_feature 1..22: note = chemically synthesized
  source 1..22: mol_type = other DNA
ttattccttaaccctgtagcca

SEQ ID NO: 107224 - DNA, 22 bp, synthetic construct
  misc_feature 1..22: note = chemically synthesized
  source 1..22: mol_type = other DNA
ttccttaaccctgtagccaata

SEQ ID NO: 107225 - DNA, 22 bp, synthetic construct
  misc_feature 1..22: note = chemically synthesized
  source 1..22: mol_type = other DNA
cttaaccctgtagccaataagc

SEQ ID NO: 107226 - DNA, 22 bp, synthetic construct
  misc_feature 1..22: note = chemically synthesized
  source 1..22: mol_type = other DNA
aaccctgtagccaataagctca

SEQ ID NO: 107227 - DNA, 22 bp, synthetic construct
  misc_feature 1..22: note = chemically synthesized
  source 1..22: mol_type = other DNA
accctgtagccaataagctcac

SEQ ID NO: 107228 - DNA, 22 bp, synthetic construct
  misc_feature 1..22: note = chemically synthesized
  source 1..22: mol_type = other DNA
tagccaataagctcactcaact

SEQ ID NO: 107229 - DNA, 22 bp, synthetic construct
  misc_feature 1..22: note = chemically synthesized
  source 1..22: mol_type = other DNA
actcaacttagacaaagcttaa

SEQ ID NO: 107230 - DNA, 22 bp, synthetic construct
  misc_feature 1..22: note = chemically synthesized
  source 1..22: mol_type = other DNA
aacttagacaaagcttaataat

SEQ ID NO: 107231 - DNA, 22 bp, synthetic construct
  misc_feature 1..22: note = chemically synthesized
  source 1..22: mol_type = other DNA
agacaaagcttaataatccctc

SEQ ID NO: 107232 - DNA, 22 bp, synthetic construct
  misc_feature 1..22: note = chemically synthesized
  source 1..22: mol_type = other DNA
gacaaagcttaataatccctca

SEQ ID NO: 107233 - DNA, 22 bp, synthetic construct
  misc_feature 1..22: note = chemically synthesized
  source 1..22: mol_type = other DNA
aataatccctcacacttaatct

SEQ ID NO: 107234 - DNA, 22 bp, synthetic construct
  misc_feature 1..22: note = chemically synthesized
  source 1..22: mol_type = other DNA
ataatccctcacacttaatctt

SEQ ID NO: 107235 - DNA, 22 bp, synthetic construct
  misc_feature 1..22: note = chemically synthesized
  source 1..22: mol_type = other DNA
acacttaatcttttcttggttt

SEQ ID NO: 107236 - DNA, 22 bp, synthetic construct
  misc_feature 1..22: note = chemically synthesized
  source 1..22: mol_type = other DNA
aatcttttcttggtttcaaata

SEQ ID NO: 107237 - DNA, 22 bp, synthetic construct
  misc_feature 1..22: note = chemically synthesized
  source 1..22: mol_type = other DNA
atcttttcttggtttcaaataa

SEQ ID NO: 107238 - DNA, 22 bp, synthetic construct
  misc_feature 1..22: note = chemically synthesized
  source 1..22: mol_type = other DNA
ttcttggtttcaaataagattg

SEQ ID NO: 107239 - DNA, 22 bp, synthetic construct
  misc_feature 1..22: note = chemically synthesized
  source 1..22: mol_type = other DNA
tcttggtttcaaataagattgt

SEQ ID NO: 107240 - DNA, 22 bp, synthetic construct
  misc_feature 1..22: note = chemically synthesized
  source 1..22: mol_type = other DNA
cttggtttcaaataagattgtt

SEQ ID NO: 107241 - DNA, 22 bp, synthetic construct
  misc_feature 1..22: note = chemically synthesized
  source 1..22: mol_type = other DNA
ttggtttcaaataagattgttt

SEQ ID NO: 107242 - DNA, 22 bp, synthetic construct
  misc_feature 1..22: note = chemically synthesized
  source 1..22: mol_type = other DNA
ggtttcaaataagattgtttgt

SEQ ID NO: 107243 - DNA, 22 bp, synthetic construct
  misc_feature 1..22: note = chemically synthesized
  source 1..22: mol_type = other DNA
gtttcaaataagattgtttgtt

SEQ ID NO: 107244 - DNA, 22 bp, synthetic construct
  misc_feature 1..22: note = chemically synthesized
  source 1..22: mol_type = other DNA
caaataagattgtttgttatat

SEQ ID NO: 107245 - DNA, 22 bp, synthetic construct
  misc_feature 1..22: note = chemically synthesized
  source 1..22: mol_type = other DNA
aaataagattgtttgttatata

SEQ ID NO: 107246 - DNA, 22 bp, synthetic construct
  misc_feature 1..22: note = chemically synthesized
  source 1..22: mol_type = other DNA
tttgttatatatactcacaaat

SEQ ID NO: 107247 - DNA, 22 bp, synthetic construct
  misc_feature 1..22: note = chemically synthesized
  source 1..22: mol_type = other DNA
gttatatatactcacaaatgag

SEQ ID NO: 107248 - DNA, 22 bp, synthetic construct
  misc_feature 1..22: note = chemically synthesized
  source 1..22: mol_type = other DNA
ttatatatactcacaaatgagt

SEQ ID NO: 107249 - DNA, 22 bp, synthetic construct
  misc_feature 1..22: note = chemically synthesized
  source 1..22: mol_type = other DNA
tatatactcacaaatgagtgct

SEQ ID NO: 107250 - DNA, 22 bp, synthetic construct
  misc_feature 1..22: note = chemically synthesized
  source 1..22: mol_type = other DNA
acaaatgagtgctgctgataag

SEQ ID NO: 107251 - DNA, 22 bp, synthetic construct
  misc_feature 1..22: note = chemically synthesized
  source 1..22: mol_type = other DNA
ctgataagttctttcaaacagt

SEQ ID NO: 107252 - DNA, 22 bp, synthetic construct
  misc_feature 1..22: note = chemically synthesized
  source 1..22: mol_type = other DNA
ataagttctttcaaacagtaag

SEQ ID NO: 107253 - DNA, 22 bp, synthetic construct
  misc_feature 1..22: note = chemically synthesized
  source 1..22: mol_type = other DNA
tttcaaacagtaagcttgtttt

SEQ ID NO: 107254 - DNA, 22 bp, synthetic construct
  misc_feature 1..22: note = chemically synthesized
  source 1..22: mol_type = other DNA
tcaaacagtaagcttgttttct

SEQ ID NO: 107255 - DNA, 22 bp, synthetic construct
  misc_feature 1..22: note = chemically synthesized
  source 1..22: mol_type = other DNA
caaacagtaagcttgttttctg

SEQ ID NO: 107256 - DNA, 22 bp, synthetic construct
  misc_feature 1..22: note = chemically synthesized
  source 1..22: mol_type = other DNA
aaacagtaagcttgttttctgt

SEQ ID NO: 107257 - DNA, 22 bp, synthetic construct
  misc_feature 1..22: note = chemically synthesized
  source 1..22: mol_type = other DNA
gttttctgtctcttggtaagtc

SEQ ID NO: 107258 - DNA, 22 bp, synthetic construct
  misc_feature 1..22: note = chemically synthesized
  source 1..22: mol_type = other DNA
ttttctgtctcttggtaagtct

SEQ ID NO: 107259 - DNA, 22 bp, synthetic construct
  misc_feature 1..22: note = chemically synthesized
  source 1..22: mol_type = other DNA
tctgtctcttggtaagtcttgc

SEQ ID NO: 107260 - DNA, 22 bp, synthetic construct
  misc_feature 1..22: note = chemically synthesized
  source 1..22: mol_type = other DNA
ctgtctcttggtaagtcttgcc

SEQ ID NO: 107261 - DNA, 22 bp, synthetic construct
  misc_feature 1..22: note = chemically synthesized
  source 1..22: mol_type = other DNA
tgtctcttggtaagtcttgccc

SEQ ID NO: 107262 - DNA, 22 bp, synthetic construct
  misc_feature 1..22: note = chemically synthesized
  source 1..22: mol_type = other DNA
tctcttggtaagtcttgcccaa

SEQ ID NO: 107263 - DNA, 22 bp, synthetic construct
  misc_feature 1..22: note = chemically synthesized
  source 1..22: mol_type = other DNA
ttggtaagtcttgcccaagaat

SEQ ID NO: 107264 - DNA, 22 bp, synthetic construct
  misc_feature 1..22: note = chemically synthesized
  source 1..22: mol_type = other DNA
ggtaagtcttgcccaagaatca

SEQ ID NO: 107265 - DNA, 22 bp, synthetic construct
  misc_feature 1..22: note = chemically synthesized
  source 1..22: mol_type = other DNA
gtaagtcttgcccaagaatcag

SEQ ID NO: 107266 - DNA, 22 bp, synthetic construct
  misc_feature 1..22: note = chemically synthesized
  source 1..22: mol_type = other DNA
gcccaagaatcagagttactgc

SEQ ID NO: 107267 - DNA, 22 bp, synthetic construct
  misc_feature 1..22: note = chemically synthesized
  source 1..22: mol_type = other DNA
cccaagaatcagagttactgct

SEQ ID NO: 107268 - DNA, 22 bp, synthetic construct
  misc_feature 1..22: note = chemically synthesized
  source 1..22: mol_type = other DNA
ctgcttctggagcaatataaat

SEQ ID NO: 107269 - DNA, 22 bp, synthetic construct
  misc_feature 1..22: note = chemically synthesized
  source 1..22: mol_type = other DNA
cttctggagcaatataaatcaa

SEQ ID NO: 107270 - DNA, 22 bp, synthetic construct
  misc_feature 1..22: note = chemically synthesized
  source 1..22: mol_type = other DNA
ctggagcaatataaatcaagtt

SEQ ID NO: 107271 - DNA, 22 bp, synthetic construct
  misc_feature 1..22: note = chemically synthesized
  source 1..22: mol_type = other DNA
tggagcaatataaatcaagttt

SEQ ID NO: 107272 - DNA, 22 bp, synthetic construct
  misc_feature 1..22: note = chemically synthesized
  source 1..22: mol_type = other DNA
gagcaatataaatcaagtttaa

SEQ ID NO: 107273 - DNA, 22 bp, synthetic construct
  misc_feature 1..22: note = chemically synthesized
  source 1..22: mol_type = other DNA
aaaaaattttatttaagtgtcc

SEQ ID NO: 107274 - DNA, 22 bp, synthetic construct
  misc_feature 1..22: note = chemically synthesized
  source 1..22: mol_type = other DNA
aaaaattttatttaagtgtcct

SEQ ID NO: 107275 - DNA, 22 bp, synthetic construct
  misc_feature 1..22: note = chemically synthesized
  source 1..22: mol_type = other DNA
tatttaagtgtcctgtagtaat

SEQ ID NO: 107276 - DNA, 22 bp, synthetic construct
  misc_feature 1..22: note = chemically synthesized
  source 1..22: mol_type = other DNA
atttaagtgtcctgtagtaatg

SEQ ID NO: 107277 - DNA, 22 bp, synthetic construct
  misc_feature 1..22: note = chemically synthesized
  source 1..22: mol_type = other DNA
tttaagtgtcctgtagtaatgt

SEQ ID NO: 107278 - DNA, 22 bp, synthetic construct
  misc_feature 1..22: note = chemically synthesized
  source 1..22: mol_type = other DNA
aagtgtcctgtagtaatgttaa

SEQ ID NO: 107279 - DNA, 22 bp, synthetic construct
  misc_feature 1..22: note = chemically synthesized
  source 1..22: mol_type = other DNA
agtgtcctgtagtaatgttaaa

SEQ ID NO: 107280 - DNA, 22 bp, synthetic construct
  misc_feature 1..22: note = chemically synthesized
  source 1..22: mol_type = other DNA
tagtaatgttaaaaaggggaca

SEQ ID NO: 107281 - DNA, 22 bp, synthetic construct
  misc_feature 1..22: note = chemically synthesized
  source 1..22: mol_type = other DNA
aaaaggggacatggtggaggta

SEQ ID NO: 107282 - DNA, 22 bp, synthetic construct
  misc_feature 1..22: note = chemically synthesized
  source 1..22: mol_type = other DNA
tttaatccctggctttgtctga

SEQ ID NO: 107283 - DNA, 22 bp, synthetic construct
  misc_feature 1..22: note = chemically synthesized
  source 1..22: mol_type = other DNA
taatccctggctttgtctgaca

SEQ ID NO: 107284 - DNA, 22 bp, synthetic construct
  misc_feature 1..22: note = chemically synthesized
  source 1..22: mol_type = other DNA
aatccctggctttgtctgacaa

SEQ ID NO: 107285 - DNA, 22 bp, synthetic construct
  misc_feature 1..22: note = chemically synthesized
  source 1..22: mol_type = other DNA
atccctggctttgtctgacaat

SEQ ID NO: 107286 - DNA, 22 bp, synthetic construct
  misc_feature 1..22: note = chemically synthesized
  source 1..22: mol_type = other DNA
gctttgtctgacaatttgtact

SEQ ID NO: 107287 - DNA, 22 bp, synthetic construct
  misc_feature 1..22: note = chemically synthesized
  source 1..22: mol_type = other DNA
tgtctgacaatttgtacttgaa

SEQ ID NO: 107288 - DNA, 22 bp, synthetic construct
  misc_feature 1..22: note = chemically synthesized
  source 1..22: mol_type = other DNA
gtctgacaatttgtacttgaat

SEQ ID NO: 107289 - DNA, 22 bp, synthetic construct
  misc_feature 1..22: note = chemically synthesized
  source 1..22: mol_type = other DNA
tctgacaatttgtacttgaata

SEQ ID NO: 107290 - DNA, 22 bp, synthetic construct
  misc_feature 1..22: note = chemically synthesized
  source 1..22: mol_type = other DNA
acaatttgtacttgaatacaat

SEQ ID NO: 107291 - DNA, 22 bp, synthetic construct
  misc_feature 1..22: note = chemically synthesized
  source 1..22: mol_type = other DNA
gtacttgaatacaatcatctca

SEQ ID NO: 107292 - DNA, 22 bp, synthetic construct
  misc_feature 1..22: note = chemically synthesized
  source 1..22: mol_type = other DNA
tacttgaatacaatcatctcat

SEQ ID NO: 107293 - DNA, 22 bp, synthetic construct
  misc_feature 1..22: note = chemically synthesized
  source 1..22: mol_type = other DNA
gaatacaatcatctcatagtct

SEQ ID NO: 107294 - DNA, 22 bp, synthetic construct
  misc_feature 1..22: note = chemically synthesized
  source 1..22: mol_type = other DNA
aatacaatcatctcatagtctg

SEQ ID NO: 107295 - DNA, 22 bp, synthetic construct
  misc_feature 1..22: note = chemically synthesized
  source 1..22: mol_type = other DNA
atagtctgtcagagaaataagg

SEQ ID NO: 107296 - DNA, 22 bp, synthetic construct
  misc_feature 1..22: note = chemically synthesized
  source 1..22: mol_type = other DNA
tcagagaaataaggatctgaga

SEQ ID NO: 107297 - DNA, 22 bp, synthetic construct
  misc_feature 1..22: note = chemically synthesized
  source 1..22: mol_type = other DNA
agaatttctattgtctcatcag

SEQ ID NO: 107298 - DNA, 22 bp, synthetic construct
  misc_feature 1..22: note = chemically synthesized
  source 1..22: mol_type = other DNA
ctattgtctcatcagtcttaaa

SEQ ID NO: 107299 - DNA, 22 bp, synthetic construct
  misc_feature 1..22: note = chemically synthesized
  source 1..22: mol_type = other DNA
tattgtctcatcagtcttaaat

SEQ ID NO: 107300 - DNA, 22 bp, synthetic construct
  misc_feature 1..22: note = chemically synthesized
  source 1..22: mol_type = other DNA
ttgtctcatcagtcttaaatcc

SEQ ID NO: 107301 - DNA, 22 bp, synthetic construct
  misc_feature 1..22: note = chemically synthesized
  source 1..22: mol_type = other DNA
tctcatcagtcttaaatcctaa

SEQ ID NO: 107302 - DNA, 22 bp, synthetic construct
  misc_feature 1..22: note = chemically synthesized
  source 1..22: mol_type = other DNA
atcagtcttaaatcctaaattt

SEQ ID NO: 107303 - DNA, 22 bp, synthetic construct
  misc_feature 1..22: note = chemically synthesized
  source 1..22: mol_type = other DNA
aaatcctaaatttatcctggaa

SEQ ID NO: 107304 - DNA, 22 bp, synthetic construct
  misc_feature 1..22: note = chemically synthesized
  source 1..22: mol_type = other DNA
aatcctaaatttatcctggaac

SEQ ID NO: 107305 - DNA, 22 bp, synthetic construct
  misc_feature 1..22: note = chemically synthesized
  source 1..22: mol_type = other DNA
aatttatcctggaacttagccc

SEQ ID NO: 107306 - DNA, 22 bp, synthetic construct
  misc_feature 1..22: note = chemically synthesized
  source 1..22: mol_type = other DNA
atcctggaacttagcccaacta

SEQ ID NO: 107307 - DNA, 22 bp, synthetic construct
  misc_feature 1..22: note = chemically synthesized
  source 1..22: mol_type = other DNA
tcctggaacttagcccaactat

SEQ ID NO: 107308 - DNA, 22 bp, synthetic construct
  misc_feature 1..22: note = chemically synthesized
  source 1..22: mol_type = other DNA
gaacttagcccaactatgagat

SEQ ID NO: 107309 - DNA, 22 bp, synthetic construct
  misc_feature 1..22: note = chemically synthesized
  source 1..22: mol_type = other DNA
agcccaactatgagattttaaa

SEQ ID NO: 107310 - DNA, 22 bp, synthetic construct
  misc_feature 1..22: note = chemically synthesized
  source 1..22: mol_type = other DNA
gcccaactatgagattttaaaa

SEQ ID NO: 107311 - DNA, 22 bp, synthetic construct
  misc_feature 1..22: note = chemically synthesized
  source 1..22: mol_type = other DNA
tgagattttaaaatgagtatgg

SEQ ID NO: 107312 - DNA, 22 bp, synthetic construct
  misc_feature 1..22: note = chemically synthesized
  source 1..22: mol_type = other DNA
taaaatgagtatgggtgcaatg

SEQ ID NO: 107313 - DNA, 22 bp, synthetic construct
  misc_feature 1..22: note = chemically synthesized
  source 1..22: mol_type = other DNA
aaaatgagtatgggtgcaatgt

SEQ ID NO: 107314 - DNA, 22 bp, synthetic construct
  misc_feature 1..22: note = chemically synthesized
  source 1..22: mol_type = other DNA
aaatgagtatgggtgcaatgtg

SEQ ID NO: 107315 - DNA, 22 bp, synthetic construct
  misc_feature 1..22: note = chemically synthesized
  source 1..22: mol_type = other DNA
tggtgcctgacatttcacatca

SEQ ID NO: 107316 - DNA, 22 bp, synthetic construct
  misc_feature 1..22: note = chemically synthesized
  source 1..22: mol_type = other DNA
ggtgcctgacatttcacatcag

SEQ ID NO: 107317 - DNA, 22 bp, synthetic construct
  misc_feature 1..22: note = chemically synthesized
  source 1..22: mol_type = other DNA
gtgcctgacatttcacatcagt

SEQ ID NO: 107318 - DNA, 22 bp, synthetic construct
  misc_feature 1..22: note = chemically synthesized
  source 1..22: mol_type = other DNA
acatttcacatcagttaagttc

SEQ ID NO: 107319 - DNA, 22 bp, synthetic construct
  misc_feature 1..22: note = chemically synthesized
  source 1..22: mol_type = other DNA
cacatcagttaagttcctcctg

SEQ ID NO: 107320 - DNA, 22 bp, synthetic construct
  misc_feature 1..22: note = chemically synthesized
  source 1..22: mol_type = other DNA
acatcagttaagttcctcctga

SEQ ID NO: 107321 - DNA, 22 bp, synthetic construct
  misc_feature 1..22: note = chemically synthesized
  source 1..22: mol_type = other DNA
agttcctcctgaactgcattct

SEQ ID NO: 107322 - DNA, 22 bp, synthetic construct
  misc_feature 1..22: note = chemically synthesized
  source 1..22: mol_type = other DNA
ctcctgaactgcattctgctca

SEQ ID NO: 107323 - DNA, 22 bp, synthetic construct
  misc_feature 1..22: note = chemically synthesized
  source 1..22: mol_type = other DNA
ctgaactgcattctgctcatag

SEQ ID NO: 107324 - DNA, 22 bp, synthetic construct
  misc_feature 1..22: note = chemically synthesized
  source 1..22: mol_type = other DNA
aactgcattctgctcataggtc

SEQ ID NO: 107325 - DNA, 22 bp, synthetic construct
  misc_feature 1..22: note = chemically synthesized
  source 1..22: mol_type = other DNA
cattctgctcataggtcttcct

SEQ ID NO: 107326 - DNA, 22 bp, synthetic construct
  misc_feature 1..22: note = chemically synthesized
  source 1..22: mol_type = other DNA
tgctcataggtcttcctaaatg

SEQ ID NO: 107327 - DNA, 22 bp, synthetic construct
  misc_feature 1..22: note = chemically synthesized
  source 1..22: mol_type = other DNA
ctcataggtcttcctaaatgta

SEQ ID NO: 107328 - DNA, 22 bp, synthetic construct
  misc_feature 1..22: note = chemically synthesized
  source 1..22: mol_type = other DNA
ataggtcttcctaaatgtaagc

SEQ ID NO: 107329 - DNA, 22 bp, synthetic construct
  misc_feature 1..22: note = chemically synthesized
  source 1..22: mol_type = other DNA
cctaaatgtaagcagaatagta

SEQ ID NO: 107330 - DNA, 22 bp, synthetic construct
  misc_feature 1..22: note = chemically synthesized
  source 1..22: mol_type = other DNA
ctaaatgtaagcagaatagtag

SEQ ID NO: 107331 - DNA, 22 bp, synthetic construct
  misc_feature 1..22: note = chemically synthesized
  source 1..22: mol_type = other DNA
aatgtaagcagaatagtagtag

SEQ ID NO: 107332 - DNA, 22 bp, synthetic construct
  misc_feature 1..22: note = chemically synthesized
  source 1..22: mol_type = other DNA
aaagtcagtctctggaaatggc

SEQ ID NO: 107333 - DNA, 22 bp, synthetic construct
  misc_feature 1..22: note = chemically synthesized
  source 1..22: mol_type = other DNA
tggaaatggcttaagtctgaaa

SEQ ID NO: 107334 - DNA, 22 bp, synthetic construct
  misc_feature 1..22: note = chemically synthesized
  source 1..22: mol_type = other DNA
gaaatggcttaagtctgaaaat

SEQ ID NO: 107335 - DNA, 22 bp, synthetic construct
  misc_feature 1..22: note = chemically synthesized
  source 1..22: mol_type = other DNA
aagtctgaaaatttgtgtgtcc

SEQ ID NO: 107336 - DNA, 22 bp, synthetic construct
  misc_feature 1..22: note = chemically synthesized
  source 1..22: mol_type = other DNA
agtctgaaaatttgtgtgtcct

SEQ ID NO: 107337 - DNA, 22 bp, synthetic construct
  misc_feature 1..22: note = chemically synthesized
  source 1..22: mol_type = other DNA
aaaatttgtgtgtcctctttgt

SEQ ID NO: 107338 - DNA, 22 bp, synthetic construct
  misc_feature 1..22: note = chemically synthesized
  source 1..22: mol_type = other DNA
gtgtgtcctctttgtactaagt

SEQ ID NO: 107339 - DNA, 22 bp, synthetic construct
  misc_feature 1..22: note = chemically synthesized
  source 1..22: mol_type = other DNA
tgtgtcctctttgtactaagtt

SEQ ID NO: 107340 - DNA, 22 bp, synthetic construct
  misc_feature 1..22: note = chemically synthesized
  source 1..22: mol_type = other DNA
tttgtactaagttaaaatttag

SEQ ID NO: 107341 - DNA, 22 bp, synthetic construct
  misc_feature 1..22: note = chemically synthesized
  source 1..22: mol_type = other DNA
tgtactaagttaaaatttaggt

SEQ ID NO: 107342 - DNA, 22 bp, synthetic construct
  misc_feature 1..22: note = chemically synthesized
  source 1..22: mol_type = other DNA
gtactaagttaaaatttaggtc

SEQ ID NO: 107343 - DNA, 22 bp, synthetic construct
  misc_feature 1..22: note = chemically synthesized
  source 1..22: mol_type = other DNA
tactaagttaaaatttaggtct

SEQ ID NO: 107344 - DNA, 22 bp, synthetic construct
  misc_feature 1..22: note = chemically synthesized
  source 1..22: mol_type = other DNA
agttaaaatttaggtctggatt

SEQ ID NO: 107345 - DNA, 22 bp, synthetic construct
  misc_feature 1..22: note = chemically synthesized
  source 1..22: mol_type = other DNA
aaatttaggtctggattgattt

SEQ ID NO: 107346 - DNA, 22 bp, synthetic construct
  misc_feature 1..22: note = chemically synthesized
  source 1..22: mol_type = other DNA
aggtctggattgatttagggga

SEQ ID NO: 107347 - DNA, 22 bp, synthetic construct
  misc_feature 1..22: note = chemically synthesized
  source 1..22: mol_type = other DNA
ggtctggattgatttaggggag

SEQ ID NO: 107348 - DNA, 22 bp, synthetic construct
  misc_feature 1..22: note = chemically synthesized
  source 1..22: mol_type = other DNA
gattgatttaggggagccatgc

SEQ ID NO: 107349 - DNA, 22 bp, synthetic construct
  misc_feature 1..22: note = chemically synthesized
  source 1..22: mol_type = other DNA
atttaggggagccatgctttga

SEQ ID NO: 107350 - DNA, 22 bp, synthetic construct
  misc_feature 1..22: note = chemically synthesized
  source 1..22: mol_type = other DNA
aggggagccatgctttgaactt

SEQ ID NO: 107351 - DNA, 22 bp, synthetic construct
  misc_feature 1..22: note = chemically synthesized
  source 1..22: mol_type = other DNA
ggggagccatgctttgaactta

SEQ ID NO: 107352 - DNA, 22 bp, synthetic construct
  misc_feature 1..22: note = chemically synthesized
  source 1..22: mol_type = other DNA
tgaacttaaaatgaggtgaggt

SEQ ID NO: 107353 - DNA, 22 bp, synthetic construct
  misc_feature 1..22: note = chemically synthesized
  source 1..22: mol_type = other DNA
gaacttaaaatgaggtgaggta

SEQ ID NO: 107354 - DNA, 22 bp, synthetic construct
  misc_feature 1..22: note = chemically synthesized
  source 1..22: mol_type = other DNA
aacttaaaatgaggtgaggtag

SEQ ID NO: 107355 - DNA, 22 bp, synthetic construct
  misc_feature 1..22: note = chemically synthesized
  source 1..22: mol_type = other DNA
aaaatgaggtgaggtagtaaga

SEQ ID NO: 107356 - DNA, 22 bp, synthetic construct
  misc_feature 1..22: note = chemically synthesized
  source 1..22: mol_type = other DNA
aaatgaggtgaggtagtaagac

SEQ ID NO: 107357 - DNA, 22 bp, synthetic construct
  misc_feature 1..22: note = chemically synthesized
  source 1..22: mol_type = other DNA
agataactgatttaatttcagg

SEQ ID NO: 107358 - DNA, 22 bp, synthetic construct
  misc_feature 1..22: note = chemically synthesized
  source 1..22: mol_type = other DNA
atttaatttcaggctgccctcc

SEQ ID NO: 107359 - DNA, 22 bp, synthetic construct
  misc_feature 1..22: note = chemically synthesized
  source 1..22: mol_type = other DNA
aatttcaggctgccctcccatt

SEQ ID NO: 107360 - DNA, 22 bp, synthetic construct
  misc_feature 1..22: note = chemically synthesized
  source 1..22: mol_type = other DNA
atttcaggctgccctcccattt

SEQ ID NO: 107361 - DNA, 22 bp, synthetic construct
  misc_feature 1..22: note = chemically synthesized
  source 1..22: mol_type = other DNA
caggctgccctcccatttcatt

SEQ ID NO: 107362 - DNA, 22 bp, synthetic construct
  misc_feature 1..22: note = chemically synthesized
  source 1..22: mol_type = other DNA
aggctgccctcccatttcatta

SEQ ID NO: 107363 - DNA, 22 bp, synthetic construct
  misc_feature 1..22: note = chemically synthesized
  source 1..22: mol_type = other DNA
ccctcccatttcattagtaggt

SEQ ID NO: 107364 - DNA, 22 bp, synthetic construct
  misc_feature 1..22: note = chemically synthesized
  source 1..22: mol_type = other DNA
ccatttcattagtaggtatatt

SEQ ID NO: 107365 - DNA, 22 bp, synthetic construct
  misc_feature 1..22: note = chemically synthesized
  source 1..22: mol_type = other DNA
cattagtaggtatattgaccct

SEQ ID NO: 107366 - DNA, 22 bp, synthetic construct
  misc_feature 1..22: note = chemically synthesized
  source 1..22: mol_type = other DNA
attagtaggtatattgaccctc

SEQ ID NO: 107367 - DNA, 22 bp, synthetic construct
  misc_feature 1..22: note = chemically synthesized
  source 1..22: mol_type = other DNA
gtaggtatattgaccctctcac

SEQ ID NO: 107368 - DNA, 22 bp, synthetic construct
  misc_feature 1..22: note = chemically synthesized
  source 1..22: mol_type = other DNA
accctctcactggcagtacacg

SEQ ID NO: 107369 - DNA, 22 bp, synthetic construct
  misc_feature 1..22: note = chemically synthesized
  source 1..22: mol_type = other DNA
tcactggcagtacacgaatctt

SEQ ID NO: 107370 - DNA, 22 bp, synthetic construct
  misc_feature 1..22: note = chemically synthesized
  source 1..22: mol_type = other DNA
actggcagtacacgaatcttct

SEQ ID NO: 107371 - DNA, 22 bp, synthetic construct
  misc_feature 1..22: note = chemically synthesized
  source 1..22: mol_type = other DNA
gcagtacacgaatcttctgccc

SEQ ID NO: 107372 - DNA, 22 bp, synthetic construct
  misc_feature 1..22: note = chemically synthesized
  source 1..22: mol_type = other DNA
ctgccccataaatatgactcta

SEQ ID NO: 107373 - DNA, 22 bp, synthetic construct
  misc_feature 1..22: note = chemically synthesized
  source 1..22: mol_type = other DNA
tgccccataaatatgactctat

SEQ ID NO: 107374 - DNA, 22 bp, synthetic construct
  misc_feature 1..22: note = chemically synthesized
  source 1..22: mol_type = other DNA
ccccataaatatgactctattc

SEQ ID NO: 107375 - DNA, 22 bp, synthetic construct
  misc_feature 1..22: note = chemically synthesized
  source 1..22: mol_type = other DNA
tattcctggaaacatcacttat

SEQ ID NO: 107376 - DNA, 22 bp, synthetic construct
  misc_feature 1..22: note = chemically synthesized
  source 1..22: mol_type = other DNA
ttcctggaaacatcacttatct

SEQ ID NO: 107377 - DNA, 22 bp, synthetic construct
  misc_feature 1..22: note = chemically synthesized
  source 1..22: mol_type = other DNA
ctggaaacatcacttatcttag

SEQ ID NO: 107378 - DNA, 22 bp, synthetic construct
  misc_feature 1..22: note = chemically synthesized
  source 1..22: mol_type = other DNA
gaaacatcacttatcttagaac

SEQ ID NO: 107379 - DNA, 22 bp, synthetic construct
  misc_feature 1..22: note = chemically synthesized
  source 1..22: mol_type = other DNA
atcttagaacagatataaagta

SEQ ID NO: 107380 - DNA, 22 bp, synthetic construct
  misc_feature 1..22: note = chemically synthesized
  source 1..22: mol_type = other DNA
tcttagaacagatataaagtaa

SEQ ID NO: 107381 - DNA, 22 bp, synthetic construct
  misc_feature 1..22: note = chemically synthesized
  source 1..22: mol_type = other DNA
agaacagatataaagtaatttc

SEQ ID NO: 107382 - DNA, 22 bp, synthetic construct
  misc_feature 1..22: note = chemically synthesized
  source 1..22: mol_type = other DNA
gaacagatataaagtaatttcc

SEQ ID NO: 107383 - DNA, 22 bp, synthetic construct
  misc_feature 1..22: note = chemically synthesized
  source 1..22: mol_type = other DNA
cctgcagactgccccagagttg

SEQ ID NO: 107384 - DNA, 22 bp, synthetic construct
  misc_feature 1..22: note = chemically synthesized
  source 1..22: mol_type = other DNA
ctgcagactgccccagagttgg

SEQ ID NO: 107385 - DNA, 22 bp, synthetic construct
  misc_feature 1..22: note = chemically synthesized
  source 1..22: mol_type = other DNA
cagactgccccagagttgggat

SEQ ID NO: 107386 - DNA, 22 bp, synthetic construct
  misc_feature 1..22: note = chemically synthesized
  source 1..22: mol_type = other DNA
ccccagagttgggataaaatct

SEQ ID NO: 107387 - DNA, 22 bp, synthetic construct
  misc_feature 1..22: note = chemically synthesized
  source 1..22: mol_type = other DNA
ggataaaatctcatgtgaagtg

SEQ ID NO: 107388 - DNA, 22 bp, synthetic construct
  misc_feature 1..22: note = chemically synthesized
  source 1..22: mol_type = other DNA
atgtgaagtgacactgttggtg

SEQ ID NO: 107389 - DNA, 22 bp, synthetic construct
  misc_feature 1..22: note = chemically synthesized
  source 1..22: mol_type = other DNA
ttggtggaggataagcctccag

SEQ ID NO: 107390 - DNA, 22 bp, synthetic construct
  misc_feature 1..22: note = chemically synthesized
  source 1..22: mol_type = other DNA
gtggaggataagcctccagaga

SEQ ID NO: 107391 - DNA, 22 bp, synthetic construct
  misc_feature 1..22: note = chemically synthesized
  source 1..22: mol_type = other DNA
cagagaatgggaacaactatta

SEQ ID NO: 107392 - DNA, 22 bp, synthetic construct
  misc_feature 1..22: note = chemically synthesized
  source 1..22: mol_type = other DNA
ttatcagccaacactcaaagtc

SEQ ID NO: 107393 - DNA, 22 bp, synthetic construct
  misc_feature 1..22: note = chemically synthesized
  source 1..22: mol_type = other DNA
tcagccaacactcaaagtcacc

SEQ ID NO: 107394 - DNA, 22 bp, synthetic construct
  misc_feature 1..22: note = chemically synthesized
  source 1..22: mol_type = other DNA
aaagtcaccaagcttaggggca

SEQ ID NO: 107395 - DNA, 22 bp, synthetic construct
  misc_feature 1..22: note = chemically synthesized
  source 1..22: mol_type = other DNA
aggggcactgggaggaagtagg

SEQ ID NO: 107396 - DNA, 22 bp, synthetic construct
  misc_feature 1..22: note = chemically synthesized
  source 1..22: mol_type = other DNA
ggggcactgggaggaagtaggc

SEQ ID NO: 107397 - DNA, 22 bp, synthetic construct
  misc_feature 1..22: note = chemically synthesized
  source 1..22: mol_type = other DNA
ggaggaagtaggcagggcaccc

SEQ ID NO: 107398 - DNA, 22 bp, synthetic construct
  misc_feature 1..22: note = chemically synthesized
  source 1..22: mol_type = other DNA
ctatttccttaaatagccattg

SEQ ID NO: 107399 - DNA, 22 bp, synthetic construct
  misc_feature 1..22: note = chemically synthesized
  source 1..22: mol_type = other DNA
tatttccttaaatagccattga

SEQ ID NO: 107400 - DNA, 22 bp, synthetic construct
  misc_feature 1..22: note = chemically synthesized
  source 1..22: mol_type = other DNA
tttccttaaatagccattgatg

SEQ ID NO: 107401 - DNA, 22 bp, synthetic construct
  misc_feature 1..22: note = chemically synthesized
  source 1..22: mol_type = other DNA
ccttaaatagccattgatgtgt

SEQ ID NO: 107402 - DNA, 22 bp, synthetic construct
  misc_feature 1..22: note = chemically synthesized
  source 1..22: mol_type = other DNA
cttaaatagccattgatgtgtc

SEQ ID NO: 107403 - DNA, 22 bp, synthetic construct
  misc_feature 1..22: note = chemically synthesized
  source 1..22: mol_type = other DNA
aaatagccattgatgtgtctct

SEQ ID NO: 107404 - DNA, 22 bp, synthetic construct
  misc_feature 1..22: note = chemically synthesized
  source 1..22: mol_type = other DNA
aatagccattgatgtgtctctc

SEQ ID NO: 107405 - DNA, 22 bp, synthetic construct
  misc_feature 1..22: note = chemically synthesized
  source 1..22: mol_type = other DNA
atgtgtctctcattcatgtatt

SEQ ID NO: 107406 - DNA, 22 bp, synthetic construct
  misc_feature 1..22: note = chemically synthesized
  source 1..22: mol_type = other DNA
tcattcatgtattttctaagac

SEQ ID NO: 107407 - DNA, 22 bp, synthetic construct
  misc_feature 1..22: note = chemically synthesized
  source 1..22: mol_type = other DNA
attcatgtattttctaagacct

SEQ ID NO: 107408 - DNA, 22 bp, synthetic construct
  misc_feature 1..22: note = chemically synthesized
  source 1..22: mol_type = other DNA
atgtattttctaagaccttgtt

SEQ ID NO: 107409 - DNA, 22 bp, synthetic construct
  misc_feature 1..22: note = chemically synthesized
  source 1..22: mol_type = other DNA
tctaagaccttgttcattcttt

SEQ ID NO: 107410 - DNA, 22 bp, synthetic construct
  misc_feature 1..22: note = chemically synthesized
  source 1..22: mol_type = other DNA
ctaagaccttgttcattctttt

SEQ ID NO: 107411 - DNA, 22 bp, synthetic construct
  misc_feature 1..22: note = chemically synthesized
  source 1..22: mol_type = other DNA
taagaccttgttcattcttttc

SEQ ID NO: 107412 - DNA, 22 bp, synthetic construct
  misc_feature 1..22: note = chemically synthesized
  source 1..22: mol_type = other DNA
agaccttgttcattcttttcat

SEQ ID NO: 107413 - DNA, 22 bp, synthetic construct
  misc_feature 1..22: note = chemically synthesized
  source 1..22: mol_type = other DNA
gttcattcttttcatatttcct

SEQ ID NO: 107414 - DNA, 22 bp, synthetic construct
  misc_feature 1..22: note = chemically synthesized
  source 1..22: mol_type = other DNA
ttcattcttttcatatttcctg

SEQ ID NO: 107415 - DNA, 22 bp, synthetic construct
  misc_feature 1..22: note = chemically synthesized
  source 1..22: mol_type = other DNA
attcttttcatatttcctgctg

SEQ ID NO: 107416 - DNA, 22 bp, synthetic construct
  misc_feature 1..22: note = chemically synthesized
  source 1..22: mol_type = other DNA
ttttcatatttcctgctgtatt

SEQ ID NO: 107417 - DNA, 22 bp, synthetic construct
  misc_feature 1..22: note = chemically synthesized
  source 1..22: mol_type = other DNA
ttcatatttcctgctgtattgc

SEQ ID NO: 107418 - DNA, 22 bp, synthetic construct
  misc_feature 1..22: note = chemically synthesized
  source 1..22: mol_type = other DNA
tcatatttcctgctgtattgcc

SEQ ID NO: 107419 - DNA, 22 bp, synthetic construct
  misc_feature 1..22: note = chemically synthesized
  source 1..22: mol_type = other DNA
catatttcctgctgtattgcct

SEQ ID NO: 107420 - DNA, 22 bp, synthetic construct
  misc_feature 1..22: note = chemically synthesized
  source 1..22: mol_type = other DNA
atatttcctgctgtattgcctg

SEQ ID NO: 107421 - DNA, 22 bp, synthetic construct
  misc_feature 1..22: note = chemically synthesized
  source 1..22: mol_type = other DNA
cctgctgtattgcctgtgaagt

SEQ ID NO: 107422 - DNA, 22 bp, synthetic construct
  misc_feature 1..22: note = chemically synthesized
  source 1..22: mol_type = other DNA
ctgctgtattgcctgtgaagta

SEQ ID NO: 107423 - DNA, 22 bp, synthetic construct
  misc_feature 1..22: note = chemically synthesized
  source 1..22: mol_type = other DNA
ctgtattgcctgtgaagtaaag

SEQ ID NO: 107424 - DNA, 22 bp, synthetic construct
  misc_feature 1..22: note = chemically synthesized
  source 1..22: mol_type = other DNA
tattgcctgtgaagtaaagtat

SEQ ID NO: 107425 - DNA, 22 bp, synthetic construct
  misc_feature 1..22: note = chemically synthesized
  source 1..22: mol_type = other DNA
cctgtgaagtaaagtatcatgt

SEQ ID NO: 107426 - DNA, 22 bp, synthetic construct
  misc_feature 1..22: note = chemically synthesized
  source 1..22: mol_type = other DNA
tgaagtaaagtatcatgtcaca

SEQ ID NO: 107427 - DNA, 22 bp, synthetic construct
  misc_feature 1..22: note = chemically synthesized
  source 1..22: mol_type = other DNA
agattgggaaggacctccatct

SEQ ID NO: 107428 - DNA, 22 bp, synthetic construct
  misc_feature 1..22: note = chemically synthesized
  source 1..22: mol_type = other DNA
ggaaggacctccatctcctgta

SEQ ID NO: 107429 - DNA, 22 bp, synthetic construct
  misc_feature 1..22: note = chemically synthesized
  source 1..22: mol_type = other DNA
catctcctgtaataaaagcctt

SEQ ID NO: 107430 - DNA, 22 bp, synthetic construct
  misc_feature 1..22: note = chemically synthesized
  source 1..22: mol_type = other DNA
ctgtaataaaagccttctttga

SEQ ID NO: 107431 - DNA, 22 bp, synthetic construct
  misc_feature 1..22: note = chemically synthesized
  source 1..22: mol_type = other DNA
taataaaagccttctttgatgc

SEQ ID NO: 107432 - DNA, 22 bp, synthetic construct
  misc_feature 1..22: note = chemically synthesized
  source 1..22: mol_type = other DNA
ctttgatgcagtgtttcctgac

SEQ ID NO: 107433 - DNA, 22 bp, synthetic construct
  misc_feature 1..22: note = chemically synthesized
  source 1..22: mol_type = other DNA
tttgatgcagtgtttcctgaca

SEQ ID NO: 107434 - DNA, 22 bp, synthetic construct
  misc_feature 1..22: note = chemically synthesized
  source 1..22: mol_type = other DNA
tgatgcagtgtttcctgacaag

SEQ ID NO: 107435 - DNA, 22 bp, synthetic construct
  misc_feature 1..22: note = chemically synthesized
  source 1..22: mol_type = other DNA
gatgcagtgtttcctgacaagg

SEQ ID NO: 107436 - DNA, 22 bp, synthetic construct
  misc_feature 1..22: note = chemically synthesized
  source 1..22: mol_type = other DNA
atgcagtgtttcctgacaaggg

SEQ ID NO: 107437 - DNA, 22 bp, synthetic construct
  misc_feature 1..22: note = chemically synthesized
  source 1..22: mol_type = other DNA
cctgacaagggtcatccgctga

SEQ ID NO: 107438 - DNA, 22 bp, synthetic construct
  misc_feature 1..22: note = chemically synthesized
  source 1..22: mol_type = other DNA
ctgacaagggtcatccgctgag

SEQ ID NO: 107439 - DNA, 22 bp, synthetic construct
  misc_feature 1..22: note = chemically synthesized
  source 1..22: mol_type = other DNA
acaagggtcatccgctgagtgc

SEQ ID NO: 107440 - DNA, 22 bp, synthetic construct
  misc_feature 1..22: note = chemically synthesized
  source 1..22: mol_type = other DNA
agtgcctgtctctttctaaatc

SEQ ID NO: 107441 - DNA, 22 bp, synthetic construct
  misc_feature 1..22: note = chemically synthesized
  source 1..22: mol_type = other DNA
tctctttctaaatcacataaca

SEQ ID NO: 107442 - DNA, 22 bp, synthetic construct
  misc_feature 1..22: note = chemically synthesized
  source 1..22: mol_type = other DNA
tttctaaatcacataacacaat

SEQ ID NO: 107443 - DNA, 22 bp, synthetic construct
  misc_feature 1..22: note = chemically synthesized
  source 1..22: mol_type = other DNA
tctaaatcacataacacaatat

SEQ ID NO: 107444 - DNA, 22 bp, synthetic construct
  misc_feature 1..22: note = chemically synthesized
  source 1..22: mol_type = other DNA
ctaaatcacataacacaatatt

SEQ ID NO: 107445 - DNA, 22 bp, synthetic construct
  misc_feature 1..22: note = chemically synthesized
  source 1..22: mol_type = other DNA
taaatcacataacacaatattt

SEQ ID NO: 107446 - DNA, 22 bp, synthetic construct
  misc_feature 1..22: note = chemically synthesized
  source 1..22: mol_type = other DNA
aatcacataacacaatatttat

SEQ ID NO: 107447 - DNA, 22 bp, synthetic construct
  misc_feature 1..22: note = chemically synthesized
  source 1..22: mol_type = other DNA
attagaatatctgtgctgaaaa

SEQ ID NO: 107448 - DNA, 22 bp, synthetic construct
  misc_feature 1..22: note = chemically synthesized
  source 1..22: mol_type = other DNA
ttagaatatctgtgctgaaaat

SEQ ID NO: 107449 - DNA, 22 bp, synthetic construct
  misc_feature 1..22: note = chemically synthesized
  source 1..22: mol_type = other DNA
gaatatctgtgctgaaaatact

SEQ ID NO: 107450 - DNA, 22 bp, synthetic construct
  misc_feature 1..22: note = chemically synthesized
  source 1..22: mol_type = other DNA
tgctgaaaatactcaggcagcc

SEQ ID NO: 107451 - DNA, 22 bp, synthetic construct
  misc_feature 1..22: note = chemically synthesized
  source 1..22: mol_type = other DNA
aaaatactcaggcagccacatt

SEQ ID NO: 107452 - DNA, 22 bp, synthetic construct
  misc_feature 1..22: note = chemically synthesized
  source 1..22: mol_type = other DNA
aggcagccacattattagaaat

SEQ ID NO: 107453 - DNA, 22 bp, synthetic construct
  misc_feature 1..22: note = chemically synthesized
  source 1..22: mol_type = other DNA
ttagaaattacctaacttttta

SEQ ID NO: 107454 - DNA, 22 bp, synthetic construct
  misc_feature 1..22: note = chemically synthesized
  source 1..22: mol_type = other DNA
gaaattacctaactttttaaaa

SEQ ID NO: 107455 - DNA, 22 bp, synthetic construct
  misc_feature 1..22: note = chemically synthesized
  source 1..22: mol_type = other DNA
cctaactttttaaaatgaaaat

SEQ ID NO: 107456 - DNA, 22 bp, synthetic construct
  misc_feature 1..22: note = chemically synthesized
  source 1..22: mol_type = other DNA
actttttaaaatgaaaatattt

SEQ ID NO: 107457 - DNA, 22 bp, synthetic construct
  misc_feature 1..22: note = chemically synthesized
  source 1..22: mol_type = other DNA
tttaaaatgaaaatatttttct

SEQ ID NO: 107458 - DNA, 22 bp, synthetic construct
  misc_feature 1..22: note = chemically synthesized
  source 1..22: mol_type = other DNA
ttaaaatgaaaatatttttctg

SEQ ID NO: 107459 - DNA, 22 bp, synthetic construct
  misc_feature 1..22: note = chemically synthesized
  source 1..22: mol_type = other DNA
taaaatgaaaatatttttctgg

SEQ ID NO: 107460 - DNA, 22 bp, synthetic construct
  misc_feature 1..22: note = chemically synthesized
  source 1..22: mol_type = other DNA
aaaatgaaaatatttttctggt

SEQ ID NO: 107461 - DNA, 22 bp, synthetic construct
  misc_feature 1..22: note = chemically synthesized
  source 1..22: mol_type = other DNA
aaatgaaaatatttttctggtc

SEQ ID NO: 107462 - DNA, 22 bp, synthetic construct
  misc_feature 1..22: note = chemically synthesized
  source 1..22: mol_type = other DNA
ttctggtcttcctattccttgg

SEQ ID NO: 107463 - DNA, 22 bp, synthetic construct
  misc_feature 1..22: note = chemically synthesized
  source 1..22: mol_type = other DNA
tctggtcttcctattccttggc

SEQ ID NO: 107464 - DNA, 22 bp, synthetic construct
  misc_feature 1..22: note = chemically synthesized
  source 1..22: mol_type = other DNA
ctggtcttcctattccttggct

SEQ ID NO: 107465 - DNA, 22 bp, synthetic construct
  misc_feature 1..22: note = chemically synthesized
  source 1..22: mol_type = other DNA
tggtcttcctattccttggctc

SEQ ID NO: 107466 - DNA, 22 bp, synthetic construct
  misc_feature 1..22: note = chemically synthesized
  source 1..22: mol_type = other DNA
gtcttcctattccttggctctt

SEQ ID NO: 107467 - DNA, 22 bp, synthetic construct
  misc_feature 1..22: note = chemically synthesized
  source 1..22: mol_type = other DNA
cctattccttggctcttggtct

SEQ ID NO: 107468 - DNA, 22 bp, synthetic construct
  misc_feature 1..22: note = chemically synthesized
  source 1..22: mol_type = other DNA
ctattccttggctcttggtctg

SEQ ID NO: 107469 - DNA, 22 bp, synthetic construct
  misc_feature 1..22: note = chemically synthesized
  source 1..22: mol_type = other DNA
ttccttggctcttggtctgagc

SEQ ID NO: 107470 - DNA, 22 bp, synthetic construct
  misc_feature 1..22: note = chemically synthesized
  source 1..22: mol_type = other DNA
cttggctcttggtctgagctct

SEQ ID NO: 107471 - DNA, 22 bp, synthetic construct
  misc_feature 1..22: note = chemically synthesized
  source 1..22: mol_type = other DNA
ggctcttggtctgagctctggc

SEQ ID NO: 107472 - DNA, 22 bp, synthetic construct
  misc_feature 1..22: note = chemically synthesized
  source 1..22: mol_type = other DNA
gctcttggtctgagctctggca

SEQ ID NO: 107473 - DNA, 22 bp, synthetic construct
  misc_feature 1..22: note = chemically synthesized
  source 1..22: mol_type = other DNA
ttggtctgagctctggcatcac

SEQ ID NO: 107474 - DNA, 22 bp, synthetic construct
  misc_feature 1..22: note = chemically synthesized
  source 1..22: mol_type = other DNA
ggtctgagctctggcatcacag

SEQ ID NO: 107475 - DNA, 22 bp, synthetic construct
  misc_feature 1..22: note = chemically synthesized
  source 1..22: mol_type = other DNA
gtctgagctctggcatcacagt

SEQ ID NO: 107476 - DNA, 22 bp, synthetic construct
  misc_feature 1..22: note = chemically synthesized
  source 1..22: mol_type = other DNA
agctctggcatcacagtctata

SEQ ID NO: 107477 - DNA, 22 bp, synthetic construct
  misc_feature 1..22: note = chemically synthesized
  source 1..22: mol_type = other DNA
tggcatcacagtctatatctaa

SEQ ID NO: 107478 - DNA, 22 bp, synthetic construct
  misc_feature 1..22: note = chemically synthesized
  source 1..22: mol_type = other DNA
gcatcacagtctatatctaact

SEQ ID NO: 107479 - DNA, 22 bp, synthetic construct
  misc_feature 1..22: note = chemically synthesized
  source 1..22: mol_type = other DNA
tatctaactgctgccttatatt

SEQ ID NO: 107480 - DNA, 22 bp, synthetic construct
  misc_feature 1..22: note = chemically synthesized
  source 1..22: mol_type = other DNA
actgctgccttatattacatat

SEQ ID NO: 107481 - DNA, 22 bp, synthetic construct
  misc_feature 1..22: note = chemically synthesized
  source 1..22: mol_type = other DNA
ctgccttatattacatatggca

SEQ ID NO: 107482 - DNA, 22 bp, synthetic construct
  misc_feature 1..22: note = chemically synthesized
  source 1..22: mol_type = other DNA
ccttatattacatatggcatat

SEQ ID NO: 107483 - DNA, 22 bp, synthetic construct
  misc_feature 1..22: note = chemically synthesized
  source 1..22: mol_type = other DNA
atattacatatggcatatagga

SEQ ID NO: 107484 - DNA, 22 bp, synthetic construct
  misc_feature 1..22: note = chemically synthesized
  source 1..22: mol_type = other DNA
tattacatatggcatataggaa

SEQ ID NO: 107485 - DNA, 22 bp, synthetic construct
  misc_feature 1..22: note = chemically synthesized
  source 1..22: mol_type = other DNA
catatggcatataggaaggcaa

SEQ ID NO: 107486 - DNA, 22 bp, synthetic construct
  misc_feature 1..22: note = chemically synthesized
  source 1..22: mol_type = other DNA
aagtataataagcttatatcgc

SEQ ID NO: 107487 - DNA, 22 bp, synthetic construct
  misc_feature 1..22: note = chemically synthesized
  source 1..22: mol_type = other DNA
atatcgctaacgattcaggaag

SEQ ID NO: 107488 - DNA, 22 bp, synthetic construct
  misc_feature 1..22: note = chemically synthesized
  source 1..22: mol_type = other DNA
tatcgctaacgattcaggaagg

SEQ ID NO: 107489 - DNA, 22 bp, synthetic construct
  misc_feature 1..22: note = chemically synthesized
  source 1..22: mol_type = other DNA
acgattcaggaaggtctctatc

SEQ ID NO: 107490 - DNA, 22 bp, synthetic construct
  misc_feature 1..22: note = chemically synthesized
  source 1..22: mol_type = other DNA
aggaaggtctctatcctaggat

SEQ ID NO: 107491 - DNA, 22 bp, synthetic construct
  misc_feature 1..22: note = chemically synthesized
  source 1..22: mol_type = other DNA
tatcctaggatttttgctgttt

SEQ ID NO: 107492 - DNA, 22 bp, synthetic construct
  misc_feature 1..22: note = chemically synthesized
  source 1..22: mol_type = other DNA
tcctaggatttttgctgtttgt

SEQ ID NO: 107493 - DNA, 22 bp, synthetic construct
  misc_feature 1..22: note = chemically synthesized
  source 1..22: mol_type = other DNA
ggatttttgctgtttgttgagt

SEQ ID NO: 107494 - DNA, 22 bp, synthetic construct
  misc_feature 1..22: note = chemically synthesized
  source 1..22: mol_type = other DNA
ttgctgtttgttgagtaagtct

SEQ ID NO: 107495 - DNA, 22 bp, synthetic construct
  misc_feature 1..22: note = chemically synthesized
  source 1..22: mol_type = other DNA
tgctgtttgttgagtaagtctg

SEQ ID NO: 107496 - DNA, 22 bp, synthetic construct
  misc_feature 1..22: note = chemically synthesized
  source 1..22: mol_type = other DNA
gctgtttgttgagtaagtctgt

SEQ ID NO: 107497 - DNA, 22 bp, synthetic construct
  misc_feature 1..22: note = chemically synthesized
  source 1..22: mol_type = other DNA
ctgtttgttgagtaagtctgtg

SEQ ID NO: 107498 - DNA, 22 bp, synthetic construct
  misc_feature 1..22: note = chemically synthesized
  source 1..22: mol_type = other DNA
tttgttgagtaagtctgtgctg

SEQ ID NO: 107499 - DNA, 22 bp, synthetic construct
  misc_feature 1..22: note = chemically synthesized
  source 1..22: mol_type = other DNA
gttgagtaagtctgtgctgaca

SEQ ID NO: 107500 - DNA, 22 bp, synthetic construct
  misc_feature 1..22: note = chemically synthesized
  source 1..22: mol_type = other DNA
ttgagtaagtctgtgctgacaa

SEQ ID NO: 107501 - DNA, 22 bp, synthetic construct
  misc_feature 1..22: note = chemically synthesized
  source 1..22: mol_type = other DNA
agtaagtctgtgctgacaatac

SEQ ID NO: 107502 - DNA, 22 bp, synthetic construct
  misc_feature 1..22: note = chemically synthesized
  source 1..22: mol_type = other DNA
tgctgacaataccagcttcttt

SEQ ID NO: 107503 - DNA, 22 bp, synthetic construct
  misc_feature 1..22: note = chemically synthesized
  source 1..22: mol_type = other DNA
acaataccagcttctttttttt

SEQ ID NO: 107504 - DNA, 22 bp, synthetic construct
  misc_feature 1..22: note = chemically synthesized
  source 1..22: mol_type = other DNA
cttttttttttttttctgtgta

SEQ ID NO: 107505 - DNA, 22 bp, synthetic construct
  misc_feature 1..22: note = chemically synthesized
  source 1..22: mol_type = other DNA
ttttttttttttttctgtgtag

SEQ ID NO: 107506 - DNA, 22 bp, synthetic construct
  misc_feature 1..22: note = chemically synthesized
  source 1..22: mol_type = other DNA
ttttttttttttctgtgtagtt

SEQ ID NO: 107507 - DNA, 22 bp, synthetic construct
  misc_feature 1..22: note = chemically synthesized
  source 1..22: mol_type = other DNA
tttttttttttctgtgtagttt

SEQ ID NO: 107508 - DNA, 22 bp, synthetic construct
  misc_feature 1..22: note = chemically synthesized
  source 1..22: mol_type = other DNA
ttttttttttctgtgtagtttg

SEQ ID NO: 107509 - DNA, 22 bp, synthetic construct
  misc_feature 1..22: note = chemically synthesized
  source 1..22: mol_type = other DNA
tttttttttctgtgtagtttga

SEQ ID NO: 107510 - DNA, 22 bp, synthetic construct
  misc_feature 1..22: note = chemically synthesized
  source 1..22: mol_type = other DNA
ttttttttctgtgtagtttgat

SEQ ID NO: 107511 - DNA, 22 bp, synthetic construct
  misc_feature 1..22: note = chemically synthesized
  source 1..22: mol_type = other DNA
tttttttctgtgtagtttgatt

SEQ ID NO: 107512 - DNA, 22 bp, synthetic construct
  misc_feature 1..22: note = chemically synthesized
  source 1..22: mol_type = other DNA
ttttttctgtgtagtttgattc

SEQ ID NO: 107513 - DNA, 22 bp, synthetic construct
  misc_feature 1..22: note = chemically synthesized
  source 1..22: mol_type = other DNA
tttttctgtgtagtttgattct

SEQ ID NO: 107514 - DNA, 22 bp, synthetic construct
  misc_feature 1..22: note = chemically synthesized
  source 1..22: mol_type = other DNA
ttttctgtgtagtttgattcta

SEQ ID NO: 107515 - DNA, 22 bp, synthetic construct
  misc_feature 1..22: note = chemically synthesized
  source 1..22: mol_type = other DNA
tttctgtgtagtttgattctat

SEQ ID NO: 107516 - DNA, 22 bp, synthetic construct
  misc_feature 1..22: note = chemically synthesized
  source 1..22: mol_type = other DNA
ttctgtgtagtttgattctatt

SEQ ID NO: 107517 - DNA, 22 bp, synthetic construct
  misc_feature 1..22: note = chemically synthesized
  source 1..22: mol_type = other DNA
tctgtgtagtttgattctatta

SEQ ID NO: 107518 - DNA, 22 bp, synthetic construct
  misc_feature 1..22: note = chemically synthesized
  source 1..22: mol_type = other DNA
ctgtgtagtttgattctattat

SEQ ID NO: 107519 - DNA, 22 bp, synthetic construct
  misc_feature 1..22: note = chemically synthesized
  source 1..22: mol_type = other DNA
tgtgtagtttgattctattatc

SEQ ID NO: 107520 - DNA, 22 bp, synthetic construct
  misc_feature 1..22: note = chemically synthesized
  source 1..22: mol_type = other DNA
tgtagtttgattctattatctg

SEQ ID NO: 107521 - DNA, 22 bp, synthetic construct
  misc_feature 1..22: note = chemically synthesized
  source 1..22: mol_type = other DNA
gattctattatctgtcagcctt

SEQ ID NO: 107522 - DNA, 22 bp, synthetic construct
  misc_feature 1..22: note = chemically synthesized
  source 1..22: mol_type = other DNA
attctattatctgtcagccttc

SEQ ID NO: 107523 - DNA, 22 bp, synthetic construct
  misc_feature 1..22: note = chemically synthesized
  source 1..22: mol_type = other DNA
tattatctgtcagccttctgga

SEQ ID NO: 107524 - DNA, 22 bp, synthetic construct
  misc_feature 1..22: note = chemically synthesized
  source 1..22: mol_type = other DNA
ttatctgtcagccttctggatt

SEQ ID NO: 107525 - DNA, 22 bp, synthetic construct
  misc_feature 1..22: note = chemically synthesized
  source 1..22: mol_type = other DNA
tctgtcagccttctggattcca

SEQ ID NO: 107526 - DNA, 22 bp, synthetic construct
  misc_feature 1..22: note = chemically synthesized
  source 1..22: mol_type = other DNA
tcagccttctggattccacaat

SEQ ID NO: 107527 - DNA, 22 bp, synthetic construct
  misc_feature 1..22: note = chemically synthesized
  source 1..22: mol_type = other DNA
ctggattccacaattatctccg

SEQ ID NO: 107528 - DNA, 22 bp, synthetic construct
  misc_feature 1..22: note = chemically synthesized
  source 1..22: mol_type = other DNA
tggattccacaattatctccga

SEQ ID NO: 107529 - DNA, 22 bp, synthetic construct
  misc_feature 1..22: note = chemically synthesized
  source 1..22: mol_type = other DNA
gattccacaattatctccgaag

SEQ ID NO: 107530 - DNA, 22 bp, synthetic construct
  misc_feature 1..22: note = chemically synthesized
  source 1..22: mol_type = other DNA
cacaattatctccgaagattcc

SEQ ID NO: 107531 - DNA, 22 bp, synthetic construct
  misc_feature 1..22: note = chemically synthesized
  source 1..22: mol_type = other DNA
tctccgaagattccatccttta

SEQ ID NO: 107532 - DNA, 22 bp, synthetic construct
  misc_feature 1..22: note = chemically synthesized
  source 1..22: mol_type = other DNA
cgaagattccatcctttaactc

SEQ ID NO: 107533 - DNA, 22 bp, synthetic construct
  misc_feature 1..22: note = chemically synthesized
  source 1..22: mol_type = other DNA
catcctttaactcatcctctac

SEQ ID NO: 107534 - DNA, 22 bp, synthetic construct
  misc_feature 1..22: note = chemically synthesized
  source 1..22: mol_type = other DNA
taactcatcctctacaggctct

SEQ ID NO: 107535 - DNA, 22 bp, synthetic construct
  misc_feature 1..22: note = chemically synthesized
  source 1..22: mol_type = other DNA
aactcatcctctacaggctctg

SEQ ID NO: 107536 - DNA, 22 bp, synthetic construct
  misc_feature 1..22: note = chemically synthesized
  source 1..22: mol_type = other DNA
actcatcctctacaggctctga

SEQ ID NO: 107537 - DNA, 22 bp, synthetic construct
  misc_feature 1..22: note = chemically synthesized
  source 1..22: mol_type = other DNA
atcctctacaggctctgatggt

SEQ ID NO: 107538 - DNA, 22 bp, synthetic construct
  misc_feature 1..22: note = chemically synthesized
  source 1..22: mol_type = other DNA
tacaggctctgatggttaattt

SEQ ID NO: 107539 - DNA, 22 bp, synthetic construct
  misc_feature 1..22: note = chemically synthesized
  source 1..22: mol_type = other DNA
caggctctgatggttaatttta

SEQ ID NO: 107540 - DNA, 22 bp, synthetic construct
  misc_feature 1..22: note = chemically synthesized
  source 1..22: mol_type = other DNA
tgatggttaattttatatgcca

SEQ ID NO: 107541 - DNA, 22 bp, synthetic construct
  misc_feature 1..22: note = chemically synthesized
  source 1..22: mol_type = other DNA
atggttaattttatatgccaat

SEQ ID NO: 107542 - DNA, 22 bp, synthetic construct
  misc_feature 1..22: note = chemically synthesized
  source 1..22: mol_type = other DNA
attttatatgccaatttgactg

SEQ ID NO: 107543 - DNA, 22 bp, synthetic construct
  misc_feature 1..22: note = chemically synthesized
  source 1..22: mol_type = other DNA
tatatgccaatttgactgggcc

SEQ ID NO: 107544 - DNA, 22 bp, synthetic construct
  misc_feature 1..22: note = chemically synthesized
  source 1..22: mol_type = other DNA
atatgccaatttgactgggcca

SEQ ID NO: 107545 - DNA, 22 bp, synthetic construct
  misc_feature 1..22: note = chemically synthesized
  source 1..22: mol_type = other DNA
tatgccaatttgactgggccat

SEQ ID NO: 107546 - DNA, 22 bp, synthetic construct
  misc_feature 1..22: note = chemically synthesized
  source 1..22: mol_type = other DNA
gactgggccatggggtgcccaa

SEQ ID NO: 107547 - DNA, 22 bp, synthetic construct
  misc_feature 1..22: note = chemically synthesized
  source 1..22: mol_type = other DNA
actgggccatggggtgcccaaa

SEQ ID NO: 107548 - DNA, 22 bp, synthetic construct
  misc_feature 1..22: note = chemically synthesized
  source 1..22: mol_type = other DNA
ggccatggggtgcccaaatatt

SEQ ID NO: 107549 - DNA, 22 bp, synthetic construct
  misc_feature 1..22: note = chemically synthesized
  source 1..22: mol_type = other DNA
gtcaaacattattctagatgtt

SEQ ID NO: 107550 - DNA, 22 bp, synthetic construct
  misc_feature 1..22: note = chemically synthesized
  source 1..22: mol_type = other DNA
tcaaacattattctagatgttt

SEQ ID NO: 107551 - DNA, 22 bp, synthetic construct
  misc_feature 1..22: note = chemically synthesized
  source 1..22: mol_type = other DNA
ttctagatgtttttgtgagggt

SEQ ID NO: 107552 - DNA, 22 bp, synthetic construct
  misc_feature 1..22: note = chemically synthesized
  source 1..22: mol_type = other DNA
tagatgtttttgtgagggtgtt

SEQ ID NO: 107553 - DNA, 22 bp, synthetic construct
  misc_feature 1..22: note = chemically synthesized
  source 1..22: mol_type = other DNA
gatgtttttgtgagggtgtttt

SEQ ID NO: 107554 - DNA, 22 bp, synthetic construct
  misc_feature 1..22: note = chemically synthesized
  source 1..22: mol_type = other DNA
ttgtgagggtgtttttaggcaa

SEQ ID NO: 107555 - DNA, 22 bp, synthetic construct
  misc_feature 1..22: note = chemically synthesized
  source 1..22: mol_type = other DNA
tgtgagggtgtttttaggcaag

SEQ ID NO: 107556 - DNA, 22 bp, synthetic construct
  misc_feature 1..22: note = chemically synthesized
  source 1..22: mol_type = other DNA
gtgagggtgtttttaggcaaga

SEQ ID NO: 107557 - DNA, 22 bp, synthetic construct
  misc_feature 1..22: note = chemically synthesized
  source 1..22: mol_type = other DNA
tgagggtgtttttaggcaagat

SEQ ID NO: 107558 - DNA, 22 bp, synthetic construct
  misc_feature 1..22: note = chemically synthesized
  source 1..22: mol_type = other DNA
ttaggcaagattaacatttaaa

SEQ ID NO: 107559 - DNA, 22 bp, synthetic construct
  misc_feature 1..22: note = chemically synthesized
  source 1..22: mol_type = other DNA
taggcaagattaacatttaaat

SEQ ID NO: 107560 - DNA, 22 bp, synthetic construct
  misc_feature 1..22: note = chemically synthesized
  source 1..22: mol_type = other DNA
aggcaagattaacatttaaatc

SEQ ID NO: 107561 - DNA, 22 bp, synthetic construct
  misc_feature 1..22: note = chemically synthesized
  source 1..22: mol_type = other DNA
ggcaagattaacatttaaatcg

SEQ ID NO: 107562 - DNA, 22 bp, synthetic construct
  misc_feature 1..22: note = chemically synthesized
  source 1..22: mol_type = other DNA
acatttaaatcggtagaccaag

SEQ ID NO: 107563 - DNA, 22 bp, synthetic construct
  misc_feature 1..22: note = chemically synthesized
  source 1..22: mol_type = other DNA
aaatcggtagaccaagtagagc

SEQ ID NO: 107564 - DNA, 22 bp, synthetic construct
  misc_feature 1..22: note = chemically synthesized
  source 1..22: mol_type = other DNA
aatcggtagaccaagtagagca

SEQ ID NO: 107565 - DNA, 22 bp, synthetic construct
  misc_feature 1..22: note = chemically synthesized
  source 1..22: mol_type = other DNA
cctattgcaggcggcttcctcc

SEQ ID NO: 107566 - DNA, 22 bp, synthetic construct
  misc_feature 1..22: note = chemically synthesized
  source 1..22: mol_type = other DNA
ctattgcaggcggcttcctcca

SEQ ID NO: 107567 - DNA, 22 bp, synthetic construct
  misc_feature 1..22: note = chemically synthesized
  source 1..22: mol_type = other DNA
ttgcaggcggcttcctccaatc

SEQ ID NO: 107568 - DNA, 22 bp, synthetic construct
  misc_feature 1..22: note = chemically synthesized
  source 1..22: mol_type = other DNA
caggcggcttcctccaatcagt

SEQ ID NO: 107569 - DNA, 22 bp, synthetic construct
  misc_feature 1..22: note = chemically synthesized
  source 1..22: mol_type = other DNA
cctccaatcagttgaaaacctg

SEQ ID NO: 107570 - DNA, 22 bp, synthetic construct
  misc_feature 1..22: note = chemically synthesized
  source 1..22: mol_type = other DNA
ctccaatcagttgaaaacctga

SEQ ID NO: 107571 - DNA, 22 bp, synthetic construct
  misc_feature 1..22: note = chemically synthesized
  source 1..22: mol_type = other DNA
caatcagttgaaaacctgaata

SEQ ID NO: 107572 - DNA, 22 bp, synthetic construct
  misc_feature 1..22: note = chemically synthesized
  source 1..22: mol_type = other DNA
aaaacctgaatagaacaaaaag

SEQ ID NO: 107573 - DNA, 22 bp, synthetic construct
  misc_feature 1..22: note = chemically synthesized
  source 1..22: mol_type = other DNA
aatagaacaaaaagtctgaccc

SEQ ID NO: 107574 - DNA, 22 bp, synthetic construct
  misc_feature 1..22: note = chemically synthesized
  source 1..22: mol_type = other DNA
acccttccccaaatcagagaga

SEQ ID NO: 107575 - DNA, 22 bp, synthetic construct
  misc_feature 1..22: note = chemically synthesized
  source 1..22: mol_type = other DNA
ccccaaatcagagagaattatt

SEQ ID NO: 107576 - DNA, 22 bp, synthetic construct
  misc_feature 1..22: note = chemically synthesized
  source 1..22: mol_type = other DNA
cccaaatcagagagaattattc

SEQ ID NO: 107577 - DNA, 22 bp, synthetic construct
  misc_feature 1..22: note = chemically synthesized
  source 1..22: mol_type = other DNA
ttccttattgatggccttcaaa

SEQ ID NO: 107578 - DNA, 22 bp, synthetic construct
  misc_feature 1..22: note = chemically synthesized
  source 1..22: mol_type = other DNA
cttattgatggccttcaaactg

SEQ ID NO: 107579 - DNA, 22 bp, synthetic construct
  misc_feature 1..22: note = chemically synthesized
  source 1..22: mol_type = other DNA
attgatggccttcaaactggaa

SEQ ID NO: 107580 - DNA, 22 bp, synthetic construct
  misc_feature 1..22: note = chemically synthesized
  source 1..22: mol_type = other DNA
ttgatggccttcaaactggaat

SEQ ID NO: 107581 - DNA, 22 bp, synthetic construct
  misc_feature 1..22: note = chemically synthesized
  source 1..22: mol_type = other DNA
atggccttcaaactggaatcta

SEQ ID NO: 107582 - DNA, 22 bp, synthetic construct
  misc_feature 1..22: note = chemically synthesized
  source 1..22: mol_type = other DNA
caaactggaatctagacctttt

SEQ ID NO: 107583 - DNA, 22 bp, synthetic construct
  misc_feature 1..22: note = chemically synthesized
  source 1..22: mol_type = other DNA
aaactggaatctagaccttttt

SEQ ID NO: 107584 - DNA, 22 bp, synthetic construct
  misc_feature 1..22: note = chemically synthesized
  source 1..22: mol_type = other DNA
gaatctagacctttttttctgc

SEQ ID NO: 107585 - DNA, 22 bp, synthetic construct
  misc_feature 1..22: note = chemically synthesized
  source 1..22: mol_type = other DNA
gacctttttttctgcctttaga

SEQ ID NO: 107586 - DNA, 22 bp, synthetic construct
  misc_feature 1..22: note = chemically synthesized
  source 1..22: mol_type = other DNA
tttttctgcctttagattgaac

SEQ ID NO: 107587 - DNA, 22 bp, synthetic construct
  misc_feature 1..22: note = chemically synthesized
  source 1..22: mol_type = other DNA
ttttctgcctttagattgaact

SEQ ID NO: 107588 - DNA, 22 bp, synthetic construct
  misc_feature 1..22: note = chemically synthesized
  source 1..22: mol_type = other DNA
tttctgcctttagattgaactg

SEQ ID NO: 107589 - DNA, 22 bp, synthetic construct
  misc_feature 1..22: note = chemically synthesized
  source 1..22: mol_type = other DNA
ttctgcctttagattgaactga

SEQ ID NO: 107590 - DNA, 22 bp, synthetic construct
  misc_feature 1..22: note = chemically synthesized
  source 1..22: mol_type = other DNA
tctgcctttagattgaactgaa

SEQ ID NO: 107591 - DNA, 22 bp, synthetic construct
  misc_feature 1..22: note = chemically synthesized
  source 1..22: mol_type = other DNA
ctgcctttagattgaactgaaa

SEQ ID NO: 107592 - DNA, 22 bp, synthetic construct
  misc_feature 1..22: note = chemically synthesized
  source 1..22: mol_type = other DNA
tgcctttagattgaactgaaac

SEQ ID NO: 107593 - DNA, 22 bp, synthetic construct
  misc_feature 1..22: note = chemically synthesized
  source 1..22: mol_type = other DNA
cctttagattgaactgaaacat

SEQ ID NO: 107594 - DNA, 22 bp, synthetic construct
  misc_feature 1..22: note = chemically synthesized
  source 1..22: mol_type = other DNA
tagattgaactgaaacatcaaa

SEQ ID NO: 107595 - DNA, 22 bp, synthetic construct
  misc_feature 1..22: note = chemically synthesized
  source 1..22: mol_type = other DNA
agattgaactgaaacatcaaaa

SEQ ID NO: 107596 - DNA, 22 bp, synthetic construct
  misc_feature 1..22: note = chemically synthesized
  source 1..22: mol_type = other DNA
gattgaactgaaacatcaaaac

SEQ ID NO: 107597 - DNA, 22 bp, synthetic construct
  misc_feature 1..22: note = chemically synthesized
  source 1..22: mol_type = other DNA
aactgaaacatcaaaacttcct

SEQ ID NO: 107598 - DNA, 22 bp, synthetic construct
  misc_feature 1..22: note = chemically synthesized
  source 1..22: mol_type = other DNA
aaacatcaaaacttcctgggtc

SEQ ID NO: 107599 - DNA, 22 bp, synthetic construct
  misc_feature 1..22: note = chemically synthesized
  source 1..22: mol_type = other DNA
cctgggtctgaagcctgatggc

SEQ ID NO: 107600 - DNA, 22 bp, synthetic construct
  misc_feature 1..22: note = chemically synthesized
  source 1..22: mol_type = other DNA
ctgggtctgaagcctgatggct

SEQ ID NO: 107601 - DNA, 22 bp, synthetic construct
  misc_feature 1..22: note = chemically synthesized
  source 1..22: mol_type = other DNA
ggtctgaagcctgatggctttt

SEQ ID NO: 107602 - DNA, 22 bp, synthetic construct
  misc_feature 1..22: note = chemically synthesized
  source 1..22: mol_type = other DNA
aagcctgatggcttttgggttg

SEQ ID NO: 107603 - DNA, 22 bp, synthetic construct
  misc_feature 1..22: note = chemically synthesized
  source 1..22: mol_type = other DNA
atggcttttgggttgcaagtac

SEQ ID NO: 107604 - DNA, 22 bp, synthetic construct
  misc_feature 1..22: note = chemically synthesized
  source 1..22: mol_type = other DNA
ttgggttgcaagtacaccatca

SEQ ID NO: 107605 - DNA, 22 bp, synthetic construct
  misc_feature 1..22: note = chemically synthesized
  source 1..22: mol_type = other DNA
tgggttgcaagtacaccatcaa

SEQ ID NO: 107606 - DNA, 22 bp, synthetic construct
  misc_feature 1..22: note = chemically synthesized
  source 1..22: mol_type = other DNA
gggttgcaagtacaccatcaat

SEQ ID NO: 107607 - DNA, 22 bp, synthetic construct
  misc_feature 1..22: note = chemically synthesized
  source 1..22: mol_type = other DNA
ggttgcaagtacaccatcaatc

SEQ ID NO: 107608 - DNA, 22 bp, synthetic construct
  misc_feature 1..22: note = chemically synthesized
  source 1..22: mol_type = other DNA
caagtacaccatcaatcctcct

SEQ ID NO: 107609 - DNA, 22 bp, synthetic construct
  misc_feature 1..22: note = chemically synthesized
  source 1..22: mol_type = other DNA
ctgtttcccaggccttcagact

SEQ ID NO: 107610 - DNA, 22 bp, synthetic construct
  misc_feature 1..22: note = chemically synthesized
  source 1..22: mol_type = other DNA
tttcccaggccttcagacttgg

SEQ ID NO: 107611 - DNA, 22 bp, synthetic construct
  misc_feature 1..22: note = chemically synthesized
  source 1..22: mol_type = other DNA
cccaggccttcagacttggact

SEQ ID NO: 107612 - DNA, 22 bp, synthetic construct
  misc_feature 1..22: note = chemically synthesized
  source 1..22: mol_type = other DNA
ccaggccttcagacttggactg

SEQ ID NO: 107613 - DNA, 22 bp, synthetic construct
  misc_feature 1..22: note = chemically synthesized
  source 1..22: mol_type = other DNA
cagacttggactgggactaaac

SEQ ID NO: 107614 - DNA, 22 bp, synthetic construct
  misc_feature 1..22: note = chemically synthesized
  source 1..22: mol_type = other DNA
agacttggactgggactaaact

SEQ ID NO: 107615 - DNA, 22 bp, synthetic construct
  misc_feature 1..22: note = chemically synthesized
  source 1..22: mol_type = other DNA
ggactgggactaaactaccagg

SEQ ID NO: 107616 - DNA, 22 bp, synthetic construct
  misc_feature 1..22: note = chemically synthesized
  source 1..22: mol_type = other DNA
gactgggactaaactaccaggc

SEQ ID NO: 107617 - DNA, 22 bp, synthetic construct
  misc_feature 1..22: note = chemically synthesized
  source 1..22: mol_type = other DNA
ggactaaactaccaggctctct

SEQ ID NO: 107618 - DNA, 22 bp, synthetic construct
  misc_feature 1..22: note = chemically synthesized
  source 1..22: mol_type = other DNA
aactaccaggctctcttgagtt

SEQ ID NO: 107619 - DNA, 22 bp, synthetic construct
  misc_feature 1..22: note = chemically synthesized
  source 1..22: mol_type = other DNA
ccaggctctcttgagttttcaa

SEQ ID NO: 107620 - DNA, 22 bp, synthetic construct
  misc_feature 1..22: note = chemically synthesized
  source 1..22: mol_type = other DNA
tcttgagttttcaacttgatga

SEQ ID NO: 107621 - DNA, 22 bp, synthetic construct
  misc_feature 1..22: note = chemically synthesized
  source 1..22: mol_type = other DNA
ttgagttttcaacttgatgact

SEQ ID NO: 107622 - DNA, 22 bp, synthetic construct
  misc_feature 1..22: note = chemically synthesized
  source 1..22: mol_type = other DNA
gagttttcaacttgatgactca

SEQ ID NO: 107623 - DNA, 22 bp, synthetic construct
  misc_feature 1..22: note = chemically synthesized
  source 1..22: mol_type = other DNA
agttttcaacttgatgactcac

SEQ ID NO: 107624 - DNA, 22 bp, synthetic construct
  misc_feature 1..22: note = chemically synthesized
  source 1..22: mol_type = other DNA
tcaacttgatgactcactctgc

SEQ ID NO: 107625 - DNA, 22 bp, synthetic construct
  misc_feature 1..22: note = chemically synthesized
  source 1..22: mol_type = other DNA
caacttgatgactcactctgca

SEQ ID NO: 107626 - DNA, 22 bp, synthetic construct
  misc_feature 1..22: note = chemically synthesized
  source 1..22: mol_type = other DNA
aacttgatgactcactctgcat

SEQ ID NO: 107627 - DNA, 22 bp, synthetic construct
  misc_feature 1..22: note = chemically synthesized
  source 1..22: mol_type = other DNA
gatgactcactctgcatatctt

SEQ ID NO: 107628 - DNA, 22 bp, synthetic construct
  misc_feature 1..22: note = chemically synthesized
  source 1..22: mol_type = other DNA
atgactcactctgcatatcttg

SEQ ID NO: 107629 - DNA, 22 bp, synthetic construct
  misc_feature 1..22: note = chemically synthesized
  source 1..22: mol_type = other DNA
actctgcatatcttgggacttg

SEQ ID NO: 107630 - DNA, 22 bp, synthetic construct
  misc_feature 1..22: note = chemically synthesized
  source 1..22: mol_type = other DNA
tgcatatcttgggacttgcctt

SEQ ID NO: 107631 - DNA, 22 bp, synthetic construct
  misc_feature 1..22: note = chemically synthesized
  source 1..22: mol_type = other DNA
catatcttgggacttgccttcc

SEQ ID NO: 107632 - DNA, 22 bp, synthetic construct
  misc_feature 1..22: note = chemically synthesized
  source 1..22: mol_type = other DNA
gggacttgccttcctccataat

SEQ ID NO: 107633 - DNA, 22 bp, synthetic construct
  misc_feature 1..22: note = chemically synthesized
  source 1..22: mol_type = other DNA
ggacttgccttcctccataatc

SEQ ID NO: 107634 - DNA, 22 bp, synthetic construct
  misc_feature 1..22: note = chemically synthesized
  source 1..22: mol_type = other DNA
gccttcctccataatcacatct

SEQ ID NO: 107635 - DNA, 22 bp, synthetic construct
  misc_feature 1..22: note = chemically synthesized
  source 1..22: mol_type = other DNA
ccttcctccataatcacatctg

SEQ ID NO: 107636 - DNA, 22 bp, synthetic construct
  misc_feature 1..22: note = chemically synthesized
  source 1..22: mol_type = other DNA
cctccataatcacatctgctat

SEQ ID NO: 107637 - DNA, 22 bp, synthetic construct
  misc_feature 1..22: note = chemically synthesized
  source 1..22: mol_type = other DNA
ctccataatcacatctgctatt

SEQ ID NO: 107638 - DNA, 22 bp, synthetic construct
  misc_feature 1..22: note = chemically synthesized
  source 1..22: mol_type = other DNA
cataatcacatctgctatttcc

SEQ ID NO: 107639 - DNA, 22 bp, synthetic construct
  misc_feature 1..22: note = chemically synthesized
  source 1..22: mol_type = other DNA
ctatttccttatattaggttgg

SEQ ID NO: 107640 - DNA, 22 bp, synthetic construct
  misc_feature 1..22: note = chemically synthesized
  source 1..22: mol_type = other DNA
tttccttatattaggttggtgc

SEQ ID NO: 107641 - DNA, 22 bp, synthetic construct
  misc_feature 1..22: note = chemically synthesized
  source 1..22: mol_type = other DNA
ccttatattaggttggtgcaac

SEQ ID NO: 107642 - DNA, 22 bp, synthetic construct
  misc_feature 1..22: note = chemically synthesized
  source 1..22: mol_type = other DNA
cttatattaggttggtgcaaca

SEQ ID NO: 107643 - DNA, 22 bp, synthetic construct
  misc_feature 1..22: note = chemically synthesized
  source 1..22: mol_type = other DNA
atattaggttggtgcaacagta

SEQ ID NO: 107644 - DNA, 22 bp, synthetic construct
  misc_feature 1..22: note = chemically synthesized
  source 1..22: mol_type = other DNA
tattaggttggtgcaacagtaa

SEQ ID NO: 107645 - DNA, 22 bp, synthetic construct
  misc_feature 1..22: note = chemically synthesized
  source 1..22: mol_type = other DNA
ggttggtgcaacagtaattgca

SEQ ID NO: 107646 - DNA, 22 bp, synthetic construct
  misc_feature 1..22: note = chemically synthesized
  source 1..22: mol_type = other DNA
gtgcaacagtaattgcagtttt

SEQ ID NO: 107647 - DNA, 22 bp, synthetic construct
  misc_feature 1..22: note = chemically synthesized
  source 1..22: mol_type = other DNA
cagtttttgccattattttttt

SEQ ID NO: 107648 - DNA, 22 bp, synthetic construct
  misc_feature 1..22: note = chemically synthesized
  source 1..22: mol_type = other DNA
ttgccattatttttttttaatg

SEQ ID NO: 107649 - DNA, 22 bp, synthetic construct
  misc_feature 1..22: note = chemically synthesized
  source 1..22: mol_type = other DNA
tgccattatttttttttaatgc

SEQ ID NO: 107650 - DNA, 22 bp, synthetic construct
  misc_feature 1..22: note = chemically synthesized
  source 1..22: mol_type = other DNA
gccattatttttttttaatgca

SEQ ID NO: 107651 - DNA, 22 bp, synthetic construct
  misc_feature 1..22: note = chemically synthesized
  source 1..22: mol_type = other DNA
ccattatttttttttaatgcag

SEQ ID NO: 107652 - DNA, 22 bp, synthetic construct
  misc_feature 1..22: note = chemically synthesized
  source 1..22: mol_type = other DNA
tttttttttaatgcagtgaatt

SEQ ID NO: 107653 - DNA, 22 bp, synthetic construct
  misc_feature 1..22: note = chemically synthesized
  source 1..22: mol_type = other DNA
ttttttaatgcagtgaattaca

SEQ ID NO: 107654 - DNA, 22 bp, synthetic construct
  misc_feature 1..22: note = chemically synthesized
  source 1..22: mol_type = other DNA
tttttaatgcagtgaattacat

SEQ ID NO: 107655 - DNA, 22 bp, synthetic construct
  misc_feature 1..22: note = chemically synthesized
  source 1..22: mol_type = other DNA
ttttaatgcagtgaattacatt

SEQ ID NO: 107656 - DNA, 22 bp, synthetic construct
  misc_feature 1..22: note = chemically synthesized
  source 1..22: mol_type = other DNA
tttaatgcagtgaattacattt

SEQ ID NO: 107657 - DNA, 22 bp, synthetic construct
  misc_feature 1..22: note = chemically synthesized
  source 1..22: mol_type = other DNA
ttaatgcagtgaattacattta

SEQ ID NO: 107658 - DNA, 22 bp, synthetic construct
  misc_feature 1..22: note = chemically synthesized
  source 1..22: mol_type = other DNA
taatgcagtgaattacatttat

SEQ ID NO: 107659 - DNA, 22 bp, synthetic construct
  misc_feature 1..22: note = chemically synthesized
  source 1..22: mol_type = other DNA
aatgcagtgaattacatttatt

SEQ ID NO: 107660 - DNA, 22 bp, synthetic construct
  misc_feature 1..22: note = chemically synthesized
  source 1..22: mol_type = other DNA
atgcagtgaattacatttatta

SEQ ID NO: 107661 - DNA, 22 bp, synthetic construct
  misc_feature 1..22: note = chemically synthesized
  source 1..22: mol_type = other DNA
catttattaatttccatatttt

SEQ ID NO: 107662 - DNA, 22 bp, synthetic construct
  misc_feature 1..22: note = chemically synthesized
  source 1..22: mol_type = other DNA
attaatttccatatttttatgt

SEQ ID NO: 107663 - DNA, 22 bp, synthetic construct
  misc_feature 1..22: note = chemically synthesized
  source 1..22: mol_type = other DNA
ttaatttccatatttttatgta

SEQ ID NO: 107664 - DNA, 22 bp, synthetic construct
  misc_feature 1..22: note = chemically synthesized
  source 1..22: mol_type = other DNA
atttccatatttttatgtacat

SEQ ID NO: 107665 - DNA, 22 bp, synthetic construct
  misc_feature 1..22: note = chemically synthesized
  source 1..22: mol_type = other DNA
ccatatttttatgtacattcaa

SEQ ID NO: 107666 - DNA, 22 bp, synthetic construct
  misc_feature 1..22: note = chemically synthesized
  source 1..22: mol_type = other DNA
catatttttatgtacattcaat

SEQ ID NO: 107667 - DNA, 22 bp, synthetic construct
  misc_feature 1..22: note = chemically synthesized
  source 1..22: mol_type = other DNA
ttatgtacattcaattttttta

SEQ ID NO: 107668 - DNA, 22 bp, synthetic construct
  misc_feature 1..22: note = chemically synthesized
  source 1..22: mol_type = other DNA
tatgtacattcaatttttttaa

SEQ ID NO: 107669 - DNA, 22 bp, synthetic construct
  misc_feature 1..22: note = chemically synthesized
  source 1..22: mol_type = other DNA
atgtacattcaatttttttaat

SEQ ID NO: 107670 - DNA, 22 bp, synthetic construct
  misc_feature 1..22: note = chemically synthesized
  source 1..22: mol_type = other DNA
tgtacattcaatttttttaatt

SEQ ID NO: 107671 - DNA, 22 bp, synthetic construct
  misc_feature 1..22: note = chemically synthesized
  source 1..22: mol_type = other DNA
aatttttttaatttttaagttc

SEQ ID NO: 107672 - DNA, 22 bp, synthetic construct
  misc_feature 1..22: note = chemically synthesized
  source 1..22: mol_type = other DNA
ttttaatttttaagttctgagg

SEQ ID NO: 107673 - DNA, 22 bp, synthetic construct
  misc_feature 1..22: note = chemically synthesized
  source 1..22: mol_type = other DNA
tttaatttttaagttctgaggt

SEQ ID NO: 107674 - DNA, 22 bp, synthetic construct
  misc_feature 1..22: note = chemically synthesized
  source 1..22: mol_type = other DNA
ttaatttttaagttctgaggta

SEQ ID NO: 107675 - DNA, 22 bp, synthetic construct
  misc_feature 1..22: note = chemically synthesized
  source 1..22: mol_type = other DNA
taatttttaagttctgaggtac

SEQ ID NO: 107676 - DNA, 22 bp, synthetic construct
  misc_feature 1..22: note = chemically synthesized
  source 1..22: mol_type = other DNA
aatttttaagttctgaggtaca

SEQ ID NO: 107677 - DNA, 22 bp, synthetic construct
  misc_feature 1..22: note = chemically synthesized
  source 1..22: mol_type = other DNA
atttttaagttctgaggtacat

SEQ ID NO: 107678 - DNA, 22 bp, synthetic construct
  misc_feature 1..22: note = chemically synthesized
  source 1..22: mol_type = other DNA
ttaagttctgaggtacatgtgc

SEQ ID NO: 107679 - DNA, 22 bp, synthetic construct
  misc_feature 1..22: note = chemically synthesized
  source 1..22: mol_type = other DNA
taagttctgaggtacatgtgca

SEQ ID NO: 107680 - DNA, 22 bp, synthetic construct
  misc_feature 1..22: note = chemically synthesized
  source 1..22: mol_type = other DNA
aagttctgaggtacatgtgcag

SEQ ID NO: 107681 - DNA, 22 bp, synthetic construct
  misc_feature 1..22: note = chemically synthesized
  source 1..22: mol_type = other DNA
agttctgaggtacatgtgcagg

SEQ ID NO: 107682 - DNA, 22 bp, synthetic construct
  misc_feature 1..22: note = chemically synthesized
  source 1..22: mol_type = other DNA
tgaggtacatgtgcaggatgtg

SEQ ID NO: 107683 - DNA, 22 bp, synthetic construct
  misc_feature 1..22: note = chemically synthesized
  source 1..22: mol_type = other DNA
aggtacatgtgcaggatgtgca

SEQ ID NO: 107684 - DNA, 22 bp, synthetic construct
  misc_feature 1..22: note = chemically synthesized
  source 1..22: mol_type = other DNA
attacatacgtaaatgtgtgca

SEQ ID NO: 107685 - DNA, 22 bp, synthetic construct
  misc_feature 1..22: note = chemically synthesized
  source 1..22: mol_type = other DNA
ttacatacgtaaatgtgtgcaa

SEQ ID NO: 107686 - DNA, 22 bp, synthetic construct
  misc_feature 1..22: note = chemically synthesized
  source 1..22: mol_type = other DNA
catacgtaaatgtgtgcaatgg

SEQ ID NO: 107687 - DNA, 22 bp, synthetic construct
  misc_feature 1..22: note = chemically synthesized
  source 1..22: mol_type = other DNA
gctgtacctatcaacccatcac

SEQ ID NO: 107688 - DNA, 22 bp, synthetic construct
  misc_feature 1..22: note = chemically synthesized
  source 1..22: mol_type = other DNA
ctgtacctatcaacccatcacc

SEQ ID NO: 107689 - DNA, 22 bp, synthetic construct
  misc_feature 1..22: note = chemically synthesized
  source 1..22: mol_type = other DNA
tacctatcaacccatcacctag

SEQ ID NO: 107690 - DNA, 22 bp, synthetic construct
  misc_feature 1..22: note = chemically synthesized
  source 1..22: mol_type = other DNA
tcaacccatcacctaggtgtta

SEQ ID NO: 107691 - DNA, 22 bp, synthetic construct
  misc_feature 1..22: note = chemically synthesized
  source 1..22: mol_type = other DNA
ggtgttaagcccagcatgcatt

SEQ ID NO: 107692 - DNA, 22 bp, synthetic construct
  misc_feature 1..22: note = chemically synthesized
  source 1..22: mol_type = other DNA
agcccagcatgcattagctatt

SEQ ID NO: 107693 - DNA, 22 bp, synthetic construct
  misc_feature 1..22: note = chemically synthesized
  source 1..22: mol_type = other DNA
gctattttttctaatgctcccc

SEQ ID NO: 107694 - DNA, 22 bp, synthetic construct
  misc_feature 1..22: note = chemically synthesized
  source 1..22: mol_type = other DNA
ttttttctaatgctccccttca

SEQ ID NO: 107695 - DNA, 22 bp, synthetic construct
  misc_feature 1..22: note = chemically synthesized
  source 1..22: mol_type = other DNA
tttctaatgctccccttcacca

SEQ ID NO: 107696 - DNA, 22 bp, synthetic construct
  misc_feature 1..22: note = chemically synthesized
  source 1..22: mol_type = other DNA
ttctaatgctccccttcaccac

SEQ ID NO: 107697 - DNA, 22 bp, synthetic construct
  misc_feature 1..22: note = chemically synthesized
  source 1..22: mol_type = other DNA
tctaatgctccccttcaccaca

SEQ ID NO: 107698 - DNA, 22 bp, synthetic construct
  misc_feature 1..22: note = chemically synthesized
  source 1..22: mol_type = other DNA
ctaatgctccccttcaccacac

SEQ ID NO: 107699 - DNA, 22 bp, synthetic construct
  misc_feature 1..22: note = chemically synthesized
  source 1..22: mol_type = other DNA
taatgctccccttcaccacacc

SEQ ID NO: 107700 - DNA, 22 bp, synthetic construct
  misc_feature 1..22: note = chemically synthesized
  source 1..22: mol_type = other DNA
atgctccccttcaccacacccc

SEQ ID NO: 107701 - DNA, 22 bp, synthetic construct
  misc_feature 1..22: note = chemically synthesized
  source 1..22: mol_type = other DNA
cccttcaccacaccccatgccc

SEQ ID NO: 107702 - DNA, 22 bp, synthetic construct
  misc_feature 1..22: note = chemically synthesized
  source 1..22: mol_type = other DNA
caccacaccccatgccctgaca

SEQ ID NO: 107703 - DNA, 22 bp, synthetic construct
  misc_feature 1..22: note = chemically synthesized
  source 1..22: mol_type = other DNA
accacaccccatgccctgacag

SEQ ID NO: 107704 - DNA, 22 bp, synthetic construct
  misc_feature 1..22: note = chemically synthesized
  source 1..22: mol_type = other DNA
acaggctccagtgtgtgttctt

SEQ ID NO: 107705 - DNA, 22 bp, synthetic construct
  misc_feature 1..22: note = chemically synthesized
  source 1..22: mol_type = other DNA
cagtgtgtgttcttcccctcac

SEQ ID NO: 107706 - DNA, 22 bp, synthetic construct
  misc_feature 1..22: note = chemically synthesized
  source 1..22: mol_type = other DNA
ttcccctcactgtttccatgtg

SEQ ID NO: 107707 - DNA, 22 bp, synthetic construct
  misc_feature 1..22: note = chemically synthesized
  source 1..22: mol_type = other DNA
cccctcactgtttccatgtgtt

SEQ ID NO: 107708 - DNA, 22 bp, synthetic construct
  misc_feature 1..22: note = chemically synthesized
  source 1..22: mol_type = other DNA
ccctcactgtttccatgtgttc

SEQ ID NO: 107709 - DNA, 22 bp, synthetic construct
  misc_feature 1..22: note = chemically synthesized
  source 1..22: mol_type = other DNA
actgtttccatgtgttctcatt

SEQ ID NO: 107710 - DNA, 22 bp, synthetic construct
  misc_feature 1..22: note = chemically synthesized
  source 1..22: mol_type = other DNA
tttccatgtgttctcattctca

SEQ ID NO: 107711 - DNA, 22 bp, synthetic construct
  misc_feature 1..22: note = chemically synthesized
  source 1..22: mol_type = other DNA
ccatgtgttctcattctcattg

SEQ ID NO: 107712 - DNA, 22 bp, synthetic construct
  misc_feature 1..22: note = chemically synthesized
  source 1..22: mol_type = other DNA
catgtgttctcattctcattgt

SEQ ID NO: 107713 - DNA, 22 bp, synthetic construct
  misc_feature 1..22: note = chemically synthesized
  source 1..22: mol_type = other DNA
tcattctcattgttcagctccc

SEQ ID NO: 107714 - DNA, 22 bp, synthetic construct
  misc_feature 1..22: note = chemically synthesized
  source 1..22: mol_type = other DNA
attctcattgttcagctcccac

SEQ ID NO: 107715 - DNA, 22 bp, synthetic construct
  misc_feature 1..22: note = chemically synthesized
  source 1..22: mol_type = other DNA
tcattgttcagctcccacttct

SEQ ID NO: 107716 - DNA, 22 bp, synthetic construct
  misc_feature 1..22: note = chemically synthesized
  source 1..22: mol_type = other DNA
attgttcagctcccacttctaa

SEQ ID NO: 107717 - DNA, 22 bp, synthetic construct
  misc_feature 1..22: note = chemically synthesized
  source 1..22: mol_type = other DNA
ttcagctcccacttctaagtga

SEQ ID NO: 107718 - DNA, 22 bp, synthetic construct
  misc_feature 1..22: note = chemically synthesized
  source 1..22: mol_type = other DNA
agctcccacttctaagtgagaa

SEQ ID NO: 107719 - DNA, 22 bp, synthetic construct
  misc_feature 1..22: note = chemically synthesized
  source 1..22: mol_type = other DNA
ccacttctaagtgagaacatgt

SEQ ID NO: 107720 - DNA, 22 bp, synthetic construct
  misc_feature 1..22: note = chemically synthesized
  source 1..22: mol_type = other DNA
ctaagtgagaacatgtggtgtt

SEQ ID NO: 107721 - DNA, 22 bp, synthetic construct
  misc_feature 1..22: note = chemically synthesized
  source 1..22: mol_type = other DNA
taagtgagaacatgtggtgttt

SEQ ID NO: 107722 - DNA, 22 bp, synthetic construct
  misc_feature 1..22: note = chemically synthesized
  source 1..22: mol_type = other DNA
agtgagaacatgtggtgtttgg

SEQ ID NO: 107723 - DNA, 22 bp, synthetic construct
  misc_feature 1..22: note = chemically synthesized
  source 1..22: mol_type = other DNA
ggttttctgttcctgcattagt

SEQ ID NO: 107724 - DNA, 22 bp, synthetic construct
  misc_feature 1..22: note = chemically synthesized
  source 1..22: mol_type = other DNA
gttttctgttcctgcattagtt

SEQ ID NO: 107725 - DNA, 22 bp, synthetic construct
  misc_feature 1..22: note = chemically synthesized
  source 1..22: mol_type = other DNA
tctgttcctgcattagtttact

SEQ ID NO: 107726 - DNA, 22 bp, synthetic construct
  misc_feature 1..22: note = chemically synthesized
  source 1..22: mol_type = other DNA
ctgttcctgcattagtttactg

SEQ ID NO: 107727 - DNA, 22 bp, synthetic construct
  misc_feature 1..22: note = chemically synthesized
  source 1..22: mol_type = other DNA
tgttcctgcattagtttactga

SEQ ID NO: 107728 - DNA, 22 bp, synthetic construct
  misc_feature 1..22: note = chemically synthesized
  source 1..22: mol_type = other DNA
ttcctgcattagtttactgaag

SEQ ID NO: 107729 - DNA, 22 bp, synthetic construct
  misc_feature 1..22: note = chemically synthesized
  source 1..22: mol_type = other DNA
ctgcattagtttactgaagata

SEQ ID NO: 107730 - DNA, 22 bp, synthetic construct
  misc_feature 1..22: note = chemically synthesized
  source 1..22: mol_type = other DNA
cattagtttactgaagataatg

SEQ ID NO: 107731 - DNA, 22 bp, synthetic construct
  misc_feature 1..22: note = chemically synthesized
  source 1..22: mol_type = other DNA
gtttactgaagataatggcttt

SEQ ID NO: 107732 - DNA, 22 bp, synthetic construct
  misc_feature 1..22: note = chemically synthesized
  source 1..22: mol_type = other DNA
actgaagataatggctttcggc

SEQ ID NO: 107733 - DNA, 22 bp, synthetic construct
  misc_feature 1..22: note = chemically synthesized
  source 1..22: mol_type = other DNA
ctgaagataatggctttcggct

SEQ ID NO: 107734 - DNA, 22 bp, synthetic construct
  misc_feature 1..22: note = chemically synthesized
  source 1..22: mol_type = other DNA
aagataatggctttcggctcca

SEQ ID NO: 107735 - DNA, 22 bp, synthetic construct
  misc_feature 1..22: note = chemically synthesized
  source 1..22: mol_type = other DNA
tcggctccatccatgtcccagc

SEQ ID NO: 107736 - DNA, 22 bp, synthetic construct
  misc_feature 1..22: note = chemically synthesized
  source 1..22: mol_type = other DNA
cggctccatccatgtcccagca

SEQ ID NO: 107737 - DNA, 22 bp, synthetic construct
  misc_feature 1..22: note = chemically synthesized
  source 1..22: mol_type = other DNA
ggctccatccatgtcccagcaa

SEQ ID NO: 107738 - DNA, 22 bp, synthetic construct
  misc_feature 1..22: note = chemically synthesized
  source 1..22: mol_type = other DNA
catccatgtcccagcaaagggc

SEQ ID NO: 107739 - DNA, 22 bp, synthetic construct
  misc_feature 1..22: note = chemically synthesized
  source 1..22: mol_type = other DNA
atccctttttatggttagatag

SEQ ID NO: 107740 - DNA, 22 bp, synthetic construct
  misc_feature 1..22: note = chemically synthesized
  source 1..22: mol_type = other DNA
tttatggttagatagtatttca

SEQ ID NO: 107741 - DNA, 22 bp, synthetic construct
  misc_feature 1..22: note = chemically synthesized
  source 1..22: mol_type = other DNA
ttatggttagatagtatttcat

SEQ ID NO: 107742 - DNA, 22 bp, synthetic construct
  misc_feature 1..22: note = chemically synthesized
  source 1..22: mol_type = other DNA
tatggttagatagtatttcatg

SEQ ID NO: 107743 - DNA, 22 bp, synthetic construct
  misc_feature 1..22: note = chemically synthesized
  source 1..22: mol_type = other DNA
atggttagatagtatttcatgg

SEQ ID NO: 107744 - DNA, 22 bp, synthetic construct
  misc_feature 1..22: note = chemically synthesized
  source 1..22: mol_type = other DNA
tggttagatagtatttcatggt

SEQ ID NO: 107745 - DNA, 22 bp, synthetic construct
  misc_feature 1..22: note = chemically synthesized
  source 1..22: mol_type = other DNA
gatagtatttcatggtttatat

SEQ ID NO: 107746 - DNA, 22 bp, synthetic construct
  misc_feature 1..22: note = chemically synthesized
  source 1..22: mol_type = other DNA
catggtttatatgtaccacatt

SEQ ID NO: 107747 - DNA, 22 bp, synthetic construct
  misc_feature 1..22: note = chemically synthesized
  source 1..22: mol_type = other DNA
atggtttatatgtaccacattt

SEQ ID NO: 107748 - DNA, 22 bp, synthetic construct
  misc_feature 1..22: note = chemically synthesized
  source 1..22: mol_type = other DNA
atatgtaccacattttttaaat

SEQ ID NO: 107749 - DNA, 22 bp, synthetic construct
  misc_feature 1..22: note = chemically synthesized
  source 1..22: mol_type = other DNA
tatgtaccacattttttaaatt

SEQ ID NO: 107750 - DNA, 22 bp, synthetic construct
  misc_feature 1..22: note = chemically synthesized
  source 1..22: mol_type = other DNA
tttaaattgtctatcattgatg

SEQ ID NO: 107751 - DNA, 22 bp, synthetic construct
  misc_feature 1..22: note = chemically synthesized
  source 1..22: mol_type = other DNA
ttaaattgtctatcattgatgg

SEQ ID NO: 107752 - DNA, 22 bp, synthetic construct
  misc_feature 1..22: note = chemically synthesized
  source 1..22: mol_type = other DNA
taaattgtctatcattgatggc

SEQ ID NO: 107753 - DNA, 22 bp, synthetic construct
  misc_feature 1..22: note = chemically synthesized
  source 1..22: mol_type = other DNA
aaattgtctatcattgatggcc

SEQ ID NO: 107754 - DNA, 22 bp, synthetic construct
  misc_feature 1..22: note = chemically synthesized
  source 1..22: mol_type = other DNA
aattgtctatcattgatggcca

SEQ ID NO: 107755 - DNA, 22 bp, synthetic construct
  misc_feature 1..22: note = chemically synthesized
  source 1..22: mol_type = other DNA
tctatcattgatggccatttgg

SEQ ID NO: 107756 - DNA, 22 bp, synthetic construct
  misc_feature 1..22: note = chemically synthesized
  source 1..22: mol_type = other DNA
tcattgatggccatttgggttg

SEQ ID NO: 107757 - DNA, 22 bp, synthetic construct
  misc_feature 1..22: note = chemically synthesized
  source 1..22: mol_type = other DNA
atggccatttgggttgattcta

SEQ ID NO: 107758 - DNA, 22 bp, synthetic construct
  misc_feature 1..22: note = chemically synthesized
  source 1..22: mol_type = other DNA
gggttgattctatgtctttgct

SEQ ID NO: 107759 - DNA, 22 bp, synthetic construct
  misc_feature 1..22: note = chemically synthesized
  source 1..22: mol_type = other DNA
ggttgattctatgtctttgcta

SEQ ID NO: 107760 - DNA, 22 bp, synthetic construct
  misc_feature 1..22: note = chemically synthesized
  source 1..22: mol_type = other DNA
attctatgtctttgctattgtg

SEQ ID NO: 107761 - DNA, 22 bp, synthetic construct
  misc_feature 1..22: note = chemically synthesized
  source 1..22: mol_type = other DNA
tatgtctttgctattgtgaata

SEQ ID NO: 107762 - DNA, 22 bp, synthetic construct
  misc_feature 1..22: note = chemically synthesized
  source 1..22: mol_type = other DNA
tgtctttgctattgtgaatagt

SEQ ID NO: 107763 - DNA, 22 bp, synthetic construct
  misc_feature 1..22: note = chemically synthesized
  source 1..22: mol_type = other DNA
tgctattgtgaatagtgctaca

SEQ ID NO: 107764 - DNA, 22 bp, synthetic construct
  misc_feature 1..22: note = chemically synthesized
  source 1..22: mol_type = other DNA
gctattgtgaatagtgctacaa

SEQ ID NO: 107765 - DNA, 22 bp, synthetic construct
  misc_feature 1..22: note = chemically synthesized
  source 1..22: mol_type = other DNA
ctattgtgaatagtgctacaat

SEQ ID NO: 107766 - DNA, 22 bp, synthetic construct
  misc_feature 1..22: note = chemically synthesized
  source 1..22: mol_type = other DNA
ttgtgaatagtgctacaatgaa

SEQ ID NO: 107767 - DNA, 22 bp, synthetic construct
  misc_feature 1..22: note = chemically synthesized
  source 1..22: mol_type = other DNA
tgaatagtgctacaatgaacat

SEQ ID NO: 107768 - DNA, 22 bp, synthetic construct
  misc_feature 1..22: note = chemically synthesized
  source 1..22: mol_type = other DNA
caatgaacatacatgtgcatgt

SEQ ID NO: 107769 - DNA, 22 bp, synthetic construct
  misc_feature 1..22: note = chemically synthesized
  source 1..22: mol_type = other DNA
agtaatagaatgatttatactc

SEQ ID NO: 107770 - DNA, 22 bp, synthetic construct
  misc_feature 1..22: note = chemically synthesized
  source 1..22: mol_type = other DNA
gtaatagaatgatttatactcc

SEQ ID NO: 107771 - DNA, 22 bp, synthetic construct
  misc_feature 1..22: note = chemically synthesized
  source 1..22: mol_type = other DNA
atactcctttaggtatataccc

SEQ ID NO: 107772 - DNA, 22 bp, synthetic construct
  misc_feature 1..22: note = chemically synthesized
  source 1..22: mol_type = other DNA
tactcctttaggtatataccca

SEQ ID NO: 107773 - DNA, 22 bp, synthetic construct
  misc_feature 1..22: note = chemically synthesized
  source 1..22: mol_type = other DNA
ctttaggtatatacccagtaat

SEQ ID NO: 107774 - DNA, 22 bp, synthetic construct
  misc_feature 1..22: note = chemically synthesized
  source 1..22: mol_type = other DNA
taggtatatacccagtaatggg

SEQ ID NO: 107775 - DNA, 22 bp, synthetic construct
  misc_feature 1..22: note = chemically synthesized
  source 1..22: mol_type = other DNA
aggtatatacccagtaatggga

SEQ ID NO: 107776 - DNA, 22 bp, synthetic construct
  misc_feature 1..22: note = chemically synthesized
  source 1..22: mol_type = other DNA
ggtatatacccagtaatgggat

SEQ ID NO: 107777 - DNA, 22 bp, synthetic construct
  misc_feature 1..22: note = chemically synthesized
  source 1..22: mol_type = other DNA
tgaggtcaaatggtatttctgg

SEQ ID NO: 107778 - DNA, 22 bp, synthetic construct
  misc_feature 1..22: note = chemically synthesized
  source 1..22: mol_type = other DNA
ctggttctaaatctttgaggaa

SEQ ID NO: 107779 - DNA, 22 bp, synthetic construct
  misc_feature 1..22: note = chemically synthesized
  source 1..22: mol_type = other DNA
tggttctaaatctttgaggaat

SEQ ID NO: 107780 - DNA, 22 bp, synthetic construct
  misc_feature 1..22: note = chemically synthesized
  source 1..22: mol_type = other DNA
gttctaaatctttgaggaattg

SEQ ID NO: 107781 - DNA, 22 bp, synthetic construct
  misc_feature 1..22: note = chemically synthesized
  source 1..22: mol_type = other DNA
taaatctttgaggaattgccac

SEQ ID NO: 107782 - DNA, 22 bp, synthetic construct
  misc_feature 1..22: note = chemically synthesized
  source 1..22: mol_type = other DNA
aatctttgaggaattgccacac

SEQ ID NO: 107783 - DNA, 22 bp, synthetic construct
  misc_feature 1..22: note = chemically synthesized
  source 1..22: mol_type = other DNA
tgaggaattgccacactgtctt

SEQ ID NO: 107784 - DNA, 22 bp, synthetic construct
  misc_feature 1..22: note = chemically synthesized
  source 1..22: mol_type = other DNA
gaggaattgccacactgtcttc

SEQ ID NO: 107785 - DNA, 22 bp, synthetic construct
  misc_feature 1..22: note = chemically synthesized
  source 1..22: mol_type = other DNA
aggaattgccacactgtcttcc

SEQ ID NO: 107786 - DNA, 22 bp, synthetic construct
  misc_feature 1..22: note = chemically synthesized
  source 1..22: mol_type = other DNA
ccacactgtcttccacaatggt

SEQ ID NO: 107787 - DNA, 22 bp, synthetic construct
  misc_feature 1..22: note = chemically synthesized
  source 1..22: mol_type = other DNA
tcttccacaatggttgaattag

SEQ ID NO: 107788 - DNA, 22 bp, synthetic construct
  misc_feature 1..22: note = chemically synthesized
  source 1..22: mol_type = other DNA
ccacaatggttgaattagttta

SEQ ID NO: 107789 - DNA, 22 bp, synthetic construct
  misc_feature 1..22: note = chemically synthesized
  source 1..22: mol_type = other DNA
cacaatggttgaattagtttac

SEQ ID NO: 107790 - DNA, 22 bp, synthetic construct
  misc_feature 1..22: note = chemically synthesized
  source 1..22: mol_type = other DNA
aattagtttacagtcccaccaa

SEQ ID NO: 107791 - DNA, 22 bp, synthetic construct
  misc_feature 1..22: note = chemically synthesized
  source 1..22: mol_type = other DNA
gtttacagtcccaccaacagtg

SEQ ID NO: 107792 - DNA, 22 bp, synthetic construct
  misc_feature 1..22: note = chemically synthesized
  source 1..22: mol_type = other DNA
acagtcccaccaacagtgtaaa

SEQ ID NO: 107793 - DNA, 22 bp, synthetic construct
  misc_feature 1..22: note = chemically synthesized
  source 1..22: mol_type = other DNA
cagtcccaccaacagtgtaaaa

SEQ ID NO: 107794 - DNA, 22 bp, synthetic construct
  misc_feature 1..22: note = chemically synthesized
  source 1..22: mol_type = other DNA
ctatttctctgcaaccttgcta

SEQ ID NO: 107795 - DNA, 22 bp, synthetic construct
  misc_feature 1..22: note = chemically synthesized
  source 1..22: mol_type = other DNA
tttctctgcaaccttgctagca

SEQ ID NO: 107796 - DNA, 22 bp, synthetic construct
  misc_feature 1..22: note = chemically synthesized
  source 1..22: mol_type = other DNA
ctctgcaaccttgctagcatct

SEQ ID NO: 107797 - DNA, 22 bp, synthetic construct
  misc_feature 1..22: note = chemically synthesized
  source 1..22: mol_type = other DNA
tctgcaaccttgctagcatctg

SEQ ID NO: 107798 - DNA, 22 bp, synthetic construct
  misc_feature 1..22: note = chemically synthesized
  source 1..22: mol_type = other DNA
tgcaaccttgctagcatctgtt

SEQ ID NO: 107799 - DNA, 22 bp, synthetic construct
  misc_feature 1..22: note = chemically synthesized
  source 1..22: mol_type = other DNA
caaccttgctagcatctgttgt

SEQ ID NO: 107800 - DNA, 22 bp, synthetic construct
  misc_feature 1..22: note = chemically synthesized
  source 1..22: mol_type = other DNA
gctagcatctgttgtttcttga

SEQ ID NO: 107801 - DNA, 22 bp, synthetic construct
  misc_feature 1..22: note = chemically synthesized
  source 1..22: mol_type = other DNA
ctagcatctgttgtttcttgac

SEQ ID NO: 107802 - DNA, 22 bp, synthetic construct
  misc_feature 1..22: note = chemically synthesized
  source 1..22: mol_type = other DNA
gcatctgttgtttcttgacttt

SEQ ID NO: 107803 - DNA, 22 bp, synthetic construct
  misc_feature 1..22: note = chemically synthesized
  source 1..22: mol_type = other DNA
ttgtttcttgactttaaaaacc

SEQ ID NO: 107804 - DNA, 22 bp, synthetic construct
  misc_feature 1..22: note = chemically synthesized
  source 1..22: mol_type = other DNA
tttcttgactttaaaaaccacc

SEQ ID NO: 107805 - DNA, 22 bp, synthetic construct
  misc_feature 1..22: note = chemically synthesized
  source 1..22: mol_type = other DNA
cttgactttaaaaaccaccatt

SEQ ID NO: 107806 - DNA, 22 bp, synthetic construct
  misc_feature 1..22: note = chemically synthesized
  source 1..22: mol_type = other DNA
ttgactttaaaaaccaccattc

SEQ ID NO: 107807 - DNA, 22 bp, synthetic construct
  misc_feature 1..22: note = chemically synthesized
  source 1..22: mol_type = other DNA
gactttaaaaaccaccattctg

SEQ ID NO: 107808 - DNA, 22 bp, synthetic construct
  misc_feature 1..22: note = chemically synthesized
  source 1..22: mol_type = other DNA
actttaaaaaccaccattctga

SEQ ID NO: 107809 - DNA, 22 bp, synthetic construct
  misc_feature 1..22: note = chemically synthesized
  source 1..22: mol_type = other DNA
taaaaaccaccattctgactgg

SEQ ID NO: 107810 - DNA, 22 bp, synthetic construct
  misc_feature 1..22: note = chemically synthesized
  source 1..22: mol_type = other DNA
aaaaaccaccattctgactggt

SEQ ID NO: 107811 - DNA, 22 bp, synthetic construct
  misc_feature 1..22: note = chemically synthesized
  source 1..22: mol_type = other DNA
aaaaccaccattctgactggtg

SEQ ID NO: 107812 - DNA, 22 bp, synthetic construct
  misc_feature 1..22: note = chemically synthesized
  source 1..22: mol_type = other DNA
tgactggtgtcagatggtattt

SEQ ID NO: 107813 - DNA, 22 bp, synthetic construct
  misc_feature 1..22: note = chemically synthesized
  source 1..22: mol_type = other DNA
actggtgtcagatggtatttca

SEQ ID NO: 107814 - DNA, 22 bp, synthetic construct
  misc_feature 1..22: note = chemically synthesized
  source 1..22: mol_type = other DNA
gtgtcagatggtatttcattgt

SEQ ID NO: 107815 - DNA, 22 bp, synthetic construct
  misc_feature 1..22: note = chemically synthesized
  source 1..22: mol_type = other DNA
cattgtggttttgatttgcatt

SEQ ID NO: 107816 - DNA, 22 bp, synthetic construct
  misc_feature 1..22: note = chemically synthesized
  source 1..22: mol_type = other DNA
attgtggttttgatttgcattt

SEQ ID NO: 107817 - DNA, 22 bp, synthetic construct
  misc_feature 1..22: note = chemically synthesized
  source 1..22: mol_type = other DNA
tggttttgatttgcatttctct

SEQ ID NO: 107818 - DNA, 22 bp, synthetic construct
  misc_feature 1..22: note = chemically synthesized
  source 1..22: mol_type = other DNA
tgatttgcatttctctaatgat

SEQ ID NO: 107819 - DNA, 22 bp, synthetic construct
  misc_feature 1..22: note = chemically synthesized
  source 1..22: mol_type = other DNA
gatttgcatttctctaatgatc

SEQ ID NO: 107820 - DNA, 22 bp, synthetic construct
  misc_feature 1..22: note = chemically synthesized
  source 1..22: mol_type = other DNA
atttgcatttctctaatgatca

SEQ ID NO: 107821 - DNA, 22 bp, synthetic construct
  misc_feature 1..22: note = chemically synthesized
  source 1..22: mol_type = other DNA
gcatttctctaatgatcagtga

SEQ ID NO: 107822 - DNA, 22 bp, synthetic construct
  misc_feature 1..22: note = chemically synthesized
  source 1..22: mol_type = other DNA
catttctctaatgatcagtgac

SEQ ID NO: 107823 - DNA, 22 bp, synthetic construct
  misc_feature 1..22: note = chemically synthesized
  source 1..22: mol_type = other DNA
ctctaatgatcagtgacattga

SEQ ID NO: 107824 - DNA, 22 bp, synthetic construct
  misc_feature 1..22: note = chemically synthesized
  source 1..22: mol_type = other DNA
tctaatgatcagtgacattgag

SEQ ID NO: 107825 - DNA, 22 bp, synthetic construct
  misc_feature 1..22: note = chemically synthesized
  source 1..22: mol_type = other DNA
taatgatcagtgacattgagac

SEQ ID NO: 107826 - DNA, 22 bp, synthetic construct
  misc_feature 1..22: note = chemically synthesized
  source 1..22: mol_type = other DNA
atgatcagtgacattgagactt

SEQ ID NO: 107827 - DNA, 22 bp, synthetic construct
  misc_feature 1..22: note = chemically synthesized
  source 1..22: mol_type = other DNA
agacttttttcgtatgtttctt

SEQ ID NO: 107828 - DNA, 22 bp, synthetic construct
  misc_feature 1..22: note = chemically synthesized
  source 1..22: mol_type = other DNA
ttttcgtatgtttcttagccac

SEQ ID NO: 107829 - DNA, 22 bp, synthetic construct
  misc_feature 1..22: note = chemically synthesized
  source 1..22: mol_type = other DNA
tttcgtatgtttcttagccaca

SEQ ID NO: 107830 - DNA, 22 bp, synthetic construct
  misc_feature 1..22: note = chemically synthesized
  source 1..22: mol_type = other DNA
ttcgtatgtttcttagccacat

SEQ ID NO: 107831 - DNA, 22 bp, synthetic construct
  misc_feature 1..22: note = chemically synthesized
  source 1..22: mol_type = other DNA
tcgtatgtttcttagccacata

SEQ ID NO: 107832 - DNA, 22 bp, synthetic construct
  misc_feature 1..22: note = chemically synthesized
  source 1..22: mol_type = other DNA
cgtatgtttcttagccacataa

SEQ ID NO: 107833 - DNA, 22 bp, synthetic construct
  misc_feature 1..22: note = chemically synthesized
  source 1..22: mol_type = other DNA
gtatgtttcttagccacataaa

SEQ ID NO: 107834 - DNA, 22 bp, synthetic construct
  misc_feature 1..22: note = chemically synthesized
  source 1..22: mol_type = other DNA
cttagccacataaatgtcttct

SEQ ID NO: 107835 - DNA, 22 bp, synthetic construct
  misc_feature 1..22: note = chemically synthesized
  source 1..22: mol_type = other DNA
ttagccacataaatgtcttctt

SEQ ID NO: 107836 - DNA, 22 bp, synthetic construct
  misc_feature 1..22: note = chemically synthesized
  source 1..22: mol_type = other DNA
agccacataaatgtcttctttt

SEQ ID NO: 107837 - DNA, 22 bp, synthetic construct
  misc_feature 1..22: note = chemically synthesized
  source 1..22: mol_type = other DNA
gccacataaatgtcttcttttg

SEQ ID NO: 107838 - DNA, 22 bp, synthetic construct
  misc_feature 1..22: note = chemically synthesized
  source 1..22: mol_type = other DNA
cttttgagaagtgtctgttcat

SEQ ID NO: 107839 - DNA, 22 bp, synthetic construct
  misc_feature 1..22: note = chemically synthesized
  source 1..22: mol_type = other DNA
ttttgagaagtgtctgttcatg

SEQ ID NO: 107840 - DNA, 22 bp, synthetic construct
  misc_feature 1..22: note = chemically synthesized
  source 1..22: mol_type = other DNA
ttgagaagtgtctgttcatgtc

SEQ ID NO: 107841 - DNA, 22 bp, synthetic construct
  misc_feature 1..22: note = chemically synthesized
  source 1..22: mol_type = other DNA
tgagaagtgtctgttcatgtcc

SEQ ID NO: 107842 - DNA, 22 bp, synthetic construct
  misc_feature 1..22: note = chemically synthesized
  source 1..22: mol_type = other DNA
gagaagtgtctgttcatgtcct

SEQ ID NO: 107843 - DNA, 22 bp, synthetic construct
  misc_feature 1..22: note = chemically synthesized
  source 1..22: mol_type = other DNA
agaagtgtctgttcatgtcctt

SEQ ID NO: 107844 - DNA, 22 bp, synthetic construct
  misc_feature 1..22: note = chemically synthesized
  source 1..22: mol_type = other DNA
ttcatgtcctttgcccactttt

SEQ ID NO: 107845 - DNA, 22 bp, synthetic construct
  misc_feature 1..22: note = chemically synthesized
  source 1..22: mol_type = other DNA
atgtcctttgcccactttttaa

SEQ ID NO: 107846 - DNA, 22 bp, synthetic construct
  misc_feature 1..22: note = chemically synthesized
  source 1..22: mol_type = other DNA
tgcccactttttaatggggttg

SEQ ID NO: 107847 - DNA, 22 bp, synthetic construct
  misc_feature 1..22: note = chemically synthesized
  source 1..22: mol_type = other DNA
gcccactttttaatggggttgt

SEQ ID NO: 107848 - DNA, 22 bp, synthetic construct
  misc_feature 1..22: note = chemically synthesized
  source 1..22: mol_type = other DNA
cccactttttaatggggttgtt

SEQ ID NO: 107849 - DNA, 22 bp, synthetic construct
  misc_feature 1..22: note = chemically synthesized
  source 1..22: mol_type = other DNA
tttaatggggttgtttgtgtgt

SEQ ID NO: 107850 - DNA, 22 bp, synthetic construct
  misc_feature 1..22: note = chemically synthesized
  source 1..22: mol_type = other DNA
ttaatggggttgtttgtgtgtt

SEQ ID NO: 107851 - DNA, 22 bp, synthetic construct
  misc_feature 1..22: note = chemically synthesized
  source 1..22: mol_type = other DNA
taatggggttgtttgtgtgttt

SEQ ID NO: 107852 - DNA, 22 bp, synthetic construct
  misc_feature 1..22: note = chemically synthesized
  source 1..22: mol_type = other DNA
aatggggttgtttgtgtgtttc

SEQ ID NO: 107853 - DNA, 22 bp, synthetic construct
  misc_feature 1..22: note = chemically synthesized
  source 1..22: mol_type = other DNA
atggggttgtttgtgtgtttct

SEQ ID NO: 107854 - DNA, 22 bp, synthetic construct
  misc_feature 1..22: note = chemically synthesized
  source 1..22: mol_type = other DNA
tttgtgtgtttcttttgtaaat

SEQ ID NO: 107855 - DNA, 22 bp, synthetic construct
  misc_feature 1..22: note = chemically synthesized
  source 1..22: mol_type = other DNA
gtgtgtttcttttgtaaatatg

SEQ ID NO: 107856 - DNA, 22 bp, synthetic construct
  misc_feature 1..22: note = chemically synthesized
  source 1..22: mol_type = other DNA
tgtgtttcttttgtaaatatgt

SEQ ID NO: 107857 - DNA, 22 bp, synthetic construct
  misc_feature 1..22: note = chemically synthesized
  source 1..22: mol_type = other DNA
cttttgtaaatatgtctaagtt

SEQ ID NO: 107858 - DNA, 22 bp, synthetic construct
  misc_feature 1..22: note = chemically synthesized
  source 1..22: mol_type = other DNA
ttttgtaaatatgtctaagttc

SEQ ID NO: 107859 - DNA, 22 bp, synthetic construct
  misc_feature 1..22: note = chemically synthesized
  source 1..22: mol_type = other DNA
ttgtaaatatgtctaagttcct

SEQ ID NO: 107860 - DNA, 22 bp, synthetic construct
  misc_feature 1..22: note = chemically synthesized
  source 1..22: mol_type = other DNA
tgtaaatatgtctaagttcctc

SEQ ID NO: 107861 - DNA, 22 bp, synthetic construct
  misc_feature 1..22: note = chemically synthesized
  source 1..22: mol_type = other DNA
gtaaatatgtctaagttcctca

SEQ ID NO: 107862 - DNA, 22 bp, synthetic construct
  misc_feature 1..22: note = chemically synthesized
  source 1..22: mol_type = other DNA
taaatatgtctaagttcctcat

SEQ ID NO: 107863 - DNA, 22 bp, synthetic construct
  misc_feature 1..22: note = chemically synthesized
  source 1..22: mol_type = other DNA
agttcctcatagattctggata

SEQ ID NO: 107864 - DNA, 22 bp, synthetic construct
  misc_feature 1..22: note = chemically synthesized
  source 1..22: mol_type = other DNA
ctcatagattctggatattaga

SEQ ID NO: 107865 - DNA, 22 bp, synthetic construct
  misc_feature 1..22: note = chemically synthesized
  source 1..22: mol_type = other DNA
atagattctggatattagacct

SEQ ID NO: 107866 - DNA, 22 bp, synthetic construct
  misc_feature 1..22: note = chemically synthesized
  source 1..22: mol_type = other DNA
tggatattagacctttgtcaga

SEQ ID NO: 107867 - DNA, 22 bp, synthetic construct
  misc_feature 1..22: note = chemically synthesized
  source 1..22: mol_type = other DNA
gatattagacctttgtcagatg

SEQ ID NO: 107868 - DNA, 22 bp, synthetic construct
  misc_feature 1..22: note = chemically synthesized
  source 1..22: mol_type = other DNA
gacctttgtcagatgggtagat

SEQ ID NO: 107869 - DNA, 22 bp, synthetic construct
  misc_feature 1..22: note = chemically synthesized
  source 1..22: mol_type = other DNA
tgtcagatgggtagattgcaga

SEQ ID NO: 107870 - DNA, 22 bp, synthetic construct
  misc_feature 1..22: note = chemically synthesized
  source 1..22: mol_type = other DNA
gtcagatgggtagattgcagaa

SEQ ID NO: 107871 - DNA, 22 bp, synthetic construct
  misc_feature 1..22: note = chemically synthesized
  source 1..22: mol_type = other DNA
tcagatgggtagattgcagaaa

SEQ ID NO: 107872 - DNA, 22 bp, synthetic construct
  misc_feature 1..22: note = chemically synthesized
  source 1..22: mol_type = other DNA
cagaaattttctcccattctgt

SEQ ID NO: 107873 - DNA, 22 bp, synthetic construct
  misc_feature 1..22: note = chemically synthesized
  source 1..22: mol_type = other DNA
tctcccattctgtaggttgcct

SEQ ID NO: 107874 - DNA, 22 bp, synthetic construct
  misc_feature 1..22: note = chemically synthesized
  source 1..22: mol_type = other DNA
ctcccattctgtaggttgcctg

SEQ ID NO: 107875 - DNA, 22 bp, synthetic construct
  misc_feature 1..22: note = chemically synthesized
  source 1..22: mol_type = other DNA
tcccattctgtaggttgcctgt

SEQ ID NO: 107876 - DNA, 22 bp, synthetic construct
  misc_feature 1..22: note = chemically synthesized
  source 1..22: mol_type = other DNA
ccattctgtaggttgcctgttc

SEQ ID NO: 107877 - DNA, 22 bp, synthetic construct
  misc_feature 1..22: note = chemically synthesized
  source 1..22: mol_type = other DNA
tgtaggttgcctgttcgctctg

SEQ ID NO: 107878 - DNA, 22 bp, synthetic construct
  misc_feature 1..22: note = chemically synthesized
  source 1..22: mol_type = other DNA
taggttgcctgttcgctctgat

SEQ ID NO: 107879 - DNA, 22 bp, synthetic construct
  misc_feature 1..22: note = chemically synthesized
  source 1..22: mol_type = other DNA
cctgttcgctctgatgatagtt

SEQ ID NO: 107880 - DNA, 22 bp, synthetic construct
  misc_feature 1..22: note = chemically synthesized
  source 1..22: mol_type = other DNA
ttcgctctgatgatagtttatt

SEQ ID NO: 107881 - DNA, 22 bp, synthetic construct
  misc_feature 1..22: note = chemically synthesized
  source 1..22: mol_type = other DNA
gctctgatgatagtttattttg

SEQ ID NO: 107882 - DNA, 22 bp, synthetic construct
  misc_feature 1..22: note = chemically synthesized
  source 1..22: mol_type = other DNA
tgatgatagtttattttgctgt

SEQ ID NO: 107883 - DNA, 22 bp, synthetic construct
  misc_feature 1..22: note = chemically synthesized
  source 1..22: mol_type = other DNA
atgatagtttattttgctgttt

SEQ ID NO: 107884 - DNA, 22 bp, synthetic construct
  misc_feature 1..22: note = chemically synthesized
  source 1..22: mol_type = other DNA
attttgctgtttagaagctctg

SEQ ID NO: 107885 - DNA, 22 bp, synthetic construct
  misc_feature 1..22: note = chemically synthesized
  source 1..22: mol_type = other DNA
ttttgctgtttagaagctctgt

SEQ ID NO: 107886 - DNA, 22 bp, synthetic construct
  misc_feature 1..22: note = chemically synthesized
  source 1..22: mol_type = other DNA
tgctgtttagaagctctgtatt

SEQ ID NO: 107887 - DNA, 22 bp, synthetic construct
  misc_feature 1..22: note = chemically synthesized
  source 1..22: mol_type = other DNA
gctgtttagaagctctgtattt

SEQ ID NO: 107888 - DNA, 22 bp, synthetic construct
  misc_feature 1..22: note = chemically synthesized
  source 1..22: mol_type = other DNA
ctgtttagaagctctgtattta

SEQ ID NO: 107889 - DNA, 22 bp, synthetic construct
  misc_feature 1..22: note = chemically synthesized
  source 1..22: mol_type = other DNA
tttagaagctctgtatttaatt

SEQ ID NO: 107890 - DNA, 22 bp, synthetic construct
  misc_feature 1..22: note = chemically synthesized
  source 1..22: mol_type = other DNA
agaagctctgtatttaattgta

SEQ ID NO: 107891 - DNA, 22 bp, synthetic construct
  misc_feature 1..22: note = chemically synthesized
  source 1..22: mol_type = other DNA
gaagctctgtatttaattgtat

SEQ ID NO: 107892 - DNA, 22 bp, synthetic construct
  misc_feature 1..22: note = chemically synthesized
  source 1..22: mol_type = other DNA
tgtatttaattgtatttttctt

SEQ ID NO: 107893 - DNA, 22 bp, synthetic construct
  misc_feature 1..22: note = chemically synthesized
  source 1..22: mol_type = other DNA
tatttaattgtatttttcttta

SEQ ID NO: 107894 - DNA, 22 bp, synthetic construct
  misc_feature 1..22: note = chemically synthesized
  source 1..22: mol_type = other DNA
aattgtatttttctttattttg

SEQ ID NO: 107895 - DNA, 22 bp, synthetic construct
  misc_feature 1..22: note = chemically synthesized
  source 1..22: mol_type = other DNA
attgtatttttctttattttga

SEQ ID NO: 107896 - DNA, 22 bp, synthetic construct
  misc_feature 1..22: note = chemically synthesized
  source 1..22: mol_type = other DNA
tatttttctttattttgagatg

SEQ ID NO: 107897 - DNA, 22 bp, synthetic construct
  misc_feature 1..22: note = chemically synthesized
  source 1..22: mol_type = other DNA
ttctttattttgagatgaagtc

SEQ ID NO: 107898 - DNA, 22 bp, synthetic construct
  misc_feature 1..22: note = chemically synthesized
  source 1..22: mol_type = other DNA
tctttattttgagatgaagtct

SEQ ID NO: 107899 - DNA, 22 bp, synthetic construct
  misc_feature 1..22: note = chemically synthesized
  source 1..22: mol_type = other DNA
ctttattttgagatgaagtctc

SEQ ID NO: 107900 - DNA, 22 bp, synthetic construct
  misc_feature 1..22: note = chemically synthesized
  source 1..22: mol_type = other DNA
tttattttgagatgaagtctca

SEQ ID NO: 107901 - DNA, 22 bp, synthetic construct
  misc_feature 1..22: note = chemically synthesized
  source 1..22: mol_type = other DNA
tattttgagatgaagtctcact

SEQ ID NO: 107902 - DNA, 22 bp, synthetic construct
  misc_feature 1..22: note = chemically synthesized
  source 1..22: mol_type = other DNA
attttgagatgaagtctcactc

SEQ ID NO: 107903 - DNA, 22 bp, synthetic construct
  misc_feature 1..22: note = chemically synthesized
  source 1..22: mol_type = other DNA
ttttgagatgaagtctcactct

SEQ ID NO: 107904 - DNA, 22 bp, synthetic construct
  misc_feature 1..22: note = chemically synthesized
  source 1..22: mol_type = other DNA
tgagatgaagtctcactctttc

SEQ ID NO: 107905 - DNA, 22 bp, synthetic construct
  misc_feature 1..22: note = chemically synthesized
  source 1..22: mol_type = other DNA
gagatgaagtctcactctttca

SEQ ID NO: 107906 - DNA, 22 bp, synthetic construct
  misc_feature 1..22: note = chemically synthesized
  source 1..22: mol_type = other DNA
agatgaagtctcactctttcac

SEQ ID NO: 107907 - DNA, 22 bp, synthetic construct
  misc_feature 1..22: note = chemically synthesized
  source 1..22: mol_type = other DNA
actctttcacccatgctagagt

SEQ ID NO: 107908 - DNA, 22 bp, synthetic construct
  misc_feature 1..22: note = chemically synthesized
  source 1..22: mol_type = other DNA
tttcacccatgctagagtgcag

SEQ ID NO: 107909 - DNA, 22 bp, synthetic construct
  misc_feature 1..22: note = chemically synthesized
  source 1..22: mol_type = other DNA
tcacccatgctagagtgcagtg

SEQ ID NO: 107910 - DNA, 22 bp, synthetic construct
  misc_feature 1..22: note = chemically synthesized
  source 1..22: mol_type = other DNA
cacccatgctagagtgcagtgg

SEQ ID NO: 107911 - DNA, 22 bp, synthetic construct
  misc_feature 1..22: note = chemically synthesized
  source 1..22: mol_type = other DNA
acccatgctagagtgcagtggt

SEQ ID NO: 107912 - DNA, 22 bp, synthetic construct
  misc_feature 1..22: note = chemically synthesized
  source 1..22: mol_type = other DNA
gagtgcagtggtgcgatctcag

SEQ ID NO: 107913 - DNA, 22 bp, synthetic construct
  misc_feature 1..22: note = chemically synthesized
  source 1..22: mol_type = other DNA
agctcactgcaacctctgcctc

SEQ ID NO: 107914 - DNA, 22 bp, synthetic construct
  misc_feature 1..22: note = chemically synthesized
  source 1..22: mol_type = other DNA
actgcaacctctgcctcctggg

SEQ ID NO: 107915 - DNA, 22 bp, synthetic construct
  misc_feature 1..22: note = chemically synthesized
  source 1..22: mol_type = other DNA
caacctctgcctcctgggttca

SEQ ID NO: 107916 - DNA, 22 bp, synthetic construct
  misc_feature 1..22: note = chemically synthesized
  source 1..22: mol_type = other DNA
tgcctcctgggttcaagcaatt

SEQ ID NO: 107917 - DNA, 22 bp, synthetic construct
  misc_feature 1..22: note = chemically synthesized
  source 1..22: mol_type = other DNA
cctcctgggttcaagcaattct

SEQ ID NO: 107918 - DNA, 22 bp, synthetic construct
  misc_feature 1..22: note = chemically synthesized
  source 1..22: mol_type = other DNA
ctgggttcaagcaattctcctg

SEQ ID NO: 107919 - DNA, 22 bp, synthetic construct
  misc_feature 1..22: note = chemically synthesized
  source 1..22: mol_type = other DNA
ggttcaagcaattctcctgcct

SEQ ID NO: 107920 - DNA, 22 bp, synthetic construct
  misc_feature 1..22: note = chemically synthesized
  source 1..22: mol_type = other DNA
aagcaattctcctgcctcagcc

SEQ ID NO: 107921 - DNA, 22 bp, synthetic construct
  misc_feature 1..22: note = chemically synthesized
  source 1..22: mol_type = other DNA
tcctgcctcagcctcctgagta

SEQ ID NO: 107922 - DNA, 22 bp, synthetic construct
  misc_feature 1..22: note = chemically synthesized
  source 1..22: mol_type = other DNA
ctgcctcagcctcctgagtagc

SEQ ID NO: 107923 - DNA, 22 bp, synthetic construct
  misc_feature 1..22: note = chemically synthesized
  source 1..22: mol_type = other DNA
cctcagcctcctgagtagctga

SEQ ID NO: 107924 - DNA, 22 bp, synthetic construct
  misc_feature 1..22: note = chemically synthesized
  source 1..22: mol_type = other DNA
agcctcctgagtagctgagatt

SEQ ID NO: 107925 - DNA, 22 bp, synthetic construct
  misc_feature 1..22: note = chemically synthesized
  source 1..22: mol_type = other DNA
ctgagtagctgagattacaggt

SEQ ID NO: 107926 - DNA, 22 bp, synthetic construct
  misc_feature 1..22: note = chemically synthesized
  source 1..22: mol_type = other DNA
agtagctgagattacaggtacg

SEQ ID NO: 107927 - DNA, 22 bp, synthetic construct
  misc_feature 1..22: note = chemically synthesized
  source 1..22: mol_type = other DNA
agattacaggtacgcaccacca

SEQ ID NO: 107928 - DNA, 22 bp, synthetic construct
  misc_feature 1..22: note = chemically synthesized
  source 1..22: mol_type = other DNA
caggtacgcaccaccataccca

SEQ ID NO: 107929 - DNA, 22 bp, synthetic construct
  misc_feature 1..22: note = chemically synthesized
  source 1..22: mol_type = other DNA
tttgtatttttagtagagatgg

SEQ ID NO: 107930 - DNA, 22 bp, synthetic construct
  misc_feature 1..22: note = chemically synthesized
  source 1..22: mol_type = other DNA
ttgtatttttagtagagatgga

SEQ ID NO: 107931 - DNA, 22 bp, synthetic construct
  misc_feature 1..22: note = chemically synthesized
  source 1..22: mol_type = other DNA
tgtatttttagtagagatggag

SEQ ID NO: 107932 - DNA, 22 bp, synthetic construct
  misc_feature 1..22: note = chemically synthesized
  source 1..22: mol_type = other DNA
gtatttttagtagagatggagt

SEQ ID NO: 107933 - DNA, 22 bp, synthetic construct
  misc_feature 1..22: note = chemically synthesized
  source 1..22: mol_type = other DNA
tatttttagtagagatggagtt

SEQ ID NO: 107934 - DNA, 22 bp, synthetic construct
  misc_feature 1..22: note = chemically synthesized
  source 1..22: mol_type = other DNA
ttagtagagatggagtttcacc

SEQ ID NO: 107935 - DNA, 22 bp, synthetic construct
  misc_feature 1..22: note = chemically synthesized
  source 1..22: mol_type = other DNA
tagtagagatggagtttcacca

SEQ ID NO: 107936 - DNA, 22 bp, synthetic construct
  misc_feature 1..22: note = chemically synthesized
  source 1..22: mol_type = other DNA
agtagagatggagtttcaccat

SEQ ID NO: 107937 - DNA, 22 bp, synthetic construct
  misc_feature 1..22: note = chemically synthesized
  source 1..22: mol_type = other DNA
gtagagatggagtttcaccatg

SEQ ID NO: 107938 - DNA, 22 bp, synthetic construct
  misc_feature 1..22: note = chemically synthesized
  source 1..22: mol_type = other DNA
caccatgttggccaggctgctc

SEQ ID NO: 107939 - DNA, 22 bp, synthetic construct
  misc_feature 1..22: note = chemically synthesized
  source 1..22: mol_type = other DNA
accatgttggccaggctgctct

SEQ ID NO: 107940 - DNA, 22 bp, synthetic construct
  misc_feature 1..22: note = chemically synthesized
  source 1..22: mol_type = other DNA
gccaggctgctcttatactccc

SEQ ID NO: 107941 - DNA, 22 bp, synthetic construct
  misc_feature 1..22: note = chemically synthesized
  source 1..22: mol_type = other DNA
ctcttatactccccacctcaag

SEQ ID NO: 107942 - DNA, 22 bp, synthetic construct
  misc_feature 1..22: note = chemically synthesized
  source 1..22: mol_type = other DNA
ttatactccccacctcaagtga

SEQ ID NO: 107943 - DNA, 22 bp, synthetic construct
  misc_feature 1..22: note = chemically synthesized
  source 1..22: mol_type = other DNA
atactccccacctcaagtgatc

SEQ ID NO: 107944 - DNA, 22 bp, synthetic construct
  misc_feature 1..22: note = chemically synthesized
  source 1..22: mol_type = other DNA
tactccccacctcaagtgatcc

SEQ ID NO: 107945 - DNA, 22 bp, synthetic construct
  misc_feature 1..22: note = chemically synthesized
  source 1..22: mol_type = other DNA
cccacctcaagtgatccaccca

SEQ ID NO: 107946 - DNA, 22 bp, synthetic construct
  misc_feature 1..22: note = chemically synthesized
  source 1..22: mol_type = other DNA
aagtgatccacccaccttggcc

SEQ ID NO: 107947 - DNA, 22 bp, synthetic construct
  misc_feature 1..22: note = chemically synthesized
  source 1..22: mol_type = other DNA
ggcctcccaaagtgctgggatt

SEQ ID NO: 107948 - DNA, 22 bp, synthetic construct
  misc_feature 1..22: note = chemically synthesized
  source 1..22: mol_type = other DNA
gcctcccaaagtgctgggatta

SEQ ID NO: 107949 - DNA, 22 bp, synthetic construct
  misc_feature 1..22: note = chemically synthesized
  source 1..22: mol_type = other DNA
ccaaagtgctgggattacaggc

SEQ ID NO: 107950 - DNA, 22 bp, synthetic construct
  misc_feature 1..22: note = chemically synthesized
  source 1..22: mol_type = other DNA
ggattacaggcgtgagccacca

SEQ ID NO: 107951 - DNA, 22 bp, synthetic construct
  misc_feature 1..22: note = chemically synthesized
  source 1..22: mol_type = other DNA
caggcgtgagccaccatgcccg

SEQ ID NO: 107952 - DNA, 22 bp, synthetic construct
  misc_feature 1..22: note = chemically synthesized
  source 1..22: mol_type = other DNA
tttagtttaattagatctcatt

SEQ ID NO: 107953 - DNA, 22 bp, synthetic construct
  misc_feature 1..22: note = chemically synthesized
  source 1..22: mol_type = other DNA
tagtttaattagatctcatttg

SEQ ID NO: 107954 - DNA, 22 bp, synthetic construct
  misc_feature 1..22: note = chemically synthesized
  source 1..22: mol_type = other DNA
agtttaattagatctcatttga

SEQ ID NO: 107955 - DNA, 22 bp, synthetic construct
  misc_feature 1..22: note = chemically synthesized
  source 1..22: mol_type = other DNA
gtttaattagatctcatttgac

SEQ ID NO: 107956 - DNA, 22 bp, synthetic construct
  misc_feature 1..22: note = chemically synthesized
  source 1..22: mol_type = other DNA
aattagatctcatttgacagtg

SEQ ID NO: 107957 - DNA, 22 bp, synthetic construct
  misc_feature 1..22: note = chemically synthesized
  source 1..22: mol_type = other DNA
attagatctcatttgacagtgt

SEQ ID NO: 107958 - DNA, 22 bp, synthetic construct
  misc_feature 1..22: note = chemically synthesized
  source 1..22: mol_type = other DNA
gatctcatttgacagtgtttgc

SEQ ID NO: 107959 - DNA, 22 bp, synthetic construct
  misc_feature 1..22: note = chemically synthesized
  source 1..22: mol_type = other DNA
atttgacagtgtttgcttttgt

SEQ ID NO: 107960 - DNA, 22 bp, synthetic construct
  misc_feature 1..22: note = chemically synthesized
  source 1..22: mol_type = other DNA
gacagtgtttgcttttgttgca

SEQ ID NO: 107961 - DNA, 22 bp, synthetic construct
  misc_feature 1..22: note = chemically synthesized
  source 1..22: mol_type = other DNA
acagtgtttgcttttgttgcaa

SEQ ID NO: 107962 - DNA, 22 bp, synthetic construct
  misc_feature 1..22: note = chemically synthesized
  source 1..22: mol_type = other DNA
gcttttgttgcaattgtttttg

SEQ ID NO: 107963 - DNA, 22 bp, synthetic construct
  misc_feature 1..22: note = chemically synthesized
  source 1..22: mol_type = other DNA
cttttgttgcaattgtttttga

SEQ ID NO: 107964 - DNA, 22 bp, synthetic construct
  misc_feature 1..22: note = chemically synthesized
  source 1..22: mol_type = other DNA
ttgttgcaattgtttttgacat

SEQ ID NO: 107965 - DNA, 22 bp, synthetic construct
  misc_feature 1..22: note = chemically synthesized
  source 1..22: mol_type = other DNA
tgttgcaattgtttttgacatt

SEQ ID NO: 107966 - DNA, 22 bp, synthetic construct
  misc_feature 1..22: note = chemically synthesized
  source 1..22: mol_type = other DNA
gttgcaattgtttttgacattt

SEQ ID NO: 107967 - DNA, 22 bp, synthetic construct
  misc_feature 1..22: note = chemically synthesized
  source 1..22: mol_type = other DNA
ttgcaattgtttttgacatttt

SEQ ID NO: 107968 - DNA, 22 bp, synthetic construct
  misc_feature 1..22: note = chemically synthesized
  source 1..22: mol_type = other DNA
caattgtttttgacattttcat

SEQ ID NO: 107969 - DNA, 22 bp, synthetic construct
  misc_feature 1..22: note = chemically synthesized
  source 1..22: mol_type = other DNA
tttttgacattttcatcatgaa

SEQ ID NO: 107970 - DNA, 22 bp, synthetic construct
  misc_feature 1..22: note = chemically synthesized
  source 1..22: mol_type = other DNA
ttgacattttcatcatgaaatc

SEQ ID NO: 107971 - DNA, 22 bp, synthetic construct
  misc_feature 1..22: note = chemically synthesized
  source 1..22: mol_type = other DNA
tgacattttcatcatgaaatct

SEQ ID NO: 107972 - DNA, 22 bp, synthetic construct
  misc_feature 1..22: note = chemically synthesized
  source 1..22: mol_type = other DNA
gacattttcatcatgaaatctt

SEQ ID NO: 107973 - DNA, 22 bp, synthetic construct
  misc_feature 1..22: note = chemically synthesized
  source 1..22: mol_type = other DNA
acattttcatcatgaaatcttt

SEQ ID NO: 107974 - DNA, 22 bp, synthetic construct
  misc_feature 1..22: note = chemically synthesized
  source 1..22: mol_type = other DNA
tcatcatgaaatctttgcctgt

SEQ ID NO: 107975 - DNA, 22 bp, synthetic construct
  misc_feature 1..22: note = chemically synthesized
  source 1..22: mol_type = other DNA
catcatgaaatctttgcctgtg

SEQ ID NO: 107976 - DNA, 22 bp, synthetic construct
  misc_feature 1..22: note = chemically synthesized
  source 1..22: mol_type = other DNA
atcatgaaatctttgcctgtgt

SEQ ID NO: 107977 - DNA, 22 bp, synthetic construct
  misc_feature 1..22: note = chemically synthesized
  source 1..22: mol_type = other DNA
tgcctgtgtctatgtccggaat

SEQ ID NO: 107978 - DNA, 22 bp, synthetic construct
  misc_feature 1..22: note = chemically synthesized
  source 1..22: mol_type = other DNA
gcctgtgtctatgtccggaatg

SEQ ID NO: 107979 - DNA, 22 bp, synthetic construct
  misc_feature 1..22: note = chemically synthesized
  source 1..22: mol_type = other DNA
cctgtgtctatgtccggaatgg

SEQ ID NO: 107980 - DNA, 22 bp, synthetic construct
  misc_feature 1..22: note = chemically synthesized
  source 1..22: mol_type = other DNA
tgtctatgtccggaatggtatt

SEQ ID NO: 107981 - DNA, 22 bp, synthetic construct
  misc_feature 1..22: note = chemically synthesized
  source 1..22: mol_type = other DNA
tgtccggaatggtattgcctag

SEQ ID NO: 107982 - DNA, 22 bp, synthetic construct
  misc_feature 1..22: note = chemically synthesized
  source 1..22: mol_type = other DNA
cctaggttttcttctaaagttt

SEQ ID NO: 107983 - DNA, 22 bp, synthetic construct
  misc_feature 1..22: note = chemically synthesized
  source 1..22: mol_type = other DNA
ggttttcttctaaagtttttat

SEQ ID NO: 107984 - DNA, 22 bp, synthetic construct
  misc_feature 1..22: note = chemically synthesized
  source 1..22: mol_type = other DNA
tcttctaaagtttttatagttt

SEQ ID NO: 107985 - DNA, 22 bp, synthetic construct
  misc_feature 1..22: note = chemically synthesized
  source 1..22: mol_type = other DNA
cttctaaagtttttatagtttt

SEQ ID NO: 107986 - DNA, 22 bp, synthetic construct
  misc_feature 1..22: note = chemically synthesized
  source 1..22: mol_type = other DNA
ttctaaagtttttatagttttg

SEQ ID NO: 107987 - DNA, 22 bp, synthetic construct
  misc_feature 1..22: note = chemically synthesized
  source 1..22: mol_type = other DNA
ctaaagtttttatagttttggg

SEQ ID NO: 107988 - DNA, 22 bp, synthetic construct
  misc_feature 1..22: note = chemically synthesized
  source 1..22: mol_type = other DNA
taaagtttttatagttttgggt

SEQ ID NO: 107989 - DNA, 22 bp, synthetic construct
  misc_feature 1..22: note = chemically synthesized
  source 1..22: mol_type = other DNA
aagtttttatagttttgggttt

SEQ ID NO: 107990 - DNA, 22 bp, synthetic construct
  misc_feature 1..22: note = chemically synthesized
  source 1..22: mol_type = other DNA
ttatagttttgggttttacact

SEQ ID NO: 107991 - DNA, 22 bp, synthetic construct
  misc_feature 1..22: note = chemically synthesized
  source 1..22: mol_type = other DNA
tatagttttgggttttacactt

SEQ ID NO: 107992 - DNA, 22 bp, synthetic construct
  misc_feature 1..22: note = chemically synthesized
  source 1..22: mol_type = other DNA
atagttttgggttttacactta

SEQ ID NO: 107993 - DNA, 22 bp, synthetic construct
  misc_feature 1..22: note = chemically synthesized
  source 1..22: mol_type = other DNA
tagttttgggttttacacttaa

SEQ ID NO: 107994 - DNA, 22 bp, synthetic construct
  misc_feature 1..22: note = chemically synthesized
  source 1..22: mol_type = other DNA
tgggttttacacttaagtcttt

SEQ ID NO: 107995 - DNA, 22 bp, synthetic construct
  misc_feature 1..22: note = chemically synthesized
  source 1..22: mol_type = other DNA
gggttttacacttaagtcttta

SEQ ID NO: 107996 - DNA, 22 bp, synthetic construct
  misc_feature 1..22: note = chemically synthesized
  source 1..22: mol_type = other DNA
ggttttacacttaagtctttaa

SEQ ID NO: 107997 - DNA, 22 bp, synthetic construct
  misc_feature 1..22: note = chemically synthesized
  source 1..22: mol_type = other DNA
tacacttaagtctttaatgcat

SEQ ID NO: 107998 - DNA, 22 bp, synthetic construct
  misc_feature 1..22: note = chemically synthesized
  source 1..22: mol_type = other DNA
acacttaagtctttaatgcatc

SEQ ID NO: 107999 - DNA, 22 bp, synthetic construct
  misc_feature 1..22: note = chemically synthesized
  source 1..22: mol_type = other DNA
cacttaagtctttaatgcatct

SEQ ID NO: 108000 - DNA, 22 bp, synthetic construct
  misc_feature 1..22: note = chemically synthesized
  source 1..22: mol_type = other DNA
aagtctttaatgcatcttgagt

SEQ ID NO: 108001 - DNA, 22 bp, synthetic construct
  misc_feature 1..22: note = chemically synthesized
  source 1..22: mol_type = other DNA
agtctttaatgcatcttgagtt

SEQ ID NO: 108002 - DNA, 22 bp, synthetic construct
  misc_feature 1..22: note = chemically synthesized
  source 1..22: mol_type = other DNA
taatgcatcttgagttaattta

SEQ ID NO: 108003 - DNA, 22 bp, synthetic construct
  misc_feature 1..22: note = chemically synthesized
  source 1..22: mol_type = other DNA
aatgcatcttgagttaatttat

SEQ ID NO: 108004 - DNA, 22 bp, synthetic construct
  misc_feature 1..22: note = chemically synthesized
  source 1..22: mol_type = other DNA
atgcatcttgagttaatttatg

SEQ ID NO: 108005 - DNA, 22 bp, synthetic construct
  misc_feature 1..22: note = chemically synthesized
  source 1..22: mol_type = other DNA
gagttaatttatgtataagatg

SEQ ID NO: 108006 - DNA, 22 bp, synthetic construct
  misc_feature 1..22: note = chemically synthesized
  source 1..22: mol_type = other DNA
agttaatttatgtataagatgt

SEQ ID NO: 108007 - DNA, 22 bp, synthetic construct
  misc_feature 1..22: note = chemically synthesized
  source 1..22: mol_type = other DNA
atttatgtataagatgtaagga

SEQ ID NO: 108008 - DNA, 22 bp, synthetic construct
  misc_feature 1..22: note = chemically synthesized
  source 1..22: mol_type = other DNA
atgtataagatgtaaggaaggg

SEQ ID NO: 108009 - DNA, 22 bp, synthetic construct
  misc_feature 1..22: note = chemically synthesized
  source 1..22: mol_type = other DNA
tgtataagatgtaaggaagggg

SEQ ID NO: 108010 - DNA, 22 bp, synthetic construct
  misc_feature 1..22: note = chemically synthesized
  source 1..22: mol_type = other DNA
caattttctgcatatggctagc

SEQ ID NO: 108011 - DNA, 22 bp, synthetic construct
  misc_feature 1..22: note = chemically synthesized
  source 1..22: mol_type = other DNA
aattttctgcatatggctagcc

SEQ ID NO: 108012 - DNA, 22 bp, synthetic construct
  misc_feature 1..22: note = chemically synthesized
  source 1..22: mol_type = other DNA
tctgcatatggctagccagttc

SEQ ID NO: 108013 - DNA, 22 bp, synthetic construct
  misc_feature 1..22: note = chemically synthesized
  source 1..22: mol_type = other DNA
ctgcatatggctagccagttct

SEQ ID NO: 108014 - DNA, 22 bp, synthetic construct
  misc_feature 1..22: note = chemically synthesized
  source 1..22: mol_type = other DNA
tgcatatggctagccagttctc

SEQ ID NO: 108015 - DNA, 22 bp, synthetic construct
  misc_feature 1..22: note = chemically synthesized
  source 1..22: mol_type = other DNA
catatggctagccagttctccc

SEQ ID NO: 108016 - DNA, 22 bp, synthetic construct
  misc_feature 1..22: note = chemically synthesized
  source 1..22: mol_type = other DNA
gccagttctcccagcacaattt

SEQ ID NO: 108017 - DNA, 22 bp, synthetic construct
  misc_feature 1..22: note = chemically synthesized
  source 1..22: mol_type = other DNA
tcccagcacaatttataaaata

SEQ ID NO: 108018 - DNA, 22 bp, synthetic construct
  misc_feature 1..22: note = chemically synthesized
  source 1..22: mol_type = other DNA
ccagcacaatttataaaatagg

SEQ ID NO: 108019 - DNA, 22 bp, synthetic construct
  misc_feature 1..22: note = chemically synthesized
  source 1..22: mol_type = other DNA
ataaaatagggaatcccttccc

SEQ ID NO: 108020 - DNA, 22 bp, synthetic construct
  misc_feature 1..22: note = chemically synthesized
  source 1..22: mol_type = other DNA
taaaatagggaatcccttcccc

SEQ ID NO: 108021 - DNA, 22 bp, synthetic construct
  misc_feature 1..22: note = chemically synthesized
  source 1..22: mol_type = other DNA
ccccattacttgtttttaccag

SEQ ID NO: 108022 - DNA, 22 bp, synthetic construct
  misc_feature 1..22: note = chemically synthesized
  source 1..22: mol_type = other DNA
cccattacttgtttttaccagg

SEQ ID NO: 108023 - DNA, 22 bp, synthetic construct
  misc_feature 1..22: note = chemically synthesized
  source 1..22: mol_type = other DNA
cttgtttttaccaggtttgttg

SEQ ID NO: 108024 - DNA, 22 bp, synthetic construct
  misc_feature 1..22: note = chemically synthesized
  source 1..22: mol_type = other DNA
gtttttaccaggtttgttgaag

SEQ ID NO: 108025 - DNA, 22 bp, synthetic construct
  misc_feature 1..22: note = chemically synthesized
  source 1..22: mol_type = other DNA
tttttaccaggtttgttgaaga

SEQ ID NO: 108026 - DNA, 22 bp, synthetic construct
  misc_feature 1..22: note = chemically synthesized
  source 1..22: mol_type = other DNA
ttaccaggtttgttgaagatca

SEQ ID NO: 108027 - DNA, 22 bp, synthetic construct
  misc_feature 1..22: note = chemically synthesized
  source 1..22: mol_type = other DNA
taccaggtttgttgaagatcag

SEQ ID NO: 108028 - DNA, 22 bp, synthetic construct
  misc_feature 1..22: note = chemically synthesized
  source 1..22: mol_type = other DNA
accaggtttgttgaagatcaga

SEQ ID NO: 108029 - DNA, 22 bp, synthetic construct
  misc_feature 1..22: note = chemically synthesized
  source 1..22: mol_type = other DNA
ccaggtttgttgaagatcagat

SEQ ID NO: 108030 - DNA, 22 bp, synthetic construct
  misc_feature 1..22: note = chemically synthesized
  source 1..22: mol_type = other DNA
gttgaagatcagattgtttcag

SEQ ID NO: 108031 - DNA, 22 bp, synthetic construct
  misc_feature 1..22: note = chemically synthesized
  source 1..22: mol_type = other DNA
ttgaagatcagattgtttcaga

SEQ ID NO: 108032 - DNA, 22 bp, synthetic construct
  misc_feature 1..22: note = chemically synthesized
  source 1..22: mol_type = other DNA
aagatcagattgtttcagatgc

SEQ ID NO: 108033 - DNA, 22 bp, synthetic construct
  misc_feature 1..22: note = chemically synthesized
  source 1..22: mol_type = other DNA
tttcagatgcgcggtcttactt

SEQ ID NO: 108034 - DNA, 22 bp, synthetic construct
  misc_feature 1..22: note = chemically synthesized
  source 1..22: mol_type = other DNA
cagatgcgcggtcttacttctg

SEQ ID NO: 108035 - DNA, 22 bp, synthetic construct
  misc_feature 1..22: note = chemically synthesized
  source 1..22: mol_type = other DNA
agatgcgcggtcttacttctga

SEQ ID NO: 108036 - DNA, 22 bp, synthetic construct
  misc_feature 1..22: note = chemically synthesized
  source 1..22: mol_type = other DNA
acttctgagttctccattctgt

SEQ ID NO: 108037 - DNA, 22 bp, synthetic construct
  misc_feature 1..22: note = chemically synthesized
  source 1..22: mol_type = other DNA
cttctgagttctccattctgtt

SEQ ID NO: 108038 - DNA, 22 bp, synthetic construct
  misc_feature 1..22: note = chemically synthesized
  source 1..22: mol_type = other DNA
ctgagttctccattctgttcca

SEQ ID NO: 108039 - DNA, 22 bp, synthetic construct
  misc_feature 1..22: note = chemically synthesized
  source 1..22: mol_type = other DNA
tgagttctccattctgttccat

SEQ ID NO: 108040 - DNA, 22 bp, synthetic construct
  misc_feature 1..22: note = chemically synthesized
  source 1..22: mol_type = other DNA
agttctccattctgttccatta

SEQ ID NO: 108041 - DNA, 22 bp, synthetic construct
  misc_feature 1..22: note = chemically synthesized
  source 1..22: mol_type = other DNA
tccattctgttccattagtcag

SEQ ID NO: 108042 - DNA, 22 bp, synthetic construct
  misc_feature 1..22: note = chemically synthesized
  source 1..22: mol_type = other DNA
cattctgttccattagtcagtg

SEQ ID NO: 108043 - DNA, 22 bp, synthetic construct
  misc_feature 1..22: note = chemically synthesized
  source 1..22: mol_type = other DNA
tgttccattagtcagtgtgtct

SEQ ID NO: 108044 - DNA, 22 bp, synthetic construct
  misc_feature 1..22: note = chemically synthesized
  source 1..22: mol_type = other DNA
ttccattagtcagtgtgtctgt

SEQ ID NO: 108045 - DNA, 22 bp, synthetic construct
  misc_feature 1..22: note = chemically synthesized
  source 1..22: mol_type = other DNA
cattagtcagtgtgtctgtttg

SEQ ID NO: 108046 - DNA, 22 bp, synthetic construct
  misc_feature 1..22: note = chemically synthesized
  source 1..22: mol_type = other DNA
gtcagtgtgtctgtttggtatc

SEQ ID NO: 108047 - DNA, 22 bp, synthetic construct
  misc_feature 1..22: note = chemically synthesized
  source 1..22: mol_type = other DNA
tttggtatcagtaccatgctgt

SEQ ID NO: 108048 - DNA, 22 bp, synthetic construct
  misc_feature 1..22: note = chemically synthesized
  source 1..22: mol_type = other DNA
ggtatcagtaccatgctgtttc

SEQ ID NO: 108049 - DNA, 22 bp, synthetic construct
  misc_feature 1..22: note = chemically synthesized
  source 1..22: mol_type = other DNA
gtatcagtaccatgctgtttca

SEQ ID NO: 108050 - DNA, 22 bp, synthetic construct
  misc_feature 1..22: note = chemically synthesized
  source 1..22: mol_type = other DNA
tttcagttagttactgtcacct

SEQ ID NO: 108051 - DNA, 22 bp, synthetic construct
  misc_feature 1..22: note = chemically synthesized
  source 1..22: mol_type = other DNA
cagttagttactgtcaccttgt

SEQ ID NO: 108052 - DNA, 22 bp, synthetic construct
  misc_feature 1..22: note = chemically synthesized
  source 1..22: mol_type = other DNA
agttagttactgtcaccttgta

SEQ ID NO: 108053 - DNA, 22 bp, synthetic construct
  misc_feature 1..22: note = chemically synthesized
  source 1..22: mol_type = other DNA
gttactgtcaccttgtagtata

SEQ ID NO: 108054 - DNA, 22 bp, synthetic construct
  misc_feature 1..22: note = chemically synthesized
  source 1..22: mol_type = other DNA
ctgtcaccttgtagtataattt

SEQ ID NO: 108055 - DNA, 22 bp, synthetic construct
  misc_feature 1..22: note = chemically synthesized
  source 1..22: mol_type = other DNA
tcaccttgtagtataatttgaa

SEQ ID NO: 108056 - DNA, 22 bp, synthetic construct
  misc_feature 1..22: note = chemically synthesized
  source 1..22: mol_type = other DNA
gtagtataatttgaagttgggt

SEQ ID NO: 108057 - DNA, 22 bp, synthetic construct
  misc_feature 1..22: note = chemically synthesized
  source 1..22: mol_type = other DNA
tagtataatttgaagttgggta

SEQ ID NO: 108058 - DNA, 22 bp, synthetic construct
  misc_feature 1..22: note = chemically synthesized
  source 1..22: mol_type = other DNA
gaagttgggtaaatcctgttga

SEQ ID NO: 108059 - DNA, 22 bp, synthetic construct
  misc_feature 1..22: note = chemically synthesized
  source 1..22: mol_type = other DNA
aagttgggtaaatcctgttgat

SEQ ID NO: 108060 - DNA, 22 bp, synthetic construct
  misc_feature 1..22: note = chemically synthesized
  source 1..22: mol_type = other DNA
ggtaaatcctgttgattctatt

SEQ ID NO: 108061 - DNA, 22 bp, synthetic construct
  misc_feature 1..22: note = chemically synthesized
  source 1..22: mol_type = other DNA
ttgattctatttttctggagaa

SEQ ID NO: 108062 - DNA, 22 bp, synthetic construct
  misc_feature 1..22: note = chemically synthesized
  source 1..22: mol_type = other DNA
attctatttttctggagaacca

SEQ ID NO: 108063 - DNA, 22 bp, synthetic construct
  misc_feature 1..22: note = chemically synthesized
  source 1..22: mol_type = other DNA
tatttttctggagaaccatgac

SEQ ID NO: 108064 - DNA, 22 bp, synthetic construct
  misc_feature 1..22: note = chemically synthesized
  source 1..22: mol_type = other DNA
tttttctggagaaccatgacta

SEQ ID NO: 108065 - DNA, 22 bp, synthetic construct
  misc_feature 1..22: note = chemically synthesized
  source 1..22: mol_type = other DNA
ttctggagaaccatgactaaca

SEQ ID NO: 108066 - DNA, 22 bp, synthetic construct
  misc_feature 1..22: note = chemically synthesized
  source 1..22: mol_type = other DNA
tctggagaaccatgactaacat

SEQ ID NO: 108067 - DNA, 22 bp, synthetic construct
  misc_feature 1..22: note = chemically synthesized
  source 1..22: mol_type = other DNA
ctggagaaccatgactaacata

SEQ ID NO: 108068 - DNA, 22 bp, synthetic construct
  misc_feature 1..22: note = chemically synthesized
  source 1..22: mol_type = other DNA
tggagaaccatgactaacatag

SEQ ID NO: 108069 - DNA, 22 bp, synthetic construct
  misc_feature 1..22: note = chemically synthesized
  source 1..22: mol_type = other DNA
gagaaccatgactaacataggg

SEQ ID NO: 108070 - DNA, 22 bp, synthetic construct
  misc_feature 1..22: note = chemically synthesized
  source 1..22: mol_type = other DNA
acatagggccatctatttttga

SEQ ID NO: 108071 - DNA, 22 bp, synthetic construct
  misc_feature 1..22: note = chemically synthesized
  source 1..22: mol_type = other DNA
tttttgaggcactttgtgacta

SEQ ID NO: 108072 - DNA, 22 bp, synthetic construct
  misc_feature 1..22: note = chemically synthesized
  source 1..22: mol_type = other DNA
ttgaggcactttgtgactaatc

SEQ ID NO: 108073 - DNA, 22 bp, synthetic construct
  misc_feature 1..22: note = chemically synthesized
  source 1..22: mol_type = other DNA
tgaggcactttgtgactaatca

SEQ ID NO: 108074 - DNA, 22 bp, synthetic construct
  misc_feature 1..22: note = chemically synthesized
  source 1..22: mol_type = other DNA
gaggcactttgtgactaatcac

SEQ ID NO: 108075 - DNA, 22 bp, synthetic construct
  misc_feature 1..22: note = chemically synthesized
  source 1..22: mol_type = other DNA
aggcactttgtgactaatcact

SEQ ID NO: 108076 - DNA, 22 bp, synthetic construct
  misc_feature 1..22: note = chemically synthesized
  source 1..22: mol_type = other DNA
tgtgactaatcactgtcatctg

SEQ ID NO: 108077 - DNA, 22 bp, synthetic construct
  misc_feature 1..22: note = chemically synthesized
  source 1..22: mol_type = other DNA
gtgactaatcactgtcatctgt

SEQ ID NO: 108078 - DNA, 22 bp, synthetic construct
  misc_feature 1..22: note = chemically synthesized
  source 1..22: mol_type = other DNA
tgactaatcactgtcatctgtc

SEQ ID NO: 108079 - DNA, 22 bp, synthetic construct
  misc_feature 1..22: note = chemically synthesized
  source 1..22: mol_type = other DNA
atcactgtcatctgtcagtttg

SEQ ID NO: 108080 - DNA, 22 bp, synthetic construct
  misc_feature 1..22: note = chemically synthesized
  source 1..22: mol_type = other DNA
tcatctgtcagtttggtggcat

SEQ ID NO: 108081 - DNA, 22 bp, synthetic construct
  misc_feature 1..22: note = chemically synthesized
  source 1..22: mol_type = other DNA
tcagtttggtggcatgtacttg

SEQ ID NO: 108082 - DNA, 22 bp, synthetic construct
  misc_feature 1..22: note = chemically synthesized
  source 1..22: mol_type = other DNA
ggtggcatgtacttgaaatcta

SEQ ID NO: 108083 - DNA, 22 bp, synthetic construct
  misc_feature 1..22: note = chemically synthesized
  source 1..22: mol_type = other DNA
gtggcatgtacttgaaatctag

SEQ ID NO: 108084 - DNA, 22 bp, synthetic construct
  misc_feature 1..22: note = chemically synthesized
  source 1..22: mol_type = other DNA
gaaatctagggacataaactcc

SEQ ID NO: 108085 - DNA, 22 bp, synthetic construct
  misc_feature 1..22: note = chemically synthesized
  source 1..22: mol_type = other DNA
aaatctagggacataaactcct

SEQ ID NO: 108086 - DNA, 22 bp, synthetic construct
  misc_feature 1..22: note = chemically synthesized
  source 1..22: mol_type = other DNA
gggacataaactcctaaatttc

SEQ ID NO: 108087 - DNA, 22 bp, synthetic construct
  misc_feature 1..22: note = chemically synthesized
  source 1..22: mol_type = other DNA
ctaaatttcccataaaataaat

SEQ ID NO: 108088 - DNA, 22 bp, synthetic construct
  misc_feature 1..22: note = chemically synthesized
  source 1..22: mol_type = other DNA
aatttcccataaaataaatttt

SEQ ID NO: 108089 - DNA, 22 bp, synthetic construct
  misc_feature 1..22: note = chemically synthesized
  source 1..22: mol_type = other DNA
cccataaaataaattttgtcta

SEQ ID NO: 108090 - DNA, 22 bp, synthetic construct
  misc_feature 1..22: note = chemically synthesized
  source 1..22: mol_type = other DNA
ccataaaataaattttgtctat

SEQ ID NO: 108091 - DNA, 22 bp, synthetic construct
  misc_feature 1..22: note = chemically synthesized
  source 1..22: mol_type = other DNA
tgtctatgagtttattaataac

SEQ ID NO: 108092 - DNA, 22 bp, synthetic construct
  misc_feature 1..22: note = chemically synthesized
  source 1..22: mol_type = other DNA
gtctatgagtttattaataaca

SEQ ID NO: 108093 - DNA, 22 bp, synthetic construct
  misc_feature 1..22: note = chemically synthesized
  source 1..22: mol_type = other DNA
tctatgagtttattaataacaa

SEQ ID NO: 108094 - DNA, 22 bp, synthetic construct
  misc_feature 1..22: note = chemically synthesized
  source 1..22: mol_type = other DNA
tgagtttattaataacaatgac

SEQ ID NO: 108095 - DNA, 22 bp, synthetic construct
  misc_feature 1..22: note = chemically synthesized
  source 1..22: mol_type = other DNA
attaataacaatgactgtgtct

SEQ ID NO: 108096 - DNA, 22 bp, synthetic construct
  misc_feature 1..22: note = chemically synthesized
  source 1..22: mol_type = other DNA
ttaataacaatgactgtgtcta

SEQ ID NO: 108097 - DNA, 22 bp, synthetic construct
  misc_feature 1..22: note = chemically synthesized
  source 1..22: mol_type = other DNA
ataacaatgactgtgtctaagg

SEQ ID NO: 108098 - DNA, 22 bp, synthetic construct
  misc_feature 1..22: note = chemically synthesized
  source 1..22: mol_type = other DNA
tgtctaaggatttaggctataa

SEQ ID NO: 108099 - DNA, 22 bp, synthetic construct
  misc_feature 1..22: note = chemically synthesized
  source 1..22: mol_type = other DNA
aggatttaggctataaaatcaa

SEQ ID NO: 108100 - DNA, 22 bp, synthetic construct
  misc_feature 1..22: note = chemically synthesized
  source 1..22: mol_type = other DNA
aggctataaaatcaaaaacaga

SEQ ID NO: 108101 - DNA, 22 bp, synthetic construct
  misc_feature 1..22: note = chemically synthesized
  source 1..22: mol_type = other DNA
ggctataaaatcaaaaacagat

SEQ ID NO: 108102 - DNA, 22 bp, synthetic construct
  misc_feature 1..22: note = chemically synthesized
  source 1..22: mol_type = other DNA
taaaatcaaaaacagatttaca

SEQ ID NO: 108103 - DNA, 22 bp, synthetic construct
  misc_feature 1..22: note = chemically synthesized
  source 1..22: mol_type = other DNA
acattctttaattggacatgga

SEQ ID NO: 108104 - DNA, 22 bp, synthetic construct
  misc_feature 1..22: note = chemically synthesized
  source 1..22: mol_type = other DNA
cattctttaattggacatggag

SEQ ID NO: 108105 - DNA, 22 bp, synthetic construct
  misc_feature 1..22: note = chemically synthesized
  source 1..22: mol_type = other DNA
tttaattggacatggagacctc

SEQ ID NO: 108106 - DNA, 22 bp, synthetic construct
  misc_feature 1..22: note = chemically synthesized
  source 1..22: mol_type = other DNA
taattggacatggagacctctg

SEQ ID NO: 108107 - DNA, 22 bp, synthetic construct
  misc_feature 1..22: note = chemically synthesized
  source 1..22: mol_type = other DNA
aattggacatggagacctctgg

SEQ ID NO: 108108 - DNA, 22 bp, synthetic construct
  misc_feature 1..22: note = chemically synthesized
  source 1..22: mol_type = other DNA
attggacatggagacctctggg

SEQ ID NO: 108109 - DNA, 22 bp, synthetic construct
  misc_feature 1..22: note = chemically synthesized
  source 1..22: mol_type = other DNA
gacatggagacctctgggtcct

SEQ ID NO: 108110 - DNA, 22 bp, synthetic construct
  misc_feature 1..22: note = chemically synthesized
  source 1..22: mol_type = other DNA
tgggtccttaatcatttctaat

SEQ ID NO: 108111 - DNA, 22 bp, synthetic construct
  misc_feature 1..22: note = chemically synthesized
  source 1..22: mol_type = other DNA
ggtccttaatcatttctaatca

SEQ ID NO: 108112 - DNA, 22 bp, synthetic construct
  misc_feature 1..22: note = chemically synthesized
  source 1..22: mol_type = other DNA
aatcatttctaatcatccttgc

SEQ ID NO: 108113 - DNA, 22 bp, synthetic construct
  misc_feature 1..22: note = chemically synthesized
  source 1..22: mol_type = other DNA
atcatttctaatcatccttgct

SEQ ID NO: 108114 - DNA, 22 bp, synthetic construct
  misc_feature 1..22: note = chemically synthesized
  source 1..22: mol_type = other DNA
ctaatcatccttgctgcccaat

SEQ ID NO: 108115 - DNA, 22 bp, synthetic construct
  misc_feature 1..22: note = chemically synthesized
  source 1..22: mol_type = other DNA
taatcatccttgctgcccaatt

SEQ ID NO: 108116 - DNA, 22 bp, synthetic construct
  misc_feature 1..22: note = chemically synthesized
  source 1..22: mol_type = other DNA
atcatccttgctgcccaattta

SEQ ID NO: 108117 - DNA, 22 bp, synthetic construct
  misc_feature 1..22: note = chemically synthesized
  source 1..22: mol_type = other DNA
gctgcccaatttaatactcata

SEQ ID NO: 108118 - DNA, 22 bp, synthetic construct
  misc_feature 1..22: note = chemically synthesized
  source 1..22: mol_type = other DNA
ctgcccaatttaatactcatat

SEQ ID NO: 108119 - DNA, 22 bp, synthetic construct
  misc_feature 1..22: note = chemically synthesized
  source 1..22: mol_type = other DNA
cccaatttaatactcatataat

SEQ ID NO: 108120 - DNA, 22 bp, synthetic construct
  misc_feature 1..22: note = chemically synthesized
  source 1..22: mol_type = other DNA
aatactcatataatctagtaag

SEQ ID NO: 108121 - DNA, 22 bp, synthetic construct
  misc_feature 1..22: note = chemically synthesized
  source 1..22: mol_type = other DNA
atactcatataatctagtaagt

SEQ ID NO: 108122 - DNA, 22 bp, synthetic construct
  misc_feature 1..22: note = chemically synthesized
  source 1..22: mol_type = other DNA
atataatctagtaagtatcttt

SEQ ID NO: 108123 - DNA, 22 bp, synthetic construct
  misc_feature 1..22: note = chemically synthesized
  source 1..22: mol_type = other DNA
gtaagtatctttaaatatatca

SEQ ID NO: 108124 - DNA, 22 bp, synthetic construct
  misc_feature 1..22: note = chemically synthesized
  source 1..22: mol_type = other DNA
taaatatatcacctttcattta

SEQ ID NO: 108125 - DNA, 22 bp, synthetic construct
  misc_feature 1..22: note = chemically synthesized
  source 1..22: mol_type = other DNA
aaatatatcacctttcatttac

SEQ ID NO: 108126 - DNA, 22 bp, synthetic construct
  misc_feature 1..22: note = chemically synthesized
  source 1..22: mol_type = other DNA
aatatatcacctttcatttacc

SEQ ID NO: 108127 - DNA, 22 bp, synthetic construct
  misc_feature 1..22: note = chemically synthesized
  source 1..22: mol_type = other DNA
tcatttaccctataaaaatctg

SEQ ID NO: 108128 - DNA, 22 bp, synthetic construct
  misc_feature 1..22: note = chemically synthesized
  source 1..22: mol_type = other DNA
catttaccctataaaaatctgc

SEQ ID NO: 108129 - DNA, 22 bp, synthetic construct
  misc_feature 1..22: note = chemically synthesized
  source 1..22: mol_type = other DNA
atttaccctataaaaatctgca

SEQ ID NO: 108130 - DNA, 22 bp, synthetic construct
  misc_feature 1..22: note = chemically synthesized
  source 1..22: mol_type = other DNA
accctataaaaatctgcatctc

SEQ ID NO: 108131 - DNA, 22 bp, synthetic construct
  misc_feature 1..22: note = chemically synthesized
  source 1..22: mol_type = other DNA
ccctataaaaatctgcatctct

SEQ ID NO: 108132 - DNA, 22 bp, synthetic construct
  misc_feature 1..22: note = chemically synthesized
  source 1..22: mol_type = other DNA
taaaaatctgcatctctggtga

SEQ ID NO: 108133 - DNA, 22 bp, synthetic construct
  misc_feature 1..22: note = chemically synthesized
  source 1..22: mol_type = other DNA
catctctggtgaaggaacccag

SEQ ID NO: 108134 - DNA, 22 bp, synthetic construct
  misc_feature 1..22: note = chemically synthesized
  source 1..22: mol_type = other DNA
tggtgaaggaacccagcaatta

SEQ ID NO: 108135 - DNA, 22 bp, synthetic construct
  misc_feature 1..22: note = chemically synthesized
  source 1..22: mol_type = other DNA
gtgaaggaacccagcaattatt

SEQ ID NO: 108136 - DNA, 22 bp, synthetic construct
  misc_feature 1..22: note = chemically synthesized
  source 1..22: mol_type = other DNA
tttgttaatgagaggaataaag

SEQ ID NO: 108137 - DNA, 22 bp, synthetic construct
  misc_feature 1..22: note = chemically synthesized
  source 1..22: mol_type = other DNA
gttaatgagaggaataaagttc

SEQ ID NO: 108138 - DNA, 22 bp, synthetic construct
  misc_feature 1..22: note = chemically synthesized
  source 1..22: mol_type = other DNA
ttaatgagaggaataaagttca

SEQ ID NO: 108139 - DNA, 22 bp, synthetic construct
  misc_feature 1..22: note = chemically synthesized
  source 1..22: mol_type = other DNA
atgagaggaataaagttcatct

SEQ ID NO: 108140 - DNA, 22 bp, synthetic construct
  misc_feature 1..22: note = chemically synthesized
  source 1..22: mol_type = other DNA
atcttccccttatctagtataa

SEQ ID NO: 108141 - DNA, 22 bp, synthetic construct
  misc_feature 1..22: note = chemically synthesized
  source 1..22: mol_type = other DNA
ccccttatctagtataaattca

SEQ ID NO: 108142 - DNA, 22 bp, synthetic construct
  misc_feature 1..22: note = chemically synthesized
  source 1..22: mol_type = other DNA
cccttatctagtataaattcat

SEQ ID NO: 108143 - DNA, 22 bp, synthetic construct
  misc_feature 1..22: note = chemically synthesized
  source 1..22: mol_type = other DNA
atctagtataaattcattttat

SEQ ID NO: 108144 - DNA, 22 bp, synthetic construct
  misc_feature 1..22: note = chemically synthesized
  source 1..22: mol_type = other DNA
tctagtataaattcattttata

SEQ ID NO: 108145 - DNA, 22 bp, synthetic construct
  misc_feature 1..22: note = chemically synthesized
  source 1..22: mol_type = other DNA
gtataaattcattttatatggg

SEQ ID NO: 108146 - DNA, 22 bp, synthetic construct
  misc_feature 1..22: note = chemically synthesized
  source 1..22: mol_type = other DNA
attttatatgggaggaaaagtg

SEQ ID NO: 108147 - DNA, 22 bp, synthetic construct
  misc_feature 1..22: note = chemically synthesized
  source 1..22: mol_type = other DNA
tatatgggaggaaaagtgatct

SEQ ID NO: 108148 - DNA, 22 bp, synthetic construct
  misc_feature 1..22: note = chemically synthesized
  source 1..22: mol_type = other DNA
atatgggaggaaaagtgatctg

SEQ ID NO: 108149 - DNA, 22 bp, synthetic construct
  misc_feature 1..22: note = chemically synthesized
  source 1..22: mol_type = other DNA
tatgggaggaaaagtgatctgt

SEQ ID NO: 108150 - DNA, 22 bp, synthetic construct
  misc_feature 1..22: note = chemically synthesized
  source 1..22: mol_type = other DNA
taaactcattagaccatacata

SEQ ID NO: 108151 - DNA, 22 bp, synthetic construct
  misc_feature 1..22: note = chemically synthesized
  source 1..22: mol_type = other DNA
attagaccatacatattttttc

SEQ ID NO: 108152 - DNA, 22 bp, synthetic construct
  misc_feature 1..22: note = chemically synthesized
  source 1..22: mol_type = other DNA
gaccatacatattttttcagtg

SEQ ID NO: 108153 - DNA, 22 bp, synthetic construct
  misc_feature 1..22: note = chemically synthesized
  source 1..22: mol_type = other DNA
tttcagtgtgtctctaagattc

SEQ ID NO: 108154 - DNA, 22 bp, synthetic construct
  misc_feature 1..22: note = chemically synthesized
  source 1..22: mol_type = other DNA
ttcagtgtgtctctaagattct

SEQ ID NO: 108155 - DNA, 22 bp, synthetic construct
  misc_feature 1..22: note = chemically synthesized
  source 1..22: mol_type = other DNA
tcagtgtgtctctaagattctt

SEQ ID NO: 108156 - DNA, 22 bp, synthetic construct
  misc_feature 1..22: note = chemically synthesized
  source 1..22: mol_type = other DNA
cagtgtgtctctaagattcttc

SEQ ID NO: 108157 - DNA, 22 bp, synthetic construct
  misc_feature 1..22: note = chemically synthesized
  source 1..22: mol_type = other DNA
agtgtgtctctaagattcttcc

SEQ ID NO: 108158 - DNA, 22 bp, synthetic construct
  misc_feature 1..22: note = chemically synthesized
  source 1..22: mol_type = other DNA
taagattcttccacgtcttctt

SEQ ID NO: 108159 - DNA, 22 bp, synthetic construct
  misc_feature 1..22: note = chemically synthesized
  source 1..22: mol_type = other DNA
agattcttccacgtcttcttaa

SEQ ID NO: 108160 - DNA, 22 bp, synthetic construct
  misc_feature 1..22: note = chemically synthesized
  source 1..22: mol_type = other DNA
ttccacgtcttcttaatcattt

SEQ ID NO: 108161 - DNA, 22 bp, synthetic construct
  misc_feature 1..22: note = chemically synthesized
  source 1..22: mol_type = other DNA
ccacgtcttcttaatcatttct

SEQ ID NO: 108162 - DNA, 22 bp, synthetic construct
  misc_feature 1..22: note = chemically synthesized
  source 1..22: mol_type = other DNA
cacgtcttcttaatcatttcta

SEQ ID NO: 108163 - DNA, 22 bp, synthetic construct
  misc_feature 1..22: note = chemically synthesized
  source 1..22: mol_type = other DNA
cttaatcatttctaagattggc

SEQ ID NO: 108164 - DNA, 22 bp, synthetic construct
  misc_feature 1..22: note = chemically synthesized
  source 1..22: mol_type = other DNA
ttaatcatttctaagattggct

SEQ ID NO: 108165 - DNA, 22 bp, synthetic construct
  misc_feature 1..22: note = chemically synthesized
  source 1..22: mol_type = other DNA
aatcatttctaagattggctta

SEQ ID NO: 108166 - DNA, 22 bp, synthetic construct
  misc_feature 1..22: note = chemically synthesized
  source 1..22: mol_type = other DNA
atcatttctaagattggcttag

SEQ ID NO: 108167 - DNA, 22 bp, synthetic construct
  misc_feature 1..22: note = chemically synthesized
  source 1..22: mol_type = other DNA
ctaagattggcttagtctacag

SEQ ID NO: 108168 - DNA, 22 bp, synthetic construct
  misc_feature 1..22: note = chemically synthesized
  source 1..22: mol_type = other DNA
taagattggcttagtctacaga

SEQ ID NO: 108169 - DNA, 22 bp, synthetic construct
  misc_feature 1..22: note = chemically synthesized
  source 1..22: mol_type = other DNA
agattggcttagtctacagaaa

SEQ ID NO: 108170 - DNA, 22 bp, synthetic construct
  misc_feature 1..22: note = chemically synthesized
  source 1..22: mol_type = other DNA
gcttagtctacagaaatgcaca

SEQ ID NO: 108171 - DNA, 22 bp, synthetic construct
  misc_feature 1..22: note = chemically synthesized
  source 1..22: mol_type = other DNA
agtctacagaaatgcacactta

SEQ ID NO: 108172 - DNA, 22 bp, synthetic construct
  misc_feature 1..22: note = chemically synthesized
  source 1..22: mol_type = other DNA
gtctacagaaatgcacacttag

SEQ ID NO: 108173 - DNA, 22 bp, synthetic construct
  misc_feature 1..22: note = chemically synthesized
  source 1..22: mol_type = other DNA
cagaaatgcacacttagccttt

SEQ ID NO: 108174 - DNA, 22 bp, synthetic construct
  misc_feature 1..22: note = chemically synthesized
  source 1..22: mol_type = other DNA
agcctttcatttcctgactcaa

SEQ ID NO: 108175 - DNA, 22 bp, synthetic construct
  misc_feature 1..22: note = chemically synthesized
  source 1..22: mol_type = other DNA
gcctttcatttcctgactcaaa

SEQ ID NO: 108176 - DNA, 22 bp, synthetic construct
  misc_feature 1..22: note = chemically synthesized
  source 1..22: mol_type = other DNA
tcatttcctgactcaaattaaa

SEQ ID NO: 108177 - DNA, 22 bp, synthetic construct
  misc_feature 1..22: note = chemically synthesized
  source 1..22: mol_type = other DNA
catttcctgactcaaattaaat

SEQ ID NO: 108178 - DNA, 22 bp, synthetic construct
  misc_feature 1..22: note = chemically synthesized
  source 1..22: mol_type = other DNA
atttcctgactcaaattaaata

SEQ ID NO: 108179 - DNA, 22 bp, synthetic construct
  misc_feature 1..22: note = chemically synthesized
  source 1..22: mol_type = other DNA
cctgactcaaattaaatattct

SEQ ID NO: 108180 - DNA, 22 bp, synthetic construct
  misc_feature 1..22: note = chemically synthesized
  source 1..22: mol_type = other DNA
ctgactcaaattaaatattctt

SEQ ID NO: 108181 - DNA, 22 bp, synthetic construct
  misc_feature 1..22: note = chemically synthesized
  source 1..22: mol_type = other DNA
actcaaattaaatattcttatg

SEQ ID NO: 108182 - DNA, 22 bp, synthetic construct
  misc_feature 1..22: note = chemically synthesized
  source 1..22: mol_type = other DNA
aaattaaatattcttatggtat

SEQ ID NO: 108183 - DNA, 22 bp, synthetic construct
  misc_feature 1..22: note = chemically synthesized
  source 1..22: mol_type = other DNA
aatattcttatggtatgttatc

SEQ ID NO: 108184 - DNA, 22 bp, synthetic construct
  misc_feature 1..22: note = chemically synthesized
  source 1..22: mol_type = other DNA
ttatggtatgttatcccttcaa

SEQ ID NO: 108185 - DNA, 22 bp, synthetic construct
  misc_feature 1..22: note = chemically synthesized
  source 1..22: mol_type = other DNA
atggtatgttatcccttcaagc

SEQ ID NO: 108186 - DNA, 22 bp, synthetic construct
  misc_feature 1..22: note = chemically synthesized
  source 1..22: mol_type = other DNA
tggtatgttatcccttcaagcc

SEQ ID NO: 108187 - DNA, 22 bp, synthetic construct
  misc_feature 1..22: note = chemically synthesized
  source 1..22: mol_type = other DNA
tcccttcaagcccatactacac

SEQ ID NO: 108188 - DNA, 22 bp, synthetic construct
  misc_feature 1..22: note = chemically synthesized
  source 1..22: mol_type = other DNA
caagcccatactacacaagtat

SEQ ID NO: 108189 - DNA, 22 bp, synthetic construct
  misc_feature 1..22: note = chemically synthesized
  source 1..22: mol_type = other DNA
aagcccatactacacaagtata

SEQ ID NO: 108190 - DNA, 22 bp, synthetic construct
  misc_feature 1..22: note = chemically synthesized
  source 1..22: mol_type = other DNA
cacaagtatattattatttgaa

SEQ ID NO: 108191 - DNA, 22 bp, synthetic construct
  misc_feature 1..22: note = chemically synthesized
  source 1..22: mol_type = other DNA
ttatttgaaaaagaaaggatgg

SEQ ID NO: 108192 - DNA, 22 bp, synthetic construct
  misc_feature 1..22: note = chemically synthesized
  source 1..22: mol_type = other DNA
tttgaaaaagaaaggatggtat

SEQ ID NO: 108193 - DNA, 22 bp, synthetic construct
  misc_feature 1..22: note = chemically synthesized
  source 1..22: mol_type = other DNA
gaaaaagaaaggatggtatttg

SEQ ID NO: 108194 - DNA, 22 bp, synthetic construct
  misc_feature 1..22: note = chemically synthesized
  source 1..22: mol_type = other DNA
aaaaagaaaggatggtatttgg

SEQ ID NO: 108195 - DNA, 22 bp, synthetic construct
  misc_feature 1..22: note = chemically synthesized
  source 1..22: mol_type = other DNA
ggcaagggctttttttaatgta

SEQ ID NO: 108196 - DNA, 22 bp, synthetic construct
  misc_feature 1..22: note = chemically synthesized
  source 1..22: mol_type = other DNA
gcaagggctttttttaatgtat

SEQ ID NO: 108197 - DNA, 22 bp, synthetic construct
  misc_feature 1..22: note = chemically synthesized
  source 1..22: mol_type = other DNA
tttttaatgtatattcttttac

SEQ ID NO: 108198 - DNA, 22 bp, synthetic construct
  misc_feature 1..22: note = chemically synthesized
  source 1..22: mol_type = other DNA
ttttaatgtatattcttttaca

SEQ ID NO: 108199 - DNA, 22 bp, synthetic construct
  misc_feature 1..22: note = chemically synthesized
  source 1..22: mol_type = other DNA
tttaatgtatattcttttacac

SEQ ID NO: 108200 - DNA, 22 bp, synthetic construct
  misc_feature 1..22: note = chemically synthesized
  source 1..22: mol_type = other DNA
ttaatgtatattcttttacacc

SEQ ID NO: 108201 - DNA, 22 bp, synthetic construct
  misc_feature 1..22: note = chemically synthesized
  source 1..22: mol_type = other DNA
taatgtatattcttttacacct

SEQ ID NO: 108202 - DNA, 22 bp, synthetic construct
  misc_feature 1..22: note = chemically synthesized
  source 1..22: mol_type = other DNA
aatgtatattcttttacacctt

SEQ ID NO: 108203 - DNA, 22 bp, synthetic construct
  misc_feature 1..22: note = chemically synthesized
  source 1..22: mol_type = other DNA
atgtatattcttttacacctta

SEQ ID NO: 108204 - DNA, 22 bp, synthetic construct
  misc_feature 1..22: note = chemically synthesized
  source 1..22: mol_type = other DNA
ttttacaccttagatttcccat

SEQ ID NO: 108205 - DNA, 22 bp, synthetic construct
  misc_feature 1..22: note = chemically synthesized
  source 1..22: mol_type = other DNA
ttacaccttagatttcccataa

SEQ ID NO: 108206 - DNA, 22 bp, synthetic construct
  misc_feature 1..22: note = chemically synthesized
  source 1..22: mol_type = other DNA
tacaccttagatttcccataac

SEQ ID NO: 108207 - DNA, 22 bp, synthetic construct
  misc_feature 1..22: note = chemically synthesized
  source 1..22: mol_type = other DNA
acaccttagatttcccataact

SEQ ID NO: 108208 - DNA, 22 bp, synthetic construct
  misc_feature 1..22: note = chemically synthesized
  source 1..22: mol_type = other DNA
caccttagatttcccataacta

SEQ ID NO: 108209 - DNA, 22 bp, synthetic construct
  misc_feature 1..22: note = chemically synthesized
  source 1..22: mol_type = other DNA
agatttcccataactacatggt

SEQ ID NO: 108210 - DNA, 22 bp, synthetic construct
  misc_feature 1..22: note = chemically synthesized
  source 1..22: mol_type = other DNA
gatttcccataactacatggta

SEQ ID NO: 108211 - DNA, 22 bp, synthetic construct
  misc_feature 1..22: note = chemically synthesized
  source 1..22: mol_type = other DNA
cccataactacatggtacttat

SEQ ID NO: 108212 - DNA, 22 bp, synthetic construct
  misc_feature 1..22: note = chemically synthesized
  source 1..22: mol_type = other DNA
ccataactacatggtacttatt

SEQ ID NO: 108213 - DNA, 22 bp, synthetic construct
  misc_feature 1..22: note = chemically synthesized
  source 1..22: mol_type = other DNA
catggtacttatttatcttaat

SEQ ID NO: 108214 - DNA, 22 bp, synthetic construct
  misc_feature 1..22: note = chemically synthesized
  source 1..22: mol_type = other DNA
atttatcttaataggcaccatg

SEQ ID NO: 108215 - DNA, 22 bp, synthetic construct
  misc_feature 1..22: note = chemically synthesized
  source 1..22: mol_type = other DNA
tttatcttaataggcaccatga

SEQ ID NO: 108216 - DNA, 22 bp, synthetic construct
  misc_feature 1..22: note = chemically synthesized
  source 1..22: mol_type = other DNA
atcttaataggcaccatgaaat

SEQ ID NO: 108217 - DNA, 22 bp, synthetic construct
  misc_feature 1..22: note = chemically synthesized
  source 1..22: mol_type = other DNA
tcttaataggcaccatgaaatt

SEQ ID NO: 108218 - DNA, 22 bp, synthetic construct
  misc_feature 1..22: note = chemically synthesized
  source 1..22: mol_type = other DNA
aataggcaccatgaaatttatt

SEQ ID NO: 108219 - DNA, 22 bp, synthetic construct
  misc_feature 1..22: note = chemically synthesized
  source 1..22: mol_type = other DNA
ataggcaccatgaaatttattc

SEQ ID NO: 108220 - DNA, 22 bp, synthetic construct
  misc_feature 1..22: note = chemically synthesized
  source 1..22: mol_type = other DNA
attcctcatgaggtccttctct

SEQ ID NO: 108221 - DNA, 22 bp, synthetic construct
  misc_feature 1..22: note = chemically synthesized
  source 1..22: mol_type = other DNA
ttcctcatgaggtccttctcta

SEQ ID NO: 108222 - DNA, 22 bp, synthetic construct
  misc_feature 1..22: note = chemically synthesized
  source 1..22: mol_type = other DNA
ctcatgaggtccttctctatat

SEQ ID NO: 108223 - DNA, 22 bp, synthetic construct
  misc_feature 1..22: note = chemically synthesized
  source 1..22: mol_type = other DNA
atgaggtccttctctatataag

SEQ ID NO: 108224 - DNA, 22 bp, synthetic construct
  misc_feature 1..22: note = chemically synthesized
  source 1..22: mol_type = other DNA
ctctatataagttatattcttc

SEQ ID NO: 108225 - DNA, 22 bp, synthetic construct
  misc_feature 1..22: note = chemically synthesized
  source 1..22: mol_type = other DNA
tctatataagttatattcttct

SEQ ID NO: 108226 - DNA, 22 bp, synthetic construct
  misc_feature 1..22: note = chemically synthesized
  source 1..22: mol_type = other DNA
tatataagttatattcttcttt

SEQ ID NO: 108227 - DNA, 22 bp, synthetic construct
  misc_feature 1..22: note = chemically synthesized
  source 1..22: mol_type = other DNA
tataagttatattcttctttca

SEQ ID NO: 108228 - DNA, 22 bp, synthetic construct
  misc_feature 1..22: note = chemically synthesized
  source 1..22: mol_type = other DNA
tattcttctttcagtcttgaat

SEQ ID NO: 108229 - DNA, 22 bp, synthetic construct
  misc_feature 1..22: note = chemically synthesized
  source 1..22: mol_type = other DNA
ttctttcagtcttgaatgatga

SEQ ID NO: 108230 - DNA, 22 bp, synthetic construct
  misc_feature 1..22: note = chemically synthesized
  source 1..22: mol_type = other DNA
ctttcagtcttgaatgatgaaa

SEQ ID NO: 108231 - DNA, 22 bp, synthetic construct
  misc_feature 1..22: note = chemically synthesized
  source 1..22: mol_type = other DNA
tttcagtcttgaatgatgaaaa

SEQ ID NO: 108232 - DNA, 22 bp, synthetic construct
  misc_feature 1..22: note = chemically synthesized
  source 1..22: mol_type = other DNA
tcagtcttgaatgatgaaaagc

SEQ ID NO: 108233 - DNA, 22 bp, synthetic construct
  misc_feature 1..22: note = chemically synthesized
  source 1..22: mol_type = other DNA
cagtcttgaatgatgaaaagct

SEQ ID NO: 108234 - DNA, 22 bp, synthetic construct
  misc_feature 1..22: note = chemically synthesized
  source 1..22: mol_type = other DNA
agtcttgaatgatgaaaagctg

SEQ ID NO: 108235 - DNA, 22 bp, synthetic construct
  misc_feature 1..22: note = chemically synthesized
  source 1..22: mol_type = other DNA
gaatgatgaaaagctgaattac

SEQ ID NO: 108236 - DNA, 22 bp, synthetic construct
  misc_feature 1..22: note = chemically synthesized
  source 1..22: mol_type = other DNA
aatgatgaaaagctgaattaca

SEQ ID NO: 108237 - DNA, 22 bp, synthetic construct
  misc_feature 1..22: note = chemically synthesized
  source 1..22: mol_type = other DNA
aattacaggcttcacctgctgt

SEQ ID NO: 108238 - DNA, 22 bp, synthetic construct
  misc_feature 1..22: note = chemically synthesized
  source 1..22: mol_type = other DNA
caggcttcacctgctgtaagaa

SEQ ID NO: 108239 - DNA, 22 bp, synthetic construct
  misc_feature 1..22: note = chemically synthesized
  source 1..22: mol_type = other DNA
cacctgctgtaagaaggtggtt

SEQ ID NO: 108240 - DNA, 22 bp, synthetic construct
  misc_feature 1..22: note = chemically synthesized
  source 1..22: mol_type = other DNA
acctgctgtaagaaggtggttc

SEQ ID NO: 108241 - DNA, 22 bp, synthetic construct
  misc_feature 1..22: note = chemically synthesized
  source 1..22: mol_type = other DNA
ctgtaagaaggtggttcaccag

SEQ ID NO: 108242 - DNA, 22 bp, synthetic construct
  misc_feature 1..22: note = chemically synthesized
  source 1..22: mol_type = other DNA
taagaaggtggttcaccagttt

SEQ ID NO: 108243 - DNA, 22 bp, synthetic construct
  misc_feature 1..22: note = chemically synthesized
  source 1..22: mol_type = other DNA
accagtttgttagtccactgga

SEQ ID NO: 108244 - DNA, 22 bp, synthetic construct
  misc_feature 1..22: note = chemically synthesized
  source 1..22: mol_type = other DNA
gttagtccactggaccactctg

SEQ ID NO: 108245 - DNA, 22 bp, synthetic construct
  misc_feature 1..22: note = chemically synthesized
  source 1..22: mol_type = other DNA
ttagtccactggaccactctga

SEQ ID NO: 108246 - DNA, 22 bp, synthetic construct
  misc_feature 1..22: note = chemically synthesized
  source 1..22: mol_type = other DNA
gtccactggaccactctgaatt

SEQ ID NO: 108247 - DNA, 22 bp, synthetic construct
  misc_feature 1..22: note = chemically synthesized
  source 1..22: mol_type = other DNA
gaccactctgaattctactctt

SEQ ID NO: 108248 - DNA, 22 bp, synthetic construct
  misc_feature 1..22: note = chemically synthesized
  source 1..22: mol_type = other DNA
tgaattctactcttcttatgaa

SEQ ID NO: 108249 - DNA, 22 bp, synthetic construct
  misc_feature 1..22: note = chemically synthesized
  source 1..22: mol_type = other DNA
aattctactcttcttatgaata

SEQ ID NO: 108250 - DNA, 22 bp, synthetic construct
  misc_feature 1..22: note = chemically synthesized
  source 1..22: mol_type = other DNA
tactcttcttatgaatacaaat

SEQ ID NO: 108251 - DNA, 22 bp, synthetic construct
  misc_feature 1..22: note = chemically synthesized
  source 1..22: mol_type = other DNA
ctcttcttatgaatacaaattc

SEQ ID NO: 108252 - DNA, 22 bp, synthetic construct
  misc_feature 1..22: note = chemically synthesized
  source 1..22: mol_type = other DNA
ttcttatgaatacaaattcatg

SEQ ID NO: 108253 - DNA, 22 bp, synthetic construct
  misc_feature 1..22: note = chemically synthesized
  source 1..22: mol_type = other DNA
cttatgaatacaaattcatgtg

SEQ ID NO: 108254 - DNA, 22 bp, synthetic construct
  misc_feature 1..22: note = chemically synthesized
  source 1..22: mol_type = other DNA
ttatgaatacaaattcatgtgc

SEQ ID NO: 108255 - DNA, 22 bp, synthetic construct
  misc_feature 1..22: note = chemically synthesized
  source 1..22: mol_type = other DNA
atgaatacaaattcatgtgcag

SEQ ID NO: 108256 - DNA, 22 bp, synthetic construct
  misc_feature 1..22: note = chemically synthesized
  source 1..22: mol_type = other DNA
tgaatacaaattcatgtgcagt

SEQ ID NO: 108257 - DNA, 22 bp, synthetic construct
  misc_feature 1..22: note = chemically synthesized
  source 1..22: mol_type = other DNA
atgtgcagtgtttcctaggaga

SEQ ID NO: 108258 - DNA, 22 bp, synthetic construct
  misc_feature 1..22: note = chemically synthesized
  source 1..22: mol_type = other DNA
cctaggagatagtgttataaat

SEQ ID NO: 108259 - DNA, 22 bp, synthetic construct
  misc_feature 1..22: note = chemically synthesized
  source 1..22: mol_type = other DNA
ctaggagatagtgttataaata

SEQ ID NO: 108260 - DNA, 22 bp, synthetic construct
  misc_feature 1..22: note = chemically synthesized
  source 1..22: mol_type = other DNA
ggagatagtgttataaataggc

SEQ ID NO: 108261 - DNA, 22 bp, synthetic construct
  misc_feature 1..22: note = chemically synthesized
  source 1..22: mol_type = other DNA
taaataggcttcttttcctaac

SEQ ID NO: 108262 - DNA, 22 bp, synthetic construct
  misc_feature 1..22: note = chemically synthesized
  source 1..22: mol_type = other DNA
cttttcctaactaacttttatt

SEQ ID NO: 108263 - DNA, 22 bp, synthetic construct
  misc_feature 1..22: note = chemically synthesized
  source 1..22: mol_type = other DNA
ttttcctaactaacttttattt

SEQ ID NO: 108264 - DNA, 22 bp, synthetic construct
  misc_feature 1..22: note = chemically synthesized
  source 1..22: mol_type = other DNA
ttcctaactaacttttatttta

SEQ ID NO: 108265 - DNA, 22 bp, synthetic construct
  misc_feature 1..22: note = chemically synthesized
  source 1..22: mol_type = other DNA
tcctaactaacttttattttag

SEQ ID NO: 108266 - DNA, 22 bp, synthetic construct
  misc_feature 1..22: note = chemically synthesized
  source 1..22: mol_type = other DNA
cctaactaacttttattttagg

SEQ ID NO: 108267 - DNA, 22 bp, synthetic construct
  misc_feature 1..22: note = chemically synthesized
  source 1..22: mol_type = other DNA
ctaactaacttttattttaggt

SEQ ID NO: 108268 - DNA, 22 bp, synthetic construct
  misc_feature 1..22: note = chemically synthesized
  source 1..22: mol_type = other DNA
actaacttttattttaggttca

SEQ ID NO: 108269 - DNA, 22 bp, synthetic construct
  misc_feature 1..22: note = chemically synthesized
  source 1..22: mol_type = other DNA
acttttattttaggttcaggag

SEQ ID NO: 108270 - DNA, 22 bp, synthetic construct
  misc_feature 1..22: note = chemically synthesized
  source 1..22: mol_type = other DNA
ttattttaggttcaggagtaca

SEQ ID NO: 108271 - DNA, 22 bp, synthetic construct
  misc_feature 1..22: note = chemically synthesized
  source 1..22: mol_type = other DNA
tattttaggttcaggagtacaa

SEQ ID NO: 108272 - DNA, 22 bp, synthetic construct
  misc_feature 1..22: note = chemically synthesized
  source 1..22: mol_type = other DNA
attttaggttcaggagtacaag

SEQ ID NO: 108273 - DNA, 22 bp, synthetic construct
  misc_feature 1..22: note = chemically synthesized
  source 1..22: mol_type = other DNA
ttttaggttcaggagtacaaga

SEQ ID NO: 108274 - DNA, 22 bp, synthetic construct
  misc_feature 1..22: note = chemically synthesized
  source 1..22: mol_type = other DNA
taggttcaggagtacaagagca

SEQ ID NO: 108275 - DNA, 22 bp, synthetic construct
  misc_feature 1..22: note = chemically synthesized
  source 1..22: mol_type = other DNA
aggttcaggagtacaagagcag

SEQ ID NO: 108276 - DNA, 22 bp, synthetic construct
  misc_feature 1..22: note = chemically synthesized
  source 1..22: mol_type = other DNA
ggttcaggagtacaagagcagg

SEQ ID NO: 108277 - DNA, 22 bp, synthetic construct
  misc_feature 1..22: note = chemically synthesized
  source 1..22: mol_type = other DNA
aggagtacaagagcaggtctgt

SEQ ID NO: 108278 - DNA, 22 bp, synthetic construct
  misc_feature 1..22: note = chemically synthesized
  source 1..22: mol_type = other DNA
ttacatatttaaacttgtgtca

SEQ ID NO: 108279 - DNA, 22 bp, synthetic construct
  misc_feature 1..22: note = chemically synthesized
  source 1..22: mol_type = other DNA
catatttaaacttgtgtcacga

SEQ ID NO: 108280 - DNA, 22 bp, synthetic construct
  misc_feature 1..22: note = chemically synthesized
  source 1..22: mol_type = other DNA
aaacttgtgtcacgagggtttg

SEQ ID NO: 108281 - DNA, 22 bp, synthetic construct
  misc_feature 1..22: note = chemically synthesized
  source 1..22: mol_type = other DNA
aacttgtgtcacgagggtttgt

SEQ ID NO: 108282 - DNA, 22 bp, synthetic construct
  misc_feature 1..22: note = chemically synthesized
  source 1..22: mol_type = other DNA
gtgtcacgagggtttgttgtac

SEQ ID NO: 108283 - DNA, 22 bp, synthetic construct
  misc_feature 1..22: note = chemically synthesized
  source 1..22: mol_type = other DNA
tgtcacgagggtttgttgtaca

SEQ ID NO: 108284 - DNA, 22 bp, synthetic construct
  misc_feature 1..22: note = chemically synthesized
  source 1..22: mol_type = other DNA
gttgtacagattatgtcatcac

SEQ ID NO: 108285 - DNA, 22 bp, synthetic construct
  misc_feature 1..22: note = chemically synthesized
  source 1..22: mol_type = other DNA
ttgtacagattatgtcatcact

SEQ ID NO: 108286 - DNA, 22 bp, synthetic construct
  misc_feature 1..22: note = chemically synthesized
  source 1..22: mol_type = other DNA
tacagattatgtcatcactcac

SEQ ID NO: 108287 - DNA, 22 bp, synthetic construct
  misc_feature 1..22: note = chemically synthesized
  source 1..22: mol_type = other DNA
tgtcatcactcactcaggtatt

SEQ ID NO: 108288 - DNA, 22 bp, synthetic construct
  misc_feature 1..22: note = chemically synthesized
  source 1..22: mol_type = other DNA
actcaggtattaagcctagtac

SEQ ID NO: 108289 - DNA, 22 bp, synthetic construct
  misc_feature 1..22: note = chemically synthesized
  source 1..22: mol_type = other DNA
aggtattaagcctagtaccctt

SEQ ID NO: 108290 - DNA, 22 bp, synthetic construct
  misc_feature 1..22: note = chemically synthesized
  source 1..22: mol_type = other DNA
agcctagtacccttttgttact

SEQ ID NO: 108291 - DNA, 22 bp, synthetic construct
  misc_feature 1..22: note = chemically synthesized
  source 1..22: mol_type = other DNA
gtacccttttgttacttttcct

SEQ ID NO: 108292 - DNA, 22 bp, synthetic construct
  misc_feature 1..22: note = chemically synthesized
  source 1..22: mol_type = other DNA
ttgttacttttcctgatcctct

SEQ ID NO: 108293 - DNA, 22 bp, synthetic construct
  misc_feature 1..22: note = chemically synthesized
  source 1..22: mol_type = other DNA
tgttacttttcctgatcctctc

SEQ ID NO: 108294 - DNA, 22 bp, synthetic construct
  misc_feature 1..22: note = chemically synthesized
  source 1..22: mol_type = other DNA
gttacttttcctgatcctctcc

SEQ ID NO: 108295 - DNA, 22 bp, synthetic construct
  misc_feature 1..22: note = chemically synthesized
  source 1..22: mol_type = other DNA
ttacttttcctgatcctctccc

SEQ ID NO: 108296 - DNA, 22 bp, synthetic construct
  misc_feature 1..22: note = chemically synthesized
  source 1..22: mol_type = other DNA
cttttcctgatcctctccctcc

SEQ ID NO: 108297 - DNA, 22 bp, synthetic construct
  misc_feature 1..22: note = chemically synthesized
  source 1..22: mol_type = other DNA
ttcctgatcctctccctccttt

SEQ ID NO: 108298 - DNA, 22 bp, synthetic construct
  misc_feature 1..22: note = chemically synthesized
  source 1..22: mol_type = other DNA
tcctgatcctctccctcctttc

SEQ ID NO: 108299 - DNA, 22 bp, synthetic construct
  misc_feature 1..22: note = chemically synthesized
  source 1..22: mol_type = other DNA
cctgatcctctccctcctttca

SEQ ID NO: 108300 - DNA, 22 bp, synthetic construct
  misc_feature 1..22: note = chemically synthesized
  source 1..22: mol_type = other DNA
ctgatcctctccctcctttcac

SEQ ID NO: 108301 - DNA, 22 bp, synthetic construct
  misc_feature 1..22: note = chemically synthesized
  source 1..22: mol_type = other DNA
atcctctccctcctttcaccct

SEQ ID NO: 108302 - DNA, 22 bp, synthetic construct
  misc_feature 1..22: note = chemically synthesized
  source 1..22: mol_type = other DNA
tccctcctttcaccctccatcc

SEQ ID NO: 108303 - DNA, 22 bp, synthetic construct
  misc_feature 1..22: note = chemically synthesized
  source 1..22: mol_type = other DNA
cctcctttcaccctccatcctc

SEQ ID NO: 108304 - DNA, 22 bp, synthetic construct
  misc_feature 1..22: note = chemically synthesized
  source 1..22: mol_type = other DNA
ctttcaccctccatcctccaat

SEQ ID NO: 108305 - DNA, 22 bp, synthetic construct
  misc_feature 1..22: note = chemically synthesized
  source 1..22: mol_type = other DNA
tcaccctccatcctccaatagg

SEQ ID NO: 108306 - DNA, 22 bp, synthetic construct
  misc_feature 1..22: note = chemically synthesized
  source 1..22: mol_type = other DNA
caccctccatcctccaataggc

SEQ ID NO: 108307 - DNA, 22 bp, synthetic construct
  misc_feature 1..22: note = chemically synthesized
  source 1..22: mol_type = other DNA
accctccatcctccaataggcc

SEQ ID NO: 108308 - DNA, 22 bp, synthetic construct
  misc_feature 1..22: note = chemically synthesized
  source 1..22: mol_type = other DNA
catcctccaataggccccagtg

SEQ ID NO: 108309 - DNA, 22 bp, synthetic construct
  misc_feature 1..22: note = chemically synthesized
  source 1..22: mol_type = other DNA
caataggccccagtgtgtgatg

SEQ ID NO: 108310 - DNA, 22 bp, synthetic construct
  misc_feature 1..22: note = chemically synthesized
  source 1..22: mol_type = other DNA
ccctccatgtgtccatgtgttc

SEQ ID NO: 108311 - DNA, 22 bp, synthetic construct
  misc_feature 1..22: note = chemically synthesized
  source 1..22: mol_type = other DNA
catgtgtccatgtgttctcatc

SEQ ID NO: 108312 - DNA, 22 bp, synthetic construct
  misc_feature 1..22: note = chemically synthesized
  source 1..22: mol_type = other DNA
tcatcatttagctcccactcat

SEQ ID NO: 108313 - DNA, 22 bp, synthetic construct
  misc_feature 1..22: note = chemically synthesized
  source 1..22: mol_type = other DNA
atcatttagctcccactcataa

SEQ ID NO: 108314 - DNA, 22 bp, synthetic construct
  misc_feature 1..22: note = chemically synthesized
  source 1..22: mol_type = other DNA
agctcccactcataagtgagaa

SEQ ID NO: 108315 - DNA, 22 bp, synthetic construct
  misc_feature 1..22: note = chemically synthesized
  source 1..22: mol_type = other DNA
gctcccactcataagtgagaac

SEQ ID NO: 108316 - DNA, 22 bp, synthetic construct
  misc_feature 1..22: note = chemically synthesized
  source 1..22: mol_type = other DNA
ccactcataagtgagaacacgt

SEQ ID NO: 108317 - DNA, 22 bp, synthetic construct
  misc_feature 1..22: note = chemically synthesized
  source 1..22: mol_type = other DNA
ataagtgagaacacgtggtatt

SEQ ID NO: 108318 - DNA, 22 bp, synthetic construct
  misc_feature 1..22: note = chemically synthesized
  source 1..22: mol_type = other DNA
ggttttctgttcctgtattaat

SEQ ID NO: 108319 - DNA, 22 bp, synthetic construct
  misc_feature 1..22: note = chemically synthesized
  source 1..22: mol_type = other DNA
gttttctgttcctgtattaatt

SEQ ID NO: 108320 - DNA, 22 bp, synthetic construct
  misc_feature 1..22: note = chemically synthesized
  source 1..22: mol_type = other DNA
tctgttcctgtattaatttgct

SEQ ID NO: 108321 - DNA, 22 bp, synthetic construct
  misc_feature 1..22: note = chemically synthesized
  source 1..22: mol_type = other DNA
ctgttcctgtattaatttgcta

SEQ ID NO: 108322 - DNA, 22 bp, synthetic construct
  misc_feature 1..22: note = chemically synthesized
  source 1..22: mol_type = other DNA
tgttcctgtattaatttgctaa

SEQ ID NO: 108323 - DNA, 22 bp, synthetic construct
  misc_feature 1..22: note = chemically synthesized
  source 1..22: mol_type = other DNA
ttcctgtattaatttgctaagg

SEQ ID NO: 108324 - DNA, 22 bp, synthetic construct
  misc_feature 1..22: note = chemically synthesized
  source 1..22: mol_type = other DNA
ctgtattaatttgctaaggctt

SEQ ID NO: 108325 - DNA, 22 bp, synthetic construct
  misc_feature 1..22: note = chemically synthesized
  source 1..22: mol_type = other DNA
tattaatttgctaaggcttcta

SEQ ID NO: 108326 - DNA, 22 bp, synthetic construct
  misc_feature 1..22: note = chemically synthesized
  source 1..22: mol_type = other DNA
atttgctaaggcttctaatagt

SEQ ID NO: 108327 - DNA, 22 bp, synthetic construct
  misc_feature 1..22: note = chemically synthesized
  source 1..22: mol_type = other DNA
gctaaggcttctaatagtacat

SEQ ID NO: 108328 - DNA, 22 bp, synthetic construct
  misc_feature 1..22: note = chemically synthesized
  source 1..22: mol_type = other DNA
ctaaggcttctaatagtacata

SEQ ID NO: 108329 - DNA, 22 bp, synthetic construct
  misc_feature 1..22: note = chemically synthesized
  source 1..22: mol_type = other DNA
aggcttctaatagtacatagca

SEQ ID NO: 108330 - DNA, 22 bp, synthetic construct
  misc_feature 1..22: note = chemically synthesized
  source 1..22: mol_type = other DNA
ctaatagtacatagcattttac

SEQ ID NO: 108331 - DNA, 22 bp, synthetic construct
  misc_feature 1..22: note = chemically synthesized
  source 1..22: mol_type = other DNA
taatagtacatagcattttacc

SEQ ID NO: 108332 - DNA, 22 bp, synthetic construct
  misc_feature 1..22: note = chemically synthesized
  source 1..22: mol_type = other DNA
atagtacatagcattttaccac

SEQ ID NO: 108333 - DNA, 22 bp, synthetic construct
  misc_feature 1..22: note = chemically synthesized
  source 1..22: mol_type = other DNA
taccacaggaagacttgtagga

SEQ ID NO: 108334 - DNA, 22 bp, synthetic construct
  misc_feature 1..22: note = chemically synthesized
  source 1..22: mol_type = other DNA
accacaggaagacttgtaggag

SEQ ID NO: 108335 - DNA, 22 bp, synthetic construct
  misc_feature 1..22: note = chemically synthesized
  source 1..22: mol_type = other DNA
ccacaggaagacttgtaggaga

SEQ ID NO: 108336 - DNA, 22 bp, synthetic construct
  misc_feature 1..22: note = chemically synthesized
  source 1..22: mol_type = other DNA
gtaggagatcacagaaagttct

SEQ ID NO: 108337 - DNA, 22 bp, synthetic construct
  misc_feature 1..22: note = chemically synthesized
  source 1..22: mol_type = other DNA
taggagatcacagaaagttcta

SEQ ID NO: 108338 - DNA, 22 bp, synthetic construct
  misc_feature 1..22: note = chemically synthesized
  source 1..22: mol_type = other DNA
taaattttatgataatactaac

SEQ ID NO: 108339 - DNA, 22 bp, synthetic construct
  misc_feature 1..22: note = chemically synthesized
  source 1..22: mol_type = other DNA
aattttatgataatactaacat

SEQ ID NO: 108340 - DNA, 22 bp, synthetic construct
  misc_feature 1..22: note = chemically synthesized
  source 1..22: mol_type = other DNA
tatgataatactaacatactgt

SEQ ID NO: 108341 - DNA, 22 bp, synthetic construct
  misc_feature 1..22: note = chemically synthesized
  source 1..22: mol_type = other DNA
atgataatactaacatactgtg

SEQ ID NO: 108342 - DNA, 22 bp, synthetic construct
  misc_feature 1..22: note = chemically synthesized
  source 1..22: mol_type = other DNA
tgataatactaacatactgtgt

SEQ ID NO: 108343 - DNA, 22 bp, synthetic construct
  misc_feature 1..22: note = chemically synthesized
  source 1..22: mol_type = other DNA
acatactgtgtttatgttgatt

SEQ ID NO: 108344 - DNA, 22 bp, synthetic construct
  misc_feature 1..22: note = chemically synthesized
  source 1..22: mol_type = other DNA
tgtttatgttgattgttacaat

SEQ ID NO: 108345 - DNA, 22 bp, synthetic construct
  misc_feature 1..22: note = chemically synthesized
  source 1..22: mol_type = other DNA
atgttgattgttacaatgggtt

SEQ ID NO: 108346 - DNA, 22 bp, synthetic construct
  misc_feature 1..22: note = chemically synthesized
  source 1..22: mol_type = other DNA
tgttgattgttacaatgggttt

SEQ ID NO: 108347 - DNA, 22 bp, synthetic construct
  misc_feature 1..22: note = chemically synthesized
  source 1..22: mol_type = other DNA
attgttacaatgggttttgaat

SEQ ID NO: 108348 - DNA, 22 bp, synthetic construct
  misc_feature 1..22: note = chemically synthesized
  source 1..22: mol_type = other DNA
ttacaatgggttttgaatagaa

SEQ ID NO: 108349 - DNA, 22 bp, synthetic construct
  misc_feature 1..22: note = chemically synthesized
  source 1..22: mol_type = other DNA
caatgggttttgaatagaaaaa

SEQ ID NO: 108350 - DNA, 22 bp, synthetic construct
  misc_feature 1..22: note = chemically synthesized
  source 1..22: mol_type = other DNA
tgaatagaaaaacatgtctgag

SEQ ID NO: 108351 - DNA, 22 bp, synthetic construct
  misc_feature 1..22: note = chemically synthesized
  source 1..22: mol_type = other DNA
gaatagaaaaacatgtctgagt

SEQ ID NO: 108352 - DNA, 22 bp, synthetic construct
  misc_feature 1..22: note = chemically synthesized
  source 1..22: mol_type = other DNA
aatagaaaaacatgtctgagtg

SEQ ID NO: 108353 - DNA, 22 bp, synthetic construct
  misc_feature 1..22: note = chemically synthesized
  source 1..22: mol_type = other DNA
agtggatttccaccatgtagcc

SEQ ID NO: 108354 - DNA, 22 bp, synthetic construct
  misc_feature 1..22: note = chemically synthesized
  source 1..22: mol_type = other DNA
ccaccatgtagccttctgtata

SEQ ID NO: 108355 - DNA, 22 bp, synthetic construct
  misc_feature 1..22: note = chemically synthesized
  source 1..22: mol_type = other DNA
caccatgtagccttctgtataa

SEQ ID NO: 108356 - DNA, 22 bp, synthetic construct
  misc_feature 1..22: note = chemically synthesized
  source 1..22: mol_type = other DNA
ctgtataactaagtttgagata

SEQ ID NO: 108357 - DNA, 22 bp, synthetic construct
  misc_feature 1..22: note = chemically synthesized
  source 1..22: mol_type = other DNA
tgtataactaagtttgagataa

SEQ ID NO: 108358 - DNA, 22 bp, synthetic construct
  misc_feature 1..22: note = chemically synthesized
  source 1..22: mol_type = other DNA
tataactaagtttgagataatt

SEQ ID NO: 108359 - DNA, 22 bp, synthetic construct
  misc_feature 1..22: note = chemically synthesized
  source 1..22: mol_type = other DNA
agtttgagataattatttagtc

SEQ ID NO: 108360 - DNA, 22 bp, synthetic construct
  misc_feature 1..22: note = chemically synthesized
  source 1..22: mol_type = other DNA
gagataattatttagtcttccc

SEQ ID NO: 108361 - DNA, 22 bp, synthetic construct
  misc_feature 1..22: note = chemically synthesized
  source 1..22: mol_type = other DNA
agataattatttagtcttcccc

SEQ ID NO: 108362 - DNA, 22 bp, synthetic construct
  misc_feature 1..22: note = chemically synthesized
  source 1..22: mol_type = other DNA
tttagtcttccccccacctccg

SEQ ID NO: 108363 - DNA, 22 bp, synthetic construct
  misc_feature 1..22: note = chemically synthesized
  source 1..22: mol_type = other DNA
agtcttccccccacctccgatg

SEQ ID NO: 108364 - DNA, 22 bp, synthetic construct
  misc_feature 1..22: note = chemically synthesized
  source 1..22: mol_type = other DNA
gtcttccccccacctccgatgt

SEQ ID NO: 108365 - DNA, 22 bp, synthetic construct
  misc_feature 1..22: note = chemically synthesized
  source 1..22: mol_type = other DNA
ccccccacctccgatgtcctgt

SEQ ID NO: 108366 - DNA, 22 bp, synthetic construct
  misc_feature 1..22: note = chemically synthesized
  source 1..22: mol_type = other DNA
cccccacctccgatgtcctgtg

SEQ ID NO: 108367 - DNA, 22 bp, synthetic construct
  misc_feature 1..22: note = chemically synthesized
  source 1..22: mol_type = other DNA
cgatgtcctgtgtctgtattca

SEQ ID NO: 108368 - DNA, 22 bp, synthetic construct
  misc_feature 1..22: note = chemically synthesized
  source 1..22: mol_type = other DNA
tgtctgtattcatcctacagca

SEQ ID NO: 108369 - DNA, 22 bp, synthetic construct
  misc_feature 1..22: note = chemically synthesized
  source 1..22: mol_type = other DNA
tattcatcctacagcatcttct

SEQ ID NO: 108370 - DNA, 22 bp, synthetic construct
  misc_feature 1..22: note = chemically synthesized
  source 1..22: mol_type = other DNA
atcctacagcatcttctcagtg

SEQ ID NO: 108371 - DNA, 22 bp, synthetic construct
  misc_feature 1..22: note = chemically synthesized
  source 1..22: mol_type = other DNA
cagcatcttctcagtgaattta

SEQ ID NO: 108372 - DNA, 22 bp, synthetic construct
  misc_feature 1..22: note = chemically synthesized
  source 1..22: mol_type = other DNA
ctcagtgaatttagtttcacac

SEQ ID NO: 108373 - DNA, 22 bp, synthetic construct
  misc_feature 1..22: note = chemically synthesized
  source 1..22: mol_type = other DNA
tcagtgaatttagtttcacact

SEQ ID NO: 108374 - DNA, 22 bp, synthetic construct
  misc_feature 1..22: note = chemically synthesized
  source 1..22: mol_type = other DNA
agtgaatttagtttcacactta

SEQ ID NO: 108375 - DNA, 22 bp, synthetic construct
  misc_feature 1..22: note = chemically synthesized
  source 1..22: mol_type = other DNA
agtttcacacttactttcaagt

SEQ ID NO: 108376 - DNA, 22 bp, synthetic construct
  misc_feature 1..22: note = chemically synthesized
  source 1..22: mol_type = other DNA
gtttcacacttactttcaagtc

SEQ ID NO: 108377 - DNA, 22 bp, synthetic construct
  misc_feature 1..22: note = chemically synthesized
  source 1..22: mol_type = other DNA
cacacttactttcaagtcagaa

SEQ ID NO: 108378 - DNA, 22 bp, synthetic construct
  misc_feature 1..22: note = chemically synthesized
  source 1..22: mol_type = other DNA
acacttactttcaagtcagaaa

SEQ ID NO: 108379 - DNA, 22 bp, synthetic construct
  misc_feature 1..22: note = chemically synthesized
  source 1..22: mol_type = other DNA
actttcaagtcagaaatgaact

SEQ ID NO: 108380 - DNA, 22 bp, synthetic construct
  misc_feature 1..22: note = chemically synthesized
  source 1..22: mol_type = other DNA
ctttcaagtcagaaatgaactt

SEQ ID NO: 108381 - DNA, 22 bp, synthetic construct
  misc_feature 1..22: note = chemically synthesized
  source 1..22: mol_type = other DNA
tcaagtcagaaatgaacttctt

SEQ ID NO: 108382 - DNA, 22 bp, synthetic construct
  misc_feature 1..22: note = chemically synthesized
  source 1..22: mol_type = other DNA
caagtcagaaatgaacttctta

SEQ ID NO: 108383 - DNA, 22 bp, synthetic construct
  misc_feature 1..22: note = chemically synthesized
  source 1..22: mol_type = other DNA
aagtcagaaatgaacttcttaa

SEQ ID NO: 108384 - DNA, 22 bp, synthetic construct
  misc_feature 1..22: note = chemically synthesized
  source 1..22: mol_type = other DNA
cttaaacaagggaaataacttc

SEQ ID NO: 108385 - DNA, 22 bp, synthetic construct
  misc_feature 1..22: note = chemically synthesized
  source 1..22: mol_type = other DNA
ttaaacaagggaaataacttca

SEQ ID NO: 108386 - DNA, 22 bp, synthetic construct
  misc_feature 1..22: note = chemically synthesized
  source 1..22: mol_type = other DNA
aaacaagggaaataacttcata

SEQ ID NO: 108387 - DNA, 22 bp, synthetic construct
  misc_feature 1..22: note = chemically synthesized
  source 1..22: mol_type = other DNA
aacaagggaaataacttcataa

SEQ ID NO: 108388 - DNA, 22 bp, synthetic construct
  misc_feature 1..22: note = chemically synthesized
  source 1..22: mol_type = other DNA
cataaatcattcaccaaatggt

SEQ ID NO: 108389 - DNA, 22 bp, synthetic construct
  misc_feature 1..22: note = chemically synthesized
  source 1..22: mol_type = other DNA
ataaatcattcaccaaatggtc

SEQ ID NO: 108390 - DNA, 22 bp, synthetic construct
  misc_feature 1..22: note = chemically synthesized
  source 1..22: mol_type = other DNA
accaaatggtcaactttcctgc

SEQ ID NO: 108391 - DNA, 22 bp, synthetic construct
  misc_feature 1..22: note = chemically synthesized
  source 1..22: mol_type = other DNA
tcctgccatttttaggttccat

SEQ ID NO: 108392 - DNA, 22 bp, synthetic construct
  misc_feature 1..22: note = chemically synthesized
  source 1..22: mol_type = other DNA
cctgccatttttaggttccatt

SEQ ID NO: 108393 - DNA, 22 bp, synthetic construct
  misc_feature 1..22: note = chemically synthesized
  source 1..22: mol_type = other DNA
ctgccatttttaggttccattt

SEQ ID NO: 108394 - DNA, 22 bp, synthetic construct
  misc_feature 1..22: note = chemically synthesized
  source 1..22: mol_type = other DNA
ccatttttaggttccatttcct

SEQ ID NO: 108395 - DNA, 22 bp, synthetic construct
  misc_feature 1..22: note = chemically synthesized
  source 1..22: mol_type = other DNA
ttaggttccatttcctgtattt

SEQ ID NO: 108396 - DNA, 22 bp, synthetic construct
  misc_feature 1..22: note = chemically synthesized
  source 1..22: mol_type = other DNA
taggttccatttcctgtatttt

SEQ ID NO: 108397 - DNA, 22 bp, synthetic construct
  misc_feature 1..22: note = chemically synthesized
  source 1..22: mol_type = other DNA
aggttccatttcctgtatttta

SEQ ID NO: 108398 - DNA, 22 bp, synthetic construct
  misc_feature 1..22: note = chemically synthesized
  source 1..22: mol_type = other DNA
ggttccatttcctgtattttag

SEQ ID NO: 108399 - DNA, 22 bp, synthetic construct
  misc_feature 1..22: note = chemically synthesized
  source 1..22: mol_type = other DNA
catttcctgtattttagaaaaa

SEQ ID NO: 108400 - DNA, 22 bp, synthetic construct
  misc_feature 1..22: note = chemically synthesized
  source 1..22: mol_type = other DNA
cctgtattttagaaaaagaggc

SEQ ID NO: 108401 - DNA, 22 bp, synthetic construct
  misc_feature 1..22: note = chemically synthesized
  source 1..22: mol_type = other DNA
ctgtattttagaaaaagaggca

SEQ ID NO: 108402 - DNA, 22 bp, synthetic construct
  misc_feature 1..22: note = chemically synthesized
  source 1..22: mol_type = other DNA
tattttagaaaaagaggcagct

SEQ ID NO: 108403 - DNA, 22 bp, synthetic construct
  misc_feature 1..22: note = chemically synthesized
  source 1..22: mol_type = other DNA
tagaaaaagaggcagctcttct

SEQ ID NO: 108404 - DNA, 22 bp, synthetic construct
  misc_feature 1..22: note = chemically synthesized
  source 1..22: mol_type = other DNA
agaaaaagaggcagctcttcta

SEQ ID NO: 108405 - DNA, 22 bp, synthetic construct
  misc_feature 1..22: note = chemically synthesized
  source 1..22: mol_type = other DNA
gaaaaagaggcagctcttctac

SEQ ID NO: 108406 - DNA, 22 bp, synthetic construct
  misc_feature 1..22: note = chemically synthesized
  source 1..22: mol_type = other DNA
ttctacctaacagtattttcca

SEQ ID NO: 108407 - DNA, 22 bp, synthetic construct
  misc_feature 1..22: note = chemically synthesized
  source 1..22: mol_type = other DNA
ctacctaacagtattttccagt

SEQ ID NO: 108408 - DNA, 22 bp, synthetic construct
  misc_feature 1..22: note = chemically synthesized
  source 1..22: mol_type = other DNA
tacctaacagtattttccagtt

SEQ ID NO: 108409 - DNA, 22 bp, synthetic construct
  misc_feature 1..22: note = chemically synthesized
  source 1..22: mol_type = other DNA
cctaacagtattttccagtttt

SEQ ID NO: 108410 - DNA, 22 bp, synthetic construct
  misc_feature 1..22: note = chemically synthesized
  source 1..22: mol_type = other DNA
acagtattttccagttttaaat

SEQ ID NO: 108411 - DNA, 22 bp, synthetic construct
  misc_feature 1..22: note = chemically synthesized
  source 1..22: mol_type = other DNA
tccagttttaaatattagttag

SEQ ID NO: 108412 - DNA, 22 bp, synthetic construct
  misc_feature 1..22: note = chemically synthesized
  source 1..22: mol_type = other DNA
ccagttttaaatattagttaga

SEQ ID NO: 108413 - DNA, 22 bp, synthetic construct
  misc_feature 1..22: note = chemically synthesized
  source 1..22: mol_type = other DNA
cagttttaaatattagttagag

SEQ ID NO: 108414 - DNA, 22 bp, synthetic construct
  misc_feature 1..22: note = chemically synthesized
  source 1..22: mol_type = other DNA
taaatattagttagagaagatt

SEQ ID NO: 108415 - DNA, 22 bp, synthetic construct
  misc_feature 1..22: note = chemically synthesized
  source 1..22: mol_type = other DNA
aaatattagttagagaagattc

SEQ ID NO: 108416 - DNA, 22 bp, synthetic construct
  misc_feature 1..22: note = chemically synthesized
  source 1..22: mol_type = other DNA
aatattagttagagaagattca

SEQ ID NO: 108417 - DNA, 22 bp, synthetic construct
  misc_feature 1..22: note = chemically synthesized
  source 1..22: mol_type = other DNA
gttagagaagattcacatatct

SEQ ID NO: 108418 - DNA, 22 bp, synthetic construct
  misc_feature 1..22: note = chemically synthesized
  source 1..22: mol_type = other DNA
gagaagattcacatatctataa

SEQ ID NO: 108419 - DNA, 22 bp, synthetic construct
  misc_feature 1..22: note = chemically synthesized
  source 1..22: mol_type = other DNA
acatatctataactgagatgat

SEQ ID NO: 108420 - DNA, 22 bp, synthetic construct
  misc_feature 1..22: note = chemically synthesized
  source 1..22: mol_type = other DNA
taactgagatgatataattatt

SEQ ID NO: 108421 - DNA, 22 bp, synthetic construct
  misc_feature 1..22: note = chemically synthesized
  source 1..22: mol_type = other DNA
agatgatataattattaatagc

SEQ ID NO: 108422 - DNA, 22 bp, synthetic construct
  misc_feature 1..22: note = chemically synthesized
  source 1..22: mol_type = other DNA
ttaatagcctttggttataagt

SEQ ID NO: 108423 - DNA, 22 bp, synthetic construct
  misc_feature 1..22: note = chemically synthesized
  source 1..22: mol_type = other DNA
atagcctttggttataagtgaa

SEQ ID NO: 108424 - DNA, 22 bp, synthetic construct
  misc_feature 1..22: note = chemically synthesized
  source 1..22: mol_type = other DNA
tggttataagtgaaactcaact

SEQ ID NO: 108425 - DNA, 22 bp, synthetic construct
  misc_feature 1..22: note = chemically synthesized
  source 1..22: mol_type = other DNA
ggttataagtgaaactcaactg

SEQ ID NO: 108426 - DNA, 22 bp, synthetic construct
  misc_feature 1..22: note = chemically synthesized
  source 1..22: mol_type = other DNA
gttataagtgaaactcaactga

SEQ ID NO: 108427 - DNA, 22 bp, synthetic construct
  misc_feature 1..22: note = chemically synthesized
  source 1..22: mol_type = other DNA
taagtgaaactcaactgaaact

SEQ ID NO: 108428 - DNA, 22 bp, synthetic construct
  misc_feature 1..22: note = chemically synthesized
  source 1..22: mol_type = other DNA
aactgaaactaggctgaacaaa

SEQ ID NO: 108429 - DNA, 22 bp, synthetic construct
  misc_feature 1..22: note = chemically synthesized
  source 1..22: mol_type = other DNA
aaactaggctgaacaaaacaaa

SEQ ID NO: 108430 - DNA, 22 bp, synthetic construct
  misc_feature 1..22: note = chemically synthesized
  source 1..22: mol_type = other DNA
ggctgaacaaaacaaattacaa

SEQ ID NO: 108431 - DNA, 22 bp, synthetic construct
  misc_feature 1..22: note = chemically synthesized
  source 1..22: mol_type = other DNA
aacaaaacaaattacaagaaga

SEQ ID NO: 108432 - DNA, 22 bp, synthetic construct
  misc_feature 1..22: note = chemically synthesized
  source 1..22: mol_type = other DNA
caagaagaggagtttattaggc

SEQ ID NO: 108433 - DNA, 22 bp, synthetic construct
  misc_feature 1..22: note = chemically synthesized
  source 1..22: mol_type = other DNA
attaggctgtggaatcaaaaaa

SEQ ID NO: 108434 - DNA, 22 bp, synthetic construct
  misc_feature 1..22: note = chemically synthesized
  source 1..22: mol_type = other DNA
ttaggctgtggaatcaaaaaaa

SEQ ID NO: 108435 - DNA, 22 bp, synthetic construct
  misc_feature 1..22: note = chemically synthesized
  source 1..22: mol_type = other DNA
ggctgtggaatcaaaaaaaaga

SEQ ID NO: 108436 - DNA, 22 bp, synthetic construct
  misc_feature 1..22: note = chemically synthesized
  source 1..22: mol_type = other DNA
tggaatcaaaaaaaagattcaa

SEQ ID NO: 108437 - DNA, 22 bp, synthetic construct
  misc_feature 1..22: note = chemically synthesized
  source 1..22: mol_type = other DNA
aaactgtcctccttgtcactga

SEQ ID NO: 108438 - DNA, 22 bp, synthetic construct
  misc_feature 1..22: note = chemically synthesized
  source 1..22: mol_type = other DNA
tcctccttgtcactgagtctca

SEQ ID NO: 108439 - DNA, 22 bp, synthetic construct
  misc_feature 1..22: note = chemically synthesized
  source 1..22: mol_type = other DNA
cttgtcactgagtctcaggaaa

SEQ ID NO: 108440 - DNA, 22 bp, synthetic construct
  misc_feature 1..22: note = chemically synthesized
  source 1..22: mol_type = other DNA
gtcactgagtctcaggaaaaca

SEQ ID NO: 108441 - DNA, 22 bp, synthetic construct
  misc_feature 1..22: note = chemically synthesized
  source 1..22: mol_type = other DNA
tcactgagtctcaggaaaacat

SEQ ID NO: 108442 - DNA, 22 bp, synthetic construct
  misc_feature 1..22: note = chemically synthesized
  source 1..22: mol_type = other DNA
agtctcaggaaaacatggaatc

SEQ ID NO: 108443 - DNA, 22 bp, synthetic construct
  misc_feature 1..22: note = chemically synthesized
  source 1..22: mol_type = other DNA
aggaaaacatggaatcagagat

SEQ ID NO: 108444 - DNA, 22 bp, synthetic construct
  misc_feature 1..22: note = chemically synthesized
  source 1..22: mol_type = other DNA
gaagattctttttatttattat

SEQ ID NO: 108445 - DNA, 22 bp, synthetic construct
  misc_feature 1..22: note = chemically synthesized
  source 1..22: mol_type = other DNA
aagattctttttatttattatc

SEQ ID NO: 108446 - DNA, 22 bp, synthetic construct
  misc_feature 1..22: note = chemically synthesized
  source 1..22: mol_type = other DNA
tttttatttattatcatttctt

SEQ ID NO: 108447 - DNA, 22 bp, synthetic construct
  misc_feature 1..22: note = chemically synthesized
  source 1..22: mol_type = other DNA
tttatttattatcatttcttta

SEQ ID NO: 108448 - DNA, 22 bp, synthetic construct
  misc_feature 1..22: note = chemically synthesized
  source 1..22: mol_type = other DNA
ttatttattatcatttctttat

SEQ ID NO: 108449 - DNA, 22 bp, synthetic construct
  misc_feature 1..22: note = chemically synthesized
  source 1..22: mol_type = other DNA
tatttattatcatttctttatc

SEQ ID NO: 108450 - DNA, 22 bp, synthetic construct
  misc_feature 1..22: note = chemically synthesized
  source 1..22: mol_type = other DNA
atttattatcatttctttatct

SEQ ID NO: 108451 - DNA, 22 bp, synthetic construct
  misc_feature 1..22: note = chemically synthesized
  source 1..22: mol_type = other DNA
tttattatcatttctttatcta

SEQ ID NO: 108452 - DNA, 22 bp, synthetic construct
  misc_feature 1..22: note = chemically synthesized
  source 1..22: mol_type = other DNA
attatcatttctttatctataa

SEQ ID NO: 108453 - DNA, 22 bp, synthetic construct
  misc_feature 1..22: note = chemically synthesized
  source 1..22: mol_type = other DNA
ttatcatttctttatctataat

SEQ ID NO: 108454 - DNA, 22 bp, synthetic construct
  misc_feature 1..22: note = chemically synthesized
  source 1..22: mol_type = other DNA
tcatttctttatctataattta

SEQ ID NO: 108455 - DNA, 22 bp, synthetic construct
  misc_feature 1..22: note = chemically synthesized
  source 1..22: mol_type = other DNA
ctttatctataatttactctaa

SEQ ID NO: 108456 - DNA, 22 bp, synthetic construct
  misc_feature 1..22: note = chemically synthesized
  source 1..22: mol_type = other DNA
tttatctataatttactctaaa

SEQ ID NO: 108457 - DNA, 22 bp, synthetic construct
  misc_feature 1..22: note = chemically synthesized
  source 1..22: mol_type = other DNA
tatctataatttactctaaata

SEQ ID NO: 108458 - DNA, 22 bp, synthetic construct
  misc_feature 1..22: note = chemically synthesized
  source 1..22: mol_type = other DNA
atctataatttactctaaatat

SEQ ID NO: 108459 - DNA, 22 bp, synthetic construct
  misc_feature 1..22: note = chemically synthesized
  source 1..22: mol_type = other DNA
tctataatttactctaaatatt

SEQ ID NO: 108460 - DNA, 22 bp, synthetic construct
  misc_feature 1..22: note = chemically synthesized
  source 1..22: mol_type = other DNA
taatttactctaaatatttatt

SEQ ID NO: 108461 - DNA, 22 bp, synthetic construct
  misc_feature 1..22: note = chemically synthesized
  source 1..22: mol_type = other DNA
actctaaatatttattatagtt

SEQ ID NO: 108462 - DNA, 22 bp, synthetic construct
  misc_feature 1..22: note = chemically synthesized
  source 1..22: mol_type = other DNA
ctctaaatatttattatagttt

SEQ ID NO: 108463 - DNA, 22 bp, synthetic construct
  misc_feature 1..22: note = chemically synthesized
  source 1..22: mol_type = other DNA
taaatatttattatagtttgaa

SEQ ID NO: 108464 - DNA, 22 bp, synthetic construct
  misc_feature 1..22: note = chemically synthesized
  source 1..22: mol_type = other DNA
aatatttattatagtttgaagt

SEQ ID NO: 108465 - DNA, 22 bp, synthetic construct
  misc_feature 1..22: note = chemically synthesized
  source 1..22: mol_type = other DNA
attatagtttgaagtcacttgc

SEQ ID NO: 108466 - DNA, 22 bp, synthetic construct
  misc_feature 1..22: note = chemically synthesized
  source 1..22: mol_type = other DNA
ttatagtttgaagtcacttgcc

SEQ ID NO: 108467 - DNA, 22 bp, synthetic construct
  misc_feature 1..22: note = chemically synthesized
  source 1..22: mol_type = other DNA
tagtttgaagtcacttgcctga

SEQ ID NO: 108468 - DNA, 22 bp, synthetic construct
  misc_feature 1..22: note = chemically synthesized
  source 1..22: mol_type = other DNA
gaagtcacttgcctgatgaaaa

SEQ ID NO: 108469 - DNA, 22 bp, synthetic construct
  misc_feature 1..22: note = chemically synthesized
  source 1..22: mol_type = other DNA
aagtcacttgcctgatgaaaaa

SEQ ID NO: 108470 - DNA, 22 bp, synthetic construct
  misc_feature 1..22: note = chemically synthesized
  source 1..22: mol_type = other DNA
gcctgatgaaaaacattgtcat

SEQ ID NO: 108471 - DNA, 22 bp, synthetic construct
  misc_feature 1..22: note = chemically synthesized
  source 1..22: mol_type = other DNA
cctgatgaaaaacattgtcatt

SEQ ID NO: 108472 - DNA, 22 bp, synthetic construct
  misc_feature 1..22: note = chemically synthesized
  source 1..22: mol_type = other DNA
atgaaaaacattgtcattaaca

SEQ ID NO: 108473 - DNA, 22 bp, synthetic construct
  misc_feature 1..22: note = chemically synthesized
  source 1..22: mol_type = other DNA
tcattaacaattctaagcattg

SEQ ID NO: 108474 - DNA, 22 bp, synthetic construct
  misc_feature 1..22: note = chemically synthesized
  source 1..22: mol_type = other DNA
acaattctaagcattgcatttt

SEQ ID NO: 108475 - DNA, 22 bp, synthetic construct
  misc_feature 1..22: note = chemically synthesized
  source 1..22: mol_type = other DNA
taagcattgcattttagtaatt

SEQ ID NO: 108476 - DNA, 22 bp, synthetic construct
  misc_feature 1..22: note = chemically synthesized
  source 1..22: mol_type = other DNA
agcattgcattttagtaattct

SEQ ID NO: 108477 - DNA, 22 bp, synthetic construct
  misc_feature 1..22: note = chemically synthesized
  source 1..22: mol_type = other DNA
cattttagtaattctacaacaa

SEQ ID NO: 108478 - DNA, 22 bp, synthetic construct
  misc_feature 1..22: note = chemically synthesized
  source 1..22: mol_type = other DNA
tagtaattctacaacaaaagca

SEQ ID NO: 108479 - DNA, 22 bp, synthetic construct
  misc_feature 1..22: note = chemically synthesized
  source 1..22: mol_type = other DNA
agtaattctacaacaaaagcat

SEQ ID NO: 108480 - DNA, 22 bp, synthetic construct
  misc_feature 1..22: note = chemically synthesized
  source 1..22: mol_type = other DNA
gtaattctacaacaaaagcatt

SEQ ID NO: 108481 - DNA, 22 bp, synthetic construct
  misc_feature 1..22: note = chemically synthesized
  source 1..22: mol_type = other DNA
tacaacaaaagcattactcttt

SEQ ID NO: 108482 - DNA, 22 bp, synthetic construct
  misc_feature 1..22: note = chemically synthesized
  source 1..22: mol_type = other DNA
caacaaaagcattactcttttt

SEQ ID NO: 108483 - DNA, 22 bp, synthetic construct
  misc_feature 1..22: note = chemically synthesized
  source 1..22: mol_type = other DNA
ctctttttttttttgcaatgtc

SEQ ID NO: 108484 - DNA, 22 bp, synthetic construct
  misc_feature 1..22: note = chemically synthesized
  source 1..22: mol_type = other DNA
tttttttttttgcaatgtcata

SEQ ID NO: 108485 - DNA, 22 bp, synthetic construct
  misc_feature 1..22: note = chemically synthesized
  source 1..22: mol_type = other DNA
tttttttttgcaatgtcatatt

SEQ ID NO: 108486 - DNA, 22 bp, synthetic construct
  misc_feature 1..22: note = chemically synthesized
  source 1..22: mol_type = other DNA
ttttttttgcaatgtcatattg

SEQ ID NO: 108487 - DNA, 22 bp, synthetic construct
  misc_feature 1..22: note = chemically synthesized
  source 1..22: mol_type = other DNA
tttttttgcaatgtcatattga

SEQ ID NO: 108488 - DNA, 22 bp, synthetic construct
  misc_feature 1..22: note = chemically synthesized
  source 1..22: mol_type = other DNA
ttttttgcaatgtcatattgaa

SEQ ID NO: 108489 - DNA, 22 bp, synthetic construct
  misc_feature 1..22: note = chemically synthesized
  source 1..22: mol_type = other DNA
tttttgcaatgtcatattgaaa

SEQ ID NO: 108490 - DNA, 22 bp, synthetic construct
  misc_feature 1..22: note = chemically synthesized
  source 1..22: mol_type = other DNA
ttttgcaatgtcatattgaaaa

SEQ ID NO: 108491 - DNA, 22 bp, synthetic construct
  misc_feature 1..22: note = chemically synthesized
  source 1..22: mol_type = other DNA
tttgcaatgtcatattgaaaaa

SEQ ID NO: 108492 - DNA, 22 bp, synthetic construct
  misc_feature 1..22: note = chemically synthesized
  source 1..22: mol_type = other DNA
ttgcaatgtcatattgaaaaat

SEQ ID NO: 108493 - DNA, 22 bp, synthetic construct
  misc_feature 1..22: note = chemically synthesized
  source 1..22: mol_type = other DNA
tgcaatgtcatattgaaaaatt

SEQ ID NO: 108494 - DNA, 22 bp, synthetic construct
  misc_feature 1..22: note = chemically synthesized
  source 1..22: mol_type = other DNA
gcaatgtcatattgaaaaattc

SEQ ID NO: 108495 - DNA, 22 bp, synthetic construct
  misc_feature 1..22: note = chemically synthesized
  source 1..22: mol_type = other DNA
caatgtcatattgaaaaattct

SEQ ID NO: 108496 - DNA, 22 bp, synthetic construct
  misc_feature 1..22: note = chemically synthesized
  source 1..22: mol_type = other DNA
aaaaattctttttaaaaaagtt

SEQ ID NO: 108497 - DNA, 22 bp, synthetic construct
  misc_feature 1..22: note = chemically synthesized
  source 1..22: mol_type = other DNA
tttttaaaaaagttcttctact

SEQ ID NO: 108498 - DNA, 22 bp, synthetic construct
  misc_feature 1..22: note = chemically synthesized
  source 1..22: mol_type = other DNA
tttaaaaaagttcttctactgc

SEQ ID NO: 108499 - DNA, 22 bp, synthetic construct
  misc_feature 1..22: note = chemically synthesized
  source 1..22: mol_type = other DNA
ttaaaaaagttcttctactgcg

SEQ ID NO: 108500 - DNA, 22 bp, synthetic construct
  misc_feature 1..22: note = chemically synthesized
  source 1..22: mol_type = other DNA
taaaaaagttcttctactgcgg

SEQ ID NO: 108501 - DNA, 22 bp, synthetic construct
  misc_feature 1..22: note = chemically synthesized
  source 1..22: mol_type = other DNA
aaaaaagttcttctactgcggt

SEQ ID NO: 108502 - DNA, 22 bp, synthetic construct
  misc_feature 1..22: note = chemically synthesized
  source 1..22: mol_type = other DNA
aaaaagttcttctactgcggtt

SEQ ID NO: 108503 - DNA, 22 bp, synthetic construct
  misc_feature 1..22: note = chemically synthesized
  source 1..22: mol_type = other DNA
ttctactgcggttaggagtttg

SEQ ID NO: 108504 - DNA, 22 bp, synthetic construct
  misc_feature 1..22: note = chemically synthesized
  source 1..22: mol_type = other DNA
ctactgcggttaggagtttgga

SEQ ID NO: 108505 - DNA, 22 bp, synthetic construct
  misc_feature 1..22: note = chemically synthesized
  source 1..22: mol_type = other DNA
tactgcggttaggagtttggag

SEQ ID NO: 108506 - DNA, 22 bp, synthetic construct
  misc_feature 1..22: note = chemically synthesized
  source 1..22: mol_type = other DNA
ctgcggttaggagtttggagat

SEQ ID NO: 108507 - DNA, 22 bp, synthetic construct
  misc_feature 1..22: note = chemically synthesized
  source 1..22: mol_type = other DNA
cggttaggagtttggagataca

SEQ ID NO: 108508 - DNA, 22 bp, synthetic construct
  misc_feature 1..22: note = chemically synthesized
  source 1..22: mol_type = other DNA
ggagtttggagatacaatgcaa

SEQ ID NO: 108509 - DNA, 22 bp, synthetic construct
  misc_feature 1..22: note = chemically synthesized
  source 1..22: mol_type = other DNA
ggagatacaatgcaaaatatca

SEQ ID NO: 108510 - DNA, 22 bp, synthetic construct
  misc_feature 1..22: note = chemically synthesized
  source 1..22: mol_type = other DNA
gagatacaatgcaaaatatcag

SEQ ID NO: 108511 - DNA, 22 bp, synthetic construct
  misc_feature 1..22: note = chemically synthesized
  source 1..22: mol_type = other DNA
tcatagggaacaatatttttgg

SEQ ID NO: 108512 - DNA, 22 bp, synthetic construct
  misc_feature 1..22: note = chemically synthesized
  source 1..22: mol_type = other DNA
catagggaacaatatttttgga

SEQ ID NO: 108513 - DNA, 22 bp, synthetic construct
  misc_feature 1..22: note = chemically synthesized
  source 1..22: mol_type = other DNA
atagggaacaatatttttggag

SEQ ID NO: 108514 - DNA, 22 bp, synthetic construct
  misc_feature 1..22: note = chemically synthesized
  source 1..22: mol_type = other DNA
ttggagtagaaggaggagaaat

SEQ ID NO: 108515 - DNA, 22 bp, synthetic construct
  misc_feature 1..22: note = chemically synthesized
  source 1..22: mol_type = other DNA
tggagtagaaggaggagaaatt

SEQ ID NO: 108516 - DNA, 22 bp, synthetic construct
  misc_feature 1..22: note = chemically synthesized
  source 1..22: mol_type = other DNA
ggagtagaaggaggagaaattt

SEQ ID NO: 108517 - DNA, 22 bp, synthetic construct
  misc_feature 1..22: note = chemically synthesized
  source 1..22: mol_type = other DNA
gagtagaaggaggagaaatttt

SEQ ID NO: 108518 - DNA, 22 bp, synthetic construct
  misc_feature 1..22: note = chemically synthesized
  source 1..22: mol_type = other DNA
tcagaaaaagaaagtaggtact

SEQ ID NO: 108519 - DNA, 22 bp, synthetic construct
  misc_feature 1..22: note = chemically synthesized
  source 1..22: mol_type = other DNA
cagaaaaagaaagtaggtacta

SEQ ID NO: 108520 - DNA, 22 bp, synthetic construct
  misc_feature 1..22: note = chemically synthesized
  source 1..22: mol_type = other DNA
agaaaaagaaagtaggtactac

SEQ ID NO: 108521 - DNA, 22 bp, synthetic construct
  misc_feature 1..22: note = chemically synthesized
  source 1..22: mol_type = other DNA
caagcatgacggaatacaaggc

SEQ ID NO: 108522 - DNA, 22 bp, synthetic construct
  misc_feature 1..22: note = chemically synthesized
  source 1..22: mol_type = other DNA
aggatagtctactgtagtggag

SEQ ID NO: 108523 - DNA, 22 bp, synthetic construct
  misc_feature 1..22: note = chemically synthesized
  source 1..22: mol_type = other DNA
ctgtagtggagtaccattcaca

SEQ ID NO: 108524 - DNA, 22 bp, synthetic construct
  misc_feature 1..22: note = chemically synthesized
  source 1..22: mol_type = other DNA
tagtggagtaccattcacactg

SEQ ID NO: 108525 - DNA, 22 bp, synthetic construct
  misc_feature 1..22: note = chemically synthesized
  source 1..22: mol_type = other DNA
acactggccttatagttagaag

SEQ ID NO: 108526 - DNA, 22 bp, synthetic construct
  misc_feature 1..22: note = chemically synthesized
  source 1..22: mol_type = other DNA
gccttatagttagaagatataa

SEQ ID NO: 108527 - DNA, 22 bp, synthetic construct
  misc_feature 1..22: note = chemically synthesized
  source 1..22: mol_type = other DNA
atagttagaagatataaatttg

SEQ ID NO: 108528 - DNA, 22 bp, synthetic construct
  misc_feature 1..22: note = chemically synthesized
  source 1..22: mol_type = other DNA
tagttagaagatataaatttga

SEQ ID NO: 108529 - DNA, 22 bp, synthetic construct
  misc_feature 1..22: note = chemically synthesized
  source 1..22: mol_type = other DNA
gaagatataaatttgaatcatg

SEQ ID NO: 108530 - DNA, 22 bp, synthetic construct
  misc_feature 1..22: note = chemically synthesized
  source 1..22: mol_type = other DNA
gaatcatgactataccaattaa

SEQ ID NO: 108531 - DNA, 22 bp, synthetic construct
  misc_feature 1..22: note = chemically synthesized
  source 1..22: mol_type = other DNA
aatcatgactataccaattaaa

SEQ ID NO: 108532 - DNA, 22 bp, synthetic construct
  misc_feature 1..22: note = chemically synthesized
  source 1..22: mol_type = other DNA
taccaattaaaaatgttatgcc

SEQ ID NO: 108533 - DNA, 22 bp, synthetic construct
  misc_feature 1..22: note = chemically synthesized
  source 1..22: mol_type = other DNA
aaaatgttatgcccttggaggg

SEQ ID NO: 108534 - DNA, 22 bp, synthetic construct
  misc_feature 1..22: note = chemically synthesized
  source 1..22: mol_type = other DNA
tgcccttggagggaatatttaa

SEQ ID NO: 108535 - DNA, 22 bp, synthetic construct
  misc_feature 1..22: note = chemically synthesized
  source 1..22: mol_type = other DNA
ggagggaatatttaactttttt

SEQ ID NO: 108536 - DNA, 22 bp, synthetic construct
  misc_feature 1..22: note = chemically synthesized
  source 1..22: mol_type = other DNA
gagggaatatttaactttttta

SEQ ID NO: 108537 - DNA, 22 bp, synthetic construct
  misc_feature 1..22: note = chemically synthesized
  source 1..22: mol_type = other DNA
aacttttttatattaaatttcc

SEQ ID NO: 108538 - DNA, 22 bp, synthetic construct
  misc_feature 1..22: note = chemically synthesized
  source 1..22: mol_type = other DNA
acttttttatattaaatttccc

SEQ ID NO: 108539 - DNA, 22 bp, synthetic construct
  misc_feature 1..22: note = chemically synthesized
  source 1..22: mol_type = other DNA
ttttatattaaatttccccatc

SEQ ID NO: 108540 - DNA, 22 bp, synthetic construct
  misc_feature 1..22: note = chemically synthesized
  source 1..22: mol_type = other DNA
tttatattaaatttccccatca

SEQ ID NO: 108541 - DNA, 22 bp, synthetic construct
  misc_feature 1..22: note = chemically synthesized
  source 1..22: mol_type = other DNA
ttatattaaatttccccatcaa

SEQ ID NO: 108542 - DNA, 22 bp, synthetic construct
  misc_feature 1..22: note = chemically synthesized
  source 1..22: mol_type = other DNA
tatattaaatttccccatcaag

SEQ ID NO: 108543 - DNA, 22 bp, synthetic construct
  misc_feature 1..22: note = chemically synthesized
  source 1..22: mol_type = other DNA
atattaaatttccccatcaaga

SEQ ID NO: 108544 - DNA, 22 bp, synthetic construct
  misc_feature 1..22: note = chemically synthesized
  source 1..22: mol_type = other DNA
tattaaatttccccatcaagaa

SEQ ID NO: 108545 - DNA, 22 bp, synthetic construct
  misc_feature 1..22: note = chemically synthesized
  source 1..22: mol_type = other DNA
aatttccccatcaagaaaacag

SEQ ID NO: 108546 - DNA, 22 bp, synthetic construct
  misc_feature 1..22: note = chemically synthesized
  source 1..22: mol_type = other DNA
ccccatcaagaaaacagtgata

SEQ ID NO: 108547 - DNA, 22 bp, synthetic construct
  misc_feature 1..22: note = chemically synthesized
  source 1..22: mol_type = other DNA
cccatcaagaaaacagtgataa

SEQ ID NO: 108548 - DNA, 22 bp, synthetic construct
  misc_feature 1..22: note = chemically synthesized
  source 1..22: mol_type = other DNA
ccccacaatatttttatgaata

SEQ ID NO: 108549 - DNA, 22 bp, synthetic construct
  misc_feature 1..22: note = chemically synthesized
  source 1..22: mol_type = other DNA
ttatgaataaaataagttgtgg

SEQ ID NO: 108550 - DNA, 22 bp, synthetic construct
  misc_feature 1..22: note = chemically synthesized
  source 1..22: mol_type = other DNA
tatgaataaaataagttgtgga

SEQ ID NO: 108551 - DNA, 22 bp, synthetic construct
  misc_feature 1..22: note = chemically synthesized
  source 1..22: mol_type = other DNA
atgaataaaataagttgtggat

SEQ ID NO: 108552 - DNA, 22 bp, synthetic construct
  misc_feature 1..22: note = chemically synthesized
  source 1..22: mol_type = other DNA
tgaataaaataagttgtggatg

SEQ ID NO: 108553 - DNA, 22 bp, synthetic construct
  misc_feature 1..22: note = chemically synthesized
  source 1..22: mol_type = other DNA
tggatgtagtagagcataatta

SEQ ID NO: 108554 - DNA, 22 bp, synthetic construct
  misc_feature 1..22: note = chemically synthesized
  source 1..22: mol_type = other DNA
agggacacatgtttggttttat

SEQ ID NO: 108555 - DNA, 22 bp, synthetic construct
  misc_feature 1..22: note = chemically synthesized
  source 1..22: mol_type = other DNA
ggttttatgaatgattgaaaac

SEQ ID NO: 108556 - DNA, 22 bp, synthetic construct
  misc_feature 1..22: note = chemically synthesized
  source 1..22: mol_type = other DNA
gttttatgaatgattgaaaaca

SEQ ID NO: 108557 - DNA, 22 bp, synthetic construct
  misc_feature 1..22: note = chemically synthesized
  source 1..22: mol_type = other DNA
tatgaatgattgaaaacaggac

SEQ ID NO: 108558 - DNA, 22 bp, synthetic construct
  misc_feature 1..22: note = chemically synthesized
  source 1..22: mol_type = other DNA
atgaatgattgaaaacaggaca

SEQ ID NO: 108559 - DNA, 22 bp, synthetic construct
  misc_feature 1..22: note = chemically synthesized
  source 1..22: mol_type = other DNA
tgaatgattgaaaacaggacaa

SEQ ID NO: 108560 - DNA, 22 bp, synthetic construct
  misc_feature 1..22: note = chemically synthesized
  source 1..22: mol_type = other DNA
aaaacaggacaaaaacctacca

SEQ ID NO: 108561 - DNA, 22 bp, synthetic construct
  misc_feature 1..22: note = chemically synthesized
  source 1..22: mol_type = other DNA
ccatcacatatatgcactcaca

SEQ ID NO: 108562 - DNA, 22 bp, synthetic construct
  misc_feature 1..22: note = chemically synthesized
  source 1..22: mol_type = other DNA
acactcacaatttagtattcag

SEQ ID NO: 108563 - DNA, 22 bp, synthetic construct
  misc_feature 1..22: note = chemically synthesized
  source 1..22: mol_type = other DNA
acaatttagtattcagactgtg

SEQ ID NO: 108564 - DNA, 22 bp, synthetic construct
  misc_feature 1..22: note = chemically synthesized
  source 1..22: mol_type = other DNA
agtattcagactgtgttgctca

SEQ ID NO: 108565 - DNA, 22 bp, synthetic construct
  misc_feature 1..22: note = chemically synthesized
  source 1..22: mol_type = other DNA
gtattcagactgtgttgctcag

SEQ ID NO: 108566 - DNA, 22 bp, synthetic construct
  misc_feature 1..22: note = chemically synthesized
  source 1..22: mol_type = other DNA
agactgtgttgctcaggtgaca

SEQ ID NO: 108567 - DNA, 22 bp, synthetic construct
  misc_feature 1..22: note = chemically synthesized
  source 1..22: mol_type = other DNA
tgttgctcaggtgacatggcgt

SEQ ID NO: 108568 - DNA, 22 bp, synthetic construct
  misc_feature 1..22: note = chemically synthesized
  source 1..22: mol_type = other DNA
ctcaggtgacatggcgtgacaa

SEQ ID NO: 108569 - DNA, 22 bp, synthetic construct
  misc_feature 1..22: note = chemically synthesized
  source 1..22: mol_type = other DNA
aggtgacatggcgtgacaagga

SEQ ID NO: 108570 - DNA, 22 bp, synthetic construct
  misc_feature 1..22: note = chemically synthesized
  source 1..22: mol_type = other DNA
atttttttatatgttcagttct

SEQ ID NO: 108571 - DNA, 22 bp, synthetic construct
  misc_feature 1..22: note = chemically synthesized
  source 1..22: mol_type = other DNA
ttttatatgttcagttctttca

SEQ ID NO: 108572 - DNA, 22 bp, synthetic construct
  misc_feature 1..22: note = chemically synthesized
  source 1..22: mol_type = other DNA
tttatatgttcagttctttcac

SEQ ID NO: 108573 - DNA, 22 bp, synthetic construct
  misc_feature 1..22: note = chemically synthesized
  source 1..22: mol_type = other DNA
ttatatgttcagttctttcaca

SEQ ID NO: 108574 - DNA, 22 bp, synthetic construct
  misc_feature 1..22: note = chemically synthesized
  source 1..22: mol_type = other DNA
tatatgttcagttctttcacaa

SEQ ID NO: 108575 - DNA, 22 bp, synthetic construct
  misc_feature 1..22: note = chemically synthesized
  source 1..22: mol_type = other DNA
atatgttcagttctttcacaat

SEQ ID NO: 108576 - DNA, 22 bp, synthetic construct
  misc_feature 1..22: note = chemically synthesized
  source 1..22: mol_type = other DNA
tatgttcagttctttcacaatt

SEQ ID NO: 108577 - DNA, 22 bp, synthetic construct
  misc_feature 1..22: note = chemically synthesized
  source 1..22: mol_type = other DNA
agttctttcacaattacatctc

SEQ ID NO: 108578 - DNA, 22 bp, synthetic construct
  misc_feature 1..22: note = chemically synthesized
  source 1..22: mol_type = other DNA
tttcacaattacatctcttaat

SEQ ID NO: 108579 - DNA, 22 bp, synthetic construct
  misc_feature 1..22: note = chemically synthesized
  source 1..22: mol_type = other DNA
tcacaattacatctcttaatga

SEQ ID NO: 108580 - DNA, 22 bp, synthetic construct
  misc_feature 1..22: note = chemically synthesized
  source 1..22: mol_type = other DNA
cacaattacatctcttaatgaa

SEQ ID NO: 108581 - DNA, 22 bp, synthetic construct
  misc_feature 1..22: note = chemically synthesized
  source 1..22: mol_type = other DNA
acaattacatctcttaatgaaa

SEQ ID NO: 108582 - DNA, 22 bp, synthetic construct
  misc_feature 1..22: note = chemically synthesized
  source 1..22: mol_type = other DNA
catctcttaatgaaacagaata

SEQ ID NO: 108583 - DNA, 22 bp, synthetic construct
  misc_feature 1..22: note = chemically synthesized
  source 1..22: mol_type = other DNA
ttaatgaaacagaatataaata

SEQ ID NO: 108584 - DNA, 22 bp, synthetic construct
  misc_feature 1..22: note = chemically synthesized
  source 1..22: mol_type = other DNA
aatgaaacagaatataaataag

SEQ ID NO: 108585 - DNA, 22 bp, synthetic construct
  misc_feature 1..22: note = chemically synthesized
  source 1..22: mol_type = other DNA
atgaaacagaatataaataagg

SEQ ID NO: 108586 - DNA, 22 bp, synthetic construct
  misc_feature 1..22: note = chemically synthesized
  source 1..22: mol_type = other DNA
cagtttttcttaagttggactc

SEQ ID NO: 108587 - DNA, 22 bp, synthetic construct
  misc_feature 1..22: note = chemically synthesized
  source 1..22: mol_type = other DNA
ttcttaagttggactctctatg

SEQ ID NO: 108588 - DNA, 22 bp, synthetic construct
  misc_feature 1..22: note = chemically synthesized
  source 1..22: mol_type = other DNA
tcttaagttggactctctatga

SEQ ID NO: 108589 - DNA, 22 bp, synthetic construct
  misc_feature 1..22: note = chemically synthesized
  source 1..22: mol_type = other DNA
cttaagttggactctctatgag

SEQ ID NO: 108590 - DNA, 22 bp, synthetic construct
  misc_feature 1..22: note = chemically synthesized
  source 1..22: mol_type = other DNA
ttaagttggactctctatgagc

SEQ ID NO: 108591 - DNA, 22 bp, synthetic construct
  misc_feature 1..22: note = chemically synthesized
  source 1..22: mol_type = other DNA
aagttggactctctatgagcaa

SEQ ID NO: 108592 - DNA, 22 bp, synthetic construct
  misc_feature 1..22: note = chemically synthesized
  source 1..22: mol_type = other DNA
agttggactctctatgagcaat

SEQ ID NO: 108593 - DNA, 22 bp, synthetic construct
  misc_feature 1..22: note = chemically synthesized
  source 1..22: mol_type = other DNA
gactctctatgagcaatacctg

SEQ ID NO: 108594 - DNA, 22 bp, synthetic construct
  misc_feature 1..22: note = chemically synthesized
  source 1..22: mol_type = other DNA
tctatgagcaatacctgagata

SEQ ID NO: 108595 - DNA, 22 bp, synthetic construct
  misc_feature 1..22: note = chemically synthesized
  source 1..22: mol_type = other DNA
tatgagcaatacctgagatagg

SEQ ID NO: 108596 - DNA, 22 bp, synthetic construct
  misc_feature 1..22: note = chemically synthesized
  source 1..22: mol_type = other DNA
tgagcaatacctgagataggga

SEQ ID NO: 108597 - DNA, 22 bp, synthetic construct
  misc_feature 1..22: note = chemically synthesized
  source 1..22: mol_type = other DNA
agatagggattcaaatgtgtgc

SEQ ID NO: 108598 - DNA, 22 bp, synthetic construct
  misc_feature 1..22: note = chemically synthesized
  source 1..22: mol_type = other DNA
aaatgtgtgcaatttattaatg

SEQ ID NO: 108599 - DNA, 22 bp, synthetic construct
  misc_feature 1..22: note = chemically synthesized
  source 1..22: mol_type = other DNA
attaatgaatgctctcaggaga

SEQ ID NO: 108600 - DNA, 22 bp, synthetic construct
  misc_feature 1..22: note = chemically synthesized
  source 1..22: mol_type = other DNA
ttaatgaatgctctcaggagac

SEQ ID NO: 108601 - DNA, 22 bp, synthetic construct
  misc_feature 1..22: note = chemically synthesized
  source 1..22: mol_type = other DNA
atgaatgctctcaggagacagg

SEQ ID NO: 108602 - DNA, 22 bp, synthetic construct
  misc_feature 1..22: note = chemically synthesized
  source 1..22: mol_type = other DNA
tcaggagacagggagcaagtaa

SEQ ID NO: 108603 - DNA, 22 bp, synthetic construct
  misc_feature 1..22: note = chemically synthesized
  source 1..22: mol_type = other DNA
aggagacagggagcaagtaaaa

SEQ ID NO: 108604 - DNA, 22 bp, synthetic construct
  misc_feature 1..22: note = chemically synthesized
  source 1..22: mol_type = other DNA
aagctggagcttagcttcagaa

SEQ ID NO: 108605 - DNA, 22 bp, synthetic construct
  misc_feature 1..22: note = chemically synthesized
  source 1..22: mol_type = other DNA
gagcttagcttcagaaggcaag

SEQ ID NO: 108606 - DNA, 22 bp, synthetic construct
  misc_feature 1..22: note = chemically synthesized
  source 1..22: mol_type = other DNA
agcttcagaaggcaagagggtc

SEQ ID NO: 108607 - DNA, 22 bp, synthetic construct
  misc_feature 1..22: note = chemically synthesized
  source 1..22: mol_type = other DNA
gcttcagaaggcaagagggtca

SEQ ID NO: 108608 - DNA, 22 bp, synthetic construct
  misc_feature 1..22: note = chemically synthesized
  source 1..22: mol_type = other DNA
cagaaggcaagagggtcagtat

SEQ ID NO: 108609 - DNA, 22 bp, synthetic construct
  misc_feature 1..22: note = chemically synthesized
  source 1..22: mol_type = other DNA
agaaggcaagagggtcagtatt

SEQ ID NO: 108610 - DNA, 22 bp, synthetic construct
  misc_feature 1..22: note = chemically synthesized
  source 1..22: mol_type = other DNA
gcctatggcctgctacctaagg

SEQ ID NO: 108611 - DNA, 22 bp, synthetic construct
  misc_feature 1..22: note = chemically synthesized
  source 1..22: mol_type = other DNA
cctatggcctgctacctaagga

SEQ ID NO: 108612 - DNA, 22 bp, synthetic construct
  misc_feature 1..22: note = chemically synthesized
  source 1..22: mol_type = other DNA
tggcctgctacctaaggagcag

SEQ ID NO: 108613 - DNA, 22 bp, synthetic construct
  misc_feature 1..22: note = chemically synthesized
  source 1..22: mol_type = other DNA
ctacctaaggagcaggggccat

SEQ ID NO: 108614 - DNA, 22 bp, synthetic construct
  misc_feature 1..22: note = chemically synthesized
  source 1..22: mol_type = other DNA
cctaaggagcaggggccatttt

SEQ ID NO: 108615 - DNA, 22 bp, synthetic construct
  misc_feature 1..22: note = chemically synthesized
  source 1..22: mol_type = other DNA
aggagcaggggccattttcttc

SEQ ID NO: 108616 - DNA, 22 bp, synthetic construct
  misc_feature 1..22: note = chemically synthesized
  source 1..22: mol_type = other DNA
tcttcataagacatttcctgct

SEQ ID NO: 108617 - DNA, 22 bp, synthetic construct
  misc_feature 1..22: note = chemically synthesized
  source 1..22: mol_type = other DNA
cttcataagacatttcctgctg

SEQ ID NO: 108618 - DNA, 22 bp, synthetic construct
  misc_feature 1..22: note = chemically synthesized
  source 1..22: mol_type = other DNA
ttcataagacatttcctgctga

SEQ ID NO: 108619 - DNA, 22 bp, synthetic construct
  misc_feature 1..22: note = chemically synthesized
  source 1..22: mol_type = other DNA
cataagacatttcctgctgagt

SEQ ID NO: 108620 - DNA, 22 bp, synthetic construct
  misc_feature 1..22: note = chemically synthesized
  source 1..22: mol_type = other DNA
ataagacatttcctgctgagtt

SEQ ID NO: 108621 - DNA, 22 bp, synthetic construct
  misc_feature 1..22: note = chemically synthesized
  source 1..22: mol_type = other DNA
cctgctgagttgagaacaacaa

SEQ ID NO: 108622 - DNA, 22 bp, synthetic construct
  misc_feature 1..22: note = chemically synthesized
  source 1..22: mol_type = other DNA
ctgctgagttgagaacaacaac

SEQ ID NO: 108623 - DNA, 22 bp, synthetic construct
  misc_feature 1..22: note = chemically synthesized
  source 1..22: mol_type = other DNA
ctgagttgagaacaacaacctg

SEQ ID NO: 108624 - DNA, 22 bp, synthetic construct
  misc_feature 1..22: note = chemically synthesized
  source 1..22: mol_type = other DNA
agttgagaacaacaacctgcag

SEQ ID NO: 108625 - DNA, 22 bp, synthetic construct
  misc_feature 1..22: note = chemically synthesized
  source 1..22: mol_type = other DNA
agaacaacaacctgcagaaagc

SEQ ID NO: 108626 - DNA, 22 bp, synthetic construct
  misc_feature 1..22: note = chemically synthesized
  source 1..22: mol_type = other DNA
cagaaagcagaaacatgaacaa

SEQ ID NO: 108627 - DNA, 22 bp, synthetic construct
  misc_feature 1..22: note = chemically synthesized
  source 1..22: mol_type = other DNA
acaggtgcacaattctgtaaaa

SEQ ID NO: 108628 - DNA, 22 bp, synthetic construct
  misc_feature 1..22: note = chemically synthesized
  source 1..22: mol_type = other DNA
tgtaaaatgatcggggtaaaac

SEQ ID NO: 108629 - DNA, 22 bp, synthetic construct
  misc_feature 1..22: note = chemically synthesized
  source 1..22: mol_type = other DNA
taaaatgatcggggtaaaacac

SEQ ID NO: 108630 - DNA, 22 bp, synthetic construct
  misc_feature 1..22: note = chemically synthesized
  source 1..22: mol_type = other DNA
ctatatagtcccctctcttgtc

SEQ ID NO: 108631 - DNA, 22 bp, synthetic construct
  misc_feature 1..22: note = chemically synthesized
  source 1..22: mol_type = other DNA
tatatagtcccctctcttgtct

SEQ ID NO: 108632 - DNA, 22 bp, synthetic construct
  misc_feature 1..22: note = chemically synthesized
  source 1..22: mol_type = other DNA
tatagtcccctctcttgtctca

SEQ ID NO: 108633 - DNA, 22 bp, synthetic construct
  misc_feature 1..22: note = chemically synthesized
  source 1..22: mol_type = other DNA
tcttgtctcactgaagtattat

SEQ ID NO: 108634 - DNA, 22 bp, synthetic construct
  misc_feature 1..22: note = chemically synthesized
  source 1..22: mol_type = other DNA
ttgtctcactgaagtattattt

SEQ ID NO: 108635 - DNA, 22 bp, synthetic construct
  misc_feature 1..22: note = chemically synthesized
  source 1..22: mol_type = other DNA
gtctcactgaagtattattttt

SEQ ID NO: 108636 - DNA, 22 bp, synthetic construct
  misc_feature 1..22: note = chemically synthesized
  source 1..22: mol_type = other DNA
tctcactgaagtattatttttg

SEQ ID NO: 108637 - DNA, 22 bp, synthetic construct
  misc_feature 1..22: note = chemically synthesized
  source 1..22: mol_type = other DNA
actgaagtattatttttgctct

SEQ ID NO: 108638 - DNA, 22 bp, synthetic construct
  misc_feature 1..22: note = chemically synthesized
  source 1..22: mol_type = other DNA
aagtattatttttgctctgatt

SEQ ID NO: 108639 - DNA, 22 bp, synthetic construct
  misc_feature 1..22: note = chemically synthesized
  source 1..22: mol_type = other DNA
tttttgctctgattaaagtata

SEQ ID NO: 108640 - DNA, 22 bp, synthetic construct
  misc_feature 1..22: note = chemically synthesized
  source 1..22: mol_type = other DNA
ttgctctgattaaagtataatt

SEQ ID NO: 108641 - DNA, 22 bp, synthetic construct
  misc_feature 1..22: note = chemically synthesized
  source 1..22: mol_type = other DNA
tgctctgattaaagtataatta

SEQ ID NO: 108642 - DNA, 22 bp, synthetic construct
  misc_feature 1..22: note = chemically synthesized
  source 1..22: mol_type = other DNA
gctctgattaaagtataattaa

SEQ ID NO: 108643 - DNA, 22 bp, synthetic construct
  misc_feature 1..22: note = chemically synthesized
  source 1..22: mol_type = other DNA
ctctgattaaagtataattaag

SEQ ID NO: 108644 - DNA, 22 bp, synthetic construct
  misc_feature 1..22: note = chemically synthesized
  source 1..22: mol_type = other DNA
tgattaaagtataattaagaca

SEQ ID NO: 108645 - DNA, 22 bp, synthetic construct
  misc_feature 1..22: note = chemically synthesized
  source 1..22: mol_type = other DNA
attaaagtataattaagacata

SEQ ID NO: 108646 - DNA, 22 bp, synthetic construct
  misc_feature 1..22: note = chemically synthesized
  source 1..22: mol_type = other DNA
aagtataattaagacataacct

SEQ ID NO: 108647 - DNA, 22 bp, synthetic construct
  misc_feature 1..22: note = chemically synthesized
  source 1..22: mol_type = other DNA
agacataacctccctcttttta

SEQ ID NO: 108648 - DNA, 22 bp, synthetic construct
  misc_feature 1..22: note = chemically synthesized
  source 1..22: mol_type = other DNA
cctctttttaggatattttaaa

SEQ ID NO: 108649 - DNA, 22 bp, synthetic construct
  misc_feature 1..22: note = chemically synthesized
  source 1..22: mol_type = other DNA
tttttaggatattttaaattga

SEQ ID NO: 108650 - DNA, 22 bp, synthetic construct
  misc_feature 1..22: note = chemically synthesized
  source 1..22: mol_type = other DNA
tttaggatattttaaattgagt

SEQ ID NO: 108651 - DNA, 22 bp, synthetic construct
  misc_feature 1..22: note = chemically synthesized
  source 1..22: mol_type = other DNA
ttaggatattttaaattgagtt

SEQ ID NO: 108652 - DNA, 22 bp, synthetic construct
  misc_feature 1..22: note = chemically synthesized
  source 1..22: mol_type = other DNA
taggatattttaaattgagtta

SEQ ID NO: 108653 - DNA, 22 bp, synthetic construct
  misc_feature 1..22: note = chemically synthesized
  source 1..22: mol_type = other DNA
aggatattttaaattgagttat

SEQ ID NO: 108654 - DNA, 22 bp, synthetic construct
  misc_feature 1..22: note = chemically synthesized
  source 1..22: mol_type = other DNA
ggatattttaaattgagttatg

SEQ ID NO: 108655 - DNA, 22 bp, synthetic construct
  misc_feature 1..22: note = chemically synthesized
  source 1..22: mol_type = other DNA
taaattgagttatgggtccctt

SEQ ID NO: 108656 - DNA, 22 bp, synthetic construct
  misc_feature 1..22: note = chemically synthesized
  source 1..22: mol_type = other DNA
aaattgagttatgggtcccttc

SEQ ID NO: 108657 - DNA, 22 bp, synthetic construct
  misc_feature 1..22: note = chemically synthesized
  source 1..22: mol_type = other DNA
aattgagttatgggtcccttcc

SEQ ID NO: 108658 - DNA, 22 bp, synthetic construct
  misc_feature 1..22: note = chemically synthesized
  source 1..22: mol_type = other DNA
agttatgggtcccttcctaact

SEQ ID NO: 108659 - DNA, 22 bp, synthetic construct
  misc_feature 1..22: note = chemically synthesized
  source 1..22: mol_type = other DNA
tgggtcccttcctaactcatca

SEQ ID NO: 108660 - DNA, 22 bp, synthetic construct
  misc_feature 1..22: note = chemically synthesized
  source 1..22: mol_type = other DNA
cctaactcatcagacaatttta

SEQ ID NO: 108661 - DNA, 22 bp, synthetic construct
  misc_feature 1..22: note = chemically synthesized
  source 1..22: mol_type = other DNA
ctaactcatcagacaattttaa

SEQ ID NO: 108662 - DNA, 22 bp, synthetic construct
  misc_feature 1..22: note = chemically synthesized
  source 1..22: mol_type = other DNA
actcatcagacaattttaatca

SEQ ID NO: 108663 - DNA, 22 bp, synthetic construct
  misc_feature 1..22: note = chemically synthesized
  source 1..22: mol_type = other DNA
atcagacaattttaatcaaatg

SEQ ID NO: 108664 - DNA, 22 bp, synthetic construct
  misc_feature 1..22: note = chemically synthesized
  source 1..22: mol_type = other DNA
taatcaaatgagaatgacattg

SEQ ID NO: 108665 - DNA, 22 bp, synthetic construct
  misc_feature 1..22: note = chemically synthesized
  source 1..22: mol_type = other DNA
aatcaaatgagaatgacattgt

SEQ ID NO: 108666 - DNA, 22 bp, synthetic construct
  misc_feature 1..22: note = chemically synthesized
  source 1..22: mol_type = other DNA
atcaaatgagaatgacattgtt

SEQ ID NO: 108667 - DNA, 22 bp, synthetic construct
  misc_feature 1..22: note = chemically synthesized
  source 1..22: mol_type = other DNA
ttgtattctttgggaaatttac

SEQ ID NO: 108668 - DNA, 22 bp, synthetic construct
  misc_feature 1..22: note = chemically synthesized
  source 1..22: mol_type = other DNA
tattctttgggaaatttacact

SEQ ID NO: 108669 - DNA, 22 bp, synthetic construct
  misc_feature 1..22: note = chemically synthesized
  source 1..22: mol_type = other DNA
tttgggaaatttacacttatta

SEQ ID NO: 108670 - DNA, 22 bp, synthetic construct
  misc_feature 1..22: note = chemically synthesized
  source 1..22: mol_type = other DNA
tgggaaatttacacttattaca

SEQ ID NO: 108671 - DNA, 22 bp, synthetic construct
  misc_feature 1..22: note = chemically synthesized
  source 1..22: mol_type = other DNA
gggaaatttacacttattacat

SEQ ID NO: 108672 - DNA, 22 bp, synthetic construct
  misc_feature 1..22: note = chemically synthesized
  source 1..22: mol_type = other DNA
ggaaatttacacttattacatg

SEQ ID NO: 108673 - DNA, 22 bp, synthetic construct
  misc_feature 1..22: note = chemically synthesized
  source 1..22: mol_type = other DNA
acacttattacatggaatcaga

SEQ ID NO: 108674 - DNA, 22 bp, synthetic construct
  misc_feature 1..22: note = chemically synthesized
  source 1..22: mol_type = other DNA
cacttattacatggaatcagaa

SEQ ID NO: 108675 - DNA, 22 bp, synthetic construct
  misc_feature 1..22: note = chemically synthesized
  source 1..22: mol_type = other DNA
attacatggaatcagaatgtat

SEQ ID NO: 108676 - DNA, 22 bp, synthetic construct
  misc_feature 1..22: note = chemically synthesized
  source 1..22: mol_type = other DNA
ttacatggaatcagaatgtatg

SEQ ID NO: 108677 - DNA, 22 bp, synthetic construct
  misc_feature 1..22: note = chemically synthesized
  source 1..22: mol_type = other DNA
catggaatcagaatgtatgtac

SEQ ID NO: 108678 - DNA, 22 bp, synthetic construct
  misc_feature 1..22: note = chemically synthesized
  source 1..22: mol_type = other DNA
ttcaaaaaaatgcagaaaccta

SEQ ID NO: 108679 - DNA, 22 bp, synthetic construct
  misc_feature 1..22: note = chemically synthesized
  source 1..22: mol_type = other DNA
caaaaaaatgcagaaacctatt

SEQ ID NO: 108680 - DNA, 22 bp, synthetic construct
  misc_feature 1..22: note = chemically synthesized
  source 1..22: mol_type = other DNA
aaaaaaatgcagaaacctattt

SEQ ID NO: 108681 - DNA, 22 bp, synthetic construct
  misc_feature 1..22: note = chemically synthesized
  source 1..22: mol_type = other DNA
tttttttttgttccttcagacc

SEQ ID NO: 108682 - DNA, 22 bp, synthetic construct
  misc_feature 1..22: note = chemically synthesized
  source 1..22: mol_type = other DNA
ttttttgttccttcagaccttt

SEQ ID NO: 108683 - DNA, 22 bp, synthetic construct
  misc_feature 1..22: note = chemically synthesized
  source 1..22: mol_type = other DNA
tttttgttccttcagacctttt

SEQ ID NO: 108684 - DNA, 22 bp, synthetic construct
  misc_feature 1..22: note = chemically synthesized
  source 1..22: mol_type = other DNA
ttttgttccttcagaccttttt

SEQ ID NO: 108685 - DNA, 22 bp, synthetic construct
  misc_feature 1..22: note = chemically synthesized
  source 1..22: mol_type = other DNA
tttgttccttcagacctttttc

SEQ ID NO: 108686 - DNA, 22 bp, synthetic construct
  misc_feature 1..22: note = chemically synthesized
  source 1..22: mol_type = other DNA
ttgttccttcagacctttttca

SEQ ID NO: 108687 - DNA, 22 bp, synthetic construct
  misc_feature 1..22: note = chemically synthesized
  source 1..22: mol_type = other DNA
tgttccttcagacctttttcat

SEQ ID NO: 108688 - DNA, 22 bp, synthetic construct
  misc_feature 1..22: note = chemically synthesized
  source 1..22: mol_type = other DNA
gttccttcagacctttttcata

SEQ ID NO: 108689 - DNA, 22 bp, synthetic construct
  misc_feature 1..22: note = chemically synthesized
  source 1..22: mol_type = other DNA
ttccttcagacctttttcatag

SEQ ID NO: 108690 - DNA, 22 bp, synthetic construct
  misc_feature 1..22: note = chemically synthesized
  source 1..22: mol_type = other DNA
cttcagacctttttcatagcaa

SEQ ID NO: 108691 - DNA, 22 bp, synthetic construct
  misc_feature 1..22: note = chemically synthesized
  source 1..22: mol_type = other DNA
cagacctttttcatagcaaaag

SEQ ID NO: 108692 - DNA, 22 bp, synthetic construct
  misc_feature 1..22: note = chemically synthesized
  source 1..22: mol_type = other DNA
agacctttttcatagcaaaagg

SEQ ID NO: 108693 - DNA, 22 bp, synthetic construct
  misc_feature 1..22: note = chemically synthesized
  source 1..22: mol_type = other DNA
tttcatagcaaaaggagggtga

SEQ ID NO: 108694 - DNA, 22 bp, synthetic construct
  misc_feature 1..22: note = chemically synthesized
  source 1..22: mol_type = other DNA
ttcatagcaaaaggagggtgaa

SEQ ID NO: 108695 - DNA, 22 bp, synthetic construct
  misc_feature 1..22: note = chemically synthesized
  source 1..22: mol_type = other DNA
tcatagcaaaaggagggtgaag

SEQ ID NO: 108696 - DNA, 22 bp, synthetic construct
  misc_feature 1..22: note = chemically synthesized
  source 1..22: mol_type = other DNA
catagcaaaaggagggtgaagg

SEQ ID NO: 108697 - DNA, 22 bp, synthetic construct
  misc_feature 1..22: note = chemically synthesized
  source 1..22: mol_type = other DNA
atagcaaaaggagggtgaagga

SEQ ID NO: 108698 - DNA, 22 bp, synthetic construct
  misc_feature 1..22: note = chemically synthesized
  source 1..22: mol_type = other DNA
tctcttccactaatttggacta

SEQ ID NO: 108699 - DNA, 22 bp, synthetic construct
  misc_feature 1..22: note = chemically synthesized
  source 1..22: mol_type = other DNA
ttccactaatttggactagtca

SEQ ID NO: 108700 - DNA, 22 bp, synthetic construct
  misc_feature 1..22: note = chemically synthesized
  source 1..22: mol_type = other DNA
ccactaatttggactagtcagc

SEQ ID NO: 108701 - DNA, 22 bp, synthetic construct
  misc_feature 1..22: note = chemically synthesized
  source 1..22: mol_type = other DNA
cactaatttggactagtcagcc

SEQ ID NO: 108702 - DNA, 22 bp, synthetic construct
  misc_feature 1..22: note = chemically synthesized
  source 1..22: mol_type = other DNA
atttggactagtcagccagcgt

SEQ ID NO: 108703 - DNA, 22 bp, synthetic construct
  misc_feature 1..22: note = chemically synthesized
  source 1..22: mol_type = other DNA
ggactagtcagccagcgtagat

SEQ ID NO: 108704 - DNA, 22 bp, synthetic construct
  misc_feature 1..22: note = chemically synthesized
  source 1..22: mol_type = other DNA
gactagtcagccagcgtagata

SEQ ID NO: 108705 - DNA, 22 bp, synthetic construct
  misc_feature 1..22: note = chemically synthesized
  source 1..22: mol_type = other DNA
gtcagccagcgtagatatctga

SEQ ID NO: 108706 - DNA, 22 bp, synthetic construct
  misc_feature 1..22: note = chemically synthesized
  source 1..22: mol_type = other DNA
aggatggcctcaacattggagc

SEQ ID NO: 108707 - DNA, 22 bp, synthetic construct
  misc_feature 1..22: note = chemically synthesized
  source 1..22: mol_type = other DNA
aacattggagctagcaactagg

SEQ ID NO: 108708 - DNA, 22 bp, synthetic construct
  misc_feature 1..22: note = chemically synthesized
  source 1..22: mol_type = other DNA
gagctagcaactagggtagtag

SEQ ID NO: 108709 - DNA, 22 bp, synthetic construct
  misc_feature 1..22: note = chemically synthesized
  source 1..22: mol_type = other DNA
gcaactagggtagtagaataag

SEQ ID NO: 108710 - DNA, 22 bp, synthetic construct
  misc_feature 1..22: note = chemically synthesized
  source 1..22: mol_type = other DNA
gggtagtagaataagaatgaga

SEQ ID NO: 108711 - DNA, 22 bp, synthetic construct
  misc_feature 1..22: note = chemically synthesized
  source 1..22: mol_type = other DNA
actgtgtctacgtcctctcatt

SEQ ID NO: 108712 - DNA, 22 bp, synthetic construct
  misc_feature 1..22: note = chemically synthesized
  source 1..22: mol_type = other DNA
tgtctacgtcctctcatttatc

SEQ ID NO: 108713 - DNA, 22 bp, synthetic construct
  misc_feature 1..22: note = chemically synthesized
  source 1..22: mol_type = other DNA
cgtcctctcatttatccgtgat

SEQ ID NO: 108714 - DNA, 22 bp, synthetic construct
  misc_feature 1..22: note = chemically synthesized
  source 1..22: mol_type = other DNA
tcatttatccgtgattcctctt

SEQ ID NO: 108715 - DNA, 22 bp, synthetic construct
  misc_feature 1..22: note = chemically synthesized
  source 1..22: mol_type = other DNA
atttatccgtgattcctcttct

SEQ ID NO: 108716 - DNA, 22 bp, synthetic construct
  misc_feature 1..22: note = chemically synthesized
  source 1..22: mol_type = other DNA
atccgtgattcctcttctcaca

SEQ ID NO: 108717 - DNA, 22 bp, synthetic construct
  misc_feature 1..22: note = chemically synthesized
  source 1..22: mol_type = other DNA
tccgtgattcctcttctcacat

SEQ ID NO: 108718 - DNA, 22 bp, synthetic construct
  misc_feature 1..22: note = chemically synthesized
  source 1..22: mol_type = other DNA
ctcttctcacatttttttgtta

SEQ ID NO: 108719 - DNA, 22 bp, synthetic construct
  misc_feature 1..22: note = chemically synthesized
  source 1..22: mol_type = other DNA
ttctcacatttttttgttacaa

SEQ ID NO: 108720 - DNA, 22 bp, synthetic construct
  misc_feature 1..22: note = chemically synthesized
  source 1..22: mol_type = other DNA
ctcacatttttttgttacaagt

SEQ ID NO: 108721 - DNA, 22 bp, synthetic construct
  misc_feature 1..22: note = chemically synthesized
  source 1..22: mol_type = other DNA
tcacatttttttgttacaagtt

SEQ ID NO: 108722 - DNA, 22 bp, synthetic construct
  misc_feature 1..22: note = chemically synthesized
  source 1..22: mol_type = other DNA
acatttttttgttacaagtttg

SEQ ID NO: 108723 - DNA, 22 bp, synthetic construct
  misc_feature 1..22: note = chemically synthesized
  source 1..22: mol_type = other DNA
ttttgttacaagtttgtcagaa

SEQ ID NO: 108724 - DNA, 22 bp, synthetic construct
  misc_feature 1..22: note = chemically synthesized
  source 1..22: mol_type = other DNA
tttgttacaagtttgtcagaag

SEQ ID NO: 108725 - DNA, 22 bp, synthetic construct
  misc_feature 1..22: note = chemically synthesized
  source 1..22: mol_type = other DNA
ttgttacaagtttgtcagaagg

SEQ ID NO: 108726 - DNA, 22 bp, synthetic construct
  misc_feature 1..22: note = chemically synthesized
  source 1..22: mol_type = other DNA
tgttacaagtttgtcagaaggt

SEQ ID NO: 108727 - DNA, 22 bp, synthetic construct
  misc_feature 1..22: note = chemically synthesized
  source 1..22: mol_type = other DNA
gttacaagtttgtcagaaggta

SEQ ID NO: 108728 - DNA, 22 bp, synthetic construct
  misc_feature 1..22: note = chemically synthesized
  source 1..22: mol_type = other DNA
ttacaagtttgtcagaaggtac

SEQ ID NO: 108729 - DNA, 22 bp, synthetic construct
  misc_feature 1..22: note = chemically synthesized
  source 1..22: mol_type = other DNA
caagtttgtcagaaggtactgc

SEQ ID NO: 108730 - DNA, 22 bp, synthetic construct
  misc_feature 1..22: note = chemically synthesized
  source 1..22: mol_type = other DNA
gtcagaaggtactgccttgggg

SEQ ID NO: 108731 - DNA, 22 bp, synthetic construct
  misc_feature 1..22: note = chemically synthesized
  source 1..22: mol_type = other DNA
tcagaaggtactgccttgggga

SEQ ID NO: 108732 - DNA, 22 bp, synthetic construct
  misc_feature 1..22: note = chemically synthesized
  source 1..22: mol_type = other DNA
ccttggggaataaatatgagtt

SEQ ID NO: 108733 - DNA, 22 bp, synthetic construct
  misc_feature 1..22: note = chemically synthesized
  source 1..22: mol_type = other DNA
ggggaataaatatgagtttatg

SEQ ID NO: 108734 - DNA, 22 bp, synthetic construct
  misc_feature 1..22: note = chemically synthesized
  source 1..22: mol_type = other DNA
gggaataaatatgagtttatgg

SEQ ID NO: 108735 - DNA, 22 bp, synthetic construct
  misc_feature 1..22: note = chemically synthesized
  source 1..22: mol_type = other DNA
atggtttttgagacaaattcat

SEQ ID NO: 108736 - DNA, 22 bp, synthetic construct
  misc_feature 1..22: note = chemically synthesized
  source 1..22: mol_type = other DNA
tggtttttgagacaaattcatt

SEQ ID NO: 108737 - DNA, 22 bp, synthetic construct
  misc_feature 1..22: note = chemically synthesized
  source 1..22: mol_type = other DNA
ttgagacaaattcattataatt

SEQ ID NO: 108738 - DNA, 22 bp, synthetic construct
  misc_feature 1..22: note = chemically synthesized
  source 1..22: mol_type = other DNA
tgagacaaattcattataattt

SEQ ID NO: 108739 - DNA, 22 bp, synthetic construct
  misc_feature 1..22: note = chemically synthesized
  source 1..22: mol_type = other DNA
gagacaaattcattataatttg

SEQ ID NO: 108740 - DNA, 22 bp, synthetic construct
  misc_feature 1..22: note = chemically synthesized
  source 1..22: mol_type = other DNA
agacaaattcattataatttga

SEQ ID NO: 108741 - DNA, 22 bp, synthetic construct
  misc_feature 1..22: note = chemically synthesized
  source 1..22: mol_type = other DNA
attataatttgatggagggagg

SEQ ID NO: 108742 - DNA, 22 bp, synthetic construct
  misc_feature 1..22: note = chemically synthesized
  source 1..22: mol_type = other DNA
taatttgatggagggaggagga

SEQ ID NO: 108743 - DNA, 22 bp, synthetic construct
  misc_feature 1..22: note = chemically synthesized
  source 1..22: mol_type = other DNA
gatggagggaggaggaaccaac

SEQ ID NO: 108744 - DNA, 22 bp, synthetic construct
  misc_feature 1..22: note = chemically synthesized
  source 1..22: mol_type = other DNA
atggagggaggaggaaccaact

SEQ ID NO: 108745 - DNA, 22 bp, synthetic construct
  misc_feature 1..22: note = chemically synthesized
  source 1..22: mol_type = other DNA
gactgttgagatgataagtaat

SEQ ID NO: 108746 - DNA, 22 bp, synthetic construct
  misc_feature 1..22: note = chemically synthesized
  source 1..22: mol_type = other DNA
ttgagatgataagtaattaggt

SEQ ID NO: 108747 - DNA, 22 bp, synthetic construct
  misc_feature 1..22: note = chemically synthesized
  source 1..22: mol_type = other DNA
agatgataagtaattaggtcac

SEQ ID NO: 108748 - DNA, 22 bp, synthetic construct
  misc_feature 1..22: note = chemically synthesized
  source 1..22: mol_type = other DNA
ggtcactgatcaaagaagatta

SEQ ID NO: 108749 - DNA, 22 bp, synthetic construct
  misc_feature 1..22: note = chemically synthesized
  source 1..22: mol_type = other DNA
atcaaagaagattatattcttt

SEQ ID NO: 108750 - DNA, 22 bp, synthetic construct
  misc_feature 1..22: note = chemically synthesized
  source 1..22: mol_type = other DNA
tattcttttttgcaggaaaatt

SEQ ID NO: 108751 - DNA, 22 bp, synthetic construct
  misc_feature 1..22: note = chemically synthesized
  source 1..22: mol_type = other DNA
ttttttgcaggaaaattcctgg

SEQ ID NO: 108752 - DNA, 22 bp, synthetic construct
  misc_feature 1..22: note = chemically synthesized
  source 1..22: mol_type = other DNA
ttttgcaggaaaattcctggac

SEQ ID NO: 108753 - DNA, 22 bp, synthetic construct
  misc_feature 1..22: note = chemically synthesized
  source 1..22: mol_type = other DNA
tttgcaggaaaattcctggact

SEQ ID NO: 108754 - DNA, 22 bp, synthetic construct
  misc_feature 1..22: note = chemically synthesized
  source 1..22: mol_type = other DNA
ttgcaggaaaattcctggactt

SEQ ID NO: 108755 - DNA, 22 bp, synthetic construct
  misc_feature 1..22: note = chemically synthesized
  source 1..22: mol_type = other DNA
tgcaggaaaattcctggacttc

SEQ ID NO: 108756 - DNA, 22 bp, synthetic construct
  misc_feature 1..22: note = chemically synthesized
  source 1..22: mol_type = other DNA
gcaggaaaattcctggacttca

SEQ ID NO: 108757 - DNA, 22 bp, synthetic construct
  misc_feature 1..22: note = chemically synthesized
  source 1..22: mol_type = other DNA
caggaaaattcctggacttcag

SEQ ID NO: 108758 - DNA, 22 bp, synthetic construct
  misc_feature 1..22: note = chemically synthesized
  source 1..22: mol_type = other DNA
ctggacttcagtgaccaaattt

SEQ ID NO: 108759 - DNA, 22 bp, synthetic construct
  misc_feature 1..22: note = chemically synthesized
  source 1..22: mol_type = other DNA
gacttcagtgaccaaatttata

SEQ ID NO: 108760 - DNA, 22 bp, synthetic construct
  misc_feature 1..22: note = chemically synthesized
  source 1..22: mol_type = other DNA
cagtgaccaaatttataggttc

SEQ ID NO: 108761 - DNA, 22 bp, synthetic construct
  misc_feature 1..22: note = chemically synthesized
  source 1..22: mol_type = other DNA
agtgaccaaatttataggttcc

SEQ ID NO: 108762 - DNA, 22 bp, synthetic construct
  misc_feature 1..22: note = chemically synthesized
  source 1..22: mol_type = other DNA
ataggttcccattgtttgtatg

SEQ ID NO: 108763 - DNA, 22 bp, synthetic construct
  misc_feature 1..22: note = chemically synthesized
  source 1..22: mol_type = other DNA
taggttcccattgtttgtatgg

SEQ ID NO: 108764 - DNA, 22 bp, synthetic construct
  misc_feature 1..22: note = chemically synthesized
  source 1..22: mol_type = other DNA
ccattgtttgtatggacacctg

SEQ ID NO: 108765 - DNA, 22 bp, synthetic construct
  misc_feature 1..22: note = chemically synthesized
  source 1..22: mol_type = other DNA
tttgtatggacacctgcagaga

SEQ ID NO: 108766 - DNA, 22 bp, synthetic construct
  misc_feature 1..22: note = chemically synthesized
  source 1..22: mol_type = other DNA
gtatggacacctgcagagaaat

SEQ ID NO: 108767 - DNA, 22 bp, synthetic construct
  misc_feature 1..22: note = chemically synthesized
  source 1..22: mol_type = other DNA
tatggacacctgcagagaaatt

SEQ ID NO: 108768 - DNA, 22 bp, synthetic construct
  misc_feature 1..22: note = chemically synthesized
  source 1..22: mol_type = other DNA
cagagaaattcataagagttgg

SEQ ID NO: 108769 - DNA, 22 bp, synthetic construct
  misc_feature 1..22: note = chemically synthesized
  source 1..22: mol_type = other DNA
ataagagttggaaattagattt

SEQ ID NO: 108770 - DNA, 22 bp, synthetic construct
  misc_feature 1..22: note = chemically synthesized
  source 1..22: mol_type = other DNA
gaaattagatttgacatagtaa

SEQ ID NO: 108771 - DNA, 22 bp, synthetic construct
  misc_feature 1..22: note = chemically synthesized
  source 1..22: mol_type = other DNA
gatttgacatagtaaaccaaac

SEQ ID NO: 108772 - DNA, 22 bp, synthetic construct
  misc_feature 1..22: note = chemically synthesized
  source 1..22: mol_type = other DNA
gacatagtaaaccaaactctat

SEQ ID NO: 108773 - DNA, 22 bp, synthetic construct
  misc_feature 1..22: note = chemically synthesized
  source 1..22: mol_type = other DNA
acatagtaaaccaaactctatt

SEQ ID NO: 108774 - DNA, 22 bp, synthetic construct
  misc_feature 1..22: note = chemically synthesized
  source 1..22: mol_type = other DNA
tattccatttcactcgaaccaa

SEQ ID NO: 108775 - DNA, 22 bp, synthetic construct
  misc_feature 1..22: note = chemically synthesized
  source 1..22: mol_type = other DNA
ttccatttcactcgaaccaact

SEQ ID NO: 108776 - DNA, 22 bp, synthetic construct
  misc_feature 1..22: note = chemically synthesized
  source 1..22: mol_type = other DNA
catttcactcgaaccaactaat

SEQ ID NO: 108777 - DNA, 22 bp, synthetic construct
  misc_feature 1..22: note = chemically synthesized
  source 1..22: mol_type = other DNA
cactcgaaccaactaataattt

SEQ ID NO: 108778 - DNA, 22 bp, synthetic construct
  misc_feature 1..22: note = chemically synthesized
  source 1..22: mol_type = other DNA
actcgaaccaactaataatttt

SEQ ID NO: 108779 - DNA, 22 bp, synthetic construct
  misc_feature 1..22: note = chemically synthesized
  source 1..22: mol_type = other DNA
gaaccaactaataattttatat

SEQ ID NO: 108780 - DNA, 22 bp, synthetic construct
  misc_feature 1..22: note = chemically synthesized
  source 1..22: mol_type = other DNA
ataattttatatttttatgatt

SEQ ID NO: 108781 - DNA, 22 bp, synthetic construct
  misc_feature 1..22: note = chemically synthesized
  source 1..22: mol_type = other DNA
tatatttttatgattctgttcc

SEQ ID NO: 108782 - DNA, 22 bp, synthetic construct
  misc_feature 1..22: note = chemically synthesized
  source 1..22: mol_type = other DNA
atatttttatgattctgttcct

SEQ ID NO: 108783 - DNA, 22 bp, synthetic construct
  misc_feature 1..22: note = chemically synthesized
  source 1..22: mol_type = other DNA
tatttttatgattctgttccta

SEQ ID NO: 108784 - DNA, 22 bp, synthetic construct
  misc_feature 1..22: note = chemically synthesized
  source 1..22: mol_type = other DNA
ttatgattctgttcctatctgc

SEQ ID NO: 108785 - DNA, 22 bp, synthetic construct
  misc_feature 1..22: note = chemically synthesized
  source 1..22: mol_type = other DNA
tatgattctgttcctatctgct

SEQ ID NO: 108786 - DNA, 22 bp, synthetic construct
  misc_feature 1..22: note = chemically synthesized
  source 1..22: mol_type = other DNA
atgattctgttcctatctgcta

SEQ ID NO: 108787 - DNA, 22 bp, synthetic construct
  misc_feature 1..22: note = chemically synthesized
  source 1..22: mol_type = other DNA
tgattctgttcctatctgctaa

SEQ ID NO: 108788 - DNA, 22 bp, synthetic construct
  misc_feature 1..22: note = chemically synthesized
  source 1..22: mol_type = other DNA
tgttcctatctgctaactttat

SEQ ID NO: 108789 - DNA, 22 bp, synthetic construct
  misc_feature 1..22: note = chemically synthesized
  source 1..22: mol_type = other DNA
ttcctatctgctaactttatac

SEQ ID NO: 108790 - DNA, 22 bp, synthetic construct
  misc_feature 1..22: note = chemically synthesized
  source 1..22: mol_type = other DNA
ctatctgctaactttataccat

SEQ ID NO: 108791 - DNA, 22 bp, synthetic construct
  misc_feature 1..22: note = chemically synthesized
  source 1..22: mol_type = other DNA
tctgctaactttataccatgaa

SEQ ID NO: 108792 - DNA, 22 bp, synthetic construct
  misc_feature 1..22: note = chemically synthesized
  source 1..22: mol_type = other DNA
ctaactttataccatgaaataa

SEQ ID NO: 108793 - DNA, 22 bp, synthetic construct
  misc_feature 1..22: note = chemically synthesized
  source 1..22: mol_type = other DNA
actttataccatgaaataaaca

SEQ ID NO: 108794 - DNA, 22 bp, synthetic construct
  misc_feature 1..22: note = chemically synthesized
  source 1..22: mol_type = other DNA
tataccatgaaataaacatatg

SEQ ID NO: 108795 - DNA, 22 bp, synthetic construct
  misc_feature 1..22: note = chemically synthesized
  source 1..22: mol_type = other DNA
ataccatgaaataaacatatgt

SEQ ID NO: 108796 - DNA, 22 bp, synthetic construct
  misc_feature 1..22: note = chemically synthesized
  source 1..22: mol_type = other DNA
taccatgaaataaacatatgtt

SEQ ID NO: 108797 - DNA, 22 bp, synthetic construct
  misc_feature 1..22: note = chemically synthesized
  source 1..22: mol_type = other DNA
gttacattatagacataccaat

SEQ ID NO: 108798 - DNA, 22 bp, synthetic construct
  misc_feature 1..22: note = chemically synthesized
  source 1..22: mol_type = other DNA
cattatagacataccaatagat

SEQ ID NO: 108799 - DNA, 22 bp, synthetic construct
  misc_feature 1..22: note = chemically synthesized
  source 1..22: mol_type = other DNA
tagacataccaatagatgccta

SEQ ID NO: 108800 - DNA, 22 bp, synthetic construct
  misc_feature 1..22: note = chemically synthesized
  source 1..22: mol_type = other DNA
aggtattgttatcacaataatt

SEQ ID NO: 108801 - DNA, 22 bp, synthetic construct
  misc_feature 1..22: note = chemically synthesized
  source 1..22: mol_type = other DNA
ttatcacaataatttagtggaa

SEQ ID NO: 108802 - DNA, 22 bp, synthetic construct
  misc_feature 1..22: note = chemically synthesized
  source 1..22: mol_type = other DNA
tcacaataatttagtggaaagc

SEQ ID NO: 108803 - DNA, 22 bp, synthetic construct
  misc_feature 1..22: note = chemically synthesized
  source 1..22: mol_type = other DNA
agtggaaagcttagagaaatat

SEQ ID NO: 108804 - DNA, 22 bp, synthetic construct
  misc_feature 1..22: note = chemically synthesized
  source 1..22: mol_type = other DNA
gtggaaagcttagagaaatatt

SEQ ID NO: 108805 - DNA, 22 bp, synthetic construct
  misc_feature 1..22: note = chemically synthesized
  source 1..22: mol_type = other DNA
agagaaatattccgtttacagg

SEQ ID NO: 108806 - DNA, 22 bp, synthetic construct
  misc_feature 1..22: note = chemically synthesized
  source 1..22: mol_type = other DNA
gagaaatattccgtttacagga

SEQ ID NO: 108807 - DNA, 22 bp, synthetic construct
  misc_feature 1..22: note = chemically synthesized
  source 1..22: mol_type = other DNA
cgtttacaggaatgcaacaaaa

SEQ ID NO: 108808 - DNA, 22 bp, synthetic construct
  misc_feature 1..22: note = chemically synthesized
  source 1..22: mol_type = other DNA
acaggaatgcaacaaaaatttg

SEQ ID NO: 108809 - DNA, 22 bp, synthetic construct
  misc_feature 1..22: note = chemically synthesized
  source 1..22: mol_type = other DNA
caggaatgcaacaaaaatttgt

SEQ ID NO: 108810 - DNA, 22 bp, synthetic construct
  misc_feature 1..22: note = chemically synthesized
  source 1..22: mol_type = other DNA
gtacaaactacatttagctaaa

SEQ ID NO: 108811 - DNA, 22 bp, synthetic construct
  misc_feature 1..22: note = chemically synthesized
  source 1..22: mol_type = other DNA
tacaaactacatttagctaaag

SEQ ID NO: 108812 - DNA, 22 bp, synthetic construct
  misc_feature 1..22: note = chemically synthesized
  source 1..22: mol_type = other DNA
catttagctaaagagttgggct

SEQ ID NO: 108813 - DNA, 22 bp, synthetic construct
  misc_feature 1..22: note = chemically synthesized
  source 1..22: mol_type = other DNA
agctaaagagttgggcttaaag

SEQ ID NO: 108814 - DNA, 22 bp, synthetic construct
  misc_feature 1..22: note = chemically synthesized
  source 1..22: mol_type = other DNA
gctaaagagttgggcttaaaga

SEQ ID NO: 108815 - DNA, 22 bp, synthetic construct
  misc_feature 1..22: note = chemically synthesized
  source 1..22: mol_type = other DNA
aagagttgggcttaaagagata

SEQ ID NO: 108816 - DNA, 22 bp, synthetic construct
  misc_feature 1..22: note = chemically synthesized
  source 1..22: mol_type = other DNA
ggcttaaagagataccttaggg

SEQ ID NO: 108817 - DNA, 22 bp, synthetic construct
  misc_feature 1..22: note = chemically synthesized
  source 1..22: mol_type = other DNA
aaagagataccttagggaaact

SEQ ID NO: 108818 - DNA, 22 bp, synthetic construct
  misc_feature 1..22: note = chemically synthesized
  source 1..22: mol_type = other DNA
aagagataccttagggaaactt

SEQ ID NO: 108819 - DNA, 22 bp, synthetic construct
  misc_feature 1..22: note = chemically synthesized
  source 1..22: mol_type = other DNA
agggaaacttgaagctgtattt

SEQ ID NO: 108820 - DNA, 22 bp, synthetic construct
  misc_feature 1..22: note = chemically synthesized
  source 1..22: mol_type = other DNA
gggaaacttgaagctgtatttt

SEQ ID NO: 108821 - DNA, 22 bp, synthetic construct
  misc_feature 1..22: note = chemically synthesized
  source 1..22: mol_type = other DNA
gaagctgtattttaacacctat

SEQ ID NO: 108822 - DNA, 22 bp, synthetic construct
  misc_feature 1..22: note = chemically synthesized
  source 1..22: mol_type = other DNA
aagctgtattttaacacctatt

SEQ ID NO: 108823 - DNA, 22 bp, synthetic construct
  misc_feature 1..22: note = chemically synthesized
  source 1..22: mol_type = other DNA
tattttaacacctattttacca

SEQ ID NO: 108824 - DNA, 22 bp, synthetic construct
  misc_feature 1..22: note = chemically synthesized
  source 1..22: mol_type = other DNA
taacacctattttaccaagtca

SEQ ID NO: 108825 - DNA, 22 bp, synthetic construct
  misc_feature 1..22: note = chemically synthesized
  source 1..22: mol_type = other DNA
aacacctattttaccaagtcat

SEQ ID NO: 108826 - DNA, 22 bp, synthetic construct
  misc_feature 1..22: note = chemically synthesized
  source 1..22: mol_type = other DNA
acacctattttaccaagtcata

SEQ ID NO: 108827 - DNA, 22 bp, synthetic construct
  misc_feature 1..22: note = chemically synthesized
  source 1..22: mol_type = other DNA
ttttaccaagtcatatgagcat

SEQ ID NO: 108828 - DNA, 22 bp, synthetic construct
  misc_feature 1..22: note = chemically synthesized
  source 1..22: mol_type = other DNA
taccaagtcatatgagcatgca

SEQ ID NO: 108829 - DNA, 22 bp, synthetic construct
  misc_feature 1..22: note = chemically synthesized
  source 1..22: mol_type = other DNA
accaagtcatatgagcatgcat

SEQ ID NO: 108830 - DNA, 22 bp, synthetic construct
  misc_feature 1..22: note = chemically synthesized
  source 1..22: mol_type = other DNA
ccaagtcatatgagcatgcatg

SEQ ID NO: 108831 - DNA, 22 bp, synthetic construct
  misc_feature 1..22: note = chemically synthesized
  source 1..22: mol_type = other DNA
gatatgagacttctttgctctc

SEQ ID NO: 108832 - DNA, 22 bp, synthetic construct
  misc_feature 1..22: note = chemically synthesized
  source 1..22: mol_type = other DNA
ctttgctctcctgctaaatatt

SEQ ID NO: 108833 - DNA, 22 bp, synthetic construct
  misc_feature 1..22: note = chemically synthesized
  source 1..22: mol_type = other DNA
tttgctctcctgctaaatatta

SEQ ID NO: 108834 - DNA, 22 bp, synthetic construct
  misc_feature 1..22: note = chemically synthesized
  source 1..22: mol_type = other DNA
tgctctcctgctaaatattaga

SEQ ID NO: 108835 - DNA, 22 bp, synthetic construct
  misc_feature 1..22: note = chemically synthesized
  source 1..22: mol_type = other DNA
gctctcctgctaaatattagag

SEQ ID NO: 108836 - DNA, 22 bp, synthetic construct
  misc_feature 1..22: note = chemically synthesized
  source 1..22: mol_type = other DNA
ctctcctgctaaatattagagt

SEQ ID NO: 108837 - DNA, 22 bp, synthetic construct
  misc_feature 1..22: note = chemically synthesized
  source 1..22: mol_type = other DNA
tcctgctaaatattagagtttt

SEQ ID NO: 108838 - DNA, 22 bp, synthetic construct
  misc_feature 1..22: note = chemically synthesized
  source 1..22: mol_type = other DNA
ctgctaaatattagagttttta

SEQ ID NO: 108839 - DNA, 22 bp, synthetic construct
  misc_feature 1..22: note = chemically synthesized
  source 1..22: mol_type = other DNA
ctaaatattagagtttttacat

SEQ ID NO: 108840 - DNA, 22 bp, synthetic construct
  misc_feature 1..22: note = chemically synthesized
  source 1..22: mol_type = other DNA
aatattagagtttttacattct

SEQ ID NO: 108841 - DNA, 22 bp, synthetic construct
  misc_feature 1..22: note = chemically synthesized
  source 1..22: mol_type = other DNA
gagtttttacattctgtgagag

SEQ ID NO: 108842 - DNA, 22 bp, synthetic construct
  misc_feature 1..22: note = chemically synthesized
  source 1..22: mol_type = other DNA
ttacattctgtgagagtgactg

SEQ ID NO: 108843 - DNA, 22 bp, synthetic construct
  misc_feature 1..22: note = chemically synthesized
  source 1..22: mol_type = other DNA
tacattctgtgagagtgactgt

SEQ ID NO: 108844 - DNA, 22 bp, synthetic construct
  misc_feature 1..22: note = chemically synthesized
  source 1..22: mol_type = other DNA
acattctgtgagagtgactgtg

SEQ ID NO: 108845 - DNA, 22 bp, synthetic construct
  misc_feature 1..22: note = chemically synthesized
  source 1..22: mol_type = other DNA
cattctgtgagagtgactgtga

SEQ ID NO: 108846 - DNA, 22 bp, synthetic construct
  misc_feature 1..22: note = chemically synthesized
  source 1..22: mol_type = other DNA
tgtgagagtgactgtgatgatt

SEQ ID NO: 108847 - DNA, 22 bp, synthetic construct
  misc_feature 1..22: note = chemically synthesized
  source 1..22: mol_type = other DNA
tgagagtgactgtgatgattgg

SEQ ID NO: 108848 - DNA, 22 bp, synthetic construct
  misc_feature 1..22: note = chemically synthesized
  source 1..22: mol_type = other DNA
tgatgattggagatcaggttcc

SEQ ID NO: 108849 - DNA, 22 bp, synthetic construct
  misc_feature 1..22: note = chemically synthesized
  source 1..22: mol_type = other DNA
gagatcaggttccaattctatg

SEQ ID NO: 108850 - DNA, 22 bp, synthetic construct
  misc_feature 1..22: note = chemically synthesized
  source 1..22: mol_type = other DNA
caattctatgggtagtaaaaag

SEQ ID NO: 108851 - DNA, 22 bp, synthetic construct
  misc_feature 1..22: note = chemically synthesized
  source 1..22: mol_type = other DNA
tatgggtagtaaaaaggtgaag

SEQ ID NO: 108852 - DNA, 22 bp, synthetic construct
  misc_feature 1..22: note = chemically synthesized
  source 1..22: mol_type = other DNA
tgggtagtaaaaaggtgaagaa

SEQ ID NO: 108853 - DNA, 22 bp, synthetic construct
  misc_feature 1..22: note = chemically synthesized
  source 1..22: mol_type = other DNA
tgaatctgcttggtcttgacac

SEQ ID NO: 108854 - DNA, 22 bp, synthetic construct
  misc_feature 1..22: note = chemically synthesized
  source 1..22: mol_type = other DNA
aatctgcttggtcttgacacta

SEQ ID NO: 108855 - DNA, 22 bp, synthetic construct
  misc_feature 1..22: note = chemically synthesized
  source 1..22: mol_type = other DNA
cttggtcttgacactatatgtt

SEQ ID NO: 108856 - DNA, 22 bp, synthetic construct
  misc_feature 1..22: note = chemically synthesized
  source 1..22: mol_type = other DNA
ggtcttgacactatatgttata

SEQ ID NO: 108857 - DNA, 22 bp, synthetic construct
  misc_feature 1..22: note = chemically synthesized
  source 1..22: mol_type = other DNA
gtcttgacactatatgttatag

SEQ ID NO: 108858 - DNA, 22 bp, synthetic construct
  misc_feature 1..22: note = chemically synthesized
  source 1..22: mol_type = other DNA
gacactatatgttataggattc

SEQ ID NO: 108859 - DNA, 22 bp, synthetic construct
  misc_feature 1..22: note = chemically synthesized
  source 1..22: mol_type = other DNA
acactatatgttataggattca

SEQ ID NO: 108860 - DNA, 22 bp, synthetic construct
  misc_feature 1..22: note = chemically synthesized
  source 1..22: mol_type = other DNA
tatgttataggattcattagtg

SEQ ID NO: 108861 - DNA, 22 bp, synthetic construct
  misc_feature 1..22: note = chemically synthesized
  source 1..22: mol_type = other DNA
taggattcattagtggagggaa

SEQ ID NO: 108862 - DNA, 22 bp, synthetic construct
  misc_feature 1..22: note = chemically synthesized
  source 1..22: mol_type = other DNA
attagtggagggaacagaaaat

SEQ ID NO: 108863 - DNA, 22 bp, synthetic construct
  misc_feature 1..22: note = chemically synthesized
  source 1..22: mol_type = other DNA
gtggagggaacagaaaataggc

SEQ ID NO: 108864 - DNA, 22 bp, synthetic construct
  misc_feature 1..22: note = chemically synthesized
  source 1..22: mol_type = other DNA
ataatgaggtgaacaatatgtg

SEQ ID NO: 108865 - DNA, 22 bp, synthetic construct
  misc_feature 1..22: note = chemically synthesized
  source 1..22: mol_type = other DNA
ctttccaaaacgatgaatcaga

SEQ ID NO: 108866 - DNA, 22 bp, synthetic construct
  misc_feature 1..22: note = chemically synthesized
  source 1..22: mol_type = other DNA
tccaaaacgatgaatcagagac

SEQ ID NO: 108867 - DNA, 22 bp, synthetic construct
  misc_feature 1..22: note = chemically synthesized
  source 1..22: mol_type = other DNA
ccaaaacgatgaatcagagaca

SEQ ID NO: 108868 - DNA, 22 bp, synthetic construct
  misc_feature 1..22: note = chemically synthesized
  source 1..22: mol_type = other DNA
caaaacgatgaatcagagacaa

SEQ ID NO: 108869 - DNA, 22 bp, synthetic construct
  misc_feature 1..22: note = chemically synthesized
  source 1..22: mol_type = other DNA
tgacataaaaaaccaggacaca

SEQ ID NO: 108870 - DNA, 22 bp, synthetic construct
  misc_feature 1..22: note = chemically synthesized
  source 1..22: mol_type = other DNA
ggccctctcctctctggaggca

SEQ ID NO: 108871 - DNA, 22 bp, synthetic construct
  misc_feature 1..22: note = chemically synthesized
  source 1..22: mol_type = other DNA
gccctctcctctctggaggcaa

SEQ ID NO: 108872 - DNA, 22 bp, synthetic construct
  misc_feature 1..22: note = chemically synthesized
  source 1..22: mol_type = other DNA
tcctctctggaggcaatgctca

SEQ ID NO: 108873 - DNA, 22 bp, synthetic construct
  misc_feature 1..22: note = chemically synthesized
  source 1..22: mol_type = other DNA
ctctctggaggcaatgctcagg

SEQ ID NO: 108874 - DNA, 22 bp, synthetic construct
  misc_feature 1..22: note = chemically synthesized
  source 1..22: mol_type = other DNA
tctggaggcaatgctcaggaca

SEQ ID NO: 108875 - DNA, 22 bp, synthetic construct
  misc_feature 1..22: note = chemically synthesized
  source 1..22: mol_type = other DNA
tggaggcaatgctcaggacagt

SEQ ID NO: 108876 - DNA, 22 bp, synthetic construct
  misc_feature 1..22: note = chemically synthesized
  source 1..22: mol_type = other DNA
gaggcaatgctcaggacagtct

SEQ ID NO: 108877 - DNA, 22 bp, synthetic construct
  misc_feature 1..22: note = chemically synthesized
  source 1..22: mol_type = other DNA
aggacagtcttgagtatcaaca

SEQ ID NO: 108878 - DNA, 22 bp, synthetic construct
  misc_feature 1..22: note = chemically synthesized
  source 1..22: mol_type = other DNA
gagtatcaacacataggagatg

SEQ ID NO: 108879 - DNA, 22 bp, synthetic construct
  misc_feature 1..22: note = chemically synthesized
  source 1..22: mol_type = other DNA
agtatcaacacataggagatga

SEQ ID NO: 108880 - DNA, 22 bp, synthetic construct
  misc_feature 1..22: note = chemically synthesized
  source 1..22: mol_type = other DNA
caagcacagctgggtacagtcg

SEQ ID NO: 108881 - DNA, 22 bp, synthetic construct
  misc_feature 1..22: note = chemically synthesized
  source 1..22: mol_type = other DNA
ggtacagtcggttgaaggtggt

SEQ ID NO: 108882 - DNA, 22 bp, synthetic construct
  misc_feature 1..22: note = chemically synthesized
  source 1..22: mol_type = other DNA
aaggtggtatcagcacaggcga

SEQ ID NO: 108883 - DNA, 22 bp, synthetic construct
  misc_feature 1..22: note = chemically synthesized
  source 1..22: mol_type = other DNA
aatgacatcctggtgaaggcag

SEQ ID NO: 108884 - DNA, 22 bp, synthetic construct
  misc_feature 1..22: note = chemically synthesized
  source 1..22: mol_type = other DNA
atgacatcctggtgaaggcaga

SEQ ID NO: 108885 - DNA, 22 bp, synthetic construct
  misc_feature 1..22: note = chemically synthesized
  source 1..22: mol_type = other DNA
gtgaaggcagaatgcatgtgaa

SEQ ID NO: 108886 - DNA, 22 bp, synthetic construct
  misc_feature 1..22: note = chemically synthesized
  source 1..22: mol_type = other DNA
attgggggaacaacggatacaa

SEQ ID NO: 108887 - DNA, 22 bp, synthetic construct
  misc_feature 1..22: note = chemically synthesized
  source 1..22: mol_type = other DNA
ggggaacaacggatacaaatcc

SEQ ID NO: 108888 - DNA, 22 bp, synthetic construct
  misc_feature 1..22: note = chemically synthesized
  source 1..22: mol_type = other DNA
atcagaactcccagcccaatct

SEQ ID NO: 108889 - DNA, 22 bp, synthetic construct
  misc_feature 1..22: note = chemically synthesized
  source 1..22: mol_type = other DNA
ccagcccaatcttcactactcg

SEQ ID NO: 108890 - DNA, 22 bp, synthetic construct
  misc_feature 1..22: note = chemically synthesized
  source 1..22: mol_type = other DNA
cactactcgagtattagtaagt

SEQ ID NO: 108891 - DNA, 22 bp, synthetic construct
  misc_feature 1..22: note = chemically synthesized
  source 1..22: mol_type = other DNA
actactcgagtattagtaagta

SEQ ID NO: 108892 - DNA, 22 bp, synthetic construct
  misc_feature 1..22: note = chemically synthesized
  source 1..22: mol_type = other DNA
ctcgagtattagtaagtacaga

SEQ ID NO: 108893 - DNA, 22 bp, synthetic construct
  misc_feature 1..22: note = chemically synthesized
  source 1..22: mol_type = other DNA
gagtattagtaagtacagaggt

SEQ ID NO: 108894 - DNA, 22 bp, synthetic construct
  misc_feature 1..22: note = chemically synthesized
  source 1..22: mol_type = other DNA
gtaagtacagaggtatatctaa

SEQ ID NO: 108895 - DNA, 22 bp, synthetic construct
  misc_feature 1..22: note = chemically synthesized
  source 1..22: mol_type = other DNA
agagggttgcagatggcaataa

SEQ ID NO: 108896 - DNA, 22 bp, synthetic construct
  misc_feature 1..22: note = chemically synthesized
  source 1..22: mol_type = other DNA
cagatggcaataaaacggtcat

SEQ ID NO: 108897 - DNA, 22 bp, synthetic construct
  misc_feature 1..22: note = chemically synthesized
  source 1..22: mol_type = other DNA
gagaaaggaaagtgagtgtata

SEQ ID NO: 108898 - DNA, 22 bp, synthetic construct
  misc_feature 1..22: note = chemically synthesized
  source 1..22: mol_type = other DNA
ggaaaagcaggccgcacttcca

SEQ ID NO: 108899 - DNA, 22 bp, synthetic construct
  misc_feature 1..22: note = chemically synthesized
  source 1..22: mol_type = other DNA
ccaatctccctgtgatccagcc

SEQ ID NO: 108900 - DNA, 22 bp, synthetic construct
  misc_feature 1..22: note = chemically synthesized
  source 1..22: mol_type = other DNA
caatctccctgtgatccagcca

SEQ ID NO: 108901 - DNA, 22 bp, synthetic construct
  misc_feature 1..22: note = chemically synthesized
  source 1..22: mol_type = other DNA
cctgtgatccagccagaggact

SEQ ID NO: 108902 - DNA, 22 bp, synthetic construct
  misc_feature 1..22: note = chemically synthesized
  source 1..22: mol_type = other DNA
tgatccagccagaggactccca

SEQ ID NO: 108903 - DNA, 22 bp, synthetic construct
  misc_feature 1..22: note = chemically synthesized
  source 1..22: mol_type = other DNA
ccagcaccgtgggcattgtggt

SEQ ID NO: 108904 - DNA, 22 bp, synthetic construct
  misc_feature 1..22: note = chemically synthesized
  source 1..22: mol_type = other DNA
tggtcagggccagccccaggtc

SEQ ID NO: 108905 - DNA, 22 bp, synthetic construct
  misc_feature 1..22: note = chemically synthesized
  source 1..22: mol_type = other DNA
tggcagccagcatggccagaaa

SEQ ID NO: 108906 - DNA, 22 bp, synthetic construct
  misc_feature 1..22: note = chemically synthesized
  source 1..22: mol_type = other DNA
atgaagattgtgatcttcctta

SEQ ID NO: 108907 - DNA, 22 bp, synthetic construct
  misc_feature 1..22: note = chemically synthesized
  source 1..22: mol_type = other DNA
tgatcttccttaatgagaagaa

SEQ ID NO: 108908 - DNA, 22 bp, synthetic construct
  misc_feature 1..22: note = chemically synthesized
  source 1..22: mol_type = other DNA
ccttaatgagaagaaggagggt

SEQ ID NO: 108909 - DNA, 22 bp, synthetic construct
  misc_feature 1..22: note = chemically synthesized
  source 1..22: mol_type = other DNA
cttaatgagaagaaggagggtg

SEQ ID NO: 108910 - DNA, 22 bp, synthetic construct
  misc_feature 1..22: note = chemically synthesized
  source 1..22: mol_type = other DNA
aatgagaagaaggagggtgcca

SEQ ID NO: 108911 - DNA, 22 bp, synthetic construct
  misc_feature 1..22: note = chemically synthesized
  source 1..22: mol_type = other DNA
atgagaagaaggagggtgccat

SEQ ID NO: 108912 - DNA, 22 bp, synthetic construct
  misc_feature 1..22: note = chemically synthesized
  source 1..22: mol_type = other DNA
ccaaaaaggatggatatataca

SEQ ID NO: 108913 - DNA, 22 bp, synthetic construct
  misc_feature 1..22: note = chemically synthesized
  source 1..22: mol_type = other DNA
cctccaagcctggaaaaccagt

SEQ ID NO: 108914 - DNA, 22 bp, synthetic construct
  misc_feature 1..22: note = chemically synthesized
  source 1..22: mol_type = other DNA
ctccaagcctggaaaaccagtc

SEQ ID NO: 108915 - DNA, 22 bp, synthetic construct
  misc_feature 1..22: note = chemically synthesized
  source 1..22: mol_type = other DNA
caagcctggaaaaccagtcaat

SEQ ID NO: 108916 - DNA, 22 bp, synthetic construct
  misc_feature 1..22: note = chemically synthesized
  source 1..22: mol_type = other DNA
gaaaaccagtcaataggaaggg

SEQ ID NO: 108917 - DNA, 22 bp, synthetic construct
  misc_feature 1..22: note = chemically synthesized
  source 1..22: mol_type = other DNA
ccgctggacgacatcctgggtt

SEQ ID NO: 108918 - DNA, 22 bp, synthetic construct
  misc_feature 1..22: note = chemically synthesized
  source 1..22: mol_type = other DNA
gacgacatcctgggtttatata

SEQ ID NO: 108919 - DNA, 22 bp, synthetic construct
  misc_feature 1..22: note = chemically synthesized
  source 1..22: mol_type = other DNA
ggtttatatagaagaaatgtct

SEQ ID NO: 108920 - DNA, 22 bp, synthetic construct
  misc_feature 1..22: note = chemically synthesized
  source 1..22: mol_type = other DNA
atatagaagaaatgtctttctg

SEQ ID NO: 108921 - DNA, 22 bp, synthetic construct
  misc_feature 1..22: note = chemically synthesized
  source 1..22: mol_type = other DNA
tatagaagaaatgtctttctgt

SEQ ID NO: 108922 - DNA, 22 bp, synthetic construct
  misc_feature 1..22: note = chemically synthesized
  source 1..22: mol_type = other DNA
tctgtttctgttattaccacag

SEQ ID NO: 108923 - DNA, 22 bp, synthetic construct
  misc_feature 1..22: note = chemically synthesized
  source 1..22: mol_type = other DNA
ctgtttctgttattaccacagt

SEQ ID NO: 108924 - DNA, 22 bp, synthetic construct
  misc_feature 1..22: note = chemically synthesized
  source 1..22: mol_type = other DNA
tgtttctgttattaccacagtg

SEQ ID NO: 108925 - DNA, 22 bp, synthetic construct
  misc_feature 1..22: note = chemically synthesized
  source 1..22: mol_type = other DNA
tttctgttattaccacagtgca

SEQ ID NO: 108926 - DNA, 22 bp, synthetic construct
  misc_feature 1..22: note = chemically synthesized
  source 1..22: mol_type = other DNA
ctgttattaccacagtgcacag

SEQ ID NO: 108927 - DNA, 22 bp, synthetic construct
  misc_feature 1..22: note = chemically synthesized
  source 1..22: mol_type = other DNA
tgttattaccacagtgcacagt

SEQ ID NO: 108928 - DNA, 22 bp, synthetic construct
  misc_feature 1..22: note = chemically synthesized
  source 1..22: mol_type = other DNA
ttattaccacagtgcacagttc

SEQ ID NO: 108929 - DNA, 22 bp, synthetic construct
  misc_feature 1..22: note = chemically synthesized
  source 1..22: mol_type = other DNA
ttaccacagtgcacagttctac

SEQ ID NO: 108930 - DNA, 22 bp, synthetic construct
  misc_feature 1..22: note = chemically synthesized
  source 1..22: mol_type = other DNA
ccacagtgcacagttctacctt

SEQ ID NO: 108931 - DNA, 22 bp, synthetic construct
  misc_feature 1..22: note = chemically synthesized
  source 1..22: mol_type = other DNA
taccttcaaggtatcacttcga

SEQ ID NO: 108932 - DNA, 22 bp, synthetic construct
  misc_feature 1..22: note = chemically synthesized
  source 1..22: mol_type = other DNA
ccttcaaggtatcacttcgact

SEQ ID NO: 108933 - DNA, 22 bp, synthetic construct
  misc_feature 1..22: note = chemically synthesized
  source 1..22: mol_type = other DNA
caaggtatcacttcgactatat

SEQ ID NO: 108934 - DNA, 22 bp, synthetic construct
  misc_feature 1..22: note = chemically synthesized
  source 1..22: mol_type = other DNA
aaggtatcacttcgactatatc

SEQ ID NO: 108935 - DNA, 22 bp, synthetic construct
  misc_feature 1..22: note = chemically synthesized
  source 1..22: mol_type = other DNA
cgactatatcattctcagaatt

SEQ ID NO: 108936 - DNA, 22 bp, synthetic construct
  misc_feature 1..22: note = chemically synthesized
  source 1..22: mol_type = other DNA
gactatatcattctcagaattt

SEQ ID NO: 108937 - DNA, 22 bp, synthetic construct
  misc_feature 1..22: note = chemically synthesized
  source 1..22: mol_type = other DNA
tatcattctcagaattttttcc

SEQ ID NO: 108938 - DNA, 22 bp, synthetic construct
  misc_feature 1..22: note = chemically synthesized
  source 1..22: mol_type = other DNA
tcagaattttttcctaaagata

SEQ ID NO: 108939 - DNA, 22 bp, synthetic construct
  misc_feature 1..22: note = chemically synthesized
  source 1..22: mol_type = other DNA
agaattttttcctaaagataat

SEQ ID NO: 108940 - DNA, 22 bp, synthetic construct
  misc_feature 1..22: note = chemically synthesized
  source 1..22: mol_type = other DNA
tttcctaaagataataatgaca

SEQ ID NO: 108941 - DNA, 22 bp, synthetic construct
  misc_feature 1..22: note = chemically synthesized
  source 1..22: mol_type = other DNA
ttcctaaagataataatgacat

SEQ ID NO: 108942 - DNA, 22 bp, synthetic construct
  misc_feature 1..22: note = chemically synthesized
  source 1..22: mol_type = other DNA
tcctaaagataataatgacatc

SEQ ID NO: 108943 - DNA, 22 bp, synthetic construct
  misc_feature 1..22: note = chemically synthesized
  source 1..22: mol_type = other DNA
cctaaagataataatgacatca

SEQ ID NO: 108944 - DNA, 22 bp, synthetic construct
  misc_feature 1..22: note = chemically synthesized
  source 1..22: mol_type = other DNA
ctaaagataataatgacatcaa

SEQ ID NO: 108945 - DNA, 22 bp, synthetic construct
  misc_feature 1..22: note = chemically synthesized
  source 1..22: mol_type = other DNA
aagataataatgacatcaatat

SEQ ID NO: 108946 - DNA, 22 bp, synthetic construct
  misc_feature 1..22: note = chemically synthesized
  source 1..22: mol_type = other DNA
tttctcaaaatacattctcagg

SEQ ID NO: 108947 - DNA, 22 bp, synthetic construct
  misc_feature 1..22: note = chemically synthesized
  source 1..22: mol_type = other DNA
ctcaaaatacattctcagggtt

SEQ ID NO: 108948 - DNA, 22 bp, synthetic construct
  misc_feature 1..22: note = chemically synthesized
  source 1..22: mol_type = other DNA
tcaaaatacattctcagggtta

SEQ ID NO: 108949 - DNA, 22 bp, synthetic construct
  misc_feature 1..22: note = chemically synthesized
  source 1..22: mol_type = other DNA
aaaatacattctcagggttact

SEQ ID NO: 108950 - DNA, 22 bp, synthetic construct
  misc_feature 1..22: note = chemically synthesized
  source 1..22: mol_type = other DNA
tcagggttactcatactatttg

SEQ ID NO: 108951 - DNA, 22 bp, synthetic construct
  misc_feature 1..22: note = chemically synthesized
  source 1..22: mol_type = other DNA
agggttactcatactatttgta

SEQ ID NO: 108952 - DNA, 22 bp, synthetic construct
  misc_feature 1..22: note = chemically synthesized
  source 1..22: mol_type = other DNA
ctcatactatttgtattcttaa

SEQ ID NO: 108953 - DNA, 22 bp, synthetic construct
  misc_feature 1..22: note = chemically synthesized
  source 1..22: mol_type = other DNA
atactatttgtattcttaactg

SEQ ID NO: 108954 - DNA, 22 bp, synthetic construct
  misc_feature 1..22: note = chemically synthesized
  source 1..22: mol_type = other DNA
tttgtattcttaactgcacatt

SEQ ID NO: 108955 - DNA, 22 bp, synthetic construct
  misc_feature 1..22: note = chemically synthesized
  source 1..22: mol_type = other DNA
gtattcttaactgcacattcca

SEQ ID NO: 108956 - DNA, 22 bp, synthetic construct
  misc_feature 1..22: note = chemically synthesized
  source 1..22: mol_type = other DNA
tattcttaactgcacattccag

SEQ ID NO: 108957 - DNA, 22 bp, synthetic construct
  misc_feature 1..22: note = chemically synthesized
  source 1..22: mol_type = other DNA
ttaactgcacattccaggatct

SEQ ID NO: 108958 - DNA, 22 bp, synthetic construct
  misc_feature 1..22: note = chemically synthesized
  source 1..22: mol_type = other DNA
aactgcacattccaggatctat

SEQ ID NO: 108959 - DNA, 22 bp, synthetic construct
  misc_feature 1..22: note = chemically synthesized
  source 1..22: mol_type = other DNA
actgcacattccaggatctatc

SEQ ID NO: 108960 - DNA, 22 bp, synthetic construct
  misc_feature 1..22: note = chemically synthesized
  source 1..22: mol_type = other DNA
cacattccaggatctatctcct

SEQ ID NO: 108961 - DNA, 22 bp, synthetic construct
  misc_feature 1..22: note = chemically synthesized
  source 1..22: mol_type = other DNA
caggatctatctcctacctacg

SEQ ID NO: 108962 - DNA, 22 bp, synthetic construct
  misc_feature 1..22: note = chemically synthesized
  source 1..22: mol_type = other DNA
tctcctacctacgtaatcaaat

SEQ ID NO: 108963 - DNA, 22 bp, synthetic construct
  misc_feature 1..22: note = chemically synthesized
  source 1..22: mol_type = other DNA
ctacctacgtaatcaaattctt

SEQ ID NO: 108964 - DNA, 22 bp, synthetic construct
  misc_feature 1..22: note = chemically synthesized
  source 1..22: mol_type = other DNA
cctacgtaatcaaattcttgga

SEQ ID NO: 108965 - DNA, 22 bp, synthetic construct
  misc_feature 1..22: note = chemically synthesized
  source 1..22: mol_type = other DNA
cgtaatcaaattcttggagttt

SEQ ID NO: 108966 - DNA, 22 bp, synthetic construct
  misc_feature 1..22: note = chemically synthesized
  source 1..22: mol_type = other DNA
ttggagtttcaactgtttatat

SEQ ID NO: 108967 - DNA, 22 bp, synthetic construct
  misc_feature 1..22: note = chemically synthesized
  source 1..22: mol_type = other DNA
ggagtttcaactgtttatatgc

SEQ ID NO: 108968 - DNA, 22 bp, synthetic construct
  misc_feature 1..22: note = chemically synthesized
  source 1..22: mol_type = other DNA
gagtttcaactgtttatatgca

SEQ ID NO: 108969 - DNA, 22 bp, synthetic construct
  misc_feature 1..22: note = chemically synthesized
  source 1..22: mol_type = other DNA
caactgtttatatgcatttaag

SEQ ID NO: 108970 - DNA, 22 bp, synthetic construct
  misc_feature 1..22: note = chemically synthesized
  source 1..22: mol_type = other DNA
aactgtttatatgcatttaagc

SEQ ID NO: 108971 - DNA, 22 bp, synthetic construct
  misc_feature 1..22: note = chemically synthesized
  source 1..22: mol_type = other DNA
tttatatgcatttaagcattct

SEQ ID NO: 108972 - DNA, 22 bp, synthetic construct
  misc_feature 1..22: note = chemically synthesized
  source 1..22: mol_type = other DNA
atatgcatttaagcattctctt

SEQ ID NO: 108973 - DNA, 22 bp, synthetic construct
  misc_feature 1..22: note = chemically synthesized
  source 1..22: mol_type = other DNA
tatgcatttaagcattctcttc

SEQ ID NO: 108974 - DNA, 22 bp, synthetic construct
  misc_feature 1..22: note = chemically synthesized
  source 1..22: mol_type = other DNA
aagcattctcttcagaaaaaaa

SEQ ID NO: 108975 - DNA, 22 bp, synthetic construct
  misc_feature 1..22: note = chemically synthesized
  source 1..22: mol_type = other DNA
agcattctcttcagaaaaaaaa

SEQ ID NO: 108976 - DNA, 22 bp, synthetic construct
  misc_feature 1..22: note = chemically synthesized
  source 1..22: mol_type = other DNA
tcttcagaaaaaaaattatgta

SEQ ID NO: 108977 - DNA, 22 bp, synthetic construct
  misc_feature 1..22: note = chemically synthesized
  source 1..22: mol_type = other DNA
ttcagaaaaaaaattatgtaaa

SEQ ID NO: 108978 - DNA, 22 bp, synthetic construct
  misc_feature 1..22: note = chemically synthesized
  source 1..22: mol_type = other DNA
cagaaaaaaaattatgtaaact

SEQ ID NO: 108979 - DNA, 22 bp, synthetic construct
  misc_feature 1..22: note = chemically synthesized
  source 1..22: mol_type = other DNA
agaaaaaaaattatgtaaacta

SEQ ID NO: 108980 - DNA, 22 bp, synthetic construct
  misc_feature 1..22: note = chemically synthesized
  source 1..22: mol_type = other DNA
tgtaaactacaacttctaaact

SEQ ID NO: 108981 - DNA, 22 bp, synthetic construct
  misc_feature 1..22: note = chemically synthesized
  source 1..22: mol_type = other DNA
caacttctaaactgttaccctt

SEQ ID NO: 108982 - DNA, 22 bp, synthetic construct
  misc_feature 1..22: note = chemically synthesized
  source 1..22: mol_type = other DNA
ctaaactgttacccttaactat

SEQ ID NO: 108983 - DNA, 22 bp, synthetic construct
  misc_feature 1..22: note = chemically synthesized
  source 1..22: mol_type = other DNA
taaactgttacccttaactatg

SEQ ID NO: 108984 - DNA, 22 bp, synthetic construct
  misc_feature 1..22: note = chemically synthesized
  source 1..22: mol_type = other DNA
aactgttacccttaactatgca

SEQ ID NO: 108985 - DNA, 22 bp, synthetic construct
  misc_feature 1..22: note = chemically synthesized
  source 1..22: mol_type = other DNA
ttacccttaactatgcagattt

SEQ ID NO: 108986 - DNA, 22 bp, synthetic construct
  misc_feature 1..22: note = chemically synthesized
  source 1..22: mol_type = other DNA
cccttaactatgcagattttaa

SEQ ID NO: 108987 - DNA, 22 bp, synthetic construct
  misc_feature 1..22: note = chemically synthesized
  source 1..22: mol_type = other DNA
aactatgcagattttaaagaat

SEQ ID NO: 108988 - DNA, 22 bp, synthetic construct
  misc_feature 1..22: note = chemically synthesized
  source 1..22: mol_type = other DNA
actatgcagattttaaagaatt

SEQ ID NO: 108989 - DNA, 22 bp, synthetic construct
  misc_feature 1..22: note = chemically synthesized
  source 1..22: mol_type = other DNA
tgcagattttaaagaattcgta

SEQ ID NO: 108990 - DNA, 22 bp, synthetic construct
  misc_feature 1..22: note = chemically synthesized
  source 1..22: mol_type = other DNA
taaagaattcgtattctatggg

SEQ ID NO: 108991 - DNA, 22 bp, synthetic construct
  misc_feature 1..22: note = chemically synthesized
  source 1..22: mol_type = other DNA
aaagaattcgtattctatgggg

SEQ ID NO: 108992 - DNA, 22 bp, synthetic construct
  misc_feature 1..22: note = chemically synthesized
  source 1..22: mol_type = other DNA
aagaattcgtattctatggggc

SEQ ID NO: 108993 - DNA, 22 bp, synthetic construct
  misc_feature 1..22: note = chemically synthesized
  source 1..22: mol_type = other DNA
gtattctatggggcattcaagg

SEQ ID NO: 108994 - DNA, 22 bp, synthetic construct
  misc_feature 1..22: note = chemically synthesized
  source 1..22: mol_type = other DNA
tatggggcattcaaggggattt

SEQ ID NO: 108995 - DNA, 22 bp, synthetic construct
  misc_feature 1..22: note = chemically synthesized
  source 1..22: mol_type = other DNA
tggggcattcaaggggatttcc

SEQ ID NO: 108996 - DNA, 22 bp, synthetic construct
  misc_feature 1..22: note = chemically synthesized
  source 1..22: mol_type = other DNA
aaggggatttccagaaagctaa

SEQ ID NO: 108997 - DNA, 22 bp, synthetic construct
  misc_feature 1..22: note = chemically synthesized
  source 1..22: mol_type = other DNA
ccagaaagctaacactaatttt

SEQ ID NO: 108998 - DNA, 22 bp, synthetic construct
  misc_feature 1..22: note = chemically synthesized
  source 1..22: mol_type = other DNA
cagaaagctaacactaattttt

SEQ ID NO: 108999 - DNA, 22 bp, synthetic construct
  misc_feature 1..22: note = chemically synthesized
  source 1..22: mol_type = other DNA
acactaatttttttctggtcta

SEQ ID NO: 109000 - DNA, 22 bp, synthetic construct
  misc_feature 1..22: note = chemically synthesized
  source 1..22: mol_type = other DNA
atttttttctggtctaccacct

SEQ ID NO: 109001 - DNA, 22 bp, synthetic construct
  misc_feature 1..22: note = chemically synthesized
  source 1..22: mol_type = other DNA
ttttctggtctaccacctaaac

SEQ ID NO: 109002 - DNA, 22 bp, synthetic construct
  misc_feature 1..22: note = chemically synthesized
  source 1..22: mol_type = other DNA
tttctggtctaccacctaaacc

SEQ ID NO: 109003 - DNA, 22 bp, synthetic construct
  misc_feature 1..22: note = chemically synthesized
  source 1..22: mol_type = other DNA
ttctggtctaccacctaaacct

SEQ ID NO: 109004 - DNA, 22 bp, synthetic construct
  misc_feature 1..22: note = chemically synthesized
  source 1..22: mol_type = other DNA
tctggtctaccacctaaacctg

SEQ ID NO: 109005 - DNA, 22 bp, synthetic construct
  misc_feature 1..22: note = chemically synthesized
  source 1..22: mol_type = other DNA
ctggtctaccacctaaacctgt

SEQ ID NO: 109006 - DNA, 22 bp, synthetic construct
  misc_feature 1..22: note = chemically synthesized
  source 1..22: mol_type = other DNA
tggtctaccacctaaacctgta

SEQ ID NO: 109007 - DNA, 22 bp, synthetic construct
  misc_feature 1..22: note = chemically synthesized
  source 1..22: mol_type = other DNA
gtctaccacctaaacctgtaat

SEQ ID NO: 109008 - DNA, 22 bp, synthetic construct
  misc_feature 1..22: note = chemically synthesized
  source 1..22: mol_type = other DNA
ccacctaaacctgtaattgcct

SEQ ID NO: 109009 - DNA, 22 bp, synthetic construct
  misc_feature 1..22: note = chemically synthesized
  source 1..22: mol_type = other DNA
aacctgtaattgccttcacagt

SEQ ID NO: 109010 - DNA, 22 bp, synthetic construct
  misc_feature 1..22: note = chemically synthesized
  source 1..22: mol_type = other DNA
taattgccttcacagtagtgat

SEQ ID NO: 109011 - DNA, 22 bp, synthetic construct
  misc_feature 1..22: note = chemically synthesized
  source 1..22: mol_type = other DNA
ccttcacagtagtgatccctaa

SEQ ID NO: 109012 - DNA, 22 bp, synthetic construct
  misc_feature 1..22: note = chemically synthesized
  source 1..22: mol_type = other DNA
cacagtagtgatccctaatcca

SEQ ID NO: 109013 - DNA, 22 bp, synthetic construct
  misc_feature 1..22: note = chemically synthesized
  source 1..22: mol_type = other DNA
acagtagtgatccctaatccac

SEQ ID NO: 109014 - DNA, 22 bp, synthetic construct
  misc_feature 1..22: note = chemically synthesized
  source 1..22: mol_type = other DNA
atccacattttcctgcatgtaa

SEQ ID NO: 109015 - DNA, 22 bp, synthetic construct
  misc_feature 1..22: note = chemically synthesized
  source 1..22: mol_type = other DNA
tcctgcatgtaaagacttacct

SEQ ID NO: 109016 - DNA, 22 bp, synthetic construct
  misc_feature 1..22: note = chemically synthesized
  source 1..22: mol_type = other DNA
cctgcatgtaaagacttacctg

SEQ ID NO: 109017 - DNA, 22 bp, synthetic construct
  misc_feature 1..22: note = chemically synthesized
  source 1..22: mol_type = other DNA
ctgcatgtaaagacttacctga

SEQ ID NO: 109018 - DNA, 22 bp, synthetic construct
  misc_feature 1..22: note = chemically synthesized
  source 1..22: mol_type = other DNA
catgtaaagacttacctgaatt

SEQ ID NO: 109019 - DNA, 22 bp, synthetic construct
  misc_feature 1..22: note = chemically synthesized
  source 1..22: mol_type = other DNA
acctgaattatcagctaaagtc

SEQ ID NO: 109020 - DNA, 22 bp, synthetic construct
  misc_feature 1..22: note = chemically synthesized
  source 1..22: mol_type = other DNA
cctgaattatcagctaaagtct

SEQ ID NO: 109021 - DNA, 22 bp, synthetic construct
  misc_feature 1..22: note = chemically synthesized
  source 1..22: mol_type = other DNA
aattatcagctaaagtctcaac

SEQ ID NO: 109022 - DNA, 22 bp, synthetic construct
  misc_feature 1..22: note = chemically synthesized
  source 1..22: mol_type = other DNA
tcagctaaagtctcaacagcct

SEQ ID NO: 109023 - DNA, 22 bp, synthetic construct
  misc_feature 1..22: note = chemically synthesized
  source 1..22: mol_type = other DNA
aagtctcaacagcctaagaaag

SEQ ID NO: 109024 - DNA, 22 bp, synthetic construct
  misc_feature 1..22: note = chemically synthesized
  source 1..22: mol_type = other DNA
aacagcctaagaaagaaaagtg

SEQ ID NO: 109025 - DNA, 22 bp, synthetic construct
  misc_feature 1..22: note = chemically synthesized
  source 1..22: mol_type = other DNA
agaaagaaaagtgtgggaagag

SEQ ID NO: 109026 - DNA, 22 bp, synthetic construct
  misc_feature 1..22: note = chemically synthesized
  source 1..22: mol_type = other DNA
tgccactaccactgtagctaag

SEQ ID NO: 109027 - DNA, 22 bp, synthetic construct
  misc_feature 1..22: note = chemically synthesized
  source 1..22: mol_type = other DNA
ccactaccactgtagctaagga

SEQ ID NO: 109028 - DNA, 22 bp, synthetic construct
  misc_feature 1..22: note = chemically synthesized
  source 1..22: mol_type = other DNA
ccactgtagctaaggagcagtc

SEQ ID NO: 109029 - DNA, 22 bp, synthetic construct
  misc_feature 1..22: note = chemically synthesized
  source 1..22: mol_type = other DNA
tagctaaggagcagtcagattg

SEQ ID NO: 109030 - DNA, 22 bp, synthetic construct
  misc_feature 1..22: note = chemically synthesized
  source 1..22: mol_type = other DNA
aggagcagtcagattgagaaag

SEQ ID NO: 109031 - DNA, 22 bp, synthetic construct
  misc_feature 1..22: note = chemically synthesized
  source 1..22: mol_type = other DNA
agaaagagacacttggcctcca

SEQ ID NO: 109032 - DNA, 22 bp, synthetic construct
  misc_feature 1..22: note = chemically synthesized
  source 1..22: mol_type = other DNA
ggcctccagatttcatggacta

SEQ ID NO: 109033 - DNA, 22 bp, synthetic construct
  misc_feature 1..22: note = chemically synthesized
  source 1..22: mol_type = other DNA
gcctccagatttcatggactag

SEQ ID NO: 109034 - DNA, 22 bp, synthetic construct
  misc_feature 1..22: note = chemically synthesized
  source 1..22: mol_type = other DNA
cagatttcatggactagtgatg

SEQ ID NO: 109035 - DNA, 22 bp, synthetic construct
  misc_feature 1..22: note = chemically synthesized
  source 1..22: mol_type = other DNA
catggactagtgatggggaaca

SEQ ID NO: 109036 - DNA, 22 bp, synthetic construct
  misc_feature 1..22: note = chemically synthesized
  source 1..22: mol_type = other DNA
atggactagtgatggggaacag

SEQ ID NO: 109037 - DNA, 22 bp, synthetic construct
  misc_feature 1..22: note = chemically synthesized
  source 1..22: mol_type = other DNA
gtgatggggaacagacattcac

SEQ ID NO: 109038 - DNA, 22 bp, synthetic construct
  misc_feature 1..22: note = chemically synthesized
  source 1..22: mol_type = other DNA
acgattagtgtgaattaccctc

SEQ ID NO: 109039 - DNA, 22 bp, synthetic construct
  misc_feature 1..22: note = chemically synthesized
  source 1..22: mol_type = other DNA
gtgtgaattaccctcttgtaga

SEQ ID NO: 109040 - DNA, 22 bp, synthetic construct
  misc_feature 1..22: note = chemically synthesized
  source 1..22: mol_type = other DNA
ccctcttgtagaatccttcagt

SEQ ID NO: 109041 - DNA, 22 bp, synthetic construct
  misc_feature 1..22: note = chemically synthesized
  source 1..22: mol_type = other DNA
ttgtagaatccttcagtactac

SEQ ID NO: 109042 - DNA, 22 bp, synthetic construct
  misc_feature 1..22: note = chemically synthesized
  source 1..22: mol_type = other DNA
gtagaatccttcagtactactc

SEQ ID NO: 109043 - DNA, 22 bp, synthetic construct
  misc_feature 1..22: note = chemically synthesized
  source 1..22: mol_type = other DNA
tagaatccttcagtactactca

SEQ ID NO: 109044 - DNA, 22 bp, synthetic construct
  misc_feature 1..22: note = chemically synthesized
  source 1..22: mol_type = other DNA
cagtactactcactacttgtga

SEQ ID NO: 109045 - DNA, 22 bp, synthetic construct
  misc_feature 1..22: note = chemically synthesized
  source 1..22: mol_type = other DNA
agtactactcactacttgtgac

SEQ ID NO: 109046 - DNA, 22 bp, synthetic construct
  misc_feature 1..22: note = chemically synthesized
  source 1..22: mol_type = other DNA
ctcactacttgtgacaatagct

SEQ ID NO: 109047 - DNA, 22 bp, synthetic construct
  misc_feature 1..22: note = chemically synthesized
  source 1..22: mol_type = other DNA
actacttgtgacaatagctcag

SEQ ID NO: 109048 - DNA, 22 bp, synthetic construct
  misc_feature 1..22: note = chemically synthesized
  source 1..22: mol_type = other DNA
cttgtgacaatagctcagtcta

SEQ ID NO: 109049 - DNA, 22 bp, synthetic construct
  misc_feature 1..22: note = chemically synthesized
  source 1..22: mol_type = other DNA
gtgacaatagctcagtctaatt

SEQ ID NO: 109050 - DNA, 22 bp, synthetic construct
  misc_feature 1..22: note = chemically synthesized
  source 1..22: mol_type = other DNA
tgacaatagctcagtctaatta

SEQ ID NO: 109051 - DNA, 22 bp, synthetic construct
  misc_feature 1..22: note = chemically synthesized
  source 1..22: mol_type = other DNA
agtctaattataagttagactt

SEQ ID NO: 109052 - DNA, 22 bp, synthetic construct
  misc_feature 1..22: note = chemically synthesized
  source 1..22: mol_type = other DNA
attataagttagactttggggc

SEQ ID NO: 109053 - DNA, 22 bp, synthetic construct
  misc_feature 1..22: note = chemically synthesized
  source 1..22: mol_type = other DNA
taagttagactttggggctgga

SEQ ID NO: 109054 - DNA, 22 bp, synthetic construct
  misc_feature 1..22: note = chemically synthesized
  source 1..22: mol_type = other DNA
gactttggggctggaataaatg

SEQ ID NO: 109055 - DNA, 22 bp, synthetic construct
  misc_feature 1..22: note = chemically synthesized
  source 1..22: mol_type = other DNA
tggggctggaataaatgattag

SEQ ID NO: 109056 - DNA, 22 bp, synthetic construct
  misc_feature 1..22: note = chemically synthesized
  source 1..22: mol_type = other DNA
ggggctggaataaatgattagg

SEQ ID NO: 109057 - DNA, 22 bp, synthetic construct
  misc_feature 1..22: note = chemically synthesized
  source 1..22: mol_type = other DNA
gggctggaataaatgattaggc

SEQ ID NO: 109058 - DNA, 22 bp, synthetic construct
  misc_feature 1..22: note = chemically synthesized
  source 1..22: mol_type = other DNA
gaataaatgattaggccagcca

SEQ ID NO: 109059 - DNA, 22 bp, synthetic construct
  misc_feature 1..22: note = chemically synthesized
  source 1..22: mol_type = other DNA
ggccagccaaagacatcactta

SEQ ID NO: 109060 - DNA, 22 bp, synthetic construct
  misc_feature 1..22: note = chemically synthesized
  source 1..22: mol_type = other DNA
ataatagtgtatctccttcagt

SEQ ID NO: 109061 - DNA, 22 bp, synthetic construct
  misc_feature 1..22: note = chemically synthesized
  source 1..22: mol_type = other DNA
taatagtgtatctccttcagtt

SEQ ID NO: 109062 - DNA, 22 bp, synthetic construct
  misc_feature 1..22: note = chemically synthesized
  source 1..22: mol_type = other DNA
cttcagtttaaacatcttactg

SEQ ID NO: 109063 - DNA, 22 bp, synthetic construct
  misc_feature 1..22: note = chemically synthesized
  source 1..22: mol_type = other DNA
cagtttaaacatcttactgttt

SEQ ID NO: 109064 - DNA, 22 bp, synthetic construct
  misc_feature 1..22: note = chemically synthesized
  source 1..22: mol_type = other DNA
agtttaaacatcttactgtttc

SEQ ID NO: 109065 - DNA, 22 bp, synthetic construct
  misc_feature 1..22: note = chemically synthesized
  source 1..22: mol_type = other DNA
aaacatcttactgtttcttatt

SEQ ID NO: 109066 - DNA, 22 bp, synthetic construct
  misc_feature 1..22: note = chemically synthesized
  source 1..22: mol_type = other DNA
aacatcttactgtttcttattt

SEQ ID NO: 109067 - DNA, 22 bp, synthetic construct
  misc_feature 1..22: note = chemically synthesized
  source 1..22: mol_type = other DNA
actgtttcttatttacaagtag

SEQ ID NO: 109068 - DNA, 22 bp, synthetic construct
  misc_feature 1..22: note = chemically synthesized
  source 1..22: mol_type = other DNA
ctgtttcttatttacaagtagt

SEQ ID NO: 109069 - DNA, 22 bp, synthetic construct
  misc_feature 1..22: note = chemically synthesized
  source 1..22: mol_type = other DNA
tttcttatttacaagtagtgtc

SEQ ID NO: 109070 - DNA, 22 bp, synthetic construct
  misc_feature 1..22: note = chemically synthesized
  source 1..22: mol_type = other DNA
cttatttacaagtagtgtcttt

SEQ ID NO: 109071 - DNA, 22 bp, synthetic construct
  misc_feature 1..22: note = chemically synthesized
  source 1..22: mol_type = other DNA
ttatttacaagtagtgtctttt

SEQ ID NO: 109072 - DNA, 22 bp, synthetic construct
  misc_feature 1..22: note = chemically synthesized
  source 1..22: mol_type = other DNA
atttacaagtagtgtctttttc

SEQ ID NO: 109073 - DNA, 22 bp, synthetic construct
  misc_feature 1..22: note = chemically synthesized
  source 1..22: mol_type = other DNA
tttacaagtagtgtctttttct

SEQ ID NO: 109074 - DNA, 22 bp, synthetic construct
  misc_feature 1..22: note = chemically synthesized
  source 1..22: mol_type = other DNA
acaagtagtgtctttttctttt

SEQ ID NO: 109075 - DNA, 22 bp, synthetic construct
  misc_feature 1..22: note = chemically synthesized
  source 1..22: mol_type = other DNA
caagtagtgtctttttcttttt

SEQ ID NO: 109076 - DNA, 22 bp, synthetic construct
  misc_feature 1..22: note = chemically synthesized
  source 1..22: mol_type = other DNA
tttctttttaaattatttttct

SEQ ID NO: 109077 - DNA, 22 bp, synthetic construct
  misc_feature 1..22: note = chemically synthesized
  source 1..22: mol_type = other DNA
ttctttttaaattatttttcta

SEQ ID NO: 109078 - DNA, 22 bp, synthetic construct
  misc_feature 1..22: note = chemically synthesized
  source 1..22: mol_type = other DNA
tctttttaaattatttttctat

SEQ ID NO: 109079 - DNA, 22 bp, synthetic construct
  misc_feature 1..22: note = chemically synthesized
  source 1..22: mol_type = other DNA
ctttttaaattatttttctata

SEQ ID NO: 109080 - DNA, 22 bp, synthetic construct
  misc_feature 1..22: note = chemically synthesized
  source 1..22: mol_type = other DNA
tttttaaattatttttctatag

SEQ ID NO: 109081 - DNA, 22 bp, synthetic construct
  misc_feature 1..22: note = chemically synthesized
  source 1..22: mol_type = other DNA
tttaaattatttttctataggc

SEQ ID NO: 109082 - DNA, 22 bp, synthetic construct
  misc_feature 1..22: note = chemically synthesized
  source 1..22: mol_type = other DNA
ttaaattatttttctataggcc

SEQ ID NO: 109083 - DNA, 22 bp, synthetic construct
  misc_feature 1..22: note = chemically synthesized
  source 1..22: mol_type = other DNA
taaattatttttctataggcct

SEQ ID NO: 109084 - DNA, 22 bp, synthetic construct
  misc_feature 1..22: note = chemically synthesized
  source 1..22: mol_type = other DNA
aaattatttttctataggccta

SEQ ID NO: 109085 - DNA, 22 bp, synthetic construct
  misc_feature 1..22: note = chemically synthesized
  source 1..22: mol_type = other DNA
aattatttttctataggcctac

SEQ ID NO: 109086 - DNA, 22 bp, synthetic construct
  misc_feature 1..22: note = chemically synthesized
  source 1..22: mol_type = other DNA
tttttctataggcctactgaag

SEQ ID NO: 109087 - DNA, 22 bp, synthetic construct
  misc_feature 1..22: note = chemically synthesized
  source 1..22: mol_type = other DNA
ttctataggcctactgaagtaa

SEQ ID NO: 109088 - DNA, 22 bp, synthetic construct
  misc_feature 1..22: note = chemically synthesized
  source 1..22: mol_type = other DNA
tctataggcctactgaagtaat

SEQ ID NO: 109089 - DNA, 22 bp, synthetic construct
  misc_feature 1..22: note = chemically synthesized
  source 1..22: mol_type = other DNA
ctataggcctactgaagtaatt

SEQ ID NO: 109090 - DNA, 22 bp, synthetic construct
  misc_feature 1..22: note = chemically synthesized
  source 1..22: mol_type = other DNA
tataggcctactgaagtaattc

SEQ ID NO: 109091 - DNA, 22 bp, synthetic construct
  misc_feature 1..22: note = chemically synthesized
  source 1..22: mol_type = other DNA
taggcctactgaagtaattccc

SEQ ID NO: 109092 - DNA, 22 bp, synthetic construct
  misc_feature 1..22: note = chemically synthesized
  source 1..22: mol_type = other DNA
ctgaagtaattccctagaatct

SEQ ID NO: 109093 - DNA, 22 bp, synthetic construct
  misc_feature 1..22: note = chemically synthesized
  source 1..22: mol_type = other DNA
aagtaattccctagaatctgac

SEQ ID NO: 109094 - DNA, 22 bp, synthetic construct
  misc_feature 1..22: note = chemically synthesized
  source 1..22: mol_type = other DNA
cctagaatctgacctctctcat

SEQ ID NO: 109095 - DNA, 22 bp, synthetic construct
  misc_feature 1..22: note = chemically synthesized
  source 1..22: mol_type = other DNA
gaatctgacctctctcatttca

SEQ ID NO: 109096 - DNA, 22 bp, synthetic construct
  misc_feature 1..22: note = chemically synthesized
  source 1..22: mol_type = other DNA
acctctctcatttcaagttctc

SEQ ID NO: 109097 - DNA, 22 bp, synthetic construct
  misc_feature 1..22: note = chemically synthesized
  source 1..22: mol_type = other DNA
tctcatttcaagttctccattt

SEQ ID NO: 109098 - DNA, 22 bp, synthetic construct
  misc_feature 1..22: note = chemically synthesized
  source 1..22: mol_type = other DNA
tcatttcaagttctccatttat

SEQ ID NO: 109099 - DNA, 22 bp, synthetic construct
  misc_feature 1..22: note = chemically synthesized
  source 1..22: mol_type = other DNA
atttcaagttctccatttatat

SEQ ID NO: 109100 - DNA, 22 bp, synthetic construct
  misc_feature 1..22: note = chemically synthesized
  source 1..22: mol_type = other DNA
caagttctccatttatatttaa

SEQ ID NO: 109101 - DNA, 22 bp, synthetic construct
  misc_feature 1..22: note = chemically synthesized
  source 1..22: mol_type = other DNA
aagttctccatttatatttaaa

SEQ ID NO: 109102 - DNA, 22 bp, synthetic construct
  misc_feature 1..22: note = chemically synthesized
  source 1..22: mol_type = other DNA
tccatttatatttaaacatcca

SEQ ID NO: 109103 - DNA, 22 bp, synthetic construct
  misc_feature 1..22: note = chemically synthesized
  source 1..22: mol_type = other DNA
catttatatttaaacatccatc

SEQ ID NO: 109104 - DNA, 22 bp, synthetic construct
  misc_feature 1..22: note = chemically synthesized
  source 1..22: mol_type = other DNA
atatttaaacatccatcttcct

SEQ ID NO: 109105 - DNA, 22 bp, synthetic construct
  misc_feature 1..22: note = chemically synthesized
  source 1..22: mol_type = other DNA
tatttaaacatccatcttcctg

SEQ ID NO: 109106 - DNA, 22 bp, synthetic construct
  misc_feature 1..22: note = chemically synthesized
  source 1..22: mol_type = other DNA
aaacatccatcttcctggtttc

SEQ ID NO: 109107 - DNA, 22 bp, synthetic construct
  misc_feature 1..22: note = chemically synthesized
  source 1..22: mol_type = other DNA
aacatccatcttcctggtttcc

SEQ ID NO: 109108 - DNA, 22 bp, synthetic construct
  misc_feature 1..22: note = chemically synthesized
  source 1..22: mol_type = other DNA
cctggtttccttccctttatcc

SEQ ID NO: 109109 - DNA, 22 bp, synthetic construct
  misc_feature 1..22: note = chemically synthesized
  source 1..22: mol_type = other DNA
ctggtttccttccctttatccc

SEQ ID NO: 109110 - DNA, 22 bp, synthetic construct
  misc_feature 1..22: note = chemically synthesized
  source 1..22: mol_type = other DNA
gtttccttccctttatccccag

SEQ ID NO: 109111 - DNA, 22 bp, synthetic construct
  misc_feature 1..22: note = chemically synthesized
  source 1..22: mol_type = other DNA
ccttccctttatccccagccat

SEQ ID NO: 109112 - DNA, 22 bp, synthetic construct
  misc_feature 1..22: note = chemically synthesized
  source 1..22: mol_type = other DNA
cttccctttatccccagccata

SEQ ID NO: 109113 - DNA, 22 bp, synthetic construct
  misc_feature 1..22: note = chemically synthesized
  source 1..22: mol_type = other DNA
ccctttatccccagccataggc

SEQ ID NO: 109114 - DNA, 22 bp, synthetic construct
  misc_feature 1..22: note = chemically synthesized
  source 1..22: mol_type = other DNA
cctttatccccagccataggct

SEQ ID NO: 109115 - DNA, 22 bp, synthetic construct
  misc_feature 1..22: note = chemically synthesized
  source 1..22: mol_type = other DNA
tatccccagccataggcttctg

SEQ ID NO: 109116 - DNA, 22 bp, synthetic construct
  misc_feature 1..22: note = chemically synthesized
  source 1..22: mol_type = other DNA
atccccagccataggcttctga

SEQ ID NO: 109117 - DNA, 22 bp, synthetic construct
  misc_feature 1..22: note = chemically synthesized
  source 1..22: mol_type = other DNA
tccccagccataggcttctgaa

SEQ ID NO: 109118 - DNA, 22 bp, synthetic construct
  misc_feature 1..22: note = chemically synthesized
  source 1..22: mol_type = other DNA
ctgaatctgttctccccaatac

SEQ ID NO: 109119 - DNA, 22 bp, synthetic construct
  misc_feature 1..22: note = chemically synthesized
  source 1..22: mol_type = other DNA
tgaatctgttctccccaatact

SEQ ID NO: 109120 - DNA, 22 bp, synthetic construct
  misc_feature 1..22: note = chemically synthesized
  source 1..22: mol_type = other DNA
aatctgttctccccaatactga

SEQ ID NO: 109121 - DNA, 22 bp, synthetic construct
  misc_feature 1..22: note = chemically synthesized
  source 1..22: mol_type = other DNA
ttctccccaatactgagtgaga

SEQ ID NO: 109122 - DNA, 22 bp, synthetic construct
  misc_feature 1..22: note = chemically synthesized
  source 1..22: mol_type = other DNA
tccccaatactgagtgagagct

SEQ ID NO: 109123 - DNA, 22 bp, synthetic construct
  misc_feature 1..22: note = chemically synthesized
  source 1..22: mol_type = other DNA
cccaatactgagtgagagctat

SEQ ID NO: 109124 - DNA, 22 bp, synthetic construct
  misc_feature 1..22: note = chemically synthesized
  source 1..22: mol_type = other DNA
agtgagagctatttccctgctt

SEQ ID NO: 109125 - DNA, 22 bp, synthetic construct
  misc_feature 1..22: note = chemically synthesized
  source 1..22: mol_type = other DNA
tttccctgcttaaacgtggtgc

SEQ ID NO: 109126 - DNA, 22 bp, synthetic construct
  misc_feature 1..22: note = chemically synthesized
  source 1..22: mol_type = other DNA
ccctgcttaaacgtggtgctgt

SEQ ID NO: 109127 - DNA, 22 bp, synthetic construct
  misc_feature 1..22: note = chemically synthesized
  source 1..22: mol_type = other DNA
cctgcttaaacgtggtgctgtc

SEQ ID NO: 109128 - DNA, 22 bp, synthetic construct
  misc_feature 1..22: note = chemically synthesized
  source 1..22: mol_type = other DNA
cttaaacgtggtgctgtctttt

SEQ ID NO: 109129 - DNA, 22 bp, synthetic construct
  misc_feature 1..22: note = chemically synthesized
  source 1..22: mol_type = other DNA
aaacgtggtgctgtcttttact

SEQ ID NO: 109130 - DNA, 22 bp, synthetic construct
  misc_feature 1..22: note = chemically synthesized
  source 1..22: mol_type = other DNA
aacgtggtgctgtcttttactg

SEQ ID NO: 109131 - DNA, 22 bp, synthetic construct
  misc_feature 1..22: note = chemically synthesized
  source 1..22: mol_type = other DNA
tcttttactgaagagaagagat

SEQ ID NO: 109132 - DNA, 22 bp, synthetic construct
  misc_feature 1..22: note = chemically synthesized
  source 1..22: mol_type = other DNA
ttactgaagagaagagattagt

SEQ ID NO: 109133 - DNA, 22 bp, synthetic construct
  misc_feature 1..22: note = chemically synthesized
  source 1..22: mol_type = other DNA
tactgaagagaagagattagtc

SEQ ID NO: 109134 - DNA, 22 bp, synthetic construct
  misc_feature 1..22: note = chemically synthesized
  source 1..22: mol_type = other DNA
actgaagagaagagattagtcc

SEQ ID NO: 109135 - DNA, 22 bp, synthetic construct
  misc_feature 1..22: note = chemically synthesized
  source 1..22: mol_type = other DNA
ctgaagagaagagattagtcct

SEQ ID NO: 109136 - DNA, 22 bp, synthetic construct
  misc_feature 1..22: note = chemically synthesized
  source 1..22: mol_type = other DNA
aagagaagagattagtcctttg

SEQ ID NO: 109137 - DNA, 22 bp, synthetic construct
  misc_feature 1..22: note = chemically synthesized
  source 1..22: mol_type = other DNA
gtcctttgagaaggttttaata

SEQ ID NO: 109138 - DNA, 22 bp, synthetic construct
  misc_feature 1..22: note = chemically synthesized
  source 1..22: mol_type = other DNA
tgagaaggttttaatattcctt

SEQ ID NO: 109139 - DNA, 22 bp, synthetic construct
  misc_feature 1..22: note = chemically synthesized
  source 1..22: mol_type = other DNA
gagaaggttttaatattccttc

SEQ ID NO: 109140 - DNA, 22 bp, synthetic construct
  misc_feature 1..22: note = chemically synthesized
  source 1..22: mol_type = other DNA
agaaggttttaatattccttct

SEQ ID NO: 109141 - DNA, 22 bp, synthetic construct
  misc_feature 1..22: note = chemically synthesized
  source 1..22: mol_type = other DNA
taatattccttctgccactaga

SEQ ID NO: 109142 - DNA, 22 bp, synthetic construct
  misc_feature 1..22: note = chemically synthesized
  source 1..22: mol_type = other DNA
aatattccttctgccactagac

SEQ ID NO: 109143 - DNA, 22 bp, synthetic construct
  misc_feature 1..22: note = chemically synthesized
  source 1..22: mol_type = other DNA
atattccttctgccactagact

SEQ ID NO: 109144 - DNA, 22 bp, synthetic construct
  misc_feature 1..22: note = chemically synthesized
  source 1..22: mol_type = other DNA
cttctgccactagactaggggc

SEQ ID NO: 109145 - DNA, 22 bp, synthetic construct
  misc_feature 1..22: note = chemically synthesized
  source 1..22: mol_type = other DNA
ctgccactagactaggggcttc

SEQ ID NO: 109146 - DNA, 22 bp, synthetic construct
  misc_feature 1..22: note = chemically synthesized
  source 1..22: mol_type = other DNA
tgccactagactaggggcttct

SEQ ID NO: 109147 - DNA, 22 bp, synthetic construct
  misc_feature 1..22: note = chemically synthesized
  source 1..22: mol_type = other DNA
ccactagactaggggcttcttg

SEQ ID NO: 109148 - DNA, 22 bp, synthetic construct
  misc_feature 1..22: note = chemically synthesized
  source 1..22: mol_type = other DNA
gactaggggcttcttgcatata

SEQ ID NO: 109149 - DNA, 22 bp, synthetic construct
  misc_feature 1..22: note = chemically synthesized
  source 1..22: mol_type = other DNA
ggggcttcttgcatatagacat

SEQ ID NO: 109150 - DNA, 22 bp, synthetic construct
  misc_feature 1..22: note = chemically synthesized
  source 1..22: mol_type = other DNA
cttgcatatagacatggtgttt

SEQ ID NO: 109151 - DNA, 22 bp, synthetic construct
  misc_feature 1..22: note = chemically synthesized
  source 1..22: mol_type = other DNA
ttgcatatagacatggtgttta

SEQ ID NO: 109152 - DNA, 22 bp, synthetic construct
  misc_feature 1..22: note = chemically synthesized
  source 1..22: mol_type = other DNA
gcatatagacatggtgtttatt

SEQ ID NO: 109153 - DNA, 22 bp, synthetic construct
  misc_feature 1..22: note = chemically synthesized
  source 1..22: mol_type = other DNA
catatagacatggtgtttattt

SEQ ID NO: 109154 - DNA, 22 bp, synthetic construct
  misc_feature 1..22: note = chemically synthesized
  source 1..22: mol_type = other DNA
atttgctttgctcaacaccttg

SEQ ID NO: 109155 - DNA, 22 bp, synthetic construct
  misc_feature 1..22: note = chemically synthesized
  source 1..22: mol_type = other DNA
tttgctttgctcaacaccttgc

SEQ ID NO: 109156 - DNA, 22 bp, synthetic construct
  misc_feature 1..22: note = chemically synthesized
  source 1..22: mol_type = other DNA
gctttgctcaacaccttgcaaa

SEQ ID NO: 109157 - DNA, 22 bp, synthetic construct
  misc_feature 1..22: note = chemically synthesized
  source 1..22: mol_type = other DNA
ctttgctcaacaccttgcaaag

SEQ ID NO: 109158 - DNA, 22 bp, synthetic construct
  misc_feature 1..22: note = chemically synthesized
  source 1..22: mol_type = other DNA
tgctcaacaccttgcaaagtat

SEQ ID NO: 109159 - DNA, 22 bp, synthetic construct
  misc_feature 1..22: note = chemically synthesized
  source 1..22: mol_type = other DNA
gctcaacaccttgcaaagtatc

SEQ ID NO: 109160 - DNA, 22 bp, synthetic construct
  misc_feature 1..22: note = chemically synthesized
  source 1..22: mol_type = other DNA
ctcaacaccttgcaaagtatct

SEQ ID NO: 109161 - DNA, 22 bp, synthetic construct
  misc_feature 1..22: note = chemically synthesized
  source 1..22: mol_type = other DNA
aacaccttgcaaagtatctaac

SEQ ID NO: 109162 - DNA, 22 bp, synthetic construct
  misc_feature 1..22: note = chemically synthesized
  source 1..22: mol_type = other DNA
gcaaagtatctaacatgtgact

SEQ ID NO: 109163 - DNA, 22 bp, synthetic construct
  misc_feature 1..22: note = chemically synthesized
  source 1..22: mol_type = other DNA
caaagtatctaacatgtgactg

SEQ ID NO: 109164 - DNA, 22 bp, synthetic construct
  misc_feature 1..22: note = chemically synthesized
  source 1..22: mol_type = other DNA
acatgtgactgataaacatttc

SEQ ID NO: 109165 - DNA, 22 bp, synthetic construct
  misc_feature 1..22: note = chemically synthesized
  source 1..22: mol_type = other DNA
ataaacatttcttagttcacct

SEQ ID NO: 109166 - DNA, 22 bp, synthetic construct
  misc_feature 1..22: note = chemically synthesized
  source 1..22: mol_type = other DNA
cttagttcacctaatatttgtg

SEQ ID NO: 109167 - DNA, 22 bp, synthetic construct
  misc_feature 1..22: note = chemically synthesized
  source 1..22: mol_type = other DNA
ttagttcacctaatatttgtga

SEQ ID NO: 109168 - DNA, 22 bp, synthetic construct
  misc_feature 1..22: note = chemically synthesized
  source 1..22: mol_type = other DNA
agttcacctaatatttgtgaac

SEQ ID NO: 109169 - DNA, 22 bp, synthetic construct
  misc_feature 1..22: note = chemically synthesized
  source 1..22: mol_type = other DNA
gttcacctaatatttgtgaaca

SEQ ID NO: 109170 - DNA, 22 bp, synthetic construct
  misc_feature 1..22: note = chemically synthesized
  source 1..22: mol_type = other DNA
acctaatatttgtgaacacgca

SEQ ID NO: 109171 - DNA, 22 bp, synthetic construct
  misc_feature 1..22: note = chemically synthesized
  source 1..22: mol_type = other DNA
atatttgtgaacacgcatcatg

SEQ ID NO: 109172 - DNA, 22 bp, synthetic construct
  misc_feature 1..22: note = chemically synthesized
  source 1..22: mol_type = other DNA
gtgaacacgcatcatgtgacag

SEQ ID NO: 109173 - DNA, 22 bp, synthetic construct
  misc_feature 1..22: note = chemically synthesized
  source 1..22: mol_type = other DNA
tgaacacgcatcatgtgacagc

SEQ ID NO: 109174 - DNA, 22 bp, synthetic construct
  misc_feature 1..22: note = chemically synthesized
  source 1..22: mol_type = other DNA
aaagctctctggaattaaatgg

SEQ ID NO: 109175 - DNA, 22 bp, synthetic construct
  misc_feature 1..22: note = chemically synthesized
  source 1..22: mol_type = other DNA
aagctctctggaattaaatggt

SEQ ID NO: 109176 - DNA, 22 bp, synthetic construct
  misc_feature 1..22: note = chemically synthesized
  source 1..22: mol_type = other DNA
tctggaattaaatggtaataag

SEQ ID NO: 109177 - DNA, 22 bp, synthetic construct
  misc_feature 1..22: note = chemically synthesized
  source 1..22: mol_type = other DNA
tggaattaaatggtaataagac

SEQ ID NO: 109178 - DNA, 22 bp, synthetic construct
  misc_feature 1..22: note = chemically synthesized
  source 1..22: mol_type = other DNA
gaattaaatggtaataagacaa

SEQ ID NO: 109179 - DNA, 22 bp, synthetic construct
  misc_feature 1..22: note = chemically synthesized
  source 1..22: mol_type = other DNA
aatggtaataagacaaagtccc

SEQ ID NO: 109180 - DNA, 22 bp, synthetic construct
  misc_feature 1..22: note = chemically synthesized
  source 1..22: mol_type = other DNA
atcttataaaccataaattaag

SEQ ID NO: 109181 - DNA, 22 bp, synthetic construct
  misc_feature 1..22: note = chemically synthesized
  source 1..22: mol_type = other DNA
ataaaccataaattaagttgaa

SEQ ID NO: 109182 - DNA, 22 bp, synthetic construct
  misc_feature 1..22: note = chemically synthesized
  source 1..22: mol_type = other DNA
taaaccataaattaagttgaaa

SEQ ID NO: 109183 - DNA, 22 bp, synthetic construct
  misc_feature 1..22: note = chemically synthesized
  source 1..22: mol_type = other DNA
agttgaaaaataaataagacaa

SEQ ID NO: 109184 - DNA, 22 bp, synthetic construct
  misc_feature 1..22: note = chemically synthesized
  source 1..22: mol_type = other DNA
aaaaataaataagacaatttta

SEQ ID NO: 109185 - DNA, 22 bp, synthetic construct
  misc_feature 1..22: note = chemically synthesized
  source 1..22: mol_type = other DNA
taaacaaatataaatgcaagtt

SEQ ID NO: 109186 - DNA, 22 bp, synthetic construct
  misc_feature 1..22: note = chemically synthesized
  source 1..22: mol_type = other DNA
aaacaaatataaatgcaagttt

SEQ ID NO: 109187 - DNA, 22 bp, synthetic construct
  misc_feature 1..22: note = chemically synthesized
  source 1..22: mol_type = other DNA
aacaaatataaatgcaagttta

SEQ ID NO: 109188 - DNA, 22 bp, synthetic construct
  misc_feature 1..22: note = chemically synthesized
  source 1..22: mol_type = other DNA
aacataaaacagtactacttga

SEQ ID NO: 109189 - DNA, 22 bp, synthetic construct
  misc_feature 1..22: note = chemically synthesized
  source 1..22: mol_type = other DNA
acataaaacagtactacttgat

SEQ ID NO: 109190 - DNA, 22 bp, synthetic construct
  misc_feature 1..22: note = chemically synthesized
  source 1..22: mol_type = other DNA
cttgatgtagattaattggatg

SEQ ID NO: 109191 - DNA, 22 bp, synthetic construct
  misc_feature 1..22: note = chemically synthesized
  source 1..22: mol_type = other DNA
gatgtagattaattggatggta

SEQ ID NO: 109192 - DNA, 22 bp, synthetic construct
  misc_feature 1..22: note = chemically synthesized
  source 1..22: mol_type = other DNA
atgtagattaattggatggtat

SEQ ID NO: 109193 - DNA, 22 bp, synthetic construct
  misc_feature 1..22: note = chemically synthesized
  source 1..22: mol_type = other DNA
attggatggtattgtatacaag

SEQ ID NO: 109194 - DNA, 22 bp, synthetic construct
  misc_feature 1..22: note = chemically synthesized
  source 1..22: mol_type = other DNA
gatggtattgtatacaagatag

SEQ ID NO: 109195 - DNA, 22 bp, synthetic construct
  misc_feature 1..22: note = chemically synthesized
  source 1..22: mol_type = other DNA
tatacaagatagtatagcagtt

SEQ ID NO: 109196 - DNA, 22 bp, synthetic construct
  misc_feature 1..22: note = chemically synthesized
  source 1..22: mol_type = other DNA
gaggggcctagaactgcaccta

SEQ ID NO: 109197 - DNA, 22 bp, synthetic construct
  misc_feature 1..22: note = chemically synthesized
  source 1..22: mol_type = other DNA
aggggcctagaactgcacctat

SEQ ID NO: 109198 - DNA, 22 bp, synthetic construct
  misc_feature 1..22: note = chemically synthesized
  source 1..22: mol_type = other DNA
gaactgcacctatgaggaggtc

SEQ ID NO: 109199 - DNA, 22 bp, synthetic construct
  misc_feature 1..22: note = chemically synthesized
  source 1..22: mol_type = other DNA
cacctatgaggaggtcccattt

SEQ ID NO: 109200 - DNA, 22 bp, synthetic construct
  misc_feature 1..22: note = chemically synthesized
  source 1..22: mol_type = other DNA
tgaggaggtcccatttgaactg

SEQ ID NO: 109201 - DNA, 22 bp, synthetic construct
  misc_feature 1..22: note = chemically synthesized
  source 1..22: mol_type = other DNA
gaactgagacctcaatacaaaa

SEQ ID NO: 109202 - DNA, 22 bp, synthetic construct
  misc_feature 1..22: note = chemically synthesized
  source 1..22: mol_type = other DNA
aactgagacctcaatacaaaag

SEQ ID NO: 109203 - DNA, 22 bp, synthetic construct
  misc_feature 1..22: note = chemically synthesized
  source 1..22: mol_type = other DNA
agacctcaatacaaaagaaaac

SEQ ID NO: 109204 - DNA, 22 bp, synthetic construct
  misc_feature 1..22: note = chemically synthesized
  source 1..22: mol_type = other DNA
aatacaaaagaaaacctgaccg

SEQ ID NO: 109205 - DNA, 22 bp, synthetic construct
  misc_feature 1..22: note = chemically synthesized
  source 1..22: mol_type = other DNA
accgtatacagacctagaggaa

SEQ ID NO: 109206 - DNA, 22 bp, synthetic construct
  misc_feature 1..22: note = chemically synthesized
  source 1..22: mol_type = other DNA
gaggaaaactgttccagaggga

SEQ ID NO: 109207 - DNA, 22 bp, synthetic construct
  misc_feature 1..22: note = chemically synthesized
  source 1..22: mol_type = other DNA
ttccagagggaaaatcagcatg

SEQ ID NO: 109208 - DNA, 22 bp, synthetic construct
  misc_feature 1..22: note = chemically synthesized
  source 1..22: mol_type = other DNA
cagagggaaaatcagcatgact

SEQ ID NO: 109209 - DNA, 22 bp, synthetic construct
  misc_feature 1..22: note = chemically synthesized
  source 1..22: mol_type = other DNA
gcatttgataagaaaacaggag

SEQ ID NO: 109210 - DNA, 22 bp, synthetic construct
  misc_feature 1..22: note = chemically synthesized
  source 1..22: mol_type = other DNA
gataagaaaacaggagagggac

SEQ ID NO: 109211 - DNA, 22 bp, synthetic construct
  misc_feature 1..22: note = chemically synthesized
  source 1..22: mol_type = other DNA
ataagaaaacaggagagggaca

SEQ ID NO: 109212 - DNA, 22 bp, synthetic construct
  misc_feature 1..22: note = chemically synthesized
  source 1..22: mol_type = other DNA
acagaccaccacggaatttttg

SEQ ID NO: 109213 - DNA, 22 bp, synthetic construct
  misc_feature 1..22: note = chemically synthesized
  source 1..22: mol_type = other DNA
cagaccaccacggaatttttgt

SEQ ID NO: 109214 - DNA, 22 bp, synthetic construct
  misc_feature 1..22: note = chemically synthesized
  source 1..22: mol_type = other DNA
ttgttttgttttgttttcttct

SEQ ID NO: 109215 - DNA, 22 bp, synthetic construct
  misc_feature 1..22: note = chemically synthesized
  source 1..22: mol_type = other DNA
tgttttgttttgttttcttctt

SEQ ID NO: 109216 - DNA, 22 bp, synthetic construct
  misc_feature 1..22: note = chemically synthesized
  source 1..22: mol_type = other DNA
gttttgttttgttttcttctta

SEQ ID NO: 109217 - DNA, 22 bp, synthetic construct
  misc_feature 1..22: note = chemically synthesized
  source 1..22: mol_type = other DNA
ttttgttttgttttcttcttac

SEQ ID NO: 109218 - DNA, 22 bp, synthetic construct
  misc_feature 1..22: note = chemically synthesized
  source 1..22: mol_type = other DNA
tgttttgttttcttcttactat

SEQ ID NO: 109219 - DNA, 22 bp, synthetic construct
  misc_feature 1..22: note = chemically synthesized
  source 1..22: mol_type = other DNA
gttttgttttcttcttactata

SEQ ID NO: 109220 - DNA, 22 bp, synthetic construct
  misc_feature 1..22: note = chemically synthesized
  source 1..22: mol_type = other DNA
ttttgttttcttcttactataa

SEQ ID NO: 109221 - DNA, 22 bp, synthetic construct
  misc_feature 1..22: note = chemically synthesized
  source 1..22: mol_type = other DNA
tgttttcttcttactataaatg

SEQ ID NO: 109222 - DNA, 22 bp, synthetic construct
  misc_feature 1..22: note = chemically synthesized
  source 1..22: mol_type = other DNA
gttttcttcttactataaatgt

SEQ ID NO: 109223 - DNA, 22 bp, synthetic construct
  misc_feature 1..22: note = chemically synthesized
  source 1..22: mol_type = other DNA
ttttcttcttactataaatgta

SEQ ID NO: 109224 - DNA, 22 bp, synthetic construct
  misc_feature 1..22: note = chemically synthesized
  source 1..22: mol_type = other DNA
tcttcttactataaatgtagta

SEQ ID NO: 109225 - DNA, 22 bp, synthetic construct
  misc_feature 1..22: note = chemically synthesized
  source 1..22: mol_type = other DNA
cttcttactataaatgtagtaa

SEQ ID NO: 109226 - DNA, 22 bp, synthetic construct
  misc_feature 1..22: note = chemically synthesized
  source 1..22: mol_type = other DNA
ttcttactataaatgtagtaaa

SEQ ID NO: 109227 - DNA, 22 bp, synthetic construct
  misc_feature 1..22: note = chemically synthesized
  source 1..22: mol_type = other DNA
cttactataaatgtagtaaaga

SEQ ID NO: 109228 - DNA, 22 bp, synthetic construct
  misc_feature 1..22: note = chemically synthesized
  source 1..22: mol_type = other DNA
ttactataaatgtagtaaagac

SEQ ID NO: 109229 - DNA, 22 bp, synthetic construct
  misc_feature 1..22: note = chemically synthesized
  source 1..22: mol_type = other DNA
actataaatgtagtaaagacat

SEQ ID NO: 109230 - DNA, 22 bp, synthetic construct
  misc_feature 1..22: note = chemically synthesized
  source 1..22: mol_type = other DNA
ctataaatgtagtaaagacatt

SEQ ID NO: 109231 - DNA, 22 bp, synthetic construct
  misc_feature 1..22: note = chemically synthesized
  source 1..22: mol_type = other DNA
taaatgtagtaaagacattagg

SEQ ID NO: 109232 - DNA, 22 bp, synthetic construct
  misc_feature 1..22: note = chemically synthesized
  source 1..22: mol_type = other DNA
ggacactttgaaaatcacaatg

SEQ ID NO: 109233 - DNA, 22 bp, synthetic construct
  misc_feature 1..22: note = chemically synthesized
  source 1..22: mol_type = other DNA
tgaaaatcacaatggaaaatag

SEQ ID NO: 109234 - DNA, 22 bp, synthetic construct
  misc_feature 1..22: note = chemically synthesized
  source 1..22: mol_type = other DNA
gaaaatcacaatggaaaatagt

SEQ ID NO: 109235 - DNA, 22 bp, synthetic construct
  misc_feature 1..22: note = chemically synthesized
  source 1..22: mol_type = other DNA
aaaatcacaatggaaaatagtg

SEQ ID NO: 109236 - DNA, 22 bp, synthetic construct
  misc_feature 1..22: note = chemically synthesized
  source 1..22: mol_type = other DNA
tgatttgtatttttaaattact

SEQ ID NO: 109237 - DNA, 22 bp, synthetic construct
  misc_feature 1..22: note = chemically synthesized
  source 1..22: mol_type = other DNA
atttgtatttttaaattactca

SEQ ID NO: 109238 - DNA, 22 bp, synthetic construct
  misc_feature 1..22: note = chemically synthesized
  source 1..22: mol_type = other DNA
gtatttttaaattactcactta

SEQ ID NO: 109239 - DNA, 22 bp, synthetic construct
  misc_feature 1..22: note = chemically synthesized
  source 1..22: mol_type = other DNA
tatttttaaattactcacttag

SEQ ID NO: 109240 - DNA, 22 bp, synthetic construct
  misc_feature 1..22: note = chemically synthesized
  source 1..22: mol_type = other DNA
ttaaattactcacttagactgc

SEQ ID NO: 109241 - DNA, 22 bp, synthetic construct
  misc_feature 1..22: note = chemically synthesized
  source 1..22: mol_type = other DNA
taaattactcacttagactgct

SEQ ID NO: 109242 - DNA, 22 bp, synthetic construct
  misc_feature 1..22: note = chemically synthesized
  source 1..22: mol_type = other DNA
aaattactcacttagactgcta

SEQ ID NO: 109243 - DNA, 22 bp, synthetic construct
  misc_feature 1..22: note = chemically synthesized
  source 1..22: mol_type = other DNA
aattactcacttagactgctat

SEQ ID NO: 109244 - DNA, 22 bp, synthetic construct
  misc_feature 1..22: note = chemically synthesized
  source 1..22: mol_type = other DNA
ctcacttagactgctatgtgaa

SEQ ID NO: 109245 - DNA, 22 bp, synthetic construct
  misc_feature 1..22: note = chemically synthesized
  source 1..22: mol_type = other DNA
acttagactgctatgtgaagaa

SEQ ID NO: 109246 - DNA, 22 bp, synthetic construct
  misc_feature 1..22: note = chemically synthesized
  source 1..22: mol_type = other DNA
agactgctatgtgaagaagact

SEQ ID NO: 109247 - DNA, 22 bp, synthetic construct
  misc_feature 1..22: note = chemically synthesized
  source 1..22: mol_type = other DNA
gactgctatgtgaagaagacta

SEQ ID NO: 109248 - DNA, 22 bp, synthetic construct
  misc_feature 1..22: note = chemically synthesized
  source 1..22: mol_type = other DNA
ctatgtgaagaagactaagcaa

SEQ ID NO: 109249 - DNA, 22 bp, synthetic construct
  misc_feature 1..22: note = chemically synthesized
  source 1..22: mol_type = other DNA
tgtgaagaagactaagcaagag

SEQ ID NO: 109250 - DNA, 22 bp, synthetic construct
  misc_feature 1..22: note = chemically synthesized
  source 1..22: mol_type = other DNA
agcaagagacaagaaaagagat

SEQ ID NO: 109251 - DNA, 22 bp, synthetic construct
  misc_feature 1..22: note = chemically synthesized
  source 1..22: mol_type = other DNA
gaaagctattttaaaaatccat

SEQ ID NO: 109252 - DNA, 22 bp, synthetic construct
  misc_feature 1..22: note = chemically synthesized
  source 1..22: mol_type = other DNA
ttttaaaaatccatatgaagag

SEQ ID NO: 109253 - DNA, 22 bp, synthetic construct
  misc_feature 1..22: note = chemically synthesized
  source 1..22: mol_type = other DNA
taaaaatccatatgaagagtca

SEQ ID NO: 109254 - DNA, 22 bp, synthetic construct
  misc_feature 1..22: note = chemically synthesized
  source 1..22: mol_type = other DNA
aaaaatccatatgaagagtcat

SEQ ID NO: 109255 - DNA, 22 bp, synthetic construct
  misc_feature 1..22: note = chemically synthesized
  source 1..22: mol_type = other DNA
aaaatccatatgaagagtcatg

SEQ ID NO: 109256 - DNA, 22 bp, synthetic construct
  misc_feature 1..22: note = chemically synthesized
  source 1..22: mol_type = other DNA
gactaggagagaagcaggggaa

SEQ ID NO: 109257 - DNA, 22 bp, synthetic construct
  misc_feature 1..22: note = chemically synthesized
  source 1..22: mol_type = other DNA
actaggagagaagcaggggaaa

SEQ ID NO: 109258 - DNA, 22 bp, synthetic construct
  misc_feature 1..22: note = chemically synthesized
  source 1..22: mol_type = other DNA
ggagagaagcaggggaaatgaa

SEQ ID NO: 109259 - DNA, 22 bp, synthetic construct
  misc_feature 1..22: note = chemically synthesized
  source 1..22: mol_type = other DNA
aaacagagacagatgcattttt

SEQ ID NO: 109260 - DNA, 22 bp, synthetic construct
  misc_feature 1..22: note = chemically synthesized
  source 1..22: mol_type = other DNA
aacagagacagatgcatttttg

SEQ ID NO: 109261 - DNA, 22 bp, synthetic construct
  misc_feature 1..22: note = chemically synthesized
  source 1..22: mol_type = other DNA
ttgaagtagtgccaagatttgc

SEQ ID NO: 109262 - DNA, 22 bp, synthetic construct
  misc_feature 1..22: note = chemically synthesized
  source 1..22: mol_type = other DNA
tgaagtagtgccaagatttgct

SEQ ID NO: 109263 - DNA, 22 bp, synthetic construct
  misc_feature 1..22: note = chemically synthesized
  source 1..22: mol_type = other DNA
gaagtagtgccaagatttgctg

SEQ ID NO: 109264 - DNA, 22 bp, synthetic construct
  misc_feature 1..22: note = chemically synthesized
  source 1..22: mol_type = other DNA
aagtagtgccaagatttgctga

SEQ ID NO: 109265 - DNA, 22 bp, synthetic construct
  misc_feature 1..22: note = chemically synthesized
  source 1..22: mol_type = other DNA
gctgatatattaaaaatgggag

SEQ ID NO: 109266 - DNA, 22 bp, synthetic construct
  misc_feature 1..22: note = chemically synthesized
  source 1..22: mol_type = other DNA
ctgatatattaaaaatgggagt

SEQ ID NO: 109267 - DNA, 22 bp, synthetic construct
  misc_feature 1..22: note = chemically synthesized
  source 1..22: mol_type = other DNA
atatattaaaaatgggagtgag

SEQ ID NO: 109268 - DNA, 22 bp, synthetic construct
  misc_feature 1..22: note = chemically synthesized
  source 1..22: mol_type = other DNA
aaaatgggagtgagggaaaaat

SEQ ID NO: 109269 - DNA, 22 bp, synthetic construct
  misc_feature 1..22: note = chemically synthesized
  source 1..22: mol_type = other DNA
cccctagatttctgtttgaaca

SEQ ID NO: 109270 - DNA, 22 bp, synthetic construct
  misc_feature 1..22: note = chemically synthesized
  source 1..22: mol_type = other DNA
ccctagatttctgtttgaacaa

SEQ ID NO: 109271 - DNA, 22 bp, synthetic construct
  misc_feature 1..22: note = chemically synthesized
  source 1..22: mol_type = other DNA
gatttctgtttgaacaaatgaa

SEQ ID NO: 109272 - DNA, 22 bp, synthetic construct
  misc_feature 1..22: note = chemically synthesized
  source 1..22: mol_type = other DNA
ctgtttgaacaaatgaaagaat

SEQ ID NO: 109273 - DNA, 22 bp, synthetic construct
  misc_feature 1..22: note = chemically synthesized
  source 1..22: mol_type = other DNA
tgtttgaacaaatgaaagaatg

SEQ ID NO: 109274 - DNA, 22 bp, synthetic construct
  misc_feature 1..22: note = chemically synthesized
  source 1..22: mol_type = other DNA
tttgaacaaatgaaagaatggt

SEQ ID NO: 109275 - DNA, 22 bp, synthetic construct
  misc_feature 1..22: note = chemically synthesized
  source 1..22: mol_type = other DNA
gaacaaatgaaagaatggtgaa

SEQ ID NO: 109276 - DNA, 22 bp, synthetic construct
  misc_feature 1..22: note = chemically synthesized
  source 1..22: mol_type = other DNA
aacaaatgaaagaatggtgaag

SEQ ID NO: 109277 - DNA, 22 bp, synthetic construct
  misc_feature 1..22: note = chemically synthesized
  source 1..22: mol_type = other DNA
actcaaaatggaagtctgaggg

SEQ ID NO: 109278 - DNA, 22 bp, synthetic construct
  misc_feature 1..22: note = chemically synthesized
  source 1..22: mol_type = other DNA
ctcaaaatggaagtctgagggg

SEQ ID NO: 109279 - DNA, 22 bp, synthetic construct
  misc_feature 1..22: note = chemically synthesized
  source 1..22: mol_type = other DNA
aaaatggaagtctgagggggat

SEQ ID NO: 109280 - DNA, 22 bp, synthetic construct
  misc_feature 1..22: note = chemically synthesized
  source 1..22: mol_type = other DNA
agggggatacatattcacttgt

SEQ ID NO: 109281 - DNA, 22 bp, synthetic construct
  misc_feature 1..22: note = chemically synthesized
  source 1..22: mol_type = other DNA
acttgtgaggaaatcaagagtc

SEQ ID NO: 109282 - DNA, 22 bp, synthetic construct
  misc_feature 1..22: note = chemically synthesized
  source 1..22: mol_type = other DNA
gtgaggaaatcaagagtcatta

SEQ ID NO: 109283 - DNA, 22 bp, synthetic construct
  misc_feature 1..22: note = chemically synthesized
  source 1..22: mol_type = other DNA
tgaggaaatcaagagtcattag

SEQ ID NO: 109284 - DNA, 22 bp, synthetic construct
  misc_feature 1..22: note = chemically synthesized
  source 1..22: mol_type = other DNA
gtaaatatagctgaattagagc

SEQ ID NO: 109285 - DNA, 22 bp, synthetic construct
  misc_feature 1..22: note = chemically synthesized
  source 1..22: mol_type = other DNA
aattagagcaaatgcatccctt

SEQ ID NO: 109286 - DNA, 22 bp, synthetic construct
  misc_feature 1..22: note = chemically synthesized
  source 1..22: mol_type = other DNA
gagcaaatgcatcccttgcttt

SEQ ID NO: 109287 - DNA, 22 bp, synthetic construct
  misc_feature 1..22: note = chemically synthesized
  source 1..22: mol_type = other DNA
gcttttttttcttgtcacatgc

SEQ ID NO: 109288 - DNA, 22 bp, synthetic construct
  misc_feature 1..22: note = chemically synthesized
  source 1..22: mol_type = other DNA
cttttttttcttgtcacatgcc

SEQ ID NO: 109289 - DNA, 22 bp, synthetic construct
  misc_feature 1..22: note = chemically synthesized
  source 1..22: mol_type = other DNA
ttttttcttgtcacatgccaga

SEQ ID NO: 109290 - DNA, 22 bp, synthetic construct
  misc_feature 1..22: note = chemically synthesized
  source 1..22: mol_type = other DNA
tttttcttgtcacatgccagaa

SEQ ID NO: 109291 - DNA, 22 bp, synthetic construct
  misc_feature 1..22: note = chemically synthesized
  source 1..22: mol_type = other DNA
ttttcttgtcacatgccagaac

SEQ ID NO: 109292 - DNA, 22 bp, synthetic construct
  misc_feature 1..22: note = chemically synthesized
  source 1..22: mol_type = other DNA
tttcttgtcacatgccagaaca

SEQ ID NO: 109293 - DNA, 22 bp, synthetic construct
  misc_feature 1..22: note = chemically synthesized
  source 1..22: mol_type = other DNA
ttcttgtcacatgccagaacaa

SEQ ID NO: 109294 - DNA, 22 bp, synthetic construct
  misc_feature 1..22: note = chemically synthesized
  source 1..22: mol_type = other DNA
tcttgtcacatgccagaacaac

SEQ ID NO: 109295 - DNA, 22 bp, synthetic construct
  misc_feature 1..22: note = chemically synthesized
  source 1..22: mol_type = other DNA
cttgtcacatgccagaacaact

SEQ ID NO: 109296 - DNA, 22 bp, synthetic construct
  misc_feature 1..22: note = chemically synthesized
  source 1..22: mol_type = other DNA
ttgtcacatgccagaacaactt

SEQ ID NO: 109297 - DNA, 22 bp, synthetic construct
  misc_feature 1..22: note = chemically synthesized
  source 1..22: mol_type = other DNA
gtcacatgccagaacaacttct

SEQ ID NO: 109298 - DNA, 22 bp, synthetic construct
  misc_feature 1..22: note = chemically synthesized
  source 1..22: mol_type = other DNA
tcacatgccagaacaacttctt

SEQ ID NO: 109299 - DNA, 22 bp, synthetic construct
  misc_feature 1..22: note = chemically synthesized
  source 1..22: mol_type = other DNA
cttgaagttgtttttatcctaa

SEQ ID NO: 109300 - DNA, 22 bp, synthetic construct
  misc_feature 1..22: note = chemically synthesized
  source 1..22: mol_type = other DNA
ttgaagttgtttttatcctaag

SEQ ID NO: 109301 - DNA, 22 bp, synthetic construct
  misc_feature 1..22: note = chemically synthesized
  source 1..22: mol_type = other DNA
gaagttgtttttatcctaagtt

SEQ ID NO: 109302 - DNA, 22 bp, synthetic construct
  misc_feature 1..22: note = chemically synthesized
  source 1..22: mol_type = other DNA
aagttgtttttatcctaagtta

SEQ ID NO: 109303 - DNA, 22 bp, synthetic construct
  misc_feature 1..22: note = chemically synthesized
  source 1..22: mol_type = other DNA
tttttatcctaagttaaaaaga

SEQ ID NO: 109304 - DNA, 22 bp, synthetic construct
  misc_feature 1..22: note = chemically synthesized
  source 1..22: mol_type = other DNA
ttatcctaagttaaaaagatgg

SEQ ID NO: 109305 - DNA, 22 bp, synthetic construct
  misc_feature 1..22: note = chemically synthesized
  source 1..22: mol_type = other DNA
tatcctaagttaaaaagatggt

SEQ ID NO: 109306 - DNA, 22 bp, synthetic construct
  misc_feature 1..22: note = chemically synthesized
  source 1..22: mol_type = other DNA
atcctaagttaaaaagatggtc

SEQ ID NO: 109307 - DNA, 22 bp, synthetic construct
  misc_feature 1..22: note = chemically synthesized
  source 1..22: mol_type = other DNA
tcctaagttaaaaagatggtcg

SEQ ID NO: 109308 - DNA, 22 bp, synthetic construct
  misc_feature 1..22: note = chemically synthesized
  source 1..22: mol_type = other DNA
agttaaaaagatggtcgtatcc

SEQ ID NO: 109309 - DNA, 22 bp, synthetic construct
  misc_feature 1..22: note = chemically synthesized
  source 1..22: mol_type = other DNA
aaaagatggtcgtatccaaata

SEQ ID NO: 109310 - DNA, 22 bp, synthetic construct
  misc_feature 1..22: note = chemically synthesized
  source 1..22: mol_type = other DNA
cagagttactttgtcagtgtaa

SEQ ID NO: 109311 - DNA, 22 bp, synthetic construct
  misc_feature 1..22: note = chemically synthesized
  source 1..22: mol_type = other DNA
agagttactttgtcagtgtaag

SEQ ID NO: 109312 - DNA, 22 bp, synthetic construct
  misc_feature 1..22: note = chemically synthesized
  source 1..22: mol_type = other DNA
ctttgtcagtgtaaggcactac

SEQ ID NO: 109313 - DNA, 22 bp, synthetic construct
  misc_feature 1..22: note = chemically synthesized
  source 1..22: mol_type = other DNA
tgtcagtgtaaggcactaccct

SEQ ID NO: 109314 - DNA, 22 bp, synthetic construct
  misc_feature 1..22: note = chemically synthesized
  source 1..22: mol_type = other DNA
gtcagtgtaaggcactacccta

SEQ ID NO: 109315 - DNA, 22 bp, synthetic construct
  misc_feature 1..22: note = chemically synthesized
  source 1..22: mol_type = other DNA
tcagtgtaaggcactaccctaa

SEQ ID NO: 109316 - DNA, 22 bp, synthetic construct
  misc_feature 1..22: note = chemically synthesized
  source 1..22: mol_type = other DNA
ccctaaagatgccaccaaagga

SEQ ID NO: 109317 - DNA, 22 bp, synthetic construct
  misc_feature 1..22: note = chemically synthesized
  source 1..22: mol_type = other DNA
aagatgccaccaaaggaaacga

SEQ ID NO: 109318 - DNA, 22 bp, synthetic construct
  misc_feature 1..22: note = chemically synthesized
  source 1..22: mol_type = other DNA
ttaccttccacccatagagatg

SEQ ID NO: 109319 - DNA, 22 bp, synthetic construct
  misc_feature 1..22: note = chemically synthesized
  source 1..22: mol_type = other DNA
accttccacccatagagatgag

SEQ ID NO: 109320 - DNA, 22 bp, synthetic construct
  misc_feature 1..22: note = chemically synthesized
  source 1..22: mol_type = other DNA
ccttccacccatagagatgaga

SEQ ID NO: 109321 - DNA, 22 bp, synthetic construct
  misc_feature 1..22: note = chemically synthesized
  source 1..22: mol_type = other DNA
ccacccatagagatgagatcta

SEQ ID NO: 109322 - DNA, 22 bp, synthetic construct
  misc_feature 1..22: note = chemically synthesized
  source 1..22: mol_type = other DNA
cacccatagagatgagatctaa

SEQ ID NO: 109323 - DNA, 22 bp, synthetic construct
  misc_feature 1..22: note = chemically synthesized
  source 1..22: mol_type = other DNA
actgtaatagtttcagtgaaga

SEQ ID NO: 109324 - DNA, 22 bp, synthetic construct
  misc_feature 1..22: note = chemically synthesized
  source 1..22: mol_type = other DNA
taatagtttcagtgaagagatg

SEQ ID NO: 109325 - DNA, 22 bp, synthetic construct
  misc_feature 1..22: note = chemically synthesized
  source 1..22: mol_type = other DNA
cagtgaagagatgccagacaac

SEQ ID NO: 109326 - DNA, 22 bp, synthetic construct
  misc_feature 1..22: note = chemically synthesized
  source 1..22: mol_type = other DNA
agtgaagagatgccagacaact

SEQ ID NO: 109327 - DNA, 22 bp, synthetic construct
  misc_feature 1..22: note = chemically synthesized
  source 1..22: mol_type = other DNA
ggcgtgaggcaacaactcagca

SEQ ID NO: 109328 - DNA, 22 bp, synthetic construct
  misc_feature 1..22: note = chemically synthesized
  source 1..22: mol_type = other DNA
agcactttgaaagaatcatttt

SEQ ID NO: 109329 - DNA, 22 bp, synthetic construct
  misc_feature 1..22: note = chemically synthesized
  source 1..22: mol_type = other DNA
tgaaagaatcatttttcagcat

SEQ ID NO: 109330 - DNA, 22 bp, synthetic construct
  misc_feature 1..22: note = chemically synthesized
  source 1..22: mol_type = other DNA
gaaagaatcatttttcagcatc

SEQ ID NO: 109331 - DNA, 22 bp, synthetic construct
  misc_feature 1..22: note = chemically synthesized
  source 1..22: mol_type = other DNA
aaagaatcatttttcagcatcc

SEQ ID NO: 109332 - DNA, 22 bp, synthetic construct
  misc_feature 1..22: note = chemically synthesized
  source 1..22: mol_type = other DNA
ttcagcatccatattctgtcct

SEQ ID NO: 109333 - DNA, 22 bp, synthetic construct
  misc_feature 1..22: note = chemically synthesized
  source 1..22: mol_type = other DNA
tcagcatccatattctgtccta

SEQ ID NO: 109334 - DNA, 22 bp, synthetic construct
  misc_feature 1..22: note = chemically synthesized
  source 1..22: mol_type = other DNA
cagcatccatattctgtcctag

SEQ ID NO: 109335 - DNA, 22 bp, synthetic construct
  misc_feature 1..22: note = chemically synthesized
  source 1..22: mol_type = other DNA
agcatccatattctgtcctagg

SEQ ID NO: 109336 - DNA, 22 bp, synthetic construct
  misc_feature 1..22: note = chemically synthesized
  source 1..22: mol_type = other DNA
tgtcctaggactgagagacata

SEQ ID NO: 109337 - DNA, 22 bp, synthetic construct
  misc_feature 1..22: note = chemically synthesized
  source 1..22: mol_type = other DNA
tcctaggactgagagacataaa

SEQ ID NO: 109338 - DNA, 22 bp, synthetic construct
  misc_feature 1..22: note = chemically synthesized
  source 1..22: mol_type = other DNA
ggactgagagacataaaccaga

SEQ ID NO: 109339 - DNA, 22 bp, synthetic construct
  misc_feature 1..22: note = chemically synthesized
  source 1..22: mol_type = other DNA
agagacataaaccagaattcag

SEQ ID NO: 109340 - DNA, 22 bp, synthetic construct
  misc_feature 1..22: note = chemically synthesized
  source 1..22: mol_type = other DNA
agtgcctactgaacatacaatg

SEQ ID NO: 109341 - DNA, 22 bp, synthetic construct
  misc_feature 1..22: note = chemically synthesized
  source 1..22: mol_type = other DNA
ctgaacatacaatgagtgatgt

SEQ ID NO: 109342 - DNA, 22 bp, synthetic construct
  misc_feature 1..22: note = chemically synthesized
  source 1..22: mol_type = other DNA
aacatacaatgagtgatgtata

SEQ ID NO: 109343 - DNA, 22 bp, synthetic construct
  misc_feature 1..22: note = chemically synthesized
  source 1..22: mol_type = other DNA
ttcagttactagacgcaaagat

SEQ ID NO: 109344 - DNA, 22 bp, synthetic construct
  misc_feature 1..22: note = chemically synthesized
  source 1..22: mol_type = other DNA
cagttactagacgcaaagataa

SEQ ID NO: 109345 - DNA, 22 bp, synthetic construct
  misc_feature 1..22: note = chemically synthesized
  source 1..22: mol_type = other DNA
agttactagacgcaaagataat

SEQ ID NO: 109346 - DNA, 22 bp, synthetic construct
  misc_feature 1..22: note = chemically synthesized
  source 1..22: mol_type = other DNA
ctagacgcaaagataatccagc

SEQ ID NO: 109347 - DNA, 22 bp, synthetic construct
  misc_feature 1..22: note = chemically synthesized
  source 1..22: mol_type = other DNA
gacgcaaagataatccagctta

SEQ ID NO: 109348 - DNA, 22 bp, synthetic construct
  misc_feature 1..22: note = chemically synthesized
  source 1..22: mol_type = other DNA
agctcctccccttctgtgttct

SEQ ID NO: 109349 - DNA, 22 bp, synthetic construct
  misc_feature 1..22: note = chemically synthesized
  source 1..22: mol_type = other DNA
gctcctccccttctgtgttcta

SEQ ID NO: 109350 - DNA, 22 bp, synthetic construct
  misc_feature 1..22: note = chemically synthesized
  source 1..22: mol_type = other DNA
ctccccttctgtgttctatgta

SEQ ID NO: 109351 - DNA, 22 bp, synthetic construct
  misc_feature 1..22: note = chemically synthesized
  source 1..22: mol_type = other DNA
cccttctgtgttctatgtactt

SEQ ID NO: 109352 - DNA, 22 bp, synthetic construct
  misc_feature 1..22: note = chemically synthesized
  source 1..22: mol_type = other DNA
ctgtgttctatgtacttcattt

SEQ ID NO: 109353 - DNA, 22 bp, synthetic construct
  misc_feature 1..22: note = chemically synthesized
  source 1..22: mol_type = other DNA
tgtgttctatgtacttcatttc

SEQ ID NO: 109354 - DNA, 22 bp, synthetic construct
  misc_feature 1..22: note = chemically synthesized
  source 1..22: mol_type = other DNA
tgttctatgtacttcatttctc

SEQ ID NO: 109355 - DNA, 22 bp, synthetic construct
  misc_feature 1..22: note = chemically synthesized
  source 1..22: mol_type = other DNA
tatgtacttcatttctctgtca

SEQ ID NO: 109356 - DNA, 22 bp, synthetic construct
  misc_feature 1..22: note = chemically synthesized
  source 1..22: mol_type = other DNA
tgtacttcatttctctgtcaac

SEQ ID NO: 109357 - DNA, 22 bp, synthetic construct
  misc_feature 1..22: note = chemically synthesized
  source 1..22: mol_type = other DNA
catttctctgtcaacactctta

SEQ ID NO: 109358 - DNA, 22 bp, synthetic construct
  misc_feature 1..22: note = chemically synthesized
  source 1..22: mol_type = other DNA
atttctctgtcaacactcttac

SEQ ID NO: 109359 - DNA, 22 bp, synthetic construct
  misc_feature 1..22: note = chemically synthesized
  source 1..22: mol_type = other DNA
ctctgtcaacactcttacttct

SEQ ID NO: 109360 - DNA, 22 bp, synthetic construct
  misc_feature 1..22: note = chemically synthesized
  source 1..22: mol_type = other DNA
tctgtcaacactcttacttctc

SEQ ID NO: 109361 - DNA, 22 bp, synthetic construct
  misc_feature 1..22: note = chemically synthesized
  source 1..22: mol_type = other DNA
tgtcaacactcttacttctctg

SEQ ID NO: 109362 - DNA, 22 bp, synthetic construct
  misc_feature 1..22: note = chemically synthesized
  source 1..22: mol_type = other DNA
tcaacactcttacttctctgac

SEQ ID NO: 109363 - DNA, 22 bp, synthetic construct
  misc_feature 1..22: note = chemically synthesized
  source 1..22: mol_type = other DNA
ttacttctctgacgtttcagca

SEQ ID NO: 109364 - DNA, 22 bp, synthetic construct
  misc_feature 1..22: note = chemically synthesized
  source 1..22: mol_type = other DNA
acttctctgacgtttcagcaat

SEQ ID NO: 109365 - DNA, 22 bp, synthetic construct
  misc_feature 1..22: note = chemically synthesized
  source 1..22: mol_type = other DNA
cttctctgacgtttcagcaata

SEQ ID NO: 109366 - DNA, 22 bp, synthetic construct
  misc_feature 1..22: note = chemically synthesized
  source 1..22: mol_type = other DNA
ctctgacgtttcagcaataatc

SEQ ID NO: 109367 - DNA, 22 bp, synthetic construct
  misc_feature 1..22: note = chemically synthesized
  source 1..22: mol_type = other DNA
tctgacgtttcagcaataatct

SEQ ID NO: 109368 - DNA, 22 bp, synthetic construct
  misc_feature 1..22: note = chemically synthesized
  source 1..22: mol_type = other DNA
tgacgtttcagcaataatctcc

SEQ ID NO: 109369 - DNA, 22 bp, synthetic construct
  misc_feature 1..22: note = chemically synthesized
  source 1..22: mol_type = other DNA
acgtttcagcaataatctcctt

SEQ ID NO: 109370 - DNA, 22 bp, synthetic construct
  misc_feature 1..22: note = chemically synthesized
  source 1..22: mol_type = other DNA
cagcaataatctcctttaacct

SEQ ID NO: 109371 - DNA, 22 bp, synthetic construct
  misc_feature 1..22: note = chemically synthesized
  source 1..22: mol_type = other DNA
agcaataatctcctttaaccta

SEQ ID NO: 109372 - DNA, 22 bp, synthetic construct
  misc_feature 1..22: note = chemically synthesized
  source 1..22: mol_type = other DNA
ctttaacctaatctttcactgt

SEQ ID NO: 109373 - DNA, 22 bp, synthetic construct
  misc_feature 1..22: note = chemically synthesized
  source 1..22: mol_type = other DNA
taacctaatctttcactgtatc

SEQ ID NO: 109374 - DNA, 22 bp, synthetic construct
  misc_feature 1..22: note = chemically synthesized
  source 1..22: mol_type = other DNA
aacctaatctttcactgtatct

SEQ ID NO: 109375 - DNA, 22 bp, synthetic construct
  misc_feature 1..22: note = chemically synthesized
  source 1..22: mol_type = other DNA
acctaatctttcactgtatctc

SEQ ID NO: 109376 - DNA, 22 bp, synthetic construct
  misc_feature 1..22: note = chemically synthesized
  source 1..22: mol_type = other DNA
atctttcactgtatctcaactt

SEQ ID NO: 109377 - DNA, 22 bp, synthetic construct
  misc_feature 1..22: note = chemically synthesized
  source 1..22: mol_type = other DNA
tcactgtatctcaactttgtga

SEQ ID NO: 109378 - DNA, 22 bp, synthetic construct
  misc_feature 1..22: note = chemically synthesized
  source 1..22: mol_type = other DNA
cactgtatctcaactttgtgaa

SEQ ID NO: 109379 - DNA, 22 bp, synthetic construct
  misc_feature 1..22: note = chemically synthesized
  source 1..22: mol_type = other DNA
actgtatctcaactttgtgaaa

SEQ ID NO: 109380 - DNA, 22 bp, synthetic construct
  misc_feature 1..22: note = chemically synthesized
  source 1..22: mol_type = other DNA
tatctcaactttgtgaaaaatt

SEQ ID NO: 109381 - DNA, 22 bp, synthetic construct
  misc_feature 1..22: note = chemically synthesized
  source 1..22: mol_type = other DNA
aactttgtgaaaaattccttct

SEQ ID NO: 109382 - DNA, 22 bp, synthetic construct
  misc_feature 1..22: note = chemically synthesized
  source 1..22: mol_type = other DNA
tgtgaaaaattccttcttatca

SEQ ID NO: 109383 - DNA, 22 bp, synthetic construct
  misc_feature 1..22: note = chemically synthesized
  source 1..22: mol_type = other DNA
gtgaaaaattccttcttatcag

SEQ ID NO: 109384 - DNA, 22 bp, synthetic construct
  misc_feature 1..22: note = chemically synthesized
  source 1..22: mol_type = other DNA
tgaaaaattccttcttatcaga

SEQ ID NO: 109385 - DNA, 22 bp, synthetic construct
  misc_feature 1..22: note = chemically synthesized
  source 1..22: mol_type = other DNA
cttcttatcagagaatatgcag

SEQ ID NO: 109386 - DNA, 22 bp, synthetic construct
  misc_feature 1..22: note = chemically synthesized
  source 1..22: mol_type = other DNA
cttatcagagaatatgcagcac

SEQ ID NO: 109387 - DNA, 22 bp, synthetic construct
  misc_feature 1..22: note = chemically synthesized
  source 1..22: mol_type = other DNA
ttatcagagaatatgcagcaca

SEQ ID NO: 109388 - DNA, 22 bp, synthetic construct
  misc_feature 1..22: note = chemically synthesized
  source 1..22: mol_type = other DNA
atcagagaatatgcagcacaag

SEQ ID NO: 109389 - DNA, 22 bp, synthetic construct
  misc_feature 1..22: note = chemically synthesized
  source 1..22: mol_type = other DNA
tcagagaatatgcagcacaagt

SEQ ID NO: 109390 - DNA, 22 bp, synthetic construct
  misc_feature 1..22: note = chemically synthesized
  source 1..22: mol_type = other DNA
cagggaaagctaaccaaactgt

SEQ ID NO: 109391 - DNA, 22 bp, synthetic construct
  misc_feature 1..22: note = chemically synthesized
  source 1..22: mol_type = other DNA
accaaactgtaaggcaatgatt

SEQ ID NO: 109392 - DNA, 22 bp, synthetic construct
  misc_feature 1..22: note = chemically synthesized
  source 1..22: mol_type = other DNA
taaggcaatgattgtattttgc

SEQ ID NO: 109393 - DNA, 22 bp, synthetic construct
  misc_feature 1..22: note = chemically synthesized
  source 1..22: mol_type = other DNA
tattttgccaataataacctgc

SEQ ID NO: 109394 - DNA, 22 bp, synthetic construct
  misc_feature 1..22: note = chemically synthesized
  source 1..22: mol_type = other DNA
tgccaataataacctgcaactt

SEQ ID NO: 109395 - DNA, 22 bp, synthetic construct
  misc_feature 1..22: note = chemically synthesized
  source 1..22: mol_type = other DNA
gccaataataacctgcaactta

SEQ ID NO: 109396 - DNA, 22 bp, synthetic construct
  misc_feature 1..22: note = chemically synthesized
  source 1..22: mol_type = other DNA
ccaataataacctgcaacttaa

SEQ ID NO: 109397 - DNA, 22 bp, synthetic construct
  misc_feature 1..22: note = chemically synthesized
  source 1..22: mol_type = other DNA
caacttaaagtttcctccttct

SEQ ID NO: 109398 - DNA, 22 bp, synthetic construct
  misc_feature 1..22: note = chemically synthesized
  source 1..22: mol_type = other DNA
aaagtttcctccttctccattc

SEQ ID NO: 109399 - DNA, 22 bp, synthetic construct
  misc_feature 1..22: note = chemically synthesized
  source 1..22: mol_type = other DNA
aagtttcctccttctccattcc

SEQ ID NO: 109400 - DNA, 22 bp, synthetic construct
  misc_feature 1..22: note = chemically synthesized
  source 1..22: mol_type = other DNA
cctccttctccattcccaagaa

SEQ ID NO: 109401 - DNA, 22 bp, synthetic construct
  misc_feature 1..22: note = chemically synthesized
  source 1..22: mol_type = other DNA
ctccttctccattcccaagaat

SEQ ID NO: 109402 - DNA, 22 bp, synthetic construct
  misc_feature 1..22: note = chemically synthesized
  source 1..22: mol_type = other DNA
cttctccattcccaagaattcc

SEQ ID NO: 109403 - DNA, 22 bp, synthetic construct
  misc_feature 1..22: note = chemically synthesized
  source 1..22: mol_type = other DNA
ctccattcccaagaattccatg

SEQ ID NO: 109404 - DNA, 22 bp, synthetic construct
  misc_feature 1..22: note = chemically synthesized
  source 1..22: mol_type = other DNA
tccattcccaagaattccatgc

SEQ ID NO: 109405 - DNA, 22 bp, synthetic construct
  misc_feature 1..22: note = chemically synthesized
  source 1..22: mol_type = other DNA
cattcccaagaattccatgcag

SEQ ID NO: 109406 - DNA, 22 bp, synthetic construct
  misc_feature 1..22: note = chemically synthesized
  source 1..22: mol_type = other DNA
ccaagaattccatgcagacata

SEQ ID NO: 109407 - DNA, 22 bp, synthetic construct
  misc_feature 1..22: note = chemically synthesized
  source 1..22: mol_type = other DNA
catgcagacatacctggtaatg

SEQ ID NO: 109408 - DNA, 22 bp, synthetic construct
  misc_feature 1..22: note = chemically synthesized
  source 1..22: mol_type = other DNA
gtaatgcagctataatagtgat

SEQ ID NO: 109409 - DNA, 22 bp, synthetic construct
  misc_feature 1..22: note = chemically synthesized
  source 1..22: mol_type = other DNA
taatagtgatctatggaatcac

SEQ ID NO: 109410 - DNA, 22 bp, synthetic construct
  misc_feature 1..22: note = chemically synthesized
  source 1..22: mol_type = other DNA
tggaatcactctactttgtttt

SEQ ID NO: 109411 - DNA, 22 bp, synthetic construct
  misc_feature 1..22: note = chemically synthesized
  source 1..22: mol_type = other DNA
tactttgttttgtgaaaattct

SEQ ID NO: 109412 - DNA, 22 bp, synthetic construct
  misc_feature 1..22: note = chemically synthesized
  source 1..22: mol_type = other DNA
ctttgttttgtgaaaattcttg

SEQ ID NO: 109413 - DNA, 22 bp, synthetic construct
  misc_feature 1..22: note = chemically synthesized
  source 1..22: mol_type = other DNA
tgttttgtgaaaattcttgtgt

SEQ ID NO: 109414 - DNA, 22 bp, synthetic construct
  misc_feature 1..22: note = chemically synthesized
  source 1..22: mol_type = other DNA
gttttgtgaaaattcttgtgtc

SEQ ID NO: 109415 - DNA, 22 bp, synthetic construct
  misc_feature 1..22: note = chemically synthesized
  source 1..22: mol_type = other DNA
ttttgtgaaaattcttgtgtcc

SEQ ID NO: 109416 - DNA, 22 bp, synthetic construct
  misc_feature 1..22: note = chemically synthesized
  source 1..22: mol_type = other DNA
tgtgaaaattcttgtgtcctca

SEQ ID NO: 109417 - DNA, 22 bp, synthetic construct
  misc_feature 1..22: note = chemically synthesized
  source 1..22: mol_type = other DNA
gtgaaaattcttgtgtcctcag

SEQ ID NO: 109418 - DNA, 22 bp, synthetic construct
  misc_feature 1..22: note = chemically synthesized
  source 1..22: mol_type = other DNA
tgaaaattcttgtgtcctcagc

SEQ ID NO: 109419 - DNA, 22 bp, synthetic construct
  misc_feature 1..22: note = chemically synthesized
  source 1..22: mol_type = other DNA
ttgtgtcctcagctagtcgtgg

SEQ ID NO: 109420 - DNA, 22 bp, synthetic construct
  misc_feature 1..22: note = chemically synthesized
  source 1..22: mol_type = other DNA
gtgtcctcagctagtcgtggct

SEQ ID NO: 109421 - DNA, 22 bp, synthetic construct
  misc_feature 1..22: note = chemically synthesized
  source 1..22: mol_type = other DNA
tgtcctcagctagtcgtggctc

SEQ ID NO: 109422 - DNA, 22 bp, synthetic construct
  misc_feature 1..22: note = chemically synthesized
  source 1..22: mol_type = other DNA
agctagtcgtggctcttggttt

SEQ ID NO: 109423 - DNA, 22 bp, synthetic construct
  misc_feature 1..22: note = chemically synthesized
  source 1..22: mol_type = other DNA
gtcgtggctcttggtttctgag

SEQ ID NO: 109424 - DNA, 22 bp, synthetic construct
  misc_feature 1..22: note = chemically synthesized
  source 1..22: mol_type = other DNA
ttggtttctgagaagaaagaca

SEQ ID NO: 109425 - DNA, 22 bp, synthetic construct
  misc_feature 1..22: note = chemically synthesized
  source 1..22: mol_type = other DNA
ggtttctgagaagaaagacaat

SEQ ID NO: 109426 - DNA, 22 bp, synthetic construct
  misc_feature 1..22: note = chemically synthesized
  source 1..22: mol_type = other DNA
gtttctgagaagaaagacaatg

SEQ ID NO: 109427 - DNA, 22 bp, synthetic construct
  misc_feature 1..22: note = chemically synthesized
  source 1..22: mol_type = other DNA
ctgagaagaaagacaatgagag

SEQ ID NO: 109428 - DNA, 22 bp, synthetic construct
  misc_feature 1..22: note = chemically synthesized
  source 1..22: mol_type = other DNA
tgagaagaaagacaatgagaga

SEQ ID NO: 109429 - DNA, 22 bp, synthetic construct
  misc_feature 1..22: note = chemically synthesized
  source 1..22: mol_type = other DNA
agaagaaagacaatgagagaag

SEQ ID NO: 109430 - DNA, 22 bp, synthetic construct
  misc_feature 1..22: note = chemically synthesized
  source 1..22: mol_type = other DNA
aggaaaaaaaatatagggaagg

SEQ ID NO: 109431 - DNA, 22 bp, synthetic construct
  misc_feature 1..22: note = chemically synthesized
  source 1..22: mol_type = other DNA
aggatagaagcaagaagattct

SEQ ID NO: 109432 - DNA, 22 bp, synthetic construct
  misc_feature 1..22: note = chemically synthesized
  source 1..22: mol_type = other DNA
tataatggaacacctagaaaat

SEQ ID NO: 109433 - DNA, 22 bp, synthetic construct
  misc_feature 1..22: note = chemically synthesized
  source 1..22: mol_type = other DNA
taatggaacacctagaaaatca

SEQ ID NO: 109434 - DNA, 22 bp, synthetic construct
  misc_feature 1..22: note = chemically synthesized
  source 1..22: mol_type = other DNA
gaaaatcagataaacttctaac

SEQ ID NO: 109435 - DNA, 22 bp, synthetic construct
  misc_feature 1..22: note = chemically synthesized
  source 1..22: mol_type = other DNA
ctaacatttacagccataattt

SEQ ID NO: 109436 - DNA, 22 bp, synthetic construct
  misc_feature 1..22: note = chemically synthesized
  source 1..22: mol_type = other DNA
taacatttacagccataatttt

SEQ ID NO: 109437 - DNA, 22 bp, synthetic construct
  misc_feature 1..22: note = chemically synthesized
  source 1..22: mol_type = other DNA
acatttacagccataatttttc

SEQ ID NO: 109438 - DNA, 22 bp, synthetic construct
  misc_feature 1..22: note = chemically synthesized
  source 1..22: mol_type = other DNA
acagccataatttttctctgct

SEQ ID NO: 109439 - DNA, 22 bp, synthetic construct
  misc_feature 1..22: note = chemically synthesized
  source 1..22: mol_type = other DNA
cagccataatttttctctgctt

SEQ ID NO: 109440 - DNA, 22 bp, synthetic construct
  misc_feature 1..22: note = chemically synthesized
  source 1..22: mol_type = other DNA
ttctctgctttgtttaaaaagt

SEQ ID NO: 109441 - DNA, 22 bp, synthetic construct
  misc_feature 1..22: note = chemically synthesized
  source 1..22: mol_type = other DNA
tctctgctttgtttaaaaagta

SEQ ID NO: 109442 - DNA, 22 bp, synthetic construct
  misc_feature 1..22: note = chemically synthesized
  source 1..22: mol_type = other DNA
ctctgctttgtttaaaaagtaa

SEQ ID NO: 109443 - DNA, 22 bp, synthetic construct
  misc_feature 1..22: note = chemically synthesized
  source 1..22: mol_type = other DNA
tctgctttgtttaaaaagtaaa

SEQ ID NO: 109444 - DNA, 22 bp, synthetic construct
  misc_feature 1..22: note = chemically synthesized
  source 1..22: mol_type = other DNA
tgctttgtttaaaaagtaaaat

SEQ ID NO: 109445 - DNA, 22 bp, synthetic construct
  misc_feature 1..22: note = chemically synthesized
  source 1..22: mol_type = other DNA
ctttgtttaaaaagtaaaatgt

SEQ ID NO: 109446 - DNA, 22 bp, synthetic construct
  misc_feature 1..22: note = chemically synthesized
  source 1..22: mol_type = other DNA
tgtttaaaaagtaaaatgtagt

SEQ ID NO: 109447 - DNA, 22 bp, synthetic construct
  misc_feature 1..22: note = chemically synthesized
  source 1..22: mol_type = other DNA
gtttaaaaagtaaaatgtagta

SEQ ID NO: 109448 - DNA, 22 bp, synthetic construct
  misc_feature 1..22: note = chemically synthesized
  source 1..22: mol_type = other DNA
tttaaaaagtaaaatgtagtag

SEQ ID NO: 109449 - DNA, 22 bp, synthetic construct
  misc_feature 1..22: note = chemically synthesized
  source 1..22: mol_type = other DNA
aaaaagtaaaatgtagtagaat

SEQ ID NO: 109450 - DNA, 22 bp, synthetic construct
  misc_feature 1..22: note = chemically synthesized
  source 1..22: mol_type = other DNA
aaaagtaaaatgtagtagaata

SEQ ID NO: 109451 - DNA, 22 bp, synthetic construct
  misc_feature 1..22: note = chemically synthesized
  source 1..22: mol_type = other DNA
cctgttcatcttttagaaagga

SEQ ID NO: 109452 - DNA, 22 bp, synthetic construct
  misc_feature 1..22: note = chemically synthesized
  source 1..22: mol_type = other DNA
ctgttcatcttttagaaaggaa

SEQ ID NO: 109453 - DNA, 22 bp, synthetic construct
  misc_feature 1..22: note = chemically synthesized
  source 1..22: mol_type = other DNA
ttcatcttttagaaaggaaaga

SEQ ID NO: 109454 - DNA, 22 bp, synthetic construct
  misc_feature 1..22: note = chemically synthesized
  source 1..22: mol_type = other DNA
atcttttagaaaggaaagaaga

SEQ ID NO: 109455 - DNA, 22 bp, synthetic construct
  misc_feature 1..22: note = chemically synthesized
  source 1..22: mol_type = other DNA
ttagaaaggaaagaagacatat

SEQ ID NO: 109456 - DNA, 22 bp, synthetic construct
  misc_feature 1..22: note = chemically synthesized
  source 1..22: mol_type = other DNA
tagaaaggaaagaagacatatg

SEQ ID NO: 109457 - DNA, 22 bp, synthetic construct
  misc_feature 1..22: note = chemically synthesized
  source 1..22: mol_type = other DNA
agaaaggaaagaagacatatga

SEQ ID NO: 109458 - DNA, 22 bp, synthetic construct
  misc_feature 1..22: note = chemically synthesized
  source 1..22: mol_type = other DNA
gaaaggaaagaagacatatgag

SEQ ID NO: 109459 - DNA, 22 bp, synthetic construct
  misc_feature 1..22: note = chemically synthesized
  source 1..22: mol_type = other DNA
acatcactgagtacagaaggtc

SEQ ID NO: 109460 - DNA, 22 bp, synthetic construct
  misc_feature 1..22: note = chemically synthesized
  source 1..22: mol_type = other DNA
agtacagaaggtcttaggtagt

SEQ ID NO: 109461 - DNA, 22 bp, synthetic construct
  misc_feature 1..22: note = chemically synthesized
  source 1..22: mol_type = other DNA
aggtagttggttggtagcactt

SEQ ID NO: 109462 - DNA, 22 bp, synthetic construct
  misc_feature 1..22: note = chemically synthesized
  source 1..22: mol_type = other DNA
ggtagttggttggtagcacttg

SEQ ID NO: 109463 - DNA, 22 bp, synthetic construct
  misc_feature 1..22: note = chemically synthesized
  source 1..22: mol_type = other DNA
gttggtagcacttggaattgct

SEQ ID NO: 109464 - DNA, 22 bp, synthetic construct
  misc_feature 1..22: note = chemically synthesized
  source 1..22: mol_type = other DNA
gtagcacttggaattgcttttg

SEQ ID NO: 109465 - DNA, 22 bp, synthetic construct
  misc_feature 1..22: note = chemically synthesized
  source 1..22: mol_type = other DNA
ggaattgcttttgaagttctat

SEQ ID NO: 109466 - DNA, 22 bp, synthetic construct
  misc_feature 1..22: note = chemically synthesized
  source 1..22: mol_type = other DNA
gaattgcttttgaagttctatc

SEQ ID NO: 109467 - DNA, 22 bp, synthetic construct
  misc_feature 1..22: note = chemically synthesized
  source 1..22: mol_type = other DNA
cttttgaagttctatcaacttc

SEQ ID NO: 109468 - DNA, 22 bp, synthetic construct
  misc_feature 1..22: note = chemically synthesized
  source 1..22: mol_type = other DNA
ttgaagttctatcaacttcaga

SEQ ID NO: 109469 - DNA, 22 bp, synthetic construct
  misc_feature 1..22: note = chemically synthesized
  source 1..22: mol_type = other DNA
tgaagttctatcaacttcagac

SEQ ID NO: 109470 - DNA, 22 bp, synthetic construct
  misc_feature 1..22: note = chemically synthesized
  source 1..22: mol_type = other DNA
gaagttctatcaacttcagact

SEQ ID NO: 109471 - DNA, 22 bp, synthetic construct
  misc_feature 1..22: note = chemically synthesized
  source 1..22: mol_type = other DNA
aagttctatcaacttcagactg

SEQ ID NO: 109472 - DNA, 22 bp, synthetic construct
  misc_feature 1..22: note = chemically synthesized
  source 1..22: mol_type = other DNA
tatcaacttcagactgaaatct

SEQ ID NO: 109473 - DNA, 22 bp, synthetic construct
  misc_feature 1..22: note = chemically synthesized
  source 1..22: mol_type = other DNA
tcaacttcagactgaaatctgt

SEQ ID NO: 109474 - DNA, 22 bp, synthetic construct
  misc_feature 1..22: note = chemically synthesized
  source 1..22: mol_type = other DNA
cagactgaaatctgtgcacaca

SEQ ID NO: 109475 - DNA, 22 bp, synthetic construct
  misc_feature 1..22: note = chemically synthesized
  source 1..22: mol_type = other DNA
agactgaaatctgtgcacacat

SEQ ID NO: 109476 - DNA, 22 bp, synthetic construct
  misc_feature 1..22: note = chemically synthesized
  source 1..22: mol_type = other DNA
aaatctgtgcacacatccaaag

SEQ ID NO: 109477 - DNA, 22 bp, synthetic construct
  misc_feature 1..22: note = chemically synthesized
  source 1..22: mol_type = other DNA
tgcacacatccaaagctgtgga

SEQ ID NO: 109478 - DNA, 22 bp, synthetic construct
  misc_feature 1..22: note = chemically synthesized
  source 1..22: mol_type = other DNA
tggactattgagatccttcact

SEQ ID NO: 109479 - DNA, 22 bp, synthetic construct
  misc_feature 1..22: note = chemically synthesized
  source 1..22: mol_type = other DNA
ttgagatccttcacttcttctc

SEQ ID NO: 109480 - DNA, 22 bp, synthetic construct
  misc_feature 1..22: note = chemically synthesized
  source 1..22: mol_type = other DNA
agatccttcacttcttctccgt

SEQ ID NO: 109481 - DNA, 22 bp, synthetic construct
  misc_feature 1..22: note = chemically synthesized
  source 1..22: mol_type = other DNA
cacttcttctccgtatctttct

SEQ ID NO: 109482 - DNA, 22 bp, synthetic construct
  misc_feature 1..22: note = chemically synthesized
  source 1..22: mol_type = other DNA
acttcttctccgtatctttctc

SEQ ID NO: 109483 - DNA, 22 bp, synthetic construct
  misc_feature 1..22: note = chemically synthesized
  source 1..22: mol_type = other DNA
cttctccgtatctttctctgga

SEQ ID NO: 109484 - DNA, 22 bp, synthetic construct
  misc_feature 1..22: note = chemically synthesized
  source 1..22: mol_type = other DNA
ttctccgtatctttctctggag

SEQ ID NO: 109485 - DNA, 22 bp, synthetic construct
  misc_feature 1..22: note = chemically synthesized
  source 1..22: mol_type = other DNA
ctccgtatctttctctggagag

SEQ ID NO: 109486 - DNA, 22 bp, synthetic construct
  misc_feature 1..22: note = chemically synthesized
  source 1..22: mol_type = other DNA
tccgtatctttctctggagagc

SEQ ID NO: 109487 - DNA, 22 bp, synthetic construct
  misc_feature 1..22: note = chemically synthesized
  source 1..22: mol_type = other DNA
cgtatctttctctggagagctt

SEQ ID NO: 109488 - DNA, 22 bp, synthetic construct
  misc_feature 1..22: note = chemically synthesized
  source 1..22: mol_type = other DNA
tctctggagagcttatagagga

SEQ ID NO: 109489 - DNA, 22 bp, synthetic construct
  misc_feature 1..22: note = chemically synthesized
  source 1..22: mol_type = other DNA
ctctggagagcttatagaggag

SEQ ID NO: 109490 - DNA, 22 bp, synthetic construct
  misc_feature 1..22: note = chemically synthesized
  source 1..22: mol_type = other DNA
tctggagagcttatagaggagt

SEQ ID NO: 109491 - DNA, 22 bp, synthetic construct
  misc_feature 1..22: note = chemically synthesized
  source 1..22: mol_type = other DNA
tggagagcttatagaggagtct

SEQ ID NO: 109492 - DNA, 22 bp, synthetic construct
  misc_feature 1..22: note = chemically synthesized
  source 1..22: mol_type = other DNA
gagagcttatagaggagtctcc

SEQ ID NO: 109493 - DNA, 22 bp, synthetic construct
  misc_feature 1..22: note = chemically synthesized
  source 1..22: mol_type = other DNA
atagaggagtctcctagtacac

SEQ ID NO: 109494 - DNA, 22 bp, synthetic construct
  misc_feature 1..22: note = chemically synthesized
  source 1..22: mol_type = other DNA
tagaggagtctcctagtacact

SEQ ID NO: 109495 - DNA, 22 bp, synthetic construct
  misc_feature 1..22: note = chemically synthesized
  source 1..22: mol_type = other DNA
ctagtacactctttatatatct

SEQ ID NO: 109496 - DNA, 22 bp, synthetic construct
  misc_feature 1..22: note = chemically synthesized
  source 1..22: mol_type = other DNA
gtacactctttatatatctagg

SEQ ID NO: 109497 - DNA, 22 bp, synthetic construct
  misc_feature 1..22: note = chemically synthesized
  source 1..22: mol_type = other DNA
tttatatatctaggagtatttc

SEQ ID NO: 109498 - DNA, 22 bp, synthetic construct
  misc_feature 1..22: note = chemically synthesized
  source 1..22: mol_type = other DNA
tatatatctaggagtatttcac

SEQ ID NO: 109499 - DNA, 22 bp, synthetic construct
  misc_feature 1..22: note = chemically synthesized
  source 1..22: mol_type = other DNA
atatatctaggagtatttcacc

SEQ ID NO: 109500 - DNA, 22 bp, synthetic construct
  misc_feature 1..22: note = chemically synthesized
  source 1..22: mol_type = other DNA
tatatctaggagtatttcacca

SEQ ID NO: 109501 - DNA, 22 bp, synthetic construct
  misc_feature 1..22: note = chemically synthesized
  source 1..22: mol_type = other DNA
ggagtatttcaccatactccca

SEQ ID NO: 109502 - DNA, 22 bp, synthetic construct
  misc_feature 1..22: note = chemically synthesized
  source 1..22: mol_type = other DNA
caccatactcccaggtaccata

SEQ ID NO: 109503 - DNA, 22 bp, synthetic construct
  misc_feature 1..22: note = chemically synthesized
  source 1..22: mol_type = other DNA
accatactcccaggtaccataa

SEQ ID NO: 109504 - DNA, 22 bp, synthetic construct
  misc_feature 1..22: note = chemically synthesized
  source 1..22: mol_type = other DNA
ccaggtaccataacttgtttga

SEQ ID NO: 109505 - DNA, 22 bp, synthetic construct
  misc_feature 1..22: note = chemically synthesized
  source 1..22: mol_type = other DNA
gtttgatggtgaggaagagcag

SEQ ID NO: 109506 - DNA, 22 bp, synthetic construct
  misc_feature 1..22: note = chemically synthesized
  source 1..22: mol_type = other DNA
tttgatggtgaggaagagcagg

SEQ ID NO: 109507 - DNA, 22 bp, synthetic construct
  misc_feature 1..22: note = chemically synthesized
  source 1..22: mol_type = other DNA
gatggtgaggaagagcagggtt

SEQ ID NO: 109508 - DNA, 22 bp, synthetic construct
  misc_feature 1..22: note = chemically synthesized
  source 1..22: mol_type = other DNA
atggtgaggaagagcagggttc

SEQ ID NO: 109509 - DNA, 22 bp, synthetic construct
  misc_feature 1..22: note = chemically synthesized
  source 1..22: mol_type = other DNA
ttgtgtcttacctaaagactta

SEQ ID NO: 109510 - DNA, 22 bp, synthetic construct
  misc_feature 1..22: note = chemically synthesized
  source 1..22: mol_type = other DNA
gtgtcttacctaaagacttaga

SEQ ID NO: 109511 - DNA, 22 bp, synthetic construct
  misc_feature 1..22: note = chemically synthesized
  source 1..22: mol_type = other DNA
tgtcttacctaaagacttagat

SEQ ID NO: 109512 - DNA, 22 bp, synthetic construct
  misc_feature 1..22: note = chemically synthesized
  source 1..22: mol_type = other DNA
acctaaagacttagatcatgtt

SEQ ID NO: 109513 - DNA, 22 bp, synthetic construct
  misc_feature 1..22: note = chemically synthesized
  source 1..22: mol_type = other DNA
cctaaagacttagatcatgttg

SEQ ID NO: 109514 - DNA, 22 bp, synthetic construct
  misc_feature 1..22: note = chemically synthesized
  source 1..22: mol_type = other DNA
aagacttagatcatgttgttcc

SEQ ID NO: 109515 - DNA, 22 bp, synthetic construct
  misc_feature 1..22: note = chemically synthesized
  source 1..22: mol_type = other DNA
agatcatgttgttccttctcaa

SEQ ID NO: 109516 - DNA, 22 bp, synthetic construct
  misc_feature 1..22: note = chemically synthesized
  source 1..22: mol_type = other DNA
gatcatgttgttccttctcaac

SEQ ID NO: 109517 - DNA, 22 bp, synthetic construct
  misc_feature 1..22: note = chemically synthesized
  source 1..22: mol_type = other DNA
ttccttctcaacatctgtgaag

SEQ ID NO: 109518 - DNA, 22 bp, synthetic construct
  misc_feature 1..22: note = chemically synthesized
  source 1..22: mol_type = other DNA
cttctcaacatctgtgaagaga

SEQ ID NO: 109519 - DNA, 22 bp, synthetic construct
  misc_feature 1..22: note = chemically synthesized
  source 1..22: mol_type = other DNA
ctcaacatctgtgaagagaagc

SEQ ID NO: 109520 - DNA, 22 bp, synthetic construct
  misc_feature 1..22: note = chemically synthesized
  source 1..22: mol_type = other DNA
tcaacatctgtgaagagaagca

SEQ ID NO: 109521 - DNA, 22 bp, synthetic construct
  misc_feature 1..22: note = chemically synthesized
  source 1..22: mol_type = other DNA
aacatctgtgaagagaagcagt

SEQ ID NO: 109522 - DNA, 22 bp, synthetic construct
  misc_feature 1..22: note = chemically synthesized
  source 1..22: mol_type = other DNA
tgaagagaagcagtcactgtgg

SEQ ID NO: 109523 - DNA, 22 bp, synthetic construct
  misc_feature 1..22: note = chemically synthesized
  source 1..22: mol_type = other DNA
tggttattaataaagatagcac

SEQ ID NO: 109524 - DNA, 22 bp, synthetic construct
  misc_feature 1..22: note = chemically synthesized
  source 1..22: mol_type = other DNA
ttaataaagatagcaccttccc

SEQ ID NO: 109525 - DNA, 22 bp, synthetic construct
  misc_feature 1..22: note = chemically synthesized
  source 1..22: mol_type = other DNA
ataaagatagcaccttcccaga

SEQ ID NO: 109526 - DNA, 22 bp, synthetic construct
  misc_feature 1..22: note = chemically synthesized
  source 1..22: mol_type = other DNA
cccagatgtctcccttttatag

SEQ ID NO: 109527 - DNA, 22 bp, synthetic construct
  misc_feature 1..22: note = chemically synthesized
  source 1..22: mol_type = other DNA
ccagatgtctcccttttatagc

SEQ ID NO: 109528 - DNA, 22 bp, synthetic construct
  misc_feature 1..22: note = chemically synthesized
  source 1..22: mol_type = other DNA
ccttttatagccaacttggatc

SEQ ID NO: 109529 - DNA, 22 bp, synthetic construct
  misc_feature 1..22: note = chemically synthesized
  source 1..22: mol_type = other DNA
ttatagccaacttggatcttaa

SEQ ID NO: 109530 - DNA, 22 bp, synthetic construct
  misc_feature 1..22: note = chemically synthesized
  source 1..22: mol_type = other DNA
tatagccaacttggatcttaag

SEQ ID NO: 109531 - DNA, 22 bp, synthetic construct
  misc_feature 1..22: note = chemically synthesized
  source 1..22: mol_type = other DNA
atagccaacttggatcttaaga

SEQ ID NO: 109532 - DNA, 22 bp, synthetic construct
  misc_feature 1..22: note = chemically synthesized
  source 1..22: mol_type = other DNA
tagccaacttggatcttaagaa

SEQ ID NO: 109533 - DNA, 22 bp, synthetic construct
  misc_feature 1..22: note = chemically synthesized
  source 1..22: mol_type = other DNA
ggatcttaagaaatatttactc

SEQ ID NO: 109534 - DNA, 22 bp, synthetic construct
  misc_feature 1..22: note = chemically synthesized
  source 1..22: mol_type = other DNA
gatcttaagaaatatttactct

SEQ ID NO: 109535 - DNA, 22 bp, synthetic construct
  misc_feature 1..22: note = chemically synthesized
  source 1..22: mol_type = other DNA
aagaaatatttactctgtatta

SEQ ID NO: 109536 - DNA, 22 bp, synthetic construct
  misc_feature 1..22: note = chemically synthesized
  source 1..22: mol_type = other DNA
agaaatatttactctgtattaa

SEQ ID NO: 109537 - DNA, 22 bp, synthetic construct
  misc_feature 1..22: note = chemically synthesized
  source 1..22: mol_type = other DNA
actctgtattaactcctcctta

SEQ ID NO: 109538 - DNA, 22 bp, synthetic construct
  misc_feature 1..22: note = chemically synthesized
  source 1..22: mol_type = other DNA
ctctgtattaactcctccttag

SEQ ID NO: 109539 - DNA, 22 bp, synthetic construct
  misc_feature 1..22: note = chemically synthesized
  source 1..22: mol_type = other DNA
tgtattaactcctccttagagg

SEQ ID NO: 109540 - DNA, 22 bp, synthetic construct
  misc_feature 1..22: note = chemically synthesized
  source 1..22: mol_type = other DNA
tattaactcctccttagaggga

SEQ ID NO: 109541 - DNA, 22 bp, synthetic construct
  misc_feature 1..22: note = chemically synthesized
  source 1..22: mol_type = other DNA
actcctccttagagggagctgg

SEQ ID NO: 109542 - DNA, 22 bp, synthetic construct
  misc_feature 1..22: note = chemically synthesized
  source 1..22: mol_type = other DNA
ctccttagagggagctggaaca

SEQ ID NO: 109543 - DNA, 22 bp, synthetic construct
  misc_feature 1..22: note = chemically synthesized
  source 1..22: mol_type = other DNA
cttagagggagctggaacactt

SEQ ID NO: 109544 - DNA, 22 bp, synthetic construct
  misc_feature 1..22: note = chemically synthesized
  source 1..22: mol_type = other DNA
agagggagctggaacacttaat

SEQ ID NO: 109545 - DNA, 22 bp, synthetic construct
  misc_feature 1..22: note = chemically synthesized
  source 1..22: mol_type = other DNA
gagggagctggaacacttaatt

SEQ ID NO: 109546 - DNA, 22 bp, synthetic construct
  misc_feature 1..22: note = chemically synthesized
  source 1..22: mol_type = other DNA
gaacacttaattagtcccccca

SEQ ID NO: 109547 - DNA, 22 bp, synthetic construct
  misc_feature 1..22: note = chemically synthesized
  source 1..22: mol_type = other DNA
aattagtccccccaagctttta

SEQ ID NO: 109548 - DNA, 22 bp, synthetic construct
  misc_feature 1..22: note = chemically synthesized
  source 1..22: mol_type = other DNA
attagtccccccaagcttttaa

SEQ ID NO: 109549 - DNA, 22 bp, synthetic construct
  misc_feature 1..22: note = chemically synthesized
  source 1..22: mol_type = other DNA
gtccccccaagcttttaaataa

SEQ ID NO: 109550 - DNA, 22 bp, synthetic construct
  misc_feature 1..22: note = chemically synthesized
  source 1..22: mol_type = other DNA
ttaaataatctttcttttttca

SEQ ID NO: 109551 - DNA, 22 bp, synthetic construct
  misc_feature 1..22: note = chemically synthesized
  source 1..22: mol_type = other DNA
taaataatctttcttttttcaa

SEQ ID NO: 109552 - DNA, 22 bp, synthetic construct
  misc_feature 1..22: note = chemically synthesized
  source 1..22: mol_type = other DNA
aaataatctttcttttttcaaa

SEQ ID NO: 109553 - DNA, 22 bp, synthetic construct
  misc_feature 1..22: note = chemically synthesized
  source 1..22: mol_type = other DNA
aataatctttcttttttcaaat

SEQ ID NO: 109554 - DNA, 22 bp, synthetic construct
  misc_feature 1..22: note = chemically synthesized
  source 1..22: mol_type = other DNA
tcttttttcaaataagttactg

SEQ ID NO: 109555 - DNA, 22 bp, synthetic construct
  misc_feature 1..22: note = chemically synthesized
  source 1..22: mol_type = other DNA
cttttttcaaataagttactgg

SEQ ID NO: 109556 - DNA, 22 bp, synthetic construct
  misc_feature 1..22: note = chemically synthesized
  source 1..22: mol_type = other DNA
ttttttcaaataagttactggc

SEQ ID NO: 109557 - DNA, 22 bp, synthetic construct
  misc_feature 1..22: note = chemically synthesized
  source 1..22: mol_type = other DNA
ttttcaaataagttactggctg

SEQ ID NO: 109558 - DNA, 22 bp, synthetic construct
  misc_feature 1..22: note = chemically synthesized
  source 1..22: mol_type = other DNA
tttcaaataagttactggctga

SEQ ID NO: 109559 - DNA, 22 bp, synthetic construct
  misc_feature 1..22: note = chemically synthesized
  source 1..22: mol_type = other DNA
ttcaaataagttactggctgaa

SEQ ID NO: 109560 - DNA, 22 bp, synthetic construct
  misc_feature 1..22: note = chemically synthesized
  source 1..22: mol_type = other DNA
tcaaataagttactggctgaat

SEQ ID NO: 109561 - DNA, 22 bp, synthetic construct
  misc_feature 1..22: note = chemically synthesized
  source 1..22: mol_type = other DNA
caaataagttactggctgaatc

SEQ ID NO: 109562 - DNA, 22 bp, synthetic construct
  misc_feature 1..22: note = chemically synthesized
  source 1..22: mol_type = other DNA
aaataagttactggctgaatca

SEQ ID NO: 109563 - DNA, 22 bp, synthetic construct
  misc_feature 1..22: note = chemically synthesized
  source 1..22: mol_type = other DNA
ctggctgaatcaagccactggt

SEQ ID NO: 109564 - DNA, 22 bp, synthetic construct
  misc_feature 1..22: note = chemically synthesized
  source 1..22: mol_type = other DNA
gctgaatcaagccactggtagg

SEQ ID NO: 109565 - DNA, 22 bp, synthetic construct
  misc_feature 1..22: note = chemically synthesized
  source 1..22: mol_type = other DNA
aatcaagccactggtaggacct

SEQ ID NO: 109566 - DNA, 22 bp, synthetic construct
  misc_feature 1..22: note = chemically synthesized
  source 1..22: mol_type = other DNA
gtaggacctttatgtgtgggga

SEQ ID NO: 109567 - DNA, 22 bp, synthetic construct
  misc_feature 1..22: note = chemically synthesized
  source 1..22: mol_type = other DNA
tatgtgtggggaatcagacagc

SEQ ID NO: 109568 - DNA, 22 bp, synthetic construct
  misc_feature 1..22: note = chemically synthesized
  source 1..22: mol_type = other DNA
atgtgtggggaatcagacagcc

SEQ ID NO: 109569 - DNA, 22 bp, synthetic construct
  misc_feature 1..22: note = chemically synthesized
  source 1..22: mol_type = other DNA
tgtgtggggaatcagacagcct

SEQ ID NO: 109570 - DNA, 22 bp, synthetic construct
  misc_feature 1..22: note = chemically synthesized
  source 1..22: mol_type = other DNA
tcttcatagccccagcagactc

SEQ ID NO: 109571 - DNA, 22 bp, synthetic construct
  misc_feature 1..22: note = chemically synthesized
  source 1..22: mol_type = other DNA
catagccccagcagactctggt

SEQ ID NO: 109572 - DNA, 22 bp, synthetic construct
  misc_feature 1..22: note = chemically synthesized
  source 1..22: mol_type = other DNA
atagccccagcagactctggta

SEQ ID NO: 109573 - DNA, 22 bp, synthetic construct
  misc_feature 1..22: note = chemically synthesized
  source 1..22: mol_type = other DNA
tggtatcacctctgggaggtaa

SEQ ID NO: 109574 - DNA, 22 bp, synthetic construct
  misc_feature 1..22: note = chemically synthesized
  source 1..22: mol_type = other DNA
gtatcacctctgggaggtaatt

SEQ ID NO: 109575 - DNA, 22 bp, synthetic construct
  misc_feature 1..22: note = chemically synthesized
  source 1..22: mol_type = other DNA
tgggaggtaatttattccctac

SEQ ID NO: 109576 - DNA, 22 bp, synthetic construct
  misc_feature 1..22: note = chemically synthesized
  source 1..22: mol_type = other DNA
ggaggtaatttattccctacat

SEQ ID NO: 109577 - DNA, 22 bp, synthetic construct
  misc_feature 1..22: note = chemically synthesized
  source 1..22: mol_type = other DNA
attccctacatttacttcaaca

SEQ ID NO: 109578 - DNA, 22 bp, synthetic construct
  misc_feature 1..22: note = chemically synthesized
  source 1..22: mol_type = other DNA
ttccctacatttacttcaacag

SEQ ID NO: 109579 - DNA, 22 bp, synthetic construct
  misc_feature 1..22: note = chemically synthesized
  source 1..22: mol_type = other DNA
cctacatttacttcaacagtca

SEQ ID NO: 109580 - DNA, 22 bp, synthetic construct
  misc_feature 1..22: note = chemically synthesized
  source 1..22: mol_type = other DNA
catttacttcaacagtcaaatc

SEQ ID NO: 109581 - DNA, 22 bp, synthetic construct
  misc_feature 1..22: note = chemically synthesized
  source 1..22: mol_type = other DNA
acttcaacagtcaaatctttcc

SEQ ID NO: 109582 - DNA, 22 bp, synthetic construct
  misc_feature 1..22: note = chemically synthesized
  source 1..22: mol_type = other DNA
cttcaacagtcaaatctttccc

SEQ ID NO: 109583 - DNA, 22 bp, synthetic construct
  misc_feature 1..22: note = chemically synthesized
  source 1..22: mol_type = other DNA
caacagtcaaatctttcccagt

SEQ ID NO: 109584 - DNA, 22 bp, synthetic construct
  misc_feature 1..22: note = chemically synthesized
  source 1..22: mol_type = other DNA
aacagtcaaatctttcccagtt

SEQ ID NO: 109585 - DNA, 22 bp, synthetic construct
  misc_feature 1..22: note = chemically synthesized
  source 1..22: mol_type = other DNA
tcccagtttatctcaagagaaa

SEQ ID NO: 109586 - DNA, 22 bp, synthetic construct
  misc_feature 1..22: note = chemically synthesized
  source 1..22: mol_type = other DNA
cccagtttatctcaagagaaag

SEQ ID NO: 109587 - DNA, 22 bp, synthetic construct
  misc_feature 1..22: note = chemically synthesized
  source 1..22: mol_type = other DNA
ccagtttatctcaagagaaagc

SEQ ID NO: 109588 - DNA, 22 bp, synthetic construct
  misc_feature 1..22: note = chemically synthesized
  source 1..22: mol_type = other DNA
atctcaagagaaagcctatata

SEQ ID NO: 109589 - DNA, 22 bp, synthetic construct
  misc_feature 1..22: note = chemically synthesized
  source 1..22: mol_type = other DNA
tctcaagagaaagcctatatat

SEQ ID NO: 109590 - DNA, 22 bp, synthetic construct
  misc_feature 1..22: note = chemically synthesized
  source 1..22: mol_type = other DNA
aagagaaagcctatatatcttc

SEQ ID NO: 109591 - DNA, 22 bp, synthetic construct
  misc_feature 1..22: note = chemically synthesized
  source 1..22: mol_type = other DNA
tatatcttcttggcctatgtaa

SEQ ID NO: 109592 - DNA, 22 bp, synthetic construct
  misc_feature 1..22: note = chemically synthesized
  source 1..22: mol_type = other DNA
cttggcctatgtaacctgaatt

SEQ ID NO: 109593 - DNA, 22 bp, synthetic construct
  misc_feature 1..22: note = chemically synthesized
  source 1..22: mol_type = other DNA
ttggcctatgtaacctgaattt

SEQ ID NO: 109594 - DNA, 22 bp, synthetic construct
  misc_feature 1..22: note = chemically synthesized
  source 1..22: mol_type = other DNA
ggcctatgtaacctgaatttct

SEQ ID NO: 109595 - DNA, 22 bp, synthetic construct
  misc_feature 1..22: note = chemically synthesized
  source 1..22: mol_type = other DNA
gcctatgtaacctgaatttcta

SEQ ID NO: 109596 - DNA, 22 bp, synthetic construct
  misc_feature 1..22: note = chemically synthesized
  source 1..22: mol_type = other DNA
tgtaacctgaatttctactata

SEQ ID NO: 109597 - DNA, 22 bp, synthetic construct
  misc_feature 1..22: note = chemically synthesized
  source 1..22: mol_type = other DNA
aatttctactatatttcctgct

SEQ ID NO: 109598 - DNA, 22 bp, synthetic construct
  misc_feature 1..22: note = chemically synthesized
  source 1..22: mol_type = other DNA
ctactatatttcctgcttggtt

SEQ ID NO: 109599 - DNA, 22 bp, synthetic construct
  misc_feature 1..22: note = chemically synthesized
  source 1..22: mol_type = other DNA
tactatatttcctgcttggttt

SEQ ID NO: 109600 - DNA, 22 bp, synthetic construct
  misc_feature 1..22: note = chemically synthesized
  source 1..22: mol_type = other DNA
ctatatttcctgcttggtttag

SEQ ID NO: 109601 - DNA, 22 bp, synthetic construct
  misc_feature 1..22: note = chemically synthesized
  source 1..22: mol_type = other DNA
tatttcctgcttggtttagatc

SEQ ID NO: 109602 - DNA, 22 bp, synthetic construct
  misc_feature 1..22: note = chemically synthesized
  source 1..22: mol_type = other DNA
cctgcttggtttagatcagaga

SEQ ID NO: 109603 - DNA, 22 bp, synthetic construct
  misc_feature 1..22: note = chemically synthesized
  source 1..22: mol_type = other DNA
ctgcttggtttagatcagagaa

SEQ ID NO: 109604 - DNA, 22 bp, synthetic construct
  misc_feature 1..22: note = chemically synthesized
  source 1..22: mol_type = other DNA
cttggtttagatcagagaaagc

SEQ ID NO: 109605 - DNA, 22 bp, synthetic construct
  misc_feature 1..22: note = chemically synthesized
  source 1..22: mol_type = other DNA
ggtttagatcagagaaagcttg

SEQ ID NO: 109606 - DNA, 22 bp, synthetic construct
  misc_feature 1..22: note = chemically synthesized
  source 1..22: mol_type = other DNA
gtttagatcagagaaagcttga

SEQ ID NO: 109607 - DNA, 22 bp, synthetic construct
  misc_feature 1..22: note = chemically synthesized
  source 1..22: mol_type = other DNA
agatcagagaaagcttgaaagc

SEQ ID NO: 109608 - DNA, 22 bp, synthetic construct
  misc_feature 1..22: note = chemically synthesized
  source 1..22: mol_type = other DNA
gatcagagaaagcttgaaagca

SEQ ID NO: 109609 - DNA, 22 bp, synthetic construct
  misc_feature 1..22: note = chemically synthesized
  source 1..22: mol_type = other DNA
gaaagcagagagctagatagac

SEQ ID NO: 109610 - DNA, 22 bp, synthetic construct
  misc_feature 1..22: note = chemically synthesized
  source 1..22: mol_type = other DNA
aaagcagagagctagatagact

SEQ ID NO: 109611 - DNA, 22 bp, synthetic construct
  misc_feature 1..22: note = chemically synthesized
  source 1..22: mol_type = other DNA
gatagactagagtcaatataat

SEQ ID NO: 109612 - DNA, 22 bp, synthetic construct
  misc_feature 1..22: note = chemically synthesized
  source 1..22: mol_type = other DNA
gagtcaatataataaaattcag

SEQ ID NO: 109613 - DNA, 22 bp, synthetic construct
  misc_feature 1..22: note = chemically synthesized
  source 1..22: mol_type = other DNA
aggcagccttctctagtaccca

SEQ ID NO: 109614 - DNA, 22 bp, synthetic construct
  misc_feature 1..22: note = chemically synthesized
  source 1..22: mol_type = other DNA
ctctagtacccaacgtgaacgc

SEQ ID NO: 109615 - DNA, 22 bp, synthetic construct
  misc_feature 1..22: note = chemically synthesized
  source 1..22: mol_type = other DNA
tctagtacccaacgtgaacgca

SEQ ID NO: 109616 - DNA, 22 bp, synthetic construct
  misc_feature 1..22: note = chemically synthesized
  source 1..22: mol_type = other DNA
tagtacccaacgtgaacgcaca

SEQ ID NO: 109617 - DNA, 22 bp, synthetic construct
  misc_feature 1..22: note = chemically synthesized
  source 1..22: mol_type = other DNA
gtacccaacgtgaacgcacatt

SEQ ID NO: 109618 - DNA, 22 bp, synthetic construct
  misc_feature 1..22: note = chemically synthesized
  source 1..22: mol_type = other DNA
tgcagttatcactaactattcc

SEQ ID NO: 109619 - DNA, 22 bp, synthetic construct
  misc_feature 1..22: note = chemically synthesized
  source 1..22: mol_type = other DNA
cagttatcactaactattccct

SEQ ID NO: 109620 - DNA, 22 bp, synthetic construct
  misc_feature 1..22: note = chemically synthesized
  source 1..22: mol_type = other DNA
tcactaactattcccttcttga

SEQ ID NO: 109621 - DNA, 22 bp, synthetic construct
  misc_feature 1..22: note = chemically synthesized
  source 1..22: mol_type = other DNA
actattcccttcttgagtttag

SEQ ID NO: 109622 - DNA, 22 bp, synthetic construct
  misc_feature 1..22: note = chemically synthesized
  source 1..22: mol_type = other DNA
ttcccttcttgagtttagccta

SEQ ID NO: 109623 - DNA, 22 bp, synthetic construct
  misc_feature 1..22: note = chemically synthesized
  source 1..22: mol_type = other DNA
ccttcttgagtttagcctacca

SEQ ID NO: 109624 - DNA, 22 bp, synthetic construct
  misc_feature 1..22: note = chemically synthesized
  source 1..22: mol_type = other DNA
cttgagtttagcctaccagaag

SEQ ID NO: 109625 - DNA, 22 bp, synthetic construct
  misc_feature 1..22: note = chemically synthesized
  source 1..22: mol_type = other DNA
ttgagtttagcctaccagaagt

SEQ ID NO: 109626 - DNA, 22 bp, synthetic construct
  misc_feature 1..22: note = chemically synthesized
  source 1..22: mol_type = other DNA
gagtttagcctaccagaagttt

SEQ ID NO: 109627 - DNA, 22 bp, synthetic construct
  misc_feature 1..22: note = chemically synthesized
  source 1..22: mol_type = other DNA
agtttagcctaccagaagtttt

SEQ ID NO: 109628 - DNA, 22 bp, synthetic construct
  misc_feature 1..22: note = chemically synthesized
  source 1..22: mol_type = other DNA
agcctaccagaagttttctctt

SEQ ID NO: 109629 - DNA, 22 bp, synthetic construct
  misc_feature 1..22: note = chemically synthesized
  source 1..22: mol_type = other DNA
gcctaccagaagttttctcttt

SEQ ID NO: 109630 - DNA, 22 bp, synthetic construct
  misc_feature 1..22: note = chemically synthesized
  source 1..22: mol_type = other DNA
ccagaagttttctcttttccag

SEQ ID NO: 109631 - DNA, 22 bp, synthetic construct
  misc_feature 1..22: note = chemically synthesized
  source 1..22: mol_type = other DNA
tctcttttccaggggatgcagc

SEQ ID NO: 109632 - DNA, 22 bp, synthetic construct
  misc_feature 1..22: note = chemically synthesized
  source 1..22: mol_type = other DNA
ctcttttccaggggatgcagca

SEQ ID NO: 109633 - DNA, 22 bp, synthetic construct
  misc_feature 1..22: note = chemically synthesized
  source 1..22: mol_type = other DNA
tcttttccaggggatgcagcag

SEQ ID NO: 109634 - DNA, 22 bp, synthetic construct
  misc_feature 1..22: note = chemically synthesized
  source 1..22: mol_type = other DNA
ttttccaggggatgcagcaggc

SEQ ID NO: 109635 - DNA, 22 bp, synthetic construct
  misc_feature 1..22: note = chemically synthesized
  source 1..22: mol_type = other DNA
ttccaggggatgcagcaggcat

SEQ ID NO: 109636 - DNA, 22 bp, synthetic construct
  misc_feature 1..22: note = chemically synthesized
  source 1..22: mol_type = other DNA
tccaggggatgcagcaggcata

SEQ ID NO: 109637 - DNA, 22 bp, synthetic construct
  misc_feature 1..22: note = chemically synthesized
  source 1..22: mol_type = other DNA
ccaggggatgcagcaggcatac

SEQ ID NO: 109638 - DNA, 22 bp, synthetic construct
  misc_feature 1..22: note = chemically synthesized
  source 1..22: mol_type = other DNA
caggggatgcagcaggcatact

SEQ ID NO: 109639 - DNA, 22 bp, synthetic construct
  misc_feature 1..22: note = chemically synthesized
  source 1..22: mol_type = other DNA
atcacatggtgcttcagccaag

SEQ ID NO: 109640 - DNA, 22 bp, synthetic construct
  misc_feature 1..22: note = chemically synthesized
  source 1..22: mol_type = other DNA
cagccaagcacaccacatcact

SEQ ID NO: 109641 - DNA, 22 bp, synthetic construct
  misc_feature 1..22: note = chemically synthesized
  source 1..22: mol_type = other DNA
agccaagcacaccacatcactt

SEQ ID NO: 109642 - DNA, 22 bp, synthetic construct
  misc_feature 1..22: note = chemically synthesized
  source 1..22: mol_type = other DNA
tgtgatggcaattattatatgc

SEQ ID NO: 109643 - DNA, 22 bp, synthetic construct
  misc_feature 1..22: note = chemically synthesized
  source 1..22: mol_type = other DNA
gtgatggcaattattatatgcg

SEQ ID NO: 109644 - DNA, 22 bp, synthetic construct
  misc_feature 1..22: note = chemically synthesized
  source 1..22: mol_type = other DNA
tgatggcaattattatatgcgt

SEQ ID NO: 109645 - DNA, 22 bp, synthetic construct
  misc_feature 1..22: note = chemically synthesized
  source 1..22: mol_type = other DNA
ttatatgcgttttacagtaagg

SEQ ID NO: 109646 - DNA, 22 bp, synthetic construct
  misc_feature 1..22: note = chemically synthesized
  source 1..22: mol_type = other DNA
tatgcgttttacagtaaggact

SEQ ID NO: 109647 - DNA, 22 bp, synthetic construct
  misc_feature 1..22: note = chemically synthesized
  source 1..22: mol_type = other DNA
tacagtaaggactatgaaatgc

SEQ ID NO: 109648 - DNA, 22 bp, synthetic construct
  misc_feature 1..22: note = chemically synthesized
  source 1..22: mol_type = other DNA
acagtaaggactatgaaatgca

SEQ ID NO: 109649 - DNA, 22 bp, synthetic construct
  misc_feature 1..22: note = chemically synthesized
  source 1..22: mol_type = other DNA
cagtaaggactatgaaatgcaa

SEQ ID NO: 109650 - DNA, 22 bp, synthetic construct
  misc_feature 1..22: note = chemically synthesized
  source 1..22: mol_type = other DNA
tgaaatgcaatgagataaaata

SEQ ID NO: 109651 - DNA, 22 bp, synthetic construct
  misc_feature 1..22: note = chemically synthesized
  source 1..22: mol_type = other DNA
caaagtagcacagcaagagcca

SEQ ID NO: 109652 - DNA, 22 bp, synthetic construct
  misc_feature 1..22: note = chemically synthesized
  source 1..22: mol_type = other DNA
aacctccaacagaggaaaacct

SEQ ID NO: 109653 - DNA, 22 bp, synthetic construct
  misc_feature 1..22: note = chemically synthesized
  source 1..22: mol_type = other DNA
caacagaggaaaacctccagta

SEQ ID NO: 109654 - DNA, 22 bp, synthetic construct
  misc_feature 1..22: note = chemically synthesized
  source 1..22: mol_type = other DNA
cagtaaaagccaggacagagac

SEQ ID NO: 109655 - DNA, 22 bp, synthetic construct
  misc_feature 1..22: note = chemically synthesized
  source 1..22: mol_type = other DNA
gagttgtgctgttcaaagccca

SEQ ID NO: 109656 - DNA, 22 bp, synthetic construct
  misc_feature 1..22: note = chemically synthesized
  source 1..22: mol_type = other DNA
agttgtgctgttcaaagcccaa

SEQ ID NO: 109657 - DNA, 22 bp, synthetic construct
  misc_feature 1..22: note = chemically synthesized
  source 1..22: mol_type = other DNA
tgctgttcaaagcccaataccc

SEQ ID NO: 109658 - DNA, 22 bp, synthetic construct
  misc_feature 1..22: note = chemically synthesized
  source 1..22: mol_type = other DNA
ttcaaagcccaatacccacaag

SEQ ID NO: 109659 - DNA, 22 bp, synthetic construct
  misc_feature 1..22: note = chemically synthesized
  source 1..22: mol_type = other DNA
aaagcccaatacccacaaggct

SEQ ID NO: 109660 - DNA, 22 bp, synthetic construct
  misc_feature 1..22: note = chemically synthesized
  source 1..22: mol_type = other DNA
agggcacaaataatagagaaaa

SEQ ID NO: 109661 - DNA, 22 bp, synthetic construct
  misc_feature 1..22: note = chemically synthesized
  source 1..22: mol_type = other DNA
tctaaatcaggaatggtctctg

SEQ ID NO: 109662 - DNA, 22 bp, synthetic construct
  misc_feature 1..22: note = chemically synthesized
  source 1..22: mol_type = other DNA
aatcaggaatggtctctgggga

SEQ ID NO: 109663 - DNA, 22 bp, synthetic construct
  misc_feature 1..22: note = chemically synthesized
  source 1..22: mol_type = other DNA
tggggaggagcttctaaaataa

SEQ ID NO: 109664 - DNA, 22 bp, synthetic construct
  misc_feature 1..22: note = chemically synthesized
  source 1..22: mol_type = other DNA
gggaggagcttctaaaataaat

SEQ ID NO: 109665 - DNA, 22 bp, synthetic construct
  misc_feature 1..22: note = chemically synthesized
  source 1..22: mol_type = other DNA
ctaaaataaatgttcctaccag

SEQ ID NO: 109666 - DNA, 22 bp, synthetic construct
  misc_feature 1..22: note = chemically synthesized
  source 1..22: mol_type = other DNA
taaaataaatgttcctaccagc

SEQ ID NO: 109667 - DNA, 22 bp, synthetic construct
  misc_feature 1..22: note = chemically synthesized
  source 1..22: mol_type = other DNA
aaataaatgttcctaccagcca

SEQ ID NO: 109668 - DNA, 22 bp, synthetic construct
  misc_feature 1..22: note = chemically synthesized
  source 1..22: mol_type = other DNA
ctaccagccaggctcatgtgca

SEQ ID NO: 109669 - DNA, 22 bp, synthetic construct
  misc_feature 1..22: note = chemically synthesized
  source 1..22: mol_type = other DNA
ccagccaggctcatgtgcagat

SEQ ID NO: 109670 - DNA, 22 bp, synthetic construct
  misc_feature 1..22: note = chemically synthesized
  source 1..22: mol_type = other DNA
atgtgcagattctgaaaagatg

SEQ ID NO: 109671 - DNA, 22 bp, synthetic construct
  misc_feature 1..22: note = chemically synthesized
  source 1..22: mol_type = other DNA
tgaaaagatgatgcccaaatct

SEQ ID NO: 109672 - DNA, 22 bp, synthetic construct
  misc_feature 1..22: note = chemically synthesized
  source 1..22: mol_type = other DNA
aaaagatgatgcccaaatcttt

SEQ ID NO: 109673 - DNA, 22 bp, synthetic construct
  misc_feature 1..22: note = chemically synthesized
  source 1..22: mol_type = other DNA
tcatacggctaaagatgtgaga

SEQ ID NO: 109674 - DNA, 22 bp, synthetic construct
  misc_feature 1..22: note = chemically synthesized
  source 1..22: mol_type = other DNA
catacggctaaagatgtgagat

SEQ ID NO: 109675 - DNA, 22 bp, synthetic construct
  misc_feature 1..22: note = chemically synthesized
  source 1..22: mol_type = other DNA
atacggctaaagatgtgagata

SEQ ID NO: 109676 - DNA, 22 bp, synthetic construct
  misc_feature 1..22: note = chemically synthesized
  source 1..22: mol_type = other DNA
aagatgtgagatacatgactat

SEQ ID NO: 109677 - DNA, 22 bp, synthetic construct
  misc_feature 1..22: note = chemically synthesized
  source 1..22: mol_type = other DNA
tggaactgaagaatggaaggga

SEQ ID NO: 109678 - DNA, 22 bp, synthetic construct
  misc_feature 1..22: note = chemically synthesized
  source 1..22: mol_type = other DNA
aagaatggaagggaacaaagtt

SEQ ID NO: 109679 - DNA, 22 bp, synthetic construct
  misc_feature 1..22: note = chemically synthesized
  source 1..22: mol_type = other DNA
caggtcagtgagggtatttaat

SEQ ID NO: 109680 - DNA, 22 bp, synthetic construct
  misc_feature 1..22: note = chemically synthesized
  source 1..22: mol_type = other DNA
aggtcagtgagggtatttaatg

SEQ ID NO: 109681 - DNA, 22 bp, synthetic construct
  misc_feature 1..22: note = chemically synthesized
  source 1..22: mol_type = other DNA
aatgaatctcctctgtaagatc

SEQ ID NO: 109682 - DNA, 22 bp, synthetic construct
  misc_feature 1..22: note = chemically synthesized
  source 1..22: mol_type = other DNA
atgaatctcctctgtaagatct

SEQ ID NO: 109683 - DNA, 22 bp, synthetic construct
  misc_feature 1..22: note = chemically synthesized
  source 1..22: mol_type = other DNA
ctctgtaagatctcattgcagg

SEQ ID NO: 109684 - DNA, 22 bp, synthetic construct
  misc_feature 1..22: note = chemically synthesized
  source 1..22: mol_type = other DNA
tgtaagatctcattgcaggaac

SEQ ID NO: 109685 - DNA, 22 bp, synthetic construct
  misc_feature 1..22: note = chemically synthesized
  source 1..22: mol_type = other DNA
taagatctcattgcaggaacca

SEQ ID NO: 109686 - DNA, 22 bp, synthetic construct
  misc_feature 1..22: note = chemically synthesized
  source 1..22: mol_type = other DNA
attgcaggaaccaaggcaaaaa

SEQ ID NO: 109687 - DNA, 22 bp, synthetic construct
  misc_feature 1..22: note = chemically synthesized
  source 1..22: mol_type = other DNA
caggaaccaaggcaaaaaaaaa

SEQ ID NO: 109688 - DNA, 22 bp, synthetic construct
  misc_feature 1..22: note = chemically synthesized
  source 1..22: mol_type = other DNA
atttcttagcaagagaaaagta

SEQ ID NO: 109689 - DNA, 22 bp, synthetic construct
  misc_feature 1..22: note = chemically synthesized
  source 1..22: mol_type = other DNA
cttagcaagagaaaagtaatag

SEQ ID NO: 109690 - DNA, 22 bp, synthetic construct
  misc_feature 1..22: note = chemically synthesized
  source 1..22: mol_type = other DNA
ttagcaagagaaaagtaatagt

SEQ ID NO: 109691 - DNA, 22 bp, synthetic construct
  misc_feature 1..22: note = chemically synthesized
  source 1..22: mol_type = other DNA
agcaagagaaaagtaatagtgt

SEQ ID NO: 109692 - DNA, 22 bp, synthetic construct
  misc_feature 1..22: note = chemically synthesized
  source 1..22: mol_type = other DNA
gcaagagaaaagtaatagtgtt

SEQ ID NO: 109693 - DNA, 22 bp, synthetic construct
  misc_feature 1..22: note = chemically synthesized
  source 1..22: mol_type = other DNA
tctgctaagagtagatatatgt

SEQ ID NO: 109694 - DNA, 22 bp, synthetic construct
  misc_feature 1..22: note = chemically synthesized
  source 1..22: mol_type = other DNA
ctaagagtagatatatgtagta

SEQ ID NO: 109695 - DNA, 22 bp, synthetic construct
  misc_feature 1..22: note = chemically synthesized
  source 1..22: mol_type = other DNA
agagtagatatatgtagtaggc

SEQ ID NO: 109696 - DNA, 22 bp, synthetic construct
  misc_feature 1..22: note = chemically synthesized
  source 1..22: mol_type = other DNA
aagactccctgacatctctaaa

SEQ ID NO: 109697 - DNA, 22 bp, synthetic construct
  misc_feature 1..22: note = chemically synthesized
  source 1..22: mol_type = other DNA
cctgacatctctaaaacttggt

SEQ ID NO: 109698 - DNA, 22 bp, synthetic construct
  misc_feature 1..22: note = chemically synthesized
  source 1..22: mol_type = other DNA
acatctctaaaacttggtttct

SEQ ID NO: 109699 - DNA, 22 bp, synthetic construct
  misc_feature 1..22: note = chemically synthesized
  source 1..22: mol_type = other DNA
taaaacttggtttctttgagag

SEQ ID NO: 109700 - DNA, 22 bp, synthetic construct
  misc_feature 1..22: note = chemically synthesized
  source 1..22: mol_type = other DNA
aaacttggtttctttgagagtt

SEQ ID NO: 109701 - DNA, 22 bp, synthetic construct
  misc_feature 1..22: note = chemically synthesized
  source 1..22: mol_type = other DNA
ggtttctttgagagttacctct

SEQ ID NO: 109702 - DNA, 22 bp, synthetic construct
  misc_feature 1..22: note = chemically synthesized
  source 1..22: mol_type = other DNA
gtttctttgagagttacctctt

SEQ ID NO: 109703 - DNA, 22 bp, synthetic construct
  misc_feature 1..22: note = chemically synthesized
  source 1..22: mol_type = other DNA
ctttgagagttacctcttcaaa

SEQ ID NO: 109704 - DNA, 22 bp, synthetic construct
  misc_feature 1..22: note = chemically synthesized
  source 1..22: mol_type = other DNA
tttgagagttacctcttcaaat

SEQ ID NO: 109705 - DNA, 22 bp, synthetic construct
  misc_feature 1..22: note = chemically synthesized
  source 1..22: mol_type = other DNA
tgagagttacctcttcaaatat

SEQ ID NO: 109706 - DNA, 22 bp, synthetic construct
  misc_feature 1..22: note = chemically synthesized
  source 1..22: mol_type = other DNA
gagagttacctcttcaaatata

SEQ ID NO: 109707 - DNA, 22 bp, synthetic construct
  misc_feature 1..22: note = chemically synthesized
  source 1..22: mol_type = other DNA
agagttacctcttcaaatataa

SEQ ID NO: 109708 - DNA, 22 bp, synthetic construct
  misc_feature 1..22: note = chemically synthesized
  source 1..22: mol_type = other DNA
cctcttcaaatataaaaaagtg

SEQ ID NO: 109709 - DNA, 22 bp, synthetic construct
  misc_feature 1..22: note = chemically synthesized
  source 1..22: mol_type = other DNA
ttcaaatataaaaaagtgaagg

SEQ ID NO: 109710 - DNA, 22 bp, synthetic construct
  misc_feature 1..22: note = chemically synthesized
  source 1..22: mol_type = other DNA
caaatataaaaaagtgaaggat

SEQ ID NO: 109711 - DNA, 22 bp, synthetic construct
  misc_feature 1..22: note = chemically synthesized
  source 1..22: mol_type = other DNA
aaatataaaaaagtgaaggata

SEQ ID NO: 109712 - DNA, 22 bp, synthetic construct
  misc_feature 1..22: note = chemically synthesized
  source 1..22: mol_type = other DNA
tggaacacataaggcaaacaat

SEQ ID NO: 109713 - DNA, 22 bp, synthetic construct
  misc_feature 1..22: note = chemically synthesized
  source 1..22: mol_type = other DNA
gaacacataaggcaaacaattc

SEQ ID NO: 109714 - DNA, 22 bp, synthetic construct
  misc_feature 1..22: note = chemically synthesized
  source 1..22: mol_type = other DNA
tacgaacaaaccagagcatggg

SEQ ID NO: 109715 - DNA, 22 bp, synthetic construct
  misc_feature 1..22: note = chemically synthesized
  source 1..22: mol_type = other DNA
cgaacaaaccagagcatgggtg

SEQ ID NO: 109716 - DNA, 22 bp, synthetic construct
  misc_feature 1..22: note = chemically synthesized
  source 1..22: mol_type = other DNA
actcaggcatgaattatggggt

SEQ ID NO: 109717 - DNA, 22 bp, synthetic construct
  misc_feature 1..22: note = chemically synthesized
  source 1..22: mol_type = other DNA
aggcatgaattatggggttgta

SEQ ID NO: 109718 - DNA, 22 bp, synthetic construct
  misc_feature 1..22: note = chemically synthesized
  source 1..22: mol_type = other DNA
tggggttgtagtaatttctctc

SEQ ID NO: 109719 - DNA, 22 bp, synthetic construct
  misc_feature 1..22: note = chemically synthesized
  source 1..22: mol_type = other DNA
tagtaatttctctccacctgac

SEQ ID NO: 109720 - DNA, 22 bp, synthetic construct
  misc_feature 1..22: note = chemically synthesized
  source 1..22: mol_type = other DNA
ctctccacctgactgattcttt

SEQ ID NO: 109721 - DNA, 22 bp, synthetic construct
  misc_feature 1..22: note = chemically synthesized
  source 1..22: mol_type = other DNA
tctccacctgactgattcttta

SEQ ID NO: 109722 - DNA, 22 bp, synthetic construct
  misc_feature 1..22: note = chemically synthesized
  source 1..22: mol_type = other DNA
tccacctgactgattctttaat

SEQ ID NO: 109723 - DNA, 22 bp, synthetic construct
  misc_feature 1..22: note = chemically synthesized
  source 1..22: mol_type = other DNA
cacctgactgattctttaatct

SEQ ID NO: 109724 - DNA, 22 bp, synthetic construct
  misc_feature 1..22: note = chemically synthesized
  source 1..22: mol_type = other DNA
actgattctttaatctctctgg

SEQ ID NO: 109725 - DNA, 22 bp, synthetic construct
  misc_feature 1..22: note = chemically synthesized
  source 1..22: mol_type = other DNA
attctttaatctctctggcttc

SEQ ID NO: 109726 - DNA, 22 bp, synthetic construct
  misc_feature 1..22: note = chemically synthesized
  source 1..22: mol_type = other DNA
tttaatctctctggcttccatt

SEQ ID NO: 109727 - DNA, 22 bp, synthetic construct
  misc_feature 1..22: note = chemically synthesized
  source 1..22: mol_type = other DNA
taatctctctggcttccattct

SEQ ID NO: 109728 - DNA, 22 bp, synthetic construct
  misc_feature 1..22: note = chemically synthesized
  source 1..22: mol_type = other DNA
aatctctctggcttccattcta

SEQ ID NO: 109729 - DNA, 22 bp, synthetic construct
  misc_feature 1..22: note = chemically synthesized
  source 1..22: mol_type = other DNA
atctctctggcttccattctaa

SEQ ID NO: 109730 - DNA, 22 bp, synthetic construct
  misc_feature 1..22: note = chemically synthesized
  source 1..22: mol_type = other DNA
tctggcttccattctaaccctg

SEQ ID NO: 109731 - DNA, 22 bp, synthetic construct
  misc_feature 1..22: note = chemically synthesized
  source 1..22: mol_type = other DNA
tggcttccattctaaccctgag

SEQ ID NO: 109732 - DNA, 22 bp, synthetic construct
  misc_feature 1..22: note = chemically synthesized
  source 1..22: mol_type = other DNA
gcttccattctaaccctgagag

SEQ ID NO: 109733 - DNA, 22 bp, synthetic construct
  misc_feature 1..22: note = chemically synthesized
  source 1..22: mol_type = other DNA
ccattctaaccctgagagtccc

SEQ ID NO: 109734 - DNA, 22 bp, synthetic construct
  misc_feature 1..22: note = chemically synthesized
  source 1..22: mol_type = other DNA
cattctaaccctgagagtcccc

SEQ ID NO: 109735 - DNA, 22 bp, synthetic construct
  misc_feature 1..22: note = chemically synthesized
  source 1..22: mol_type = other DNA
taaccctgagagtccccctgcc

SEQ ID NO: 109736 - DNA, 22 bp, synthetic construct
  misc_feature 1..22: note = chemically synthesized
  source 1..22: mol_type = other DNA
accctgagagtccccctgcccc

SEQ ID NO: 109737 - DNA, 22 bp, synthetic construct
  misc_feature 1..22: note = chemically synthesized
  source 1..22: mol_type = other DNA
agagtccccctgcccccaaccc

SEQ ID NO: 109738 - DNA, 22 bp, synthetic construct
  misc_feature 1..22: note = chemically synthesized
  source 1..22: mol_type = other DNA
cccccaaccccatgtcttttac

SEQ ID NO: 109739 - DNA, 22 bp, synthetic construct
  misc_feature 1..22: note = chemically synthesized
  source 1..22: mol_type = other DNA
ttaccttagaagtccagataag

SEQ ID NO: 109740 - DNA, 22 bp, synthetic construct
  misc_feature 1..22: note = chemically synthesized
  source 1..22: mol_type = other DNA
taccttagaagtccagataagt

SEQ ID NO: 109741 - DNA, 22 bp, synthetic construct
  misc_feature 1..22: note = chemically synthesized
  source 1..22: mol_type = other DNA
accttagaagtccagataagtg

SEQ ID NO: 109742 - DNA, 22 bp, synthetic construct
  misc_feature 1..22: note = chemically synthesized
  source 1..22: mol_type = other DNA
ccttagaagtccagataagtgc

SEQ ID NO: 109743 - DNA, 22 bp, synthetic construct
  misc_feature 1..22: note = chemically synthesized
  source 1..22: mol_type = other DNA
agaagtccagataagtgccaaa

SEQ ID NO: 109744 - DNA, 22 bp, synthetic construct
  misc_feature 1..22: note = chemically synthesized
  source 1..22: mol_type = other DNA
gaagtccagataagtgccaaat

SEQ ID NO: 109745 - DNA, 22 bp, synthetic construct
  misc_feature 1..22: note = chemically synthesized
  source 1..22: mol_type = other DNA
ttccaaattcttgaggaggtat

SEQ ID NO: 109746 - DNA, 22 bp, synthetic construct
  misc_feature 1..22: note = chemically synthesized
  source 1..22: mol_type = other DNA
ccaaattcttgaggaggtatac

SEQ ID NO: 109747 - DNA, 22 bp, synthetic construct
  misc_feature 1..22: note = chemically synthesized
  source 1..22: mol_type = other DNA
caaattcttgaggaggtatacc

SEQ ID NO: 109748 - DNA, 22 bp, synthetic construct
  misc_feature 1..22: note = chemically synthesized
  source 1..22: mol_type = other DNA
ttgaggaggtatacctctgtaa

SEQ ID NO: 109749 - DNA, 22 bp, synthetic construct
  misc_feature 1..22: note = chemically synthesized
  source 1..22: mol_type = other DNA
gaggaggtatacctctgtaatc

SEQ ID NO: 109750 - DNA, 22 bp, synthetic construct
  misc_feature 1..22: note = chemically synthesized
  source 1..22: mol_type = other DNA
aggaggtatacctctgtaatca

SEQ ID NO: 109751 - DNA, 22 bp, synthetic construct
  misc_feature 1..22: note = chemically synthesized
  source 1..22: mol_type = other DNA
tgtaatcatcagaggttcaaat

SEQ ID NO: 109752 - DNA, 22 bp, synthetic construct
  misc_feature 1..22: note = chemically synthesized
  source 1..22: mol_type = other DNA
taatcatcagaggttcaaatac

SEQ ID NO: 109753 - DNA, 22 bp, synthetic construct
  misc_feature 1..22: note = chemically synthesized
  source 1..22: mol_type = other DNA
aaatactttctagaaaaaaagt

SEQ ID NO: 109754 - DNA, 22 bp, synthetic construct
  misc_feature 1..22: note = chemically synthesized
  source 1..22: mol_type = other DNA
tctagaaaaaaagtcactatct

SEQ ID NO: 109755 - DNA, 22 bp, synthetic construct
  misc_feature 1..22: note = chemically synthesized
  source 1..22: mol_type = other DNA
ctagaaaaaaagtcactatctg

SEQ ID NO: 109756 - DNA, 22 bp, synthetic construct
  misc_feature 1..22: note = chemically synthesized
  source 1..22: mol_type = other DNA
tagaaaaaaagtcactatctga

SEQ ID NO: 109757 - DNA, 22 bp, synthetic construct
  misc_feature 1..22: note = chemically synthesized
  source 1..22: mol_type = other DNA
gaaaaaaagtcactatctgacc

SEQ ID NO: 109758 - DNA, 22 bp, synthetic construct
  misc_feature 1..22: note = chemically synthesized
  source 1..22: mol_type = other DNA
tctgaccatatgactaataaac

SEQ ID NO: 109759 - DNA, 22 bp, synthetic construct
  misc_feature 1..22: note = chemically synthesized
  source 1..22: mol_type = other DNA
accatatgactaataaaccaat

SEQ ID NO: 109760 - DNA, 22 bp, synthetic construct
  misc_feature 1..22: note = chemically synthesized
  source 1..22: mol_type = other DNA
ataaaccaattcaaaattaagc

SEQ ID NO: 109761 - DNA, 22 bp, synthetic construct
  misc_feature 1..22: note = chemically synthesized
  source 1..22: mol_type = other DNA
aaaattaagcttggacggagct

SEQ ID NO: 109762 - DNA, 22 bp, synthetic construct
  misc_feature 1..22: note = chemically synthesized
  source 1..22: mol_type = other DNA
agcttggacggagcttgggtta

SEQ ID NO: 109763 - DNA, 22 bp, synthetic construct
  misc_feature 1..22: note = chemically synthesized
  source 1..22: mol_type = other DNA
ggacggagcttgggttatgtgt

SEQ ID NO: 109764 - DNA, 22 bp, synthetic construct
  misc_feature 1..22: note = chemically synthesized
  source 1..22: mol_type = other DNA
gacggagcttgggttatgtgtg

SEQ ID NO: 109765 - DNA, 22 bp, synthetic construct
  misc_feature 1..22: note = chemically synthesized
  source 1..22: mol_type = other DNA
gggttatgtgtgcctctggatc

SEQ ID NO: 109766 - DNA, 22 bp, synthetic construct
  misc_feature 1..22: note = chemically synthesized
  source 1..22: mol_type = other DNA
ggttatgtgtgcctctggatca

SEQ ID NO: 109767 - DNA, 22 bp, synthetic construct
  misc_feature 1..22: note = chemically synthesized
  source 1..22: mol_type = other DNA
tgtgtgcctctggatcaggggt

SEQ ID NO: 109768 - DNA, 22 bp, synthetic construct
  misc_feature 1..22: note = chemically synthesized
  source 1..22: mol_type = other DNA
tggatcaggggtacagattcac

SEQ ID NO: 109769 - DNA, 22 bp, synthetic construct
  misc_feature 1..22: note = chemically synthesized
  source 1..22: mol_type = other DNA
gatcaggggtacagattcacat

SEQ ID NO: 109770 - DNA, 22 bp, synthetic construct
  misc_feature 1..22: note = chemically synthesized
  source 1..22: mol_type = other DNA
acatagcctgtgtgactttagc

SEQ ID NO: 109771 - DNA, 22 bp, synthetic construct
  misc_feature 1..22: note = chemically synthesized
  source 1..22: mol_type = other DNA
tgtgactttagcacctggaaag

SEQ ID NO: 109772 - DNA, 22 bp, synthetic construct
  misc_feature 1..22: note = chemically synthesized
  source 1..22: mol_type = other DNA
tagcacctggaaaggtttatat

SEQ ID NO: 109773 - DNA, 22 bp, synthetic construct
  misc_feature 1..22: note = chemically synthesized
  source 1..22: mol_type = other DNA
agcacctggaaaggtttatatt

SEQ ID NO: 109774 - DNA, 22 bp, synthetic construct
  misc_feature 1..22: note = chemically synthesized
  source 1..22: mol_type = other DNA
gcacctggaaaggtttatattg

SEQ ID NO: 109775 - DNA, 22 bp, synthetic construct
  misc_feature 1..22: note = chemically synthesized
  source 1..22: mol_type = other DNA
gaaaggtttatattgtgtaaca

SEQ ID NO: 109776 - DNA, 22 bp, synthetic construct
  misc_feature 1..22: note = chemically synthesized
  source 1..22: mol_type = other DNA
atattgtgtaacaggcatccac

SEQ ID NO: 109777 - DNA, 22 bp, synthetic construct
  misc_feature 1..22: note = chemically synthesized
  source 1..22: mol_type = other DNA
tattgtgtaacaggcatccact

SEQ ID NO: 109778 - DNA, 22 bp, synthetic construct
  misc_feature 1..22: note = chemically synthesized
  source 1..22: mol_type = other DNA
tgtaacaggcatccactactct

SEQ ID NO: 109779 - DNA, 22 bp, synthetic construct
  misc_feature 1..22: note = chemically synthesized
  source 1..22: mol_type = other DNA
ctcttccatcttcttttgcctg

SEQ ID NO: 109780 - DNA, 22 bp, synthetic construct
  misc_feature 1..22: note = chemically synthesized
  source 1..22: mol_type = other DNA
ttccatcttcttttgcctgctt

SEQ ID NO: 109781 - DNA, 22 bp, synthetic construct
  misc_feature 1..22: note = chemically synthesized
  source 1..22: mol_type = other DNA
ccatcttcttttgcctgctttc

SEQ ID NO: 109782 - DNA, 22 bp, synthetic construct
  misc_feature 1..22: note = chemically synthesized
  source 1..22: mol_type = other DNA
catcttcttttgcctgctttct

SEQ ID NO: 109783 - DNA, 22 bp, synthetic construct
  misc_feature 1..22: note = chemically synthesized
  source 1..22: mol_type = other DNA
cttttgcctgctttcttctagc

SEQ ID NO: 109784 - DNA, 22 bp, synthetic construct
  misc_feature 1..22: note = chemically synthesized
  source 1..22: mol_type = other DNA
ttttgcctgctttcttctagcc

SEQ ID NO: 109785 - DNA, 22 bp, synthetic construct
  misc_feature 1..22: note = chemically synthesized
  source 1..22: mol_type = other DNA
ttgcctgctttcttctagccgc

SEQ ID NO: 109786 - DNA, 22 bp, synthetic construct
  misc_feature 1..22: note = chemically synthesized
  source 1..22: mol_type = other DNA
tgcctgctttcttctagccgcc

SEQ ID NO: 109787 - DNA, 22 bp, synthetic construct
  misc_feature 1..22: note = chemically synthesized
  source 1..22: mol_type = other DNA
gcctgctttcttctagccgccc

SEQ ID NO: 109788 - DNA, 22 bp, synthetic construct
  misc_feature 1..22: note = chemically synthesized
  source 1..22: mol_type = other DNA
cctgctttcttctagccgccct

SEQ ID NO: 109789 - DNA, 22 bp, synthetic construct
  misc_feature 1..22: note = chemically synthesized
  source 1..22: mol_type = other DNA
ctttcttctagccgccctggca

SEQ ID NO: 109790 - DNA, 22 bp, synthetic construct
  misc_feature 1..22: note = chemically synthesized
  source 1..22: mol_type = other DNA
tcttctagccgccctggcagct

SEQ ID NO: 109791 - DNA, 22 bp, synthetic construct
  misc_feature 1..22: note = chemically synthesized
  source 1..22: mol_type = other DNA
cttctagccgccctggcagctg

SEQ ID NO: 109792 - DNA, 22 bp, synthetic construct
  misc_feature 1..22: note = chemically synthesized
  source 1..22: mol_type = other DNA
ttctagccgccctggcagctga

SEQ ID NO: 109793 - DNA, 22 bp, synthetic construct
  misc_feature 1..22: note = chemically synthesized
  source 1..22: mol_type = other DNA
ctagccgccctggcagctgatt

SEQ ID NO: 109794 - DNA, 22 bp, synthetic construct
  misc_feature 1..22: note = chemically synthesized
  source 1..22: mol_type = other DNA
tagccgccctggcagctgatta

SEQ ID NO: 109795 - DNA, 22 bp, synthetic construct
  misc_feature 1..22: note = chemically synthesized
  source 1..22: mol_type = other DNA
gccgccctggcagctgattaga

SEQ ID NO: 109796 - DNA, 22 bp, synthetic construct
  misc_feature 1..22: note = chemically synthesized
  source 1..22: mol_type = other DNA
gcagctgattagatagtaccca

SEQ ID NO: 109797 - DNA, 22 bp, synthetic construct
  misc_feature 1..22: note = chemically synthesized
  source 1..22: mol_type = other DNA
attagatagtacccacccagac

SEQ ID NO: 109798 - DNA, 22 bp, synthetic construct
  misc_feature 1..22: note = chemically synthesized
  source 1..22: mol_type = other DNA
gatagtacccacccagacggag

SEQ ID NO: 109799 - DNA, 22 bp, synthetic construct
  misc_feature 1..22: note = chemically synthesized
  source 1..22: mol_type = other DNA
cctctcccagtctactgactca

SEQ ID NO: 109800 - DNA, 22 bp, synthetic construct
  misc_feature 1..22: note = chemically synthesized
  source 1..22: mol_type = other DNA
tcccagtctactgactcaaatg

SEQ ID NO: 109801 - DNA, 22 bp, synthetic construct
  misc_feature 1..22: note = chemically synthesized
  source 1..22: mol_type = other DNA
ccagtctactgactcaaatgtt

SEQ ID NO: 109802 - DNA, 22 bp, synthetic construct
  misc_feature 1..22: note = chemically synthesized
  source 1..22: mol_type = other DNA
ctgactcaaatgttaatctcct

SEQ ID NO: 109803 - DNA, 22 bp, synthetic construct
  misc_feature 1..22: note = chemically synthesized
  source 1..22: mol_type = other DNA
actcaaatgttaatctcctttg

SEQ ID NO: 109804 - DNA, 22 bp, synthetic construct
  misc_feature 1..22: note = chemically synthesized
  source 1..22: mol_type = other DNA
aaatgttaatctcctttggcaa

SEQ ID NO: 109805 - DNA, 22 bp, synthetic construct
  misc_feature 1..22: note = chemically synthesized
  source 1..22: mol_type = other DNA
atctcctttggcaacaccctta

SEQ ID NO: 109806 - DNA, 22 bp, synthetic construct
  misc_feature 1..22: note = chemically synthesized
  source 1..22: mol_type = other DNA
ctttggcaacacccttacagca

SEQ ID NO: 109807 - DNA, 22 bp, synthetic construct
  misc_feature 1..22: note = chemically synthesized
  source 1..22: mol_type = other DNA
tggcaacacccttacagcacac

SEQ ID NO: 109808 - DNA, 22 bp, synthetic construct
  misc_feature 1..22: note = chemically synthesized
  source 1..22: mol_type = other DNA
ggcaacacccttacagcacacc

SEQ ID NO: 109809 - DNA, 22 bp, synthetic construct
  misc_feature 1..22: note = chemically synthesized
  source 1..22: mol_type = other DNA
gcaacacccttacagcacaccc

SEQ ID NO: 109810 - DNA, 22 bp, synthetic construct
  misc_feature 1..22: note = chemically synthesized
  source 1..22: mol_type = other DNA
acagcacacccaggaacaatac

SEQ ID NO: 109811 - DNA, 22 bp, synthetic construct
  misc_feature 1..22: note = chemically synthesized
  source 1..22: mol_type = other DNA
cagcacacccaggaacaatact

SEQ ID NO: 109812 - DNA, 22 bp, synthetic construct
  misc_feature 1..22: note = chemically synthesized
  source 1..22: mol_type = other DNA
tgcatccttcaatccaatcaag

SEQ ID NO: 109813 - DNA, 22 bp, synthetic construct
  misc_feature 1..22: note = chemically synthesized
  source 1..22: mol_type = other DNA
gcatccttcaatccaatcaagt

SEQ ID NO: 109814 - DNA, 22 bp, synthetic construct
  misc_feature 1..22: note = chemically synthesized
  source 1..22: mol_type = other DNA
catccttcaatccaatcaagtt

SEQ ID NO: 109815 - DNA, 22 bp, synthetic construct
  misc_feature 1..22: note = chemically synthesized
  source 1..22: mol_type = other DNA
caatccaatcaagtttgcactc

SEQ ID NO: 109816 - DNA, 22 bp, synthetic construct
  misc_feature 1..22: note = chemically synthesized
  source 1..22: mol_type = other DNA
aatccaatcaagtttgcactca

SEQ ID NO: 109817 - DNA, 22 bp, synthetic construct
  misc_feature 1..22: note = chemically synthesized
  source 1..22: mol_type = other DNA
gcactcaatattaaccatcaca

SEQ ID NO: 109818 - DNA, 22 bp, synthetic construct
  misc_feature 1..22: note = chemically synthesized
  source 1..22: mol_type = other DNA
cactcaatattaaccatcacag

SEQ ID NO: 109819 - DNA, 22 bp, synthetic construct
  misc_feature 1..22: note = chemically synthesized
  source 1..22: mol_type = other DNA
aatattaaccatcacagaaagg

SEQ ID NO: 109820 - DNA, 22 bp, synthetic construct
  misc_feature 1..22: note = chemically synthesized
  source 1..22: mol_type = other DNA
accatcacagaaaggataatag

SEQ ID NO: 109821 - DNA, 22 bp, synthetic construct
  misc_feature 1..22: note = chemically synthesized
  source 1..22: mol_type = other DNA
agtgcttgagacagaaaagagt

SEQ ID NO: 109822 - DNA, 22 bp, synthetic construct
  misc_feature 1..22: note = chemically synthesized
  source 1..22: mol_type = other DNA
gagacagaaaagagtgtcagga

SEQ ID NO: 109823 - DNA, 22 bp, synthetic construct
  misc_feature 1..22: note = chemically synthesized
  source 1..22: mol_type = other DNA
agacagaaaagagtgtcaggaa

SEQ ID NO: 109824 - DNA, 22 bp, synthetic construct
  misc_feature 1..22: note = chemically synthesized
  source 1..22: mol_type = other DNA
acatctgaatgggctcctgctg

SEQ ID NO: 109825 - DNA, 22 bp, synthetic construct
  misc_feature 1..22: note = chemically synthesized
  source 1..22: mol_type = other DNA
aatgggctcctgctgaggtgtc

SEQ ID NO: 109826 - DNA, 22 bp, synthetic construct
  misc_feature 1..22: note = chemically synthesized
  source 1..22: mol_type = other DNA
ctgctgaggtgtctgcatagag

SEQ ID NO: 109827 - DNA, 22 bp, synthetic construct
  misc_feature 1..22: note = chemically synthesized
  source 1..22: mol_type = other DNA
ctgaggtgtctgcatagagcca

SEQ ID NO: 109828 - DNA, 22 bp, synthetic construct
  misc_feature 1..22: note = chemically synthesized
  source 1..22: mol_type = other DNA
aggtgtctgcatagagccatca

SEQ ID NO: 109829 - DNA, 22 bp, synthetic construct
  misc_feature 1..22: note = chemically synthesized
  source 1..22: mol_type = other DNA
catagagccatcagtttatgcg

SEQ ID NO: 109830 - DNA, 22 bp, synthetic construct
  misc_feature 1..22: note = chemically synthesized
  source 1..22: mol_type = other DNA
atgcggcagagtttgagacttt

SEQ ID NO: 109831 - DNA, 22 bp, synthetic construct
  misc_feature 1..22: note = chemically synthesized
  source 1..22: mol_type = other DNA
tgcggcagagtttgagactttg

SEQ ID NO: 109832 - DNA, 22 bp, synthetic construct
  misc_feature 1..22: note = chemically synthesized
  source 1..22: mol_type = other DNA
gagactttgagaattagtttct

SEQ ID NO: 109833 - DNA, 22 bp, synthetic construct
  misc_feature 1..22: note = chemically synthesized
  source 1..22: mol_type = other DNA
agactttgagaattagtttctc

SEQ ID NO: 109834 - DNA, 22 bp, synthetic construct
  misc_feature 1..22: note = chemically synthesized
  source 1..22: mol_type = other DNA
tgagaattagtttctcattaat

SEQ ID NO: 109835 - DNA, 22 bp, synthetic construct
  misc_feature 1..22: note = chemically synthesized
  source 1..22: mol_type = other DNA
gagaattagtttctcattaata

SEQ ID NO: 109836 - DNA, 22 bp, synthetic construct
  misc_feature 1..22: note = chemically synthesized
  source 1..22: mol_type = other DNA
agaattagtttctcattaataa

SEQ ID NO: 109837 - DNA, 22 bp, synthetic construct
  misc_feature 1..22: note = chemically synthesized
  source 1..22: mol_type = other DNA
gtttctcattaataaaaactca

SEQ ID NO: 109838 - DNA, 22 bp, synthetic construct
  misc_feature 1..22: note = chemically synthesized
  source 1..22: mol_type = other DNA
ctcattaataaaaactcaagtc

SEQ ID NO: 109839 - DNA, 22 bp, synthetic construct
  misc_feature 1..22: note = chemically synthesized
  source 1..22: mol_type = other DNA
tcattaataaaaactcaagtct

SEQ ID NO: 109840 - DNA, 22 bp, synthetic construct
  misc_feature 1..22: note = chemically synthesized
  source 1..22: mol_type = other DNA
attaataaaaactcaagtctat

SEQ ID NO: 109841 - DNA, 22 bp, synthetic construct
  misc_feature 1..22: note = chemically synthesized
  source 1..22: mol_type = other DNA
ataaaaactcaagtctattcta

SEQ ID NO: 109842 - DNA, 22 bp, synthetic construct
  misc_feature 1..22: note = chemically synthesized
  source 1..22: mol_type = other DNA
aagtctattctatgacagagac

SEQ ID NO: 109843 - DNA, 22 bp, synthetic construct
  misc_feature 1..22: note = chemically synthesized
  source 1..22: mol_type = other DNA
ttctatgacagagaccctggaa

SEQ ID NO: 109844 - DNA, 22 bp, synthetic construct
  misc_feature 1..22: note = chemically synthesized
  source 1..22: mol_type = other DNA
tatgacagagaccctggaagag

SEQ ID NO: 109845 - DNA, 22 bp, synthetic construct
  misc_feature 1..22: note = chemically synthesized
  source 1..22: mol_type = other DNA
tgacagagaccctggaagaggg

SEQ ID NO: 109846 - DNA, 22 bp, synthetic construct
  misc_feature 1..22: note = chemically synthesized
  source 1..22: mol_type = other DNA
gaagagggtgaatggctgcagg

SEQ ID NO: 109847 - DNA, 22 bp, synthetic construct
  misc_feature 1..22: note = chemically synthesized
  source 1..22: mol_type = other DNA
cagggatgaggcaaaggtttta

SEQ ID NO: 109848 - DNA, 22 bp, synthetic construct
  misc_feature 1..22: note = chemically synthesized
  source 1..22: mol_type = other DNA
tagatttttatcccctctgaaa

SEQ ID NO: 109849 - DNA, 22 bp, synthetic construct
  misc_feature 1..22: note = chemically synthesized
  source 1..22: mol_type = other DNA
agatttttatcccctctgaaac

SEQ ID NO: 109850 - DNA, 22 bp, synthetic construct
  misc_feature 1..22: note = chemically synthesized
  source 1..22: mol_type = other DNA
gatttttatcccctctgaaact

SEQ ID NO: 109851 - DNA, 22 bp, synthetic construct
  misc_feature 1..22: note = chemically synthesized
  source 1..22: mol_type = other DNA
ttatcccctctgaaactcacag

SEQ ID NO: 109852 - DNA, 22 bp, synthetic construct
  misc_feature 1..22: note = chemically synthesized
  source 1..22: mol_type = other DNA
tatcccctctgaaactcacaga

SEQ ID NO: 109853 - DNA, 22 bp, synthetic construct
  misc_feature 1..22: note = chemically synthesized
  source 1..22: mol_type = other DNA
atcccctctgaaactcacagat

SEQ ID NO: 109854 - DNA, 22 bp, synthetic construct
  misc_feature 1..22: note = chemically synthesized
  source 1..22: mol_type = other DNA
tcccctctgaaactcacagatc

SEQ ID NO: 109855 - DNA, 22 bp, synthetic construct
  misc_feature 1..22: note = chemically synthesized
  source 1..22: mol_type = other DNA
tgaaactcacagatcatctcat

SEQ ID NO: 109856 - DNA, 22 bp, synthetic construct
  misc_feature 1..22: note = chemically synthesized
  source 1..22: mol_type = other DNA
aaactcacagatcatctcatat

SEQ ID NO: 109857 - DNA, 22 bp, synthetic construct
  misc_feature 1..22: note = chemically synthesized
  source 1..22: mol_type = other DNA
acagatcatctcatataccaca

SEQ ID NO: 109858 - DNA, 22 bp, synthetic construct
  misc_feature 1..22: note = chemically synthesized
  source 1..22: mol_type = other DNA
atataccacaaaagcaactgag

SEQ ID NO: 109859 - DNA, 22 bp, synthetic construct
  misc_feature 1..22: note = chemically synthesized
  source 1..22: mol_type = other DNA
agtgaatcaagtgaaagcactc

SEQ ID NO: 109860 - DNA, 22 bp, synthetic construct
  misc_feature 1..22: note = chemically synthesized
  source 1..22: mol_type = other DNA
agttttcaatatgaaaacagac

SEQ ID NO: 109861 - DNA, 22 bp, synthetic construct
  misc_feature 1..22: note = chemically synthesized
  source 1..22: mol_type = other DNA
tcaatatgaaaacagacaagac

SEQ ID NO: 109862 - DNA, 22 bp, synthetic construct
  misc_feature 1..22: note = chemically synthesized
  source 1..22: mol_type = other DNA
caatatgaaaacagacaagaca

SEQ ID NO: 109863 - DNA, 22 bp, synthetic construct
  misc_feature 1..22: note = chemically synthesized
  source 1..22: mol_type = other DNA
aatatgaaaacagacaagacaa

SEQ ID NO: 109864 - DNA, 22 bp, synthetic construct
  misc_feature 1..22: note = chemically synthesized
  source 1..22: mol_type = other DNA
ttttaaggattcttcccaaaaa

SEQ ID NO: 109865 - DNA, 22 bp, synthetic construct
  misc_feature 1..22: note = chemically synthesized
  source 1..22: mol_type = other DNA
taaggattcttcccaaaaaatg

SEQ ID NO: 109866 - DNA, 22 bp, synthetic construct
  misc_feature 1..22: note = chemically synthesized
  source 1..22: mol_type = other DNA
aaggattcttcccaaaaaatga

SEQ ID NO: 109867 - DNA, 22 bp, synthetic construct
  misc_feature 1..22: note = chemically synthesized
  source 1..22: mol_type = other DNA
aggattcttcccaaaaaatgag

SEQ ID NO: 109868 - DNA, 22 bp, synthetic construct
  misc_feature 1..22: note = chemically synthesized
  source 1..22: mol_type = other DNA
ttcccaaaaaatgaggtgtata

SEQ ID NO: 109869 - DNA, 22 bp, synthetic construct
  misc_feature 1..22: note = chemically synthesized
  source 1..22: mol_type = other DNA
cccaaaaaatgaggtgtatata

SEQ ID NO: 109870 - DNA, 22 bp, synthetic construct
  misc_feature 1..22: note = chemically synthesized
  source 1..22: mol_type = other DNA
ccaaaaaatgaggtgtatataa

SEQ ID NO: 109871 - DNA, 22 bp, synthetic construct
  misc_feature 1..22: note = chemically synthesized
  source 1..22: mol_type = other DNA
gacacacggtagaaattcaaca

SEQ ID NO: 109872 - DNA, 22 bp, synthetic construct
  misc_feature 1..22: note = chemically synthesized
  source 1..22: mol_type = other DNA
acacacggtagaaattcaacaa

SEQ ID NO: 109873 - DNA, 22 bp, synthetic construct
  misc_feature 1..22: note = chemically synthesized
  source 1..22: mol_type = other DNA
aacaattatttgttccatacat

SEQ ID NO: 109874 - DNA, 22 bp, synthetic construct
  misc_feature 1..22: note = chemically synthesized
  source 1..22: mol_type = other DNA
tttgttccatacatttgtttct

SEQ ID NO: 109875 - DNA, 22 bp, synthetic construct
  misc_feature 1..22: note = chemically synthesized
  source 1..22: mol_type = other DNA
gttccatacatttgtttctcag

SEQ ID NO: 109876 - DNA, 22 bp, synthetic construct
  misc_feature 1..22: note = chemically synthesized
  source 1..22: mol_type = other DNA
ttccatacatttgtttctcagc

SEQ ID NO: 109877 - DNA, 22 bp, synthetic construct
  misc_feature 1..22: note = chemically synthesized
  source 1..22: mol_type = other DNA
catacatttgtttctcagcttt

SEQ ID NO: 109878 - DNA, 22 bp, synthetic construct
  misc_feature 1..22: note = chemically synthesized
  source 1..22: mol_type = other DNA
gtttctcagctttattttccct

SEQ ID NO: 109879 - DNA, 22 bp, synthetic construct
  misc_feature 1..22: note = chemically synthesized
  source 1..22: mol_type = other DNA
tttctcagctttattttcccta

SEQ ID NO: 109880 - DNA, 22 bp, synthetic construct
  misc_feature 1..22: note = chemically synthesized
  source 1..22: mol_type = other DNA
ctcagctttattttccctatct

SEQ ID NO: 109881 - DNA, 22 bp, synthetic construct
  misc_feature 1..22: note = chemically synthesized
  source 1..22: mol_type = other DNA
tcagctttattttccctatctg

SEQ ID NO: 109882 - DNA, 22 bp, synthetic construct
  misc_feature 1..22: note = chemically synthesized
  source 1..22: mol_type = other DNA
agctttattttccctatctggt

SEQ ID NO: 109883 - DNA, 22 bp, synthetic construct
  misc_feature 1..22: note = chemically synthesized
  source 1..22: mol_type = other DNA
tattttccctatctggtattcc

SEQ ID NO: 109884 - DNA, 22 bp, synthetic construct
  misc_feature 1..22: note = chemically synthesized
  source 1..22: mol_type = other DNA
attttccctatctggtattcct

SEQ ID NO: 109885 - DNA, 22 bp, synthetic construct
  misc_feature 1..22: note = chemically synthesized
  source 1..22: mol_type = other DNA
ttttccctatctggtattccta

SEQ ID NO: 109886 - DNA, 22 bp, synthetic construct
  misc_feature 1..22: note = chemically synthesized
  source 1..22: mol_type = other DNA
tccctatctggtattcctactc

SEQ ID NO: 109887 - DNA, 22 bp, synthetic construct
  misc_feature 1..22: note = chemically synthesized
  source 1..22: mol_type = other DNA
ccctatctggtattcctactcc

SEQ ID NO: 109888 - DNA, 22 bp, synthetic construct
  misc_feature 1..22: note = chemically synthesized
  source 1..22: mol_type = other DNA
cctatctggtattcctactcct

SEQ ID NO: 109889 - DNA, 22 bp, synthetic construct
  misc_feature 1..22: note = chemically synthesized
  source 1..22: mol_type = other DNA
tctggtattcctactcctgttt

SEQ ID NO: 109890 - DNA, 22 bp, synthetic construct
  misc_feature 1..22: note = chemically synthesized
  source 1..22: mol_type = other DNA
gtattcctactcctgttttttt

SEQ ID NO: 109891 - DNA, 22 bp, synthetic construct
  misc_feature 1..22: note = chemically synthesized
  source 1..22: mol_type = other DNA
ctactcctgtttttttttaatt

SEQ ID NO: 109892 - DNA, 22 bp, synthetic construct
  misc_feature 1..22: note = chemically synthesized
  source 1..22: mol_type = other DNA
ctcctgtttttttttaatttat

SEQ ID NO: 109893 - DNA, 22 bp, synthetic construct
  misc_feature 1..22: note = chemically synthesized
  source 1..22: mol_type = other DNA
ctgtttttttttaatttatcaa

SEQ ID NO: 109894 - DNA, 22 bp, synthetic construct
  misc_feature 1..22: note = chemically synthesized
  source 1..22: mol_type = other DNA
tttttttttaatttatcaatta

SEQ ID NO: 109895 - DNA, 22 bp, synthetic construct
  misc_feature 1..22: note = chemically synthesized
  source 1..22: mol_type = other DNA
ttttttaatttatcaattatat

SEQ ID NO: 109896 - DNA, 22 bp, synthetic construct
  misc_feature 1..22: note = chemically synthesized
  source 1..22: mol_type = other DNA
tttttaatttatcaattatatg

SEQ ID NO: 109897 - DNA, 22 bp, synthetic construct
  misc_feature 1..22: note = chemically synthesized
  source 1..22: mol_type = other DNA
ttttaatttatcaattatatgt

SEQ ID NO: 109898 - DNA, 22 bp, synthetic construct
  misc_feature 1..22: note = chemically synthesized
  source 1..22: mol_type = other DNA
tttaatttatcaattatatgtt

SEQ ID NO: 109899 - DNA, 22 bp, synthetic construct
  misc_feature 1..22: note = chemically synthesized
  source 1..22: mol_type = other DNA
ttaatttatcaattatatgttt

SEQ ID NO: 109900 - DNA, 22 bp, synthetic construct
  misc_feature 1..22: note = chemically synthesized
  source 1..22: mol_type = other DNA
taatttatcaattatatgttta

SEQ ID NO: 109901 - DNA, 22 bp, synthetic construct
  misc_feature 1..22: note = chemically synthesized
  source 1..22: mol_type = other DNA
aatttatcaattatatgtttat

SEQ ID NO: 109902 - DNA, 22 bp, synthetic construct
  misc_feature 1..22: note = chemically synthesized
  source 1..22: mol_type = other DNA
atttatcaattatatgtttatt

SEQ ID NO: 109903 - DNA, 22 bp, synthetic construct
  misc_feature 1..22: note = chemically synthesized
  source 1..22: mol_type = other DNA
atcaattatatgtttatttagt

SEQ ID NO: 109904 - DNA, 22 bp, synthetic construct
  misc_feature 1..22: note = chemically synthesized
  source 1..22: mol_type = other DNA
tcaattatatgtttatttagta

SEQ ID NO: 109905 - DNA, 22 bp, synthetic construct
  misc_feature 1..22: note = chemically synthesized
  source 1..22: mol_type = other DNA
tatgtttatttagtagtaatat

SEQ ID NO: 109906 - DNA, 22 bp, synthetic construct
  misc_feature 1..22: note = chemically synthesized
  source 1..22: mol_type = other DNA
atttagtagtaatataacacaa

SEQ ID NO: 109907 - DNA, 22 bp, synthetic construct
  misc_feature 1..22: note = chemically synthesized
  source 1..22: mol_type = other DNA
tttagtagtaatataacacaat

SEQ ID NO: 109908 - DNA, 22 bp, synthetic construct
  misc_feature 1..22: note = chemically synthesized
  source 1..22: mol_type = other DNA
agtagtaatataacacaattaa

SEQ ID NO: 109909 - DNA, 22 bp, synthetic construct
  misc_feature 1..22: note = chemically synthesized
  source 1..22: mol_type = other DNA
gtagtaatataacacaattaac

SEQ ID NO: 109910 - DNA, 22 bp, synthetic construct
  misc_feature 1..22: note = chemically synthesized
  source 1..22: mol_type = other DNA
actagattaatgttctgtatta

SEQ ID NO: 109911 - DNA, 22 bp, synthetic construct
  misc_feature 1..22: note = chemically synthesized
  source 1..22: mol_type = other DNA
gattaatgttctgtattatctt

SEQ ID NO: 109912 - DNA, 22 bp, synthetic construct
  misc_feature 1..22: note = chemically synthesized
  source 1..22: mol_type = other DNA
atgttctgtattatcttttccc

SEQ ID NO: 109913 - DNA, 22 bp, synthetic construct
  misc_feature 1..22: note = chemically synthesized
  source 1..22: mol_type = other DNA
tgtattatcttttccctcccag

SEQ ID NO: 109914 - DNA, 22 bp, synthetic construct
  misc_feature 1..22: note = chemically synthesized
  source 1..22: mol_type = other DNA
tattatcttttccctcccagct

SEQ ID NO: 109915 - DNA, 22 bp, synthetic construct
  misc_feature 1..22: note = chemically synthesized
  source 1..22: mol_type = other DNA
tcttttccctcccagctttatt

SEQ ID NO: 109916 - DNA, 22 bp, synthetic construct
  misc_feature 1..22: note = chemically synthesized
  source 1..22: mol_type = other DNA
ttccctcccagctttatttagg

SEQ ID NO: 109917 - DNA, 22 bp, synthetic construct
  misc_feature 1..22: note = chemically synthesized
  source 1..22: mol_type = other DNA
tccctcccagctttatttaggt

SEQ ID NO: 109918 - DNA, 22 bp, synthetic construct
  misc_feature 1..22: note = chemically synthesized
  source 1..22: mol_type = other DNA
ccctcccagctttatttaggta

SEQ ID NO: 109919 - DNA, 22 bp, synthetic construct
  misc_feature 1..22: note = chemically synthesized
  source 1..22: mol_type = other DNA
cctcccagctttatttaggtat

SEQ ID NO: 109920 - DNA, 22 bp, synthetic construct
  misc_feature 1..22: note = chemically synthesized
  source 1..22: mol_type = other DNA
ccagctttatttaggtatattt

SEQ ID NO: 109921 - DNA, 22 bp, synthetic construct
  misc_feature 1..22: note = chemically synthesized
  source 1..22: mol_type = other DNA
tatttaggtatatttaaaattt

SEQ ID NO: 109922 - DNA, 22 bp, synthetic construct
  misc_feature 1..22: note = chemically synthesized
  source 1..22: mol_type = other DNA
atttaggtatatttaaaatttg

SEQ ID NO: 109923 - DNA, 22 bp, synthetic construct
  misc_feature 1..22: note = chemically synthesized
  source 1..22: mol_type = other DNA
tttaggtatatttaaaatttgc

SEQ ID NO: 109924 - DNA, 22 bp, synthetic construct
  misc_feature 1..22: note = chemically synthesized
  source 1..22: mol_type = other DNA
aggtatatttaaaatttgctaa

SEQ ID NO: 109925 - DNA, 22 bp, synthetic construct
  misc_feature 1..22: note = chemically synthesized
  source 1..22: mol_type = other DNA
ggtatatttaaaatttgctaag

SEQ ID NO: 109926 - DNA, 22 bp, synthetic construct
  misc_feature 1..22: note = chemically synthesized
  source 1..22: mol_type = other DNA
aaaatttgctaagaaagcagac

SEQ ID NO: 109927 - DNA, 22 bp, synthetic construct
  misc_feature 1..22: note = chemically synthesized
  source 1..22: mol_type = other DNA
aaatttgctaagaaagcagacc

SEQ ID NO: 109928 - DNA, 22 bp, synthetic construct
  misc_feature 1..22: note = chemically synthesized
  source 1..22: mol_type = other DNA
gctaagaaagcagacctcacat

SEQ ID NO: 109929 - DNA, 22 bp, synthetic construct
  misc_feature 1..22: note = chemically synthesized
  source 1..22: mol_type = other DNA
ctaagaaagcagacctcacata

SEQ ID NO: 109930 - DNA, 22 bp, synthetic construct
  misc_feature 1..22: note = chemically synthesized
  source 1..22: mol_type = other DNA
agaaagcagacctcacatattt

SEQ ID NO: 109931 - DNA, 22 bp, synthetic construct
  misc_feature 1..22: note = chemically synthesized
  source 1..22: mol_type = other DNA
acatatttttactaccaaaaaa

SEQ ID NO: 109932 - DNA, 22 bp, synthetic construct
  misc_feature 1..22: note = chemically synthesized
  source 1..22: mol_type = other DNA
ttactaccaaaaaaattaaagt

SEQ ID NO: 109933 - DNA, 22 bp, synthetic construct
  misc_feature 1..22: note = chemically synthesized
  source 1..22: mol_type = other DNA
tactaccaaaaaaattaaagtt

SEQ ID NO: 109934 - DNA, 22 bp, synthetic construct
  misc_feature 1..22: note = chemically synthesized
  source 1..22: mol_type = other DNA
actaccaaaaaaattaaagtta

SEQ ID NO: 109935 - DNA, 22 bp, synthetic construct
  misc_feature 1..22: note = chemically synthesized
  source 1..22: mol_type = other DNA
ctaccaaaaaaattaaagttat

SEQ ID NO: 109936 - DNA, 22 bp, synthetic construct
  misc_feature 1..22: note = chemically synthesized
  source 1..22: mol_type = other DNA
ccaaaaaaattaaagttattat

SEQ ID NO: 109937 - DNA, 22 bp, synthetic construct
  misc_feature 1..22: note = chemically synthesized
  source 1..22: mol_type = other DNA
aagttattatgtgaggtgatag

SEQ ID NO: 109938 - DNA, 22 bp, synthetic construct
  misc_feature 1..22: note = chemically synthesized
  source 1..22: mol_type = other DNA
ttatgtgaggtgatagatatat

SEQ ID NO: 109939 - DNA, 22 bp, synthetic construct
  misc_feature 1..22: note = chemically synthesized
  source 1..22: mol_type = other DNA
tgtgaggtgatagatatattaa

SEQ ID NO: 109940 - DNA, 22 bp, synthetic construct
  misc_feature 1..22: note = chemically synthesized
  source 1..22: mol_type = other DNA
attagtttgattatggtaatca

SEQ ID NO: 109941 - DNA, 22 bp, synthetic construct
  misc_feature 1..22: note = chemically synthesized
  source 1..22: mol_type = other DNA
gtttgattatggtaatcattta

SEQ ID NO: 109942 - DNA, 22 bp, synthetic construct
  misc_feature 1..22: note = chemically synthesized
  source 1..22: mol_type = other DNA
gattatggtaatcatttaacaa

SEQ ID NO: 109943 - DNA, 22 bp, synthetic construct
  misc_feature 1..22: note = chemically synthesized
  source 1..22: mol_type = other DNA
attatggtaatcatttaacaat

SEQ ID NO: 109944 - DNA, 22 bp, synthetic construct
  misc_feature 1..22: note = chemically synthesized
  source 1..22: mol_type = other DNA
tggtaatcatttaacaatgaat

SEQ ID NO: 109945 - DNA, 22 bp, synthetic construct
  misc_feature 1..22: note = chemically synthesized
  source 1..22: mol_type = other DNA
aacaatgaatacctataataaa

SEQ ID NO: 109946 - DNA, 22 bp, synthetic construct
  misc_feature 1..22: note = chemically synthesized
  source 1..22: mol_type = other DNA
acaatgaatacctataataaaa

SEQ ID NO: 109947 - DNA, 22 bp, synthetic construct
  misc_feature 1..22: note = chemically synthesized
  source 1..22: mol_type = other DNA
taataaaacaataagttatata

SEQ ID NO: 109948 - DNA, 22 bp, synthetic construct
  misc_feature 1..22: note = chemically synthesized
  source 1..22: mol_type = other DNA
tatacctatgtacaatttttat

SEQ ID NO: 109949 - DNA, 22 bp, synthetic construct
  misc_feature 1..22: note = chemically synthesized
  source 1..22: mol_type = other DNA
tgtacaatttttatttgccata

SEQ ID NO: 109950 - DNA, 22 bp, synthetic construct
  misc_feature 1..22: note = chemically synthesized
  source 1..22: mol_type = other DNA
ttatttgccatactgcttcttt

SEQ ID NO: 109951 - DNA, 22 bp, synthetic construct
  misc_feature 1..22: note = chemically synthesized
  source 1..22: mol_type = other DNA
tatttgccatactgcttcttta

SEQ ID NO: 109952 - DNA, 22 bp, synthetic construct
  misc_feature 1..22: note = chemically synthesized
  source 1..22: mol_type = other DNA
atttgccatactgcttctttaa

SEQ ID NO: 109953 - DNA, 22 bp, synthetic construct
  misc_feature 1..22: note = chemically synthesized
  source 1..22: mol_type = other DNA
tttgccatactgcttctttaat

SEQ ID NO: 109954 - DNA, 22 bp, synthetic construct
  misc_feature 1..22: note = chemically synthesized
  source 1..22: mol_type = other DNA
gccatactgcttctttaatcct

SEQ ID NO: 109955 - DNA, 22 bp, synthetic construct
  misc_feature 1..22: note = chemically synthesized
  source 1..22: mol_type = other DNA
ccatactgcttctttaatcctg

SEQ ID NO: 109956 - DNA, 22 bp, synthetic construct
  misc_feature 1..22: note = chemically synthesized
  source 1..22: mol_type = other DNA
cttctttaatcctgcataagct

SEQ ID NO: 109957 - DNA, 22 bp, synthetic construct
  misc_feature 1..22: note = chemically synthesized
  source 1..22: mol_type = other DNA
ctttaatcctgcataagctgag

SEQ ID NO: 109958 - DNA, 22 bp, synthetic construct
  misc_feature 1..22: note = chemically synthesized
  source 1..22: mol_type = other DNA
tttaatcctgcataagctgagt

SEQ ID NO: 109959 - DNA, 22 bp, synthetic construct
  misc_feature 1..22: note = chemically synthesized
  source 1..22: mol_type = other DNA
taatcctgcataagctgagtat

SEQ ID NO: 109960 - DNA, 22 bp, synthetic construct
  misc_feature 1..22: note = chemically synthesized
  source 1..22: mol_type = other DNA
aatcctgcataagctgagtatt

SEQ ID NO: 109961 - DNA, 22 bp, synthetic construct
  misc_feature 1..22: note = chemically synthesized
  source 1..22: mol_type = other DNA
atcctgcataagctgagtattg

SEQ ID NO: 109962 - DNA, 22 bp, synthetic construct
  misc_feature 1..22: note = chemically synthesized
  source 1..22: mol_type = other DNA
cataagctgagtattgtctgaa

SEQ ID NO: 109963 - DNA, 22 bp, synthetic construct
  misc_feature 1..22: note = chemically synthesized
  source 1..22: mol_type = other DNA
agtattgtctgaacctctcact

SEQ ID NO: 109964 - DNA, 22 bp, synthetic construct
  misc_feature 1..22: note = chemically synthesized
  source 1..22: mol_type = other DNA
tctgaacctctcactggcaggc

SEQ ID NO: 109965 - DNA, 22 bp, synthetic construct
  misc_feature 1..22: note = chemically synthesized
  source 1..22: mol_type = other DNA
aacctctcactggcaggcagat

SEQ ID NO: 109966 - DNA, 22 bp, synthetic construct
  misc_feature 1..22: note = chemically synthesized
  source 1..22: mol_type = other DNA
tcactggcaggcagattgagca

SEQ ID NO: 109967 - DNA, 22 bp, synthetic construct
  misc_feature 1..22: note = chemically synthesized
  source 1..22: mol_type = other DNA
actggcaggcagattgagcaat

SEQ ID NO: 109968 - DNA, 22 bp, synthetic construct
  misc_feature 1..22: note = chemically synthesized
  source 1..22: mol_type = other DNA
gcaggcagattgagcaataata

SEQ ID NO: 109969 - DNA, 22 bp, synthetic construct
  misc_feature 1..22: note = chemically synthesized
  source 1..22: mol_type = other DNA
agcaataatacctccttttctc

SEQ ID NO: 109970 - DNA, 22 bp, synthetic construct
  misc_feature 1..22: note = chemically synthesized
  source 1..22: mol_type = other DNA
cttttctcactttttgaggaca

SEQ ID NO: 109971 - DNA, 22 bp, synthetic construct
  misc_feature 1..22: note = chemically synthesized
  source 1..22: mol_type = other DNA
ttctcactttttgaggacagag

SEQ ID NO: 109972 - DNA, 22 bp, synthetic construct
  misc_feature 1..22: note = chemically synthesized
  source 1..22: mol_type = other DNA
tctcactttttgaggacagagt

SEQ ID NO: 109973 - DNA, 22 bp, synthetic construct
  misc_feature 1..22: note = chemically synthesized
  source 1..22: mol_type = other DNA
ctcactttttgaggacagagtt

SEQ ID NO: 109974 - DNA, 22 bp, synthetic construct
  misc_feature 1..22: note = chemically synthesized
  source 1..22: mol_type = other DNA
tcactttttgaggacagagttg

SEQ ID NO: 109975 - DNA, 22 bp, synthetic construct
  misc_feature 1..22: note = chemically synthesized
  source 1..22: mol_type = other DNA
actttttgaggacagagttgct

SEQ ID NO: 109976 - DNA, 22 bp, synthetic construct
  misc_feature 1..22: note = chemically synthesized
  source 1..22: mol_type = other DNA
tttgaggacagagttgctttcc

SEQ ID NO: 109977 - DNA, 22 bp, synthetic construct
  misc_feature 1..22: note = chemically synthesized
  source 1..22: mol_type = other DNA
ttgaggacagagttgctttccc

SEQ ID NO: 109978 - DNA, 22 bp, synthetic construct
  misc_feature 1..22: note = chemically synthesized
  source 1..22: mol_type = other DNA
tgaggacagagttgctttcccc

SEQ ID NO: 109979 - DNA, 22 bp, synthetic construct
  misc_feature 1..22: note = chemically synthesized
  source 1..22: mol_type = other DNA
gaggacagagttgctttcccct

SEQ ID NO: 109980 - DNA, 22 bp, synthetic construct
  misc_feature 1..22: note = chemically synthesized
  source 1..22: mol_type = other DNA
aggacagagttgctttcccctc

SEQ ID NO: 109981 - DNA, 22 bp, synthetic construct
  misc_feature 1..22: note = chemically synthesized
  source 1..22: mol_type = other DNA
ctttcccctctacttccctcag

SEQ ID NO: 109982 - DNA, 22 bp, synthetic construct
  misc_feature 1..22: note = chemically synthesized
  source 1..22: mol_type = other DNA
tcccctctacttccctcagtcc

SEQ ID NO: 109983 - DNA, 22 bp, synthetic construct
  misc_feature 1..22: note = chemically synthesized
  source 1..22: mol_type = other DNA
cccctctacttccctcagtccc

SEQ ID NO: 109984 - DNA, 22 bp, synthetic construct
  misc_feature 1..22: note = chemically synthesized
  source 1..22: mol_type = other DNA
ccctctacttccctcagtccca

SEQ ID NO: 109985 - DNA, 22 bp, synthetic construct
  misc_feature 1..22: note = chemically synthesized
  source 1..22: mol_type = other DNA
tacttccctcagtcccaatgcc

SEQ ID NO: 109986 - DNA, 22 bp, synthetic construct
  misc_feature 1..22: note = chemically synthesized
  source 1..22: mol_type = other DNA
cttccctcagtcccaatgcccc

SEQ ID NO: 109987 - DNA, 22 bp, synthetic construct
  misc_feature 1..22: note = chemically synthesized
  source 1..22: mol_type = other DNA
ccctcagtcccaatgccccagg

SEQ ID NO: 109988 - DNA, 22 bp, synthetic construct
  misc_feature 1..22: note = chemically synthesized
  source 1..22: mol_type = other DNA
cctcagtcccaatgccccaggc

SEQ ID NO: 109989 - DNA, 22 bp, synthetic construct
  misc_feature 1..22: note = chemically synthesized
  source 1..22: mol_type = other DNA
agtcccaatgccccaggctcaa

SEQ ID NO: 109990 - DNA, 22 bp, synthetic construct
  misc_feature 1..22: note = chemically synthesized
  source 1..22: mol_type = other DNA
aacgttacttttagctatgtca

SEQ ID NO: 109991 - DNA, 22 bp, synthetic construct
  misc_feature 1..22: note = chemically synthesized
  source 1..22: mol_type = other DNA
cttttagctatgtcagaagttc

SEQ ID NO: 109992 - DNA, 22 bp, synthetic construct
  misc_feature 1..22: note = chemically synthesized
  source 1..22: mol_type = other DNA
ttagctatgtcagaagttccca

SEQ ID NO: 109993 - DNA, 22 bp, synthetic construct
  misc_feature 1..22: note = chemically synthesized
  source 1..22: mol_type = other DNA
tagctatgtcagaagttcccac

SEQ ID NO: 109994 - DNA, 22 bp, synthetic construct
  misc_feature 1..22: note = chemically synthesized
  source 1..22: mol_type = other DNA
agctatgtcagaagttcccaca

SEQ ID NO: 109995 - DNA, 22 bp, synthetic construct
  misc_feature 1..22: note = chemically synthesized
  source 1..22: mol_type = other DNA
gctatgtcagaagttcccacat

SEQ ID NO: 109996 - DNA, 22 bp, synthetic construct
  misc_feature 1..22: note = chemically synthesized
  source 1..22: mol_type = other DNA
tgtcagaagttcccacattggc

SEQ ID NO: 109997 - DNA, 22 bp, synthetic construct
  misc_feature 1..22: note = chemically synthesized
  source 1..22: mol_type = other DNA
ccacattggctcatcaatcttt

SEQ ID NO: 109998 - DNA, 22 bp, synthetic construct
  misc_feature 1..22: note = chemically synthesized
  source 1..22: mol_type = other DNA
gctcatcaatcttttctccttt

SEQ ID NO: 109999 - DNA, 22 bp, synthetic construct
  misc_feature 1..22: note = chemically synthesized
  source 1..22: mol_type = other DNA
atcaatcttttctcctttccct

SEQ ID NO: 110000 - DNA, 22 bp, synthetic construct
  misc_feature 1..22: note = chemically synthesized
  source 1..22: mol_type = other DNA
ttctcctttccctttcccaccc

SEQ ID NO: 110001 - DNA, 22 bp, synthetic construct
  misc_feature 1..22: note = chemically synthesized
  source 1..22: mol_type = other DNA
tctcctttccctttcccaccca

SEQ ID NO: 110002 - DNA, 22 bp, synthetic construct
  misc_feature 1..22: note = chemically synthesized
  source 1..22: mol_type = other DNA
ctcctttccctttcccacccag

SEQ ID NO: 110003 - DNA, 22 bp, synthetic construct
  misc_feature 1..22: note = chemically synthesized
  source 1..22: mol_type = other DNA
tcctttccctttcccacccaga

SEQ ID NO: 110004 - DNA, 22 bp, synthetic construct
  misc_feature 1..22: note = chemically synthesized
  source 1..22: mol_type = other DNA
ctttccctttcccacccagaca

SEQ ID NO: 110005 - DNA, 22 bp, synthetic construct
  misc_feature 1..22: note = chemically synthesized
  source 1..22: mol_type = other DNA
tccctttcccacccagacatat

SEQ ID NO: 110006 - DNA, 22 bp, synthetic construct
  misc_feature 1..22: note = chemically synthesized
  source 1..22: mol_type = other DNA
ccctttcccacccagacatatc

SEQ ID NO: 110007 - DNA, 22 bp, synthetic construct
  misc_feature 1..22: note = chemically synthesized
  source 1..22: mol_type = other DNA
cctttcccacccagacatatca

SEQ ID NO: 110008 - DNA, 22 bp, synthetic construct
  misc_feature 1..22: note = chemically synthesized
  source 1..22: mol_type = other DNA
tcccacccagacatatcacatt

SEQ ID NO: 110009 - DNA, 22 bp, synthetic construct
  misc_feature 1..22: note = chemically synthesized
  source 1..22: mol_type = other DNA
cccacccagacatatcacattt

SEQ ID NO: 110010 - DNA, 22 bp, synthetic construct
  misc_feature 1..22: note = chemically synthesized
  source 1..22: mol_type = other DNA
ccacccagacatatcacatttt

SEQ ID NO: 110011 - DNA, 22 bp, synthetic construct
  misc_feature 1..22: note = chemically synthesized
  source 1..22: mol_type = other DNA
tatctgctgattagagaaacta

SEQ ID NO: 110012 - DNA, 22 bp, synthetic construct
  misc_feature 1..22: note = chemically synthesized
  source 1..22: mol_type = other DNA
atctgctgattagagaaactat

SEQ ID NO: 110013 - DNA, 22 bp, synthetic construct
  misc_feature 1..22: note = chemically synthesized
  source 1..22: mol_type = other DNA
tctgctgattagagaaactata

SEQ ID NO: 110014 - DNA, 22 bp, synthetic construct
  misc_feature 1..22: note = chemically synthesized
  source 1..22: mol_type = other DNA
ctgattagagaaactatagttt

SEQ ID NO: 110015 - DNA, 22 bp, synthetic construct
  misc_feature 1..22: note = chemically synthesized
  source 1..22: mol_type = other DNA
attagagaaactatagtttaat

SEQ ID NO: 110016 - DNA, 22 bp, synthetic construct
  misc_feature 1..22: note = chemically synthesized
  source 1..22: mol_type = other DNA
gagaaactatagtttaatatct

SEQ ID NO: 110017 - DNA, 22 bp, synthetic construct
  misc_feature 1..22: note = chemically synthesized
  source 1..22: mol_type = other DNA
tagtttaatatctttatttaaa

SEQ ID NO: 110018 - DNA, 22 bp, synthetic construct
  misc_feature 1..22: note = chemically synthesized
  source 1..22: mol_type = other DNA
aatatctttatttaaagtcaaa

SEQ ID NO: 110019 - DNA, 22 bp, synthetic construct
  misc_feature 1..22: note = chemically synthesized
  source 1..22: mol_type = other DNA
atatctttatttaaagtcaaac

SEQ ID NO: 110020 - DNA, 22 bp, synthetic construct
  misc_feature 1..22: note = chemically synthesized
  source 1..22: mol_type = other DNA
tatttaaagtcaaacacaggct

SEQ ID NO: 110021 - DNA, 22 bp, synthetic construct
  misc_feature 1..22: note = chemically synthesized
  source 1..22: mol_type = other DNA
atttaaagtcaaacacaggctc

SEQ ID NO: 110022 - DNA, 22 bp, synthetic construct
  misc_feature 1..22: note = chemically synthesized
  source 1..22: mol_type = other DNA
tttaaagtcaaacacaggctcc

SEQ ID NO: 110023 - DNA, 22 bp, synthetic construct
  misc_feature 1..22: note = chemically synthesized
  source 1..22: mol_type = other DNA
aaagtcaaacacaggctcctaa

SEQ ID NO: 110024 - DNA, 22 bp, synthetic construct
  misc_feature 1..22: note = chemically synthesized
  source 1..22: mol_type = other DNA
aagtcaaacacaggctcctaaa

SEQ ID NO: 110025 - DNA, 22 bp, synthetic construct
  misc_feature 1..22: note = chemically synthesized
  source 1..22: mol_type = other DNA
ctaaaaaccccatcatcatctt

SEQ ID NO: 110026 - DNA, 22 bp, synthetic construct
  misc_feature 1..22: note = chemically synthesized
  source 1..22: mol_type = other DNA
aaaaccccatcatcatcttata

SEQ ID NO: 110027 - DNA, 22 bp, synthetic construct
  misc_feature 1..22: note = chemically synthesized
  source 1..22: mol_type = other DNA
atatctgttcccaaggcttcca

SEQ ID NO: 110028 - DNA, 22 bp, synthetic construct
  misc_feature 1..22: note = chemically synthesized
  source 1..22: mol_type = other DNA
tatctgttcccaaggcttccac

SEQ ID NO: 110029 - DNA, 22 bp, synthetic construct
  misc_feature 1..22: note = chemically synthesized
  source 1..22: mol_type = other DNA
ttcccaaggcttccacagaaaa

SEQ ID NO: 110030 - DNA, 22 bp, synthetic construct
  misc_feature 1..22: note = chemically synthesized
  source 1..22: mol_type = other DNA
ccaaggcttccacagaaaaaaa

SEQ ID NO: 110031 - DNA, 22 bp, synthetic construct
  misc_feature 1..22: note = chemically synthesized
  source 1..22: mol_type = other DNA
ccacagaaaaaaaggaaatcat

SEQ ID NO: 110032 - DNA, 22 bp, synthetic construct
  misc_feature 1..22: note = chemically synthesized
  source 1..22: mol_type = other DNA
cacagaaaaaaaggaaatcatt

SEQ ID NO: 110033 - DNA, 22 bp, synthetic construct
  misc_feature 1..22: note = chemically synthesized
  source 1..22: mol_type = other DNA
gacacacctctgggtgaataat

SEQ ID NO: 110034 - DNA, 22 bp, synthetic construct
  misc_feature 1..22: note = chemically synthesized
  source 1..22: mol_type = other DNA
acacacctctgggtgaataatc

SEQ ID NO: 110035 - DNA, 22 bp, synthetic construct
  misc_feature 1..22: note = chemically synthesized
  source 1..22: mol_type = other DNA
tgggtgaataatcctgacatgt

SEQ ID NO: 110036 - DNA, 22 bp, synthetic construct
  misc_feature 1..22: note = chemically synthesized
  source 1..22: mol_type = other DNA
ggtgaataatcctgacatgtac

SEQ ID NO: 110037 - DNA, 22 bp, synthetic construct
  misc_feature 1..22: note = chemically synthesized
  source 1..22: mol_type = other DNA
acatgtactcactagagaaaga

SEQ ID NO: 110038 - DNA, 22 bp, synthetic construct
  misc_feature 1..22: note = chemically synthesized
  source 1..22: mol_type = other DNA
actagagaaagagaaaggaggt

SEQ ID NO: 110039 - DNA, 22 bp, synthetic construct
  misc_feature 1..22: note = chemically synthesized
  source 1..22: mol_type = other DNA
gagaaagagaaaggaggtactt

SEQ ID NO: 110040 - DNA, 22 bp, synthetic construct
  misc_feature 1..22: note = chemically synthesized
  source 1..22: mol_type = other DNA
ctctgaaacaataacaaaaaca

SEQ ID NO: 110041 - DNA, 22 bp, synthetic construct
  misc_feature 1..22: note = chemically synthesized
  source 1..22: mol_type = other DNA
tctgaaacaataacaaaaacac

SEQ ID NO: 110042 - DNA, 22 bp, synthetic construct
  misc_feature 1..22: note = chemically synthesized
  source 1..22: mol_type = other DNA
tgaaacaataacaaaaacacaa

SEQ ID NO: 110043 - DNA, 22 bp, synthetic construct
  misc_feature 1..22: note = chemically synthesized
  source 1..22: mol_type = other DNA
aaacaataacaaaaacacaaaa

SEQ ID NO: 110044 - DNA, 22 bp, synthetic construct
  misc_feature 1..22: note = chemically synthesized
  source 1..22: mol_type = other DNA
tccactctttacaaaacatttc

SEQ ID NO: 110045 - DNA, 22 bp, synthetic construct
  misc_feature 1..22: note = chemically synthesized
  source 1..22: mol_type = other DNA
tttacaaaacatttccccttac

SEQ ID NO: 110046 - DNA, 22 bp, synthetic construct
  misc_feature 1..22: note = chemically synthesized
  source 1..22: mol_type = other DNA
tacaaaacatttccccttactt

SEQ ID NO: 110047 - DNA, 22 bp, synthetic construct
  misc_feature 1..22: note = chemically synthesized
  source 1..22: mol_type = other DNA
acaaaacatttccccttacttt

SEQ ID NO: 110048 - DNA, 22 bp, synthetic construct
  misc_feature 1..22: note = chemically synthesized
  source 1..22: mol_type = other DNA
caaaacatttccccttactttg

SEQ ID NO: 110049 - DNA, 22 bp, synthetic construct
  misc_feature 1..22: note = chemically synthesized
  source 1..22: mol_type = other DNA
ccccttactttgtgtcaagaga

SEQ ID NO: 110050 - DNA, 22 bp, synthetic construct
  misc_feature 1..22: note = chemically synthesized
  source 1..22: mol_type = other DNA
cccttactttgtgtcaagagaa

SEQ ID NO: 110051 - DNA, 22 bp, synthetic construct
  misc_feature 1..22: note = chemically synthesized
  source 1..22: mol_type = other DNA
actttgtgtcaagagaatgact

SEQ ID NO: 110052 - DNA, 22 bp, synthetic construct
  misc_feature 1..22: note = chemically synthesized
  source 1..22: mol_type = other DNA
ctttgtgtcaagagaatgactg

SEQ ID NO: 110053 - DNA, 22 bp, synthetic construct
  misc_feature 1..22: note = chemically synthesized
  source 1..22: mol_type = other DNA
tgtgtcaagagaatgactgaga

SEQ ID NO: 110054 - DNA, 22 bp, synthetic construct
  misc_feature 1..22: note = chemically synthesized
  source 1..22: mol_type = other DNA
gtgtcaagagaatgactgagaa

SEQ ID NO: 110055 - DNA, 22 bp, synthetic construct
  misc_feature 1..22: note = chemically synthesized
  source 1..22: mol_type = other DNA
tgtcaagagaatgactgagaag

SEQ ID NO: 110056 - DNA, 22 bp, synthetic construct
  misc_feature 1..22: note = chemically synthesized
  source 1..22: mol_type = other DNA
agaagacagaaatcactagtag

SEQ ID NO: 110057 - DNA, 22 bp, synthetic construct
  misc_feature 1..22: note = chemically synthesized
  source 1..22: mol_type = other DNA
gtagtctttacaggttatgtaa

SEQ ID NO: 110058 - DNA, 22 bp, synthetic construct
  misc_feature 1..22: note = chemically synthesized
  source 1..22: mol_type = other DNA
tacaggttatgtaaccaaatct

SEQ ID NO: 110059 - DNA, 22 bp, synthetic construct
  misc_feature 1..22: note = chemically synthesized
  source 1..22: mol_type = other DNA
acaggttatgtaaccaaatctc

SEQ ID NO: 110060 - DNA, 22 bp, synthetic construct
  misc_feature 1..22: note = chemically synthesized
  source 1..22: mol_type = other DNA
caggttatgtaaccaaatctca

SEQ ID NO: 110061 - DNA, 22 bp, synthetic construct
  misc_feature 1..22: note = chemically synthesized
  source 1..22: mol_type = other DNA
tgtaaccaaatctcaagattaa

SEQ ID NO: 110062 - DNA, 22 bp, synthetic construct
  misc_feature 1..22: note = chemically synthesized
  source 1..22: mol_type = other DNA
aagattaaattactttcccaag

SEQ ID NO: 110063 - DNA, 22 bp, synthetic construct
  misc_feature 1..22: note = chemically synthesized
  source 1..22: mol_type = other DNA
aattactttcccaagatcatta

SEQ ID NO: 110064 - DNA, 22 bp, synthetic construct
  misc_feature 1..22: note = chemically synthesized
  source 1..22: mol_type = other DNA
ctttcccaagatcattattgtt

SEQ ID NO: 110065 - DNA, 22 bp, synthetic construct
  misc_feature 1..22: note = chemically synthesized
  source 1..22: mol_type = other DNA
tcccaagatcattattgttaga

SEQ ID NO: 110066 - DNA, 22 bp, synthetic construct
  misc_feature 1..22: note = chemically synthesized
  source 1..22: mol_type = other DNA
cccaagatcattattgttagaa

SEQ ID NO: 110067 - DNA, 22 bp, synthetic construct
  misc_feature 1..22: note = chemically synthesized
  source 1..22: mol_type = other DNA
ccaagatcattattgttagaaa

SEQ ID NO: 110068 - DNA, 22 bp, synthetic construct
  misc_feature 1..22: note = chemically synthesized
  source 1..22: mol_type = other DNA
ttgttagaaagagcagagctga

SEQ ID NO: 110069 - DNA, 22 bp, synthetic construct
  misc_feature 1..22: note = chemically synthesized
  source 1..22: mol_type = other DNA
ttagaaagagcagagctgaaac

SEQ ID NO: 110070 - DNA, 22 bp, synthetic construct
  misc_feature 1..22: note = chemically synthesized
  source 1..22: mol_type = other DNA
gaaagagcagagctgaaacttc

SEQ ID NO: 110071 - DNA, 22 bp, synthetic construct
  misc_feature 1..22: note = chemically synthesized
  source 1..22: mol_type = other DNA
aaacttcaacaaattcttctga

SEQ ID NO: 110072 - DNA, 22 bp, synthetic construct
  misc_feature 1..22: note = chemically synthesized
  source 1..22: mol_type = other DNA
caacaaattcttctgaaaatga

SEQ ID NO: 110073 - DNA, 22 bp, synthetic construct
  misc_feature 1..22: note = chemically synthesized
  source 1..22: mol_type = other DNA
aacaaattcttctgaaaatgaa

SEQ ID NO: 110074 - DNA, 22 bp, synthetic construct
  misc_feature 1..22: note = chemically synthesized
  source 1..22: mol_type = other DNA
ttctgaaaatgaaagtccagta

SEQ ID NO: 110075 - DNA, 22 bp, synthetic construct
  misc_feature 1..22: note = chemically synthesized
  source 1..22: mol_type = other DNA
ctgaaaatgaaagtccagtaat

SEQ ID NO: 110076 - DNA, 22 bp, synthetic construct
  misc_feature 1..22: note = chemically synthesized
  source 1..22: mol_type = other DNA
tgaaaatgaaagtccagtaatc

SEQ ID NO: 110077 - DNA, 22 bp, synthetic construct
  misc_feature 1..22: note = chemically synthesized
  source 1..22: mol_type = other DNA
aaaatgaaagtccagtaatctt

SEQ ID NO: 110078 - DNA, 22 bp, synthetic construct
  misc_feature 1..22: note = chemically synthesized
  source 1..22: mol_type = other DNA
ggatgcattcttttcatggaca

SEQ ID NO: 110079 - DNA, 22 bp, synthetic construct
  misc_feature 1..22: note = chemically synthesized
  source 1..22: mol_type = other DNA
gatgcattcttttcatggacag

SEQ ID NO: 110080 - DNA, 22 bp, synthetic construct
  misc_feature 1..22: note = chemically synthesized
  source 1..22: mol_type = other DNA
ttttcatggacagaaagaggtc

SEQ ID NO: 110081 - DNA, 22 bp, synthetic construct
  misc_feature 1..22: note = chemically synthesized
  source 1..22: mol_type = other DNA
ttcatggacagaaagaggtctt

SEQ ID NO: 110082 - DNA, 22 bp, synthetic construct
  misc_feature 1..22: note = chemically synthesized
  source 1..22: mol_type = other DNA
tcatggacagaaagaggtcttg

SEQ ID NO: 110083 - DNA, 22 bp, synthetic construct
  misc_feature 1..22: note = chemically synthesized
  source 1..22: mol_type = other DNA
catggacagaaagaggtcttgt

SEQ ID NO: 110084 - DNA, 22 bp, synthetic construct
  misc_feature 1..22: note = chemically synthesized
  source 1..22: mol_type = other DNA
atggacagaaagaggtcttgta

SEQ ID NO: 110085 - DNA, 22 bp, synthetic construct
  misc_feature 1..22: note = chemically synthesized
  source 1..22: mol_type = other DNA
gtaaatcgtgcataaatttaca

SEQ ID NO: 110086 - DNA, 22 bp, synthetic construct
  misc_feature 1..22: note = chemically synthesized
  source 1..22: mol_type = other DNA
taaatcgtgcataaatttacat

SEQ ID NO: 110087 - DNA, 22 bp, synthetic construct
  misc_feature 1..22: note = chemically synthesized
  source 1..22: mol_type = other DNA
acatcaatatgctctttcaata

SEQ ID NO: 110088 - DNA, 22 bp, synthetic construct
  misc_feature 1..22: note = chemically synthesized
  source 1..22: mol_type = other DNA
catcaatatgctctttcaatag

SEQ ID NO: 110089 - DNA, 22 bp, synthetic construct
  misc_feature 1..22: note = chemically synthesized
  source 1..22: mol_type = other DNA
tttcaatagtatatgagatgta

SEQ ID NO: 110090 - DNA, 22 bp, synthetic construct
  misc_feature 1..22: note = chemically synthesized
  source 1..22: mol_type = other DNA
tcaatagtatatgagatgtata

SEQ ID NO: 110091 - DNA, 22 bp, synthetic construct
  misc_feature 1..22: note = chemically synthesized
  source 1..22: mol_type = other DNA
caatagtatatgagatgtatag

SEQ ID NO: 110092 - DNA, 22 bp, synthetic construct
  misc_feature 1..22: note = chemically synthesized
  source 1..22: mol_type = other DNA
aatagtatatgagatgtatagt

SEQ ID NO: 110093 - DNA, 22 bp, synthetic construct
  misc_feature 1..22: note = chemically synthesized
  source 1..22: mol_type = other DNA
ttttctctggctcatgccacca

SEQ ID NO: 110094 - DNA, 22 bp, synthetic construct
  misc_feature 1..22: note = chemically synthesized
  source 1..22: mol_type = other DNA
tctctggctcatgccaccaaca

SEQ ID NO: 110095 - DNA, 22 bp, synthetic construct
  misc_feature 1..22: note = chemically synthesized
  source 1..22: mol_type = other DNA
ctctggctcatgccaccaacac

SEQ ID NO: 110096 - DNA, 22 bp, synthetic construct
  misc_feature 1..22: note = chemically synthesized
  source 1..22: mol_type = other DNA
tctggctcatgccaccaacaca

SEQ ID NO: 110097 - DNA, 22 bp, synthetic construct
  misc_feature 1..22: note = chemically synthesized
  source 1..22: mol_type = other DNA
tggctcatgccaccaacacaca

SEQ ID NO: 110098 - DNA, 22 bp, synthetic construct
  misc_feature 1..22: note = chemically synthesized
  source 1..22: mol_type = other DNA
gctcatgccaccaacacacaat

SEQ ID NO: 110099 - DNA, 22 bp, synthetic construct
  misc_feature 1..22: note = chemically synthesized
  source 1..22: mol_type = other DNA
atgccaccaacacacaatttat

SEQ ID NO: 110100 - DNA, 22 bp, synthetic construct
  misc_feature 1..22: note = chemically synthesized
  source 1..22: mol_type = other DNA
atgtattctcagaggttggctg

SEQ ID NO: 110101 - DNA, 22 bp, synthetic construct
  misc_feature 1..22: note = chemically synthesized
  source 1..22: mol_type = other DNA
tgtattctcagaggttggctgc

SEQ ID NO: 110102 - DNA, 22 bp, synthetic construct
  misc_feature 1..22: note = chemically synthesized
  source 1..22: mol_type = other DNA
tcagaggttggctgcctgcacc

SEQ ID NO: 110103 - DNA, 22 bp, synthetic construct
  misc_feature 1..22: note = chemically synthesized
  source 1..22: mol_type = other DNA
agaggttggctgcctgcaccag

SEQ ID NO: 110104 - DNA, 22 bp, synthetic construct
  misc_feature 1..22: note = chemically synthesized
  source 1..22: mol_type = other DNA
gctgcctgcaccagctgaaatc

SEQ ID NO: 110105 - DNA, 22 bp, synthetic construct
  misc_feature 1..22: note = chemically synthesized
  source 1..22: mol_type = other DNA
cctgcaccagctgaaatcttag

SEQ ID NO: 110106 - DNA, 22 bp, synthetic construct
  misc_feature 1..22: note = chemically synthesized
  source 1..22: mol_type = other DNA
caccagctgaaatcttagaatt

SEQ ID NO: 110107 - DNA, 22 bp, synthetic construct
  misc_feature 1..22: note = chemically synthesized
  source 1..22: mol_type = other DNA
aaatcttagaattctaatgagt

SEQ ID NO: 110108 - DNA, 22 bp, synthetic construct
  misc_feature 1..22: note = chemically synthesized
  source 1..22: mol_type = other DNA
agaattctaatgagtcacagag

SEQ ID NO: 110109 - DNA, 22 bp, synthetic construct
  misc_feature 1..22: note = chemically synthesized
  source 1..22: mol_type = other DNA
gaattctaatgagtcacagagc

SEQ ID NO: 110110 - DNA, 22 bp, synthetic construct
  misc_feature 1..22: note = chemically synthesized
  source 1..22: mol_type = other DNA
taatgagtcacagagccttctc

SEQ ID NO: 110111 - DNA, 22 bp, synthetic construct
  misc_feature 1..22: note = chemically synthesized
  source 1..22: mol_type = other DNA
atgagtcacagagccttctcac

SEQ ID NO: 110112 - DNA, 22 bp, synthetic construct
  misc_feature 1..22: note = chemically synthesized
  source 1..22: mol_type = other DNA
ctcacttttgtcaaatcccatc

SEQ ID NO: 110113 - DNA, 22 bp, synthetic construct
  misc_feature 1..22: note = chemically synthesized
  source 1..22: mol_type = other DNA
tcacttttgtcaaatcccatca

SEQ ID NO: 110114 - DNA, 22 bp, synthetic construct
  misc_feature 1..22: note = chemically synthesized
  source 1..22: mol_type = other DNA
acttttgtcaaatcccatcaga

SEQ ID NO: 110115 - DNA, 22 bp, synthetic construct
  misc_feature 1..22: note = chemically synthesized
  source 1..22: mol_type = other DNA
ttgtcaaatcccatcagattcc

SEQ ID NO: 110116 - DNA, 22 bp, synthetic construct
  misc_feature 1..22: note = chemically synthesized
  source 1..22: mol_type = other DNA
tgtcaaatcccatcagattcca

SEQ ID NO: 110117 - DNA, 22 bp, synthetic construct
  misc_feature 1..22: note = chemically synthesized
  source 1..22: mol_type = other DNA
gtcaaatcccatcagattccat

SEQ ID NO: 110118 - DNA, 22 bp, synthetic construct
  misc_feature 1..22: note = chemically synthesized
  source 1..22: mol_type = other DNA
tcaaatcccatcagattccata

SEQ ID NO: 110119 - DNA, 22 bp, synthetic construct
  misc_feature 1..22: note = chemically synthesized
  source 1..22: mol_type = other DNA
catagttttaaaaaaaaaattc

SEQ ID NO: 110120 - DNA, 22 bp, synthetic construct
  misc_feature 1..22: note = chemically synthesized
  source 1..22: mol_type = other DNA
taaaaaaaaaattctccttgat

SEQ ID NO: 110121 - DNA, 22 bp, synthetic construct
  misc_feature 1..22: note = chemically synthesized
  source 1..22: mol_type = other DNA
aaaaaaaaaattctccttgatc

SEQ ID NO: 110122 - DNA, 22 bp, synthetic construct
  misc_feature 1..22: note = chemically synthesized
  source 1..22: mol_type = other DNA
aaaaaaaaattctccttgatct

SEQ ID NO: 110123 - DNA, 22 bp, synthetic construct
  misc_feature 1..22: note = chemically synthesized
  source 1..22: mol_type = other DNA
tccttgatcttgcctaaattac

SEQ ID NO: 110124 - DNA, 22 bp, synthetic construct
  misc_feature 1..22: note = chemically synthesized
  source 1..22: mol_type = other DNA
cttgatcttgcctaaattacca

SEQ ID NO: 110125 - DNA, 22 bp, synthetic construct
  misc_feature 1..22: note = chemically synthesized
  source 1..22: mol_type = other DNA
gatcttgcctaaattaccaatt

SEQ ID NO: 110126 - DNA, 22 bp, synthetic construct
  misc_feature 1..22: note = chemically synthesized
  source 1..22: mol_type = other DNA
atcttgcctaaattaccaattt

SEQ ID NO: 110127 - DNA, 22 bp, synthetic construct
  misc_feature 1..22: note = chemically synthesized
  source 1..22: mol_type = other DNA
gcctaaattaccaatttttatt

SEQ ID NO: 110128 - DNA, 22 bp, synthetic construct
  misc_feature 1..22: note = chemically synthesized
  source 1..22: mol_type = other DNA
cctaaattaccaatttttattt

SEQ ID NO: 110129 - DNA, 22 bp, synthetic construct
  misc_feature 1..22: note = chemically synthesized
  source 1..22: mol_type = other DNA
aattaccaatttttatttttgc

SEQ ID NO: 110130 - DNA, 22 bp, synthetic construct
  misc_feature 1..22: note = chemically synthesized
  source 1..22: mol_type = other DNA
ccaatttttatttttgcatcac

SEQ ID NO: 110131 - DNA, 22 bp, synthetic construct
  misc_feature 1..22: note = chemically synthesized
  source 1..22: mol_type = other DNA
ttatttttgcatcaccaagtag

SEQ ID NO: 110132 - DNA, 22 bp, synthetic construct
  misc_feature 1..22: note = chemically synthesized
  source 1..22: mol_type = other DNA
tatttttgcatcaccaagtagg

SEQ ID NO: 110133 - DNA, 22 bp, synthetic construct
  misc_feature 1..22: note = chemically synthesized
  source 1..22: mol_type = other DNA
atttttgcatcaccaagtaggt

SEQ ID NO: 110134 - DNA, 22 bp, synthetic construct
  misc_feature 1..22: note = chemically synthesized
  source 1..22: mol_type = other DNA
tttttgcatcaccaagtaggtg

SEQ ID NO: 110135 - DNA, 22 bp, synthetic construct
  misc_feature 1..22: note = chemically synthesized
  source 1..22: mol_type = other DNA
ttgcatcaccaagtaggtgata

SEQ ID NO: 110136 - DNA, 22 bp, synthetic construct
  misc_feature 1..22: note = chemically synthesized
  source 1..22: mol_type = other DNA
tgcatcaccaagtaggtgatat

SEQ ID NO: 110137 - DNA, 22 bp, synthetic construct
  misc_feature 1..22: note = chemically synthesized
  source 1..22: mol_type = other DNA
gcatcaccaagtaggtgatatg

SEQ ID NO: 110138 - DNA, 22 bp, synthetic construct
  misc_feature 1..22: note = chemically synthesized
  source 1..22: mol_type = other DNA
catcaccaagtaggtgatatgc

SEQ ID NO: 110139 - DNA, 22 bp, synthetic construct
  misc_feature 1..22: note = chemically synthesized
  source 1..22: mol_type = other DNA
ggtgctattatcaattagtgcc

SEQ ID NO: 110140 - DNA, 22 bp, synthetic construct
  misc_feature 1..22: note = chemically synthesized
  source 1..22: mol_type = other DNA
gtgctattatcaattagtgcct

SEQ ID NO: 110141 - DNA, 22 bp, synthetic construct
  misc_feature 1..22: note = chemically synthesized
  source 1..22: mol_type = other DNA
ttatcaattagtgccttcaaaa

SEQ ID NO: 110142 - DNA, 22 bp, synthetic construct
  misc_feature 1..22: note = chemically synthesized
  source 1..22: mol_type = other DNA
tcaattagtgccttcaaaagct

SEQ ID NO: 110143 - DNA, 22 bp, synthetic construct
  misc_feature 1..22: note = chemically synthesized
  source 1..22: mol_type = other DNA
gtgccttcaaaagcttatcatc

SEQ ID NO: 110144 - DNA, 22 bp, synthetic construct
  misc_feature 1..22: note = chemically synthesized
  source 1..22: mol_type = other DNA
caaaagcttatcatcaaatcca

SEQ ID NO: 110145 - DNA, 22 bp, synthetic construct
  misc_feature 1..22: note = chemically synthesized
  source 1..22: mol_type = other DNA
aaaagcttatcatcaaatccac

SEQ ID NO: 110146 - DNA, 22 bp, synthetic construct
  misc_feature 1..22: note = chemically synthesized
  source 1..22: mol_type = other DNA
atcatcaaatccacattttact

SEQ ID NO: 110147 - DNA, 22 bp, synthetic construct
  misc_feature 1..22: note = chemically synthesized
  source 1..22: mol_type = other DNA
tcatcaaatccacattttactg

SEQ ID NO: 110148 - DNA, 22 bp, synthetic construct
  misc_feature 1..22: note = chemically synthesized
  source 1..22: mol_type = other DNA
tactgtttattcttcaatttat

SEQ ID NO: 110149 - DNA, 22 bp, synthetic construct
  misc_feature 1..22: note = chemically synthesized
  source 1..22: mol_type = other DNA
actgtttattcttcaatttata

SEQ ID NO: 110150 - DNA, 22 bp, synthetic construct
  misc_feature 1..22: note = chemically synthesized
  source 1..22: mol_type = other DNA
ctgtttattcttcaatttatat

SEQ ID NO: 110151 - DNA, 22 bp, synthetic construct
  misc_feature 1..22: note = chemically synthesized
  source 1..22: mol_type = other DNA
tttattcttcaatttatattat

SEQ ID NO: 110152 - DNA, 22 bp, synthetic construct
  misc_feature 1..22: note = chemically synthesized
  source 1..22: mol_type = other DNA
attcttcaatttatattatgaa

SEQ ID NO: 110153 - DNA, 22 bp, synthetic construct
  misc_feature 1..22: note = chemically synthesized
  source 1..22: mol_type = other DNA
ttcttcaatttatattatgaaa

SEQ ID NO: 110154 - DNA, 22 bp, synthetic construct
  misc_feature 1..22: note = chemically synthesized
  source 1..22: mol_type = other DNA
ttcaatttatattatgaaaatt

SEQ ID NO: 110155 - DNA, 22 bp, synthetic construct
  misc_feature 1..22: note = chemically synthesized
  source 1..22: mol_type = other DNA
caatttatattatgaaaatttg

SEQ ID NO: 110156 - DNA, 22 bp, synthetic construct
  misc_feature 1..22: note = chemically synthesized
  source 1..22: mol_type = other DNA
aatttatattatgaaaatttga

SEQ ID NO: 110157 - DNA, 22 bp, synthetic construct
  misc_feature 1..22: note = chemically synthesized
  source 1..22: mol_type = other DNA
atattatgaaaatttgaattct

SEQ ID NO: 110158 - DNA, 22 bp, synthetic construct
  misc_feature 1..22: note = chemically synthesized
  source 1..22: mol_type = other DNA
tattatgaaaatttgaattctt

SEQ ID NO: 110159 - DNA, 22 bp, synthetic construct
  misc_feature 1..22: note = chemically synthesized
  source 1..22: mol_type = other DNA
tgaaaatttgaattctttgaag

SEQ ID NO: 110160 - DNA, 22 bp, synthetic construct
  misc_feature 1..22: note = chemically synthesized
  source 1..22: mol_type = other DNA
gaattctttgaagcagtgtatc

SEQ ID NO: 110161 - DNA, 22 bp, synthetic construct
  misc_feature 1..22: note = chemically synthesized
  source 1..22: mol_type = other DNA
aattctttgaagcagtgtatca

SEQ ID NO: 110162 - DNA, 22 bp, synthetic construct
  misc_feature 1..22: note = chemically synthesized
  source 1..22: mol_type = other DNA
tttgaagcagtgtatcaataac

SEQ ID NO: 110163 - DNA, 22 bp, synthetic construct
  misc_feature 1..22: note = chemically synthesized
  source 1..22: mol_type = other DNA
tgaagcagtgtatcaataacta

SEQ ID NO: 110164 - DNA, 22 bp, synthetic construct
  misc_feature 1..22: note = chemically synthesized
  source 1..22: mol_type = other DNA
gaagcagtgtatcaataactag

SEQ ID NO: 110165 - DNA, 22 bp, synthetic construct
  misc_feature 1..22: note = chemically synthesized
  source 1..22: mol_type = other DNA
aagcagtgtatcaataactagg

SEQ ID NO: 110166 - DNA, 22 bp, synthetic construct
  misc_feature 1..22: note = chemically synthesized
  source 1..22: mol_type = other DNA
gggttataaagctgggcaactt

SEQ ID NO: 110167 - DNA, 22 bp, synthetic construct
  misc_feature 1..22: note = chemically synthesized
  source 1..22: mol_type = other DNA
taaagctgggcaacttagagtt

SEQ ID NO: 110168 - DNA, 22 bp, synthetic construct
  misc_feature 1..22: note = chemically synthesized
  source 1..22: mol_type = other DNA
ggcaacttagagttctatgtgc

SEQ ID NO: 110169 - DNA, 22 bp, synthetic construct
  misc_feature 1..22: note = chemically synthesized
  source 1..22: mol_type = other DNA
agagttctatgtgctttggaaa

SEQ ID NO: 110170 - DNA, 22 bp, synthetic construct
  misc_feature 1..22: note = chemically synthesized
  source 1..22: mol_type = other DNA
gagttctatgtgctttggaaac

SEQ ID NO: 110171 - DNA, 22 bp, synthetic construct
  misc_feature 1..22: note = chemically synthesized
  source 1..22: mol_type = other DNA
tatgtgctttggaaacacacac

SEQ ID NO: 110172 - DNA, 22 bp, synthetic construct
  misc_feature 1..22: note = chemically synthesized
  source 1..22: mol_type = other DNA
tgtgctttggaaacacacacag

SEQ ID NO: 110173 - DNA, 22 bp, synthetic construct
  misc_feature 1..22: note = chemically synthesized
  source 1..22: mol_type = other DNA
tggaaacacacacaggtaagtc

SEQ ID NO: 110174 - DNA, 22 bp, synthetic construct
  misc_feature 1..22: note = chemically synthesized
  source 1..22: mol_type = other DNA
ggaaacacacacaggtaagtca

SEQ ID NO: 110175 - DNA, 22 bp, synthetic construct
  misc_feature 1..22: note = chemically synthesized
  source 1..22: mol_type = other DNA
gaaacacacacaggtaagtcac

SEQ ID NO: 110176 - DNA, 22 bp, synthetic construct
  misc_feature 1..22: note = chemically synthesized
  source 1..22: mol_type = other DNA
ttacgtcattttctaactaccc

SEQ ID NO: 110177 - DNA, 22 bp, synthetic construct
  misc_feature 1..22: note = chemically synthesized
  source 1..22: mol_type = other DNA
acgtcattttctaactacccaa

SEQ ID NO: 110178 - DNA, 22 bp, synthetic construct
  misc_feature 1..22: note = chemically synthesized
  source 1..22: mol_type = other DNA
cgtcattttctaactacccaaa

SEQ ID NO: 110179 - DNA, 22 bp, synthetic construct
  misc_feature 1..22: note = chemically synthesized
  source 1..22: mol_type = other DNA
tctaactacccaaaagtctctg

SEQ ID NO: 110180 - DNA, 22 bp, synthetic construct
  misc_feature 1..22: note = chemically synthesized
  source 1..22: mol_type = other DNA
ctaactacccaaaagtctctgg

SEQ ID NO: 110181 - DNA, 22 bp, synthetic construct
  misc_feature 1..22: note = chemically synthesized
  source 1..22: mol_type = other DNA
taactacccaaaagtctctgga

SEQ ID NO: 110182 - DNA, 22 bp, synthetic construct
  misc_feature 1..22: note = chemically synthesized
  source 1..22: mol_type = other DNA
actacccaaaagtctctggagc

SEQ ID NO: 110183 - DNA, 22 bp, synthetic construct
  misc_feature 1..22: note = chemically synthesized
  source 1..22: mol_type = other DNA
cccaaaagtctctggagcttca

SEQ ID NO: 110184 - DNA, 22 bp, synthetic construct
  misc_feature 1..22: note = chemically synthesized
  source 1..22: mol_type = other DNA
tggagcttcatcaattgaattt

SEQ ID NO: 110185 - DNA, 22 bp, synthetic construct
  misc_feature 1..22: note = chemically synthesized
  source 1..22: mol_type = other DNA
gagcttcatcaattgaattttc

SEQ ID NO: 110186 - DNA, 22 bp, synthetic construct
  misc_feature 1..22: note = chemically synthesized
  source 1..22: mol_type = other DNA
catcaattgaattttccctcca

SEQ ID NO: 110187 - DNA, 22 bp, synthetic construct
  misc_feature 1..22: note = chemically synthesized
  source 1..22: mol_type = other DNA
atcaattgaattttccctccag

SEQ ID NO: 110188 - DNA, 22 bp, synthetic construct
  misc_feature 1..22: note = chemically synthesized
  source 1..22: mol_type = other DNA
aattttccctccaggaatattg

SEQ ID NO: 110189 - DNA, 22 bp, synthetic construct
  misc_feature 1..22: note = chemically synthesized
  source 1..22: mol_type = other DNA
tccctccaggaatattgaagaa

SEQ ID NO: 110190 - DNA, 22 bp, synthetic construct
  misc_feature 1..22: note = chemically synthesized
  source 1..22: mol_type = other DNA
ccctccaggaatattgaagaaa

SEQ ID NO: 110191 - DNA, 22 bp, synthetic construct
  misc_feature 1..22: note = chemically synthesized
  source 1..22: mol_type = other DNA
cctccaggaatattgaagaaaa

SEQ ID NO: 110192 - DNA, 22 bp, synthetic construct
  misc_feature 1..22: note = chemically synthesized
  source 1..22: mol_type = other DNA
caggaatattgaagaaaagtca

SEQ ID NO: 110193 - DNA, 22 bp, synthetic construct
  misc_feature 1..22: note = chemically synthesized
  source 1..22: mol_type = other DNA
aagaaaagtcaatctctgaaat

SEQ ID NO: 110194 - DNA, 22 bp, synthetic construct
  misc_feature 1..22: note = chemically synthesized
  source 1..22: mol_type = other DNA
tgaaatttactattttattgta

SEQ ID NO: 110195 - DNA, 22 bp, synthetic construct
  misc_feature 1..22: note = chemically synthesized
  source 1..22: mol_type = other DNA
aaatttactattttattgtatt

SEQ ID NO: 110196 - DNA, 22 bp, synthetic construct
  misc_feature 1..22: note = chemically synthesized
  source 1..22: mol_type = other DNA
actattttattgtatttgctca

SEQ ID NO: 110197 - DNA, 22 bp, synthetic construct
  misc_feature 1..22: note = chemically synthesized
  source 1..22: mol_type = other DNA
ctattttattgtatttgctcat

SEQ ID NO: 110198 - DNA, 22 bp, synthetic construct
  misc_feature 1..22: note = chemically synthesized
  source 1..22: mol_type = other DNA
ttttattgtatttgctcatata

SEQ ID NO: 110199 - DNA, 22 bp, synthetic construct
  misc_feature 1..22: note = chemically synthesized
  source 1..22: mol_type = other DNA
tattgtatttgctcatatattt

SEQ ID NO: 110200 - DNA, 22 bp, synthetic construct
  misc_feature 1..22: note = chemically synthesized
  source 1..22: mol_type = other DNA
attgtatttgctcatatatttc

SEQ ID NO: 110201 - DNA, 22 bp, synthetic construct
  misc_feature 1..22: note = chemically synthesized
  source 1..22: mol_type = other DNA
ttgtatttgctcatatatttct

SEQ ID NO: 110202 - DNA, 22 bp, synthetic construct
  misc_feature 1..22: note = chemically synthesized
  source 1..22: mol_type = other DNA
tatttgctcatatatttcttac

SEQ ID NO: 110203 - DNA, 22 bp, synthetic construct
  misc_feature 1..22: note = chemically synthesized
  source 1..22: mol_type = other DNA
gctcatatatttcttacttgtg

SEQ ID NO: 110204 - DNA, 22 bp, synthetic construct
  misc_feature 1..22: note = chemically synthesized
  source 1..22: mol_type = other DNA
ctcatatatttcttacttgtgt

SEQ ID NO: 110205 - DNA, 22 bp, synthetic construct
  misc_feature 1..22: note = chemically synthesized
  source 1..22: mol_type = other DNA
atatatttcttacttgtgtatt

SEQ ID NO: 110206 - DNA, 22 bp, synthetic construct
  misc_feature 1..22: note = chemically synthesized
  source 1..22: mol_type = other DNA
cttacttgtgtatttgtttttc

SEQ ID NO: 110207 - DNA, 22 bp, synthetic construct
  misc_feature 1..22: note = chemically synthesized
  source 1..22: mol_type = other DNA
ttacttgtgtatttgtttttcc

SEQ ID NO: 110208 - DNA, 22 bp, synthetic construct
  misc_feature 1..22: note = chemically synthesized
  source 1..22: mol_type = other DNA
acttgtgtatttgtttttccat

SEQ ID NO: 110209 - DNA, 22 bp, synthetic construct
  misc_feature 1..22: note = chemically synthesized
  source 1..22: mol_type = other DNA
cttgtgtatttgtttttccata

SEQ ID NO: 110210 - DNA, 22 bp, synthetic construct
  misc_feature 1..22: note = chemically synthesized
  source 1..22: mol_type = other DNA
gtgtatttgtttttccatataa

SEQ ID NO: 110211 - DNA, 22 bp, synthetic construct
  misc_feature 1..22: note = chemically synthesized
  source 1..22: mol_type = other DNA
tgtatttgtttttccatataat

SEQ ID NO: 110212 - DNA, 22 bp, synthetic construct
  misc_feature 1..22: note = chemically synthesized
  source 1..22: mol_type = other DNA
gtttttccatataatctttata

SEQ ID NO: 110213 - DNA, 22 bp, synthetic construct
  misc_feature 1..22: note = chemically synthesized
  source 1..22: mol_type = other DNA
tttttccatataatctttatat

SEQ ID NO: 110214 - DNA, 22 bp, synthetic construct
  misc_feature 1..22: note = chemically synthesized
  source 1..22: mol_type = other DNA
ttccatataatctttatatctg

SEQ ID NO: 110215 - DNA, 22 bp, synthetic construct
  misc_feature 1..22: note = chemically synthesized
  source 1..22: mol_type = other DNA
tccatataatctttatatctgc

SEQ ID NO: 110216 - DNA, 22 bp, synthetic construct
  misc_feature 1..22: note = chemically synthesized
  source 1..22: mol_type = other DNA
ccatataatctttatatctgct

SEQ ID NO: 110217 - DNA, 22 bp, synthetic construct
  misc_feature 1..22: note = chemically synthesized
  source 1..22: mol_type = other DNA
catataatctttatatctgctt

SEQ ID NO: 110218 - DNA, 22 bp, synthetic construct
  misc_feature 1..22: note = chemically synthesized
  source 1..22: mol_type = other DNA
tatatctgcttttccaatagtg

SEQ ID NO: 110219 - DNA, 22 bp, synthetic construct
  misc_feature 1..22: note = chemically synthesized
  source 1..22: mol_type = other DNA
atatctgcttttccaatagtgc

SEQ ID NO: 110220 - DNA, 22 bp, synthetic construct
  misc_feature 1..22: note = chemically synthesized
  source 1..22: mol_type = other DNA
tatctgcttttccaatagtgct

SEQ ID NO: 110221 - DNA, 22 bp, synthetic construct
  misc_feature 1..22: note = chemically synthesized
  source 1..22: mol_type = other DNA
cttttccaatagtgcttagaac

SEQ ID NO: 110222 - DNA, 22 bp, synthetic construct
  misc_feature 1..22: note = chemically synthesized
  source 1..22: mol_type = other DNA
ttccaatagtgcttagaaccat

SEQ ID NO: 110223 - DNA, 22 bp, synthetic construct
  misc_feature 1..22: note = chemically synthesized
  source 1..22: mol_type = other DNA
tccaatagtgcttagaaccatt

SEQ ID NO: 110224 - DNA, 22 bp, synthetic construct
  misc_feature 1..22: note = chemically synthesized
  source 1..22: mol_type = other DNA
ccaatagtgcttagaaccattt

SEQ ID NO: 110225 - DNA, 22 bp, synthetic construct
  misc_feature 1..22: note = chemically synthesized
  source 1..22: mol_type = other DNA
caatagtgcttagaaccatttt

SEQ ID NO: 110226 - DNA, 22 bp, synthetic construct
  misc_feature 1..22: note = chemically synthesized
  source 1..22: mol_type = other DNA
agaaccatttttctactgatct

SEQ ID NO: 110227 - DNA, 22 bp, synthetic construct
  misc_feature 1..22: note = chemically synthesized
  source 1..22: mol_type = other DNA
gaaccatttttctactgatctt

SEQ ID NO: 110228 - DNA, 22 bp, synthetic construct
  misc_feature 1..22: note = chemically synthesized
  source 1..22: mol_type = other DNA
ttctactgatcttttaggtctc

SEQ ID NO: 110229 - DNA, 22 bp, synthetic construct
  misc_feature 1..22: note = chemically synthesized
  source 1..22: mol_type = other DNA
tctactgatcttttaggtctca

SEQ ID NO: 110230 - DNA, 22 bp, synthetic construct
  misc_feature 1..22: note = chemically synthesized
  source 1..22: mol_type = other DNA
ctactgatcttttaggtctcac

SEQ ID NO: 110231 - DNA, 22 bp, synthetic construct
  misc_feature 1..22: note = chemically synthesized
  source 1..22: mol_type = other DNA
tactgatcttttaggtctcaca

SEQ ID NO: 110232 - DNA, 22 bp, synthetic construct
  misc_feature 1..22: note = chemically synthesized
  source 1..22: mol_type = other DNA
ctgatcttttaggtctcacata

SEQ ID NO: 110233 - DNA, 22 bp, synthetic construct
  misc_feature 1..22: note = chemically synthesized
  source 1..22: mol_type = other DNA
atcttttaggtctcacatagcc

SEQ ID NO: 110234 - DNA, 22 bp, synthetic construct
  misc_feature 1..22: note = chemically synthesized
  source 1..22: mol_type = other DNA
ttaggtctcacatagcctggga

SEQ ID NO: 110235 - DNA, 22 bp, synthetic construct
  misc_feature 1..22: note = chemically synthesized
  source 1..22: mol_type = other DNA
taggtctcacatagcctgggaa

SEQ ID NO: 110236 - DNA, 22 bp, synthetic construct
  misc_feature 1..22: note = chemically synthesized
  source 1..22: mol_type = other DNA
aggtctcacatagcctgggaaa

SEQ ID NO: 110237 - DNA, 22 bp, synthetic construct
  misc_feature 1..22: note = chemically synthesized
  source 1..22: mol_type = other DNA
ggtctcacatagcctgggaaac

SEQ ID NO: 110238 - DNA, 22 bp, synthetic construct
  misc_feature 1..22: note = chemically synthesized
  source 1..22: mol_type = other DNA
acatagcctgggaaacctttac

SEQ ID NO: 110239 - DNA, 22 bp, synthetic construct
  misc_feature 1..22: note = chemically synthesized
  source 1..22: mol_type = other DNA
ggaaacctttacatccacccta

SEQ ID NO: 110240 - DNA, 22 bp, synthetic construct
  misc_feature 1..22: note = chemically synthesized
  source 1..22: mol_type = other DNA
tacatccaccctataataccac

SEQ ID NO: 110241 - DNA, 22 bp, synthetic construct
  misc_feature 1..22: note = chemically synthesized
  source 1..22: mol_type = other DNA
acatccaccctataataccacc

SEQ ID NO: 110242 - DNA, 22 bp, synthetic construct
  misc_feature 1..22: note = chemically synthesized
  source 1..22: mol_type = other DNA
catccaccctataataccacca

SEQ ID NO: 110243 - DNA, 22 bp, synthetic construct
  misc_feature 1..22: note = chemically synthesized
  source 1..22: mol_type = other DNA
taataccaccagtcaggatgaa

SEQ ID NO: 110244 - DNA, 22 bp, synthetic construct
  misc_feature 1..22: note = chemically synthesized
  source 1..22: mol_type = other DNA
taagtttcaggccattacagca

SEQ ID NO: 110245 - DNA, 22 bp, synthetic construct
  misc_feature 1..22: note = chemically synthesized
  source 1..22: mol_type = other DNA
caggccattacagcactattca

SEQ ID NO: 110246 - DNA, 22 bp, synthetic construct
  misc_feature 1..22: note = chemically synthesized
  source 1..22: mol_type = other DNA
aggccattacagcactattcaa

SEQ ID NO: 110247 - DNA, 22 bp, synthetic construct
  misc_feature 1..22: note = chemically synthesized
  source 1..22: mol_type = other DNA
cagcactattcaaatatagtga

SEQ ID NO: 110248 - DNA, 22 bp, synthetic construct
  misc_feature 1..22: note = chemically synthesized
  source 1..22: mol_type = other DNA
ttcaaatatagtgatttcttct

SEQ ID NO: 110249 - DNA, 22 bp, synthetic construct
  misc_feature 1..22: note = chemically synthesized
  source 1..22: mol_type = other DNA
aaatatagtgatttcttctttc

SEQ ID NO: 110250 - DNA, 22 bp, synthetic construct
  misc_feature 1..22: note = chemically synthesized
  source 1..22: mol_type = other DNA
cttctttcattttgtttttatt

SEQ ID NO: 110251 - DNA, 22 bp, synthetic construct
  misc_feature 1..22: note = chemically synthesized
  source 1..22: mol_type = other DNA
ttctttcattttgtttttattt

SEQ ID NO: 110252 - DNA, 22 bp, synthetic construct
  misc_feature 1..22: note = chemically synthesized
  source 1..22: mol_type = other DNA
ctttcattttgtttttattttc

SEQ ID NO: 110253 - DNA, 22 bp, synthetic construct
  misc_feature 1..22: note = chemically synthesized
  source 1..22: mol_type = other DNA
tttcattttgtttttattttct

SEQ ID NO: 110254 - DNA, 22 bp, synthetic construct
  misc_feature 1..22: note = chemically synthesized
  source 1..22: mol_type = other DNA
tcattttgtttttattttctgg

SEQ ID NO: 110255 - DNA, 22 bp, synthetic construct
  misc_feature 1..22: note = chemically synthesized
  source 1..22: mol_type = other DNA
cattttgtttttattttctggg

SEQ ID NO: 110256 - DNA, 22 bp, synthetic construct
  misc_feature 1..22: note = chemically synthesized
  source 1..22: mol_type = other DNA
attttgtttttattttctgggt

SEQ ID NO: 110257 - DNA, 22 bp, synthetic construct
  misc_feature 1..22: note = chemically synthesized
  source 1..22: mol_type = other DNA
tgtttttattttctgggttata

SEQ ID NO: 110258 - DNA, 22 bp, synthetic construct
  misc_feature 1..22: note = chemically synthesized
  source 1..22: mol_type = other DNA
gtttttattttctgggttatat

SEQ ID NO: 110259 - DNA, 22 bp, synthetic construct
  misc_feature 1..22: note = chemically synthesized
  source 1..22: mol_type = other DNA
tttttattttctgggttatatg

SEQ ID NO: 110260 - DNA, 22 bp, synthetic construct
  misc_feature 1..22: note = chemically synthesized
  source 1..22: mol_type = other DNA
ttattttctgggttatatgatt

SEQ ID NO: 110261 - DNA, 22 bp, synthetic construct
  misc_feature 1..22: note = chemically synthesized
  source 1..22: mol_type = other DNA
tattttctgggttatatgattt

SEQ ID NO: 110262 - DNA, 22 bp, synthetic construct
  misc_feature 1..22: note = chemically synthesized
  source 1..22: mol_type = other DNA
attttctgggttatatgattta

SEQ ID NO: 110263 - DNA, 22 bp, synthetic construct
  misc_feature 1..22: note = chemically synthesized
  source 1..22: mol_type = other DNA
ttttctgggttatatgatttac

SEQ ID NO: 110264 - DNA, 22 bp, synthetic construct
  misc_feature 1..22: note = chemically synthesized
  source 1..22: mol_type = other DNA
tctgggttatatgatttacaat

SEQ ID NO: 110265 - DNA, 22 bp, synthetic construct
  misc_feature 1..22: note = chemically synthesized
  source 1..22: mol_type = other DNA
ctgggttatatgatttacaatg

SEQ ID NO: 110266 - DNA, 22 bp, synthetic construct
  misc_feature 1..22: note = chemically synthesized
  source 1..22: mol_type = other DNA
tgggttatatgatttacaatga

SEQ ID NO: 110267 - DNA, 22 bp, synthetic construct
  misc_feature 1..22: note = chemically synthesized
  source 1..22: mol_type = other DNA
ggttatatgatttacaatgaat

SEQ ID NO: 110268 - DNA, 22 bp, synthetic construct
  misc_feature 1..22: note = chemically synthesized
  source 1..22: mol_type = other DNA
tatgatttacaatgaattcaac

SEQ ID NO: 110269 - DNA, 22 bp, synthetic construct
  misc_feature 1..22: note = chemically synthesized
  source 1..22: mol_type = other DNA
acaatgaattcaacaatgttta

SEQ ID NO: 110270 - DNA, 22 bp, synthetic construct
  misc_feature 1..22: note = chemically synthesized
  source 1..22: mol_type = other DNA
caatgaattcaacaatgtttat

SEQ ID NO: 110271 - DNA, 22 bp, synthetic construct
  misc_feature 1..22: note = chemically synthesized
  source 1..22: mol_type = other DNA
aacaatgtttattctgcatgaa

SEQ ID NO: 110272 - DNA, 22 bp, synthetic construct
  misc_feature 1..22: note = chemically synthesized
  source 1..22: mol_type = other DNA
attctgcatgaatagctgtatc

SEQ ID NO: 110273 - DNA, 22 bp, synthetic construct
  misc_feature 1..22: note = chemically synthesized
  source 1..22: mol_type = other DNA
ttctgcatgaatagctgtatcc

SEQ ID NO: 110274 - DNA, 22 bp, synthetic construct
  misc_feature 1..22: note = chemically synthesized
  source 1..22: mol_type = other DNA
tgcatgaatagctgtatcccca

SEQ ID NO: 110275 - DNA, 22 bp, synthetic construct
  misc_feature 1..22: note = chemically synthesized
  source 1..22: mol_type = other DNA
catgaatagctgtatccccaac

SEQ ID NO: 110276 - DNA, 22 bp, synthetic construct
  misc_feature 1..22: note = chemically synthesized
  source 1..22: mol_type = other DNA
tatccccaacgtagtatccaat

SEQ ID NO: 110277 - DNA, 22 bp, synthetic construct
  misc_feature 1..22: note = chemically synthesized
  source 1..22: mol_type = other DNA
acatagagtaaaccctaaataa

SEQ ID NO: 110278 - DNA, 22 bp, synthetic construct
  misc_feature 1..22: note = chemically synthesized
  source 1..22: mol_type = other DNA
catagagtaaaccctaaataat

SEQ ID NO: 110279 - DNA, 22 bp, synthetic construct
  misc_feature 1..22: note = chemically synthesized
  source 1..22: mol_type = other DNA
aataatatcttctttatacatt

SEQ ID NO: 110280 - DNA, 22 bp, synthetic construct
  misc_feature 1..22: note = chemically synthesized
  source 1..22: mol_type = other DNA
ctttatacattctattttccca

SEQ ID NO: 110281 - DNA, 22 bp, synthetic construct
  misc_feature 1..22: note = chemically synthesized
  source 1..22: mol_type = other DNA
tttatacattctattttcccat

SEQ ID NO: 110282 - DNA, 22 bp, synthetic construct
  misc_feature 1..22: note = chemically synthesized
  source 1..22: mol_type = other DNA
tatacattctattttcccatac

SEQ ID NO: 110283 - DNA, 22 bp, synthetic construct
  misc_feature 1..22: note = chemically synthesized
  source 1..22: mol_type = other DNA
atacattctattttcccatacc

SEQ ID NO: 110284 - DNA, 22 bp, synthetic construct
  misc_feature 1..22: note = chemically synthesized
  source 1..22: mol_type = other DNA
tacattctattttcccatacct

SEQ ID NO: 110285 - DNA, 22 bp, synthetic construct
  misc_feature 1..22: note = chemically synthesized
  source 1..22: mol_type = other DNA
tattttcccatacctaggatct

SEQ ID NO: 110286 - DNA, 22 bp, synthetic construct
  misc_feature 1..22: note = chemically synthesized
  source 1..22: mol_type = other DNA
ttttcccatacctaggatctcc

SEQ ID NO: 110287 - DNA, 22 bp, synthetic construct
  misc_feature 1..22: note = chemically synthesized
  source 1..22: mol_type = other DNA
tcccatacctaggatctcccag

SEQ ID NO: 110288 - DNA, 22 bp, synthetic construct
  misc_feature 1..22: note = chemically synthesized
  source 1..22: mol_type = other DNA
cccatacctaggatctcccagg

SEQ ID NO: 110289 - DNA, 22 bp, synthetic construct
  misc_feature 1..22: note = chemically synthesized
  source 1..22: mol_type = other DNA
ccatacctaggatctcccagga

SEQ ID NO: 110290 - DNA, 22 bp, synthetic construct
  misc_feature 1..22: note = chemically synthesized
  source 1..22: mol_type = other DNA
ggatctcccaggaatgactaaa

SEQ ID NO: 110291 - DNA, 22 bp, synthetic construct
  misc_feature 1..22: note = chemically synthesized
  source 1..22: mol_type = other DNA
ccaggaatgactaaattatcat

SEQ ID NO: 110292 - DNA, 22 bp, synthetic construct
  misc_feature 1..22: note = chemically synthesized
  source 1..22: mol_type = other DNA
aattatcatccttgctgtcact

SEQ ID NO: 110293 - DNA, 22 bp, synthetic construct
  misc_feature 1..22: note = chemically synthesized
  source 1..22: mol_type = other DNA
tcatccttgctgtcactgaaag

SEQ ID NO: 110294 - DNA, 22 bp, synthetic construct
  misc_feature 1..22: note = chemically synthesized
  source 1..22: mol_type = other DNA
gctgtcactgaaagtcaggact

SEQ ID NO: 110295 - DNA, 22 bp, synthetic construct
  misc_feature 1..22: note = chemically synthesized
  source 1..22: mol_type = other DNA
ctgtcactgaaagtcaggactg

SEQ ID NO: 110296 - DNA, 22 bp, synthetic construct
  misc_feature 1..22: note = chemically synthesized
  source 1..22: mol_type = other DNA
tcactgaaagtcaggactggtg

SEQ ID NO: 110297 - DNA, 22 bp, synthetic construct
  misc_feature 1..22: note = chemically synthesized
  source 1..22: mol_type = other DNA
aaagtcaggactggtgaacatc

SEQ ID NO: 110298 - DNA, 22 bp, synthetic construct
  misc_feature 1..22: note = chemically synthesized
  source 1..22: mol_type = other DNA
gtgaacatcttatgaacaggta

SEQ ID NO: 110299 - DNA, 22 bp, synthetic construct
  misc_feature 1..22: note = chemically synthesized
  source 1..22: mol_type = other DNA
atgaacaggtagaattctcaag

SEQ ID NO: 110300 - DNA, 22 bp, synthetic construct
  misc_feature 1..22: note = chemically synthesized
  source 1..22: mol_type = other DNA
tgaacaggtagaattctcaagg

SEQ ID NO: 110301 - DNA, 22 bp, synthetic construct
  misc_feature 1..22: note = chemically synthesized
  source 1..22: mol_type = other DNA
tcaaggagcaacttttatacaa

SEQ ID NO: 110302 - DNA, 22 bp, synthetic construct
  misc_feature 1..22: note = chemically synthesized
  source 1..22: mol_type = other DNA
aaggagcaacttttatacaact

SEQ ID NO: 110303 - DNA, 22 bp, synthetic construct
  misc_feature 1..22: note = chemically synthesized
  source 1..22: mol_type = other DNA
ttatacaactgattactattgc

SEQ ID NO: 110304 - DNA, 22 bp, synthetic construct
  misc_feature 1..22: note = chemically synthesized
  source 1..22: mol_type = other DNA
tatacaactgattactattgct

SEQ ID NO: 110305 - DNA, 22 bp, synthetic construct
  misc_feature 1..22: note = chemically synthesized
  source 1..22: mol_type = other DNA
atacaactgattactattgctt

SEQ ID NO: 110306 - DNA, 22 bp, synthetic construct
  misc_feature 1..22: note = chemically synthesized
  source 1..22: mol_type = other DNA
tacaactgattactattgcttt

SEQ ID NO: 110307 - DNA, 22 bp, synthetic construct
  misc_feature 1..22: note = chemically synthesized
  source 1..22: mol_type = other DNA
attactattgctttacctggag

SEQ ID NO: 110308 - DNA, 22 bp, synthetic construct
  misc_feature 1..22: note = chemically synthesized
  source 1..22: mol_type = other DNA
ctattgctttacctggagtaaa

SEQ ID NO: 110309 - DNA, 22 bp, synthetic construct
  misc_feature 1..22: note = chemically synthesized
  source 1..22: mol_type = other DNA
ttgctttacctggagtaaatat

SEQ ID NO: 110310 - DNA, 22 bp, synthetic construct
  misc_feature 1..22: note = chemically synthesized
  source 1..22: mol_type = other DNA
ctttacctggagtaaatatttg

SEQ ID NO: 110311 - DNA, 22 bp, synthetic construct
  misc_feature 1..22: note = chemically synthesized
  source 1..22: mol_type = other DNA
tacctggagtaaatatttgcct

SEQ ID NO: 110312 - DNA, 22 bp, synthetic construct
  misc_feature 1..22: note = chemically synthesized
  source 1..22: mol_type = other DNA
acctggagtaaatatttgcctc

SEQ ID NO: 110313 - DNA, 22 bp, synthetic construct
  misc_feature 1..22: note = chemically synthesized
  source 1..22: mol_type = other DNA
cctggagtaaatatttgcctct

SEQ ID NO: 110314 - DNA, 22 bp, synthetic construct
  misc_feature 1..22: note = chemically synthesized
  source 1..22: mol_type = other DNA
gagtaaatatttgcctctttgc

SEQ ID NO: 110315 - DNA, 22 bp, synthetic construct
  misc_feature 1..22: note = chemically synthesized
  source 1..22: mol_type = other DNA
gcctctttgcaaagctggcaat

SEQ ID NO: 110316 - DNA, 22 bp, synthetic construct
  misc_feature 1..22: note = chemically synthesized
  source 1..22: mol_type = other DNA
cctctttgcaaagctggcaatg

SEQ ID NO: 110317 - DNA, 22 bp, synthetic construct
  misc_feature 1..22: note = chemically synthesized
  source 1..22: mol_type = other DNA
tttgcaaagctggcaatggggc

SEQ ID NO: 110318 - DNA, 22 bp, synthetic construct
  misc_feature 1..22: note = chemically synthesized
  source 1..22: mol_type = other DNA
tgcaaagctggcaatggggctc

SEQ ID NO: 110319 - DNA, 22 bp, synthetic construct
  misc_feature 1..22: note = chemically synthesized
  source 1..22: mol_type = other DNA
gcaaagctggcaatggggctca

SEQ ID NO: 110320 - DNA, 22 bp, synthetic construct
  misc_feature 1..22: note = chemically synthesized
  source 1..22: mol_type = other DNA
caaagctggcaatggggctcaa

SEQ ID NO: 110321 - DNA, 22 bp, synthetic construct
  misc_feature 1..22: note = chemically synthesized
  source 1..22: mol_type = other DNA
gcaatggggctcaataagtctg

SEQ ID NO: 110322 - DNA, 22 bp, synthetic construct
  misc_feature 1..22: note = chemically synthesized
  source 1..22: mol_type = other DNA
aataagtctgcttccaccttcc

SEQ ID NO: 110323 - DNA, 22 bp, synthetic construct
  misc_feature 1..22: note = chemically synthesized
  source 1..22: mol_type = other DNA
cttccaccttccagcttactgg

SEQ ID NO: 110324 - DNA, 22 bp, synthetic construct
  misc_feature 1..22: note = chemically synthesized
  source 1..22: mol_type = other DNA
ccaccttccagcttactggctt

SEQ ID NO: 110325 - DNA, 22 bp, synthetic construct
  misc_feature 1..22: note = chemically synthesized
  source 1..22: mol_type = other DNA
caccttccagcttactggcttc

SEQ ID NO: 110326 - DNA, 22 bp, synthetic construct
  misc_feature 1..22: note = chemically synthesized
  source 1..22: mol_type = other DNA
ccagcttactggcttcccaggc

SEQ ID NO: 110327 - DNA, 22 bp, synthetic construct
  misc_feature 1..22: note = chemically synthesized
  source 1..22: mol_type = other DNA
cagcttactggcttcccaggca

SEQ ID NO: 110328 - DNA, 22 bp, synthetic construct
  misc_feature 1..22: note = chemically synthesized
  source 1..22: mol_type = other DNA
actggcttcccaggcatggaga

SEQ ID NO: 110329 - DNA, 22 bp, synthetic construct
  misc_feature 1..22: note = chemically synthesized
  source 1..22: mol_type = other DNA
ctggcttcccaggcatggagaa

SEQ ID NO: 110330 - DNA, 22 bp, synthetic construct
  misc_feature 1..22: note = chemically synthesized
  source 1..22: mol_type = other DNA
gcttcccaggcatggagaaggc

SEQ ID NO: 110331 - DNA, 22 bp, synthetic construct
  misc_feature 1..22: note = chemically synthesized
  source 1..22: mol_type = other DNA
cccaggcatggagaaggcacat

SEQ ID NO: 110332 - DNA, 22 bp, synthetic construct
  misc_feature 1..22: note = chemically synthesized
  source 1..22: mol_type = other DNA
ccaggcatggagaaggcacatc

SEQ ID NO: 110333 - DNA, 22 bp, synthetic construct
  misc_feature 1..22: note = chemically synthesized
  source 1..22: mol_type = other DNA
gatattcatcccattattggca

SEQ ID NO: 110334 - DNA, 22 bp, synthetic construct
  misc_feature 1..22: note = chemically synthesized
  source 1..22: mol_type = other DNA
atcccattattggcagcctaca

SEQ ID NO: 110335 - DNA, 22 bp, synthetic construct
  misc_feature 1..22: note = chemically synthesized
  source 1..22: mol_type = other DNA
ttggcagcctacatctccatac

SEQ ID NO: 110336 - DNA, 22 bp, synthetic construct
  misc_feature 1..22: note = chemically synthesized
  source 1..22: mol_type = other DNA
gcagcctacatctccatacttc

SEQ ID NO: 110337 - DNA, 22 bp, synthetic construct
  misc_feature 1..22: note = chemically synthesized
  source 1..22: mol_type = other DNA
catctccatacttcttggcaat

SEQ ID NO: 110338 - DNA, 22 bp, synthetic construct
  misc_feature 1..22: note = chemically synthesized
  source 1..22: mol_type = other DNA
catacttcttggcaatggcact

SEQ ID NO: 110339 - DNA, 22 bp, synthetic construct
  misc_feature 1..22: note = chemically synthesized
  source 1..22: mol_type = other DNA
cttggcaatggcactcttctct

SEQ ID NO: 110340 - DNA, 22 bp, synthetic construct
  misc_feature 1..22: note = chemically synthesized
  source 1..22: mol_type = other DNA
ttggcaatggcactcttctctt

SEQ ID NO: 110341 - DNA, 22 bp, synthetic construct
  misc_feature 1..22: note = chemically synthesized
  source 1..22: mol_type = other DNA
ggcaatggcactcttctctttc

SEQ ID NO: 110342 - DNA, 22 bp, synthetic construct
  misc_feature 1..22: note = chemically synthesized
  source 1..22: mol_type = other DNA
gcaatggcactcttctctttct

SEQ ID NO: 110343 - DNA, 22 bp, synthetic construct
  misc_feature 1..22: note = chemically synthesized
  source 1..22: mol_type = other DNA
ttctctttctcatcaggaatga

SEQ ID NO: 110344 - DNA, 22 bp, synthetic construct
  misc_feature 1..22: note = chemically synthesized
  source 1..22: mol_type = other DNA
ctctttctcatcaggaatgatc

SEQ ID NO: 110345 - DNA, 22 bp, synthetic construct
  misc_feature 1..22: note = chemically synthesized
  source 1..22: mol_type = other DNA
tctttctcatcaggaatgatca

SEQ ID NO: 110346 - DNA, 22 bp, synthetic construct
  misc_feature 1..22: note = chemically synthesized
  source 1..22: mol_type = other DNA
tttctcatcaggaatgatcata

SEQ ID NO: 110347 - DNA, 22 bp, synthetic construct
  misc_feature 1..22: note = chemically synthesized
  source 1..22: mol_type = other DNA
tctcatcaggaatgatcataac

SEQ ID NO: 110348 - DNA, 22 bp, synthetic construct
  misc_feature 1..22: note = chemically synthesized
  source 1..22: mol_type = other DNA
ctcatcaggaatgatcataacc

SEQ ID NO: 110349 - DNA, 22 bp, synthetic construct
  misc_feature 1..22: note = chemically synthesized
  source 1..22: mol_type = other DNA
tcatcaggaatgatcataacct

SEQ ID NO: 110350 - DNA, 22 bp, synthetic construct
  misc_feature 1..22: note = chemically synthesized
  source 1..22: mol_type = other DNA
atcaggaatgatcataacctcc

SEQ ID NO: 110351 - DNA, 22 bp, synthetic construct
  misc_feature 1..22: note = chemically synthesized
  source 1..22: mol_type = other DNA
catgagcccatgtactatttct

SEQ ID NO: 110352 - DNA, 22 bp, synthetic construct
  misc_feature 1..22: note = chemically synthesized
  source 1..22: mol_type = other DNA
tttcttagctatgttggcagct

SEQ ID NO: 110353 - DNA, 22 bp, synthetic construct
  misc_feature 1..22: note = chemically synthesized
  source 1..22: mol_type = other DNA
cttagctatgttggcagctaca

SEQ ID NO: 110354 - DNA, 22 bp, synthetic construct
  misc_feature 1..22: note = chemically synthesized
  source 1..22: mol_type = other DNA
ttagctatgttggcagctacag

SEQ ID NO: 110355 - DNA, 22 bp, synthetic construct
  misc_feature 1..22: note = chemically synthesized
  source 1..22: mol_type = other DNA
agctatgttggcagctacagac

SEQ ID NO: 110356 - DNA, 22 bp, synthetic construct
  misc_feature 1..22: note = chemically synthesized
  source 1..22: mol_type = other DNA
gctatgttggcagctacagacc

SEQ ID NO: 110357 - DNA, 22 bp, synthetic construct
  misc_feature 1..22: note = chemically synthesized
  source 1..22: mol_type = other DNA
tgttggcagctacagacctcgg

SEQ ID NO: 110358 - DNA, 22 bp, synthetic construct
  misc_feature 1..22: note = chemically synthesized
  source 1..22: mol_type = other DNA
gcagctacagacctcggagtga

SEQ ID NO: 110359 - DNA, 22 bp, synthetic construct
  misc_feature 1..22: note = chemically synthesized
  source 1..22: mol_type = other DNA
cagacctcggagtgacattgac

SEQ ID NO: 110360 - DNA, 22 bp, synthetic construct
  misc_feature 1..22: note = chemically synthesized
  source 1..22: mol_type = other DNA
ggagtgacattgaccacaatgc

SEQ ID NO: 110361 - DNA, 22 bp, synthetic construct
  misc_feature 1..22: note = chemically synthesized
  source 1..22: mol_type = other DNA
accacaatgcccacagtgctag

SEQ ID NO: 110362 - DNA, 22 bp, synthetic construct
  misc_feature 1..22: note = chemically synthesized
  source 1..22: mol_type = other DNA
ggtgttctgtggttagatcaca

SEQ ID NO: 110363 - DNA, 22 bp, synthetic construct
  misc_feature 1..22: note = chemically synthesized
  source 1..22: mol_type = other DNA
tgtggttagatcacagggagat

SEQ ID NO: 110364 - DNA, 22 bp, synthetic construct
  misc_feature 1..22: note = chemically synthesized
  source 1..22: mol_type = other DNA
tggttagatcacagggagattg

SEQ ID NO: 110365 - DNA, 22 bp, synthetic construct
  misc_feature 1..22: note = chemically synthesized
  source 1..22: mol_type = other DNA
gatcacagggagattggccatg

SEQ ID NO: 110366 - DNA, 22 bp, synthetic construct
  misc_feature 1..22: note = chemically synthesized
  source 1..22: mol_type = other DNA
gccatggagcctgcttctctca

SEQ ID NO: 110367 - DNA, 22 bp, synthetic construct
  misc_feature 1..22: note = chemically synthesized
  source 1..22: mol_type = other DNA
cttctctcaggcctattttatc

SEQ ID NO: 110368 - DNA, 22 bp, synthetic construct
  misc_feature 1..22: note = chemically synthesized
  source 1..22: mol_type = other DNA
ctctcaggcctattttatccat

SEQ ID NO: 110369 - DNA, 22 bp, synthetic construct
  misc_feature 1..22: note = chemically synthesized
  source 1..22: mol_type = other DNA
tctcaggcctattttatccata

SEQ ID NO: 110370 - DNA, 22 bp, synthetic construct
  misc_feature 1..22: note = chemically synthesized
  source 1..22: mol_type = other DNA
tcaggcctattttatccatact

SEQ ID NO: 110371 - DNA, 22 bp, synthetic construct
  misc_feature 1..22: note = chemically synthesized
  source 1..22: mol_type = other DNA
aggcctattttatccatactct

SEQ ID NO: 110372 - DNA, 22 bp, synthetic construct
  misc_feature 1..22: note = chemically synthesized
  source 1..22: mol_type = other DNA
ttttatccatactctttctgtc

SEQ ID NO: 110373 - DNA, 22 bp, synthetic construct
  misc_feature 1..22: note = chemically synthesized
  source 1..22: mol_type = other DNA
tatccatactctttctgtcatg

SEQ ID NO: 110374 - DNA, 22 bp, synthetic construct
  misc_feature 1..22: note = chemically synthesized
  source 1..22: mol_type = other DNA
atccatactctttctgtcatgg

SEQ ID NO: 110375 - DNA, 22 bp, synthetic construct
  misc_feature 1..22: note = chemically synthesized
  source 1..22: mol_type = other DNA
tccatactctttctgtcatgga

SEQ ID NO: 110376 - DNA, 22 bp, synthetic construct
  misc_feature 1..22: note = chemically synthesized
  source 1..22: mol_type = other DNA
tttctgtcatggagtcaggtgt

SEQ ID NO: 110377 - DNA, 22 bp, synthetic construct
  misc_feature 1..22: note = chemically synthesized
  source 1..22: mol_type = other DNA
tctgtcatggagtcaggtgtct

SEQ ID NO: 110378 - DNA, 22 bp, synthetic construct
  misc_feature 1..22: note = chemically synthesized
  source 1..22: mol_type = other DNA
ctgtcatggagtcaggtgtctt

SEQ ID NO: 110379 - DNA, 22 bp, synthetic construct
  misc_feature 1..22: note = chemically synthesized
  source 1..22: mol_type = other DNA
tgtcatggagtcaggtgtcttg

SEQ ID NO: 110380 - DNA, 22 bp, synthetic construct
  misc_feature 1..22: note = chemically synthesized
  source 1..22: mol_type = other DNA
tcatggagtcaggtgtcttgct

SEQ ID NO: 110381 - DNA, 22 bp, synthetic construct
  misc_feature 1..22: note = chemically synthesized
  source 1..22: mol_type = other DNA
gcttgccatggcttatgactgt

SEQ ID NO: 110382 - DNA, 22 bp, synthetic construct
  misc_feature 1..22: note = chemically synthesized
  source 1..22: mol_type = other DNA
cttgccatggcttatgactgtt

SEQ ID NO: 110383 - DNA, 22 bp, synthetic construct
  misc_feature 1..22: note = chemically synthesized
  source 1..22: mol_type = other DNA
gccatggcttatgactgtttca

SEQ ID NO: 110384 - DNA, 22 bp, synthetic construct
  misc_feature 1..22: note = chemically synthesized
  source 1..22: mol_type = other DNA
ccatggcttatgactgtttcat

SEQ ID NO: 110385 - DNA, 22 bp, synthetic construct
  misc_feature 1..22: note = chemically synthesized
  source 1..22: mol_type = other DNA
atgactgtttcattaccatccg

SEQ ID NO: 110386 - DNA, 22 bp, synthetic construct
  misc_feature 1..22: note = chemically synthesized
  source 1..22: mol_type = other DNA
tgactgtttcattaccatccgc

SEQ ID NO: 110387 - DNA, 22 bp, synthetic construct
  misc_feature 1..22: note = chemically synthesized
  source 1..22: mol_type = other DNA
tttcattaccatccgcagcccc

SEQ ID NO: 110388 - DNA, 22 bp, synthetic construct
  misc_feature 1..22: note = chemically synthesized
  source 1..22: mol_type = other DNA
cattaccatccgcagcccctta

SEQ ID NO: 110389 - DNA, 22 bp, synthetic construct
  misc_feature 1..22: note = chemically synthesized
  source 1..22: mol_type = other DNA
attaccatccgcagccccttaa

SEQ ID NO: 110390 - DNA, 22 bp, synthetic construct
  misc_feature 1..22: note = chemically synthesized
  source 1..22: mol_type = other DNA
ccatccgcagccccttaagata

SEQ ID NO: 110391 - DNA, 22 bp, synthetic construct
  misc_feature 1..22: note = chemically synthesized
  source 1..22: mol_type = other DNA
aagatatacctctatcctgacc

SEQ ID NO: 110392 - DNA, 22 bp, synthetic construct
  misc_feature 1..22: note = chemically synthesized
  source 1..22: mol_type = other DNA
agatatacctctatcctgacca

SEQ ID NO: 110393 - DNA, 22 bp, synthetic construct
  misc_feature 1..22: note = chemically synthesized
  source 1..22: mol_type = other DNA
tatcctgaccaacacccaggta

SEQ ID NO: 110394 - DNA, 22 bp, synthetic construct
  misc_feature 1..22: note = chemically synthesized
  source 1..22: mol_type = other DNA
tcctgaccaacacccaggtaat

SEQ ID NO: 110395 - DNA, 22 bp, synthetic construct
  misc_feature 1..22: note = chemically synthesized
  source 1..22: mol_type = other DNA
accaacacccaggtaatgaaga

SEQ ID NO: 110396 - DNA, 22 bp, synthetic construct
  misc_feature 1..22: note = chemically synthesized
  source 1..22: mol_type = other DNA
gtgtgcgggtattgacaagggc

SEQ ID NO: 110397 - DNA, 22 bp, synthetic construct
  misc_feature 1..22: note = chemically synthesized
  source 1..22: mol_type = other DNA
acaagggctggtctgtccatta

SEQ ID NO: 110398 - DNA, 22 bp, synthetic construct
  misc_feature 1..22: note = chemically synthesized
  source 1..22: mol_type = other DNA
gtctgtccattatgccaatagt

SEQ ID NO: 110399 - DNA, 22 bp, synthetic construct
  misc_feature 1..22: note = chemically synthesized
  source 1..22: mol_type = other DNA
tccattatgccaatagttgttc

SEQ ID NO: 110400 - DNA, 22 bp, synthetic construct
  misc_feature 1..22: note = chemically synthesized
  source 1..22: mol_type = other DNA
tgccaatagttgttcgcctaca

SEQ ID NO: 110401 - DNA, 22 bp, synthetic construct
  misc_feature 1..22: note = chemically synthesized
  source 1..22: mol_type = other DNA
ttcgcctacactggtttcccta

SEQ ID NO: 110402 - DNA, 22 bp, synthetic construct
  misc_feature 1..22: note = chemically synthesized
  source 1..22: mol_type = other DNA
gcctacactggtttccctactg

SEQ ID NO: 110403 - DNA, 22 bp, synthetic construct
  misc_feature 1..22: note = chemically synthesized
  source 1..22: mol_type = other DNA
cactggtttccctactgtcgat

SEQ ID NO: 110404 - DNA, 22 bp, synthetic construct
  misc_feature 1..22: note = chemically synthesized
  source 1..22: mol_type = other DNA
gtttccctactgtcgatcccat

SEQ ID NO: 110405 - DNA, 22 bp, synthetic construct
  misc_feature 1..22: note = chemically synthesized
  source 1..22: mol_type = other DNA
ccctactgtcgatcccatgtac

SEQ ID NO: 110406 - DNA, 22 bp, synthetic construct
  misc_feature 1..22: note = chemically synthesized
  source 1..22: mol_type = other DNA
cctactgtcgatcccatgtact

SEQ ID NO: 110407 - DNA, 22 bp, synthetic construct
  misc_feature 1..22: note = chemically synthesized
  source 1..22: mol_type = other DNA
ctgtcgatcccatgtactctcc

SEQ ID NO: 110408 - DNA, 22 bp, synthetic construct
  misc_feature 1..22: note = chemically synthesized
  source 1..22: mol_type = other DNA
tcgatcccatgtactctcccat

SEQ ID NO: 110409 - DNA, 22 bp, synthetic construct
  misc_feature 1..22: note = chemically synthesized
  source 1..22: mol_type = other DNA
tcccatgctttctgtctacacc

SEQ ID NO: 110410 - DNA, 22 bp, synthetic construct
  misc_feature 1..22: note = chemically synthesized
  source 1..22: mol_type = other DNA
ccatgctttctgtctacaccaa

SEQ ID NO: 110411 - DNA, 22 bp, synthetic construct
  misc_feature 1..22: note = chemically synthesized
  source 1..22: mol_type = other DNA
tctgtctacaccaagatgtcat

SEQ ID NO: 110412 - DNA, 22 bp, synthetic construct
  misc_feature 1..22: note = chemically synthesized
  source 1..22: mol_type = other DNA
ctgtctacaccaagatgtcatc

SEQ ID NO: 110413 - DNA, 22 bp, synthetic construct
  misc_feature 1..22: note = chemically synthesized
  source 1..22: mol_type = other DNA
tgtctacaccaagatgtcatca

SEQ ID NO: 110414 - DNA, 22 bp, synthetic construct
  misc_feature 1..22: note = chemically synthesized
  source 1..22: mol_type = other DNA
tctacaccaagatgtcatcaag

SEQ ID NO: 110415 - DNA, 22 bp, synthetic construct
  misc_feature 1..22: note = chemically synthesized
  source 1..22: mol_type = other DNA
caccaagatgtcatcaagctag

SEQ ID NO: 110416 - DNA, 22 bp, synthetic construct
  misc_feature 1..22: note = chemically synthesized
  source 1..22: mol_type = other DNA
gcctgtgctgacatcaccttca

SEQ ID NO: 110417 - DNA, 22 bp, synthetic construct
  misc_feature 1..22: note = chemically synthesized
  source 1..22: mol_type = other DNA
tgctgacatcaccttcaaccgt

SEQ ID NO: 110418 - DNA, 22 bp, synthetic construct
  misc_feature 1..22: note = chemically synthesized
  source 1..22: mol_type = other DNA
acatcaccttcaaccgtctcta

SEQ ID NO: 110419 - DNA, 22 bp, synthetic construct
  misc_feature 1..22: note = chemically synthesized
  source 1..22: mol_type = other DNA
caaccgtctctatccagttgta

SEQ ID NO: 110420 - DNA, 22 bp, synthetic construct
  misc_feature 1..22: note = chemically synthesized
  source 1..22: mol_type = other DNA
aaccgtctctatccagttgtag

SEQ ID NO: 110421 - DNA, 22 bp, synthetic construct
  misc_feature 1..22: note = chemically synthesized
  source 1..22: mol_type = other DNA
tatccagttgtagttttatttg

SEQ ID NO: 110422 - DNA, 22 bp, synthetic construct
  misc_feature 1..22: note = chemically synthesized
  source 1..22: mol_type = other DNA
tccagttgtagttttatttgca

SEQ ID NO: 110423 - DNA, 22 bp, synthetic construct
  misc_feature 1..22: note = chemically synthesized
  source 1..22: mol_type = other DNA
tagttttatttgcaatggtctt

SEQ ID NO: 110424 - DNA, 22 bp, synthetic construct
  misc_feature 1..22: note = chemically synthesized
  source 1..22: mol_type = other DNA
tatttgcaatggtcttgttgga

SEQ ID NO: 110425 - DNA, 22 bp, synthetic construct
  misc_feature 1..22: note = chemically synthesized
  source 1..22: mol_type = other DNA
atttgcaatggtcttgttggac

SEQ ID NO: 110426 - DNA, 22 bp, synthetic construct
  misc_feature 1..22: note = chemically synthesized
  source 1..22: mol_type = other DNA
tttgcaatggtcttgttggact

SEQ ID NO: 110427 - DNA, 22 bp, synthetic construct
  misc_feature 1..22: note = chemically synthesized
  source 1..22: mol_type = other DNA
gcaatggtcttgttggactttc

SEQ ID NO: 110428 - DNA, 22 bp, synthetic construct
  misc_feature 1..22: note = chemically synthesized
  source 1..22: mol_type = other DNA
caatggtcttgttggactttct

SEQ ID NO: 110429 - DNA, 22 bp, synthetic construct
  misc_feature 1..22: note = chemically synthesized
  source 1..22: mol_type = other DNA
gttggactttctcatcatcttt

SEQ ID NO: 110430 - DNA, 22 bp, synthetic construct
  misc_feature 1..22: note = chemically synthesized
  source 1..22: mol_type = other DNA
ttggactttctcatcatctttt

SEQ ID NO: 110431 - DNA, 22 bp, synthetic construct
  misc_feature 1..22: note = chemically synthesized
  source 1..22: mol_type = other DNA
gactttctcatcatctttttct

SEQ ID NO: 110432 - DNA, 22 bp, synthetic construct
  misc_feature 1..22: note = chemically synthesized
  source 1..22: mol_type = other DNA
tctcatcatctttttctcctac

SEQ ID NO: 110433 - DNA, 22 bp, synthetic construct
  misc_feature 1..22: note = chemically synthesized
  source 1..22: mol_type = other DNA
ctcatcatctttttctcctaca

SEQ ID NO: 110434 - DNA, 22 bp, synthetic construct
  misc_feature 1..22: note = chemically synthesized
  source 1..22: mol_type = other DNA
tcatcatctttttctcctacat

SEQ ID NO: 110435 - DNA, 22 bp, synthetic construct
  misc_feature 1..22: note = chemically synthesized
  source 1..22: mol_type = other DNA
atcatctttttctcctacattt

SEQ ID NO: 110436 - DNA, 22 bp, synthetic construct
  misc_feature 1..22: note = chemically synthesized
  source 1..22: mol_type = other DNA
tttctcctacattttgattctc

SEQ ID NO: 110437 - DNA, 22 bp, synthetic construct
  misc_feature 1..22: note = chemically synthesized
  source 1..22: mol_type = other DNA
ttctcctacattttgattctca

SEQ ID NO: 110438 - DNA, 22 bp, synthetic construct
  misc_feature 1..22: note = chemically synthesized
  source 1..22: mol_type = other DNA
tctcctacattttgattctcaa

SEQ ID NO: 110439 - DNA, 22 bp, synthetic construct
  misc_feature 1..22: note = chemically synthesized
  source 1..22: mol_type = other DNA
ctcctacattttgattctcaag

SEQ ID NO: 110440 - DNA, 22 bp, synthetic construct
  misc_feature 1..22: note = chemically synthesized
  source 1..22: mol_type = other DNA
tcctacattttgattctcaaga

SEQ ID NO: 110441 - DNA, 22 bp, synthetic construct
  misc_feature 1..22: note = chemically synthesized
  source 1..22: mol_type = other DNA
ctacattttgattctcaagact

SEQ ID NO: 110442 - DNA, 22 bp, synthetic construct
  misc_feature 1..22: note = chemically synthesized
  source 1..22: mol_type = other DNA
cattttgattctcaagactgtc

SEQ ID NO: 110443 - DNA, 22 bp, synthetic construct
  misc_feature 1..22: note = chemically synthesized
  source 1..22: mol_type = other DNA
tgattctcaagactgtcatggg

SEQ ID NO: 110444 - DNA, 22 bp, synthetic construct
  misc_feature 1..22: note = chemically synthesized
  source 1..22: mol_type = other DNA
gattctcaagactgtcatgggc

SEQ ID NO: 110445 - DNA, 22 bp, synthetic construct
  misc_feature 1..22: note = chemically synthesized
  source 1..22: mol_type = other DNA
attctcaagactgtcatgggca

SEQ ID NO: 110446 - DNA, 22 bp, synthetic construct
  misc_feature 1..22: note = chemically synthesized
  source 1..22: mol_type = other DNA
tcaagactgtcatgggcattgg

SEQ ID NO: 110447 - DNA, 22 bp, synthetic construct
  misc_feature 1..22: note = chemically synthesized
  source 1..22: mol_type = other DNA
aagactgtcatgggcattggtt

SEQ ID NO: 110448 - DNA, 22 bp, synthetic construct
  misc_feature 1..22: note = chemically synthesized
  source 1..22: mol_type = other DNA
tcatgggcattggttctggagg

SEQ ID NO: 110449 - DNA, 22 bp, synthetic construct
  misc_feature 1..22: note = chemically synthesized
  source 1..22: mol_type = other DNA
gttctggaggagaaagggccaa

SEQ ID NO: 110450 - DNA, 22 bp, synthetic construct
  misc_feature 1..22: note = chemically synthesized
  source 1..22: mol_type = other DNA
tggaggagaaagggccaaggcc

SEQ ID NO: 110451 - DNA, 22 bp, synthetic construct
  misc_feature 1..22: note = chemically synthesized
  source 1..22: mol_type = other DNA
gaggagaaagggccaaggccct

SEQ ID NO: 110452 - DNA, 22 bp, synthetic construct
  misc_feature 1..22: note = chemically synthesized
  source 1..22: mol_type = other DNA
aacacatgtgtctctcatatct

SEQ ID NO: 110453 - DNA, 22 bp, synthetic construct
  misc_feature 1..22: note = chemically synthesized
  source 1..22: mol_type = other DNA
tcatatctgctgcatcctggtc

SEQ ID NO: 110454 - DNA, 22 bp, synthetic construct
  misc_feature 1..22: note = chemically synthesized
  source 1..22: mol_type = other DNA
atatctgctgcatcctggtctt

SEQ ID NO: 110455 - DNA, 22 bp, synthetic construct
  misc_feature 1..22: note = chemically synthesized
  source 1..22: mol_type = other DNA
ctgcatcctggtcttctatgtc

SEQ ID NO: 110456 - DNA, 22 bp, synthetic construct
  misc_feature 1..22: note = chemically synthesized
  source 1..22: mol_type = other DNA
catcctggtcttctatgtcact

SEQ ID NO: 110457 - DNA, 22 bp, synthetic construct
  misc_feature 1..22: note = chemically synthesized
  source 1..22: mol_type = other DNA
gtcttctatgtcactgtagttt

SEQ ID NO: 110458 - DNA, 22 bp, synthetic construct
  misc_feature 1..22: note = chemically synthesized
  source 1..22: mol_type = other DNA
ctatgtcactgtagtttgtctg

SEQ ID NO: 110459 - DNA, 22 bp, synthetic construct
  misc_feature 1..22: note = chemically synthesized
  source 1..22: mol_type = other DNA
tatgtcactgtagtttgtctga

SEQ ID NO: 110460 - DNA, 22 bp, synthetic construct
  misc_feature 1..22: note = chemically synthesized
  source 1..22: mol_type = other DNA
tgtcactgtagtttgtctgaca

SEQ ID NO: 110461 - DNA, 22 bp, synthetic construct
  misc_feature 1..22: note = chemically synthesized
  source 1..22: mol_type = other DNA
tagtttgtctgacatttattca

SEQ ID NO: 110462 - DNA, 22 bp, synthetic construct
  misc_feature 1..22: note = chemically synthesized
  source 1..22: mol_type = other DNA
gtctgacatttattcataggtt

SEQ ID NO: 110463 - DNA, 22 bp, synthetic construct
  misc_feature 1..22: note = chemically synthesized
  source 1..22: mol_type = other DNA
tctgacatttattcataggttt

SEQ ID NO: 110464 - DNA, 22 bp, synthetic construct
  misc_feature 1..22: note = chemically synthesized
  source 1..22: mol_type = other DNA
acatttattcataggtttggaa

SEQ ID NO: 110465 - DNA, 22 bp, synthetic construct
  misc_feature 1..22: note = chemically synthesized
  source 1..22: mol_type = other DNA
attcataggtttggaaagcatg

SEQ ID NO: 110466 - DNA, 22 bp, synthetic construct
  misc_feature 1..22: note = chemically synthesized
  source 1..22: mol_type = other DNA
ttcataggtttggaaagcatgt

SEQ ID NO: 110467 - DNA, 22 bp, synthetic construct
  misc_feature 1..22: note = chemically synthesized
  source 1..22: mol_type = other DNA
ataggtttggaaagcatgttcc

SEQ ID NO: 110468 - DNA, 22 bp, synthetic construct
  misc_feature 1..22: note = chemically synthesized
  source 1..22: mol_type = other DNA
ggaaagcatgttcctcatgtcg

SEQ ID NO: 110469 - DNA, 22 bp, synthetic construct
  misc_feature 1..22: note = chemically synthesized
  source 1..22: mol_type = other DNA
gaaagcatgttcctcatgtcgt

SEQ ID NO: 110470 - DNA, 22 bp, synthetic construct
  misc_feature 1..22: note = chemically synthesized
  source 1..22: mol_type = other DNA
ctcatgtcgttcacatcacaat

SEQ ID NO: 110471 - DNA, 22 bp, synthetic construct
  misc_feature 1..22: note = chemically synthesized
  source 1..22: mol_type = other DNA
atgtcgttcacatcacaatgag

SEQ ID NO: 110472 - DNA, 22 bp, synthetic construct
  misc_feature 1..22: note = chemically synthesized
  source 1..22: mol_type = other DNA
acatcacaatgagctacatcca

SEQ ID NO: 110473 - DNA, 22 bp, synthetic construct
  misc_feature 1..22: note = chemically synthesized
  source 1..22: mol_type = other DNA
catccacttccttttcccacct

SEQ ID NO: 110474 - DNA, 22 bp, synthetic construct
  misc_feature 1..22: note = chemically synthesized
  source 1..22: mol_type = other DNA
ccttttcccaccttttatgaac

SEQ ID NO: 110475 - DNA, 22 bp, synthetic construct
  misc_feature 1..22: note = chemically synthesized
  source 1..22: mol_type = other DNA
cttttcccaccttttatgaacc

SEQ ID NO: 110476 - DNA, 22 bp, synthetic construct
  misc_feature 1..22: note = chemically synthesized
  source 1..22: mol_type = other DNA
ttcccaccttttatgaacccat

SEQ ID NO: 110477 - DNA, 22 bp, synthetic construct
  misc_feature 1..22: note = chemically synthesized
  source 1..22: mol_type = other DNA
tcccaccttttatgaacccatt

SEQ ID NO: 110478 - DNA, 22 bp, synthetic construct
  misc_feature 1..22: note = chemically synthesized
  source 1..22: mol_type = other DNA
cccaccttttatgaacccattt

SEQ ID NO: 110479 - DNA, 22 bp, synthetic construct
  misc_feature 1..22: note = chemically synthesized
  source 1..22: mol_type = other DNA
ccaccttttatgaacccattta

SEQ ID NO: 110480 - DNA, 22 bp, synthetic construct
  misc_feature 1..22: note = chemically synthesized
  source 1..22: mol_type = other DNA
ttatgaacccatttatctatag

SEQ ID NO: 110481 - DNA, 22 bp, synthetic construct
  misc_feature 1..22: note = chemically synthesized
  source 1..22: mol_type = other DNA
tatgaacccatttatctatagc

SEQ ID NO: 110482 - DNA, 22 bp, synthetic construct
  misc_feature 1..22: note = chemically synthesized
  source 1..22: mol_type = other DNA
atgaacccatttatctatagca

SEQ ID NO: 110483 - DNA, 22 bp, synthetic construct
  misc_feature 1..22: note = chemically synthesized
  source 1..22: mol_type = other DNA
tgaacccatttatctatagcat

SEQ ID NO: 110484 - DNA, 22 bp, synthetic construct
  misc_feature 1..22: note = chemically synthesized
  source 1..22: mol_type = other DNA
atctatagcattaaaactaagc

SEQ ID NO: 110485 - DNA, 22 bp, synthetic construct
  misc_feature 1..22: note = chemically synthesized
  source 1..22: mol_type = other DNA
tctatagcattaaaactaagca

SEQ ID NO: 110486 - DNA, 22 bp, synthetic construct
  misc_feature 1..22: note = chemically synthesized
  source 1..22: mol_type = other DNA
tagcattaaaactaagcagatt

SEQ ID NO: 110487 - DNA, 22 bp, synthetic construct
  misc_feature 1..22: note = chemically synthesized
  source 1..22: mol_type = other DNA
aaactaagcagattcagagtgg

SEQ ID NO: 110488 - DNA, 22 bp, synthetic construct
  misc_feature 1..22: note = chemically synthesized
  source 1..22: mol_type = other DNA
agcagattcagagtggcatact

SEQ ID NO: 110489 - DNA, 22 bp, synthetic construct
  misc_feature 1..22: note = chemically synthesized
  source 1..22: mol_type = other DNA
agagtggcatacttcgtttatt

SEQ ID NO: 110490 - DNA, 22 bp, synthetic construct
  misc_feature 1..22: note = chemically synthesized
  source 1..22: mol_type = other DNA
cgtttattctctctgcctcact

SEQ ID NO: 110491 - DNA, 22 bp, synthetic construct
  misc_feature 1..22: note = chemically synthesized
  source 1..22: mol_type = other DNA
gtttattctctctgcctcactc

SEQ ID NO: 110492 - DNA, 22 bp, synthetic construct
  misc_feature 1..22: note = chemically synthesized
  source 1..22: mol_type = other DNA
attctctctgcctcactctaga

SEQ ID NO: 110493 - DNA, 22 bp, synthetic construct
  misc_feature 1..22: note = chemically synthesized
  source 1..22: mol_type = other DNA
ttctctctgcctcactctagag

SEQ ID NO: 110494 - DNA, 22 bp, synthetic construct
  misc_feature 1..22: note = chemically synthesized
  source 1..22: mol_type = other DNA
tctctgcctcactctagagcat

SEQ ID NO: 110495 - DNA, 22 bp, synthetic construct
  misc_feature 1..22: note = chemically synthesized
  source 1..22: mol_type = other DNA
tctgcctcactctagagcatga

SEQ ID NO: 110496 - DNA, 22 bp, synthetic construct
  misc_feature 1..22: note = chemically synthesized
  source 1..22: mol_type = other DNA
tgcctcactctagagcatgaca

SEQ ID NO: 110497 - DNA, 22 bp, synthetic construct
  misc_feature 1..22: note = chemically synthesized
  source 1..22: mol_type = other DNA
cctcactctagagcatgacatt

SEQ ID NO: 110498 - DNA, 22 bp, synthetic construct
  misc_feature 1..22: note = chemically synthesized
  source 1..22: mol_type = other DNA
actctagagcatgacattgttt

SEQ ID NO: 110499 - DNA, 22 bp, synthetic construct
  misc_feature 1..22: note = chemically synthesized
  source 1..22: mol_type = other DNA
tagagcatgacattgtttcact

SEQ ID NO: 110500 - DNA, 22 bp, synthetic construct
  misc_feature 1..22: note = chemically synthesized
  source 1..22: mol_type = other DNA
gagcatgacattgtttcactgg

SEQ ID NO: 110501 - DNA, 22 bp, synthetic construct
  misc_feature 1..22: note = chemically synthesized
  source 1..22: mol_type = other DNA
tttcactggtctctgaggaata

SEQ ID NO: 110502 - DNA, 22 bp, synthetic construct
  misc_feature 1..22: note = chemically synthesized
  source 1..22: mol_type = other DNA
cactggtctctgaggaataatt

SEQ ID NO: 110503 - DNA, 22 bp, synthetic construct
  misc_feature 1..22: note = chemically synthesized
  source 1..22: mol_type = other DNA
actggtctctgaggaataattc

SEQ ID NO: 110504 - DNA, 22 bp, synthetic construct
  misc_feature 1..22: note = chemically synthesized
  source 1..22: mol_type = other DNA
gtctctgaggaataattcaggg

SEQ ID NO: 110505 - DNA, 22 bp, synthetic construct
  misc_feature 1..22: note = chemically synthesized
  source 1..22: mol_type = other DNA
tgaggaataattcaggggacct

SEQ ID NO: 110506 - DNA, 22 bp, synthetic construct
  misc_feature 1..22: note = chemically synthesized
  source 1..22: mol_type = other DNA
aggaataattcaggggacctgg

SEQ ID NO: 110507 - DNA, 22 bp, synthetic construct
  misc_feature 1..22: note = chemically synthesized
  source 1..22: mol_type = other DNA
aggggacctggacaggatgaca

SEQ ID NO: 110508 - DNA, 22 bp, synthetic construct
  misc_feature 1..22: note = chemically synthesized
  source 1..22: mol_type = other DNA
gacaggatgacaatgttgccag

SEQ ID NO: 110509 - DNA, 22 bp, synthetic construct
  misc_feature 1..22: note = chemically synthesized
  source 1..22: mol_type = other DNA
ccagcataagtaactagggaaa

SEQ ID NO: 110510 - DNA, 22 bp, synthetic construct
  misc_feature 1..22: note = chemically synthesized
  source 1..22: mol_type = other DNA
gggaaagtcatttcaatgagaa

SEQ ID NO: 110511 - DNA, 22 bp, synthetic construct
  misc_feature 1..22: note = chemically synthesized
  source 1..22: mol_type = other DNA
caatgagaactaatcaatccct

SEQ ID NO: 110512 - DNA, 22 bp, synthetic construct
  misc_feature 1..22: note = chemically synthesized
  source 1..22: mol_type = other DNA
aatgagaactaatcaatccctg

SEQ ID NO: 110513 - DNA, 22 bp, synthetic construct
  misc_feature 1..22: note = chemically synthesized
  source 1..22: mol_type = other DNA
atcaatccctgagcatttcagt

SEQ ID NO: 110514 - DNA, 22 bp, synthetic construct
  misc_feature 1..22: note = chemically synthesized
  source 1..22: mol_type = other DNA
agcatttcagtggaaatcagtc

SEQ ID NO: 110515 - DNA, 22 bp, synthetic construct
  misc_feature 1..22: note = chemically synthesized
  source 1..22: mol_type = other DNA
cagtggaaatcagtcaatccct

SEQ ID NO: 110516 - DNA, 22 bp, synthetic construct
  misc_feature 1..22: note = chemically synthesized
  source 1..22: mol_type = other DNA
agtggaaatcagtcaatccctc

SEQ ID NO: 110517 - DNA, 22 bp, synthetic construct
  misc_feature 1..22: note = chemically synthesized
  source 1..22: mol_type = other DNA
tgctacttagaacattatttta

SEQ ID NO: 110518 - DNA, 22 bp, synthetic construct
  misc_feature 1..22: note = chemically synthesized
  source 1..22: mol_type = other DNA
ctacttagaacattattttacc

SEQ ID NO: 110519 - DNA, 22 bp, synthetic construct
  misc_feature 1..22: note = chemically synthesized
  source 1..22: mol_type = other DNA
cttagaacattattttaccctg

SEQ ID NO: 110520 - DNA, 22 bp, synthetic construct
  misc_feature 1..22: note = chemically synthesized
  source 1..22: mol_type = other DNA
agaacattattttaccctgcct

SEQ ID NO: 110521 - DNA, 22 bp, synthetic construct
  misc_feature 1..22: note = chemically synthesized
  source 1..22: mol_type = other DNA
gaacattattttaccctgcctg

SEQ ID NO: 110522 - DNA, 22 bp, synthetic construct
  misc_feature 1..22: note = chemically synthesized
  source 1..22: mol_type = other DNA
ttttaccctgcctgtctattgc

SEQ ID NO: 110523 - DNA, 22 bp, synthetic construct
  misc_feature 1..22: note = chemically synthesized
  source 1..22: mol_type = other DNA
taccctgcctgtctattgctga

SEQ ID NO: 110524 - DNA, 22 bp, synthetic construct
  misc_feature 1..22: note = chemically synthesized
  source 1..22: mol_type = other DNA
accctgcctgtctattgctgat

SEQ ID NO: 110525 - DNA, 22 bp, synthetic construct
  misc_feature 1..22: note = chemically synthesized
  source 1..22: mol_type = other DNA
ccctgcctgtctattgctgatt

SEQ ID NO: 110526 - DNA, 22 bp, synthetic construct
  misc_feature 1..22: note = chemically synthesized
  source 1..22: mol_type = other DNA
cctgtctattgctgatttgtat

SEQ ID NO: 110527 - DNA, 22 bp, synthetic construct
  misc_feature 1..22: note = chemically synthesized
  source 1..22: mol_type = other DNA
tctattgctgatttgtataaga

SEQ ID NO: 110528 - DNA, 22 bp, synthetic construct
  misc_feature 1..22: note = chemically synthesized
  source 1..22: mol_type = other DNA
ttgctgatttgtataagatata

SEQ ID NO: 110529 - DNA, 22 bp, synthetic construct
  misc_feature 1..22: note = chemically synthesized
  source 1..22: mol_type = other DNA
ctgatttgtataagatatatgt

SEQ ID NO: 110530 - DNA, 22 bp, synthetic construct
  misc_feature 1..22: note = chemically synthesized
  source 1..22: mol_type = other DNA
atttgtataagatatatgtaca

SEQ ID NO: 110531 - DNA, 22 bp, synthetic construct
  misc_feature 1..22: note = chemically synthesized
  source 1..22: mol_type = other DNA
gtataagatatatgtacaacac

SEQ ID NO: 110532 - DNA, 22 bp, synthetic construct
  misc_feature 1..22: note = chemically synthesized
  source 1..22: mol_type = other DNA
tataagatatatgtacaacact

SEQ ID NO: 110533 - DNA, 22 bp, synthetic construct
  misc_feature 1..22: note = chemically synthesized
  source 1..22: mol_type = other DNA
agtacatatctcagtgctcaac

SEQ ID NO: 110534 - DNA, 22 bp, synthetic construct
  misc_feature 1..22: note = chemically synthesized
  source 1..22: mol_type = other DNA
agtgctcaactgatattgtttt

SEQ ID NO: 110535 - DNA, 22 bp, synthetic construct
  misc_feature 1..22: note = chemically synthesized
  source 1..22: mol_type = other DNA
aactgatattgttttctcaggt

SEQ ID NO: 110536 - DNA, 22 bp, synthetic construct
  misc_feature 1..22: note = chemically synthesized
  source 1..22: mol_type = other DNA
atattgttttctcaggtaattt

SEQ ID NO: 110537 - DNA, 22 bp, synthetic construct
  misc_feature 1..22: note = chemically synthesized
  source 1..22: mol_type = other DNA
ttttctcaggtaatttaactca

SEQ ID NO: 110538 - DNA, 22 bp, synthetic construct
  misc_feature 1..22: note = chemically synthesized
  source 1..22: mol_type = other DNA
tctcaggtaatttaactcacat

SEQ ID NO: 110539 - DNA, 22 bp, synthetic construct
  misc_feature 1..22: note = chemically synthesized
  source 1..22: mol_type = other DNA
ctcaggtaatttaactcacatt

SEQ ID NO: 110540 - DNA, 22 bp, synthetic construct
  misc_feature 1..22: note = chemically synthesized
  source 1..22: mol_type = other DNA
tcaggtaatttaactcacattg

SEQ ID NO: 110541 - DNA, 22 bp, synthetic construct
  misc_feature 1..22: note = chemically synthesized
  source 1..22: mol_type = other DNA
aggtaatttaactcacattgtt

SEQ ID NO: 110542 - DNA, 22 bp, synthetic construct
  misc_feature 1..22: note = chemically synthesized
  source 1..22: mol_type = other DNA
aactcacattgtttgattagct

SEQ ID NO: 110543 - DNA, 22 bp, synthetic construct
  misc_feature 1..22: note = chemically synthesized
  source 1..22: mol_type = other DNA
actcacattgtttgattagctt

SEQ ID NO: 110544 - DNA, 22 bp, synthetic construct
  misc_feature 1..22: note = chemically synthesized
  source 1..22: mol_type = other DNA
acattgtttgattagcttatgg

SEQ ID NO: 110545 - DNA, 22 bp, synthetic construct
  misc_feature 1..22: note = chemically synthesized
  source 1..22: mol_type = other DNA
tttgattagcttatggctggca

SEQ ID NO: 110546 - DNA, 22 bp, synthetic construct
  misc_feature 1..22: note = chemically synthesized
  source 1..22: mol_type = other DNA
gattagcttatggctggcacca

SEQ ID NO: 110547 - DNA, 22 bp, synthetic construct
  misc_feature 1..22: note = chemically synthesized
  source 1..22: mol_type = other DNA
attagcttatggctggcaccat

SEQ ID NO: 110548 - DNA, 22 bp, synthetic construct
  misc_feature 1..22: note = chemically synthesized
  source 1..22: mol_type = other DNA
gcttatggctggcaccatacac

SEQ ID NO: 110549 - DNA, 22 bp, synthetic construct
  misc_feature 1..22: note = chemically synthesized
  source 1..22: mol_type = other DNA
atggctggcaccatacacatac

SEQ ID NO: 110550 - DNA, 22 bp, synthetic construct
  misc_feature 1..22: note = chemically synthesized
  source 1..22: mol_type = other DNA
tggctggcaccatacacataca

SEQ ID NO: 110551 - DNA, 22 bp, synthetic construct
  misc_feature 1..22: note = chemically synthesized
  source 1..22: mol_type = other DNA
gcaccatacacatacatacata

SEQ ID NO: 110552 - DNA, 22 bp, synthetic construct
  misc_feature 1..22: note = chemically synthesized
  source 1..22: mol_type = other DNA
acacacatacatatacacacac

SEQ ID NO: 110553 - DNA, 22 bp, synthetic construct
  misc_feature 1..22: note = chemically synthesized
  source 1..22: mol_type = other DNA
cacacatacatatacacacaca

SEQ ID NO: 110554 - DNA, 22 bp, synthetic construct
  misc_feature 1..22: note = chemically synthesized
  source 1..22: mol_type = other DNA
ttatatatatttaatatatata

SEQ ID NO: 110555 - DNA, 22 bp, synthetic construct
  misc_feature 1..22: note = chemically synthesized
  source 1..22: mol_type = other DNA
tatatatttaatatatataata

SEQ ID NO: 110556 - DNA, 22 bp, synthetic construct
  misc_feature 1..22: note = chemically synthesized
  source 1..22: mol_type = other DNA
aatatatataatacacactatt

SEQ ID NO: 110557 - DNA, 22 bp, synthetic construct
  misc_feature 1..22: note = chemically synthesized
  source 1..22: mol_type = other DNA
atatatataatacacactatta

SEQ ID NO: 110558 - DNA, 22 bp, synthetic construct
  misc_feature 1..22: note = chemically synthesized
  source 1..22: mol_type = other DNA
ttatatatacttaatatataat

SEQ ID NO: 110559 - DNA, 22 bp, synthetic construct
  misc_feature 1..22: note = chemically synthesized
  source 1..22: mol_type = other DNA
tatatacttaatatataatagt

SEQ ID NO: 110560 - DNA, 22 bp, synthetic construct
  misc_feature 1..22: note = chemically synthesized
  source 1..22: mol_type = other DNA
aatatataatagtgtgtgtatg

SEQ ID NO: 110561 - DNA, 22 bp, synthetic construct
  misc_feature 1..22: note = chemically synthesized
  source 1..22: mol_type = other DNA
atatataatagtgtgtgtatgt

SEQ ID NO: 110562 - DNA, 22 bp, synthetic construct
  misc_feature 1..22: note = chemically synthesized
  source 1..22: mol_type = other DNA
tgtgtgtttatatatattatat

SEQ ID NO: 110563 - DNA, 22 bp, synthetic construct
  misc_feature 1..22: note = chemically synthesized
  source 1..22: mol_type = other DNA
atatatattatataaataatat

SEQ ID NO: 110564 - DNA, 22 bp, synthetic construct
  misc_feature 1..22: note = chemically synthesized
  source 1..22: mol_type = other DNA
tatatattatataaataatata

SEQ ID NO: 110565 - DNA, 22 bp, synthetic construct
  misc_feature 1..22: note = chemically synthesized
  source 1..22: mol_type = other DNA
tataaataatatatatatatga

SEQ ID NO: 110566 - DNA, 22 bp, synthetic construct
  misc_feature 1..22: note = chemically synthesized
  source 1..22: mol_type = other DNA
tatatataattcttgggtctat

SEQ ID NO: 110567 - DNA, 22 bp, synthetic construct
  misc_feature 1..22: note = chemically synthesized
  source 1..22: mol_type = other DNA
ttgggtctatgatttgggtcac

SEQ ID NO: 110568 - DNA, 22 bp, synthetic construct
  misc_feature 1..22: note = chemically synthesized
  source 1..22: mol_type = other DNA
gggtctatgatttgggtcaccg

SEQ ID NO: 110569 - DNA, 22 bp, synthetic construct
  misc_feature 1..22: note = chemically synthesized
  source 1..22: mol_type = other DNA
ggtctatgatttgggtcaccgg

SEQ ID NO: 110570 - DNA, 22 bp, synthetic construct
  misc_feature 1..22: note = chemically synthesized
  source 1..22: mol_type = other DNA
tgatttgggtcaccggcatttc

SEQ ID NO: 110571 - DNA, 22 bp, synthetic construct
  misc_feature 1..22: note = chemically synthesized
  source 1..22: mol_type = other DNA
gggtcaccggcatttcagtcaa

SEQ ID NO: 110572 - DNA, 22 bp, synthetic construct
  misc_feature 1..22: note = chemically synthesized
  source 1..22: mol_type = other DNA
ggtcaccggcatttcagtcaat

SEQ ID NO: 110573 - DNA, 22 bp, synthetic construct
  misc_feature 1..22: note = chemically synthesized
  source 1..22: mol_type = other DNA
cagtcaatgcccattgctctcc

SEQ ID NO: 110574 - DNA, 22 bp, synthetic construct
  misc_feature 1..22: note = chemically synthesized
  source 1..22: mol_type = other DNA
agtcaatgcccattgctctcca

SEQ ID NO: 110575 - DNA, 22 bp, synthetic construct
  misc_feature 1..22: note = chemically synthesized
  source 1..22: mol_type = other DNA
ctctccatatggcttgcatata

SEQ ID NO: 110576 - DNA, 22 bp, synthetic construct
  misc_feature 1..22: note = chemically synthesized
  source 1..22: mol_type = other DNA
tccatatggcttgcatatatta

SEQ ID NO: 110577 - DNA, 22 bp, synthetic construct
  misc_feature 1..22: note = chemically synthesized
  source 1..22: mol_type = other DNA
catatggcttgcatatattagt

SEQ ID NO: 110578 - DNA, 22 bp, synthetic construct
  misc_feature 1..22: note = chemically synthesized
  source 1..22: mol_type = other DNA
gcatatattagtcctgttatac

SEQ ID NO: 110579 - DNA, 22 bp, synthetic construct
  misc_feature 1..22: note = chemically synthesized
  source 1..22: mol_type = other DNA
catatattagtcctgttataca

SEQ ID NO: 110580 - DNA, 22 bp, synthetic construct
  misc_feature 1..22: note = chemically synthesized
  source 1..22: mol_type = other DNA
gtcctgttatacataggaataa

SEQ ID NO: 110581 - DNA, 22 bp, synthetic construct
  misc_feature 1..22: note = chemically synthesized
  source 1..22: mol_type = other DNA
ttatacataggaataaggcatt

SEQ ID NO: 110582 - DNA, 22 bp, synthetic construct
  misc_feature 1..22: note = chemically synthesized
  source 1..22: mol_type = other DNA
tacataggaataaggcattttt

SEQ ID NO: 110583 - DNA, 22 bp, synthetic construct
  misc_feature 1..22: note = chemically synthesized
  source 1..22: mol_type = other DNA
ttggcttcagacatacatccag

SEQ ID NO: 110584 - DNA, 22 bp, synthetic construct
  misc_feature 1..22: note = chemically synthesized
  source 1..22: mol_type = other DNA
tggcttcagacatacatccagt

SEQ ID NO: 110585 - DNA, 22 bp, synthetic construct
  misc_feature 1..22: note = chemically synthesized
  source 1..22: mol_type = other DNA
ggcttcagacatacatccagtt

SEQ ID NO: 110586 - DNA, 22 bp, synthetic construct
  misc_feature 1..22: note = chemically synthesized
  source 1..22: mol_type = other DNA
gcttcagacatacatccagttc

SEQ ID NO: 110587 - DNA, 22 bp, synthetic construct
  misc_feature 1..22: note = chemically synthesized
  source 1..22: mol_type = other DNA
cagacatacatccagttctctt

SEQ ID NO: 110588 - DNA, 22 bp, synthetic construct
  misc_feature 1..22: note = chemically synthesized
  source 1..22: mol_type = other DNA
agacatacatccagttctcttg

SEQ ID NO: 110589 - DNA, 22 bp, synthetic construct
  misc_feature 1..22: note = chemically synthesized
  source 1..22: mol_type = other DNA
tcttgcatatatggagctggct

SEQ ID NO: 110590 - DNA, 22 bp, synthetic construct
  misc_feature 1..22: note = chemically synthesized
  source 1..22: mol_type = other DNA
ttgcatatatggagctggctgc

SEQ ID NO: 110591 - DNA, 22 bp, synthetic construct
  misc_feature 1..22: note = chemically synthesized
  source 1..22: mol_type = other DNA
gcatatatggagctggctgctg

SEQ ID NO: 110592 - DNA, 22 bp, synthetic construct
  misc_feature 1..22: note = chemically synthesized
  source 1..22: mol_type = other DNA
catatatggagctggctgctgt

SEQ ID NO: 110593 - DNA, 22 bp, synthetic construct
  misc_feature 1..22: note = chemically synthesized
  source 1..22: mol_type = other DNA
gctgctgtttctagaaaattgc

SEQ ID NO: 110594 - DNA, 22 bp, synthetic construct
  misc_feature 1..22: note = chemically synthesized
  source 1..22: mol_type = other DNA
ctgtttctagaaaattgcacgt

SEQ ID NO: 110595 - DNA, 22 bp, synthetic construct
  misc_feature 1..22: note = chemically synthesized
  source 1..22: mol_type = other DNA
tttctagaaaattgcacgtgaa

SEQ ID NO: 110596 - DNA, 22 bp, synthetic construct
  misc_feature 1..22: note = chemically synthesized
  source 1..22: mol_type = other DNA
ctagaaaattgcacgtgaagaa

SEQ ID NO: 110597 - DNA, 22 bp, synthetic construct
  misc_feature 1..22: note = chemically synthesized
  source 1..22: mol_type = other DNA
tagaaaattgcacgtgaagaaa

SEQ ID NO: 110598 - DNA, 22 bp, synthetic construct
  misc_feature 1..22: note = chemically synthesized
  source 1..22: mol_type = other DNA
gaaaattgcacgtgaagaaatg

SEQ ID NO: 110599 - DNA, 22 bp, synthetic construct
  misc_feature 1..22: note = chemically synthesized
  source 1..22: mol_type = other DNA
cacgtgaagaaatgagactttc

SEQ ID NO: 110600 - DNA, 22 bp, synthetic construct
  misc_feature 1..22: note = chemically synthesized
  source 1..22: mol_type = other DNA
tcttcaatgagagtaagccatt

SEQ ID NO: 110601 - DNA, 22 bp, synthetic construct
  misc_feature 1..22: note = chemically synthesized
  source 1..22: mol_type = other DNA
cttcaatgagagtaagccattt

SEQ ID NO: 110602 - DNA, 22 bp, synthetic construct
  misc_feature 1..22: note = chemically synthesized
  source 1..22: mol_type = other DNA
ttcaatgagagtaagccatttc

SEQ ID NO: 110603 - DNA, 22 bp, synthetic construct
  misc_feature 1..22: note = chemically synthesized
  source 1..22: mol_type = other DNA
caatgagagtaagccatttccc

SEQ ID NO: 110604 - DNA, 22 bp, synthetic construct
  misc_feature 1..22: note = chemically synthesized
  source 1..22: mol_type = other DNA
aatgagagtaagccatttccct

SEQ ID NO: 110605 - DNA, 22 bp, synthetic construct
  misc_feature 1..22: note = chemically synthesized
  source 1..22: mol_type = other DNA
ccctcaattactttcttcaatg

SEQ ID NO: 110606 - DNA, 22 bp, synthetic construct
  misc_feature 1..22: note = chemically synthesized
  source 1..22: mol_type = other DNA
cctcaattactttcttcaatga

SEQ ID NO: 110607 - DNA, 22 bp, synthetic construct
  misc_feature 1..22: note = chemically synthesized
  source 1..22: mol_type = other DNA
aattactttcttcaatgagggt

SEQ ID NO: 110608 - DNA, 22 bp, synthetic construct
  misc_feature 1..22: note = chemically synthesized
  source 1..22: mol_type = other DNA
ctttcttcaatgagggtaaacc

SEQ ID NO: 110609 - DNA, 22 bp, synthetic construct
  misc_feature 1..22: note = chemically synthesized
  source 1..22: mol_type = other DNA
tcttcaatgagggtaaaccatt

SEQ ID NO: 110610 - DNA, 22 bp, synthetic construct
  misc_feature 1..22: note = chemically synthesized
  source 1..22: mol_type = other DNA
cttcaatgagggtaaaccattt

SEQ ID NO: 110611 - DNA, 22 bp, synthetic construct
  misc_feature 1..22: note = chemically synthesized
  source 1..22: mol_type = other DNA
ttcaatgagggtaaaccatttc

SEQ ID NO: 110612 - DNA, 22 bp, synthetic construct
  misc_feature 1..22: note = chemically synthesized
  source 1..22: mol_type = other DNA
caatgagggtaaaccatttccc

SEQ ID NO: 110613 - DNA, 22 bp, synthetic construct
  misc_feature 1..22: note = chemically synthesized
  source 1..22: mol_type = other DNA
aatgagggtaaaccatttccct

SEQ ID NO: 110614 - DNA, 22 bp, synthetic construct
  misc_feature 1..22: note = chemically synthesized
  source 1..22: mol_type = other DNA
ccctcaattcaaaatgatgagt

SEQ ID NO: 110615 - DNA, 22 bp, synthetic construct
  misc_feature 1..22: note = chemically synthesized
  source 1..22: mol_type = other DNA
cctcaattcaaaatgatgagtc

SEQ ID NO: 110616 - DNA, 22 bp, synthetic construct
  misc_feature 1..22: note = chemically synthesized
  source 1..22: mol_type = other DNA
aattcaaaatgatgagtctagg

SEQ ID NO: 110617 - DNA, 22 bp, synthetic construct
  misc_feature 1..22: note = chemically synthesized
  source 1..22: mol_type = other DNA
aaaatgatgagtctagggaaag

SEQ ID NO: 110618 - DNA, 22 bp, synthetic construct
  misc_feature 1..22: note = chemically synthesized
  source 1..22: mol_type = other DNA
gggaaagtatctctatgagaaa

SEQ ID NO: 110619 - DNA, 22 bp, synthetic construct
  misc_feature 1..22: note = chemically synthesized
  source 1..22: mol_type = other DNA
tatgagaaatgtgttcagttaa

SEQ ID NO: 110620 - DNA, 22 bp, synthetic construct
  misc_feature 1..22: note = chemically synthesized
  source 1..22: mol_type = other DNA
tgagaaatgtgttcagttaaaa

SEQ ID NO: 110621 - DNA, 22 bp, synthetic construct
  misc_feature 1..22: note = chemically synthesized
  source 1..22: mol_type = other DNA
agttaaaactttggttaacatt

SEQ ID NO: 110622 - DNA, 22 bp, synthetic construct
  misc_feature 1..22: note = chemically synthesized
  source 1..22: mol_type = other DNA
aaactttggttaacatttatca

SEQ ID NO: 110623 - DNA, 22 bp, synthetic construct
  misc_feature 1..22: note = chemically synthesized
  source 1..22: mol_type = other DNA
tggttaacatttatcaaataat

SEQ ID NO: 110624 - DNA, 22 bp, synthetic construct
  misc_feature 1..22: note = chemically synthesized
  source 1..22: mol_type = other DNA
ggttaacatttatcaaataata

SEQ ID NO: 110625 - DNA, 22 bp, synthetic construct
  misc_feature 1..22: note = chemically synthesized
  source 1..22: mol_type = other DNA
gttaacatttatcaaataatat

SEQ ID NO: 110626 - DNA, 22 bp, synthetic construct
  misc_feature 1..22: note = chemically synthesized
  source 1..22: mol_type = other DNA
acatttatcaaataatattgat

SEQ ID NO: 110627 - DNA, 22 bp, synthetic construct
  misc_feature 1..22: note = chemically synthesized
  source 1..22: mol_type = other DNA
atcaaataatattgataataat

SEQ ID NO: 110628 - DNA, 22 bp, synthetic construct
  misc_feature 1..22: note = chemically synthesized
  source 1..22: mol_type = other DNA
tcaaataatattgataataatt

SEQ ID NO: 110629 - DNA, 22 bp, synthetic construct
  misc_feature 1..22: note = chemically synthesized
  source 1..22: mol_type = other DNA
ataataatttgaaaacagagat

SEQ ID NO: 110630 - DNA, 22 bp, synthetic construct
  misc_feature 1..22: note = chemically synthesized
  source 1..22: mol_type = other DNA
gaaaacagagatataatttcta

SEQ ID NO: 110631 - DNA, 22 bp, synthetic construct
  misc_feature 1..22: note = chemically synthesized
  source 1..22: mol_type = other DNA
aaaacagagatataatttctaa

SEQ ID NO: 110632 - DNA, 22 bp, synthetic construct
  misc_feature 1..22: note = chemically synthesized
  source 1..22: mol_type = other DNA
ctaattcagatgaccattgtct

SEQ ID NO: 110633 - DNA, 22 bp, synthetic construct
  misc_feature 1..22: note = chemically synthesized
  source 1..22: mol_type = other DNA
taattcagatgaccattgtctt

SEQ ID NO: 110634 - DNA, 22 bp, synthetic construct
  misc_feature 1..22: note = chemically synthesized
  source 1..22: mol_type = other DNA
attcagatgaccattgtcttga

SEQ ID NO: 110635 - DNA, 22 bp, synthetic construct
  misc_feature 1..22: note = chemically synthesized
  source 1..22: mol_type = other DNA
agatgaccattgtcttgatagt

SEQ ID NO: 110636 - DNA, 22 bp, synthetic construct
  misc_feature 1..22: note = chemically synthesized
  source 1..22: mol_type = other DNA
tcttgatagttaattccagtta

SEQ ID NO: 110637 - DNA, 22 bp, synthetic construct
  misc_feature 1..22: note = chemically synthesized
  source 1..22: mol_type = other DNA
gatagttaattccagttactac

SEQ ID NO: 110638 - DNA, 22 bp, synthetic construct
  misc_feature 1..22: note = chemically synthesized
  source 1..22: mol_type = other DNA
atagttaattccagttactact

SEQ ID NO: 110639 - DNA, 22 bp, synthetic construct
  misc_feature 1..22: note = chemically synthesized
  source 1..22: mol_type = other DNA
attccagttactactgaacaga

SEQ ID NO: 110640 - DNA, 22 bp, synthetic construct
  misc_feature 1..22: note = chemically synthesized
  source 1..22: mol_type = other DNA
cagttactactgaacagagaga

SEQ ID NO: 110641 - DNA, 22 bp, synthetic construct
  misc_feature 1..22: note = chemically synthesized
  source 1..22: mol_type = other DNA
ctactgaacagagagatgcatt

SEQ ID NO: 110642 - DNA, 22 bp, synthetic construct
  misc_feature 1..22: note = chemically synthesized
  source 1..22: mol_type = other DNA
ctgaacagagagatgcattttc

SEQ ID NO: 110643 - DNA, 22 bp, synthetic construct
  misc_feature 1..22: note = chemically synthesized
  source 1..22: mol_type = other DNA
aacagagagatgcattttcata

SEQ ID NO: 110644 - DNA, 22 bp, synthetic construct
  misc_feature 1..22: note = chemically synthesized
  source 1..22: mol_type = other DNA
tcataaagtggtatgagaggtc

SEQ ID NO: 110645 - DNA, 22 bp, synthetic construct
  misc_feature 1..22: note = chemically synthesized
  source 1..22: mol_type = other DNA
cataaagtggtatgagaggtct

SEQ ID NO: 110646 - DNA, 22 bp, synthetic construct
  misc_feature 1..22: note = chemically synthesized
  source 1..22: mol_type = other DNA
ataaagtggtatgagaggtctg

SEQ ID NO: 110647 - DNA, 22 bp, synthetic construct
  misc_feature 1..22: note = chemically synthesized
  source 1..22: mol_type = other DNA
gtttaggggaacatcagagata

SEQ ID NO: 110648 - DNA, 22 bp, synthetic construct
  misc_feature 1..22: note = chemically synthesized
  source 1..22: mol_type = other DNA
aggggaacatcagagataagac

SEQ ID NO: 110649 - DNA, 22 bp, synthetic construct
  misc_feature 1..22: note = chemically synthesized
  source 1..22: mol_type = other DNA
ggggaacatcagagataagact

SEQ ID NO: 110650 - DNA, 22 bp, synthetic construct
  misc_feature 1..22: note = chemically synthesized
  source 1..22: mol_type = other DNA
gataggggtgtctggcatgtgc

SEQ ID NO: 110651 - DNA, 22 bp, synthetic construct
  misc_feature 1..22: note = chemically synthesized
  source 1..22: mol_type = other DNA
gcatgtgcaaaatagcagagtt

SEQ ID NO: 110652 - DNA, 22 bp, synthetic construct
  misc_feature 1..22: note = chemically synthesized
  source 1..22: mol_type = other DNA
aaaaacaaacagttggtcatat

SEQ ID NO: 110653 - DNA, 22 bp, synthetic construct
  misc_feature 1..22: note = chemically synthesized
  source 1..22: mol_type = other DNA
gtcatatgtggagagtggggag

SEQ ID NO: 110654 - DNA, 22 bp, synthetic construct
  misc_feature 1..22: note = chemically synthesized
  source 1..22: mol_type = other DNA
ataactagaagataaaatggcc

SEQ ID NO: 110655 - DNA, 22 bp, synthetic construct
  misc_feature 1..22: note = chemically synthesized
  source 1..22: mol_type = other DNA
gaagataaaatggccttttctg

SEQ ID NO: 110656 - DNA, 22 bp, synthetic construct
  misc_feature 1..22: note = chemically synthesized
  source 1..22: mol_type = other DNA
ttctggctccaaatacttttga

SEQ ID NO: 110657 - DNA, 22 bp, synthetic construct
  misc_feature 1..22: note = chemically synthesized
  source 1..22: mol_type = other DNA
tctggctccaaatacttttgat

SEQ ID NO: 110658 - DNA, 22 bp, synthetic construct
  misc_feature 1..22: note = chemically synthesized
  source 1..22: mol_type = other DNA
ctggctccaaatacttttgatt

SEQ ID NO: 110659 - DNA, 22 bp, synthetic construct
  misc_feature 1..22: note = chemically synthesized
  source 1..22: mol_type = other DNA
tggctccaaatacttttgattc

SEQ ID NO: 110660 - DNA, 22 bp, synthetic construct
  misc_feature 1..22: note = chemically synthesized
  source 1..22: mol_type = other DNA
gctccaaatacttttgattctt

SEQ ID NO: 110661 - DNA, 22 bp, synthetic construct
  misc_feature 1..22: note = chemically synthesized
  source 1..22: mol_type = other DNA
caaatacttttgattcttttca

SEQ ID NO: 110662 - DNA, 22 bp, synthetic construct
  misc_feature 1..22: note = chemically synthesized
  source 1..22: mol_type = other DNA
ttgattcttttcagagtctagg

SEQ ID NO: 110663 - DNA, 22 bp, synthetic construct
  misc_feature 1..22: note = chemically synthesized
  source 1..22: mol_type = other DNA
tgattcttttcagagtctaggc

SEQ ID NO: 110664 - DNA, 22 bp, synthetic construct
  misc_feature 1..22: note = chemically synthesized
  source 1..22: mol_type = other DNA
gattcttttcagagtctaggca

SEQ ID NO: 110665 - DNA, 22 bp, synthetic construct
  misc_feature 1..22: note = chemically synthesized
  source 1..22: mol_type = other DNA
attcttttcagagtctaggcat

SEQ ID NO: 110666 - DNA, 22 bp, synthetic construct
  misc_feature 1..22: note = chemically synthesized
  source 1..22: mol_type = other DNA
ttttcagagtctaggcatgaga

SEQ ID NO: 110667 - DNA, 22 bp, synthetic construct
  misc_feature 1..22: note = chemically synthesized
  source 1..22: mol_type = other DNA
ttcagagtctaggcatgagaag

SEQ ID NO: 110668 - DNA, 22 bp, synthetic construct
  misc_feature 1..22: note = chemically synthesized
  source 1..22: mol_type = other DNA
tcagagtctaggcatgagaaga

SEQ ID NO: 110669 - DNA, 22 bp, synthetic construct
  misc_feature 1..22: note = chemically synthesized
  source 1..22: mol_type = other DNA
cagagtctaggcatgagaagag

SEQ ID NO: 110670 - DNA, 22 bp, synthetic construct
  misc_feature 1..22: note = chemically synthesized
  source 1..22: mol_type = other DNA
agagtctaggcatgagaagagg

SEQ ID NO: 110671 - DNA, 22 bp, synthetic construct
  misc_feature 1..22: note = chemically synthesized
  source 1..22: mol_type = other DNA
ggcatgagaagagggggtttgt

SEQ ID NO: 110672 - DNA, 22 bp, synthetic construct
  misc_feature 1..22: note = chemically synthesized
  source 1..22: mol_type = other DNA
gtggtcctatggccaggtgaag

SEQ ID NO: 110673 - DNA, 22 bp, synthetic construct
  misc_feature 1..22: note = chemically synthesized
  source 1..22: mol_type = other DNA
tggtcctatggccaggtgaaga

SEQ ID NO: 110674 - DNA, 22 bp, synthetic construct
  misc_feature 1..22: note = chemically synthesized
  source 1..22: mol_type = other DNA
tggccaggtgaagagccagtat

SEQ ID NO: 110675 - DNA, 22 bp, synthetic construct
  misc_feature 1..22: note = chemically synthesized
  source 1..22: mol_type = other DNA
aaatgataagttttaaattaat

SEQ ID NO: 110676 - DNA, 22 bp, synthetic construct
  misc_feature 1..22: note = chemically synthesized
  source 1..22: mol_type = other DNA
taaattaattttaaaagaaaga

SEQ ID NO: 110677 - DNA, 22 bp, synthetic construct
  misc_feature 1..22: note = chemically synthesized
  source 1..22: mol_type = other DNA
aaattaattttaaaagaaagat

SEQ ID NO: 110678 - DNA, 22 bp, synthetic construct
  misc_feature 1..22: note = chemically synthesized
  source 1..22: mol_type = other DNA
aattaattttaaaagaaagata

SEQ ID NO: 110679 - DNA, 22 bp, synthetic construct
  misc_feature 1..22: note = chemically synthesized
  source 1..22: mol_type = other DNA
attttaaaagaaagatattctt

SEQ ID NO: 110680 - DNA, 22 bp, synthetic construct
  misc_feature 1..22: note = chemically synthesized
  source 1..22: mol_type = other DNA
taaaagaaagatattcttttga

SEQ ID NO: 110681 - DNA, 22 bp, synthetic construct
  misc_feature 1..22: note = chemically synthesized
  source 1..22: mol_type = other DNA
aaaagaaagatattcttttgac

SEQ ID NO: 110682 - DNA, 22 bp, synthetic construct
  misc_feature 1..22: note = chemically synthesized
  source 1..22: mol_type = other DNA
aaagaaagatattcttttgacc

SEQ ID NO: 110683 - DNA, 22 bp, synthetic construct
  misc_feature 1..22: note = chemically synthesized
  source 1..22: mol_type = other DNA
ttttgaccaaaatacagggtat

SEQ ID NO: 110684 - DNA, 22 bp, synthetic construct
  misc_feature 1..22: note = chemically synthesized
  source 1..22: mol_type = other DNA
ttgaccaaaatacagggtatga

SEQ ID NO: 110685 - DNA, 22 bp, synthetic construct
  misc_feature 1..22: note = chemically synthesized
  source 1..22: mol_type = other DNA
tgaccaaaatacagggtatgat

SEQ ID NO: 110686 - DNA, 22 bp, synthetic construct
  misc_feature 1..22: note = chemically synthesized
  source 1..22: mol_type = other DNA
gaccaaaatacagggtatgatg

SEQ ID NO: 110687 - DNA, 22 bp, synthetic construct
  misc_feature 1..22: note = chemically synthesized
  source 1..22: mol_type = other DNA
accaaaatacagggtatgatgt

SEQ ID NO: 110688 - DNA, 22 bp, synthetic construct
  misc_feature 1..22: note = chemically synthesized
  source 1..22: mol_type = other DNA
ggactacacaaggggccaccca

SEQ ID NO: 110689 - DNA, 22 bp, synthetic construct
  misc_feature 1..22: note = chemically synthesized
  source 1..22: mol_type = other DNA
gactacacaaggggccacccag

SEQ ID NO: 110690 - DNA, 22 bp, synthetic construct
  misc_feature 1..22: note = chemically synthesized
  source 1..22: mol_type = other DNA
cacaaggggccacccagtgacc

SEQ ID NO: 110691 - DNA, 22 bp, synthetic construct
  misc_feature 1..22: note = chemically synthesized
  source 1..22: mol_type = other DNA
gatgcccctcatctctggcctc

SEQ ID NO: 110692 - DNA, 22 bp, synthetic construct
  misc_feature 1..22: note = chemically synthesized
  source 1..22: mol_type = other DNA
atctctggcctctgtcatactg

SEQ ID NO: 110693 - DNA, 22 bp, synthetic construct
  misc_feature 1..22: note = chemically synthesized
  source 1..22: mol_type = other DNA
tggcctctgtcatactgacact

SEQ ID NO: 110694 - DNA, 22 bp, synthetic construct
  misc_feature 1..22: note = chemically synthesized
  source 1..22: mol_type = other DNA
gcctctgtcatactgacactca

SEQ ID NO: 110695 - DNA, 22 bp, synthetic construct
  misc_feature 1..22: note = chemically synthesized
  source 1..22: mol_type = other DNA
tgtcatactgacactcagtgat

SEQ ID NO: 110696 - DNA, 22 bp, synthetic construct
  misc_feature 1..22: note = chemically synthesized
  source 1..22: mol_type = other DNA
tcatactgacactcagtgatct

SEQ ID NO: 110697 - DNA, 22 bp, synthetic construct
  misc_feature 1..22: note = chemically synthesized
  source 1..22: mol_type = other DNA
acactcagtgatctatggctgc

SEQ ID NO: 110698 - DNA, 22 bp, synthetic construct
  misc_feature 1..22: note = chemically synthesized
  source 1..22: mol_type = other DNA
agtgatctatggctgcccacct

SEQ ID NO: 110699 - DNA, 22 bp, synthetic construct
  misc_feature 1..22: note = chemically synthesized
  source 1..22: mol_type = other DNA
tggctgcccacctactcttcat

SEQ ID NO: 110700 - DNA, 22 bp, synthetic construct
  misc_feature 1..22: note = chemically synthesized
  source 1..22: mol_type = other DNA
cccacctactcttcatcacaga

SEQ ID NO: 110701 - DNA, 22 bp, synthetic construct
  misc_feature 1..22: note = chemically synthesized
  source 1..22: mol_type = other DNA
ctcttcatcacagaaaggtggg

SEQ ID NO: 110702 - DNA, 22 bp, synthetic construct
  misc_feature 1..22: note = chemically synthesized
  source 1..22: mol_type = other DNA
ttcatcacagaaaggtggggat

SEQ ID NO: 110703 - DNA, 22 bp, synthetic construct
  misc_feature 1..22: note = chemically synthesized
  source 1..22: mol_type = other DNA
catcacagaaaggtggggattt

SEQ ID NO: 110704 - DNA, 22 bp, synthetic construct
  misc_feature 1..22: note = chemically synthesized
  source 1..22: mol_type = other DNA
atcacagaaaggtggggatttt

SEQ ID NO: 110705 - DNA, 22 bp, synthetic construct
  misc_feature 1..22: note = chemically synthesized
  source 1..22: mol_type = other DNA
tttaggattcttgggatgtata

SEQ ID NO: 110706 - DNA, 22 bp, synthetic construct
  misc_feature 1..22: note = chemically synthesized
  source 1..22: mol_type = other DNA
ttaggattcttgggatgtataa

SEQ ID NO: 110707 - DNA, 22 bp, synthetic construct
  misc_feature 1..22: note = chemically synthesized
  source 1..22: mol_type = other DNA
taggattcttgggatgtataaa

SEQ ID NO: 110708 - DNA, 22 bp, synthetic construct
  misc_feature 1..22: note = chemically synthesized
  source 1..22: mol_type = other DNA
aggattcttgggatgtataaat

SEQ ID NO: 110709 - DNA, 22 bp, synthetic construct
  misc_feature 1..22: note = chemically synthesized
  source 1..22: mol_type = other DNA
ggattcttgggatgtataaata

SEQ ID NO: 110710 - DNA, 22 bp, synthetic construct
  misc_feature 1..22: note = chemically synthesized
  source 1..22: mol_type = other DNA
ttgggatgtataaataacacag

SEQ ID NO: 110711 - DNA, 22 bp, synthetic construct
  misc_feature 1..22: note = chemically synthesized
  source 1..22: mol_type = other DNA
gggatgtataaataacacagag

SEQ ID NO: 110712 - DNA, 22 bp, synthetic construct
  misc_feature 1..22: note = chemically synthesized
  source 1..22: mol_type = other DNA
ggatgtataaataacacagaga

SEQ ID NO: 110713 - DNA, 22 bp, synthetic construct
  misc_feature 1..22: note = chemically synthesized
  source 1..22: mol_type = other DNA
cacaatagtttccaggctagta

SEQ ID NO: 110714 - DNA, 22 bp, synthetic construct
  misc_feature 1..22: note = chemically synthesized
  source 1..22: mol_type = other DNA
acaatagtttccaggctagtaa

SEQ ID NO: 110715 - DNA, 22 bp, synthetic construct
  misc_feature 1..22: note = chemically synthesized
  source 1..22: mol_type = other DNA
ccaggctagtaaatgatcttta

SEQ ID NO: 110716 - DNA, 22 bp, synthetic construct
  misc_feature 1..22: note = chemically synthesized
  source 1..22: mol_type = other DNA
caggctagtaaatgatctttat

SEQ ID NO: 110717 - DNA, 22 bp, synthetic construct
  misc_feature 1..22: note = chemically synthesized
  source 1..22: mol_type = other DNA
gtaaatgatctttatctgatta

SEQ ID NO: 110718 - DNA, 22 bp, synthetic construct
  misc_feature 1..22: note = chemically synthesized
  source 1..22: mol_type = other DNA
tatctgattagaccaaaagatt

SEQ ID NO: 110719 - DNA, 22 bp, synthetic construct
  misc_feature 1..22: note = chemically synthesized
  source 1..22: mol_type = other DNA
atctgattagaccaaaagattt

SEQ ID NO: 110720 - DNA, 22 bp, synthetic construct
  misc_feature 1..22: note = chemically synthesized
  source 1..22: mol_type = other DNA
tctgattagaccaaaagatttt

SEQ ID NO: 110721 - DNA, 22 bp, synthetic construct
  misc_feature 1..22: note = chemically synthesized
  source 1..22: mol_type = other DNA
attagaccaaaagattttgttt

SEQ ID NO: 110722 - DNA, 22 bp, synthetic construct
  misc_feature 1..22: note = chemically synthesized
  source 1..22: mol_type = other DNA
gaccaaaagattttgtttgttt

SEQ ID NO: 110723 - DNA, 22 bp, synthetic construct
  misc_feature 1..22: note = chemically synthesized
  source 1..22: mol_type = other DNA
tgtttgttttactcaacttggc

SEQ ID NO: 110724 - DNA, 22 bp, synthetic construct
  misc_feature 1..22: note = chemically synthesized
  source 1..22: mol_type = other DNA
gtttgttttactcaacttggct

SEQ ID NO: 110725 - DNA, 22 bp, synthetic construct
  misc_feature 1..22: note = chemically synthesized
  source 1..22: mol_type = other DNA
tttgttttactcaacttggctg

SEQ ID NO: 110726 - DNA, 22 bp, synthetic construct
  misc_feature 1..22: note = chemically synthesized
  source 1..22: mol_type = other DNA
gttttactcaacttggctgtgt

SEQ ID NO: 110727 - DNA, 22 bp, synthetic construct
  misc_feature 1..22: note = chemically synthesized
  source 1..22: mol_type = other DNA
ttttactcaacttggctgtgtg

SEQ ID NO: 110728 - DNA, 22 bp, synthetic construct
  misc_feature 1..22: note = chemically synthesized
  source 1..22: mol_type = other DNA
tactcaacttggctgtgtgtga

SEQ ID NO: 110729 - DNA, 22 bp, synthetic construct
  misc_feature 1..22: note = chemically synthesized
  source 1..22: mol_type = other DNA
actcaacttggctgtgtgtgaa

SEQ ID NO: 110730 - DNA, 22 bp, synthetic construct
  misc_feature 1..22: note = chemically synthesized
  source 1..22: mol_type = other DNA
ctcaacttggctgtgtgtgaaa

SEQ ID NO: 110731 - DNA, 22 bp, synthetic construct
  misc_feature 1..22: note = chemically synthesized
  source 1..22: mol_type = other DNA
aacttggctgtgtgtgaaattt

SEQ ID NO: 110732 - DNA, 22 bp, synthetic construct
  misc_feature 1..22: note = chemically synthesized
  source 1..22: mol_type = other DNA
ggctgtgtgtgaaatttgcctt

SEQ ID NO: 110733 - DNA, 22 bp, synthetic construct
  misc_feature 1..22: note = chemically synthesized
  source 1..22: mol_type = other DNA
gctgtgtgtgaaatttgccttt

SEQ ID NO: 110734 - DNA, 22 bp, synthetic construct
  misc_feature 1..22: note = chemically synthesized
  source 1..22: mol_type = other DNA
tgtgtgaaatttgcctttctct

SEQ ID NO: 110735 - DNA, 22 bp, synthetic construct
  misc_feature 1..22: note = chemically synthesized
  source 1..22: mol_type = other DNA
gcctttctcttttgtagcttct

SEQ ID NO: 110736 - DNA, 22 bp, synthetic construct
  misc_feature 1..22: note = chemically synthesized
  source 1..22: mol_type = other DNA
cctttctcttttgtagcttctt

SEQ ID NO: 110737 - DNA, 22 bp, synthetic construct
  misc_feature 1..22: note = chemically synthesized
  source 1..22: mol_type = other DNA
tctcttttgtagcttcttgact

SEQ ID NO: 110738 - DNA, 22 bp, synthetic construct
  misc_feature 1..22: note = chemically synthesized
  source 1..22: mol_type = other DNA
ctcttttgtagcttcttgactg

SEQ ID NO: 110739 - DNA, 22 bp, synthetic construct
  misc_feature 1..22: note = chemically synthesized
  source 1..22: mol_type = other DNA
tcttttgtagcttcttgactgt

SEQ ID NO: 110740 - DNA, 22 bp, synthetic construct
  misc_feature 1..22: note = chemically synthesized
  source 1..22: mol_type = other DNA
ttttgtagcttcttgactgtgt

SEQ ID NO: 110741 - DNA, 22 bp, synthetic construct
  misc_feature 1..22: note = chemically synthesized
  source 1..22: mol_type = other DNA
ttgtagcttcttgactgtgtgc

SEQ ID NO: 110742 - DNA, 22 bp, synthetic construct
  misc_feature 1..22: note = chemically synthesized
  source 1..22: mol_type = other DNA
tgtagcttcttgactgtgtgct

SEQ ID NO: 110743 - DNA, 22 bp, synthetic construct
  misc_feature 1..22: note = chemically synthesized
  source 1..22: mol_type = other DNA
gtagcttcttgactgtgtgctc

SEQ ID NO: 110744 - DNA, 22 bp, synthetic construct
  misc_feature 1..22: note = chemically synthesized
  source 1..22: mol_type = other DNA
tagcttcttgactgtgtgctcg

SEQ ID NO: 110745 - DNA, 22 bp, synthetic construct
  misc_feature 1..22: note = chemically synthesized
  source 1..22: mol_type = other DNA
cttgactgtgtgctcgaggatg

SEQ ID NO: 110746 - DNA, 22 bp, synthetic construct
  misc_feature 1..22: note = chemically synthesized
  source 1..22: mol_type = other DNA
ttgactgtgtgctcgaggatgg

SEQ ID NO: 110747 - DNA, 22 bp, synthetic construct
  misc_feature 1..22: note = chemically synthesized
  source 1..22: mol_type = other DNA
gactgtgtgctcgaggatggta

SEQ ID NO: 110748 - DNA, 22 bp, synthetic construct
  misc_feature 1..22: note = chemically synthesized
  source 1..22: mol_type = other DNA
actgtgtgctcgaggatggtaa

SEQ ID NO: 110749 - DNA, 22 bp, synthetic construct
  misc_feature 1..22: note = chemically synthesized
  source 1..22: mol_type = other DNA
tgtgctcgaggatggtaaatat

SEQ ID NO: 110750 - DNA, 22 bp, synthetic construct
  misc_feature 1..22: note = chemically synthesized
  source 1..22: mol_type = other DNA
gaggatggtaaatataacatag

SEQ ID NO: 110751 - DNA, 22 bp, synthetic construct
  misc_feature 1..22: note = chemically synthesized
  source 1..22: mol_type = other DNA
ttattccctactgtattacaga

SEQ ID NO: 110752 - DNA, 22 bp, synthetic construct
  misc_feature 1..22: note = chemically synthesized
  source 1..22: mol_type = other DNA
attccctactgtattacagaac

SEQ ID NO: 110753 - DNA, 22 bp, synthetic construct
  misc_feature 1..22: note = chemically synthesized
  source 1..22: mol_type = other DNA
ttccctactgtattacagaact

SEQ ID NO: 110754 - DNA, 22 bp, synthetic construct
  misc_feature 1..22: note = chemically synthesized
  source 1..22: mol_type = other DNA
cctactgtattacagaacttct

SEQ ID NO: 110755 - DNA, 22 bp, synthetic construct
  misc_feature 1..22: note = chemically synthesized
  source 1..22: mol_type = other DNA
ctgtattacagaacttctcaca

SEQ ID NO: 110756 - DNA, 22 bp, synthetic construct
  misc_feature 1..22: note = chemically synthesized
  source 1..22: mol_type = other DNA
tattacagaacttctcacatag

SEQ ID NO: 110757 - DNA, 22 bp, synthetic construct
  misc_feature 1..22: note = chemically synthesized
  source 1..22: mol_type = other DNA
cagaacttctcacatagaccat

SEQ ID NO: 110758 - DNA, 22 bp, synthetic construct
  misc_feature 1..22: note = chemically synthesized
  source 1..22: mol_type = other DNA
ctcacatagaccatttttaaca

SEQ ID NO: 110759 - DNA, 22 bp, synthetic construct
  misc_feature 1..22: note = chemically synthesized
  source 1..22: mol_type = other DNA
tcacatagaccatttttaacaa

SEQ ID NO: 110760 - DNA, 22 bp, synthetic construct
  misc_feature 1..22: note = chemically synthesized
  source 1..22: mol_type = other DNA
acatagaccatttttaacaaaa

SEQ ID NO: 110761 - DNA, 22 bp, synthetic construct
  misc_feature 1..22: note = chemically synthesized
  source 1..22: mol_type = other DNA
ttaacaaaatataatttttcat

SEQ ID NO: 110762 - DNA, 22 bp, synthetic construct
  misc_feature 1..22: note = chemically synthesized
  source 1..22: mol_type = other DNA
taacaaaatataatttttcatt

SEQ ID NO: 110763 - DNA, 22 bp, synthetic construct
  misc_feature 1..22: note = chemically synthesized
  source 1..22: mol_type = other DNA
aacaaaatataatttttcatta

SEQ ID NO: 110764 - DNA, 22 bp, synthetic construct
  misc_feature 1..22: note = chemically synthesized
  source 1..22: mol_type = other DNA
acaaaatataatttttcattaa

SEQ ID NO: 110765 - DNA, 22 bp, synthetic construct
  misc_feature 1..22: note = chemically synthesized
  source 1..22: mol_type = other DNA
ttcattaaaatgaataaataaa

SEQ ID NO: 110766 - DNA, 22 bp, synthetic construct
  misc_feature 1..22: note = chemically synthesized
  source 1..22: mol_type = other DNA
tcattaaaatgaataaataaaa

SEQ ID NO: 110767 - DNA, 22 bp, synthetic construct
  misc_feature 1..22: note = chemically synthesized
  source 1..22: mol_type = other DNA
cattaaaatgaataaataaaat

SEQ ID NO: 110768 - DNA, 22 bp, synthetic construct
  misc_feature 1..22: note = chemically synthesized
  source 1..22: mol_type = other DNA
attaaaatgaataaataaaatt

SEQ ID NO: 110769 - DNA, 22 bp, synthetic construct
  misc_feature 1..22: note = chemically synthesized
  source 1..22: mol_type = other DNA
aaatgaataaataaaatttaaa

SEQ ID NO: 110770 - DNA, 22 bp, synthetic construct
  misc_feature 1..22: note = chemically synthesized
  source 1..22: mol_type = other DNA
aaagtgacccatgtctttctgt

SEQ ID NO: 110771 - DNA, 22 bp, synthetic construct
  misc_feature 1..22: note = chemically synthesized
  source 1..22: mol_type = other DNA
aagtgacccatgtctttctgtg

SEQ ID NO: 110772 - DNA, 22 bp, synthetic construct
  misc_feature 1..22: note = chemically synthesized
  source 1..22: mol_type = other DNA
tctgtgtgtctgctagttcttc

SEQ ID NO: 110773 - DNA, 22 bp, synthetic construct
  misc_feature 1..22: note = chemically synthesized
  source 1..22: mol_type = other DNA
ctgtgtgtctgctagttcttct

SEQ ID NO: 110774 - DNA, 22 bp, synthetic construct
  misc_feature 1..22: note = chemically synthesized
  source 1..22: mol_type = other DNA
tgtgtgtctgctagttcttctg

SEQ ID NO: 110775 - DNA, 22 bp, synthetic construct
  misc_feature 1..22: note = chemically synthesized
  source 1..22: mol_type = other DNA
tgtgtctgctagttcttctgtc

SEQ ID NO: 110776 - DNA, 22 bp, synthetic construct
  misc_feature 1..22: note = chemically synthesized
  source 1..22: mol_type = other DNA
ctagttcttctgtctgttactg

SEQ ID NO: 110777 - DNA, 22 bp, synthetic construct
  misc_feature 1..22: note = chemically synthesized
  source 1..22: mol_type = other DNA
gttcttctgtctgttactgctc

SEQ ID NO: 110778 - DNA, 22 bp, synthetic construct
  misc_feature 1..22: note = chemically synthesized
  source 1..22: mol_type = other DNA
ttctgtctgttactgctctctg

SEQ ID NO: 110779 - DNA, 22 bp, synthetic construct
  misc_feature 1..22: note = chemically synthesized
  source 1..22: mol_type = other DNA
ctgtctgttactgctctctgta

SEQ ID NO: 110780 - DNA, 22 bp, synthetic construct
  misc_feature 1..22: note = chemically synthesized
  source 1..22: mol_type = other DNA
tgtctgttactgctctctgtat

SEQ ID NO: 110781 - DNA, 22 bp, synthetic construct
  misc_feature 1..22: note = chemically synthesized
  source 1..22: mol_type = other DNA
tctgttactgctctctgtattg

SEQ ID NO: 110782 - DNA, 22 bp, synthetic construct
  misc_feature 1..22: note = chemically synthesized
  source 1..22: mol_type = other DNA
ttactgctctctgtattgtctt

SEQ ID NO: 110783 - DNA, 22 bp, synthetic construct
  misc_feature 1..22: note = chemically synthesized
  source 1..22: mol_type = other DNA
ctgctctctgtattgtcttcca

SEQ ID NO: 110784 - DNA, 22 bp, synthetic construct
  misc_feature 1..22: note = chemically synthesized
  source 1..22: mol_type = other DNA
ctctctgtattgtcttccaaga

SEQ ID NO: 110785 - DNA, 22 bp, synthetic construct
  misc_feature 1..22: note = chemically synthesized
  source 1..22: mol_type = other DNA
tctgtattgtcttccaagatat

SEQ ID NO: 110786 - DNA, 22 bp, synthetic construct
  misc_feature 1..22: note = chemically synthesized
  source 1..22: mol_type = other DNA
tgtattgtcttccaagatatgg

SEQ ID NO: 110787 - DNA, 22 bp, synthetic construct
  misc_feature 1..22: note = chemically synthesized
  source 1..22: mol_type = other DNA
tattgtcttccaagatatgggc

SEQ ID NO: 110788 - DNA, 22 bp, synthetic construct
  misc_feature 1..22: note = chemically synthesized
  source 1..22: mol_type = other DNA
tcttccaagatatgggcaatgt

SEQ ID NO: 110789 - DNA, 22 bp, synthetic construct
  misc_feature 1..22: note = chemically synthesized
  source 1..22: mol_type = other DNA
ccaagatatgggcaatgtatac

SEQ ID NO: 110790 - DNA, 22 bp, synthetic construct
  misc_feature 1..22: note = chemically synthesized
  source 1..22: mol_type = other DNA
caagatatgggcaatgtatact

SEQ ID NO: 110791 - DNA, 22 bp, synthetic construct
  misc_feature 1..22: note = chemically synthesized
  source 1..22: mol_type = other DNA
aatcctgttctttcttcccttg

SEQ ID NO: 110792 - DNA, 22 bp, synthetic construct
  misc_feature 1..22: note = chemically synthesized
  source 1..22: mol_type = other DNA
atcctgttctttcttcccttgg

SEQ ID NO: 110793 - DNA, 22 bp, synthetic construct
  misc_feature 1..22: note = chemically synthesized
  source 1..22: mol_type = other DNA
ttctttcttcccttgggctttt

SEQ ID NO: 110794 - DNA, 22 bp, synthetic construct
  misc_feature 1..22: note = chemically synthesized
  source 1..22: mol_type = other DNA
tttcttcccttgggcttttggg

SEQ ID NO: 110795 - DNA, 22 bp, synthetic construct
  misc_feature 1..22: note = chemically synthesized
  source 1..22: mol_type = other DNA
tcttcccttgggcttttgggaa

SEQ ID NO: 110796 - DNA, 22 bp, synthetic construct
  misc_feature 1..22: note = chemically synthesized
  source 1..22: mol_type = other DNA
cttcccttgggcttttgggaat

SEQ ID NO: 110797 - DNA, 22 bp, synthetic construct
  misc_feature 1..22: note = chemically synthesized
  source 1..22: mol_type = other DNA
ttcccttgggcttttgggaatg

SEQ ID NO: 110798 - DNA, 22 bp, synthetic construct
  misc_feature 1..22: note = chemically synthesized
  source 1..22: mol_type = other DNA
cccttgggcttttgggaatgaa

SEQ ID NO: 110799 - DNA, 22 bp, synthetic construct
  misc_feature 1..22: note = chemically synthesized
  source 1..22: mol_type = other DNA
ccttgggcttttgggaatgaat

SEQ ID NO: 110800 - DNA, 22 bp, synthetic construct
  misc_feature 1..22: note = chemically synthesized
  source 1..22: mol_type = other DNA
gggcttttgggaatgaattcag

SEQ ID NO: 110801 - DNA, 22 bp, synthetic construct
  misc_feature 1..22: note = chemically synthesized
  source 1..22: mol_type = other DNA
ggcttttgggaatgaattcagg

SEQ ID NO: 110802 - DNA, 22 bp, synthetic construct
  misc_feature 1..22: note = chemically synthesized
  source 1..22: mol_type = other DNA
ttgggaatgaattcagggggat

SEQ ID NO: 110803 - DNA, 22 bp, synthetic construct
  misc_feature 1..22: note = chemically synthesized
  source 1..22: mol_type = other DNA
tgggaatgaattcagggggatc

SEQ ID NO: 110804 - DNA, 22 bp, synthetic construct
  misc_feature 1..22: note = chemically synthesized
  source 1..22: mol_type = other DNA
gggaatgaattcagggggatct

SEQ ID NO: 110805 - DNA, 22 bp, synthetic construct
  misc_feature 1..22: note = chemically synthesized
  source 1..22: mol_type = other DNA
ggaatgaattcagggggatcta

SEQ ID NO: 110806 - DNA, 22 bp, synthetic construct
  misc_feature 1..22: note = chemically synthesized
  source 1..22: mol_type = other DNA
agggggatctaagccacatcaa

SEQ ID NO: 110807 - DNA, 22 bp, synthetic construct
  misc_feature 1..22: note = chemically synthesized
  source 1..22: mol_type = other DNA
agccacatcaaagaaaatcttt

SEQ ID NO: 110808 - DNA, 22 bp, synthetic construct
  misc_feature 1..22: note = chemically synthesized
  source 1..22: mol_type = other DNA
tcttgactcaccctctaggtcc

SEQ ID NO: 110809 - DNA, 22 bp, synthetic construct
  misc_feature 1..22: note = chemically synthesized
  source 1..22: mol_type = other DNA
cttgactcaccctctaggtcca

SEQ ID NO: 110810 - DNA, 22 bp, synthetic construct
  misc_feature 1..22: note = chemically synthesized
  source 1..22: mol_type = other DNA
ttgactcaccctctaggtccag

SEQ ID NO: 110811 - DNA, 22 bp, synthetic construct
  misc_feature 1..22: note = chemically synthesized
  source 1..22: mol_type = other DNA
gactcaccctctaggtccagtg

SEQ ID NO: 110812 - DNA, 22 bp, synthetic construct
  misc_feature 1..22: note = chemically synthesized
  source 1..22: mol_type = other DNA
actcaccctctaggtccagtga

SEQ ID NO: 110813 - DNA, 22 bp, synthetic construct
  misc_feature 1..22: note = chemically synthesized
  source 1..22: mol_type = other DNA
accctctaggtccagtgatcct

SEQ ID NO: 110814 - DNA, 22 bp, synthetic construct
  misc_feature 1..22: note = chemically synthesized
  source 1..22: mol_type = other DNA
taggtccagtgatcctgaaacc

SEQ ID NO: 110815 - DNA, 22 bp, synthetic construct
  misc_feature 1..22: note = chemically synthesized
  source 1..22: mol_type = other DNA
ggtccagtgatcctgaaacctg

SEQ ID NO: 110816 - DNA, 22 bp, synthetic construct
  misc_feature 1..22: note = chemically synthesized
  source 1..22: mol_type = other DNA
aaacctgccatagcaggctagt

SEQ ID NO: 110817 - DNA, 22 bp, synthetic construct
  misc_feature 1..22: note = chemically synthesized
  source 1..22: mol_type = other DNA
ccatagcaggctagtataaaga

SEQ ID NO: 110818 - DNA, 22 bp, synthetic construct
  misc_feature 1..22: note = chemically synthesized
  source 1..22: mol_type = other DNA
gtataaagataactaggataac

SEQ ID NO: 110819 - DNA, 22 bp, synthetic construct
  misc_feature 1..22: note = chemically synthesized
  source 1..22: mol_type = other DNA
ggataacaatacattttataaa

SEQ ID NO: 110820 - DNA, 22 bp, synthetic construct
  misc_feature 1..22: note = chemically synthesized
  source 1..22: mol_type = other DNA
tataaattctgtaaatggacac

SEQ ID NO: 110821 - DNA, 22 bp, synthetic construct
  misc_feature 1..22: note = chemically synthesized
  source 1..22: mol_type = other DNA
ataaattctgtaaatggacaca

SEQ ID NO: 110822 - DNA, 22 bp, synthetic construct
  misc_feature 1..22: note = chemically synthesized
  source 1..22: mol_type = other DNA
taaattctgtaaatggacacat

SEQ ID NO: 110823 - DNA, 22 bp, synthetic construct
  misc_feature 1..22: note = chemically synthesized
  source 1..22: mol_type = other DNA
tgtaaatggacacatttgactg

SEQ ID NO: 110824 - DNA, 22 bp, synthetic construct
  misc_feature 1..22: note = chemically synthesized
  source 1..22: mol_type = other DNA
taaatggacacatttgactgac

SEQ ID NO: 110825 - DNA, 22 bp, synthetic construct
  misc_feature 1..22: note = chemically synthesized
  source 1..22: mol_type = other DNA
gactgacaaccctgagtttctc

SEQ ID NO: 110826 - DNA, 22 bp, synthetic construct
  misc_feature 1..22: note = chemically synthesized
  source 1..22: mol_type = other DNA
actgacaaccctgagtttctct

SEQ ID NO: 110827 - DNA, 22 bp, synthetic construct
  misc_feature 1..22: note = chemically synthesized
  source 1..22: mol_type = other DNA
acaaccctgagtttctctcctc

SEQ ID NO: 110828 - DNA, 22 bp, synthetic construct
  misc_feature 1..22: note = chemically synthesized
  source 1..22: mol_type = other DNA
agtttctctcctccctttctgt

SEQ ID NO: 110829 - DNA, 22 bp, synthetic construct
  misc_feature 1..22: note = chemically synthesized
  source 1..22: mol_type = other DNA
ctctcctccctttctgttcttc

SEQ ID NO: 110830 - DNA, 22 bp, synthetic construct
  misc_feature 1..22: note = chemically synthesized
  source 1..22: mol_type = other DNA
tctcctccctttctgttcttcc

SEQ ID NO: 110831 - DNA, 22 bp, synthetic construct
  misc_feature 1..22: note = chemically synthesized
  source 1..22: mol_type = other DNA
tcctccctttctgttcttcctt

SEQ ID NO: 110832 - DNA, 22 bp, synthetic construct
  misc_feature 1..22: note = chemically synthesized
  source 1..22: mol_type = other DNA
ctccctttctgttcttccttat

SEQ ID NO: 110833 - DNA, 22 bp, synthetic construct
  misc_feature 1..22: note = chemically synthesized
  source 1..22: mol_type = other DNA
cctttctgttcttccttatact

SEQ ID NO: 110834 - DNA, 22 bp, synthetic construct
  misc_feature 1..22: note = chemically synthesized
  source 1..22: mol_type = other DNA
tctgttcttccttatactgaag

SEQ ID NO: 110835 - DNA, 22 bp, synthetic construct
  misc_feature 1..22: note = chemically synthesized
  source 1..22: mol_type = other DNA
ctgttcttccttatactgaaga

SEQ ID NO: 110836 - DNA, 22 bp, synthetic construct
  misc_feature 1..22: note = chemically synthesized
  source 1..22: mol_type = other DNA
tgttcttccttatactgaagag

SEQ ID NO: 110837 - DNA, 22 bp, synthetic construct
  misc_feature 1..22: note = chemically synthesized
  source 1..22: mol_type = other DNA
ttcttccttatactgaagagat

SEQ ID NO: 110838 - DNA, 22 bp, synthetic construct
  misc_feature 1..22: note = chemically synthesized
  source 1..22: mol_type = other DNA
ttccttatactgaagagatgtg

SEQ ID NO: 110839 - DNA, 22 bp, synthetic construct
  misc_feature 1..22: note = chemically synthesized
  source 1..22: mol_type = other DNA
ccttatactgaagagatgtgat

SEQ ID NO: 110840 - DNA, 22 bp, synthetic construct
  misc_feature 1..22: note = chemically synthesized
  source 1..22: mol_type = other DNA
cttatactgaagagatgtgatg

SEQ ID NO: 110841 - DNA, 22 bp, synthetic construct
  misc_feature 1..22: note = chemically synthesized
  source 1..22: mol_type = other DNA
atactgaagagatgtgatgaag

SEQ ID NO: 110842 - DNA, 22 bp, synthetic construct
  misc_feature 1..22: note = chemically synthesized
  source 1..22: mol_type = other DNA
tactgaagagatgtgatgaaga

SEQ ID NO: 110843 - DNA, 22 bp, synthetic construct
  misc_feature 1..22: note = chemically synthesized
  source 1..22: mol_type = other DNA
aagagatgtgatgaagagacaa

SEQ ID NO: 110844 - DNA, 22 bp, synthetic construct
  misc_feature 1..22: note = chemically synthesized
  source 1..22: mol_type = other DNA
ggacttgcagttctctttgtgg

SEQ ID NO: 110845 - DNA, 22 bp, synthetic construct
  misc_feature 1..22: note = chemically synthesized
  source 1..22: mol_type = other DNA
gcagttctctttgtggagtccc

SEQ ID NO: 110846 - DNA, 22 bp, synthetic construct
  misc_feature 1..22: note = chemically synthesized
  source 1..22: mol_type = other DNA
cagttctctttgtggagtcccg

SEQ ID NO: 110847 - DNA, 22 bp, synthetic construct
  misc_feature 1..22: note = chemically synthesized
  source 1..22: mol_type = other DNA
tctttgtggagtcccgtgaaac

SEQ ID NO: 110848 - DNA, 22 bp, synthetic construct
  misc_feature 1..22: note = chemically synthesized
  source 1..22: mol_type = other DNA
tttgtggagtcccgtgaaacag

SEQ ID NO: 110849 - DNA, 22 bp, synthetic construct
  misc_feature 1..22: note = chemically synthesized
  source 1..22: mol_type = other DNA
tgtggagtcccgtgaaacagag

SEQ ID NO: 110850 - DNA, 22 bp, synthetic construct
  misc_feature 1..22: note = chemically synthesized
  source 1..22: mol_type = other DNA
gtggagtcccgtgaaacagagc

SEQ ID NO: 110851 - DNA, 22 bp, synthetic construct
  misc_feature 1..22: note = chemically synthesized
  source 1..22: mol_type = other DNA
tggagtcccgtgaaacagagca

SEQ ID NO: 110852 - DNA, 22 bp, synthetic construct
  misc_feature 1..22: note = chemically synthesized
  source 1..22: mol_type = other DNA
tgggctcccgatggtccctgaa

SEQ ID NO: 110853 - DNA, 22 bp, synthetic construct
  misc_feature 1..22: note = chemically synthesized
  source 1..22: mol_type = other DNA
ggctcccgatggtccctgaaca

SEQ ID NO: 110854 - DNA, 22 bp, synthetic construct
  misc_feature 1..22: note = chemically synthesized
  source 1..22: mol_type = other DNA
ccgatggtccctgaacaacata

SEQ ID NO: 110855 - DNA, 22 bp, synthetic construct
  misc_feature 1..22: note = chemically synthesized
  source 1..22: mol_type = other DNA
aacaacatatcaacagtagggt

SEQ ID NO: 110856 - DNA, 22 bp, synthetic construct
  misc_feature 1..22: note = chemically synthesized
  source 1..22: mol_type = other DNA
acccctcctcatgatcctcccc

SEQ ID NO: 110857 - DNA, 22 bp, synthetic construct
  misc_feature 1..22: note = chemically synthesized
  source 1..22: mol_type = other DNA
ctcatgatcctccccacttcct

SEQ ID NO: 110858 - DNA, 22 bp, synthetic construct
  misc_feature 1..22: note = chemically synthesized
  source 1..22: mol_type = other DNA
atgatcctccccacttcctccc

SEQ ID NO: 110859 - DNA, 22 bp, synthetic construct
  misc_feature 1..22: note = chemically synthesized
  source 1..22: mol_type = other DNA
cccacttcctcccgcccctcca

SEQ ID NO: 110860 - DNA, 22 bp, synthetic construct
  misc_feature 1..22: note = chemically synthesized
  source 1..22: mol_type = other DNA
cctcccgcccctccacgccacc

SEQ ID NO: 110861 - DNA, 22 bp, synthetic construct
  misc_feature 1..22: note = chemically synthesized
  source 1..22: mol_type = other DNA
ctcccgcccctccacgccacca

SEQ ID NO: 110862 - DNA, 22 bp, synthetic construct
  misc_feature 1..22: note = chemically synthesized
  source 1..22: mol_type = other DNA
ccgcccctccacgccaccagcc

SEQ ID NO: 110863 - DNA, 22 bp, synthetic construct
  misc_feature 1..22: note = chemically synthesized
  source 1..22: mol_type = other DNA
cacgccaccagccacactgagc

SEQ ID NO: 110864 - DNA, 22 bp, synthetic construct
  misc_feature 1..22: note = chemically synthesized
  source 1..22: mol_type = other DNA
agcgctcagctcctcccaggtc

SEQ ID NO: 110865 - DNA, 22 bp, synthetic construct
  misc_feature 1..22: note = chemically synthesized
  source 1..22: mol_type = other DNA
agctcctcccaggtcctggacc

SEQ ID NO: 110866 - DNA, 22 bp, synthetic construct
  misc_feature 1..22: note = chemically synthesized
  source 1..22: mol_type = other DNA
ctcccaggtcctggacctgcag

SEQ ID NO: 110867 - DNA, 22 bp, synthetic construct
  misc_feature 1..22: note = chemically synthesized
  source 1..22: mol_type = other DNA
ccaggtcctggacctgcagccc

SEQ ID NO: 110868 - DNA, 22 bp, synthetic construct
  misc_feature 1..22: note = chemically synthesized
  source 1..22: mol_type = other DNA
gacctgcagccctggccaacat

SEQ ID NO: 110869 - DNA, 22 bp, synthetic construct
  misc_feature 1..22: note = chemically synthesized
  source 1..22: mol_type = other DNA
cagccctggccaacatcaagag

SEQ ID NO: 110870 - DNA, 22 bp, synthetic construct
  misc_feature 1..22: note = chemically synthesized
  source 1..22: mol_type = other DNA
gccaacatcaagagggcatctt

SEQ ID NO: 110871 - DNA, 22 bp, synthetic construct
  misc_feature 1..22: note = chemically synthesized
  source 1..22: mol_type = other DNA
tgccaagaatgcctggaagaga

SEQ ID NO: 110872 - DNA, 22 bp, synthetic construct
  misc_feature 1..22: note = chemically synthesized
  source 1..22: mol_type = other DNA
gccaagaatgcctggaagagac

SEQ ID NO: 110873 - DNA, 22 bp, synthetic construct
  misc_feature 1..22: note = chemically synthesized
  source 1..22: mol_type = other DNA
ccaagaatgcctggaagagact

SEQ ID NO: 110874 - DNA, 22 bp, synthetic construct
  misc_feature 1..22: note = chemically synthesized
  source 1..22: mol_type = other DNA
gaagagactcagccactcacag

SEQ ID NO: 110875 - DNA, 22 bp, synthetic construct
  misc_feature 1..22: note = chemically synthesized
  source 1..22: mol_type = other DNA
agccactcacaggaaaacgtcc

SEQ ID NO: 110876 - DNA, 22 bp, synthetic construct
  misc_feature 1..22: note = chemically synthesized
  source 1..22: mol_type = other DNA
acaggaaaacgtcctccagaag

SEQ ID NO: 110877 - DNA, 22 bp, synthetic construct
  misc_feature 1..22: note = chemically synthesized
  source 1..22: mol_type = other DNA
cagaagccagggaaagctgctg

SEQ ID NO: 110878 - DNA, 22 bp, synthetic construct
  misc_feature 1..22: note = chemically synthesized
  source 1..22: mol_type = other DNA
ctgagacaaaagacaaacagtt

SEQ ID NO: 110879 - DNA, 22 bp, synthetic construct
  misc_feature 1..22: note = chemically synthesized
  source 1..22: mol_type = other DNA
agacaaaagacaaacagtttga

SEQ ID NO: 110880 - DNA, 22 bp, synthetic construct
  misc_feature 1..22: note = chemically synthesized
  source 1..22: mol_type = other DNA
gaagaatatgtccagaacttca

SEQ ID NO: 110881 - DNA, 22 bp, synthetic construct
  misc_feature 1..22: note = chemically synthesized
  source 1..22: mol_type = other DNA
aagaatatgtccagaacttcaa

SEQ ID NO: 110882 - DNA, 22 bp, synthetic construct
  misc_feature 1..22: note = chemically synthesized
  source 1..22: mol_type = other DNA
caagccacaagaagcagagggt

SEQ ID NO: 110883 - DNA, 22 bp, synthetic construct
  misc_feature 1..22: note = chemically synthesized
  source 1..22: mol_type = other DNA
aagccacaagaagcagagggta

SEQ ID NO: 110884 - DNA, 22 bp, synthetic construct
  misc_feature 1..22: note = chemically synthesized
  source 1..22: mol_type = other DNA
agagaactctgaggatgtttag

SEQ ID NO: 110885 - DNA, 22 bp, synthetic construct
  misc_feature 1..22: note = chemically synthesized
  source 1..22: mol_type = other DNA
tgaggatgtttagaagcaatca

SEQ ID NO: 110886 - DNA, 22 bp, synthetic construct
  misc_feature 1..22: note = chemically synthesized
  source 1..22: mol_type = other DNA
aggatgtttagaagcaatcaaa

SEQ ID NO: 110887 - DNA, 22 bp, synthetic construct
  misc_feature 1..22: note = chemically synthesized
  source 1..22: mol_type = other DNA
agaagcaatcaaaggcattcaa

SEQ ID NO: 110888 - DNA, 22 bp, synthetic construct
  misc_feature 1..22: note = chemically synthesized
  source 1..22: mol_type = other DNA
gaagcaatcaaaggcattcaag

SEQ ID NO: 110889 - DNA, 22 bp, synthetic construct
  misc_feature 1..22: note = chemically synthesized
  source 1..22: mol_type = other DNA
aagagaccttgacgaagctgag

SEQ ID NO: 110890 - DNA, 22 bp, synthetic construct
  misc_feature 1..22: note = chemically synthesized
  source 1..22: mol_type = other DNA
gacgaagctgagtcactgtgtg

SEQ ID NO: 110891 - DNA, 22 bp, synthetic construct
  misc_feature 1..22: note = chemically synthesized
  source 1..22: mol_type = other DNA
acgaagctgagtcactgtgtga

SEQ ID NO: 110892 - DNA, 22 bp, synthetic construct
  misc_feature 1..22: note = chemically synthesized
  source 1..22: mol_type = other DNA
agtcactgtgtgaagtctgtgc

SEQ ID NO: 110893 - DNA, 22 bp, synthetic construct
  misc_feature 1..22: note = chemically synthesized
  source 1..22: mol_type = other DNA
tgtgaagtctgtgcgctggatt

SEQ ID NO: 110894 - DNA, 22 bp, synthetic construct
  misc_feature 1..22: note = chemically synthesized
  source 1..22: mol_type = other DNA
tgcgctggattggtctgggcag

SEQ ID NO: 110895 - DNA, 22 bp, synthetic construct
  misc_feature 1..22: note = chemically synthesized
  source 1..22: mol_type = other DNA
gattggtctgggcaggaaggtg

SEQ ID NO: 110896 - DNA, 22 bp, synthetic construct
  misc_feature 1..22: note = chemically synthesized
  source 1..22: mol_type = other DNA
gtctgggcaggaaggtgtgaaa

SEQ ID NO: 110897 - DNA, 22 bp, synthetic construct
  misc_feature 1..22: note = chemically synthesized
  source 1..22: mol_type = other DNA
ggcaggaaggtgtgaaaatggt

SEQ ID NO: 110898 - DNA, 22 bp, synthetic construct
  misc_feature 1..22: note = chemically synthesized
  source 1..22: mol_type = other DNA
gtgagaaaggtgatgtgctctg

SEQ ID NO: 110899 - DNA, 22 bp, synthetic construct
  misc_feature 1..22: note = chemically synthesized
  source 1..22: mol_type = other DNA
tgggaggatatccacaaaaaac

SEQ ID NO: 110900 - DNA, 22 bp, synthetic construct
  misc_feature 1..22: note = chemically synthesized
  source 1..22: mol_type = other DNA
ggaggatatccacaaaaaactc

SEQ ID NO: 110901 - DNA, 22 bp, synthetic construct
  misc_feature 1..22: note = chemically synthesized
  source 1..22: mol_type = other DNA
atggatgcatccttgctaacac

SEQ ID NO: 110902 - DNA, 22 bp, synthetic construct
  misc_feature 1..22: note = chemically synthesized
  source 1..22: mol_type = other DNA
gctaacactggaaaactacctg

SEQ ID NO: 110903 - DNA, 22 bp, synthetic construct
  misc_feature 1..22: note = chemically synthesized
  source 1..22: mol_type = other DNA
ctaacactggaaaactacctgg

SEQ ID NO: 110904 - DNA, 22 bp, synthetic construct
  misc_feature 1..22: note = chemically synthesized
  source 1..22: mol_type = other DNA
acactggaaaactacctggacc

SEQ ID NO: 110905 - DNA, 22 bp, synthetic construct
  misc_feature 1..22: note = chemically synthesized
  source 1..22: mol_type = other DNA
gaaaactacctggaccaatttc

SEQ ID NO: 110906 - DNA, 22 bp, synthetic construct
  misc_feature 1..22: note = chemically synthesized
  source 1..22: mol_type = other DNA
cctggaccaatttcctgacttg

SEQ ID NO: 110907 - DNA, 22 bp, synthetic construct
  misc_feature 1..22: note = chemically synthesized
  source 1..22: mol_type = other DNA
gaccaatttcctgacttgaaga

SEQ ID NO: 110908 - DNA, 22 bp, synthetic construct
  misc_feature 1..22: note = chemically synthesized
  source 1..22: mol_type = other DNA
cctgacttgaagaatcacatca

SEQ ID NO: 110909 - DNA, 22 bp, synthetic construct
  misc_feature 1..22: note = chemically synthesized
  source 1..22: mol_type = other DNA
ctgacttgaagaatcacatcac

SEQ ID NO: 110910 - DNA, 22 bp, synthetic construct
  misc_feature 1..22: note = chemically synthesized
  source 1..22: mol_type = other DNA
acttgaagaatcacatcaccaa

SEQ ID NO: 110911 - DNA, 22 bp, synthetic construct
  misc_feature 1..22: note = chemically synthesized
  source 1..22: mol_type = other DNA
gaagaatcacatcaccaagtgc

SEQ ID NO: 110912 - DNA, 22 bp, synthetic construct
  misc_feature 1..22: note = chemically synthesized
  source 1..22: mol_type = other DNA
aagaatcacatcaccaagtgca

SEQ ID NO: 110913 - DNA, 22 bp, synthetic construct
  misc_feature 1..22: note = chemically synthesized
  source 1..22: mol_type = other DNA
acggactatgacagtgcctgcc

SEQ ID NO: 110914 - DNA, 22 bp, synthetic construct
  misc_feature 1..22: note = chemically synthesized
  source 1..22: mol_type = other DNA
cggactatgacagtgcctgccc

SEQ ID NO: 110915 - DNA, 22 bp, synthetic construct
  misc_feature 1..22: note = chemically synthesized
  source 1..22: mol_type = other DNA
tgacagtgcctgcccacctcca

SEQ ID NO: 110916 - DNA, 22 bp, synthetic construct
  misc_feature 1..22: note = chemically synthesized
  source 1..22: mol_type = other DNA
cccacctccatcgggctcaaca

SEQ ID NO: 110917 - DNA, 22 bp, synthetic construct
  misc_feature 1..22: note = chemically synthesized
  source 1..22: mol_type = other DNA
catcgggctcaacagagcttca

SEQ ID NO: 110918 - DNA, 22 bp, synthetic construct
  misc_feature 1..22: note = chemically synthesized
  source 1..22: mol_type = other DNA
aacagagcttcaggaggaagga

SEQ ID NO: 110919 - DNA, 22 bp, synthetic construct
  misc_feature 1..22: note = chemically synthesized
  source 1..22: mol_type = other DNA
caggaggaaggataggagcctc

SEQ ID NO: 110920 - DNA, 22 bp, synthetic construct
  misc_feature 1..22: note = chemically synthesized
  source 1..22: mol_type = other DNA
aggaggaaggataggagcctct

SEQ ID NO: 110921 - DNA, 22 bp, synthetic construct
  misc_feature 1..22: note = chemically synthesized
  source 1..22: mol_type = other DNA
tgtctaaggcagaagtagaatt

SEQ ID NO: 110922 - DNA, 22 bp, synthetic construct
  misc_feature 1..22: note = chemically synthesized
  source 1..22: mol_type = other DNA
tctaaggcagaagtagaatttc

SEQ ID NO: 110923 - DNA, 22 bp, synthetic construct
  misc_feature 1..22: note = chemically synthesized
  source 1..22: mol_type = other DNA
aggcagaagtagaatttcagaa

SEQ ID NO: 110924 - DNA, 22 bp, synthetic construct
  misc_feature 1..22: note = chemically synthesized
  source 1..22: mol_type = other DNA
cagaaagcatagagaaagtttg

SEQ ID NO: 110925 - DNA, 22 bp, synthetic construct
  misc_feature 1..22: note = chemically synthesized
  source 1..22: mol_type = other DNA
agaaagcatagagaaagtttga

SEQ ID NO: 110926 - DNA, 22 bp, synthetic construct
  misc_feature 1..22: note = chemically synthesized
  source 1..22: mol_type = other DNA
gaagagtttaatggtgacttac

SEQ ID NO: 110927 - DNA, 22 bp, synthetic construct
  misc_feature 1..22: note = chemically synthesized
  source 1..22: mol_type = other DNA
aagagtttaatggtgacttaca

SEQ ID NO: 110928 - DNA, 22 bp, synthetic construct
  misc_feature 1..22: note = chemically synthesized
  source 1..22: mol_type = other DNA
aatggtgacttacaagaaaagt

SEQ ID NO: 110929 - DNA, 22 bp, synthetic construct
  misc_feature 1..22: note = chemically synthesized
  source 1..22: mol_type = other DNA
atggtgacttacaagaaaagtt

SEQ ID NO: 110930 - DNA, 22 bp, synthetic construct
  misc_feature 1..22: note = chemically synthesized
  source 1..22: mol_type = other DNA
acaagaaaagttaccattatta

SEQ ID NO: 110931 - DNA, 22 bp, synthetic construct
  misc_feature 1..22: note = chemically synthesized
  source 1..22: mol_type = other DNA
caagaaaagttaccattattat

SEQ ID NO: 110932 - DNA, 22 bp, synthetic construct
  misc_feature 1..22: note = chemically synthesized
  source 1..22: mol_type = other DNA
ccattattatagtcaagacgaa

SEQ ID NO: 110933 - DNA, 22 bp, synthetic construct
  misc_feature 1..22: note = chemically synthesized
  source 1..22: mol_type = other DNA
ttatagtcaagacgaattggat

SEQ ID NO: 110934 - DNA, 22 bp, synthetic construct
  misc_feature 1..22: note = chemically synthesized
  source 1..22: mol_type = other DNA
tagtcaagacgaattggatttt

SEQ ID NO: 110935 - DNA, 22 bp, synthetic construct
  misc_feature 1..22: note = chemically synthesized
  source 1..22: mol_type = other DNA
gattttatattaatactttcaa

SEQ ID NO: 110936 - DNA, 22 bp, synthetic construct
  misc_feature 1..22: note = chemically synthesized
  source 1..22: mol_type = other DNA
tatattaatactttcaaaaaca

SEQ ID NO: 110937 - DNA, 22 bp, synthetic construct
  misc_feature 1..22: note = chemically synthesized
  source 1..22: mol_type = other DNA
atattaatactttcaaaaacat

SEQ ID NO: 110938 - DNA, 22 bp, synthetic construct
  misc_feature 1..22: note = chemically synthesized
  source 1..22: mol_type = other DNA
tattaatactttcaaaaacatc

SEQ ID NO: 110939 - DNA, 22 bp, synthetic construct
  misc_feature 1..22: note = chemically synthesized
  source 1..22: mol_type = other DNA
atactttcaaaaacatctccag

SEQ ID NO: 110940 - DNA, 22 bp, synthetic construct
  misc_feature 1..22: note = chemically synthesized
  source 1..22: mol_type = other DNA
tcaaaaacatctccagccttga

SEQ ID NO: 110941 - DNA, 22 bp, synthetic construct
  misc_feature 1..22: note = chemically synthesized
  source 1..22: mol_type = other DNA
caaaaacatctccagccttgaa

SEQ ID NO: 110942 - DNA, 22 bp, synthetic construct
  misc_feature 1..22: note = chemically synthesized
  source 1..22: mol_type = other DNA
aaaaacatctccagccttgaag

SEQ ID NO: 110943 - DNA, 22 bp, synthetic construct
  misc_feature 1..22: note = chemically synthesized
  source 1..22: mol_type = other DNA
cagccttgaagctaagtttcat

SEQ ID NO: 110944 - DNA, 22 bp, synthetic construct
  misc_feature 1..22: note = chemically synthesized
  source 1..22: mol_type = other DNA
gaagctaagtttcataaggaaa

SEQ ID NO: 110945 - DNA, 22 bp, synthetic construct
  misc_feature 1..22: note = chemically synthesized
  source 1..22: mol_type = other DNA
aagctaagtttcataaggaaac

SEQ ID NO: 110946 - DNA, 22 bp, synthetic construct
  misc_feature 1..22: note = chemically synthesized
  source 1..22: mol_type = other DNA
agtttcataaggaaactgtggt

SEQ ID NO: 110947 - DNA, 22 bp, synthetic construct
  misc_feature 1..22: note = chemically synthesized
  source 1..22: mol_type = other DNA
cataaggaaactgtggtgcttt

SEQ ID NO: 110948 - DNA, 22 bp, synthetic construct
  misc_feature 1..22: note = chemically synthesized
  source 1..22: mol_type = other DNA
ataaggaaactgtggtgctttg

SEQ ID NO: 110949 - DNA, 22 bp, synthetic construct
  misc_feature 1..22: note = chemically synthesized
  source 1..22: mol_type = other DNA
tggtgctttggtacaaacagta

SEQ ID NO: 110950 - DNA, 22 bp, synthetic construct
  misc_feature 1..22: note = chemically synthesized
  source 1..22: mol_type = other DNA
tggtacaaacagtatgaagtga

SEQ ID NO: 110951 - DNA, 22 bp, synthetic construct
  misc_feature 1..22: note = chemically synthesized
  source 1..22: mol_type = other DNA
ggtacaaacagtatgaagtgat

SEQ ID NO: 110952 - DNA, 22 bp, synthetic construct
  misc_feature 1..22: note = chemically synthesized
  source 1..22: mol_type = other DNA
gtacaaacagtatgaagtgatg

SEQ ID NO: 110953 - DNA, 22 bp, synthetic construct
  misc_feature 1..22: note = chemically synthesized
  source 1..22: mol_type = other DNA
ggtgaccagtatgctgacaagg

SEQ ID NO: 110954 - DNA, 22 bp, synthetic construct
  misc_feature 1..22: note = chemically synthesized
  source 1..22: mol_type = other DNA
acaaggccttcaacattcaaag

SEQ ID NO: 110955 - DNA, 22 bp, synthetic construct
  misc_feature 1..22: note = chemically synthesized
  source 1..22: mol_type = other DNA
caacattcaaagagcaacaccc

SEQ ID NO: 110956 - DNA, 22 bp, synthetic construct
  misc_feature 1..22: note = chemically synthesized
  source 1..22: mol_type = other DNA
aacattcaaagagcaacaccca

SEQ ID NO: 110957 - DNA, 22 bp, synthetic construct
  misc_feature 1..22: note = chemically synthesized
  source 1..22: mol_type = other DNA
aaagagcaacacccactgattt

SEQ ID NO: 110958 - DNA, 22 bp, synthetic construct
  misc_feature 1..22: note = chemically synthesized
  source 1..22: mol_type = other DNA
atttgggtcctctccacattgc

SEQ ID NO: 110959 - DNA, 22 bp, synthetic construct
  misc_feature 1..22: note = chemically synthesized
  source 1..22: mol_type = other DNA
gggtcctctccacattgcaaag

SEQ ID NO: 110960 - DNA, 22 bp, synthetic construct
  misc_feature 1..22: note = chemically synthesized
  source 1..22: mol_type = other DNA
ggtcctctccacattgcaaaga

SEQ ID NO: 110961 - DNA, 22 bp, synthetic construct
  misc_feature 1..22: note = chemically synthesized
  source 1..22: mol_type = other DNA
tccacattgcaaagatgtcctc

SEQ ID NO: 110962 - DNA, 22 bp, synthetic construct
  misc_feature 1..22: note = chemically synthesized
  source 1..22: mol_type = other DNA
cacattgcaaagatgtcctcat

SEQ ID NO: 110963 - DNA, 22 bp, synthetic construct
  misc_feature 1..22: note = chemically synthesized
  source 1..22: mol_type = other DNA
caaagatgtcctcatggcctag

SEQ ID NO: 110964 - DNA, 22 bp, synthetic construct
  misc_feature 1..22: note = chemically synthesized
  source 1..22: mol_type = other DNA
atggcctagggagctttcattc

SEQ ID NO: 110965 - DNA, 22 bp, synthetic construct
  misc_feature 1..22: note = chemically synthesized
  source 1..22: mol_type = other DNA
gggagctttcattccaccccag

SEQ ID NO: 110966 - DNA, 22 bp, synthetic construct
  misc_feature 1..22: note = chemically synthesized
  source 1..22: mol_type = other DNA
tcattccaccccagcccaacaa

SEQ ID NO: 110967 - DNA, 22 bp, synthetic construct
  misc_feature 1..22: note = chemically synthesized
  source 1..22: mol_type = other DNA
cattccaccccagcccaacaac

SEQ ID NO: 110968 - DNA, 22 bp, synthetic construct
  misc_feature 1..22: note = chemically synthesized
  source 1..22: mol_type = other DNA
attccaccccagcccaacaact

SEQ ID NO: 110969 - DNA, 22 bp, synthetic construct
  misc_feature 1..22: note = chemically synthesized
  source 1..22: mol_type = other DNA
caccccagcccaacaactagtt

SEQ ID NO: 110970 - DNA, 22 bp, synthetic construct
  misc_feature 1..22: note = chemically synthesized
  source 1..22: mol_type = other DNA
gttcaagtgaaacactagcacc

SEQ ID NO: 110971 - DNA, 22 bp, synthetic construct
  misc_feature 1..22: note = chemically synthesized
  source 1..22: mol_type = other DNA
aagtgaaacactagcacctgct

SEQ ID NO: 110972 - DNA, 22 bp, synthetic construct
  misc_feature 1..22: note = chemically synthesized
  source 1..22: mol_type = other DNA
gcacctgcttctcctatgccag

SEQ ID NO: 110973 - DNA, 22 bp, synthetic construct
  misc_feature 1..22: note = chemically synthesized
  source 1..22: mol_type = other DNA
cttctcctatgccagcatgacc

SEQ ID NO: 110974 - DNA, 22 bp, synthetic construct
  misc_feature 1..22: note = chemically synthesized
  source 1..22: mol_type = other DNA
ctcctatgccagcatgacctga

SEQ ID NO: 110975 - DNA, 22 bp, synthetic construct
  misc_feature 1..22: note = chemically synthesized
  source 1..22: mol_type = other DNA
tcctatgccagcatgacctgag

SEQ ID NO: 110976 - DNA, 22 bp, synthetic construct
  misc_feature 1..22: note = chemically synthesized
  source 1..22: mol_type = other DNA
ctatgccagcatgacctgagtc

SEQ ID NO: 110977 - DNA, 22 bp, synthetic construct
  misc_feature 1..22: note = chemically synthesized
  source 1..22: mol_type = other DNA
tgccagcatgacctgagtcact

SEQ ID NO: 110978 - DNA, 22 bp, synthetic construct
  misc_feature 1..22: note = chemically synthesized
  source 1..22: mol_type = other DNA
agtcactcttgcagtcctgtat

SEQ ID NO: 110979 - DNA, 22 bp, synthetic construct
  misc_feature 1..22: note = chemically synthesized
  source 1..22: mol_type = other DNA
ttgcagtcctgtatctgtctaa

SEQ ID NO: 110980 - DNA, 22 bp, synthetic construct
  misc_feature 1..22: note = chemically synthesized
  source 1..22: mol_type = other DNA
gcagtcctgtatctgtctaaag

SEQ ID NO: 110981 - DNA, 22 bp, synthetic construct
  misc_feature 1..22: note = chemically synthesized
  source 1..22: mol_type = other DNA
cagtcctgtatctgtctaaagt

SEQ ID NO: 110982 - DNA, 22 bp, synthetic construct
  misc_feature 1..22: note = chemically synthesized
  source 1..22: mol_type = other DNA
tatctgtctaaagtcacttgac

SEQ ID NO: 110983 - DNA, 22 bp, synthetic construct
  misc_feature 1..22: note = chemically synthesized
  source 1..22: mol_type = other DNA
tctaaagtcacttgacaaagga

SEQ ID NO: 110984 - DNA, 22 bp, synthetic construct
  misc_feature 1..22: note = chemically synthesized
  source 1..22: mol_type = other DNA
aagtcacttgacaaaggaactg

SEQ ID NO: 110985 - DNA, 22 bp, synthetic construct
  misc_feature 1..22: note = chemically synthesized
  source 1..22: mol_type = other DNA
gacaaaggaactgcagcaggaa

SEQ ID NO: 110986 - DNA, 22 bp, synthetic construct
  misc_feature 1..22: note = chemically synthesized
  source 1..22: mol_type = other DNA
acaaaggaactgcagcaggaaa

SEQ ID NO: 110987 - DNA, 22 bp, synthetic construct
  misc_feature 1..22: note = chemically synthesized
  source 1..22: mol_type = other DNA
cagcaggaaaaatatcatcttc

SEQ ID NO: 110988 - DNA, 22 bp, synthetic construct
  misc_feature 1..22: note = chemically synthesized
  source 1..22: mol_type = other DNA
cacagactgtcctaaagtaaga

SEQ ID NO: 110989 - DNA, 22 bp, synthetic construct
  misc_feature 1..22: note = chemically synthesized
  source 1..22: mol_type = other DNA
acagactgtcctaaagtaagat

SEQ ID NO: 110990 - DNA, 22 bp, synthetic construct
  misc_feature 1..22: note = chemically synthesized
  source 1..22: mol_type = other DNA
tcctaaagtaagataggtgatg

SEQ ID NO: 110991 - DNA, 22 bp, synthetic construct
  misc_feature 1..22: note = chemically synthesized
  source 1..22: mol_type = other DNA
aagtaagataggtgatgtgtac

SEQ ID NO: 110992 - DNA, 22 bp, synthetic construct
  misc_feature 1..22: note = chemically synthesized
  source 1..22: mol_type = other DNA
tatccacaaatcatctgtaaaa

SEQ ID NO: 110993 - DNA, 22 bp, synthetic construct
  misc_feature 1..22: note = chemically synthesized
  source 1..22: mol_type = other DNA
taaaagttatgttttcagtggt

SEQ ID NO: 110994 - DNA, 22 bp, synthetic construct
  misc_feature 1..22: note = chemically synthesized
  source 1..22: mol_type = other DNA
tgttttcagtggtgtgtcattt

SEQ ID NO: 110995 - DNA, 22 bp, synthetic construct
  misc_feature 1..22: note = chemically synthesized
  source 1..22: mol_type = other DNA
tcagtggtgtgtcatttcaaat

SEQ ID NO: 110996 - DNA, 22 bp, synthetic construct
  misc_feature 1..22: note = chemically synthesized
  source 1..22: mol_type = other DNA
cagtggtgtgtcatttcaaata

SEQ ID NO: 110997 - DNA, 22 bp, synthetic construct
  misc_feature 1..22: note = chemically synthesized
  source 1..22: mol_type = other DNA
agtggtgtgtcatttcaaataa

SEQ ID NO: 110998 - DNA, 22 bp, synthetic construct
  misc_feature 1..22: note = chemically synthesized
  source 1..22: mol_type = other DNA
caaataaaccttgggaaatttc

SEQ ID NO: 110999 - DNA, 22 bp, synthetic construct
  misc_feature 1..22: note = chemically synthesized
  source 1..22: mol_type = other DNA
aaataaaccttgggaaatttct

SEQ ID NO: 111000 - DNA, 22 bp, synthetic construct
  misc_feature 1..22: note = chemically synthesized
  source 1..22: mol_type = other DNA
gggaaatttctaacaattacct

SEQ ID NO: 111001 - DNA, 22 bp, synthetic construct
  misc_feature 1..22: note = chemically synthesized
  source 1..22: mol_type = other DNA
ggaaatttctaacaattacctt

SEQ ID NO: 111002 - DNA, 22 bp, synthetic construct
  misc_feature 1..22: note = chemically synthesized
  source 1..22: mol_type = other DNA
ctaacaattacctttaaaaatt

SEQ ID NO: 111003 - DNA, 22 bp, synthetic construct
  misc_feature 1..22: note = chemically synthesized
  source 1..22: mol_type = other DNA
taacaattacctttaaaaatta

SEQ ID NO: 111004 - DNA, 22 bp, synthetic construct
  misc_feature 1..22: note = chemically synthesized
  source 1..22: mol_type = other DNA
acaattacctttaaaaattaaa

SEQ ID NO: 111005 - DNA, 22 bp, synthetic construct
  misc_feature 1..22: note = chemically synthesized
  source 1..22: mol_type = other DNA
cctttaaaaattaaaaaaaaaa

SEQ ID NO: 111006 - DNA, 22 bp, synthetic construct
  misc_feature 1..22: note = chemically synthesized
  source 1..22: mol_type = other DNA
taaaaattaaaaaaaaaaaaaa

SEQ ID NO: 111007 - DNA, 22 bp, synthetic construct
  misc_feature 1..22: note = chemically synthesized
  source 1..22: mol_type = other DNA
aaaaattaaaaaaaaaaaaaag

SEQ ID NO: 111008 - DNA, 22 bp, synthetic construct
  misc_feature 1..22: note = chemically synthesized
  source 1..22: mol_type = other DNA
aaaattaaaaaaaaaaaaaaga

SEQ ID NO: 111009 - DNA, 22 bp, synthetic construct
  misc_feature 1..22: note = chemically synthesized
  source 1..22: mol_type = other DNA
aaaaaaaaaaaaagagtagggt

SEQ ID NO: 111010 - DNA, 22 bp, synthetic construct
  misc_feature 1..22: note = chemically synthesized
  source 1..22: mol_type = other DNA
tcttaaaggatcaatgtaatgc

SEQ ID NO: 111011 - DNA, 22 bp, synthetic construct
  misc_feature 1..22: note = chemically synthesized
  source 1..22: mol_type = other DNA
cttaaaggatcaatgtaatgcc

SEQ ID NO: 111012 - DNA, 22 bp, synthetic construct
  misc_feature 1..22: note = chemically synthesized
  source 1..22: mol_type = other DNA
ttaaaggatcaatgtaatgccc

SEQ ID NO: 111013 - DNA, 22 bp, synthetic construct
  misc_feature 1..22: note = chemically synthesized
  source 1..22: mol_type = other DNA
aaaggatcaatgtaatgccctg

SEQ ID NO: 111014 - DNA, 22 bp, synthetic construct
  misc_feature 1..22: note = chemically synthesized
  source 1..22: mol_type = other DNA
aaggatcaatgtaatgccctgc

SEQ ID NO: 111015 - DNA, 22 bp, synthetic construct
  misc_feature 1..22: note = chemically synthesized
  source 1..22: mol_type = other DNA
ctctgattcctgtagtgacata

SEQ ID NO: 111016 - DNA, 22 bp, synthetic construct
  misc_feature 1..22: note = chemically synthesized
  source 1..22: mol_type = other DNA
tgattcctgtagtgacataggc

SEQ ID NO: 111017 - DNA, 22 bp, synthetic construct
  misc_feature 1..22: note = chemically synthesized
  source 1..22: mol_type = other DNA
attcctgtagtgacataggcgt

SEQ ID NO: 111018 - DNA, 22 bp, synthetic construct
  misc_feature 1..22: note = chemically synthesized
  source 1..22: mol_type = other DNA
ctgtagtgacataggcgtcaat

SEQ ID NO: 111019 - DNA, 22 bp, synthetic construct
  misc_feature 1..22: note = chemically synthesized
  source 1..22: mol_type = other DNA
tagtgacataggcgtcaatata

SEQ ID NO: 111020 - DNA, 22 bp, synthetic construct
  misc_feature 1..22: note = chemically synthesized
  source 1..22: mol_type = other DNA
gaagttcttttaaaaatctgct

SEQ ID NO: 111021 - DNA, 22 bp, synthetic construct
  misc_feature 1..22: note = chemically synthesized
  source 1..22: mol_type = other DNA
ttttaaaaatctgctgcaagct

SEQ ID NO: 111022 - DNA, 22 bp, synthetic construct
  misc_feature 1..22: note = chemically synthesized
  source 1..22: mol_type = other DNA
ttaaaaatctgctgcaagctga

SEQ ID NO: 111023 - DNA, 22 bp, synthetic construct
  misc_feature 1..22: note = chemically synthesized
  source 1..22: mol_type = other DNA
taaaaatctgctgcaagctgag

SEQ ID NO: 111024 - DNA, 22 bp, synthetic construct
  misc_feature 1..22: note = chemically synthesized
  source 1..22: mol_type = other DNA
aaaaatctgctgcaagctgagg

SEQ ID NO: 111025 - DNA, 22 bp, synthetic construct
  misc_feature 1..22: note = chemically synthesized
  source 1..22: mol_type = other DNA
aaaatctgctgcaagctgaggg

SEQ ID NO: 111026 - DNA, 22 bp, synthetic construct
  misc_feature 1..22: note = chemically synthesized
  source 1..22: mol_type = other DNA
ctgcaagctgagggtcctgtta

SEQ ID NO: 111027 - DNA, 22 bp, synthetic construct
  misc_feature 1..22: note = chemically synthesized
  source 1..22: mol_type = other DNA
caagctgagggtcctgttagaa

SEQ ID NO: 111028 - DNA, 22 bp, synthetic construct
  misc_feature 1..22: note = chemically synthesized
  source 1..22: mol_type = other DNA
agggtcctgttagaaggaaaac

SEQ ID NO: 111029 - DNA, 22 bp, synthetic construct
  misc_feature 1..22: note = chemically synthesized
  source 1..22: mol_type = other DNA
ttagaaggaaaactaacaaaca

SEQ ID NO: 111030 - DNA, 22 bp, synthetic construct
  misc_feature 1..22: note = chemically synthesized
  source 1..22: mol_type = other DNA
gaaggaaaactaacaaacagaa

SEQ ID NO: 111031 - DNA, 22 bp, synthetic construct
  misc_feature 1..22: note = chemically synthesized
  source 1..22: mol_type = other DNA
acaaacagaaaggacatccaca

SEQ ID NO: 111032 - DNA, 22 bp, synthetic construct
  misc_feature 1..22: note = chemically synthesized
  source 1..22: mol_type = other DNA
tacgtcaccatcatcaaagacc

SEQ ID NO: 111033 - DNA, 22 bp, synthetic construct
  misc_feature 1..22: note = chemically synthesized
  source 1..22: mol_type = other DNA
gaaactctaaaaatcagagtgc

SEQ ID NO: 111034 - DNA, 22 bp, synthetic construct
  misc_feature 1..22: note = chemically synthesized
  source 1..22: mol_type = other DNA
taaaaatcagagtgcctctcct

SEQ ID NO: 111035 - DNA, 22 bp, synthetic construct
  misc_feature 1..22: note = chemically synthesized
  source 1..22: mol_type = other DNA
aaaatcagagtgcctctcctcc

SEQ ID NO: 111036 - DNA, 22 bp, synthetic construct
  misc_feature 1..22: note = chemically synthesized
  source 1..22: mol_type = other DNA
tcctcctccaaaggaatgcagc

SEQ ID NO: 111037 - DNA, 22 bp, synthetic construct
  misc_feature 1..22: note = chemically synthesized
  source 1..22: mol_type = other DNA
ctcctccaaaggaatgcagctc

SEQ ID NO: 111038 - DNA, 22 bp, synthetic construct
  misc_feature 1..22: note = chemically synthesized
  source 1..22: mol_type = other DNA
ctccaaaggaatgcagctcctc

SEQ ID NO: 111039 - DNA, 22 bp, synthetic construct
  misc_feature 1..22: note = chemically synthesized
  source 1..22: mol_type = other DNA
caaaggaatgcagctcctcacc

SEQ ID NO: 111040 - DNA, 22 bp, synthetic construct
  misc_feature 1..22: note = chemically synthesized
  source 1..22: mol_type = other DNA
ctcaccagcaacggtacaaagc

SEQ ID NO: 111041 - DNA, 22 bp, synthetic construct
  misc_feature 1..22: note = chemically synthesized
  source 1..22: mol_type = other DNA
accagcaacggtacaaagctgg

SEQ ID NO: 111042 - DNA, 22 bp, synthetic construct
  misc_feature 1..22: note = chemically synthesized
  source 1..22: mol_type = other DNA
gacagagaatgactttgacaag

SEQ ID NO: 111043 - DNA, 22 bp, synthetic construct
  misc_feature 1..22: note = chemically synthesized
  source 1..22: mol_type = other DNA
tgacaagttgagagaagaaggc

SEQ ID NO: 111044 - DNA, 22 bp, synthetic construct
  misc_feature 1..22: note = chemically synthesized
  source 1..22: mol_type = other DNA
gacaagttgagagaagaaggct

SEQ ID NO: 111045 - DNA, 22 bp, synthetic construct
  misc_feature 1..22: note = chemically synthesized
  source 1..22: mol_type = other DNA
acaagttgagagaagaaggctt

SEQ ID NO: 111046 - DNA, 22 bp, synthetic construct
  misc_feature 1..22: note = chemically synthesized
  source 1..22: mol_type = other DNA
agagaagaaggcttcagacgat

SEQ ID NO: 111047 - DNA, 22 bp, synthetic construct
  misc_feature 1..22: note = chemically synthesized
  source 1..22: mol_type = other DNA
cagacgatcaaactactccgag

SEQ ID NO: 111048 - DNA, 22 bp, synthetic construct
  misc_feature 1..22: note = chemically synthesized
  source 1..22: mol_type = other DNA
agacgatcaaactactccgagc

SEQ ID NO: 111049 - DNA, 22 bp, synthetic construct
  misc_feature 1..22: note = chemically synthesized
  source 1..22: mol_type = other DNA
ctccgagctaaaggaggaagct

SEQ ID NO: 111050 - DNA, 22 bp, synthetic construct
  misc_feature 1..22: note = chemically synthesized
  source 1..22: mol_type = other DNA
cgagctaaaggaggaagctcga

SEQ ID NO: 111051 - DNA, 22 bp, synthetic construct
  misc_feature 1..22: note = chemically synthesized
  source 1..22: mol_type = other DNA
aaggaggaagctcgaacccatg

SEQ ID NO: 111052 - DNA, 22 bp, synthetic construct
  misc_feature 1..22: note = chemically synthesized
  source 1..22: mol_type = other DNA
gaacccatggcaaaaaagttaa

SEQ ID NO: 111053 - DNA, 22 bp, synthetic construct
  misc_feature 1..22: note = chemically synthesized
  source 1..22: mol_type = other DNA
aaaaccttgaaaataaattaga

SEQ ID NO: 111054 - DNA, 22 bp, synthetic construct
  misc_feature 1..22: note = chemically synthesized
  source 1..22: mol_type = other DNA
gaaaataaattagactaatggc

SEQ ID NO: 111055 - DNA, 22 bp, synthetic construct
  misc_feature 1..22: note = chemically synthesized
  source 1..22: mol_type = other DNA
aaaataaattagactaatggct

SEQ ID NO: 111056 - DNA, 22 bp, synthetic construct
  misc_feature 1..22: note = chemically synthesized
  source 1..22: mol_type = other DNA
gactaatggctaactagaataa

SEQ ID NO: 111057 - DNA, 22 bp, synthetic construct
  misc_feature 1..22: note = chemically synthesized
  source 1..22: mol_type = other DNA
atggctaactagaataaccaat

SEQ ID NO: 111058 - DNA, 22 bp, synthetic construct
  misc_feature 1..22: note = chemically synthesized
  source 1..22: mol_type = other DNA
actagaataaccaatacagaga

SEQ ID NO: 111059 - DNA, 22 bp, synthetic construct
  misc_feature 1..22: note = chemically synthesized
  source 1..22: mol_type = other DNA
gaataaccaatacagagaagtc

SEQ ID NO: 111060 - DNA, 22 bp, synthetic construct
  misc_feature 1..22: note = chemically synthesized
  source 1..22: mol_type = other DNA
aaaggacctgatggagctgaaa

SEQ ID NO: 111061 - DNA, 22 bp, synthetic construct
  misc_feature 1..22: note = chemically synthesized
  source 1..22: mol_type = other DNA
aaggacctgatggagctgaaaa

SEQ ID NO: 111062 - DNA, 22 bp, synthetic construct
  misc_feature 1..22: note = chemically synthesized
  source 1..22: mol_type = other DNA
atggagctgaaaaccaaggcat

SEQ ID NO: 111063 - DNA, 22 bp, synthetic construct
  misc_feature 1..22: note = chemically synthesized
  source 1..22: mol_type = other DNA
aaaaccaaggcatgagaactac

SEQ ID NO: 111064 - DNA, 22 bp, synthetic construct
  misc_feature 1..22: note = chemically synthesized
  source 1..22: mol_type = other DNA
catgatgaatgcacaagactca

SEQ ID NO: 111065 - DNA, 22 bp, synthetic construct
  misc_feature 1..22: note = chemically synthesized
  source 1..22: mol_type = other DNA
agtagctgattcgatcaactgg

SEQ ID NO: 111066 - DNA, 22 bp, synthetic construct
  misc_feature 1..22: note = chemically synthesized
  source 1..22: mol_type = other DNA
attcgatcaactggaagaaagg

SEQ ID NO: 111067 - DNA, 22 bp, synthetic construct
  misc_feature 1..22: note = chemically synthesized
  source 1..22: mol_type = other DNA
gatcaactggaagaaagggtat

SEQ ID NO: 111068 - DNA, 22 bp, synthetic construct
  misc_feature 1..22: note = chemically synthesized
  source 1..22: mol_type = other DNA
gaagaaagggtatcagtgatgg

SEQ ID NO: 111069 - DNA, 22 bp, synthetic construct
  misc_feature 1..22: note = chemically synthesized
  source 1..22: mol_type = other DNA
agagaaaaaagaataaaaagaa

SEQ ID NO: 111070 - DNA, 22 bp, synthetic construct
  misc_feature 1..22: note = chemically synthesized
  source 1..22: mol_type = other DNA
gagaaaaaagaataaaaagaaa

SEQ ID NO: 111071 - DNA, 22 bp, synthetic construct
  misc_feature 1..22: note = chemically synthesized
  source 1..22: mol_type = other DNA
caagaaatatgggactatgtga

SEQ ID NO: 111072 - DNA, 22 bp, synthetic construct
  misc_feature 1..22: note = chemically synthesized
  source 1..22: mol_type = other DNA
tgtgaaaagaccaaatctatat

SEQ ID NO: 111073 - DNA, 22 bp, synthetic construct
  misc_feature 1..22: note = chemically synthesized
  source 1..22: mol_type = other DNA
tatctgattggtgtacctgaaa

SEQ ID NO: 111074 - DNA, 22 bp, synthetic construct
  misc_feature 1..22: note = chemically synthesized
  source 1..22: mol_type = other DNA
attggtgtacctgaaagtgacg

SEQ ID NO: 111075 - DNA, 22 bp, synthetic construct
  misc_feature 1..22: note = chemically synthesized
  source 1..22: mol_type = other DNA
gtgtacctgaaagtgacgggca

SEQ ID NO: 111076 - DNA, 22 bp, synthetic construct
  misc_feature 1..22: note = chemically synthesized
  source 1..22: mol_type = other DNA
aaagtgacgggcagaatggaac

SEQ ID NO: 111077 - DNA, 22 bp, synthetic construct
  misc_feature 1..22: note = chemically synthesized
  source 1..22: mol_type = other DNA
gaaaacactctgcaggatatta

SEQ ID NO: 111078 - DNA, 22 bp, synthetic construct
  misc_feature 1..22: note = chemically synthesized
  source 1..22: mol_type = other DNA
tgcaggatattatccaggagaa

SEQ ID NO: 111079 - DNA, 22 bp, synthetic construct
  misc_feature 1..22: note = chemically synthesized
  source 1..22: mol_type = other DNA
caggatattatccaggagaact

SEQ ID NO: 111080 - DNA, 22 bp, synthetic construct
  misc_feature 1..22: note = chemically synthesized
  source 1..22: mol_type = other DNA
tccaggagaacttccccaatct

SEQ ID NO: 111081 - DNA, 22 bp, synthetic construct
  misc_feature 1..22: note = chemically synthesized
  source 1..22: mol_type = other DNA
ccccaatctagcaaggcaggtc

SEQ ID NO: 111082 - DNA, 22 bp, synthetic construct
  misc_feature 1..22: note = chemically synthesized
  source 1..22: mol_type = other DNA
cccaatctagcaaggcaggtca

SEQ ID NO: 111083 - DNA, 22 bp, synthetic construct
  misc_feature 1..22: note = chemically synthesized
  source 1..22: mol_type = other DNA
gcaaggcaggtcaacattcaaa

SEQ ID NO: 111084 - DNA, 22 bp, synthetic construct
  misc_feature 1..22: note = chemically synthesized
  source 1..22: mol_type = other DNA
aaattcaggaaatacagagaac

SEQ ID NO: 111085 - DNA, 22 bp, synthetic construct
  misc_feature 1..22: note = chemically synthesized
  source 1..22: mol_type = other DNA
aggaaatacagagaacgccaca

SEQ ID NO: 111086 - DNA, 22 bp, synthetic construct
  misc_feature 1..22: note = chemically synthesized
  source 1..22: mol_type = other DNA
cttgagaagagcaactacaagg

SEQ ID NO: 111087 - DNA, 22 bp, synthetic construct
  misc_feature 1..22: note = chemically synthesized
  source 1..22: mol_type = other DNA
gagaagagcaactacaaggcac

SEQ ID NO: 111088 - DNA, 22 bp, synthetic construct
  misc_feature 1..22: note = chemically synthesized
  source 1..22: mol_type = other DNA
agaagagcaactacaaggcaca

SEQ ID NO: 111089 - DNA, 22 bp, synthetic construct
  misc_feature 1..22: note = chemically synthesized
  source 1..22: mol_type = other DNA
caaggcacataattgtcagatt

SEQ ID NO: 111090 - DNA, 22 bp, synthetic construct
  misc_feature 1..22: note = chemically synthesized
  source 1..22: mol_type = other DNA
tcagattcaccaaagttgaaat

SEQ ID NO: 111091 - DNA, 22 bp, synthetic construct
  misc_feature 1..22: note = chemically synthesized
  source 1..22: mol_type = other DNA
accaaagttgaaatgaagggaa

SEQ ID NO: 111092 - DNA, 22 bp, synthetic construct
  misc_feature 1..22: note = chemically synthesized
  source 1..22: mol_type = other DNA
aaatgaagggaaaaatgttaag

SEQ ID NO: 111093 - DNA, 22 bp, synthetic construct
  misc_feature 1..22: note = chemically synthesized
  source 1..22: mol_type = other DNA
agggtagccagagagaaaggtc

SEQ ID NO: 111094 - DNA, 22 bp, synthetic construct
  misc_feature 1..22: note = chemically synthesized
  source 1..22: mol_type = other DNA
cccacaaagggaagcccatcag

SEQ ID NO: 111095 - DNA, 22 bp, synthetic construct
  misc_feature 1..22: note = chemically synthesized
  source 1..22: mol_type = other DNA
tcagcagaaactctacaagcca

SEQ ID NO: 111096 - DNA, 22 bp, synthetic construct
  misc_feature 1..22: note = chemically synthesized
  source 1..22: mol_type = other DNA
agcagaaactctacaagccaga

SEQ ID NO: 111097 - DNA, 22 bp, synthetic construct
  misc_feature 1..22: note = chemically synthesized
  source 1..22: mol_type = other DNA
tacaagccagaagagagtgggg

SEQ ID NO: 111098 - DNA, 22 bp, synthetic construct
  misc_feature 1..22: note = chemically synthesized
  source 1..22: mol_type = other DNA
caagccagaagagagtgggggc

SEQ ID NO: 111099 - DNA, 22 bp, synthetic construct
  misc_feature 1..22: note = chemically synthesized
  source 1..22: mol_type = other DNA
aacatccttaaaggaaagaatt

SEQ ID NO: 111100 - DNA, 22 bp, synthetic construct
  misc_feature 1..22: note = chemically synthesized
  source 1..22: mol_type = other DNA
aaaggaaagaattttcaacaca

SEQ ID NO: 111101 - DNA, 22 bp, synthetic construct
  misc_feature 1..22: note = chemically synthesized
  source 1..22: mol_type = other DNA
aaggaaagaattttcaacacag

SEQ ID NO: 111102 - DNA, 22 bp, synthetic construct
  misc_feature 1..22: note = chemically synthesized
  source 1..22: mol_type = other DNA
tcaacacagaatttcatatcca

SEQ ID NO: 111103 - DNA, 22 bp, synthetic construct
  misc_feature 1..22: note = chemically synthesized
  source 1..22: mol_type = other DNA
caacacagaatttcatatccag

SEQ ID NO: 111104 - DNA, 22 bp, synthetic construct
  misc_feature 1..22: note = chemically synthesized
  source 1..22: mol_type = other DNA
aacacagaatttcatatccagc

SEQ ID NO: 111105 - DNA, 22 bp, synthetic construct
  misc_feature 1..22: note = chemically synthesized
  source 1..22: mol_type = other DNA
catatccagccaaactaagctt

SEQ ID NO: 111106 - DNA, 22 bp, synthetic construct
  misc_feature 1..22: note = chemically synthesized
  source 1..22: mol_type = other DNA
atatccagccaaactaagcttc

SEQ ID NO: 111107 - DNA, 22 bp, synthetic construct
  misc_feature 1..22: note = chemically synthesized
  source 1..22: mol_type = other DNA
agcttcataagtgaaggagaaa

SEQ ID NO: 111108 - DNA, 22 bp, synthetic construct
  misc_feature 1..22: note = chemically synthesized
  source 1..22: mol_type = other DNA
cataagtgaaggagaaataaaa

SEQ ID NO: 111109 - DNA, 22 bp, synthetic construct
  misc_feature 1..22: note = chemically synthesized
  source 1..22: mol_type = other DNA
ataagtgaaggagaaataaaat

SEQ ID NO: 111110 - DNA, 22 bp, synthetic construct
  misc_feature 1..22: note = chemically synthesized
  source 1..22: mol_type = other DNA
tacagacaagcaaatgctgaga

SEQ ID NO: 111111 - DNA, 22 bp, synthetic construct
  misc_feature 1..22: note = chemically synthesized
  source 1..22: mol_type = other DNA
acagacaagcaaatgctgagag

SEQ ID NO: 111112 - DNA, 22 bp, synthetic construct
  misc_feature 1..22: note = chemically synthesized
  source 1..22: mol_type = other DNA
cagacaagcaaatgctgagaga

SEQ ID NO: 111113 - DNA, 22 bp, synthetic construct
  misc_feature 1..22: note = chemically synthesized
  source 1..22: mol_type = other DNA
agagattttgtcatcaccaggc

SEQ ID NO: 111114 - DNA, 22 bp, synthetic construct
  misc_feature 1..22: note = chemically synthesized
  source 1..22: mol_type = other DNA
tgtcatcaccaggcctgaccta

SEQ ID NO: 111115 - DNA, 22 bp, synthetic construct
  misc_feature 1..22: note = chemically synthesized
  source 1..22: mol_type = other DNA
gtcatcaccaggcctgacctaa

SEQ ID NO: 111116 - DNA, 22 bp, synthetic construct
  misc_feature 1..22: note = chemically synthesized
  source 1..22: mol_type = other DNA
tcatcaccaggcctgacctaaa

SEQ ID NO: 111117 - DNA, 22 bp, synthetic construct
  misc_feature 1..22: note = chemically synthesized
  source 1..22: mol_type = other DNA
acctaaaagagctcctgaagga

SEQ ID NO: 111118 - DNA, 22 bp, synthetic construct
  misc_feature 1..22: note = chemically synthesized
  source 1..22: mol_type = other DNA
aaagagctcctgaaggaagcac

SEQ ID NO: 111119 - DNA, 22 bp, synthetic construct
  misc_feature 1..22: note = chemically synthesized
  source 1..22: mol_type = other DNA
ctgaaggaagcactaaatatgg

SEQ ID NO: 111120 - DNA, 22 bp, synthetic construct
  misc_feature 1..22: note = chemically synthesized
  source 1..22: mol_type = other DNA
aaggaagcactaaatatggaaa

SEQ ID NO: 111121 - DNA, 22 bp, synthetic construct
  misc_feature 1..22: note = chemically synthesized
  source 1..22: mol_type = other DNA
aatatggaaaggcacaaccggt

SEQ ID NO: 111122 - DNA, 22 bp, synthetic construct
  misc_feature 1..22: note = chemically synthesized
  source 1..22: mol_type = other DNA
caaaaacatgccaaattgtaaa

SEQ ID NO: 111123 - DNA, 22 bp, synthetic construct
  misc_feature 1..22: note = chemically synthesized
  source 1..22: mol_type = other DNA
taaagaccattgaggctaggaa

SEQ ID NO: 111124 - DNA, 22 bp, synthetic construct
  misc_feature 1..22: note = chemically synthesized
  source 1..22: mol_type = other DNA
aggctaggaagaaactgcatca

SEQ ID NO: 111125 - DNA, 22 bp, synthetic construct
  misc_feature 1..22: note = chemically synthesized
  source 1..22: mol_type = other DNA
ggaagaaactgcatcaactaat

SEQ ID NO: 111126 - DNA, 22 bp, synthetic construct
  misc_feature 1..22: note = chemically synthesized
  source 1..22: mol_type = other DNA
catcaactaatgagcaaaataa

SEQ ID NO: 111127 - DNA, 22 bp, synthetic construct
  misc_feature 1..22: note = chemically synthesized
  source 1..22: mol_type = other DNA
atgagcaaaataaccagctaac

SEQ ID NO: 111128 - DNA, 22 bp, synthetic construct
  misc_feature 1..22: note = chemically synthesized
  source 1..22: mol_type = other DNA
acatcataatgacaggatcaaa

SEQ ID NO: 111129 - DNA, 22 bp, synthetic construct
  misc_feature 1..22: note = chemically synthesized
  source 1..22: mol_type = other DNA
acacataacaatattaacctta

SEQ ID NO: 111130 - DNA, 22 bp, synthetic construct
  misc_feature 1..22: note = chemically synthesized
  source 1..22: mol_type = other DNA
accttaatgtaaatgggctaaa

SEQ ID NO: 111131 - DNA, 22 bp, synthetic construct
  misc_feature 1..22: note = chemically synthesized
  source 1..22: mol_type = other DNA
aatgtaaatgggctaaatgctc

SEQ ID NO: 111132 - DNA, 22 bp, synthetic construct
  misc_feature 1..22: note = chemically synthesized
  source 1..22: mol_type = other DNA
atgtaaatgggctaaatgctcc

SEQ ID NO: 111133 - DNA, 22 bp, synthetic construct
  misc_feature 1..22: note = chemically synthesized
  source 1..22: mol_type = other DNA
aatgctccagtaaaaagacaca

SEQ ID NO: 111134 - DNA, 22 bp, synthetic construct
  misc_feature 1..22: note = chemically synthesized
  source 1..22: mol_type = other DNA
cagtaaaaagacacagacgggc

SEQ ID NO: 111135 - DNA, 22 bp, synthetic construct
  misc_feature 1..22: note = chemically synthesized
  source 1..22: mol_type = other DNA
gataaagagtcaagacccatca

SEQ ID NO: 111136 - DNA, 22 bp, synthetic construct
  misc_feature 1..22: note = chemically synthesized
  source 1..22: mol_type = other DNA
tattcaggaaacccatctcatg

SEQ ID NO: 111137 - DNA, 22 bp, synthetic construct
  misc_feature 1..22: note = chemically synthesized
  source 1..22: mol_type = other DNA
aggaaacccatctcatgtgcac

SEQ ID NO: 111138 - DNA, 22 bp, synthetic construct
  misc_feature 1..22: note = chemically synthesized
  source 1..22: mol_type = other DNA
atgtgcacacacacacataggc

SEQ ID NO: 111139 - DNA, 22 bp, synthetic construct
  misc_feature 1..22: note = chemically synthesized
  source 1..22: mol_type = other DNA
aaaataaagggatggaggaaga

SEQ ID NO: 111140 - DNA, 22 bp, synthetic construct
  misc_feature 1..22: note = chemically synthesized
  source 1..22: mol_type = other DNA
ccaagaaaatggaaaacaaaaa

SEQ ID NO: 111141 - DNA, 22 bp, synthetic construct
  misc_feature 1..22: note = chemically synthesized
  source 1..22: mol_type = other DNA
caatcctcatctctgataaaac

SEQ ID NO: 111142 - DNA, 22 bp, synthetic construct
  misc_feature 1..22: note = chemically synthesized
  source 1..22: mol_type = other DNA
atctctgataaaacaggcttta

SEQ ID NO: 111143 - DNA, 22 bp, synthetic construct
  misc_feature 1..22: note = chemically synthesized
  source 1..22: mol_type = other DNA
tgataaaacaggctttaaacca

SEQ ID NO: 111144 - DNA, 22 bp, synthetic construct
  misc_feature 1..22: note = chemically synthesized
  source 1..22: mol_type = other DNA
ataaaacaggctttaaaccaac

SEQ ID NO: 111145 - DNA, 22 bp, synthetic construct
  misc_feature 1..22: note = chemically synthesized
  source 1..22: mol_type = other DNA
taaaccaacaaagatcaaaaga

SEQ ID NO: 111146 - DNA, 22 bp, synthetic construct
  misc_feature 1..22: note = chemically synthesized
  source 1..22: mol_type = other DNA
aaaccaacaaagatcaaaagag

SEQ ID NO: 111147 - DNA, 22 bp, synthetic construct
  misc_feature 1..22: note = chemically synthesized
  source 1..22: mol_type = other DNA
aaccaacaaagatcaaaagaga

SEQ ID NO: 111148 - DNA, 22 bp, synthetic construct
  misc_feature 1..22: note = chemically synthesized
  source 1..22: mol_type = other DNA
cataatggtaaagggatcaatt

SEQ ID NO: 111149 - DNA, 22 bp, synthetic construct
  misc_feature 1..22: note = chemically synthesized
  source 1..22: mol_type = other DNA
aacaagaagagctaactatcct

SEQ ID NO: 111150 - DNA, 22 bp, synthetic construct
  misc_feature 1..22: note = chemically synthesized
  source 1..22: mol_type = other DNA
actatcctaaacatatatgcac

SEQ ID NO: 111151 - DNA, 22 bp, synthetic construct
  misc_feature 1..22: note = chemically synthesized
  source 1..22: mol_type = other DNA
tcctaaacatatatgcacccaa

SEQ ID NO: 111152 - DNA, 22 bp, synthetic construct
  misc_feature 1..22: note = chemically synthesized
  source 1..22: mol_type = other DNA
aacatatatgcacccaatacag

SEQ ID NO: 111153 - DNA, 22 bp, synthetic construct
  misc_feature 1..22: note = chemically synthesized
  source 1..22: mol_type = other DNA
ataaagcaagtccttagagacc

SEQ ID NO: 111154 - DNA, 22 bp, synthetic construct
  misc_feature 1..22: note = chemically synthesized
  source 1..22: mol_type = other DNA
agagacctacaaagagacttag

SEQ ID NO: 111155 - DNA, 22 bp, synthetic construct
  misc_feature 1..22: note = chemically synthesized
  source 1..22: mol_type = other DNA
gagacctacaaagagacttaga

SEQ ID NO: 111156 - DNA, 22 bp, synthetic construct
  misc_feature 1..22: note = chemically synthesized
  source 1..22: mol_type = other DNA
caaagagacttagactctcaca

SEQ ID NO: 111157 - DNA, 22 bp, synthetic construct
  misc_feature 1..22: note = chemically synthesized
  source 1..22: mol_type = other DNA
agactctcacacaataacaatg

SEQ ID NO: 111158 - DNA, 22 bp, synthetic construct
  misc_feature 1..22: note = chemically synthesized
  source 1..22: mol_type = other DNA
gactctcacacaataacaatgg

SEQ ID NO: 111159 - DNA, 22 bp, synthetic construct
  misc_feature 1..22: note = chemically synthesized
  source 1..22: mol_type = other DNA
tcacacaataacaatgggagac

SEQ ID NO: 111160 - DNA, 22 bp, synthetic construct
  misc_feature 1..22: note = chemically synthesized
  source 1..22: mol_type = other DNA
acacaataacaatgggagactt

SEQ ID NO: 111161 - DNA, 22 bp, synthetic construct
  misc_feature 1..22: note = chemically synthesized
  source 1..22: mol_type = other DNA
taacaccccactgtcaacatta

SEQ ID NO: 111162 - DNA, 22 bp, synthetic construct
  misc_feature 1..22: note = chemically synthesized
  source 1..22: mol_type = other DNA
aacaccccactgtcaacattag

SEQ ID NO: 111163 - DNA, 22 bp, synthetic construct
  misc_feature 1..22: note = chemically synthesized
  source 1..22: mol_type = other DNA
acaccccactgtcaacattaga

SEQ ID NO: 111164 - DNA, 22 bp, synthetic construct
  misc_feature 1..22: note = chemically synthesized
  source 1..22: mol_type = other DNA
tcaacattagacagatcaacat

SEQ ID NO: 111165 - DNA, 22 bp, synthetic construct
  misc_feature 1..22: note = chemically synthesized
  source 1..22: mol_type = other DNA
gacagatcaacattagacagat

SEQ ID NO: 111166 - DNA, 22 bp, synthetic construct
  misc_feature 1..22: note = chemically synthesized
  source 1..22: mol_type = other DNA
gacagatcaacgagacagaaag

SEQ ID NO: 111167 - DNA, 22 bp, synthetic construct
  misc_feature 1..22: note = chemically synthesized
  source 1..22: mol_type = other DNA
acaaggatatccaggaattgaa

SEQ ID NO: 111168 - DNA, 22 bp, synthetic construct
  misc_feature 1..22: note = chemically synthesized
  source 1..22: mol_type = other DNA
aactcagctctgcaccaagcgg

SEQ ID NO: 111169 - DNA, 22 bp, synthetic construct
  misc_feature 1..22: note = chemically synthesized
  source 1..22: mol_type = other DNA
agctctgcaccaagcggaccta

SEQ ID NO: 111170 - DNA, 22 bp, synthetic construct
  misc_feature 1..22: note = chemically synthesized
  source 1..22: mol_type = other DNA
tgcaccaagcggacctaataga

SEQ ID NO: 111171 - DNA, 22 bp, synthetic construct
  misc_feature 1..22: note = chemically synthesized
  source 1..22: mol_type = other DNA
caccaagcggacctaatagaca

SEQ ID NO: 111172 - DNA, 22 bp, synthetic construct
  misc_feature 1..22: note = chemically synthesized
  source 1..22: mol_type = other DNA
atagacatctacagaactctcc

SEQ ID NO: 111173 - DNA, 22 bp, synthetic construct
  misc_feature 1..22: note = chemically synthesized
  source 1..22: mol_type = other DNA
cagaactctccaccccaaatca

SEQ ID NO: 111174 - DNA, 22 bp, synthetic construct
  misc_feature 1..22: note = chemically synthesized
  source 1..22: mol_type = other DNA
tccaccccaaatcaacagaata

SEQ ID NO: 111175 - DNA, 22 bp, synthetic construct
  misc_feature 1..22: note = chemically synthesized
  source 1..22: mol_type = other DNA
caccccaaatcaacagaatata

SEQ ID NO: 111176 - DNA, 22 bp, synthetic construct
  misc_feature 1..22: note = chemically synthesized
  source 1..22: mol_type = other DNA
ttttcagcaccacaccacacct

SEQ ID NO: 111177 - DNA, 22 bp, synthetic construct
  misc_feature 1..22: note = chemically synthesized
  source 1..22: mol_type = other DNA
ttcagcaccacaccacacctat

SEQ ID NO: 111178 - DNA, 22 bp, synthetic construct
  misc_feature 1..22: note = chemically synthesized
  source 1..22: mol_type = other DNA
tcagcaccacaccacacctatt

SEQ ID NO: 111179 - DNA, 22 bp, synthetic construct
  misc_feature 1..22: note = chemically synthesized
  source 1..22: mol_type = other DNA
cagcaccacaccacacctattc

SEQ ID NO: 111180 - DNA, 22 bp, synthetic construct
  misc_feature 1..22: note = chemically synthesized
  source 1..22: mol_type = other DNA
agcaccacaccacacctattcc

SEQ ID NO: 111181 - DNA, 22 bp, synthetic construct
  misc_feature 1..22: note = chemically synthesized
  source 1..22: mol_type = other DNA
ttccaaaattgaccacatagtt

SEQ ID NO: 111182 - DNA, 22 bp, synthetic construct
  misc_feature 1..22: note = chemically synthesized
  source 1..22: mol_type = other DNA
caaaattgaccacatagttgga

SEQ ID NO: 111183 - DNA, 22 bp, synthetic construct
  misc_feature 1..22: note = chemically synthesized
  source 1..22: mol_type = other DNA
accacatagttggaagtaaagc

SEQ ID NO: 111184 - DNA, 22 bp, synthetic construct
  misc_feature 1..22: note = chemically synthesized
  source 1..22: mol_type = other DNA
gaagtaaagcactcctcagcaa

SEQ ID NO: 111185 - DNA, 22 bp, synthetic construct
  misc_feature 1..22: note = chemically synthesized
  source 1..22: mol_type = other DNA
ctcagcaaatgtaaaagaacag

SEQ ID NO: 111186 - DNA, 22 bp, synthetic construct
  misc_feature 1..22: note = chemically synthesized
  source 1..22: mol_type = other DNA
agcaaatgtaaaagaacagaaa

SEQ ID NO: 111187 - DNA, 22 bp, synthetic construct
  misc_feature 1..22: note = chemically synthesized
  source 1..22: mol_type = other DNA
taacaaactgtctctcagacca

SEQ ID NO: 111188 - DNA, 22 bp, synthetic construct
  misc_feature 1..22: note = chemically synthesized
  source 1..22: mol_type = other DNA
tctctcagaccacagtgcaatc

SEQ ID NO: 111189 - DNA, 22 bp, synthetic construct
  misc_feature 1..22: note = chemically synthesized
  source 1..22: mol_type = other DNA
tcagaccacagtgcaatcaaac

SEQ ID NO: 111190 - DNA, 22 bp, synthetic construct
  misc_feature 1..22: note = chemically synthesized
  source 1..22: mol_type = other DNA
agaccacagtgcaatcaaacta

SEQ ID NO: 111191 - DNA, 22 bp, synthetic construct
  misc_feature 1..22: note = chemically synthesized
  source 1..22: mol_type = other DNA
gaactcaggattaagaaactca

SEQ ID NO: 111192 - DNA, 22 bp, synthetic construct
  misc_feature 1..22: note = chemically synthesized
  source 1..22: mol_type = other DNA
aggattaagaaactcactcaaa

SEQ ID NO: 111193 - DNA, 22 bp, synthetic construct
  misc_feature 1..22: note = chemically synthesized
  source 1..22: mol_type = other DNA
agaaactcactcaaaaccgctc

SEQ ID NO: 111194 - DNA, 22 bp, synthetic construct
  misc_feature 1..22: note = chemically synthesized
  source 1..22: mol_type = other DNA
actcaaaaccgctcaactacat

SEQ ID NO: 111195 - DNA, 22 bp, synthetic construct
  misc_feature 1..22: note = chemically synthesized
  source 1..22: mol_type = other DNA
aaaaccgctcaactacatggaa

SEQ ID NO: 111196 - DNA, 22 bp, synthetic construct
  misc_feature 1..22: note = chemically synthesized
  source 1..22: mol_type = other DNA
aactacatggaaaccgaacaaa

SEQ ID NO: 111197 - DNA, 22 bp, synthetic construct
  misc_feature 1..22: note = chemically synthesized
  source 1..22: mol_type = other DNA
catggaaaccgaacaaattgct

SEQ ID NO: 111198 - DNA, 22 bp, synthetic construct
  misc_feature 1..22: note = chemically synthesized
  source 1..22: mol_type = other DNA
ctcctgaatgactactgggttc

SEQ ID NO: 111199 - DNA, 22 bp, synthetic construct
  misc_feature 1..22: note = chemically synthesized
  source 1..22: mol_type = other DNA
ctgaatgactactgggttcata

SEQ ID NO: 111200 - DNA, 22 bp, synthetic construct
  misc_feature 1..22: note = chemically synthesized
  source 1..22: mol_type = other DNA
aatgactactgggttcataaca

SEQ ID NO: 111201 - DNA, 22 bp, synthetic construct
  misc_feature 1..22: note = chemically synthesized
  source 1..22: mol_type = other DNA
ctgggttcataacaaaatgaag

SEQ ID NO: 111202 - DNA, 22 bp, synthetic construct
  misc_feature 1..22: note = chemically synthesized
  source 1..22: mol_type = other DNA
ggttcataacaaaatgaaggca

SEQ ID NO: 111203 - DNA, 22 bp, synthetic construct
  misc_feature 1..22: note = chemically synthesized
  source 1..22: mol_type = other DNA
ataacaaaatgaaggcagaaat

SEQ ID NO: 111204 - DNA, 22 bp, synthetic construct
  misc_feature 1..22: note = chemically synthesized
  source 1..22: mol_type = other DNA
tttggaaccaaagagaacaaag

SEQ ID NO: 111205 - DNA, 22 bp, synthetic construct
  misc_feature 1..22: note = chemically synthesized
  source 1..22: mol_type = other DNA
tggaaccaaagagaacaaagac

SEQ ID NO: 111206 - DNA, 22 bp, synthetic construct
  misc_feature 1..22: note = chemically synthesized
  source 1..22: mol_type = other DNA
ggaaccaaagagaacaaagaca

SEQ ID NO: 111207 - DNA, 22 bp, synthetic construct
  misc_feature 1..22: note = chemically synthesized
  source 1..22: mol_type = other DNA
gaaccaaagagaacaaagacac

SEQ ID NO: 111208 - DNA, 22 bp, synthetic construct
  misc_feature 1..22: note = chemically synthesized
  source 1..22: mol_type = other DNA
tgggacacattcaaagcagtgt

SEQ ID NO: 111209 - DNA, 22 bp, synthetic construct
  misc_feature 1..22: note = chemically synthesized
  source 1..22: mol_type = other DNA
ggacacattcaaagcagtgtgt

SEQ ID NO: 111210 - DNA, 22 bp, synthetic construct
  misc_feature 1..22: note = chemically synthesized
  source 1..22: mol_type = other DNA
aaagcagtgtgtagagggaaat

SEQ ID NO: 111211 - DNA, 22 bp, synthetic construct
  misc_feature 1..22: note = chemically synthesized
  source 1..22: mol_type = other DNA
atagcactaaacgcccagaaga

SEQ ID NO: 111212 - DNA, 22 bp, synthetic construct
  misc_feature 1..22: note = chemically synthesized
  source 1..22: mol_type = other DNA
tagcactaaacgcccagaagag

SEQ ID NO: 111213 - DNA, 22 bp, synthetic construct
  misc_feature 1..22: note = chemically synthesized
  source 1..22: mol_type = other DNA
aacgcccagaagagaaagcagg

SEQ ID NO: 111214 - DNA, 22 bp, synthetic construct
  misc_feature 1..22: note = chemically synthesized
  source 1..22: mol_type = other DNA
aaattgacaccctaacatcaca

SEQ ID NO: 111215 - DNA, 22 bp, synthetic construct
  misc_feature 1..22: note = chemically synthesized
  source 1..22: mol_type = other DNA
acaccctaacatcacaattaaa

SEQ ID NO: 111216 - DNA, 22 bp, synthetic construct
  misc_feature 1..22: note = chemically synthesized
  source 1..22: mol_type = other DNA
acatcacaattaaaagaactag

SEQ ID NO: 111217 - DNA, 22 bp, synthetic construct
  misc_feature 1..22: note = chemically synthesized
  source 1..22: mol_type = other DNA
aaagaactagagaagcaagagc

SEQ ID NO: 111218 - DNA, 22 bp, synthetic construct
  misc_feature 1..22: note = chemically synthesized
  source 1..22: mol_type = other DNA
gagaagcaagagcaaacacatt

SEQ ID NO: 111219 - DNA, 22 bp, synthetic construct
  misc_feature 1..22: note = chemically synthesized
  source 1..22: mol_type = other DNA
aaatgctagcagaaggcaagaa

SEQ ID NO: 111220 - DNA, 22 bp, synthetic construct
  misc_feature 1..22: note = chemically synthesized
  source 1..22: mol_type = other DNA
gcagaaggcaagaaataactaa

SEQ ID NO: 111221 - DNA, 22 bp, synthetic construct
  misc_feature 1..22: note = chemically synthesized
  source 1..22: mol_type = other DNA
aaatcagagcagaactgaagga

SEQ ID NO: 111222 - DNA, 22 bp, synthetic construct
  misc_feature 1..22: note = chemically synthesized
  source 1..22: mol_type = other DNA
aaggaaatagagacacaaaaaa

SEQ ID NO: 111223 - DNA, 22 bp, synthetic construct
  misc_feature 1..22: note = chemically synthesized
  source 1..22: mol_type = other DNA
caaaaaatcaatgaatccagaa

SEQ ID NO: 111224 - DNA, 22 bp, synthetic construct
  misc_feature 1..22: note = chemically synthesized
  source 1..22: mol_type = other DNA
aaaaaatcaatgaatccagaag

SEQ ID NO: 111225 - DNA, 22 bp, synthetic construct
  misc_feature 1..22: note = chemically synthesized
  source 1..22: mol_type = other DNA
gtttttcaaaaagatcaacaaa

SEQ ID NO: 111226 - DNA, 22 bp, synthetic construct
  misc_feature 1..22: note = chemically synthesized
  source 1..22: mol_type = other DNA
ttcaaaaagatcaacaaaattg

SEQ ID NO: 111227 - DNA, 22 bp, synthetic construct
  misc_feature 1..22: note = chemically synthesized
  source 1..22: mol_type = other DNA
tcaaaaagatcaacaaaattga

SEQ ID NO: 111228 - DNA, 22 bp, synthetic construct
  misc_feature 1..22: note = chemically synthesized
  source 1..22: mol_type = other DNA
caaaaagatcaacaaaattgat

SEQ ID NO: 111229 - DNA, 22 bp, synthetic construct
  misc_feature 1..22: note = chemically synthesized
  source 1..22: mol_type = other DNA
aaaaagatcaacaaaattgata

SEQ ID NO: 111230 - DNA, 22 bp, synthetic construct
  misc_feature 1..22: note = chemically synthesized
  source 1..22: mol_type = other DNA
atagactgctagcaagactaat

SEQ ID NO: 111231 - DNA, 22 bp, synthetic construct
  misc_feature 1..22: note = chemically synthesized
  source 1..22: mol_type = other DNA
ctagcaagactaataaagaaga

SEQ ID NO: 111232 - DNA, 22 bp, synthetic construct
  misc_feature 1..22: note = chemically synthesized
  source 1..22: mol_type = other DNA
gcaagactaataaagaagaaaa

SEQ ID NO: 111233 - DNA, 22 bp, synthetic construct
  misc_feature 1..22: note = chemically synthesized
  source 1..22: mol_type = other DNA
ataaagaagaaaagagagaaga

SEQ ID NO: 111234 - DNA, 22 bp, synthetic construct
  misc_feature 1..22: note = chemically synthesized
  source 1..22: mol_type = other DNA
taaacacctctacacaaataaa

SEQ ID NO: 111235 - DNA, 22 bp, synthetic construct
  misc_feature 1..22: note = chemically synthesized
  source 1..22: mol_type = other DNA
tacacaaataaactagaaaatc

SEQ ID NO: 111236 - DNA, 22 bp, synthetic construct
  misc_feature 1..22: note = chemically synthesized
  source 1..22: mol_type = other DNA
cacaaataaactagaaaatcta

SEQ ID NO: 111237 - DNA, 22 bp, synthetic construct
  misc_feature 1..22: note = chemically synthesized
  source 1..22: mol_type = other DNA
gaaaatctagaagaaatggata

SEQ ID NO: 111238 - DNA, 22 bp, synthetic construct
  misc_feature 1..22: note = chemically synthesized
  source 1..22: mol_type = other DNA
gaagaaatggataaattccttg

SEQ ID NO: 111239 - DNA, 22 bp, synthetic construct
  misc_feature 1..22: note = chemically synthesized
  source 1..22: mol_type = other DNA
cttgacacatacaccctcccaa

SEQ ID NO: 111240 - DNA, 22 bp, synthetic construct
  misc_feature 1..22: note = chemically synthesized
  source 1..22: mol_type = other DNA
gacacatacaccctcccaagac

SEQ ID NO: 111241 - DNA, 22 bp, synthetic construct
  misc_feature 1..22: note = chemically synthesized
  source 1..22: mol_type = other DNA
acacatacaccctcccaagact

SEQ ID NO: 111242 - DNA, 22 bp, synthetic construct
  misc_feature 1..22: note = chemically synthesized
  source 1..22: mol_type = other DNA
ccaagactaaaccaggaagaag

SEQ ID NO: 111243 - DNA, 22 bp, synthetic construct
  misc_feature 1..22: note = chemically synthesized
  source 1..22: mol_type = other DNA
aaccaggaagaagttgaatctc

SEQ ID NO: 111244 - DNA, 22 bp, synthetic construct
  misc_feature 1..22: note = chemically synthesized
  source 1..22: mol_type = other DNA
aatctctgaatagaccaataac

SEQ ID NO: 111245 - DNA, 22 bp, synthetic construct
  misc_feature 1..22: note = chemically synthesized
  source 1..22: mol_type = other DNA
tgaatagaccaataacaggatc

SEQ ID NO: 111246 - DNA, 22 bp, synthetic construct
  misc_feature 1..22: note = chemically synthesized
  source 1..22: mol_type = other DNA
aatagaccaataacaggatctg

SEQ ID NO: 111247 - DNA, 22 bp, synthetic construct
  misc_feature 1..22: note = chemically synthesized
  source 1..22: mol_type = other DNA
aaattgaggcaataattaatag

SEQ ID NO: 111248 - DNA, 22 bp, synthetic construct
  misc_feature 1..22: note = chemically synthesized
  source 1..22: mol_type = other DNA
aggcaataattaatagcttacc

SEQ ID NO: 111249 - DNA, 22 bp, synthetic construct
  misc_feature 1..22: note = chemically synthesized
  source 1..22: mol_type = other DNA
atagcttaccaaccaaaaacag

SEQ ID NO: 111250 - DNA, 22 bp, synthetic construct
  misc_feature 1..22: note = chemically synthesized
  source 1..22: mol_type = other DNA
accaaccaaaaacagtccagga

SEQ ID NO: 111251 - DNA, 22 bp, synthetic construct
  misc_feature 1..22: note = chemically synthesized
  source 1..22: mol_type = other DNA
ccaaccaaaaacagtccaggac

SEQ ID NO: 111252 - DNA, 22 bp, synthetic construct
  misc_feature 1..22: note = chemically synthesized
  source 1..22: mol_type = other DNA
taccagaggtacaaggaggagc

SEQ ID NO: 111253 - DNA, 22 bp, synthetic construct
  misc_feature 1..22: note = chemically synthesized
  source 1..22: mol_type = other DNA
ccagaggtacaaggaggagctg

SEQ ID NO: 111254 - DNA, 22 bp, synthetic construct
  misc_feature 1..22: note = chemically synthesized
  source 1..22: mol_type = other DNA
gtaccattccctctgaaactat

SEQ ID NO: 111255 - DNA, 22 bp, synthetic construct
  misc_feature 1..22: note = chemically synthesized
  source 1..22: mol_type = other DNA
cctctgaaactattcgaatcaa

SEQ ID NO: 111256 - DNA, 22 bp, synthetic construct
  misc_feature 1..22: note = chemically synthesized
  source 1..22: mol_type = other DNA
tgaaactattcgaatcaatagt

SEQ ID NO: 111257 - DNA, 22 bp, synthetic construct
  misc_feature 1..22: note = chemically synthesized
  source 1..22: mol_type = other DNA
aaactattcgaatcaatagtaa

SEQ ID NO: 111258 - DNA, 22 bp, synthetic construct
  misc_feature 1..22: note = chemically synthesized
  source 1..22: mol_type = other DNA
ttcgaatcaatagtaaaagagg

SEQ ID NO: 111259 - DNA, 22 bp, synthetic construct
  misc_feature 1..22: note = chemically synthesized
  source 1..22: mol_type = other DNA
gaatcaatagtaaaagagggaa

SEQ ID NO: 111260 - DNA, 22 bp, synthetic construct
  misc_feature 1..22: note = chemically synthesized
  source 1..22: mol_type = other DNA
cctaactcattttatgaggcca

SEQ ID NO: 111261 - DNA, 22 bp, synthetic construct
  misc_feature 1..22: note = chemically synthesized
  source 1..22: mol_type = other DNA
actcattttatgaggccagcat

SEQ ID NO: 111262 - DNA, 22 bp, synthetic construct
  misc_feature 1..22: note = chemically synthesized
  source 1..22: mol_type = other DNA
attttatgaggccagcatcatc

SEQ ID NO: 111263 - DNA, 22 bp, synthetic construct
  misc_feature 1..22: note = chemically synthesized
  source 1..22: mol_type = other DNA
tatgaggccagcatcatcctga

SEQ ID NO: 111264 - DNA, 22 bp, synthetic construct
  misc_feature 1..22: note = chemically synthesized
  source 1..22: mol_type = other DNA
atgaggccagcatcatcctgat

SEQ ID NO: 111265 - DNA, 22 bp, synthetic construct
  misc_feature 1..22: note = chemically synthesized
  source 1..22: mol_type = other DNA
tgaggccagcatcatcctgata

SEQ ID NO: 111266 - DNA, 22 bp, synthetic construct
  misc_feature 1..22: note = chemically synthesized
  source 1..22: mol_type = other DNA
ataccaaagccgggcagagaca

SEQ ID NO: 111267 - DNA, 22 bp, synthetic construct
  misc_feature 1..22: note = chemically synthesized
  source 1..22: mol_type = other DNA
tagaccaatatccctgatggac

SEQ ID NO: 111268 - DNA, 22 bp, synthetic construct
  misc_feature 1..22: note = chemically synthesized
  source 1..22: mol_type = other DNA
agaccaatatccctgatggaca

SEQ ID NO: 111269 - DNA, 22 bp, synthetic construct
  misc_feature 1..22: note = chemically synthesized
  source 1..22: mol_type = other DNA
gaccaatatccctgatggacat

SEQ ID NO: 111270 - DNA, 22 bp, synthetic construct
  misc_feature 1..22: note = chemically synthesized
  source 1..22: mol_type = other DNA
atggacatcgatgcaaaaaacc

SEQ ID NO: 111271 - DNA, 22 bp, synthetic construct
  misc_feature 1..22: note = chemically synthesized
  source 1..22: mol_type = other DNA
aataaaatactggcaaagcaaa

SEQ ID NO: 111272 - DNA, 22 bp, synthetic construct
  misc_feature 1..22: note = chemically synthesized
  source 1..22: mol_type = other DNA
gcaaagcaaatccagcagcaca

SEQ ID NO: 111273 - DNA, 22 bp, synthetic construct
  misc_feature 1..22: note = chemically synthesized
  source 1..22: mol_type = other DNA
atccaccatgatcaagtgggct

SEQ ID NO: 111274 - DNA, 22 bp, synthetic construct
  misc_feature 1..22: note = chemically synthesized
  source 1..22: mol_type = other DNA
tccaccatgatcaagtgggctt

SEQ ID NO: 111275 - DNA, 22 bp, synthetic construct
  misc_feature 1..22: note = chemically synthesized
  source 1..22: mol_type = other DNA
catccctgggatgcaaggctgg

SEQ ID NO: 111276 - DNA, 22 bp, synthetic construct
  misc_feature 1..22: note = chemically synthesized
  source 1..22: mol_type = other DNA
atccctgggatgcaaggctggt

SEQ ID NO: 111277 - DNA, 22 bp, synthetic construct
  misc_feature 1..22: note = chemically synthesized
  source 1..22: mol_type = other DNA
ggatgcaaggctggttcaacat

SEQ ID NO: 111278 - DNA, 22 bp, synthetic construct
  misc_feature 1..22: note = chemically synthesized
  source 1..22: mol_type = other DNA
gttcaacatatgcaaatcaata

SEQ ID NO: 111279 - DNA, 22 bp, synthetic construct
  misc_feature 1..22: note = chemically synthesized
  source 1..22: mol_type = other DNA
aacatatgcaaatcaataaatg

SEQ ID NO: 111280 - DNA, 22 bp, synthetic construct
  misc_feature 1..22: note = chemically synthesized
  source 1..22: mol_type = other DNA
tctcaatagatgcagaaaaggc

SEQ ID NO: 111281 - DNA, 22 bp, synthetic construct
  misc_feature 1..22: note = chemically synthesized
  source 1..22: mol_type = other DNA
aatagatgcagaaaaggccttt

SEQ ID NO: 111282 - DNA, 22 bp, synthetic construct
  misc_feature 1..22: note = chemically synthesized
  source 1..22: mol_type = other DNA
tgacaaaattcaacaacccttc

SEQ ID NO: 111283 - DNA, 22 bp, synthetic construct
  misc_feature 1..22: note = chemically synthesized
  source 1..22: mol_type = other DNA
gacaaaattcaacaacccttca

SEQ ID NO: 111284 - DNA, 22 bp, synthetic construct
  misc_feature 1..22: note = chemically synthesized
  source 1..22: mol_type = other DNA
acaaaattcaacaacccttcat

SEQ ID NO: 111285 - DNA, 22 bp, synthetic construct
  misc_feature 1..22: note = chemically synthesized
  source 1..22: mol_type = other DNA
aacaacccttcatgctaaaaac

SEQ ID NO: 111286 - DNA, 22 bp, synthetic construct
  misc_feature 1..22: note = chemically synthesized
  source 1..22: mol_type = other DNA
catgctaaaaactctcaataaa

SEQ ID NO: 111287 - DNA, 22 bp, synthetic construct
  misc_feature 1..22: note = chemically synthesized
  source 1..22: mol_type = other DNA
atgctaaaaactctcaataaat

SEQ ID NO: 111288 - DNA, 22 bp, synthetic construct
  misc_feature 1..22: note = chemically synthesized
  source 1..22: mol_type = other DNA
aaaactctcaataaattaggta

SEQ ID NO: 111289 - DNA, 22 bp, synthetic construct
  misc_feature 1..22: note = chemically synthesized
  source 1..22: mol_type = other DNA
tcaataaattaggtattgatgg

SEQ ID NO: 111290 - DNA, 22 bp, synthetic construct
  misc_feature 1..22: note = chemically synthesized
  source 1..22: mol_type = other DNA
aataaattaggtattgatggga

SEQ ID NO: 111291 - DNA, 22 bp, synthetic construct
  misc_feature 1..22: note = chemically synthesized
  source 1..22: mol_type = other DNA
ggtattgatgggacgtatctca

SEQ ID NO: 111292 - DNA, 22 bp, synthetic construct
  misc_feature 1..22: note = chemically synthesized
  source 1..22: mol_type = other DNA
atgggacgtatctcaaaataat

SEQ ID NO: 111293 - DNA, 22 bp, synthetic construct
  misc_feature 1..22: note = chemically synthesized
  source 1..22: mol_type = other DNA
aaaataataagagccatctatg

SEQ ID NO: 111294 - DNA, 22 bp, synthetic construct
  misc_feature 1..22: note = chemically synthesized
  source 1..22: mol_type = other DNA
tgacaaacccacagccaatatc

SEQ ID NO: 111295 - DNA, 22 bp, synthetic construct
  misc_feature 1..22: note = chemically synthesized
  source 1..22: mol_type = other DNA
aatggacaaaaactggaagcat

SEQ ID NO: 111296 - DNA, 22 bp, synthetic construct
  misc_feature 1..22: note = chemically synthesized
  source 1..22: mol_type = other DNA
gaagcattccctttgaaaactg

SEQ ID NO: 111297 - DNA, 22 bp, synthetic construct
  misc_feature 1..22: note = chemically synthesized
  source 1..22: mol_type = other DNA
cctttgaaaactggcacaagac

SEQ ID NO: 111298 - DNA, 22 bp, synthetic construct
  misc_feature 1..22: note = chemically synthesized
  source 1..22: mol_type = other DNA
tgaaaactggcacaagacaggg

SEQ ID NO: 111299 - DNA, 22 bp, synthetic construct
  misc_feature 1..22: note = chemically synthesized
  source 1..22: mol_type = other DNA
gaaaactggcacaagacaggga

SEQ ID NO: 111300 - DNA, 22 bp, synthetic construct
  misc_feature 1..22: note = chemically synthesized
  source 1..22: mol_type = other DNA
aaaactggcacaagacagggat

SEQ ID NO: 111301 - DNA, 22 bp, synthetic construct
  misc_feature 1..22: note = chemically synthesized
  source 1..22: mol_type = other DNA
gcacaagacagggatgccctct

SEQ ID NO: 111302 - DNA, 22 bp, synthetic construct
  misc_feature 1..22: note = chemically synthesized
  source 1..22: mol_type = other DNA
tctcactactcctattcaacat

SEQ ID NO: 111303 - DNA, 22 bp, synthetic construct
  misc_feature 1..22: note = chemically synthesized
  source 1..22: mol_type = other DNA
tcactactcctattcaacatag

SEQ ID NO: 111304 - DNA, 22 bp, synthetic construct
  misc_feature 1..22: note = chemically synthesized
  source 1..22: mol_type = other DNA
actactcctattcaacatagtg

SEQ ID NO: 111305 - DNA, 22 bp, synthetic construct
  misc_feature 1..22: note = chemically synthesized
  source 1..22: mol_type = other DNA
ctcctattcaacatagtgttgg

SEQ ID NO: 111306 - DNA, 22 bp, synthetic construct
  misc_feature 1..22: note = chemically synthesized
  source 1..22: mol_type = other DNA
ctattcaacatagtgttggaat

SEQ ID NO: 111307 - DNA, 22 bp, synthetic construct
  misc_feature 1..22: note = chemically synthesized
  source 1..22: mol_type = other DNA
ttcaacatagtgttggaatttc

SEQ ID NO: 111308 - DNA, 22 bp, synthetic construct
  misc_feature 1..22: note = chemically synthesized
  source 1..22: mol_type = other DNA
aacatagtgttggaatttctgg

SEQ ID NO: 111309 - DNA, 22 bp, synthetic construct
  misc_feature 1..22: note = chemically synthesized
  source 1..22: mol_type = other DNA
gaatttctggccagggcaatta

SEQ ID NO: 111310 - DNA, 22 bp, synthetic construct
  misc_feature 1..22: note = chemically synthesized
  source 1..22: mol_type = other DNA
ctggccagggcaattaggcagg

SEQ ID NO: 111311 - DNA, 22 bp, synthetic construct
  misc_feature 1..22: note = chemically synthesized
  source 1..22: mol_type = other DNA
tggccagggcaattaggcagga

SEQ ID NO: 111312 - DNA, 22 bp, synthetic construct
  misc_feature 1..22: note = chemically synthesized
  source 1..22: mol_type = other DNA
gccagggcaattaggcaggaga

SEQ ID NO: 111313 - DNA, 22 bp, synthetic construct
  misc_feature 1..22: note = chemically synthesized
  source 1..22: mol_type = other DNA
ggcaggagaaggaaaaaaaggt

SEQ ID NO: 111314 - DNA, 22 bp, synthetic construct
  misc_feature 1..22: note = chemically synthesized
  source 1..22: mol_type = other DNA
aattaggaaaagaggaagtcaa

SEQ ID NO: 111315 - DNA, 22 bp, synthetic construct
  misc_feature 1..22: note = chemically synthesized
  source 1..22: mol_type = other DNA
ggaaaagaggaagtcaaattgt

SEQ ID NO: 111316 - DNA, 22 bp, synthetic construct
  misc_feature 1..22: note = chemically synthesized
  source 1..22: mol_type = other DNA
tccctgtttgcagatgacacga

SEQ ID NO: 111317 - DNA, 22 bp, synthetic construct
  misc_feature 1..22: note = chemically synthesized
  source 1..22: mol_type = other DNA
tttgcagatgacacgattgtat

SEQ ID NO: 111318 - DNA, 22 bp, synthetic construct
  misc_feature 1..22: note = chemically synthesized
  source 1..22: mol_type = other DNA
gcagatgacacgattgtatatc

SEQ ID NO: 111319 - DNA, 22 bp, synthetic construct
  misc_feature 1..22: note = chemically synthesized
  source 1..22: mol_type = other DNA
cagatgacacgattgtatatct

SEQ ID NO: 111320 - DNA, 22 bp, synthetic construct
  misc_feature 1..22: note = chemically synthesized
  source 1..22: mol_type = other DNA
tatatctagaaaaccccactgt

SEQ ID NO: 111321 - DNA, 22 bp, synthetic construct
  misc_feature 1..22: note = chemically synthesized
  source 1..22: mol_type = other DNA
gaaaaccccactgtctcagccc

SEQ ID NO: 111322 - DNA, 22 bp, synthetic construct
  misc_feature 1..22: note = chemically synthesized
  source 1..22: mol_type = other DNA
tctcagcccaaaatgtccttaa

SEQ ID NO: 111323 - DNA, 22 bp, synthetic construct
  misc_feature 1..22: note = chemically synthesized
  source 1..22: mol_type = other DNA
agcccaaaatgtccttaaactg

SEQ ID NO: 111324 - DNA, 22 bp, synthetic construct
  misc_feature 1..22: note = chemically synthesized
  source 1..22: mol_type = other DNA
aaactgataggcaacttcagca

SEQ ID NO: 111325 - DNA, 22 bp, synthetic construct
  misc_feature 1..22: note = chemically synthesized
  source 1..22: mol_type = other DNA
aactgataggcaacttcagcaa

SEQ ID NO: 111326 - DNA, 22 bp, synthetic construct
  misc_feature 1..22: note = chemically synthesized
  source 1..22: mol_type = other DNA
ataggcaacttcagcaaagtct

SEQ ID NO: 111327 - DNA, 22 bp, synthetic construct
  misc_feature 1..22: note = chemically synthesized
  source 1..22: mol_type = other DNA
cagcaaagtctcaggatacaaa

SEQ ID NO: 111328 - DNA, 22 bp, synthetic construct
  misc_feature 1..22: note = chemically synthesized
  source 1..22: mol_type = other DNA
agcaaagtctcaggatacaaaa

SEQ ID NO: 111329 - DNA, 22 bp, synthetic construct
  misc_feature 1..22: note = chemically synthesized
  source 1..22: mol_type = other DNA
aggatacaaaatcaatgtgcaa

SEQ ID NO: 111330 - DNA, 22 bp, synthetic construct
  misc_feature 1..22: note = chemically synthesized
  source 1..22: mol_type = other DNA
ttatacaccaataacagacaaa

SEQ ID NO: 111331 - DNA, 22 bp, synthetic construct
  misc_feature 1..22: note = chemically synthesized
  source 1..22: mol_type = other DNA
atacaccaataacagacaaaca

SEQ ID NO: 111332 - DNA, 22 bp, synthetic construct
  misc_feature 1..22: note = chemically synthesized
  source 1..22: mol_type = other DNA
tacaccaataacagacaaacag

SEQ ID NO: 111333 - DNA, 22 bp, synthetic construct
  misc_feature 1..22: note = chemically synthesized
  source 1..22: mol_type = other DNA
ccattcacaattgcttcaaaga

SEQ ID NO: 111334 - DNA, 22 bp, synthetic construct
  misc_feature 1..22: note = chemically synthesized
  source 1..22: mol_type = other DNA
acaattgcttcaaagagaataa

SEQ ID NO: 111335 - DNA, 22 bp, synthetic construct
  misc_feature 1..22: note = chemically synthesized
  source 1..22: mol_type = other DNA
cttcaaagagaataaaatacct

SEQ ID NO: 111336 - DNA, 22 bp, synthetic construct
  misc_feature 1..22: note = chemically synthesized
  source 1..22: mol_type = other DNA
caaagagaataaaatacctagg

SEQ ID NO: 111337 - DNA, 22 bp, synthetic construct
  misc_feature 1..22: note = chemically synthesized
  source 1..22: mol_type = other DNA
aaagagaataaaatacctagga

SEQ ID NO: 111338 - DNA, 22 bp, synthetic construct
  misc_feature 1..22: note = chemically synthesized
  source 1..22: mol_type = other DNA
ggaatccaacttacaagagagg

SEQ ID NO: 111339 - DNA, 22 bp, synthetic construct
  misc_feature 1..22: note = chemically synthesized
  source 1..22: mol_type = other DNA
acaagagaggtgaaggacctct

SEQ ID NO: 111340 - DNA, 22 bp, synthetic construct
  misc_feature 1..22: note = chemically synthesized
  source 1..22: mol_type = other DNA
caagagaggtgaaggacctctt

SEQ ID NO: 111341 - DNA, 22 bp, synthetic construct
  misc_feature 1..22: note = chemically synthesized
  source 1..22: mol_type = other DNA
ttcaaggagaactacaaaccac

SEQ ID NO: 111342 - DNA, 22 bp, synthetic construct
  misc_feature 1..22: note = chemically synthesized
  source 1..22: mol_type = other DNA
caaggagaactacaaaccactg

SEQ ID NO: 111343 - DNA, 22 bp, synthetic construct
  misc_feature 1..22: note = chemically synthesized
  source 1..22: mol_type = other DNA
aaggagaactacaaaccactgc

SEQ ID NO: 111344 - DNA, 22 bp, synthetic construct
  misc_feature 1..22: note = chemically synthesized
  source 1..22: mol_type = other DNA
caaaccactgctgaatgaaata

SEQ ID NO: 111345 - DNA, 22 bp, synthetic construct
  misc_feature 1..22: note = chemically synthesized
  source 1..22: mol_type = other DNA
ctgaatgaaataaaagaagata

SEQ ID NO: 111346 - DNA, 22 bp, synthetic construct
  misc_feature 1..22: note = chemically synthesized
  source 1..22: mol_type = other DNA
aatgaaataaaagaagatacaa

SEQ ID NO: 111347 - DNA, 22 bp, synthetic construct
  misc_feature 1..22: note = chemically synthesized
  source 1..22: mol_type = other DNA
catgctcatgggtaggaagaat

SEQ ID NO: 111348 - DNA, 22 bp, synthetic construct
  misc_feature 1..22: note = chemically synthesized
  source 1..22: mol_type = other DNA
atgggtaggaagaatcaatatc

SEQ ID NO: 111349 - DNA, 22 bp, synthetic construct
  misc_feature 1..22: note = chemically synthesized
  source 1..22: mol_type = other DNA
atagattcaatgccatccccat

SEQ ID NO: 111350 - DNA, 22 bp, synthetic construct
  misc_feature 1..22: note = chemically synthesized
  source 1..22: mol_type = other DNA
tagattcaatgccatccccatc

SEQ ID NO: 111351 - DNA, 22 bp, synthetic construct
  misc_feature 1..22: note = chemically synthesized
  source 1..22: mol_type = other DNA
aatgccatccccatcaagctac

SEQ ID NO: 111352 - DNA, 22 bp, synthetic construct
  misc_feature 1..22: note = chemically synthesized
  source 1..22: mol_type = other DNA
ccaatgactttcttcacagaat

SEQ ID NO: 111353 - DNA, 22 bp, synthetic construct
  misc_feature 1..22: note = chemically synthesized
  source 1..22: mol_type = other DNA
tcttcacagaattggaaaaaac

SEQ ID NO: 111354 - DNA, 22 bp, synthetic construct
  misc_feature 1..22: note = chemically synthesized
  source 1..22: mol_type = other DNA
cttcacagaattggaaaaaact

SEQ ID NO: 111355 - DNA, 22 bp, synthetic construct
  misc_feature 1..22: note = chemically synthesized
  source 1..22: mol_type = other DNA
ttcacagaattggaaaaaacta

SEQ ID NO: 111356 - DNA, 22 bp, synthetic construct
  misc_feature 1..22: note = chemically synthesized
  source 1..22: mol_type = other DNA
cacagaattggaaaaaactact

SEQ ID NO: 111357 - DNA, 22 bp, synthetic construct
  misc_feature 1..22: note = chemically synthesized
  source 1..22: mol_type = other DNA
acagaattggaaaaaactactt

SEQ ID NO: 111358 - DNA, 22 bp, synthetic construct
  misc_feature 1..22: note = chemically synthesized
  source 1..22: mol_type = other DNA
gaaaaaactactttaaagttca

SEQ ID NO: 111359 - DNA, 22 bp, synthetic construct
  misc_feature 1..22: note = chemically synthesized
  source 1..22: mol_type = other DNA
ctttaaagttcatatggaacca

SEQ ID NO: 111360 - DNA, 22 bp, synthetic construct
  misc_feature 1..22: note = chemically synthesized
  source 1..22: mol_type = other DNA
taaagttcatatggaaccaaaa

SEQ ID NO: 111361 - DNA, 22 bp, synthetic construct
  misc_feature 1..22: note = chemically synthesized
  source 1..22: mol_type = other DNA
aaagttcatatggaaccaaaaa

SEQ ID NO: 111362 - DNA, 22 bp, synthetic construct
  misc_feature 1..22: note = chemically synthesized
  source 1..22: mol_type = other DNA
aagttcatatggaaccaaaaaa

SEQ ID NO: 111363 - DNA, 22 bp, synthetic construct
  misc_feature 1..22: note = chemically synthesized
  source 1..22: mol_type = other DNA
atatggaaccaaaaaagagccc

SEQ ID NO: 111364 - DNA, 22 bp, synthetic construct
  misc_feature 1..22: note = chemically synthesized
  source 1..22: mol_type = other DNA
acatgccaatcctaagccaaaa

SEQ ID NO: 111365 - DNA, 22 bp, synthetic construct
  misc_feature 1..22: note = chemically synthesized
  source 1..22: mol_type = other DNA
agccaaaagaacaaagctggag

SEQ ID NO: 111366 - DNA, 22 bp, synthetic construct
  misc_feature 1..22: note = chemically synthesized
  source 1..22: mol_type = other DNA
gaggcatcacgctacctgactt

SEQ ID NO: 111367 - DNA, 22 bp, synthetic construct
  misc_feature 1..22: note = chemically synthesized
  source 1..22: mol_type = other DNA
cctgacttcaaactatactaca

SEQ ID NO: 111368 - DNA, 22 bp, synthetic construct
  misc_feature 1..22: note = chemically synthesized
  source 1..22: mol_type = other DNA
acttcaaactatactacaaggc

SEQ ID NO: 111369 - DNA, 22 bp, synthetic construct
  misc_feature 1..22: note = chemically synthesized
  source 1..22: mol_type = other DNA
caaactatactacaaggctaca

SEQ ID NO: 111370 - DNA, 22 bp, synthetic construct
  misc_feature 1..22: note = chemically synthesized
  source 1..22: mol_type = other DNA
aaactatactacaaggctacag

SEQ ID NO: 111371 - DNA, 22 bp, synthetic construct
  misc_feature 1..22: note = chemically synthesized
  source 1..22: mol_type = other DNA
tactacaaggctacagtaacca

SEQ ID NO: 111372 - DNA, 22 bp, synthetic construct
  misc_feature 1..22: note = chemically synthesized
  source 1..22: mol_type = other DNA
caaggctacagtaaccaaaaca

SEQ ID NO: 111373 - DNA, 22 bp, synthetic construct
  misc_feature 1..22: note = chemically synthesized
  source 1..22: mol_type = other DNA
cagtaaccaaaacagcatggta

SEQ ID NO: 111374 - DNA, 22 bp, synthetic construct
  misc_feature 1..22: note = chemically synthesized
  source 1..22: mol_type = other DNA
gtaccaaaacagagatatagac

SEQ ID NO: 111375 - DNA, 22 bp, synthetic construct
  misc_feature 1..22: note = chemically synthesized
  source 1..22: mol_type = other DNA
agaaataatgccgcatgtctac

SEQ ID NO: 111376 - DNA, 22 bp, synthetic construct
  misc_feature 1..22: note = chemically synthesized
  source 1..22: mol_type = other DNA
caaccatctgatctttgacaaa

SEQ ID NO: 111377 - DNA, 22 bp, synthetic construct
  misc_feature 1..22: note = chemically synthesized
  source 1..22: mol_type = other DNA
atctttgacaaacctgacaaaa

SEQ ID NO: 111378 - DNA, 22 bp, synthetic construct
  misc_feature 1..22: note = chemically synthesized
  source 1..22: mol_type = other DNA
tgacaaacctgacaaaaaaaac

SEQ ID NO: 111379 - DNA, 22 bp, synthetic construct
  misc_feature 1..22: note = chemically synthesized
  source 1..22: mol_type = other DNA
gacaaacctgacaaaaaaaaca

SEQ ID NO: 111380 - DNA, 22 bp, synthetic construct
  misc_feature 1..22: note = chemically synthesized
  source 1..22: mol_type = other DNA
acaaacctgacaaaaaaaacaa

SEQ ID NO: 111381 - DNA, 22 bp, synthetic construct
  misc_feature 1..22: note = chemically synthesized
  source 1..22: mol_type = other DNA
acaaaaaaaacaaatggggaaa

SEQ ID NO: 111382 - DNA, 22 bp, synthetic construct
  misc_feature 1..22: note = chemically synthesized
  source 1..22: mol_type = other DNA
cctatttaataaatggtgctgg

SEQ ID NO: 111383 - DNA, 22 bp, synthetic construct
  misc_feature 1..22: note = chemically synthesized
  source 1..22: mol_type = other DNA
tttaataaatggtgctgggaaa

SEQ ID NO: 111384 - DNA, 22 bp, synthetic construct
  misc_feature 1..22: note = chemically synthesized
  source 1..22: mol_type = other DNA
aataaatggtgctgggaaaact

SEQ ID NO: 111385 - DNA, 22 bp, synthetic construct
  misc_feature 1..22: note = chemically synthesized
  source 1..22: mol_type = other DNA
ataaatggtgctgggaaaactg

SEQ ID NO: 111386 - DNA, 22 bp, synthetic construct
  misc_feature 1..22: note = chemically synthesized
  source 1..22: mol_type = other DNA
ggaaaactggctaaccatacgc

SEQ ID NO: 111387 - DNA, 22 bp, synthetic construct
  misc_feature 1..22: note = chemically synthesized
  source 1..22: mol_type = other DNA
gctaaccatacgcagaaagctg

SEQ ID NO: 111388 - DNA, 22 bp, synthetic construct
  misc_feature 1..22: note = chemically synthesized
  source 1..22: mol_type = other DNA
accatacgcagaaagctgaaac

SEQ ID NO: 111389 - DNA, 22 bp, synthetic construct
  misc_feature 1..22: note = chemically synthesized
  source 1..22: mol_type = other DNA
aaactggatccctttcttacac

SEQ ID NO: 111390 - DNA, 22 bp, synthetic construct
  misc_feature 1..22: note = chemically synthesized
  source 1..22: mol_type = other DNA
gatccctttcttacaccttata

SEQ ID NO: 111391 - DNA, 22 bp, synthetic construct
  misc_feature 1..22: note = chemically synthesized
  source 1..22: mol_type = other DNA
tcttacaccttatacaaaaatt

SEQ ID NO: 111392 - DNA, 22 bp, synthetic construct
  misc_feature 1..22: note = chemically synthesized
  source 1..22: mol_type = other DNA
cttacaccttatacaaaaatta

SEQ ID NO: 111393 - DNA, 22 bp, synthetic construct
  misc_feature 1..22: note = chemically synthesized
  source 1..22: mol_type = other DNA
ttacaccttatacaaaaattaa

SEQ ID NO: 111394 - DNA, 22 bp, synthetic construct
  misc_feature 1..22: note = chemically synthesized
  source 1..22: mol_type = other DNA
acaccttatacaaaaattaatt

SEQ ID NO: 111395 - DNA, 22 bp, synthetic construct
  misc_feature 1..22: note = chemically synthesized
  source 1..22: mol_type = other DNA
caccttatacaaaaattaattc

SEQ ID NO: 111396 - DNA, 22 bp, synthetic construct
  misc_feature 1..22: note = chemically synthesized
  source 1..22: mol_type = other DNA
atacaaaaattaattcaagatg

SEQ ID NO: 111397 - DNA, 22 bp, synthetic construct
  misc_feature 1..22: note = chemically synthesized
  source 1..22: mol_type = other DNA
tacaaaaattaattcaagatgg

SEQ ID NO: 111398 - DNA, 22 bp, synthetic construct
  misc_feature 1..22: note = chemically synthesized
  source 1..22: mol_type = other DNA
attcaagatggattacagactt

SEQ ID NO: 111399 - DNA, 22 bp, synthetic construct
  misc_feature 1..22: note = chemically synthesized
  source 1..22: mol_type = other DNA
aagatggattacagacttaaat

SEQ ID NO: 111400 - DNA, 22 bp, synthetic construct
  misc_feature 1..22: note = chemically synthesized
  source 1..22: mol_type = other DNA
cagacttaaatgttagactgaa

SEQ ID NO: 111401 - DNA, 22 bp, synthetic construct
  misc_feature 1..22: note = chemically synthesized
  source 1..22: mol_type = other DNA
aaatgttagactgaaaaccata

SEQ ID NO: 111402 - DNA, 22 bp, synthetic construct
  misc_feature 1..22: note = chemically synthesized
  source 1..22: mol_type = other DNA
aatgttagactgaaaaccataa

SEQ ID NO: 111403 - DNA, 22 bp, synthetic construct
  misc_feature 1..22: note = chemically synthesized
  source 1..22: mol_type = other DNA
gactgaaaaccataaaaactct

SEQ ID NO: 111404 - DNA, 22 bp, synthetic construct
  misc_feature 1..22: note = chemically synthesized
  source 1..22: mol_type = other DNA
aaaaccataaaaactctggaag

SEQ ID NO: 111405 - DNA, 22 bp, synthetic construct
  misc_feature 1..22: note = chemically synthesized
  source 1..22: mol_type = other DNA
tggaagaaaacctaggcaatac

SEQ ID NO: 111406 - DNA, 22 bp, synthetic construct
  misc_feature 1..22: note = chemically synthesized
  source 1..22: mol_type = other DNA
gaagaaaacctaggcaatacca

SEQ ID NO: 111407 - DNA, 22 bp, synthetic construct
  misc_feature 1..22: note = chemically synthesized
  source 1..22: mol_type = other DNA
ggcaataccattcaggacatag

SEQ ID NO: 111408 - DNA, 22 bp, synthetic construct
  misc_feature 1..22: note = chemically synthesized
  source 1..22: mol_type = other DNA
aggacataggcatgggcaagga

SEQ ID NO: 111409 - DNA, 22 bp, synthetic construct
  misc_feature 1..22: note = chemically synthesized
  source 1..22: mol_type = other DNA
catgtctaaaacaccaaaagca

SEQ ID NO: 111410 - DNA, 22 bp, synthetic construct
  misc_feature 1..22: note = chemically synthesized
  source 1..22: mol_type = other DNA
atgtctaaaacaccaaaagcaa

SEQ ID NO: 111411 - DNA, 22 bp, synthetic construct
  misc_feature 1..22: note = chemically synthesized
  source 1..22: mol_type = other DNA
aaacaccaaaagcaatggcaac

SEQ ID NO: 111412 - DNA, 22 bp, synthetic construct
  misc_feature 1..22: note = chemically synthesized
  source 1..22: mol_type = other DNA
attaaactaaagagcttctgca

SEQ ID NO: 111413 - DNA, 22 bp, synthetic construct
  misc_feature 1..22: note = chemically synthesized
  source 1..22: mol_type = other DNA
aactaaagagcttctgcacagc

SEQ ID NO: 111414 - DNA, 22 bp, synthetic construct
  misc_feature 1..22: note = chemically synthesized
  source 1..22: mol_type = other DNA
aagagcttctgcacagcaaaag

SEQ ID NO: 111415 - DNA, 22 bp, synthetic construct
  misc_feature 1..22: note = chemically synthesized
  source 1..22: mol_type = other DNA
ctgcacagcaaaagaaactacc

SEQ ID NO: 111416 - DNA, 22 bp, synthetic construct
  misc_feature 1..22: note = chemically synthesized
  source 1..22: mol_type = other DNA
tgcacagcaaaagaaactacca

SEQ ID NO: 111417 - DNA, 22 bp, synthetic construct
  misc_feature 1..22: note = chemically synthesized
  source 1..22: mol_type = other DNA
cacagcaaaagaaactaccatc

SEQ ID NO: 111418 - DNA, 22 bp, synthetic construct
  misc_feature 1..22: note = chemically synthesized
  source 1..22: mol_type = other DNA
ccatcagagtgaacaggcaaca

SEQ ID NO: 111419 - DNA, 22 bp, synthetic construct
  misc_feature 1..22: note = chemically synthesized
  source 1..22: mol_type = other DNA
ttgcaatctactcatccgacaa

SEQ ID NO: 111420 - DNA, 22 bp, synthetic construct
  misc_feature 1..22: note = chemically synthesized
  source 1..22: mol_type = other DNA
tgcaatctactcatccgacaaa

SEQ ID NO: 111421 - DNA, 22 bp, synthetic construct
  misc_feature 1..22: note = chemically synthesized
  source 1..22: mol_type = other DNA
gcaatctactcatccgacaaag

SEQ ID NO: 111422 - DNA, 22 bp, synthetic construct
  misc_feature 1..22: note = chemically synthesized
  source 1..22: mol_type = other DNA
caatctactcatccgacaaagg

SEQ ID NO: 111423 - DNA, 22 bp, synthetic construct
  misc_feature 1..22: note = chemically synthesized
  source 1..22: mol_type = other DNA
ctcatccgacaaagggctaata

SEQ ID NO: 111424 - DNA, 22 bp, synthetic construct
  misc_feature 1..22: note = chemically synthesized
  source 1..22: mol_type = other DNA
atccgacaaagggctaatatcc

SEQ ID NO: 111425 - DNA, 22 bp, synthetic construct
  misc_feature 1..22: note = chemically synthesized
  source 1..22: mol_type = other DNA
atatccagaatctatgatgaac

SEQ ID NO: 111426 - DNA, 22 bp, synthetic construct
  misc_feature 1..22: note = chemically synthesized
  source 1..22: mol_type = other DNA
tgatgaactcaaacaaatttac

SEQ ID NO: 111427 - DNA, 22 bp, synthetic construct
  misc_feature 1..22: note = chemically synthesized
  source 1..22: mol_type = other DNA
aaacaaatttacaagaaaaaaa

SEQ ID NO: 111428 - DNA, 22 bp, synthetic construct
  misc_feature 1..22: note = chemically synthesized
  source 1..22: mol_type = other DNA
acaagaaaaaaacaaccccatc

SEQ ID NO: 111429 - DNA, 22 bp, synthetic construct
  misc_feature 1..22: note = chemically synthesized
  source 1..22: mol_type = other DNA
caagaaaaaaacaaccccatca

SEQ ID NO: 111430 - DNA, 22 bp, synthetic construct
  misc_feature 1..22: note = chemically synthesized
  source 1..22: mol_type = other DNA
ctcaaaagaagacatttatgca

SEQ ID NO: 111431 - DNA, 22 bp, synthetic construct
  misc_feature 1..22: note = chemically synthesized
  source 1..22: mol_type = other DNA
tcaaaagaagacatttatgcag

SEQ ID NO: 111432 - DNA, 22 bp, synthetic construct
  misc_feature 1..22: note = chemically synthesized
  source 1..22: mol_type = other DNA
aaaagaagacatttatgcagtc

SEQ ID NO: 111433 - DNA, 22 bp, synthetic construct
  misc_feature 1..22: note = chemically synthesized
  source 1..22: mol_type = other DNA
atgcagtcaacagacacatgaa

SEQ ID NO: 111434 - DNA, 22 bp, synthetic construct
  misc_feature 1..22: note = chemically synthesized
  source 1..22: mol_type = other DNA
tgcagtcaacagacacatgaaa

SEQ ID NO: 111435 - DNA, 22 bp, synthetic construct
  misc_feature 1..22: note = chemically synthesized
  source 1..22: mol_type = other DNA
atcatcactggccatcagagaa

SEQ ID NO: 111436 - DNA, 22 bp, synthetic construct
  misc_feature 1..22: note = chemically synthesized
  source 1..22: mol_type = other DNA
gccatcagagaaatacaaatca

SEQ ID NO: 111437 - DNA, 22 bp, synthetic construct
  misc_feature 1..22: note = chemically synthesized
  source 1..22: mol_type = other DNA
acaccagttagaatggcgatca

SEQ ID NO: 111438 - DNA, 22 bp, synthetic construct
  misc_feature 1..22: note = chemically synthesized
  source 1..22: mol_type = other DNA
gaatggcgatcattaaaaagtc

SEQ ID NO: 111439 - DNA, 22 bp, synthetic construct
  misc_feature 1..22: note = chemically synthesized
  source 1..22: mol_type = other DNA
aaaagtcaggaaacaacaggtg

SEQ ID NO: 111440 - DNA, 22 bp, synthetic construct
  misc_feature 1..22: note = chemically synthesized
  source 1..22: mol_type = other DNA
gagaggatgtgaagaagtagga

SEQ ID NO: 111441 - DNA, 22 bp, synthetic construct
  misc_feature 1..22: note = chemically synthesized
  source 1..22: mol_type = other DNA
ttacactgttggtgagactgta

SEQ ID NO: 111442 - DNA, 22 bp, synthetic construct
  misc_feature 1..22: note = chemically synthesized
  source 1..22: mol_type = other DNA
tacactgttggtgagactgtaa

SEQ ID NO: 111443 - DNA, 22 bp, synthetic construct
  misc_feature 1..22: note = chemically synthesized
  source 1..22: mol_type = other DNA
acactgttggtgagactgtaaa

SEQ ID NO: 111444 - DNA, 22 bp, synthetic construct
  misc_feature 1..22: note = chemically synthesized
  source 1..22: mol_type = other DNA
cactgttggtgagactgtaaac

SEQ ID NO: 111445 - DNA, 22 bp, synthetic construct
  misc_feature 1..22: note = chemically synthesized
  source 1..22: mol_type = other DNA
ttggtgagactgtaaactagtt

SEQ ID NO: 111446 - DNA, 22 bp, synthetic construct
  misc_feature 1..22: note = chemically synthesized
  source 1..22: mol_type = other DNA
gtgagactgtaaactagttcaa

SEQ ID NO: 111447 - DNA, 22 bp, synthetic construct
  misc_feature 1..22: note = chemically synthesized
  source 1..22: mol_type = other DNA
taaactagttcaaccattgtgg

SEQ ID NO: 111448 - DNA, 22 bp, synthetic construct
  misc_feature 1..22: note = chemically synthesized
  source 1..22: mol_type = other DNA
gttcaaccattgtggaagtcag

SEQ ID NO: 111449 - DNA, 22 bp, synthetic construct
  misc_feature 1..22: note = chemically synthesized
  source 1..22: mol_type = other DNA
aaccattgtggaagtcagtgtg

SEQ ID NO: 111450 - DNA, 22 bp, synthetic construct
  misc_feature 1..22: note = chemically synthesized
  source 1..22: mol_type = other DNA
tggaagtcagtgtggcgattcc

SEQ ID NO: 111451 - DNA, 22 bp, synthetic construct
  misc_feature 1..22: note = chemically synthesized
  source 1..22: mol_type = other DNA
ctcagggatctagaactagaaa

SEQ ID NO: 111452 - DNA, 22 bp, synthetic construct
  misc_feature 1..22: note = chemically synthesized
  source 1..22: mol_type = other DNA
agggatctagaactagaaatac

SEQ ID NO: 111453 - DNA, 22 bp, synthetic construct
  misc_feature 1..22: note = chemically synthesized
  source 1..22: mol_type = other DNA
gaactagaaataccatttgacc

SEQ ID NO: 111454 - DNA, 22 bp, synthetic construct
  misc_feature 1..22: note = chemically synthesized
  source 1..22: mol_type = other DNA
gaaataccatttgacccagcca

SEQ ID NO: 111455 - DNA, 22 bp, synthetic construct
  misc_feature 1..22: note = chemically synthesized
  source 1..22: mol_type = other DNA
gacccagccatcccattactgg

SEQ ID NO: 111456 - DNA, 22 bp, synthetic construct
  misc_feature 1..22: note = chemically synthesized
  source 1..22: mol_type = other DNA
acccagccatcccattactggg

SEQ ID NO: 111457 - DNA, 22 bp, synthetic construct
  misc_feature 1..22: note = chemically synthesized
  source 1..22: mol_type = other DNA
ctgggtacatactcaaaggatt

SEQ ID NO: 111458 - DNA, 22 bp, synthetic construct
  misc_feature 1..22: note = chemically synthesized
  source 1..22: mol_type = other DNA
ggtacatactcaaaggattata

SEQ ID NO: 111459 - DNA, 22 bp, synthetic construct
  misc_feature 1..22: note = chemically synthesized
  source 1..22: mol_type = other DNA
aaaggattataaatcatgctgc

SEQ ID NO: 111460 - DNA, 22 bp, synthetic construct
  misc_feature 1..22: note = chemically synthesized
  source 1..22: mol_type = other DNA
taaatcatgctgctataaagac

SEQ ID NO: 111461 - DNA, 22 bp, synthetic construct
  misc_feature 1..22: note = chemically synthesized
  source 1..22: mol_type = other DNA
ctataaagacacatgcacatgt

SEQ ID NO: 111462 - DNA, 22 bp, synthetic construct
  misc_feature 1..22: note = chemically synthesized
  source 1..22: mol_type = other DNA
taaagacacatgcacatgtatg

SEQ ID NO: 111463 - DNA, 22 bp, synthetic construct
  misc_feature 1..22: note = chemically synthesized
  source 1..22: mol_type = other DNA
attgtggcactattcacaatag

SEQ ID NO: 111464 - DNA, 22 bp, synthetic construct
  misc_feature 1..22: note = chemically synthesized
  source 1..22: mol_type = other DNA
ttgtggcactattcacaatagc

SEQ ID NO: 111465 - DNA, 22 bp, synthetic construct
  misc_feature 1..22: note = chemically synthesized
  source 1..22: mol_type = other DNA
tggcactattcacaatagcaaa

SEQ ID NO: 111466 - DNA, 22 bp, synthetic construct
  misc_feature 1..22: note = chemically synthesized
  source 1..22: mol_type = other DNA
ttcacaatagcaaagacttgga

SEQ ID NO: 111467 - DNA, 22 bp, synthetic construct
  misc_feature 1..22: note = chemically synthesized
  source 1..22: mol_type = other DNA
acaatagcaaagacttggaacc

SEQ ID NO: 111468 - DNA, 22 bp, synthetic construct
  misc_feature 1..22: note = chemically synthesized
  source 1..22: mol_type = other DNA
ggaaccaacccaaatgtccaac

SEQ ID NO: 111469 - DNA, 22 bp, synthetic construct
  misc_feature 1..22: note = chemically synthesized
  source 1..22: mol_type = other DNA
gaaccaacccaaatgtccaaca

SEQ ID NO: 111470 - DNA, 22 bp, synthetic construct
  misc_feature 1..22: note = chemically synthesized
  source 1..22: mol_type = other DNA
gattaagaaaacgtggcacata

SEQ ID NO: 111471 - DNA, 22 bp, synthetic construct
  misc_feature 1..22: note = chemically synthesized
  source 1..22: mol_type = other DNA
agaaaacgtggcacatatacac

SEQ ID NO: 111472 - DNA, 22 bp, synthetic construct
  misc_feature 1..22: note = chemically synthesized
  source 1..22: mol_type = other DNA
tgcagccataaaaaatgaagag

SEQ ID NO: 111473 - DNA, 22 bp, synthetic construct
  misc_feature 1..22: note = chemically synthesized
  source 1..22: mol_type = other DNA
atgtcctttgtagggacatgga

SEQ ID NO: 111474 - DNA, 22 bp, synthetic construct
  misc_feature 1..22: note = chemically synthesized
  source 1..22: mol_type = other DNA
tgtagggacatggatgaagctg

SEQ ID NO: 111475 - DNA, 22 bp, synthetic construct
  misc_feature 1..22: note = chemically synthesized
  source 1..22: mol_type = other DNA
gtagggacatggatgaagctgg

SEQ ID NO: 111476 - DNA, 22 bp, synthetic construct
  misc_feature 1..22: note = chemically synthesized
  source 1..22: mol_type = other DNA
tagggacatggatgaagctgga

SEQ ID NO: 111477 - DNA, 22 bp, synthetic construct
  misc_feature 1..22: note = chemically synthesized
  source 1..22: mol_type = other DNA
gaaaccatcattctcagcaaac

SEQ ID NO: 111478 - DNA, 22 bp, synthetic construct
  misc_feature 1..22: note = chemically synthesized
  source 1..22: mol_type = other DNA
tcagcaaactatcgcaaggaca

SEQ ID NO: 111479 - DNA, 22 bp, synthetic construct
  misc_feature 1..22: note = chemically synthesized
  source 1..22: mol_type = other DNA
agcaaactatcgcaaggacaaa

SEQ ID NO: 111480 - DNA, 22 bp, synthetic construct
  misc_feature 1..22: note = chemically synthesized
  source 1..22: mol_type = other DNA
tcgcaaggacaaaaaccaaaca

SEQ ID NO: 111481 - DNA, 22 bp, synthetic construct
  misc_feature 1..22: note = chemically synthesized
  source 1..22: mol_type = other DNA
catgttctcactcataggtggg

SEQ ID NO: 111482 - DNA, 22 bp, synthetic construct
  misc_feature 1..22: note = chemically synthesized
  source 1..22: mol_type = other DNA
tcactcataggtgggaattgaa

SEQ ID NO: 111483 - DNA, 22 bp, synthetic construct
  misc_feature 1..22: note = chemically synthesized
  source 1..22: mol_type = other DNA
actcataggtgggaattgaaca

SEQ ID NO: 111484 - DNA, 22 bp, synthetic construct
  misc_feature 1..22: note = chemically synthesized
  source 1..22: mol_type = other DNA
ataggtgggaattgaacaatga

SEQ ID NO: 111485 - DNA, 22 bp, synthetic construct
  misc_feature 1..22: note = chemically synthesized
  source 1..22: mol_type = other DNA
aacaatgagaacacatggacac

SEQ ID NO: 111486 - DNA, 22 bp, synthetic construct
  misc_feature 1..22: note = chemically synthesized
  source 1..22: mol_type = other DNA
cagtggggtgggggtcgggggg

SEQ ID NO: 111487 - DNA, 22 bp, synthetic construct
  misc_feature 1..22: note = chemically synthesized
  source 1..22: mol_type = other DNA
ggagatatacctaatgctaagt

SEQ ID NO: 111488 - DNA, 22 bp, synthetic construct
  misc_feature 1..22: note = chemically synthesized
  source 1..22: mol_type = other DNA
atgctaagtgacgagttaatgg

SEQ ID NO: 111489 - DNA, 22 bp, synthetic construct
  misc_feature 1..22: note = chemically synthesized
  source 1..22: mol_type = other DNA
agtgacgagttaatgggtgcag

SEQ ID NO: 111490 - DNA, 22 bp, synthetic construct
  misc_feature 1..22: note = chemically synthesized
  source 1..22: mol_type = other DNA
atgggtgcagcacaccaacatg

SEQ ID NO: 111491 - DNA, 22 bp, synthetic construct
  misc_feature 1..22: note = chemically synthesized
  source 1..22: mol_type = other DNA
cacgttgtgcaaatgtacccta

SEQ ID NO: 111492 - DNA, 22 bp, synthetic construct
  misc_feature 1..22: note = chemically synthesized
  source 1..22: mol_type = other DNA
tgcaaatgtaccctaaaactta

SEQ ID NO: 111493 - DNA, 22 bp, synthetic construct
  misc_feature 1..22: note = chemically synthesized
  source 1..22: mol_type = other DNA
aaacttaaagtataataataaa

SEQ ID NO: 111494 - DNA, 22 bp, synthetic construct
  misc_feature 1..22: note = chemically synthesized
  source 1..22: mol_type = other DNA
aaagtataataataaaagaaag

SEQ ID NO: 111495 - DNA, 22 bp, synthetic construct
  misc_feature 1..22: note = chemically synthesized
  source 1..22: mol_type = other DNA
aagtataataataaaagaaaga

SEQ ID NO: 111496 - DNA, 22 bp, synthetic construct
  misc_feature 1..22: note = chemically synthesized
  source 1..22: mol_type = other DNA
ctgcaaaaaggccatcctccct

SEQ ID NO: 111497 - DNA, 22 bp, synthetic construct
  misc_feature 1..22: note = chemically synthesized
  source 1..22: mol_type = other DNA
caaaaaggccatcctccctaca

SEQ ID NO: 111498 - DNA, 22 bp, synthetic construct
  misc_feature 1..22: note = chemically synthesized
  source 1..22: mol_type = other DNA
cctacattttcttttctacccc

SEQ ID NO: 111499 - DNA, 22 bp, synthetic construct
  misc_feature 1..22: note = chemically synthesized
  source 1..22: mol_type = other DNA
cattttcttttctacccctatg

SEQ ID NO: 111500 - DNA, 22 bp, synthetic construct
  misc_feature 1..22: note = chemically synthesized
  source 1..22: mol_type = other DNA
tcttttctacccctatgtgatg

SEQ ID NO: 111501 - DNA, 22 bp, synthetic construct
  misc_feature 1..22: note = chemically synthesized
  source 1..22: mol_type = other DNA
cttttctacccctatgtgatgc

SEQ ID NO: 111502 - DNA, 22 bp, synthetic construct
  misc_feature 1..22: note = chemically synthesized
  source 1..22: mol_type = other DNA
ttttctacccctatgtgatgct

SEQ ID NO: 111503 - DNA, 22 bp, synthetic construct
  misc_feature 1..22: note = chemically synthesized
  source 1..22: mol_type = other DNA
ttctacccctatgtgatgctta

SEQ ID NO: 111504 - DNA, 22 bp, synthetic construct
  misc_feature 1..22: note = chemically synthesized
  source 1..22: mol_type = other DNA
tctacccctatgtgatgcttaa

SEQ ID NO: 111505 - DNA, 22 bp, synthetic construct
  misc_feature 1..22: note = chemically synthesized
  source 1..22: mol_type = other DNA
ctacccctatgtgatgcttaaa

SEQ ID NO: 111506 - DNA, 22 bp, synthetic construct
  misc_feature 1..22: note = chemically synthesized
  source 1..22: mol_type = other DNA
tacccctatgtgatgcttaaaa

SEQ ID NO: 111507 - DNA, 22 bp, synthetic construct
  misc_feature 1..22: note = chemically synthesized
  source 1..22: mol_type = other DNA
cccctatgtgatgcttaaaata

SEQ ID NO: 111508 - DNA, 22 bp, synthetic construct
  misc_feature 1..22: note = chemically synthesized
  source 1..22: mol_type = other DNA
tgtgatgcttaaaataaatctt

SEQ ID NO: 111509 - DNA, 22 bp, synthetic construct
  misc_feature 1..22: note = chemically synthesized
  source 1..22: mol_type = other DNA
aaaataaatcttatttctggag

SEQ ID NO: 111510 - DNA, 22 bp, synthetic construct
  misc_feature 1..22: note = chemically synthesized
  source 1..22: mol_type = other DNA
aaataaatcttatttctggaga

SEQ ID NO: 111511 - DNA, 22 bp, synthetic construct
  misc_feature 1..22: note = chemically synthesized
  source 1..22: mol_type = other DNA
atttctggagatgtggctaatt

SEQ ID NO: 111512 - DNA, 22 bp, synthetic construct
  misc_feature 1..22: note = chemically synthesized
  source 1..22: mol_type = other DNA
tttctggagatgtggctaattc

SEQ ID NO: 111513 - DNA, 22 bp, synthetic construct
  misc_feature 1..22: note = chemically synthesized
  source 1..22: mol_type = other DNA
ctggagatgtggctaattccct

SEQ ID NO: 111514 - DNA, 22 bp, synthetic construct
  misc_feature 1..22: note = chemically synthesized
  source 1..22: mol_type = other DNA
tggagatgtggctaattcccta

SEQ ID NO: 111515 - DNA, 22 bp, synthetic construct
  misc_feature 1..22: note = chemically synthesized
  source 1..22: mol_type = other DNA
gagatgtggctaattccctaac

SEQ ID NO: 111516 - DNA, 22 bp, synthetic construct
  misc_feature 1..22: note = chemically synthesized
  source 1..22: mol_type = other DNA
attccctaacctagatgcagga

SEQ ID NO: 111517 - DNA, 22 bp, synthetic construct
  misc_feature 1..22: note = chemically synthesized
  source 1..22: mol_type = other DNA
cctaacctagatgcaggaagaa

SEQ ID NO: 111518 - DNA, 22 bp, synthetic construct
  misc_feature 1..22: note = chemically synthesized
  source 1..22: mol_type = other DNA
acctagatgcaggaagaaacct

SEQ ID NO: 111519 - DNA, 22 bp, synthetic construct
  misc_feature 1..22: note = chemically synthesized
  source 1..22: mol_type = other DNA
gatgcaggaagaaaccttagcg

SEQ ID NO: 111520 - DNA, 22 bp, synthetic construct
  misc_feature 1..22: note = chemically synthesized
  source 1..22: mol_type = other DNA
agcgactcctgttccaaagttc

SEQ ID NO: 111521 - DNA, 22 bp, synthetic construct
  misc_feature 1..22: note = chemically synthesized
  source 1..22: mol_type = other DNA
gcgactcctgttccaaagttct

SEQ ID NO: 111522 - DNA, 22 bp, synthetic construct
  misc_feature 1..22: note = chemically synthesized
  source 1..22: mol_type = other DNA
ctgttccaaagttctaaatccc

SEQ ID NO: 111523 - DNA, 22 bp, synthetic construct
  misc_feature 1..22: note = chemically synthesized
  source 1..22: mol_type = other DNA
ttccaaagttctaaatccctca

SEQ ID NO: 111524 - DNA, 22 bp, synthetic construct
  misc_feature 1..22: note = chemically synthesized
  source 1..22: mol_type = other DNA
caaagttctaaatccctcaggc

SEQ ID NO: 111525 - DNA, 22 bp, synthetic construct
  misc_feature 1..22: note = chemically synthesized
  source 1..22: mol_type = other DNA
taaatccctcaggctgggagaa

SEQ ID NO: 111526 - DNA, 22 bp, synthetic construct
  misc_feature 1..22: note = chemically synthesized
  source 1..22: mol_type = other DNA
aatccctcaggctgggagaata

SEQ ID NO: 111527 - DNA, 22 bp, synthetic construct
  misc_feature 1..22: note = chemically synthesized
  source 1..22: mol_type = other DNA
aggctgggagaataaagaagga

SEQ ID NO: 111528 - DNA, 22 bp, synthetic construct
  misc_feature 1..22: note = chemically synthesized
  source 1..22: mol_type = other DNA
ggagaataaagaaggagggagg

SEQ ID NO: 111529 - DNA, 22 bp, synthetic construct
  misc_feature 1..22: note = chemically synthesized
  source 1..22: mol_type = other DNA
ctgaaactaattttctttgcag

SEQ ID NO: 111530 - DNA, 22 bp, synthetic construct
  misc_feature 1..22: note = chemically synthesized
  source 1..22: mol_type = other DNA
tgaaactaattttctttgcagc

SEQ ID NO: 111531 - DNA, 22 bp, synthetic construct
  misc_feature 1..22: note = chemically synthesized
  source 1..22: mol_type = other DNA
aaactaattttctttgcagctt

SEQ ID NO: 111532 - DNA, 22 bp, synthetic construct
  misc_feature 1..22: note = chemically synthesized
  source 1..22: mol_type = other DNA
attttctttgcagcttggcttc

SEQ ID NO: 111533 - DNA, 22 bp, synthetic construct
  misc_feature 1..22: note = chemically synthesized
  source 1..22: mol_type = other DNA
tctttgcagcttggcttctgag

SEQ ID NO: 111534 - DNA, 22 bp, synthetic construct
  misc_feature 1..22: note = chemically synthesized
  source 1..22: mol_type = other DNA
ctttgcagcttggcttctgagt

SEQ ID NO: 111535 - DNA, 22 bp, synthetic construct
  misc_feature 1..22: note = chemically synthesized
  source 1..22: mol_type = other DNA
tttgcagcttggcttctgagta

SEQ ID NO: 111536 - DNA, 22 bp, synthetic construct
  misc_feature 1..22: note = chemically synthesized
  source 1..22: mol_type = other DNA
tgcagcttggcttctgagtata

SEQ ID NO: 111537 - DNA, 22 bp, synthetic construct
  misc_feature 1..22: note = chemically synthesized
  source 1..22: mol_type = other DNA
gcagcttggcttctgagtatag

SEQ ID NO: 111538 - DNA, 22 bp, synthetic construct
  misc_feature 1..22: note = chemically synthesized
  source 1..22: mol_type = other DNA
cagcttggcttctgagtatagt

SEQ ID NO: 111539 - DNA, 22 bp, synthetic construct
  misc_feature 1..22: note = chemically synthesized
  source 1..22: mol_type = other DNA
ggcttctgagtatagtctaaaa

SEQ ID NO: 111540 - DNA, 22 bp, synthetic construct
  misc_feature 1..22: note = chemically synthesized
  source 1..22: mol_type = other DNA
gcttctgagtatagtctaaaaa

SEQ ID NO: 111541 - DNA, 22 bp, synthetic construct
  misc_feature 1..22: note = chemically synthesized
  source 1..22: mol_type = other DNA
ctgagtatagtctaaaaagttg

SEQ ID NO: 111542 - DNA, 22 bp, synthetic construct
  misc_feature 1..22: note = chemically synthesized
  source 1..22: mol_type = other DNA
tgagtatagtctaaaaagttgg

SEQ ID NO: 111543 - DNA, 22 bp, synthetic construct
  misc_feature 1..22: note = chemically synthesized
  source 1..22: mol_type = other DNA
agtatagtctaaaaagttggtg

SEQ ID NO: 111544 - DNA, 22 bp, synthetic construct
  misc_feature 1..22: note = chemically synthesized
  source 1..22: mol_type = other DNA
aaaagttggtgttggatccaat

SEQ ID NO: 111545 - DNA, 22 bp, synthetic construct
  misc_feature 1..22: note = chemically synthesized
  source 1..22: mol_type = other DNA
gtgttggatccaatatcttgac

SEQ ID NO: 111546 - DNA, 22 bp, synthetic construct
  misc_feature 1..22: note = chemically synthesized
  source 1..22: mol_type = other DNA
gatccaatatcttgaccaggct

SEQ ID NO: 111547 - DNA, 22 bp, synthetic construct
  misc_feature 1..22: note = chemically synthesized
  source 1..22: mol_type = other DNA
gaccaggcttaggggttcatag

SEQ ID NO: 111548 - DNA, 22 bp, synthetic construct
  misc_feature 1..22: note = chemically synthesized
  source 1..22: mol_type = other DNA
accaggcttaggggttcatagt

SEQ ID NO: 111549 - DNA, 22 bp, synthetic construct
  misc_feature 1..22: note = chemically synthesized
  source 1..22: mol_type = other DNA
aggggttcatagtcacatctgt

SEQ ID NO: 111550 - DNA, 22 bp, synthetic construct
  misc_feature 1..22: note = chemically synthesized
  source 1..22: mol_type = other DNA
ggggttcatagtcacatctgtg

SEQ ID NO: 111551 - DNA, 22 bp, synthetic construct
  misc_feature 1..22: note = chemically synthesized
  source 1..22: mol_type = other DNA
atagtcacatctgtggcaacaa

SEQ ID NO: 111552 - DNA, 22 bp, synthetic construct
  misc_feature 1..22: note = chemically synthesized
  source 1..22: mol_type = other DNA
tggcaacaatgaacagacttat

SEQ ID NO: 111553 - DNA, 22 bp, synthetic construct
  misc_feature 1..22: note = chemically synthesized
  source 1..22: mol_type = other DNA
atgaacaggtcggtaaagaact

SEQ ID NO: 111554 - DNA, 22 bp, synthetic construct
  misc_feature 1..22: note = chemically synthesized
  source 1..22: mol_type = other DNA
tgaacaggtcggtaaagaactc

SEQ ID NO: 111555 - DNA, 22 bp, synthetic construct
  misc_feature 1..22: note = chemically synthesized
  source 1..22: mol_type = other DNA
cagtgtgtcttggcctagaggc

SEQ ID NO: 111556 - DNA, 22 bp, synthetic construct
  misc_feature 1..22: note = chemically synthesized
  source 1..22: mol_type = other DNA
ggcctagaggctccgcatagga

SEQ ID NO: 111557 - DNA, 22 bp, synthetic construct
  misc_feature 1..22: note = chemically synthesized
  source 1..22: mol_type = other DNA
gcctagaggctccgcataggaa

SEQ ID NO: 111558 - DNA, 22 bp, synthetic construct
  misc_feature 1..22: note = chemically synthesized
  source 1..22: mol_type = other DNA
gaggctccgcataggaatgagc

SEQ ID NO: 111559 - DNA, 22 bp, synthetic construct
  misc_feature 1..22: note = chemically synthesized
  source 1..22: mol_type = other DNA
cgcataggaatgagcagtagac

SEQ ID NO: 111560 - DNA, 22 bp, synthetic construct
  misc_feature 1..22: note = chemically synthesized
  source 1..22: mol_type = other DNA
gcttatcagagattgcagagag

SEQ ID NO: 111561 - DNA, 22 bp, synthetic construct
  misc_feature 1..22: note = chemically synthesized
  source 1..22: mol_type = other DNA
atcagagattgcagagagggaa

SEQ ID NO: 111562 - DNA, 22 bp, synthetic construct
  misc_feature 1..22: note = chemically synthesized
  source 1..22: mol_type = other DNA
tcagagattgcagagagggaaa

SEQ ID NO: 111563 - DNA, 22 bp, synthetic construct
  misc_feature 1..22: note = chemically synthesized
  source 1..22: mol_type = other DNA
cagagagggaaatgcagtaatg

SEQ ID NO: 111564 - DNA, 22 bp, synthetic construct
  misc_feature 1..22: note = chemically synthesized
  source 1..22: mol_type = other DNA
tcatcccaaagactccctaaaa

SEQ ID NO: 111565 - DNA, 22 bp, synthetic construct
  misc_feature 1..22: note = chemically synthesized
  source 1..22: mol_type = other DNA
cctaaaatctttagaacttggc

SEQ ID NO: 111566 - DNA, 22 bp, synthetic construct
  misc_feature 1..22: note = chemically synthesized
  source 1..22: mol_type = other DNA
aaatctttagaacttggcttct

SEQ ID NO: 111567 - DNA, 22 bp, synthetic construct
  misc_feature 1..22: note = chemically synthesized
  source 1..22: mol_type = other DNA
tagaacttggcttctgaataat

SEQ ID NO: 111568 - DNA, 22 bp, synthetic construct
  misc_feature 1..22: note = chemically synthesized
  source 1..22: mol_type = other DNA
agaacttggcttctgaataatc

SEQ ID NO: 111569 - DNA, 22 bp, synthetic construct
  misc_feature 1..22: note = chemically synthesized
  source 1..22: mol_type = other DNA
gaacttggcttctgaataatct

SEQ ID NO: 111570 - DNA, 22 bp, synthetic construct
  misc_feature 1..22: note = chemically synthesized
  source 1..22: mol_type = other DNA
ggcttctgaataatctcttttg

SEQ ID NO: 111571 - DNA, 22 bp, synthetic construct
  misc_feature 1..22: note = chemically synthesized
  source 1..22: mol_type = other DNA
gcttctgaataatctcttttgc

SEQ ID NO: 111572 - DNA, 22 bp, synthetic construct
  misc_feature 1..22: note = chemically synthesized
  source 1..22: mol_type = other DNA
ctgaataatctcttttgcaaat

SEQ ID NO: 111573 - DNA, 22 bp, synthetic construct
  misc_feature 1..22: note = chemically synthesized
  source 1..22: mol_type = other DNA
tgaataatctcttttgcaaatt

SEQ ID NO: 111574 - DNA, 22 bp, synthetic construct
  misc_feature 1..22: note = chemically synthesized
  source 1..22: mol_type = other DNA
aataatctcttttgcaaattcc

SEQ ID NO: 111575 - DNA, 22 bp, synthetic construct
  misc_feature 1..22: note = chemically synthesized
  source 1..22: mol_type = other DNA
ttttgcaaattcctagaagagg

SEQ ID NO: 111576 - DNA, 22 bp, synthetic construct
  misc_feature 1..22: note = chemically synthesized
  source 1..22: mol_type = other DNA
ttgcaaattcctagaagaggga

SEQ ID NO: 111577 - DNA, 22 bp, synthetic construct
  misc_feature 1..22: note = chemically synthesized
  source 1..22: mol_type = other DNA
tgcaaattcctagaagagggaa

SEQ ID NO: 111578 - DNA, 22 bp, synthetic construct
  misc_feature 1..22: note = chemically synthesized
  source 1..22: mol_type = other DNA
gcaaattcctagaagagggaaa

SEQ ID NO: 111579 - DNA, 22 bp, synthetic construct
  misc_feature 1..22: note = chemically synthesized
  source 1..22: mol_type = other DNA
caaattcctagaagagggaaaa

SEQ ID NO: 111580 - DNA, 22 bp, synthetic construct
  misc_feature 1..22: note = chemically synthesized
  source 1..22: mol_type = other DNA
ctagaagagggaaaatcctaga

SEQ ID NO: 111581 - DNA, 22 bp, synthetic construct
  misc_feature 1..22: note = chemically synthesized
  source 1..22: mol_type = other DNA
gaagagggaaaatcctagatct

SEQ ID NO: 111582 - DNA, 22 bp, synthetic construct
  misc_feature 1..22: note = chemically synthesized
  source 1..22: mol_type = other DNA
gatctcctttttcattccctag

SEQ ID NO: 111583 - DNA, 22 bp, synthetic construct
  misc_feature 1..22: note = chemically synthesized
  source 1..22: mol_type = other DNA
ctttttcattccctagcagagt

SEQ ID NO: 111584 - DNA, 22 bp, synthetic construct
  misc_feature 1..22: note = chemically synthesized
  source 1..22: mol_type = other DNA
tttcattccctagcagagtgat

SEQ ID NO: 111585 - DNA, 22 bp, synthetic construct
  misc_feature 1..22: note = chemically synthesized
  source 1..22: mol_type = other DNA
ttcattccctagcagagtgatc

SEQ ID NO: 111586 - DNA, 22 bp, synthetic construct
  misc_feature 1..22: note = chemically synthesized
  source 1..22: mol_type = other DNA
tcattccctagcagagtgatct

SEQ ID NO: 111587 - DNA, 22 bp, synthetic construct
  misc_feature 1..22: note = chemically synthesized
  source 1..22: mol_type = other DNA
cattccctagcagagtgatcta

SEQ ID NO: 111588 - DNA, 22 bp, synthetic construct
  misc_feature 1..22: note = chemically synthesized
  source 1..22: mol_type = other DNA
attccctagcagagtgatctag

SEQ ID NO: 111589 - DNA, 22 bp, synthetic construct
  misc_feature 1..22: note = chemically synthesized
  source 1..22: mol_type = other DNA
cctagcagagtgatctagttag

SEQ ID NO: 111590 - DNA, 22 bp, synthetic construct
  misc_feature 1..22: note = chemically synthesized
  source 1..22: mol_type = other DNA
gcagagtgatctagttaggaaa

SEQ ID NO: 111591 - DNA, 22 bp, synthetic construct
  misc_feature 1..22: note = chemically synthesized
  source 1..22: mol_type = other DNA
gttaggaaaaaatcaagttgaa

SEQ ID NO: 111592 - DNA, 22 bp, synthetic construct
  misc_feature 1..22: note = chemically synthesized
  source 1..22: mol_type = other DNA
ggaaaaaatcaagttgaaaatc

SEQ ID NO: 111593 - DNA, 22 bp, synthetic construct
  misc_feature 1..22: note = chemically synthesized
  source 1..22: mol_type = other DNA
aaaatccacgggaatacagaat

SEQ ID NO: 111594 - DNA, 22 bp, synthetic construct
  misc_feature 1..22: note = chemically synthesized
  source 1..22: mol_type = other DNA
tggtgtagttccagactctggt

SEQ ID NO: 111595 - DNA, 22 bp, synthetic construct
  misc_feature 1..22: note = chemically synthesized
  source 1..22: mol_type = other DNA
gtgtagttccagactctggttt

SEQ ID NO: 111596 - DNA, 22 bp, synthetic construct
  misc_feature 1..22: note = chemically synthesized
  source 1..22: mol_type = other DNA
cagactctggtttggattatct

SEQ ID NO: 111597 - DNA, 22 bp, synthetic construct
  misc_feature 1..22: note = chemically synthesized
  source 1..22: mol_type = other DNA
tggtttggattatctatttcct

SEQ ID NO: 111598 - DNA, 22 bp, synthetic construct
  misc_feature 1..22: note = chemically synthesized
  source 1..22: mol_type = other DNA
gtttggattatctatttccttt

SEQ ID NO: 111599 - DNA, 22 bp, synthetic construct
  misc_feature 1..22: note = chemically synthesized
  source 1..22: mol_type = other DNA
ggattatctatttcctttgttg

SEQ ID NO: 111600 - DNA, 22 bp, synthetic construct
  misc_feature 1..22: note = chemically synthesized
  source 1..22: mol_type = other DNA
gattatctatttcctttgttgc

SEQ ID NO: 111601 - DNA, 22 bp, synthetic construct
  misc_feature 1..22: note = chemically synthesized
  source 1..22: mol_type = other DNA
tctatttcctttgttgctctct

SEQ ID NO: 111602 - DNA, 22 bp, synthetic construct
  misc_feature 1..22: note = chemically synthesized
  source 1..22: mol_type = other DNA
tttcctttgttgctctcttcgg

SEQ ID NO: 111603 - DNA, 22 bp, synthetic construct
  misc_feature 1..22: note = chemically synthesized
  source 1..22: mol_type = other DNA
cctttgttgctctcttcgggct

SEQ ID NO: 111604 - DNA, 22 bp, synthetic construct
  misc_feature 1..22: note = chemically synthesized
  source 1..22: mol_type = other DNA
ctttgttgctctcttcgggctg

SEQ ID NO: 111605 - DNA, 22 bp, synthetic construct
  misc_feature 1..22: note = chemically synthesized
  source 1..22: mol_type = other DNA
tgttgctctcttcgggctgcat

SEQ ID NO: 111606 - DNA, 22 bp, synthetic construct
  misc_feature 1..22: note = chemically synthesized
  source 1..22: mol_type = other DNA
gttgctctcttcgggctgcata

SEQ ID NO: 111607 - DNA, 22 bp, synthetic construct
  misc_feature 1..22: note = chemically synthesized
  source 1..22: mol_type = other DNA
ttgctctcttcgggctgcataa

SEQ ID NO: 111608 - DNA, 22 bp, synthetic construct
  misc_feature 1..22: note = chemically synthesized
  source 1..22: mol_type = other DNA
ctctcttcgggctgcataaacc

SEQ ID NO: 111609 - DNA, 22 bp, synthetic construct
  misc_feature 1..22: note = chemically synthesized
  source 1..22: mol_type = other DNA
tcttcgggctgcataaaccagc

SEQ ID NO: 111610 - DNA, 22 bp, synthetic construct
  misc_feature 1..22: note = chemically synthesized
  source 1..22: mol_type = other DNA
ttcgggctgcataaaccagctt

SEQ ID NO: 111611 - DNA, 22 bp, synthetic construct
  misc_feature 1..22: note = chemically synthesized
  source 1..22: mol_type = other DNA
cgggctgcataaaccagcttcc

SEQ ID NO: 111612 - DNA, 22 bp, synthetic construct
  misc_feature 1..22: note = chemically synthesized
  source 1..22: mol_type = other DNA
gggctgcataaaccagcttcct

SEQ ID NO: 111613 - DNA, 22 bp, synthetic construct
  misc_feature 1..22: note = chemically synthesized
  source 1..22: mol_type = other DNA
cataaaccagcttcctctttgc

SEQ ID NO: 111614 - DNA, 22 bp, synthetic construct
  misc_feature 1..22: note = chemically synthesized
  source 1..22: mol_type = other DNA
cctctttgcctctatgtgttct

SEQ ID NO: 111615 - DNA, 22 bp, synthetic construct
  misc_feature 1..22: note = chemically synthesized
  source 1..22: mol_type = other DNA
ctctttgcctctatgtgttcta

SEQ ID NO: 111616 - DNA, 22 bp, synthetic construct
  misc_feature 1..22: note = chemically synthesized
  source 1..22: mol_type = other DNA
tttgcctctatgtgttctacca

SEQ ID NO: 111617 - DNA, 22 bp, synthetic construct
  misc_feature 1..22: note = chemically synthesized
  source 1..22: mol_type = other DNA
tgcctctatgtgttctaccaag

SEQ ID NO: 111618 - DNA, 22 bp, synthetic construct
  misc_feature 1..22: note = chemically synthesized
  source 1..22: mol_type = other DNA
gcctctatgtgttctaccaagt

SEQ ID NO: 111619 - DNA, 22 bp, synthetic construct
  misc_feature 1..22: note = chemically synthesized
  source 1..22: mol_type = other DNA
cctctatgtgttctaccaagta

SEQ ID NO: 111620 - DNA, 22 bp, synthetic construct
  misc_feature 1..22: note = chemically synthesized
  source 1..22: mol_type = other DNA
tatgtgttctaccaagtactta

SEQ ID NO: 111621 - DNA, 22 bp, synthetic construct
  misc_feature 1..22: note = chemically synthesized
  source 1..22: mol_type = other DNA
tgtgttctaccaagtacttact

SEQ ID NO: 111622 - DNA, 22 bp, synthetic construct
  misc_feature 1..22: note = chemically synthesized
  source 1..22: mol_type = other DNA
taccaagtacttactcccaaaa

SEQ ID NO: 111623 - DNA, 22 bp, synthetic construct
  misc_feature 1..22: note = chemically synthesized
  source 1..22: mol_type = other DNA
ccaagtacttactcccaaaaaa

SEQ ID NO: 111624 - DNA, 22 bp, synthetic construct
  misc_feature 1..22: note = chemically synthesized
  source 1..22: mol_type = other DNA
actcccaaaaaagatgaagtta

SEQ ID NO: 111625 - DNA, 22 bp, synthetic construct
  misc_feature 1..22: note = chemically synthesized
  source 1..22: mol_type = other DNA
ctcccaaaaaagatgaagttag

SEQ ID NO: 111626 - DNA, 22 bp, synthetic construct
  misc_feature 1..22: note = chemically synthesized
  source 1..22: mol_type = other DNA
ccaaaaaagatgaagttagagt

SEQ ID NO: 111627 - DNA, 22 bp, synthetic construct
  misc_feature 1..22: note = chemically synthesized
  source 1..22: mol_type = other DNA
gagtgaggataggggacactgt

SEQ ID NO: 111628 - DNA, 22 bp, synthetic construct
  misc_feature 1..22: note = chemically synthesized
  source 1..22: mol_type = other DNA
taatgacaagggtatagactaa

SEQ ID NO: 111629 - DNA, 22 bp, synthetic construct
  misc_feature 1..22: note = chemically synthesized
  source 1..22: mol_type = other DNA
acagaaagaaaaacttaccaaa

SEQ ID NO: 111630 - DNA, 22 bp, synthetic construct
  misc_feature 1..22: note = chemically synthesized
  source 1..22: mol_type = other DNA
accaaatagattagtgtcagat

SEQ ID NO: 111631 - DNA, 22 bp, synthetic construct
  misc_feature 1..22: note = chemically synthesized
  source 1..22: mol_type = other DNA
ccaaatagattagtgtcagatt

SEQ ID NO: 111632 - DNA, 22 bp, synthetic construct
  misc_feature 1..22: note = chemically synthesized
  source 1..22: mol_type = other DNA
gtgtcagattgagtaaagcaaa

SEQ ID NO: 111633 - DNA, 22 bp, synthetic construct
  misc_feature 1..22: note = chemically synthesized
  source 1..22: mol_type = other DNA
agtaaagcaaactttgacatga

SEQ ID NO: 111634 - DNA, 22 bp, synthetic construct
  misc_feature 1..22: note = chemically synthesized
  source 1..22: mol_type = other DNA
tgacatgaggcacaatgcttta

SEQ ID NO: 111635 - DNA, 22 bp, synthetic construct
  misc_feature 1..22: note = chemically synthesized
  source 1..22: mol_type = other DNA
gacatgaggcacaatgctttaa

SEQ ID NO: 111636 - DNA, 22 bp, synthetic construct
  misc_feature 1..22: note = chemically synthesized
  source 1..22: mol_type = other DNA
acatgaggcacaatgctttaaa

SEQ ID NO: 111637 - DNA, 22 bp, synthetic construct
  misc_feature 1..22: note = chemically synthesized
  source 1..22: mol_type = other DNA
taaattgctgcatattcccaga

SEQ ID NO: 111638 - DNA, 22 bp, synthetic construct
  misc_feature 1..22: note = chemically synthesized
  source 1..22: mol_type = other DNA
aaattgctgcatattcccagaa

SEQ ID NO: 111639 - DNA, 22 bp, synthetic construct
  misc_feature 1..22: note = chemically synthesized
  source 1..22: mol_type = other DNA
aattgctgcatattcccagaaa

SEQ ID NO: 111640 - DNA, 22 bp, synthetic construct
  misc_feature 1..22: note = chemically synthesized
  source 1..22: mol_type = other DNA
ctgcatattcccagaaatgagc

SEQ ID NO: 111641 - DNA, 22 bp, synthetic construct
  misc_feature 1..22: note = chemically synthesized
  source 1..22: mol_type = other DNA
catattcccagaaatgagccta

SEQ ID NO: 111642 - DNA, 22 bp, synthetic construct
  misc_feature 1..22: note = chemically synthesized
  source 1..22: mol_type = other DNA
ccagaaatgagcctagtatcca

SEQ ID NO: 111643 - DNA, 22 bp, synthetic construct
  misc_feature 1..22: note = chemically synthesized
  source 1..22: mol_type = other DNA
gtatccatcagaaaatgtatgc

SEQ ID NO: 111644 - DNA, 22 bp, synthetic construct
  misc_feature 1..22: note = chemically synthesized
  source 1..22: mol_type = other DNA
ataaaccaaagtcagagagagc

SEQ ID NO: 111645 - DNA, 22 bp, synthetic construct
  misc_feature 1..22: note = chemically synthesized
  source 1..22: mol_type = other DNA
taaaccaaagtcagagagagct

SEQ ID NO: 111646 - DNA, 22 bp, synthetic construct
  misc_feature 1..22: note = chemically synthesized
  source 1..22: mol_type = other DNA
gttggttcacttcattccatgc

SEQ ID NO: 111647 - DNA, 22 bp, synthetic construct
  misc_feature 1..22: note = chemically synthesized
  source 1..22: mol_type = other DNA
ttggttcacttcattccatgct

SEQ ID NO: 111648 - DNA, 22 bp, synthetic construct
  misc_feature 1..22: note = chemically synthesized
  source 1..22: mol_type = other DNA
gttcacttcattccatgctgag

SEQ ID NO: 111649 - DNA, 22 bp, synthetic construct
  misc_feature 1..22: note = chemically synthesized
  source 1..22: mol_type = other DNA
acttcattccatgctgagctat

SEQ ID NO: 111650 - DNA, 22 bp, synthetic construct
  misc_feature 1..22: note = chemically synthesized
  source 1..22: mol_type = other DNA
cattccatgctgagctatcagc

SEQ ID NO: 111651 - DNA, 22 bp, synthetic construct
  misc_feature 1..22: note = chemically synthesized
  source 1..22: mol_type = other DNA
attccatgctgagctatcagca

SEQ ID NO: 111652 - DNA, 22 bp, synthetic construct
  misc_feature 1..22: note = chemically synthesized
  source 1..22: mol_type = other DNA
catgctgagctatcagcactgc

SEQ ID NO: 111653 - DNA, 22 bp, synthetic construct
  misc_feature 1..22: note = chemically synthesized
  source 1..22: mol_type = other DNA
agctatcagcactgcagatttt

SEQ ID NO: 111654 - DNA, 22 bp, synthetic construct
  misc_feature 1..22: note = chemically synthesized
  source 1..22: mol_type = other DNA
tcagcactgcagattttgaaga

SEQ ID NO: 111655 - DNA, 22 bp, synthetic construct
  misc_feature 1..22: note = chemically synthesized
  source 1..22: mol_type = other DNA
cagattttgaagatctcaacca

SEQ ID NO: 111656 - DNA, 22 bp, synthetic construct
  misc_feature 1..22: note = chemically synthesized
  source 1..22: mol_type = other DNA
tgaagatctcaaccacacccag

SEQ ID NO: 111657 - DNA, 22 bp, synthetic construct
  misc_feature 1..22: note = chemically synthesized
  source 1..22: mol_type = other DNA
gaagatctcaaccacacccaga

SEQ ID NO: 111658 - DNA, 22 bp, synthetic construct
  misc_feature 1..22: note = chemically synthesized
  source 1..22: mol_type = other DNA
aagatctcaaccacacccagat

SEQ ID NO: 111659 - DNA, 22 bp, synthetic construct
  misc_feature 1..22: note = chemically synthesized
  source 1..22: mol_type = other DNA
aaccacacccagatagagagtg

SEQ ID NO: 111660 - DNA, 22 bp, synthetic construct
  misc_feature 1..22: note = chemically synthesized
  source 1..22: mol_type = other DNA
ctgtcgggggatgggagtagat

SEQ ID NO: 111661 - DNA, 22 bp, synthetic construct
  misc_feature 1..22: note = chemically synthesized
  source 1..22: mol_type = other DNA
tgtcgggggatgggagtagata

SEQ ID NO: 111662 - DNA, 22 bp, synthetic construct
  misc_feature 1..22: note = chemically synthesized
  source 1..22: mol_type = other DNA
tcgggggatgggagtagataag

SEQ ID NO: 111663 - DNA, 22 bp, synthetic construct
  misc_feature 1..22: note = chemically synthesized
  source 1..22: mol_type = other DNA
actatttttaccagcaggggaa

SEQ ID NO: 111664 - DNA, 22 bp, synthetic construct
  misc_feature 1..22: note = chemically synthesized
  source 1..22: mol_type = other DNA
ctatttttaccagcaggggaaa

SEQ ID NO: 111665 - DNA, 22 bp, synthetic construct
  misc_feature 1..22: note = chemically synthesized
  source 1..22: mol_type = other DNA
tttttaccagcaggggaaacta

SEQ ID NO: 111666 - DNA, 22 bp, synthetic construct
  misc_feature 1..22: note = chemically synthesized
  source 1..22: mol_type = other DNA
ttaccagcaggggaaactaccc

SEQ ID NO: 111667 - DNA, 22 bp, synthetic construct
  misc_feature 1..22: note = chemically synthesized
  source 1..22: mol_type = other DNA
taccagcaggggaaactaccca

SEQ ID NO: 111668 - DNA, 22 bp, synthetic construct
  misc_feature 1..22: note = chemically synthesized
  source 1..22: mol_type = other DNA
accagcaggggaaactacccag

SEQ ID NO: 111669 - DNA, 22 bp, synthetic construct
  misc_feature 1..22: note = chemically synthesized
  source 1..22: mol_type = other DNA
ccagcaggggaaactacccaga

SEQ ID NO: 111670 - DNA, 22 bp, synthetic construct
  misc_feature 1..22: note = chemically synthesized
  source 1..22: mol_type = other DNA
cccagatgaaaatggtgctgga

SEQ ID NO: 111671 - DNA, 22 bp, synthetic construct
  misc_feature 1..22: note = chemically synthesized
  source 1..22: mol_type = other DNA
gatgctttgggcaaaaagccat

SEQ ID NO: 111672 - DNA, 22 bp, synthetic construct
  misc_feature 1..22: note = chemically synthesized
  source 1..22: mol_type = other DNA
tgggcaaaaagccattcagagc

SEQ ID NO: 111673 - DNA, 22 bp, synthetic construct
  misc_feature 1..22: note = chemically synthesized
  source 1..22: mol_type = other DNA
gggcaaaaagccattcagagcc

SEQ ID NO: 111674 - DNA, 22 bp, synthetic construct
  misc_feature 1..22: note = chemically synthesized
  source 1..22: mol_type = other DNA
ggcaaaaagccattcagagcca

SEQ ID NO: 111675 - DNA, 22 bp, synthetic construct
  misc_feature 1..22: note = chemically synthesized
  source 1..22: mol_type = other DNA
agagccataatcaactacgaag

SEQ ID NO: 111676 - DNA, 22 bp, synthetic construct
  misc_feature 1..22: note = chemically synthesized
  source 1..22: mol_type = other DNA
cgaagatggtcaggaatttagt

SEQ ID NO: 111677 - DNA, 22 bp, synthetic construct
  misc_feature 1..22: note = chemically synthesized
  source 1..22: mol_type = other DNA
agtgtatttgtagatcagatga

SEQ ID NO: 111678 - DNA, 22 bp, synthetic construct
  misc_feature 1..22: note = chemically synthesized
  source 1..22: mol_type = other DNA
gtgtatttgtagatcagatgat

SEQ ID NO: 111679 - DNA, 22 bp, synthetic construct
  misc_feature 1..22: note = chemically synthesized
  source 1..22: mol_type = other DNA
gtagatcagatgatcagtctat

SEQ ID NO: 111680 - DNA, 22 bp, synthetic construct
  misc_feature 1..22: note = chemically synthesized
  source 1..22: mol_type = other DNA
tagatcagatgatcagtctatg

SEQ ID NO: 111681 - DNA, 22 bp, synthetic construct
  misc_feature 1..22: note = chemically synthesized
  source 1..22: mol_type = other DNA
tggctttggaaaattgtgaaca

SEQ ID NO: 111682 - DNA, 22 bp, synthetic construct
  misc_feature 1..22: note = chemically synthesized
  source 1..22: mol_type = other DNA
tggaaaattgtgaacattagtt

SEQ ID NO: 111683 - DNA, 22 bp, synthetic construct
  misc_feature 1..22: note = chemically synthesized
  source 1..22: mol_type = other DNA
ggaaaattgtgaacattagttg

SEQ ID NO: 111684 - DNA, 22 bp, synthetic construct
  misc_feature 1..22: note = chemically synthesized
  source 1..22: mol_type = other DNA
gaaaattgtgaacattagttgt

SEQ ID NO: 111685 - DNA, 22 bp, synthetic construct
  misc_feature 1..22: note = chemically synthesized
  source 1..22: mol_type = other DNA
tgaacattagttgttgagcctt

SEQ ID NO: 111686 - DNA, 22 bp, synthetic construct
  misc_feature 1..22: note = chemically synthesized
  source 1..22: mol_type = other DNA
gttgttgagccttataatgaga

SEQ ID NO: 111687 - DNA, 22 bp, synthetic construct
  misc_feature 1..22: note = chemically synthesized
  source 1..22: mol_type = other DNA
ttgagccttataatgagaatgt

SEQ ID NO: 111688 - DNA, 22 bp, synthetic construct
  misc_feature 1..22: note = chemically synthesized
  source 1..22: mol_type = other DNA
agccttataatgagaatgtgat

SEQ ID NO: 111689 - DNA, 22 bp, synthetic construct
  misc_feature 1..22: note = chemically synthesized
  source 1..22: mol_type = other DNA
ataatgagaatgtgatgattaa

SEQ ID NO: 111690 - DNA, 22 bp, synthetic construct
  misc_feature 1..22: note = chemically synthesized
  source 1..22: mol_type = other DNA
taatgagaatgtgatgattaaa

SEQ ID NO: 111691 - DNA, 22 bp, synthetic construct
  misc_feature 1..22: note = chemically synthesized
  source 1..22: mol_type = other DNA
aatcaggtctactggatactat

SEQ ID NO: 111692 - DNA, 22 bp, synthetic construct
  misc_feature 1..22: note = chemically synthesized
  source 1..22: mol_type = other DNA
ctggatactatgaatcagaata

SEQ ID NO: 111693 - DNA, 22 bp, synthetic construct
  misc_feature 1..22: note = chemically synthesized
  source 1..22: mol_type = other DNA
gatactatgaatcagaatagat

SEQ ID NO: 111694 - DNA, 22 bp, synthetic construct
  misc_feature 1..22: note = chemically synthesized
  source 1..22: mol_type = other DNA
tgaatcagaatagataacattg

SEQ ID NO: 111695 - DNA, 22 bp, synthetic construct
  misc_feature 1..22: note = chemically synthesized
  source 1..22: mol_type = other DNA
ttagatataattacctagtcag

SEQ ID NO: 111696 - DNA, 22 bp, synthetic construct
  misc_feature 1..22: note = chemically synthesized
  source 1..22: mol_type = other DNA
gatataattacctagtcagaga

SEQ ID NO: 111697 - DNA, 22 bp, synthetic construct
  misc_feature 1..22: note = chemically synthesized
  source 1..22: mol_type = other DNA
cctagtcagagagcagagatga

SEQ ID NO: 111698 - DNA, 22 bp, synthetic construct
  misc_feature 1..22: note = chemically synthesized
  source 1..22: mol_type = other DNA
gtcagagagcagagatgaagtc

SEQ ID NO: 111699 - DNA, 22 bp, synthetic construct
  misc_feature 1..22: note = chemically synthesized
  source 1..22: mol_type = other DNA
ctggtggcagagtggtggctta

SEQ ID NO: 111700 - DNA, 22 bp, synthetic construct
  misc_feature 1..22: note = chemically synthesized
  source 1..22: mol_type = other DNA
tggtggcagagtggtggcttag

SEQ ID NO: 111701 - DNA, 22 bp, synthetic construct
  misc_feature 1..22: note = chemically synthesized
  source 1..22: mol_type = other DNA
gtggcagagtggtggcttagcc

SEQ ID NO: 111702 - DNA, 22 bp, synthetic construct
  misc_feature 1..22: note = chemically synthesized
  source 1..22: mol_type = other DNA
agcctgctggggcaaaatggag

SEQ ID NO: 111703 - DNA, 22 bp, synthetic construct
  misc_feature 1..22: note = chemically synthesized
  source 1..22: mol_type = other DNA
gcctgctggggcaaaatggagc

SEQ ID NO: 111704 - DNA, 22 bp, synthetic construct
  misc_feature 1..22: note = chemically synthesized
  source 1..22: mol_type = other DNA
ctggggcaaaatggagctcaag

SEQ ID NO: 111705 - DNA, 22 bp, synthetic construct
  misc_feature 1..22: note = chemically synthesized
  source 1..22: mol_type = other DNA
gggcaaaatggagctcaaggcc

SEQ ID NO: 111706 - DNA, 22 bp, synthetic construct
  misc_feature 1..22: note = chemically synthesized
  source 1..22: mol_type = other DNA
aaggccatgagcagatacaaca

SEQ ID NO: 111707 - DNA, 22 bp, synthetic construct
  misc_feature 1..22: note = chemically synthesized
  source 1..22: mol_type = other DNA
tcttcccccatctgattgtaga

SEQ ID NO: 111708 - DNA, 22 bp, synthetic construct
  misc_feature 1..22: note = chemically synthesized
  source 1..22: mol_type = other DNA
cccccatctgattgtagagctt

SEQ ID NO: 111709 - DNA, 22 bp, synthetic construct
  misc_feature 1..22: note = chemically synthesized
  source 1..22: mol_type = other DNA
ccccatctgattgtagagcttt

SEQ ID NO: 111710 - DNA, 22 bp, synthetic construct
  misc_feature 1..22: note = chemically synthesized
  source 1..22: mol_type = other DNA
attgtagagcttttggccatcg

SEQ ID NO: 111711 - DNA, 22 bp, synthetic construct
  misc_feature 1..22: note = chemically synthesized
  source 1..22: mol_type = other DNA
tagagcttttggccatcgacat

SEQ ID NO: 111712 - DNA, 22 bp, synthetic construct
  misc_feature 1..22: note = chemically synthesized
  source 1..22: mol_type = other DNA
ttggccatcgacatgttcttca

SEQ ID NO: 111713 - DNA, 22 bp, synthetic construct
  misc_feature 1..22: note = chemically synthesized
  source 1..22: mol_type = other DNA
tggccatcgacatgttcttcac

SEQ ID NO: 111714 - DNA, 22 bp, synthetic construct
  misc_feature 1..22: note = chemically synthesized
  source 1..22: mol_type = other DNA
ggccatcgacatgttcttcacc

SEQ ID NO: 111715 - DNA, 22 bp, synthetic construct
  misc_feature 1..22: note = chemically synthesized
  source 1..22: mol_type = other DNA
gccatcgacatgttcttcacca

SEQ ID NO: 111716 - DNA, 22 bp, synthetic construct
  misc_feature 1..22: note = chemically synthesized
  source 1..22: mol_type = other DNA
ttcaccacctggttctttgttt

SEQ ID NO: 111717 - DNA, 22 bp, synthetic construct
  misc_feature 1..22: note = chemically synthesized
  source 1..22: mol_type = other DNA
caccacctggttctttgtttac

SEQ ID NO: 111718 - DNA, 22 bp, synthetic construct
  misc_feature 1..22: note = chemically synthesized
  source 1..22: mol_type = other DNA
accacctggttctttgtttacg

SEQ ID NO: 111719 - DNA, 22 bp, synthetic construct
  misc_feature 1..22: note = chemically synthesized
  source 1..22: mol_type = other DNA
gttctttgtttacgaggtcacc

SEQ ID NO: 111720 - DNA, 22 bp, synthetic construct
  misc_feature 1..22: note = chemically synthesized
  source 1..22: mol_type = other DNA
tttgtttacgaggtcacctcta

SEQ ID NO: 111721 - DNA, 22 bp, synthetic construct
  misc_feature 1..22: note = chemically synthesized
  source 1..22: mol_type = other DNA
tgtttacgaggtcacctctacc

SEQ ID NO: 111722 - DNA, 22 bp, synthetic construct
  misc_feature 1..22: note = chemically synthesized
  source 1..22: mol_type = other DNA
gtttacgaggtcacctctacca

SEQ ID NO: 111723 - DNA, 22 bp, synthetic construct
  misc_feature 1..22: note = chemically synthesized
  source 1..22: mol_type = other DNA
tttacgaggtcacctctaccaa

SEQ ID NO: 111724 - DNA, 22 bp, synthetic construct
  misc_feature 1..22: note = chemically synthesized
  source 1..22: mol_type = other DNA
acgaggtcacctctaccaagta

SEQ ID NO: 111725 - DNA, 22 bp, synthetic construct
  misc_feature 1..22: note = chemically synthesized
  source 1..22: mol_type = other DNA
cgaggtcacctctaccaagtac

SEQ ID NO: 111726 - DNA, 22 bp, synthetic construct
  misc_feature 1..22: note = chemically synthesized
  source 1..22: mol_type = other DNA
taccaagtacacttgtgatatc

SEQ ID NO: 111727 - DNA, 22 bp, synthetic construct
  misc_feature 1..22: note = chemically synthesized
  source 1..22: mol_type = other DNA
ccaagtacacttgtgatatcta

SEQ ID NO: 111728 - DNA, 22 bp, synthetic construct
  misc_feature 1..22: note = chemically synthesized
  source 1..22: mol_type = other DNA
gtgatatctataaagagtatct

SEQ ID NO: 111729 - DNA, 22 bp, synthetic construct
  misc_feature 1..22: note = chemically synthesized
  source 1..22: mol_type = other DNA
tgatatctataaagagtatctc

SEQ ID NO: 111730 - DNA, 22 bp, synthetic construct
  misc_feature 1..22: note = chemically synthesized
  source 1..22: mol_type = other DNA
taaagagtatctccttggtggc

SEQ ID NO: 111731 - DNA, 22 bp, synthetic construct
  misc_feature 1..22: note = chemically synthesized
  source 1..22: mol_type = other DNA
cttggtggcctcactcttcatg

SEQ ID NO: 111732 - DNA, 22 bp, synthetic construct
  misc_feature 1..22: note = chemically synthesized
  source 1..22: mol_type = other DNA
ggtggcctcactcttcatgggc

SEQ ID NO: 111733 - DNA, 22 bp, synthetic construct
  misc_feature 1..22: note = chemically synthesized
  source 1..22: mol_type = other DNA
gtggcctcactcttcatgggct

SEQ ID NO: 111734 - DNA, 22 bp, synthetic construct
  misc_feature 1..22: note = chemically synthesized
  source 1..22: mol_type = other DNA
actcttcatgggctttgaagtc

SEQ ID NO: 111735 - DNA, 22 bp, synthetic construct
  misc_feature 1..22: note = chemically synthesized
  source 1..22: mol_type = other DNA
ttcatgggctttgaagtcctct

SEQ ID NO: 111736 - DNA, 22 bp, synthetic construct
  misc_feature 1..22: note = chemically synthesized
  source 1..22: mol_type = other DNA
catgggctttgaagtcctcttc

SEQ ID NO: 111737 - DNA, 22 bp, synthetic construct
  misc_feature 1..22: note = chemically synthesized
  source 1..22: mol_type = other DNA
atgggctttgaagtcctcttcc

SEQ ID NO: 111738 - DNA, 22 bp, synthetic construct
  misc_feature 1..22: note = chemically synthesized
  source 1..22: mol_type = other DNA
tgaagtcctcttcctgatgctc

SEQ ID NO: 111739 - DNA, 22 bp, synthetic construct
  misc_feature 1..22: note = chemically synthesized
  source 1..22: mol_type = other DNA
gaagtcctcttcctgatgctct

SEQ ID NO: 111740 - DNA, 22 bp, synthetic construct
  misc_feature 1..22: note = chemically synthesized
  source 1..22: mol_type = other DNA
aagtcctcttcctgatgctctg

SEQ ID NO: 111741 - DNA, 22 bp, synthetic construct
  misc_feature 1..22: note = chemically synthesized
  source 1..22: mol_type = other DNA
ttcctgatgctctgggttggca

SEQ ID NO: 111742 - DNA, 22 bp, synthetic construct
  misc_feature 1..22: note = chemically synthesized
  source 1..22: mol_type = other DNA
cctgatgctctgggttggcatc

SEQ ID NO: 111743 - DNA, 22 bp, synthetic construct
  misc_feature 1..22: note = chemically synthesized
  source 1..22: mol_type = other DNA
ctgatgctctgggttggcatct

SEQ ID NO: 111744 - DNA, 22 bp, synthetic construct
  misc_feature 1..22: note = chemically synthesized
  source 1..22: mol_type = other DNA
atgctctgggttggcatctaca

SEQ ID NO: 111745 - DNA, 22 bp, synthetic construct
  misc_feature 1..22: note = chemically synthesized
  source 1..22: mol_type = other DNA
tgggttggcatctacatgtgag

SEQ ID NO: 111746 - DNA, 22 bp, synthetic construct
  misc_feature 1..22: note = chemically synthesized
  source 1..22: mol_type = other DNA
ggttggcatctacatgtgagtg

SEQ ID NO: 111747 - DNA, 22 bp, synthetic construct
  misc_feature 1..22: note = chemically synthesized
  source 1..22: mol_type = other DNA
gcatctacatgtgagtgcccaa

SEQ ID NO: 111748 - DNA, 22 bp, synthetic construct
  misc_feature 1..22: note = chemically synthesized
  source 1..22: mol_type = other DNA
catgtgagtgcccaagagtaac

SEQ ID NO: 111749 - DNA, 22 bp, synthetic construct
  misc_feature 1..22: note = chemically synthesized
  source 1..22: mol_type = other DNA
cactgaatccctgcttttgtaa

SEQ ID NO: 111750 - DNA, 22 bp, synthetic construct
  misc_feature 1..22: note = chemically synthesized
  source 1..22: mol_type = other DNA
actgaatccctgcttttgtaaa

SEQ ID NO: 111751 - DNA, 22 bp, synthetic construct
  misc_feature 1..22: note = chemically synthesized
  source 1..22: mol_type = other DNA
aatccctgcttttgtaaattaa

SEQ ID NO: 111752 - DNA, 22 bp, synthetic construct
  misc_feature 1..22: note = chemically synthesized
  source 1..22: mol_type = other DNA
cttttgtaaattaagttttctt

SEQ ID NO: 111753 - DNA, 22 bp, synthetic construct
  misc_feature 1..22: note = chemically synthesized
  source 1..22: mol_type = other DNA
ttgtaaattaagttttctttct

SEQ ID NO: 111754 - DNA, 22 bp, synthetic construct
  misc_feature 1..22: note = chemically synthesized
  source 1..22: mol_type = other DNA
tgtaaattaagttttctttcta

SEQ ID NO: 111755 - DNA, 22 bp, synthetic construct
  misc_feature 1..22: note = chemically synthesized
  source 1..22: mol_type = other DNA
gtaaattaagttttctttctat

SEQ ID NO: 111756 - DNA, 22 bp, synthetic construct
  misc_feature 1..22: note = chemically synthesized
  source 1..22: mol_type = other DNA
taaattaagttttctttctatt

SEQ ID NO: 111757 - DNA, 22 bp, synthetic construct
  misc_feature 1..22: note = chemically synthesized
  source 1..22: mol_type = other DNA
agttttctttctattgctggaa

SEQ ID NO: 111758 - DNA, 22 bp, synthetic construct
  misc_feature 1..22: note = chemically synthesized
  source 1..22: mol_type = other DNA
tctttctattgctggaagtgtc

SEQ ID NO: 111759 - DNA, 22 bp, synthetic construct
  misc_feature 1..22: note = chemically synthesized
  source 1..22: mol_type = other DNA
ctttctattgctggaagtgtcc

SEQ ID NO: 111760 - DNA, 22 bp, synthetic construct
  misc_feature 1..22: note = chemically synthesized
  source 1..22: mol_type = other DNA
tttctattgctggaagtgtccc

SEQ ID NO: 111761 - DNA, 22 bp, synthetic construct
  misc_feature 1..22: note = chemically synthesized
  source 1..22: mol_type = other DNA
tctattgctggaagtgtcccgc

SEQ ID NO: 111762 - DNA, 22 bp, synthetic construct
  misc_feature 1..22: note = chemically synthesized
  source 1..22: mol_type = other DNA
ctattgctggaagtgtcccgcc

SEQ ID NO: 111763 - DNA, 22 bp, synthetic construct
  misc_feature 1..22: note = chemically synthesized
  source 1..22: mol_type = other DNA
tattgctggaagtgtcccgcct

SEQ ID NO: 111764 - DNA, 22 bp, synthetic construct
  misc_feature 1..22: note = chemically synthesized
  source 1..22: mol_type = other DNA
ttgctggaagtgtcccgcctgt

SEQ ID NO: 111765 - DNA, 22 bp, synthetic construct
  misc_feature 1..22: note = chemically synthesized
  source 1..22: mol_type = other DNA
ctggaagtgtcccgcctgttgc

SEQ ID NO: 111766 - DNA, 22 bp, synthetic construct
  misc_feature 1..22: note = chemically synthesized
  source 1..22: mol_type = other DNA
gaagtgtcccgcctgttgctta

SEQ ID NO: 111767 - DNA, 22 bp, synthetic construct
  misc_feature 1..22: note = chemically synthesized
  source 1..22: mol_type = other DNA
ttgcttataataaatgcagatg

SEQ ID NO: 111768 - DNA, 22 bp, synthetic construct
  misc_feature 1..22: note = chemically synthesized
  source 1..22: mol_type = other DNA
cttataataaatgcagatgtat

SEQ ID NO: 111769 - DNA, 22 bp, synthetic construct
  misc_feature 1..22: note = chemically synthesized
  source 1..22: mol_type = other DNA
ataataaatgcagatgtatggc

SEQ ID NO: 111770 - DNA, 22 bp, synthetic construct
  misc_feature 1..22: note = chemically synthesized
  source 1..22: mol_type = other DNA
taataaatgcagatgtatggca

SEQ ID NO: 111771 - DNA, 22 bp, synthetic construct
  misc_feature 1..22: note = chemically synthesized
  source 1..22: mol_type = other DNA
aaaaaaaaaaagaaataataga

SEQ ID NO: 111772 - DNA, 22 bp, synthetic construct
  misc_feature 1..22: note = chemically synthesized
  source 1..22: mol_type = other DNA
ggcagggattggggcatgaagg

SEQ ID NO: 111773 - DNA, 22 bp, synthetic construct
  misc_feature 1..22: note = chemically synthesized
  source 1..22: mol_type = other DNA
gggcatgaaggttgaaaacaag

SEQ ID NO: 111774 - DNA, 22 bp, synthetic construct
  misc_feature 1..22: note = chemically synthesized
  source 1..22: mol_type = other DNA
aaaacaaggaaaaggagcccaa

SEQ ID NO: 111775 - DNA, 22 bp, synthetic construct
  misc_feature 1..22: note = chemically synthesized
  source 1..22: mol_type = other DNA
taaaatgtgctaagtagatgtc

SEQ ID NO: 111776 - DNA, 22 bp, synthetic construct
  misc_feature 1..22: note = chemically synthesized
  source 1..22: mol_type = other DNA
agtagatgtctgagtggcattc

SEQ ID NO: 111777 - DNA, 22 bp, synthetic construct
  misc_feature 1..22: note = chemically synthesized
  source 1..22: mol_type = other DNA
agtggcattcctccatgagaga

SEQ ID NO: 111778 - DNA, 22 bp, synthetic construct
  misc_feature 1..22: note = chemically synthesized
  source 1..22: mol_type = other DNA
ctccatgagagaaagcttaagg

SEQ ID NO: 111779 - DNA, 22 bp, synthetic construct
  misc_feature 1..22: note = chemically synthesized
  source 1..22: mol_type = other DNA
catgagagaaagcttaagggaa

SEQ ID NO: 111780 - DNA, 22 bp, synthetic construct
  misc_feature 1..22: note = chemically synthesized
  source 1..22: mol_type = other DNA
aagggaagaaagagaccctgag

SEQ ID NO: 111781 - DNA, 22 bp, synthetic construct
  misc_feature 1..22: note = chemically synthesized
  source 1..22: mol_type = other DNA
agggaagaaagagaccctgagt

SEQ ID NO: 111782 - DNA, 22 bp, synthetic construct
  misc_feature 1..22: note = chemically synthesized
  source 1..22: mol_type = other DNA
agtgtcttcaaaactcaaagtt

SEQ ID NO: 111783 - DNA, 22 bp, synthetic construct
  misc_feature 1..22: note = chemically synthesized
  source 1..22: mol_type = other DNA
caaaactcaaagttttacgaac

SEQ ID NO: 111784 - DNA, 22 bp, synthetic construct
  misc_feature 1..22: note = chemically synthesized
  source 1..22: mol_type = other DNA
aaaactcaaagttttacgaaca

SEQ ID NO: 111785 - DNA, 22 bp, synthetic construct
  misc_feature 1..22: note = chemically synthesized
  source 1..22: mol_type = other DNA
aaagttttacgaacagaatgat

SEQ ID NO: 111786 - DNA, 22 bp, synthetic construct
  misc_feature 1..22: note = chemically synthesized
  source 1..22: mol_type = other DNA
tacgaacagaatgattagtctg

SEQ ID NO: 111787 - DNA, 22 bp, synthetic construct
  misc_feature 1..22: note = chemically synthesized
  source 1..22: mol_type = other DNA
acgaacagaatgattagtctgg

SEQ ID NO: 111788 - DNA, 22 bp, synthetic construct
  misc_feature 1..22: note = chemically synthesized
  source 1..22: mol_type = other DNA
cgaacagaatgattagtctgga

SEQ ID NO: 111789 - DNA, 22 bp, synthetic construct
  misc_feature 1..22: note = chemically synthesized
  source 1..22: mol_type = other DNA
gtctggagaaatcatttttcat

SEQ ID NO: 111790 - DNA, 22 bp, synthetic construct
  misc_feature 1..22: note = chemically synthesized
  source 1..22: mol_type = other DNA
gagaaatcatttttcatcaata

SEQ ID NO: 111791 - DNA, 22 bp, synthetic construct
  misc_feature 1..22: note = chemically synthesized
  source 1..22: mol_type = other DNA
ttcatcaatacaggatctcaag

SEQ ID NO: 111792 - DNA, 22 bp, synthetic construct
  misc_feature 1..22: note = chemically synthesized
  source 1..22: mol_type = other DNA
tcatcaatacaggatctcaagt

SEQ ID NO: 111793 - DNA, 22 bp, synthetic construct
  misc_feature 1..22: note = chemically synthesized
  source 1..22: mol_type = other DNA
catcaatacaggatctcaagtg

SEQ ID NO: 111794 - DNA, 22 bp, synthetic construct
  misc_feature 1..22: note = chemically synthesized
  source 1..22: mol_type = other DNA
atcaatacaggatctcaagtgt

SEQ ID NO: 111795 - DNA, 22 bp, synthetic construct
  misc_feature 1..22: note = chemically synthesized
  source 1..22: mol_type = other DNA
aagtgtttccccacaacgaacc

SEQ ID NO: 111796 - DNA, 22 bp, synthetic construct
  misc_feature 1..22: note = chemically synthesized
  source 1..22: mol_type = other DNA
ccccacaacgaacccaacccct

SEQ ID NO: 111797 - DNA, 22 bp, synthetic construct
  misc_feature 1..22: note = chemically synthesized
  source 1..22: mol_type = other DNA
cccacaacgaacccaacccctc

SEQ ID NO: 111798 - DNA, 22 bp, synthetic construct
  misc_feature 1..22: note = chemically synthesized
  source 1..22: mol_type = other DNA
acacacacacacacacacacac

SEQ ID NO: 111799 - DNA, 22 bp, synthetic construct
  misc_feature 1..22: note = chemically synthesized
  source 1..22: mol_type = other DNA
ttcaagtcatgatgcagcagta

SEQ ID NO: 111800 - DNA, 22 bp, synthetic construct
  misc_feature 1..22: note = chemically synthesized
  source 1..22: mol_type = other DNA
tcaagtcatgatgcagcagtat

SEQ ID NO: 111801 - DNA, 22 bp, synthetic construct
  misc_feature 1..22: note = chemically synthesized
  source 1..22: mol_type = other DNA
caagtcatgatgcagcagtatt

SEQ ID NO: 111802 - DNA, 22 bp, synthetic construct
  misc_feature 1..22: note = chemically synthesized
  source 1..22: mol_type = other DNA
aagtcatgatgcagcagtattg

SEQ ID NO: 111803 - DNA, 22 bp, synthetic construct
  misc_feature 1..22: note = chemically synthesized
  source 1..22: mol_type = other DNA
gaattacagttttttttggttt

SEQ ID NO: 111804 - DNA, 22 bp, synthetic construct
  misc_feature 1..22: note = chemically synthesized
  source 1..22: mol_type = other DNA
cagttttttttggtttttgttt

SEQ ID NO: 111805 - DNA, 22 bp, synthetic construct
  misc_feature 1..22: note = chemically synthesized
  source 1..22: mol_type = other DNA
tttttggtttttgttttttttt

SEQ ID NO: 111806 - DNA, 22 bp, synthetic construct
  misc_feature 1..22: note = chemically synthesized
  source 1..22: mol_type = other DNA
ttttggtttttgttttttttta

SEQ ID NO: 111807 - DNA, 22 bp, synthetic construct
  misc_feature 1..22: note = chemically synthesized
  source 1..22: mol_type = other DNA
tttggtttttgtttttttttac

SEQ ID NO: 111808 - DNA, 22 bp, synthetic construct
  misc_feature 1..22: note = chemically synthesized
  source 1..22: mol_type = other DNA
ttggtttttgtttttttttact

SEQ ID NO: 111809 - DNA, 22 bp, synthetic construct
  misc_feature 1..22: note = chemically synthesized
  source 1..22: mol_type = other DNA
tggtttttgtttttttttactt

SEQ ID NO: 111810 - DNA, 22 bp, synthetic construct
  misc_feature 1..22: note = chemically synthesized
  source 1..22: mol_type = other DNA
ggtttttgtttttttttacttc

SEQ ID NO: 111811 - DNA, 22 bp, synthetic construct
  misc_feature 1..22: note = chemically synthesized
  source 1..22: mol_type = other DNA
gtttttgtttttttttacttca

SEQ ID NO: 111812 - DNA, 22 bp, synthetic construct
  misc_feature 1..22: note = chemically synthesized
  source 1..22: mol_type = other DNA
ttgtttttttttacttcaagct

SEQ ID NO: 111813 - DNA, 22 bp, synthetic construct
  misc_feature 1..22: note = chemically synthesized
  source 1..22: mol_type = other DNA
tgtttttttttacttcaagcta

SEQ ID NO: 111814 - DNA, 22 bp, synthetic construct
  misc_feature 1..22: note = chemically synthesized
  source 1..22: mol_type = other DNA
gtttttttttacttcaagctat

SEQ ID NO: 111815 - DNA, 22 bp, synthetic construct
  misc_feature 1..22: note = chemically synthesized
  source 1..22: mol_type = other DNA
tttttttttacttcaagctatg

SEQ ID NO: 111816 - DNA, 22 bp, synthetic construct
  misc_feature 1..22: note = chemically synthesized
  source 1..22: mol_type = other DNA
ttttttacttcaagctatggtg

SEQ ID NO: 111817 - DNA, 22 bp, synthetic construct
  misc_feature 1..22: note = chemically synthesized
  source 1..22: mol_type = other DNA
tttttacttcaagctatggtgt

SEQ ID NO: 111818 - DNA, 22 bp, synthetic construct
  misc_feature 1..22: note = chemically synthesized
  source 1..22: mol_type = other DNA
ttttacttcaagctatggtgtt

SEQ ID NO: 111819 - DNA, 22 bp, synthetic construct
  misc_feature 1..22: note = chemically synthesized
  source 1..22: mol_type = other DNA
tttacttcaagctatggtgttg

SEQ ID NO: 111820 - DNA, 22 bp, synthetic construct
  misc_feature 1..22: note = chemically synthesized
  source 1..22: mol_type = other DNA
ttacttcaagctatggtgttga

SEQ ID NO: 111821 - DNA, 22 bp, synthetic construct
  misc_feature 1..22: note = chemically synthesized
  source 1..22: mol_type = other DNA
tacttcaagctatggtgttgag

SEQ ID NO: 111822 - DNA, 22 bp, synthetic construct
  misc_feature 1..22: note = chemically synthesized
  source 1..22: mol_type = other DNA
acttcaagctatggtgttgagt

SEQ ID NO: 111823 - DNA, 22 bp, synthetic construct
  misc_feature 1..22: note = chemically synthesized
  source 1..22: mol_type = other DNA
cttcaagctatggtgttgagta

SEQ ID NO: 111824 - DNA, 22 bp, synthetic construct
  misc_feature 1..22: note = chemically synthesized
  source 1..22: mol_type = other DNA
caagctatggtgttgagtacat

SEQ ID NO: 111825 - DNA, 22 bp, synthetic construct
  misc_feature 1..22: note = chemically synthesized
  source 1..22: mol_type = other DNA
aagctatggtgttgagtacatg

SEQ ID NO: 111826 - DNA, 22 bp, synthetic construct
  misc_feature 1..22: note = chemically synthesized
  source 1..22: mol_type = other DNA
tggtgttgagtacatgatccta

SEQ ID NO: 111827 - DNA, 22 bp, synthetic construct
  misc_feature 1..22: note = chemically synthesized
  source 1..22: mol_type = other DNA
agtacatgatcctaatcaccaa

SEQ ID NO: 111828 - DNA, 22 bp, synthetic construct
  misc_feature 1..22: note = chemically synthesized
  source 1..22: mol_type = other DNA
atcaccaattaattgttccttt

SEQ ID NO: 111829 - DNA, 22 bp, synthetic construct
  misc_feature 1..22: note = chemically synthesized
  source 1..22: mol_type = other DNA
attgttcctttaagcccttaac

SEQ ID NO: 111830 - DNA, 22 bp, synthetic construct
  misc_feature 1..22: note = chemically synthesized
  source 1..22: mol_type = other DNA
ttcctttaagcccttaacctct

SEQ ID NO: 111831 - DNA, 22 bp, synthetic construct
  misc_feature 1..22: note = chemically synthesized
  source 1..22: mol_type = other DNA
ctttaagcccttaacctcttga

SEQ ID NO: 111832 - DNA, 22 bp, synthetic construct
  misc_feature 1..22: note = chemically synthesized
  source 1..22: mol_type = other DNA
taagcccttaacctcttgacac

SEQ ID NO: 111833 - DNA, 22 bp, synthetic construct
  misc_feature 1..22: note = chemically synthesized
  source 1..22: mol_type = other DNA
aagcccttaacctcttgacaca

SEQ ID NO: 111834 - DNA, 22 bp, synthetic construct
  misc_feature 1..22: note = chemically synthesized
  source 1..22: mol_type = other DNA
agcccttaacctcttgacacac

SEQ ID NO: 111835 - DNA, 22 bp, synthetic construct
  misc_feature 1..22: note = chemically synthesized
  source 1..22: mol_type = other DNA
aacctcttgacacacatacaca

SEQ ID NO: 111836 - DNA, 22 bp, synthetic construct
  misc_feature 1..22: note = chemically synthesized
  source 1..22: mol_type = other DNA
acctcttgacacacatacacac

SEQ ID NO: 111837 - DNA, 22 bp, synthetic construct
  misc_feature 1..22: note = chemically synthesized
  source 1..22: mol_type = other DNA
ttgacacacatacacacacact

SEQ ID NO: 111838 - DNA, 22 bp, synthetic construct
  misc_feature 1..22: note = chemically synthesized
  source 1..22: mol_type = other DNA
gacacacatacacacacactct

SEQ ID NO: 111839 - DNA, 22 bp, synthetic construct
  misc_feature 1..22: note = chemically synthesized
  source 1..22: mol_type = other DNA
acacacatacacacacactctc

SEQ ID NO: 111840 - DNA, 22 bp, synthetic construct
  misc_feature 1..22: note = chemically synthesized
  source 1..22: mol_type = other DNA
tctctctcacacaaaagcgcca

SEQ ID NO: 111841 - DNA, 22 bp, synthetic construct
  misc_feature 1..22: note = chemically synthesized
  source 1..22: mol_type = other DNA
tctctcacacaaaagcgccaca

SEQ ID NO: 111842 - DNA, 22 bp, synthetic construct
  misc_feature 1..22: note = chemically synthesized
  source 1..22: mol_type = other DNA
tctcacacaaaagcgccacaca

SEQ ID NO: 111843 - DNA, 22 bp, synthetic construct
  misc_feature 1..22: note = chemically synthesized
  source 1..22: mol_type = other DNA
tcacacaaaagcgccacacaca

SEQ ID NO: 111844 - DNA, 22 bp, synthetic construct
  misc_feature 1..22: note = chemically synthesized
  source 1..22: mol_type = other DNA
acacaaaagcgccacacacaca

SEQ ID NO: 111845 - DNA, 22 bp, synthetic construct
  misc_feature 1..22: note = chemically synthesized
  source 1..22: mol_type = other DNA
agctccatgaggtacactcact

SEQ ID NO: 111846 - DNA, 22 bp, synthetic construct
  misc_feature 1..22: note = chemically synthesized
  source 1..22: mol_type = other DNA
catgaggtacactcactacttt

SEQ ID NO: 111847 - DNA, 22 bp, synthetic construct
  misc_feature 1..22: note = chemically synthesized
  source 1..22: mol_type = other DNA
actacttttattaaaccaagca

SEQ ID NO: 111848 - DNA, 22 bp, synthetic construct
  misc_feature 1..22: note = chemically synthesized
  source 1..22: mol_type = other DNA
cttttattaaaccaagcacaga

SEQ ID NO: 111849 - DNA, 22 bp, synthetic construct
  misc_feature 1..22: note = chemically synthesized
  source 1..22: mol_type = other DNA
ttattaaaccaagcacagatac

SEQ ID NO: 111850 - DNA, 22 bp, synthetic construct
  misc_feature 1..22: note = chemically synthesized
  source 1..22: mol_type = other DNA
tattaaaccaagcacagatacc

SEQ ID NO: 111851 - DNA, 22 bp, synthetic construct
  misc_feature 1..22: note = chemically synthesized
  source 1..22: mol_type = other DNA
attaaaccaagcacagatacca

SEQ ID NO: 111852 - DNA, 22 bp, synthetic construct
  misc_feature 1..22: note = chemically synthesized
  source 1..22: mol_type = other DNA
ttaaaccaagcacagataccaa

SEQ ID NO: 111853 - DNA, 22 bp, synthetic construct
  misc_feature 1..22: note = chemically synthesized
  source 1..22: mol_type = other DNA
aaccaagcacagataccaagtt

SEQ ID NO: 111854 - DNA, 22 bp, synthetic construct
  misc_feature 1..22: note = chemically synthesized
  source 1..22: mol_type = other DNA
ttgagtgtgaatgcagaaagaa

SEQ ID NO: 111855 - DNA, 22 bp, synthetic construct
  misc_feature 1..22: note = chemically synthesized
  source 1..22: mol_type = other DNA
tgagtgtgaatgcagaaagaag

SEQ ID NO: 111856 - DNA, 22 bp, synthetic construct
  misc_feature 1..22: note = chemically synthesized
  source 1..22: mol_type = other DNA
gagtgtgaatgcagaaagaaga

SEQ ID NO: 111857 - DNA, 22 bp, synthetic construct
  misc_feature 1..22: note = chemically synthesized
  source 1..22: mol_type = other DNA
agtgtgaatgcagaaagaagat

SEQ ID NO: 111858 - DNA, 22 bp, synthetic construct
  misc_feature 1..22: note = chemically synthesized
  source 1..22: mol_type = other DNA
aggtagatttttctcatagata

SEQ ID NO: 111859 - DNA, 22 bp, synthetic construct
  misc_feature 1..22: note = chemically synthesized
  source 1..22: mol_type = other DNA
ttctcatagatactactaagat

SEQ ID NO: 111860 - DNA, 22 bp, synthetic construct
  misc_feature 1..22: note = chemically synthesized
  source 1..22: mol_type = other DNA
tctcatagatactactaagatt

SEQ ID NO: 111861 - DNA, 22 bp, synthetic construct
  misc_feature 1..22: note = chemically synthesized
  source 1..22: mol_type = other DNA
ctcatagatactactaagatta

SEQ ID NO: 111862 - DNA, 22 bp, synthetic construct
  misc_feature 1..22: note = chemically synthesized
  source 1..22: mol_type = other DNA
tcatagatactactaagattat

SEQ ID NO: 111863 - DNA, 22 bp, synthetic construct
  misc_feature 1..22: note = chemically synthesized
  source 1..22: mol_type = other DNA
atagatactactaagattatat

SEQ ID NO: 111864 - DNA, 22 bp, synthetic construct
  misc_feature 1..22: note = chemically synthesized
  source 1..22: mol_type = other DNA
ctaagattatattgtctggaat

SEQ ID NO: 111865 - DNA, 22 bp, synthetic construct
  misc_feature 1..22: note = chemically synthesized
  source 1..22: mol_type = other DNA
agattatattgtctggaatctt

SEQ ID NO: 111866 - DNA, 22 bp, synthetic construct
  misc_feature 1..22: note = chemically synthesized
  source 1..22: mol_type = other DNA
tattgtctggaatcttatgtga

SEQ ID NO: 111867 - DNA, 22 bp, synthetic construct
  misc_feature 1..22: note = chemically synthesized
  source 1..22: mol_type = other DNA
tctggaatcttatgtgacacag

SEQ ID NO: 111868 - DNA, 22 bp, synthetic construct
  misc_feature 1..22: note = chemically synthesized
  source 1..22: mol_type = other DNA
gaatcttatgtgacacagaaaa

SEQ ID NO: 111869 - DNA, 22 bp, synthetic construct
  misc_feature 1..22: note = chemically synthesized
  source 1..22: mol_type = other DNA
atgtgacacagaaaaagaacaa

SEQ ID NO: 111870 - DNA, 22 bp, synthetic construct
  misc_feature 1..22: note = chemically synthesized
  source 1..22: mol_type = other DNA
tgtgacacagaaaaagaacaac

SEQ ID NO: 111871 - DNA, 22 bp, synthetic construct
  misc_feature 1..22: note = chemically synthesized
  source 1..22: mol_type = other DNA
tgccatttggccatttgcttgt

SEQ ID NO: 111872 - DNA, 22 bp, synthetic construct
  misc_feature 1..22: note = chemically synthesized
  source 1..22: mol_type = other DNA
ccatttggccatttgcttgtgt

SEQ ID NO: 111873 - DNA, 22 bp, synthetic construct
  misc_feature 1..22: note = chemically synthesized
  source 1..22: mol_type = other DNA
ggccatttgcttgtgtttggac

SEQ ID NO: 111874 - DNA, 22 bp, synthetic construct
  misc_feature 1..22: note = chemically synthesized
  source 1..22: mol_type = other DNA
gccatttgcttgtgtttggact

SEQ ID NO: 111875 - DNA, 22 bp, synthetic construct
  misc_feature 1..22: note = chemically synthesized
  source 1..22: mol_type = other DNA
gcttgtgtttggacttgtgaag

SEQ ID NO: 111876 - DNA, 22 bp, synthetic construct
  misc_feature 1..22: note = chemically synthesized
  source 1..22: mol_type = other DNA
cttgtgtttggacttgtgaagg

SEQ ID NO: 111877 - DNA, 22 bp, synthetic construct
  misc_feature 1..22: note = chemically synthesized
  source 1..22: mol_type = other DNA
gtgtttggacttgtgaaggtct

SEQ ID NO: 111878 - DNA, 22 bp, synthetic construct
  misc_feature 1..22: note = chemically synthesized
  source 1..22: mol_type = other DNA
tgtttggacttgtgaaggtctt

SEQ ID NO: 111879 - DNA, 22 bp, synthetic construct
  misc_feature 1..22: note = chemically synthesized
  source 1..22: mol_type = other DNA
ggacttgtgaaggtctttccat

SEQ ID NO: 111880 - DNA, 22 bp, synthetic construct
  misc_feature 1..22: note = chemically synthesized
  source 1..22: mol_type = other DNA
gacttgtgaaggtctttccatc

SEQ ID NO: 111881 - DNA, 22 bp, synthetic construct
  misc_feature 1..22: note = chemically synthesized
  source 1..22: mol_type = other DNA
gtgaaggtctttccatcattct

SEQ ID NO: 111882 - DNA, 22 bp, synthetic construct
  misc_feature 1..22: note = chemically synthesized
  source 1..22: mol_type = other DNA
tgaaggtctttccatcattctg

SEQ ID NO: 111883 - DNA, 22 bp, synthetic construct
  misc_feature 1..22: note = chemically synthesized
  source 1..22: mol_type = other DNA
tccatcattctgttattggaaa

SEQ ID NO: 111884 - DNA, 22 bp, synthetic construct
  misc_feature 1..22: note = chemically synthesized
  source 1..22: mol_type = other DNA
ccatcattctgttattggaaag

SEQ ID NO: 111885 - DNA, 22 bp, synthetic construct
  misc_feature 1..22: note = chemically synthesized
  source 1..22: mol_type = other DNA
catcattctgttattggaaagc

SEQ ID NO: 111886 - DNA, 22 bp, synthetic construct
  misc_feature 1..22: note = chemically synthesized
  source 1..22: mol_type = other DNA
tgttattggaaagcgggaaagt

SEQ ID NO: 111887 - DNA, 22 bp, synthetic construct
  misc_feature 1..22: note = chemically synthesized
  source 1..22: mol_type = other DNA
ttattggaaagcgggaaagtag

SEQ ID NO: 111888 - DNA, 22 bp, synthetic construct
  misc_feature 1..22: note = chemically synthesized
  source 1..22: mol_type = other DNA
ttggaaagcgggaaagtagcat

SEQ ID NO: 111889 - DNA, 22 bp, synthetic construct
  misc_feature 1..22: note = chemically synthesized
  source 1..22: mol_type = other DNA
gaaagcgggaaagtagcatttt

SEQ ID NO: 111890 - DNA, 22 bp, synthetic construct
  misc_feature 1..22: note = chemically synthesized
  source 1..22: mol_type = other DNA
tcatgaggattctattaaaaac

SEQ ID NO: 111891 - DNA, 22 bp, synthetic construct
  misc_feature 1..22: note = chemically synthesized
  source 1..22: mol_type = other DNA
catgaggattctattaaaaact

SEQ ID NO: 111892 - DNA, 22 bp, synthetic construct
  misc_feature 1..22: note = chemically synthesized
  source 1..22: mol_type = other DNA
atgaggattctattaaaaacta

SEQ ID NO: 111893 - DNA, 22 bp, synthetic construct
  misc_feature 1..22: note = chemically synthesized
  source 1..22: mol_type = other DNA
tattaaaaactagggaccatat

SEQ ID NO: 111894 - DNA, 22 bp, synthetic construct
  misc_feature 1..22: note = chemically synthesized
  source 1..22: mol_type = other DNA
ttaaaaactagggaccatatgc

SEQ ID NO: 111895 - DNA, 22 bp, synthetic construct
  misc_feature 1..22: note = chemically synthesized
  source 1..22: mol_type = other DNA
aaaactagggaccatatgcaat

SEQ ID NO: 111896 - DNA, 22 bp, synthetic construct
  misc_feature 1..22: note = chemically synthesized
  source 1..22: mol_type = other DNA
gggaccatatgcaatacatcca

SEQ ID NO: 111897 - DNA, 22 bp, synthetic construct
  misc_feature 1..22: note = chemically synthesized
  source 1..22: mol_type = other DNA
tatttagtgtacaatagaaagc

SEQ ID NO: 111898 - DNA, 22 bp, synthetic construct
  misc_feature 1..22: note = chemically synthesized
  source 1..22: mol_type = other DNA
agtgtacaatagaaagcaatta

SEQ ID NO: 111899 - DNA, 22 bp, synthetic construct
  misc_feature 1..22: note = chemically synthesized
  source 1..22: mol_type = other DNA
gtgtacaatagaaagcaattac

SEQ ID NO: 111900 - DNA, 22 bp, synthetic construct
  misc_feature 1..22: note = chemically synthesized
  source 1..22: mol_type = other DNA
ccatagcaattatgttccctag

SEQ ID NO: 111901 - DNA, 22 bp, synthetic construct
  misc_feature 1..22: note = chemically synthesized
  source 1..22: mol_type = other DNA
tgttccctagctgtcttctctc

SEQ ID NO: 111902 - DNA, 22 bp, synthetic construct
  misc_feature 1..22: note = chemically synthesized
  source 1..22: mol_type = other DNA
cctagctgtcttctctctttgc

SEQ ID NO: 111903 - DNA, 22 bp, synthetic construct
  misc_feature 1..22: note = chemically synthesized
  source 1..22: mol_type = other DNA
gctgtcttctctctttgcaaac

SEQ ID NO: 111904 - DNA, 22 bp, synthetic construct
  misc_feature 1..22: note = chemically synthesized
  source 1..22: mol_type = other DNA
tcttctctctttgcaaacccca

SEQ ID NO: 111905 - DNA, 22 bp, synthetic construct
  misc_feature 1..22: note = chemically synthesized
  source 1..22: mol_type = other DNA
ctctctttgcaaaccccagccc

SEQ ID NO: 111906 - DNA, 22 bp, synthetic construct
  misc_feature 1..22: note = chemically synthesized
  source 1..22: mol_type = other DNA
tctctttgcaaaccccagcccc

SEQ ID NO: 111907 - DNA, 22 bp, synthetic construct
  misc_feature 1..22: note = chemically synthesized
  source 1..22: mol_type = other DNA
tctttgcaaaccccagccccca

SEQ ID NO: 111908 - DNA, 22 bp, synthetic construct
  misc_feature 1..22: note = chemically synthesized
  source 1..22: mol_type = other DNA
tttgcaaaccccagcccccact

SEQ ID NO: 111909 - DNA, 22 bp, synthetic construct
  misc_feature 1..22: note = chemically synthesized
  source 1..22: mol_type = other DNA
tgcaaaccccagcccccactca

SEQ ID NO: 111910 - DNA, 22 bp, synthetic construct
  misc_feature 1..22: note = chemically synthesized
  source 1..22: mol_type = other DNA
gcaaaccccagcccccactcag

SEQ ID NO: 111911 - DNA, 22 bp, synthetic construct
  misc_feature 1..22: note = chemically synthesized
  source 1..22: mol_type = other DNA
caaaccccagcccccactcagc

SEQ ID NO: 111912 - DNA, 22 bp, synthetic construct
  misc_feature 1..22: note = chemically synthesized
  source 1..22: mol_type = other DNA
agcatgacatggcaggtataaa

SEQ ID NO: 111913 - DNA, 22 bp, synthetic construct
  misc_feature 1..22: note = chemically synthesized
  source 1..22: mol_type = other DNA
agacccatttctgtaaaggagg

SEQ ID NO: 111914 - DNA, 22 bp, synthetic construct
  misc_feature 1..22: note = chemically synthesized
  source 1..22: mol_type = other DNA
ctgtaaaggaggagaagcttgt

SEQ ID NO: 111915 - DNA, 22 bp, synthetic construct
  misc_feature 1..22: note = chemically synthesized
  source 1..22: mol_type = other DNA
tgtaaaggaggagaagcttgtg

SEQ ID NO: 111916 - DNA, 22 bp, synthetic construct
  misc_feature 1..22: note = chemically synthesized
  source 1..22: mol_type = other DNA
taaaggaggagaagcttgtgtt

SEQ ID NO: 111917 - DNA, 22 bp, synthetic construct
  misc_feature 1..22: note = chemically synthesized
  source 1..22: mol_type = other DNA
gtgttaggaatggaagaatgcc

SEQ ID NO: 111918 - DNA, 22 bp, synthetic construct
  misc_feature 1..22: note = chemically synthesized
  source 1..22: mol_type = other DNA
tgttaggaatggaagaatgcct

SEQ ID NO: 111919 - DNA, 22 bp, synthetic construct
  misc_feature 1..22: note = chemically synthesized
  source 1..22: mol_type = other DNA
ggaatggaagaatgcctgggct

SEQ ID NO: 111920 - DNA, 22 bp, synthetic construct
  misc_feature 1..22: note = chemically synthesized
  source 1..22: mol_type = other DNA
ggctggagaacagggcttcaca

SEQ ID NO: 111921 - DNA, 22 bp, synthetic construct
  misc_feature 1..22: note = chemically synthesized
  source 1..22: mol_type = other DNA
gagaacagggcttcacaacagt

SEQ ID NO: 111922 - DNA, 22 bp, synthetic construct
  misc_feature 1..22: note = chemically synthesized
  source 1..22: mol_type = other DNA
cacaacagtgtagtgatagatt

SEQ ID NO: 111923 - DNA, 22 bp, synthetic construct
  misc_feature 1..22: note = chemically synthesized
  source 1..22: mol_type = other DNA
acaacagtgtagtgatagattc

SEQ ID NO: 111924 - DNA, 22 bp, synthetic construct
  misc_feature 1..22: note = chemically synthesized
  source 1..22: mol_type = other DNA
acccacatattatgtgatgtgg

SEQ ID NO: 111925 - DNA, 22 bp, synthetic construct
  misc_feature 1..22: note = chemically synthesized
  source 1..22: mol_type = other DNA
tgtgatgtggacctctgagcca

SEQ ID NO: 111926 - DNA, 22 bp, synthetic construct
  misc_feature 1..22: note = chemically synthesized
  source 1..22: mol_type = other DNA
tgagccaggtactatctcattc

SEQ ID NO: 111927 - DNA, 22 bp, synthetic construct
  misc_feature 1..22: note = chemically synthesized
  source 1..22: mol_type = other DNA
agccaggtactatctcattctc

SEQ ID NO: 111928 - DNA, 22 bp, synthetic construct
  misc_feature 1..22: note = chemically synthesized
  source 1..22: mol_type = other DNA
tctcattctccatggttgcaat

SEQ ID NO: 111929 - DNA, 22 bp, synthetic construct
  misc_feature 1..22: note = chemically synthesized
  source 1..22: mol_type = other DNA
attctccatggttgcaataagg

SEQ ID NO: 111930 - DNA, 22 bp, synthetic construct
  misc_feature 1..22: note = chemically synthesized
  source 1..22: mol_type = other DNA
tccatggttgcaataaggtcga

SEQ ID NO: 111931 - DNA, 22 bp, synthetic construct
  misc_feature 1..22: note = chemically synthesized
  source 1..22: mol_type = other DNA
catggttgcaataaggtcgatt

SEQ ID NO: 111932 - DNA, 22 bp, synthetic construct
  misc_feature 1..22: note = chemically synthesized
  source 1..22: mol_type = other DNA
caataaggtcgattatagattc

SEQ ID NO: 111933 - DNA, 22 bp, synthetic construct
  misc_feature 1..22: note = chemically synthesized
  source 1..22: mol_type = other DNA
tagattcaataaaggaagaggt

SEQ ID NO: 111934 - DNA, 22 bp, synthetic construct
  misc_feature 1..22: note = chemically synthesized
  source 1..22: mol_type = other DNA
aataaaggaagaggtatctcaa

SEQ ID NO: 111935 - DNA, 22 bp, synthetic construct
  misc_feature 1..22: note = chemically synthesized
  source 1..22: mol_type = other DNA
aacactaaagaaagagtaaaat

SEQ ID NO: 111936 - DNA, 22 bp, synthetic construct
  misc_feature 1..22: note = chemically synthesized
  source 1..22: mol_type = other DNA
aagaaagagtaaaattttcagg

SEQ ID NO: 111937 - DNA, 22 bp, synthetic construct
  misc_feature 1..22: note = chemically synthesized
  source 1..22: mol_type = other DNA
tcagggttcaacaagcgaccac

SEQ ID NO: 111938 - DNA, 22 bp, synthetic construct
  misc_feature 1..22: note = chemically synthesized
  source 1..22: mol_type = other DNA
cagggttcaacaagcgaccacc

SEQ ID NO: 111939 - DNA, 22 bp, synthetic construct
  misc_feature 1..22: note = chemically synthesized
  source 1..22: mol_type = other DNA
agggttcaacaagcgaccacct

SEQ ID NO: 111940 - DNA, 22 bp, synthetic construct
  misc_feature 1..22: note = chemically synthesized
  source 1..22: mol_type = other DNA
aacaagcgaccacctaagggca

SEQ ID NO: 111941 - DNA, 22 bp, synthetic construct
  misc_feature 1..22: note = chemically synthesized
  source 1..22: mol_type = other DNA
agggcaaaatattttcctaaat

SEQ ID NO: 111942 - DNA, 22 bp, synthetic construct
  misc_feature 1..22: note = chemically synthesized
  source 1..22: mol_type = other DNA
tcctaaattttgacaaacttta

SEQ ID NO: 111943 - DNA, 22 bp, synthetic construct
  misc_feature 1..22: note = chemically synthesized
  source 1..22: mol_type = other DNA
cctaaattttgacaaactttaa

SEQ ID NO: 111944 - DNA, 22 bp, synthetic construct
  misc_feature 1..22: note = chemically synthesized
  source 1..22: mol_type = other DNA
ctaaattttgacaaactttaag

SEQ ID NO: 111945 - DNA, 22 bp, synthetic construct
  misc_feature 1..22: note = chemically synthesized
  source 1..22: mol_type = other DNA
aattttgacaaactttaagttc

SEQ ID NO: 111946 - DNA, 22 bp, synthetic construct
  misc_feature 1..22: note = chemically synthesized
  source 1..22: mol_type = other DNA
tgacaaactttaagttcaaaaa

SEQ ID NO: 111947 - DNA, 22 bp, synthetic construct
  misc_feature 1..22: note = chemically synthesized
  source 1..22: mol_type = other DNA
gacaaactttaagttcaaaaag

SEQ ID NO: 111948 - DNA, 22 bp, synthetic construct
  misc_feature 1..22: note = chemically synthesized
  source 1..22: mol_type = other DNA
acaaactttaagttcaaaaagc

SEQ ID NO: 111949 - DNA, 22 bp, synthetic construct
  misc_feature 1..22: note = chemically synthesized
  source 1..22: mol_type = other DNA
taagttcaaaaagctcatctag

SEQ ID NO: 111950 - DNA, 22 bp, synthetic construct
  misc_feature 1..22: note = chemically synthesized
  source 1..22: mol_type = other DNA
aagttcaaaaagctcatctagc

SEQ ID NO: 111951 - DNA, 22 bp, synthetic construct
  misc_feature 1..22: note = chemically synthesized
  source 1..22: mol_type = other DNA
agttcaaaaagctcatctagct

SEQ ID NO: 111952 - DNA, 22 bp, synthetic construct
  misc_feature 1..22: note = chemically synthesized
  source 1..22: mol_type = other DNA
aaaaagctcatctagctatgac

SEQ ID NO: 111953 - DNA, 22 bp, synthetic construct
  misc_feature 1..22: note = chemically synthesized
  source 1..22: mol_type = other DNA
atctagctatgacaaagtttga

SEQ ID NO: 111954 - DNA, 22 bp, synthetic construct
  misc_feature 1..22: note = chemically synthesized
  source 1..22: mol_type = other DNA
gctatgacaaagtttgacatag

SEQ ID NO: 111955 - DNA, 22 bp, synthetic construct
  misc_feature 1..22: note = chemically synthesized
  source 1..22: mol_type = other DNA
tgacaaagtttgacatagttag

SEQ ID NO: 111956 - DNA, 22 bp, synthetic construct
  misc_feature 1..22: note = chemically synthesized
  source 1..22: mol_type = other DNA
gacatagttagatgagcttttg

SEQ ID NO: 111957 - DNA, 22 bp, synthetic construct
  misc_feature 1..22: note = chemically synthesized
  source 1..22: mol_type = other DNA
acatagttagatgagcttttga

SEQ ID NO: 111958 - DNA, 22 bp, synthetic construct
  misc_feature 1..22: note = chemically synthesized
  source 1..22: mol_type = other DNA
gatgagcttttgatctgtgcac

SEQ ID NO: 111959 - DNA, 22 bp, synthetic construct
  misc_feature 1..22: note = chemically synthesized
  source 1..22: mol_type = other DNA
ttgatctgtgcactttccctcg

SEQ ID NO: 111960 - DNA, 22 bp, synthetic construct
  misc_feature 1..22: note = chemically synthesized
  source 1..22: mol_type = other DNA
tgatctgtgcactttccctcga

SEQ ID NO: 111961 - DNA, 22 bp, synthetic construct
  misc_feature 1..22: note = chemically synthesized
  source 1..22: mol_type = other DNA
gatctgtgcactttccctcgac

SEQ ID NO: 111962 - DNA, 22 bp, synthetic construct
  misc_feature 1..22: note = chemically synthesized
  source 1..22: mol_type = other DNA
atctgtgcactttccctcgacc

SEQ ID NO: 111963 - DNA, 22 bp, synthetic construct
  misc_feature 1..22: note = chemically synthesized
  source 1..22: mol_type = other DNA
tgcactttccctcgaccttgac

SEQ ID NO: 111964 - DNA, 22 bp, synthetic construct
  misc_feature 1..22: note = chemically synthesized
  source 1..22: mol_type = other DNA
tccctcgaccttgaccaccaat

SEQ ID NO: 111965 - DNA, 22 bp, synthetic construct
  misc_feature 1..22: note = chemically synthesized
  source 1..22: mol_type = other DNA
ccctcgaccttgaccaccaatc

SEQ ID NO: 111966 - DNA, 22 bp, synthetic construct
  misc_feature 1..22: note = chemically synthesized
  source 1..22: mol_type = other DNA
cctcgaccttgaccaccaatct

SEQ ID NO: 111967 - DNA, 22 bp, synthetic construct
  misc_feature 1..22: note = chemically synthesized
  source 1..22: mol_type = other DNA
gaccttgaccaccaatcttgac

SEQ ID NO: 111968 - DNA, 22 bp, synthetic construct
  misc_feature 1..22: note = chemically synthesized
  source 1..22: mol_type = other DNA
gaccaccaatcttgacttcaca

SEQ ID NO: 111969 - DNA, 22 bp, synthetic construct
  misc_feature 1..22: note = chemically synthesized
  source 1..22: mol_type = other DNA
accaccaatcttgacttcacaa

SEQ ID NO: 111970 - DNA, 22 bp, synthetic construct
  misc_feature 1..22: note = chemically synthesized
  source 1..22: mol_type = other DNA
gacttcacaaaaccattggaat

SEQ ID NO: 111971 - DNA, 22 bp, synthetic construct
  misc_feature 1..22: note = chemically synthesized
  source 1..22: mol_type = other DNA
acttcacaaaaccattggaatt

SEQ ID NO: 111972 - DNA, 22 bp, synthetic construct
  misc_feature 1..22: note = chemically synthesized
  source 1..22: mol_type = other DNA
cacaaaaccattggaatttggg

SEQ ID NO: 111973 - DNA, 22 bp, synthetic construct
  misc_feature 1..22: note = chemically synthesized
  source 1..22: mol_type = other DNA
acaaaaccattggaatttgggg

SEQ ID NO: 111974 - DNA, 22 bp, synthetic construct
  misc_feature 1..22: note = chemically synthesized
  source 1..22: mol_type = other DNA
gaatttggggtgatatggaggc

SEQ ID NO: 111975 - DNA, 22 bp, synthetic construct
  misc_feature 1..22: note = chemically synthesized
  source 1..22: mol_type = other DNA
ggggtgatatggaggcaagcca

SEQ ID NO: 111976 - DNA, 22 bp, synthetic construct
  misc_feature 1..22: note = chemically synthesized
  source 1..22: mol_type = other DNA
gggtgatatggaggcaagccaa

SEQ ID NO: 111977 - DNA, 22 bp, synthetic construct
  misc_feature 1..22: note = chemically synthesized
  source 1..22: mol_type = other DNA
tgatgcagtttaggagctatgt

SEQ ID NO: 111978 - DNA, 22 bp, synthetic construct
  misc_feature 1..22: note = chemically synthesized
  source 1..22: mol_type = other DNA
aggagctatgtgatgtgtcatt

SEQ ID NO: 111979 - DNA, 22 bp, synthetic construct
  misc_feature 1..22: note = chemically synthesized
  source 1..22: mol_type = other DNA
ggagctatgtgatgtgtcattt

SEQ ID NO: 111980 - DNA, 22 bp, synthetic construct
  misc_feature 1..22: note = chemically synthesized
  source 1..22: mol_type = other DNA
tgtgatgtgtcatttctgtgac

SEQ ID NO: 111981 - DNA, 22 bp, synthetic construct
  misc_feature 1..22: note = chemically synthesized
  source 1..22: mol_type = other DNA
ctgtgacaggatatgagagctg

SEQ ID NO: 111982 - DNA, 22 bp, synthetic construct
  misc_feature 1..22: note = chemically synthesized
  source 1..22: mol_type = other DNA
tgtgacaggatatgagagctgc

SEQ ID NO: 111983 - DNA, 22 bp, synthetic construct
  misc_feature 1..22: note = chemically synthesized
  source 1..22: mol_type = other DNA
tgacaggatatgagagctgcac

SEQ ID NO: 111984 - DNA, 22 bp, synthetic construct
  misc_feature 1..22: note = chemically synthesized
  source 1..22: mol_type = other DNA
cacatctttctgtttagaaatt

SEQ ID NO: 111985 - DNA, 22 bp, synthetic construct
  misc_feature 1..22: note = chemically synthesized
  source 1..22: mol_type = other DNA
tctgtttagaaattcctgccat

SEQ ID NO: 111986 - DNA, 22 bp, synthetic construct
  misc_feature 1..22: note = chemically synthesized
  source 1..22: mol_type = other DNA
ctgtttagaaattcctgccata

SEQ ID NO: 111987 - DNA, 22 bp, synthetic construct
  misc_feature 1..22: note = chemically synthesized
  source 1..22: mol_type = other DNA
tgtttagaaattcctgccatat

SEQ ID NO: 111988 - DNA, 22 bp, synthetic construct
  misc_feature 1..22: note = chemically synthesized
  source 1..22: mol_type = other DNA
tttagaaattcctgccatattt

SEQ ID NO: 111989 - DNA, 22 bp, synthetic construct
  misc_feature 1..22: note = chemically synthesized
  source 1..22: mol_type = other DNA
agaaattcctgccatatttgta

SEQ ID NO: 111990 - DNA, 22 bp, synthetic construct
  misc_feature 1..22: note = chemically synthesized
  source 1..22: mol_type = other DNA
gaaattcctgccatatttgtaa

SEQ ID NO: 111991 - DNA, 22 bp, synthetic construct
  misc_feature 1..22: note = chemically synthesized
  source 1..22: mol_type = other DNA
ctgccatatttgtaattctcaa

SEQ ID NO: 111992 - DNA, 22 bp, synthetic construct
  misc_feature 1..22: note = chemically synthesized
  source 1..22: mol_type = other DNA
ccatatttgtaattctcaatgg

SEQ ID NO: 111993 - DNA, 22 bp, synthetic construct
  misc_feature 1..22: note = chemically synthesized
  source 1..22: mol_type = other DNA
gtaattctcaatggtcagtctc

SEQ ID NO: 111994 - DNA, 22 bp, synthetic construct
  misc_feature 1..22: note = chemically synthesized
  source 1..22: mol_type = other DNA
taattctcaatggtcagtctcc

SEQ ID NO: 111995 - DNA, 22 bp, synthetic construct
  misc_feature 1..22: note = chemically synthesized
  source 1..22: mol_type = other DNA
tcaatggtcagtctccttgctg

SEQ ID NO: 111996 - DNA, 22 bp, synthetic construct
  misc_feature 1..22: note = chemically synthesized
  source 1..22: mol_type = other DNA
aatggtcagtctccttgctgga

SEQ ID NO: 111997 - DNA, 22 bp, synthetic construct
  misc_feature 1..22: note = chemically synthesized
  source 1..22: mol_type = other DNA
cttgctggactataaattcaac

SEQ ID NO: 111998 - DNA, 22 bp, synthetic construct
  misc_feature 1..22: note = chemically synthesized
  source 1..22: mol_type = other DNA
gctggactataaattcaactac

SEQ ID NO: 111999 - DNA, 22 bp, synthetic construct
  misc_feature 1..22: note = chemically synthesized
  source 1..22: mol_type = other DNA
ctggactataaattcaactaca

SEQ ID NO: 112000 - DNA, 22 bp, synthetic construct
  misc_feature 1..22: note = chemically synthesized
  source 1..22: mol_type = other DNA
gactataaattcaactacatgc

SEQ ID NO: 112001 - DNA, 22 bp, synthetic construct
  misc_feature 1..22: note = chemically synthesized
  source 1..22: mol_type = other DNA
taaattcaactacatgccagct

SEQ ID NO: 112002 - DNA, 22 bp, synthetic construct
  misc_feature 1..22: note = chemically synthesized
  source 1..22: mol_type = other DNA
aactacatgccagctttaagca

SEQ ID NO: 112003 - DNA, 22 bp, synthetic construct
  misc_feature 1..22: note = chemically synthesized
  source 1..22: mol_type = other DNA
catgccagctttaagcacagtg

SEQ ID NO: 112004 - DNA, 22 bp, synthetic construct
  misc_feature 1..22: note = chemically synthesized
  source 1..22: mol_type = other DNA
taagcacagtgctttgaagaga

SEQ ID NO: 112005 - DNA, 22 bp, synthetic construct
  misc_feature 1..22: note = chemically synthesized
  source 1..22: mol_type = other DNA
aagcacagtgctttgaagagag

SEQ ID NO: 112006 - DNA, 22 bp, synthetic construct
  misc_feature 1..22: note = chemically synthesized
  source 1..22: mol_type = other DNA
agcacagtgctttgaagagagt

SEQ ID NO: 112007 - DNA, 22 bp, synthetic construct
  misc_feature 1..22: note = chemically synthesized
  source 1..22: mol_type = other DNA
tgaagagagtaggagcttaaaa

SEQ ID NO: 112008 - DNA, 22 bp, synthetic construct
  misc_feature 1..22: note = chemically synthesized
  source 1..22: mol_type = other DNA
gaagagagtaggagcttaaaaa

SEQ ID NO: 112009 - DNA, 22 bp, synthetic construct
  misc_feature 1..22: note = chemically synthesized
  source 1..22: mol_type = other DNA
aagagagtaggagcttaaaaaa

SEQ ID NO: 112010 - DNA, 22 bp, synthetic construct
  misc_feature 1..22: note = chemically synthesized
  source 1..22: mol_type = other DNA
aaaaaatattctgtattaaatg

SEQ ID NO: 112011 - DNA, 22 bp, synthetic construct
  misc_feature 1..22: note = chemically synthesized
  source 1..22: mol_type = other DNA
aaaaatattctgtattaaatga

SEQ ID NO: 112012 - DNA, 22 bp, synthetic construct
  misc_feature 1..22: note = chemically synthesized
  source 1..22: mol_type = other DNA
tgtattaaatgaaaaaataaac

SEQ ID NO: 112013 - DNA, 22 bp, synthetic construct
  misc_feature 1..22: note = chemically synthesized
  source 1..22: mol_type = other DNA
tattaaatgaaaaaataaacta

SEQ ID NO: 112014 - DNA, 22 bp, synthetic construct
  misc_feature 1..22: note = chemically synthesized
  source 1..22: mol_type = other DNA
aatgaaaaaataaactaagcgt

SEQ ID NO: 112015 - DNA, 22 bp, synthetic construct
  misc_feature 1..22: note = chemically synthesized
  source 1..22: mol_type = other DNA
agcgtgagaggtatttatgtgt

SEQ ID NO: 112016 - DNA, 22 bp, synthetic construct
  misc_feature 1..22: note = chemically synthesized
  source 1..22: mol_type = other DNA
atgtgtctctctcttcctcttc

SEQ ID NO: 112017 - DNA, 22 bp, synthetic construct
  misc_feature 1..22: note = chemically synthesized
  source 1..22: mol_type = other DNA
tgtgtctctctcttcctcttct

SEQ ID NO: 112018 - DNA, 22 bp, synthetic construct
  misc_feature 1..22: note = chemically synthesized
  source 1..22: mol_type = other DNA
tctcttcctcttctcactccat

SEQ ID NO: 112019 - DNA, 22 bp, synthetic construct
  misc_feature 1..22: note = chemically synthesized
  source 1..22: mol_type = other DNA
tcttcctcttctcactccatcc

SEQ ID NO: 112020 - DNA, 22 bp, synthetic construct
  misc_feature 1..22: note = chemically synthesized
  source 1..22: mol_type = other DNA
ttcctcttctcactccatcctc

SEQ ID NO: 112021 - DNA, 22 bp, synthetic construct
  misc_feature 1..22: note = chemically synthesized
  source 1..22: mol_type = other DNA
cctcttctcactccatcctcat

SEQ ID NO: 112022 - DNA, 22 bp, synthetic construct
  misc_feature 1..22: note = chemically synthesized
  source 1..22: mol_type = other DNA
ctcttctcactccatcctcatg

SEQ ID NO: 112023 - DNA, 22 bp, synthetic construct
  misc_feature 1..22: note = chemically synthesized
  source 1..22: mol_type = other DNA
ttctcactccatcctcatgtgc

SEQ ID NO: 112024 - DNA, 22 bp, synthetic construct
  misc_feature 1..22: note = chemically synthesized
  source 1..22: mol_type = other DNA
ctcactccatcctcatgtgcat

SEQ ID NO: 112025 - DNA, 22 bp, synthetic construct
  misc_feature 1..22: note = chemically synthesized
  source 1..22: mol_type = other DNA
tcactccatcctcatgtgcatc

SEQ ID NO: 112026 - DNA, 22 bp, synthetic construct
  misc_feature 1..22: note = chemically synthesized
  source 1..22: mol_type = other DNA
actccatcctcatgtgcatctc

SEQ ID NO: 112027 - DNA, 22 bp, synthetic construct
  misc_feature 1..22: note = chemically synthesized
  source 1..22: mol_type = other DNA
catcctcatgtgcatctctgaa

SEQ ID NO: 112028 - DNA, 22 bp, synthetic construct
  misc_feature 1..22: note = chemically synthesized
  source 1..22: mol_type = other DNA
atgtgcatctctgaatatctct

SEQ ID NO: 112029 - DNA, 22 bp, synthetic construct
  misc_feature 1..22: note = chemically synthesized
  source 1..22: mol_type = other DNA
tgaatatctctgattttgtgca

SEQ ID NO: 112030 - DNA, 22 bp, synthetic construct
  misc_feature 1..22: note = chemically synthesized
  source 1..22: mol_type = other DNA
aatatctctgattttgtgcact

SEQ ID NO: 112031 - DNA, 22 bp, synthetic construct
  misc_feature 1..22: note = chemically synthesized
  source 1..22: mol_type = other DNA
tgattttgtgcactctaaggca

SEQ ID NO: 112032 - DNA, 22 bp, synthetic construct
  misc_feature 1..22: note = chemically synthesized
  source 1..22: mol_type = other DNA
attttgtgcactctaaggcagc

SEQ ID NO: 112033 - DNA, 22 bp, synthetic construct
  misc_feature 1..22: note = chemically synthesized
  source 1..22: mol_type = other DNA
tgtgcactctaaggcagccctc

SEQ ID NO: 112034 - DNA, 22 bp, synthetic construct
  misc_feature 1..22: note = chemically synthesized
  source 1..22: mol_type = other DNA
gtgcactctaaggcagccctct

SEQ ID NO: 112035 - DNA, 22 bp, synthetic construct
  misc_feature 1..22: note = chemically synthesized
  source 1..22: mol_type = other DNA
tgcactctaaggcagccctcta

SEQ ID NO: 112036 - DNA, 22 bp, synthetic construct
  misc_feature 1..22: note = chemically synthesized
  source 1..22: mol_type = other DNA
taaggcagccctctaagctgtt

SEQ ID NO: 112037 - DNA, 22 bp, synthetic construct
  misc_feature 1..22: note = chemically synthesized
  source 1..22: mol_type = other DNA
aggcagccctctaagctgtttg

SEQ ID NO: 112038 - DNA, 22 bp, synthetic construct
  misc_feature 1..22: note = chemically synthesized
  source 1..22: mol_type = other DNA
taagctgtttgcccatccagca

SEQ ID NO: 112039 - DNA, 22 bp, synthetic construct
  misc_feature 1..22: note = chemically synthesized
  source 1..22: mol_type = other DNA
agctgtttgcccatccagcata

SEQ ID NO: 112040 - DNA, 22 bp, synthetic construct
  misc_feature 1..22: note = chemically synthesized
  source 1..22: mol_type = other DNA
tttgcccatccagcatatgaca

SEQ ID NO: 112041 - DNA, 22 bp, synthetic construct
  misc_feature 1..22: note = chemically synthesized
  source 1..22: mol_type = other DNA
gcccatccagcatatgacagaa

SEQ ID NO: 112042 - DNA, 22 bp, synthetic construct
  misc_feature 1..22: note = chemically synthesized
  source 1..22: mol_type = other DNA
cccatccagcatatgacagaag

SEQ ID NO: 112043 - DNA, 22 bp, synthetic construct
  misc_feature 1..22: note = chemically synthesized
  source 1..22: mol_type = other DNA
ttcaaagtgaatgatcaaagtc

SEQ ID NO: 112044 - DNA, 22 bp, synthetic construct
  misc_feature 1..22: note = chemically synthesized
  source 1..22: mol_type = other DNA
caaagtgaatgatcaaagtccc

SEQ ID NO: 112045 - DNA, 22 bp, synthetic construct
  misc_feature 1..22: note = chemically synthesized
  source 1..22: mol_type = other DNA
aaagtgaatgatcaaagtccct

SEQ ID NO: 112046 - DNA, 22 bp, synthetic construct
  misc_feature 1..22: note = chemically synthesized
  source 1..22: mol_type = other DNA
gtttacagggtccccccaccct

SEQ ID NO: 112047 - DNA, 22 bp, synthetic construct
  misc_feature 1..22: note = chemically synthesized
  source 1..22: mol_type = other DNA
tttacagggtccccccaccctc

SEQ ID NO: 112048 - DNA, 22 bp, synthetic construct
  misc_feature 1..22: note = chemically synthesized
  source 1..22: mol_type = other DNA
acagggtccccccaccctcttc

SEQ ID NO: 112049 - DNA, 22 bp, synthetic construct
  misc_feature 1..22: note = chemically synthesized
  source 1..22: mol_type = other DNA
cagggtccccccaccctcttcc

SEQ ID NO: 112050 - DNA, 22 bp, synthetic construct
  misc_feature 1..22: note = chemically synthesized
  source 1..22: mol_type = other DNA
ttccttcctgagcatgtgttct

SEQ ID NO: 112051 - DNA, 22 bp, synthetic construct
  misc_feature 1..22: note = chemically synthesized
  source 1..22: mol_type = other DNA
ccttcctgagcatgtgttctgg

SEQ ID NO: 112052 - DNA, 22 bp, synthetic construct
  misc_feature 1..22: note = chemically synthesized
  source 1..22: mol_type = other DNA
cttcctgagcatgtgttctgga

SEQ ID NO: 112053 - DNA, 22 bp, synthetic construct
  misc_feature 1..22: note = chemically synthesized
  source 1..22: mol_type = other DNA
cctgagcatgtgttctggatat

SEQ ID NO: 112054 - DNA, 22 bp, synthetic construct
  misc_feature 1..22: note = chemically synthesized
  source 1..22: mol_type = other DNA
ctgagcatgtgttctggatatg

SEQ ID NO: 112055 - DNA, 22 bp, synthetic construct
  misc_feature 1..22: note = chemically synthesized
  source 1..22: mol_type = other DNA
agcatgtgttctggatatgctg

SEQ ID NO: 112056 - DNA, 22 bp, synthetic construct
  misc_feature 1..22: note = chemically synthesized
  source 1..22: mol_type = other DNA
tggatatgctgaagccaacctc

SEQ ID NO: 112057 - DNA, 22 bp, synthetic construct
  misc_feature 1..22: note = chemically synthesized
  source 1..22: mol_type = other DNA
gatatgctgaagccaacctcac

SEQ ID NO: 112058 - DNA, 22 bp, synthetic construct
  misc_feature 1..22: note = chemically synthesized
  source 1..22: mol_type = other DNA
aagccaacctcacaggactttg

SEQ ID NO: 112059 - DNA, 22 bp, synthetic construct
  misc_feature 1..22: note = chemically synthesized
  source 1..22: mol_type = other DNA
acaggactttgttacctttcct

SEQ ID NO: 112060 - DNA, 22 bp, synthetic construct
  misc_feature 1..22: note = chemically synthesized
  source 1..22: mol_type = other DNA
tgttacctttcctaagtttcta

SEQ ID NO: 112061 - DNA, 22 bp, synthetic construct
  misc_feature 1..22: note = chemically synthesized
  source 1..22: mol_type = other DNA
gttacctttcctaagtttctat

SEQ ID NO: 112062 - DNA, 22 bp, synthetic construct
  misc_feature 1..22: note = chemically synthesized
  source 1..22: mol_type = other DNA
ttacctttcctaagtttctatt

SEQ ID NO: 112063 - DNA, 22 bp, synthetic construct
  misc_feature 1..22: note = chemically synthesized
  source 1..22: mol_type = other DNA
cctttcctaagtttctattggt

SEQ ID NO: 112064 - DNA, 22 bp, synthetic construct
  misc_feature 1..22: note = chemically synthesized
  source 1..22: mol_type = other DNA
tcctaagtttctattggtgaat

SEQ ID NO: 112065 - DNA, 22 bp, synthetic construct
  misc_feature 1..22: note = chemically synthesized
  source 1..22: mol_type = other DNA
cctaagtttctattggtgaatt

SEQ ID NO: 112066 - DNA, 22 bp, synthetic construct
  misc_feature 1..22: note = chemically synthesized
  source 1..22: mol_type = other DNA
ctaagtttctattggtgaattt

SEQ ID NO: 112067 - DNA, 22 bp, synthetic construct
  misc_feature 1..22: note = chemically synthesized
  source 1..22: mol_type = other DNA
agtttctattggtgaatttcca

SEQ ID NO: 112068 - DNA, 22 bp, synthetic construct
  misc_feature 1..22: note = chemically synthesized
  source 1..22: mol_type = other DNA
ctattggtgaatttccatttaa

SEQ ID NO: 112069 - DNA, 22 bp, synthetic construct
  misc_feature 1..22: note = chemically synthesized
  source 1..22: mol_type = other DNA
tattggtgaatttccatttaat

SEQ ID NO: 112070 - DNA, 22 bp, synthetic construct
  misc_feature 1..22: note = chemically synthesized
  source 1..22: mol_type = other DNA
ttggtgaatttccatttaatat

SEQ ID NO: 112071 - DNA, 22 bp, synthetic construct
  misc_feature 1..22: note = chemically synthesized
  source 1..22: mol_type = other DNA
gtgaatttccatttaatatagt

SEQ ID NO: 112072 - DNA, 22 bp, synthetic construct
  misc_feature 1..22: note = chemically synthesized
  source 1..22: mol_type = other DNA
ccatttaatatagttttattaa

SEQ ID NO: 112073 - DNA, 22 bp, synthetic construct
  misc_feature 1..22: note = chemically synthesized
  source 1..22: mol_type = other DNA
catttaatatagttttattaaa

SEQ ID NO: 112074 - DNA, 22 bp, synthetic construct
  misc_feature 1..22: note = chemically synthesized
  source 1..22: mol_type = other DNA
aatatagttttattaaatgatt

SEQ ID NO: 112075 - DNA, 22 bp, synthetic construct
  misc_feature 1..22: note = chemically synthesized
  source 1..22: mol_type = other DNA
atatagttttattaaatgattt

SEQ ID NO: 112076 - DNA, 22 bp, synthetic construct
  misc_feature 1..22: note = chemically synthesized
  source 1..22: mol_type = other DNA
tattaaatgattttagtaaata

SEQ ID NO: 112077 - DNA, 22 bp, synthetic construct
  misc_feature 1..22: note = chemically synthesized
  source 1..22: mol_type = other DNA
attaaatgattttagtaaataa

SEQ ID NO: 112078 - DNA, 22 bp, synthetic construct
  misc_feature 1..22: note = chemically synthesized
  source 1..22: mol_type = other DNA
ttaaatgattttagtaaataat

SEQ ID NO: 112079 - DNA, 22 bp, synthetic construct
  misc_feature 1..22: note = chemically synthesized
  source 1..22: mol_type = other DNA
aatgattttagtaaataatttt

SEQ ID NO: 112080 - DNA, 22 bp, synthetic construct
  misc_feature 1..22: note = chemically synthesized
  source 1..22: mol_type = other DNA
tagtaaataatttttaatcatt

SEQ ID NO: 112081 - DNA, 22 bp, synthetic construct
  misc_feature 1..22: note = chemically synthesized
  source 1..22: mol_type = other DNA
agtaaataatttttaatcattg

SEQ ID NO: 112082 - DNA, 22 bp, synthetic construct
  misc_feature 1..22: note = chemically synthesized
  source 1..22: mol_type = other DNA
gtaaataatttttaatcattgt

SEQ ID NO: 112083 - DNA, 22 bp, synthetic construct
  misc_feature 1..22: note = chemically synthesized
  source 1..22: mol_type = other DNA
ttaatcattgtagcttctatgg

SEQ ID NO: 112084 - DNA, 22 bp, synthetic construct
  misc_feature 1..22: note = chemically synthesized
  source 1..22: mol_type = other DNA
taatcattgtagcttctatggt

SEQ ID NO: 112085 - DNA, 22 bp, synthetic construct
  misc_feature 1..22: note = chemically synthesized
  source 1..22: mol_type = other DNA
aatcattgtagcttctatggtg

SEQ ID NO: 112086 - DNA, 22 bp, synthetic construct
  misc_feature 1..22: note = chemically synthesized
  source 1..22: mol_type = other DNA
atcattgtagcttctatggtgg

SEQ ID NO: 112087 - DNA, 22 bp, synthetic construct
  misc_feature 1..22: note = chemically synthesized
  source 1..22: mol_type = other DNA
tagcttctatggtggatacaca

SEQ ID NO: 112088 - DNA, 22 bp, synthetic construct
  misc_feature 1..22: note = chemically synthesized
  source 1..22: mol_type = other DNA
ctatggtggatacacaaggaga

SEQ ID NO: 112089 - DNA, 22 bp, synthetic construct
  misc_feature 1..22: note = chemically synthesized
  source 1..22: mol_type = other DNA
tatggtggatacacaaggagaa

SEQ ID NO: 112090 - DNA, 22 bp, synthetic construct
  misc_feature 1..22: note = chemically synthesized
  source 1..22: mol_type = other DNA
tggtggatacacaaggagaagc

SEQ ID NO: 112091 - DNA, 22 bp, synthetic construct
  misc_feature 1..22: note = chemically synthesized
  source 1..22: mol_type = other DNA
caaggggatttctcaagtaact

SEQ ID NO: 112092 - DNA, 22 bp, synthetic construct
  misc_feature 1..22: note = chemically synthesized
  source 1..22: mol_type = other DNA
ctcaagtaactgcttcttcttg

SEQ ID NO: 112093 - DNA, 22 bp, synthetic construct
  misc_feature 1..22: note = chemically synthesized
  source 1..22: mol_type = other DNA
tcaagtaactgcttcttcttgt

SEQ ID NO: 112094 - DNA, 22 bp, synthetic construct
  misc_feature 1..22: note = chemically synthesized
  source 1..22: mol_type = other DNA
aagtaactgcttcttcttgtca

SEQ ID NO: 112095 - DNA, 22 bp, synthetic construct
  misc_feature 1..22: note = chemically synthesized
  source 1..22: mol_type = other DNA
cttcttcttgtcattcttgtca

SEQ ID NO: 112096 - DNA, 22 bp, synthetic construct
  misc_feature 1..22: note = chemically synthesized
  source 1..22: mol_type = other DNA
cttcttgtcattcttgtcacag

SEQ ID NO: 112097 - DNA, 22 bp, synthetic construct
  misc_feature 1..22: note = chemically synthesized
  source 1..22: mol_type = other DNA
ttcttgtcattcttgtcacagc

SEQ ID NO: 112098 - DNA, 22 bp, synthetic construct
  misc_feature 1..22: note = chemically synthesized
  source 1..22: mol_type = other DNA
cttgtcattcttgtcacagcaa

SEQ ID NO: 112099 - DNA, 22 bp, synthetic construct
  misc_feature 1..22: note = chemically synthesized
  source 1..22: mol_type = other DNA
ttgtcattcttgtcacagcaat

SEQ ID NO: 112100 - DNA, 22 bp, synthetic construct
  misc_feature 1..22: note = chemically synthesized
  source 1..22: mol_type = other DNA
gtcattcttgtcacagcaatga

SEQ ID NO: 112101 - DNA, 22 bp, synthetic construct
  misc_feature 1..22: note = chemically synthesized
  source 1..22: mol_type = other DNA
tcattcttgtcacagcaatgaa

SEQ ID NO: 112102 - DNA, 22 bp, synthetic construct
  misc_feature 1..22: note = chemically synthesized
  source 1..22: mol_type = other DNA
ttgtcacagcaatgaatcttgg

SEQ ID NO: 112103 - DNA, 22 bp, synthetic construct
  misc_feature 1..22: note = chemically synthesized
  source 1..22: mol_type = other DNA
gtcacagcaatgaatcttgggc

SEQ ID NO: 112104 - DNA, 22 bp, synthetic construct
  misc_feature 1..22: note = chemically synthesized
  source 1..22: mol_type = other DNA
tcacagcaatgaatcttgggca

SEQ ID NO: 112105 - DNA, 22 bp, synthetic construct
  misc_feature 1..22: note = chemically synthesized
  source 1..22: mol_type = other DNA
gggcaaataagggacactcaat

SEQ ID NO: 112106 - DNA, 22 bp, synthetic construct
  misc_feature 1..22: note = chemically synthesized
  source 1..22: mol_type = other DNA
ggcaaataagggacactcaata

SEQ ID NO: 112107 - DNA, 22 bp, synthetic construct
  misc_feature 1..22: note = chemically synthesized
  source 1..22: mol_type = other DNA
aataaaaccaaatgtgtcaata

SEQ ID NO: 112108 - DNA, 22 bp, synthetic construct
  misc_feature 1..22: note = chemically synthesized
  source 1..22: mol_type = other DNA
gtaataaccttgaattcaagtg

SEQ ID NO: 112109 - DNA, 22 bp, synthetic construct
  misc_feature 1..22: note = chemically synthesized
  source 1..22: mol_type = other DNA
taataaccttgaattcaagtgg

SEQ ID NO: 112110 - DNA, 22 bp, synthetic construct
  misc_feature 1..22: note = chemically synthesized
  source 1..22: mol_type = other DNA
gaattcaagtggtagcttatca

SEQ ID NO: 112111 - DNA, 22 bp, synthetic construct
  misc_feature 1..22: note = chemically synthesized
  source 1..22: mol_type = other DNA
aattcaagtggtagcttatcac

SEQ ID NO: 112112 - DNA, 22 bp, synthetic construct
  misc_feature 1..22: note = chemically synthesized
  source 1..22: mol_type = other DNA
aagtggtagcttatcacaactg

SEQ ID NO: 112113 - DNA, 22 bp, synthetic construct
  misc_feature 1..22: note = chemically synthesized
  source 1..22: mol_type = other DNA
atcacaactgctaaataacttt

SEQ ID NO: 112114 - DNA, 22 bp, synthetic construct
  misc_feature 1..22: note = chemically synthesized
  source 1..22: mol_type = other DNA
tcacaactgctaaataactttt

SEQ ID NO: 112115 - DNA, 22 bp, synthetic construct
  misc_feature 1..22: note = chemically synthesized
  source 1..22: mol_type = other DNA
ctaaataacttttcttctttgt

SEQ ID NO: 112116 - DNA, 22 bp, synthetic construct
  misc_feature 1..22: note = chemically synthesized
  source 1..22: mol_type = other DNA
aataacttttcttctttgtctg

SEQ ID NO: 112117 - DNA, 22 bp, synthetic construct
  misc_feature 1..22: note = chemically synthesized
  source 1..22: mol_type = other DNA
ttcttctttgtctggtgagttc

SEQ ID NO: 112118 - DNA, 22 bp, synthetic construct
  misc_feature 1..22: note = chemically synthesized
  source 1..22: mol_type = other DNA
tcttctttgtctggtgagttct

SEQ ID NO: 112119 - DNA, 22 bp, synthetic construct
  misc_feature 1..22: note = chemically synthesized
  source 1..22: mol_type = other DNA
cttctttgtctggtgagttctg

SEQ ID NO: 112120 - DNA, 22 bp, synthetic construct
  misc_feature 1..22: note = chemically synthesized
  source 1..22: mol_type = other DNA
ttctttgtctggtgagttctgt

SEQ ID NO: 112121 - DNA, 22 bp, synthetic construct
  misc_feature 1..22: note = chemically synthesized
  source 1..22: mol_type = other DNA
ctttgtctggtgagttctgtag

SEQ ID NO: 112122 - DNA, 22 bp, synthetic construct
  misc_feature 1..22: note = chemically synthesized
  source 1..22: mol_type = other DNA
tttgtctggtgagttctgtaga

SEQ ID NO: 112123 - DNA, 22 bp, synthetic construct
  misc_feature 1..22: note = chemically synthesized
  source 1..22: mol_type = other DNA
tgtctggtgagttctgtagaca

SEQ ID NO: 112124 - DNA, 22 bp, synthetic construct
  misc_feature 1..22: note = chemically synthesized
  source 1..22: mol_type = other DNA
gtctggtgagttctgtagacat

SEQ ID NO: 112125 - DNA, 22 bp, synthetic construct
  misc_feature 1..22: note = chemically synthesized
  source 1..22: mol_type = other DNA
tctggtgagttctgtagacatt

SEQ ID NO: 112126 - DNA, 22 bp, synthetic construct
  misc_feature 1..22: note = chemically synthesized
  source 1..22: mol_type = other DNA
gtgagttctgtagacatttaga

SEQ ID NO: 112127 - DNA, 22 bp, synthetic construct
  misc_feature 1..22: note = chemically synthesized
  source 1..22: mol_type = other DNA
tgtagacatttagagtgtaggg

SEQ ID NO: 112128 - DNA, 22 bp, synthetic construct
  misc_feature 1..22: note = chemically synthesized
  source 1..22: mol_type = other DNA
tagacatttagagtgtagggct

SEQ ID NO: 112129 - DNA, 22 bp, synthetic construct
  misc_feature 1..22: note = chemically synthesized
  source 1..22: mol_type = other DNA
agagtgtagggctggcaactgt

SEQ ID NO: 112130 - DNA, 22 bp, synthetic construct
  misc_feature 1..22: note = chemically synthesized
  source 1..22: mol_type = other DNA
gagtgtagggctggcaactgtg

SEQ ID NO: 112131 - DNA, 22 bp, synthetic construct
  misc_feature 1..22: note = chemically synthesized
  source 1..22: mol_type = other DNA
gcaactgtgtttaaaataagtt

SEQ ID NO: 112132 - DNA, 22 bp, synthetic construct
  misc_feature 1..22: note = chemically synthesized
  source 1..22: mol_type = other DNA
tgtttaaaataagttgtctatt

SEQ ID NO: 112133 - DNA, 22 bp, synthetic construct
  misc_feature 1..22: note = chemically synthesized
  source 1..22: mol_type = other DNA
aaaataagttgtctattatatc

SEQ ID NO: 112134 - DNA, 22 bp, synthetic construct
  misc_feature 1..22: note = chemically synthesized
  source 1..22: mol_type = other DNA
aaataagttgtctattatatca

SEQ ID NO: 112135 - DNA, 22 bp, synthetic construct
  misc_feature 1..22: note = chemically synthesized
  source 1..22: mol_type = other DNA
tctattatatcaggactccatg

SEQ ID NO: 112136 - DNA, 22 bp, synthetic construct
  misc_feature 1..22: note = chemically synthesized
  source 1..22: mol_type = other DNA
ttatatcaggactccatggaaa

SEQ ID NO: 112137 - DNA, 22 bp, synthetic construct
  misc_feature 1..22: note = chemically synthesized
  source 1..22: mol_type = other DNA
tatcaggactccatggaaacat

SEQ ID NO: 112138 - DNA, 22 bp, synthetic construct
  misc_feature 1..22: note = chemically synthesized
  source 1..22: mol_type = other DNA
catggaaacatctagtgaacca

SEQ ID NO: 112139 - DNA, 22 bp, synthetic construct
  misc_feature 1..22: note = chemically synthesized
  source 1..22: mol_type = other DNA
gtgaaccagaagggctggtggt

SEQ ID NO: 112140 - DNA, 22 bp, synthetic construct
  misc_feature 1..22: note = chemically synthesized
  source 1..22: mol_type = other DNA
gtggtgagaacagtgttattag

SEQ ID NO: 112141 - DNA, 22 bp, synthetic construct
  misc_feature 1..22: note = chemically synthesized
  source 1..22: mol_type = other DNA
ttagaataccactggtgtttgc

SEQ ID NO: 112142 - DNA, 22 bp, synthetic construct
  misc_feature 1..22: note = chemically synthesized
  source 1..22: mol_type = other DNA
gaataccactggtgtttgccag

SEQ ID NO: 112143 - DNA, 22 bp, synthetic construct
  misc_feature 1..22: note = chemically synthesized
  source 1..22: mol_type = other DNA
gtgtttgccagctgtggaaaac

SEQ ID NO: 112144 - DNA, 22 bp, synthetic construct
  misc_feature 1..22: note = chemically synthesized
  source 1..22: mol_type = other DNA
gccagctgtggaaaacatgggt

SEQ ID NO: 112145 - DNA, 22 bp, synthetic construct
  misc_feature 1..22: note = chemically synthesized
  source 1..22: mol_type = other DNA
ccagctgtggaaaacatgggta

SEQ ID NO: 112146 - DNA, 22 bp, synthetic construct
  misc_feature 1..22: note = chemically synthesized
  source 1..22: mol_type = other DNA
tggaaaacatgggtatagagca

SEQ ID NO: 112147 - DNA, 22 bp, synthetic construct
  misc_feature 1..22: note = chemically synthesized
  source 1..22: mol_type = other DNA
atgccaaaggcaaaccaatgca

SEQ ID NO: 112148 - DNA, 22 bp, synthetic construct
  misc_feature 1..22: note = chemically synthesized
  source 1..22: mol_type = other DNA
gtcccggcatggcaacaagtaa

SEQ ID NO: 112149 - DNA, 22 bp, synthetic construct
  misc_feature 1..22: note = chemically synthesized
  source 1..22: mol_type = other DNA
tagaaatcgctgtggagagatg

SEQ ID NO: 112150 - DNA, 22 bp, synthetic construct
  misc_feature 1..22: note = chemically synthesized
  source 1..22: mol_type = other DNA
tggagagatgcatttagatgaa

SEQ ID NO: 112151 - DNA, 22 bp, synthetic construct
  misc_feature 1..22: note = chemically synthesized
  source 1..22: mol_type = other DNA
agatgaaaaggtaacccaattc

SEQ ID NO: 112152 - DNA, 22 bp, synthetic construct
  misc_feature 1..22: note = chemically synthesized
  source 1..22: mol_type = other DNA
gatgaaaaggtaacccaattct

SEQ ID NO: 112153 - DNA, 22 bp, synthetic construct
  misc_feature 1..22: note = chemically synthesized
  source 1..22: mol_type = other DNA
tggtctgccagtcagcaaccat

SEQ ID NO: 112154 - DNA, 22 bp, synthetic construct
  misc_feature 1..22: note = chemically synthesized
  source 1..22: mol_type = other DNA
gtctgccagtcagcaaccattt

SEQ ID NO: 112155 - DNA, 22 bp, synthetic construct
  misc_feature 1..22: note = chemically synthesized
  source 1..22: mol_type = other DNA
ccagtcagcaaccattttcctg

SEQ ID NO: 112156 - DNA, 22 bp, synthetic construct
  misc_feature 1..22: note = chemically synthesized
  source 1..22: mol_type = other DNA
tcctgtctatgcacaggatagg

SEQ ID NO: 112157 - DNA, 22 bp, synthetic construct
  misc_feature 1..22: note = chemically synthesized
  source 1..22: mol_type = other DNA
cctgtctatgcacaggatagga

SEQ ID NO: 112158 - DNA, 22 bp, synthetic construct
  misc_feature 1..22: note = chemically synthesized
  source 1..22: mol_type = other DNA
ctgtctatgcacaggataggat

SEQ ID NO: 112159 - DNA, 22 bp, synthetic construct
  misc_feature 1..22: note = chemically synthesized
  source 1..22: mol_type = other DNA
tctatgcacaggataggatatg

SEQ ID NO: 112160 - DNA, 22 bp, synthetic construct
  misc_feature 1..22: note = chemically synthesized
  source 1..22: mol_type = other DNA
tgcacaggataggatatggctg

SEQ ID NO: 112161 - DNA, 22 bp, synthetic construct
  misc_feature 1..22: note = chemically synthesized
  source 1..22: mol_type = other DNA
tactacctcgaagttttttcac

SEQ ID NO: 112162 - DNA, 22 bp, synthetic construct
  misc_feature 1..22: note = chemically synthesized
  source 1..22: mol_type = other DNA
cctcgaagttttttcacaaagc

SEQ ID NO: 112163 - DNA, 22 bp, synthetic construct
  misc_feature 1..22: note = chemically synthesized
  source 1..22: mol_type = other DNA
gaagttttttcacaaagcatat

SEQ ID NO: 112164 - DNA, 22 bp, synthetic construct
  misc_feature 1..22: note = chemically synthesized
  source 1..22: mol_type = other DNA
tttcacaaagcatattgataca

SEQ ID NO: 112165 - DNA, 22 bp, synthetic construct
  misc_feature 1..22: note = chemically synthesized
  source 1..22: mol_type = other DNA
ttcacaaagcatattgatacac

SEQ ID NO: 112166 - DNA, 22 bp, synthetic construct
  misc_feature 1..22: note = chemically synthesized
  source 1..22: mol_type = other DNA
tcacaaagcatattgatacaca

SEQ ID NO: 112167 - DNA, 22 bp, synthetic construct
  misc_feature 1..22: note = chemically synthesized
  source 1..22: mol_type = other DNA
cacaaagcatattgatacacaa

SEQ ID NO: 112168 - DNA, 22 bp, synthetic construct
  misc_feature 1..22: note = chemically synthesized
  source 1..22: mol_type = other DNA
acaaagcatattgatacacaaa

SEQ ID NO: 112169 - DNA, 22 bp, synthetic construct
  misc_feature 1..22: note = chemically synthesized
  source 1..22: mol_type = other DNA
atacacaaaaacattatcgaga

SEQ ID NO: 112170 - DNA, 22 bp, synthetic construct
  misc_feature 1..22: note = chemically synthesized
  source 1..22: mol_type = other DNA
tcgagatgcacatgacatcggt

SEQ ID NO: 112171 - DNA, 22 bp, synthetic construct
  misc_feature 1..22: note = chemically synthesized
  source 1..22: mol_type = other DNA
gccatgacagggctcttggtgt

SEQ ID NO: 112172 - DNA, 22 bp, synthetic construct
  misc_feature 1..22: note = chemically synthesized
  source 1..22: mol_type = other DNA
ccatgacagggctcttggtgtg

SEQ ID NO: 112173 - DNA, 22 bp, synthetic construct
  misc_feature 1..22: note = chemically synthesized
  source 1..22: mol_type = other DNA
ttggtgtgaatctgactactgt

SEQ ID NO: 112174 - DNA, 22 bp, synthetic construct
  misc_feature 1..22: note = chemically synthesized
  source 1..22: mol_type = other DNA
ggtgtgaatctgactactgtct

SEQ ID NO: 112175 - DNA, 22 bp, synthetic construct
  misc_feature 1..22: note = chemically synthesized
  source 1..22: mol_type = other DNA
gtgtgaatctgactactgtctt

SEQ ID NO: 112176 - DNA, 22 bp, synthetic construct
  misc_feature 1..22: note = chemically synthesized
  source 1..22: mol_type = other DNA
actactgtcttaacacacctcc

SEQ ID NO: 112177 - DNA, 22 bp, synthetic construct
  misc_feature 1..22: note = chemically synthesized
  source 1..22: mol_type = other DNA
ctgtcttaacacacctccaaat

SEQ ID NO: 112178 - DNA, 22 bp, synthetic construct
  misc_feature 1..22: note = chemically synthesized
  source 1..22: mol_type = other DNA
tcttaacacacctccaaatgtg

SEQ ID NO: 112179 - DNA, 22 bp, synthetic construct
  misc_feature 1..22: note = chemically synthesized
  source 1..22: mol_type = other DNA
aacacacctccaaatgtgttga

SEQ ID NO: 112180 - DNA, 22 bp, synthetic construct
  misc_feature 1..22: note = chemically synthesized
  source 1..22: mol_type = other DNA
acacacctccaaatgtgttgag

SEQ ID NO: 112181 - DNA, 22 bp, synthetic construct
  misc_feature 1..22: note = chemically synthesized
  source 1..22: mol_type = other DNA
caaatgtgttgaggccctaatg

SEQ ID NO: 112182 - DNA, 22 bp, synthetic construct
  misc_feature 1..22: note = chemically synthesized
  source 1..22: mol_type = other DNA
aggccctaatgagaaacatccc

SEQ ID NO: 112183 - DNA, 22 bp, synthetic construct
  misc_feature 1..22: note = chemically synthesized
  source 1..22: mol_type = other DNA
atgagaaacatccctgatttta

SEQ ID NO: 112184 - DNA, 22 bp, synthetic construct
  misc_feature 1..22: note = chemically synthesized
  source 1..22: mol_type = other DNA
attttattcaacccaaactgat

SEQ ID NO: 112185 - DNA, 22 bp, synthetic construct
  misc_feature 1..22: note = chemically synthesized
  source 1..22: mol_type = other DNA
tattcaacccaaactgatacat

SEQ ID NO: 112186 - DNA, 22 bp, synthetic construct
  misc_feature 1..22: note = chemically synthesized
  source 1..22: mol_type = other DNA
attcaacccaaactgatacatt

SEQ ID NO: 112187 - DNA, 22 bp, synthetic construct
  misc_feature 1..22: note = chemically synthesized
  source 1..22: mol_type = other DNA
ttcaacccaaactgatacattt

SEQ ID NO: 112188 - DNA, 22 bp, synthetic construct
  misc_feature 1..22: note = chemically synthesized
  source 1..22: mol_type = other DNA
aacccaaactgatacatttaaa

SEQ ID NO: 112189 - DNA, 22 bp, synthetic construct
  misc_feature 1..22: note = chemically synthesized
  source 1..22: mol_type = other DNA
atacatttaaattgtcctgtaa

SEQ ID NO: 112190 - DNA, 22 bp, synthetic construct
  misc_feature 1..22: note = chemically synthesized
  source 1..22: mol_type = other DNA
aaattgtcctgtaattatttaa

SEQ ID NO: 112191 - DNA, 22 bp, synthetic construct
  misc_feature 1..22: note = chemically synthesized
  source 1..22: mol_type = other DNA
aattgtcctgtaattatttaaa

SEQ ID NO: 112192 - DNA, 22 bp, synthetic construct
  misc_feature 1..22: note = chemically synthesized
  source 1..22: mol_type = other DNA
tcctgtaattatttaaaaaata

SEQ ID NO: 112193 - DNA, 22 bp, synthetic construct
  misc_feature 1..22: note = chemically synthesized
  source 1..22: mol_type = other DNA
taattatttaaaaaatagatat

SEQ ID NO: 112194 - DNA, 22 bp, synthetic construct
  misc_feature 1..22: note = chemically synthesized
  source 1..22: mol_type = other DNA
tttaaaaaatagatataagctt

SEQ ID NO: 112195 - DNA, 22 bp, synthetic construct
  misc_feature 1..22: note = chemically synthesized
  source 1..22: mol_type = other DNA
aaaaaatagatataagcttttg

SEQ ID NO: 112196 - DNA, 22 bp, synthetic construct
  misc_feature 1..22: note = chemically synthesized
  source 1..22: mol_type = other DNA
aaaaatagatataagcttttga

SEQ ID NO: 112197 - DNA, 22 bp, synthetic construct
  misc_feature 1..22: note = chemically synthesized
  source 1..22: mol_type = other DNA
ttgagggcagatattataatcc

SEQ ID NO: 112198 - DNA, 22 bp, synthetic construct
  misc_feature 1..22: note = chemically synthesized
  source 1..22: mol_type = other DNA
tgagggcagatattataatcca

SEQ ID NO: 112199 - DNA, 22 bp, synthetic construct
  misc_feature 1..22: note = chemically synthesized
  source 1..22: mol_type = other DNA
gagggcagatattataatccag

SEQ ID NO: 112200 - DNA, 22 bp, synthetic construct
  misc_feature 1..22: note = chemically synthesized
  source 1..22: mol_type = other DNA
agggcagatattataatccagg

SEQ ID NO: 112201 - DNA, 22 bp, synthetic construct
  misc_feature 1..22: note = chemically synthesized
  source 1..22: mol_type = other DNA
taatccaggcatcacctccatt

SEQ ID NO: 112202 - DNA, 22 bp, synthetic construct
  misc_feature 1..22: note = chemically synthesized
  source 1..22: mol_type = other DNA
cattacccacattgtctagcac

SEQ ID NO: 112203 - DNA, 22 bp, synthetic construct
  misc_feature 1..22: note = chemically synthesized
  source 1..22: mol_type = other DNA
cccacattgtctagcacattat

SEQ ID NO: 112204 - DNA, 22 bp, synthetic construct
  misc_feature 1..22: note = chemically synthesized
  source 1..22: mol_type = other DNA
tctagcacattatagatgctta

SEQ ID NO: 112205 - DNA, 22 bp, synthetic construct
  misc_feature 1..22: note = chemically synthesized
  source 1..22: mol_type = other DNA
gcacattatagatgcttagtat

SEQ ID NO: 112206 - DNA, 22 bp, synthetic construct
  misc_feature 1..22: note = chemically synthesized
  source 1..22: mol_type = other DNA
tagatgcttagtatgtgctggc

SEQ ID NO: 112207 - DNA, 22 bp, synthetic construct
  misc_feature 1..22: note = chemically synthesized
  source 1..22: mol_type = other DNA
agtatgtgctggcttgatgaca

SEQ ID NO: 112208 - DNA, 22 bp, synthetic construct
  misc_feature 1..22: note = chemically synthesized
  source 1..22: mol_type = other DNA
gtatgtgctggcttgatgacag

SEQ ID NO: 112209 - DNA, 22 bp, synthetic construct
  misc_feature 1..22: note = chemically synthesized
  source 1..22: mol_type = other DNA
gcttgatgacaggatgaagttt

SEQ ID NO: 112210 - DNA, 22 bp, synthetic construct
  misc_feature 1..22: note = chemically synthesized
  source 1..22: mol_type = other DNA
gatgacaggatgaagtttaagt

SEQ ID NO: 112211 - DNA, 22 bp, synthetic construct
  misc_feature 1..22: note = chemically synthesized
  source 1..22: mol_type = other DNA
atgacaggatgaagtttaagtt

SEQ ID NO: 112212 - DNA, 22 bp, synthetic construct
  misc_feature 1..22: note = chemically synthesized
  source 1..22: mol_type = other DNA
aagttgctaaccattcttagag

SEQ ID NO: 112213 - DNA, 22 bp, synthetic construct
  misc_feature 1..22: note = chemically synthesized
  source 1..22: mol_type = other DNA
agttgctaaccattcttagagg

SEQ ID NO: 112214 - DNA, 22 bp, synthetic construct
  misc_feature 1..22: note = chemically synthesized
  source 1..22: mol_type = other DNA
ctaaccattcttagaggaactc

SEQ ID NO: 112215 - DNA, 22 bp, synthetic construct
  misc_feature 1..22: note = chemically synthesized
  source 1..22: mol_type = other DNA
accattcttagaggaactctgc

SEQ ID NO: 112216 - DNA, 22 bp, synthetic construct
  misc_feature 1..22: note = chemically synthesized
  source 1..22: mol_type = other DNA
ttagaggaactctgcttacctc

SEQ ID NO: 112217 - DNA, 22 bp, synthetic construct
  misc_feature 1..22: note = chemically synthesized
  source 1..22: mol_type = other DNA
agaggaactctgcttacctctt

SEQ ID NO: 112218 - DNA, 22 bp, synthetic construct
  misc_feature 1..22: note = chemically synthesized
  source 1..22: mol_type = other DNA
gaggaactctgcttacctcttg

SEQ ID NO: 112219 - DNA, 22 bp, synthetic construct
  misc_feature 1..22: note = chemically synthesized
  source 1..22: mol_type = other DNA
tgcttacctcttgggttctgaa

SEQ ID NO: 112220 - DNA, 22 bp, synthetic construct
  misc_feature 1..22: note = chemically synthesized
  source 1..22: mol_type = other DNA
cttacctcttgggttctgaagg

SEQ ID NO: 112221 - DNA, 22 bp, synthetic construct
  misc_feature 1..22: note = chemically synthesized
  source 1..22: mol_type = other DNA
acctcttgggttctgaagggtc

SEQ ID NO: 112222 - DNA, 22 bp, synthetic construct
  misc_feature 1..22: note = chemically synthesized
  source 1..22: mol_type = other DNA
cctcttgggttctgaagggtct

SEQ ID NO: 112223 - DNA, 22 bp, synthetic construct
  misc_feature 1..22: note = chemically synthesized
  source 1..22: mol_type = other DNA
ttgggttctgaagggtctgact

SEQ ID NO: 112224 - DNA, 22 bp, synthetic construct
  misc_feature 1..22: note = chemically synthesized
  source 1..22: mol_type = other DNA
gggttctgaagggtctgactga

SEQ ID NO: 112225 - DNA, 22 bp, synthetic construct
  misc_feature 1..22: note = chemically synthesized
  source 1..22: mol_type = other DNA
ggttctgaagggtctgactgac

SEQ ID NO: 112226 - DNA, 22 bp, synthetic construct
  misc_feature 1..22: note = chemically synthesized
  source 1..22: mol_type = other DNA
tgaagggtctgactgaccagag

SEQ ID NO: 112227 - DNA, 22 bp, synthetic construct
  misc_feature 1..22: note = chemically synthesized
  source 1..22: mol_type = other DNA
aagggtctgactgaccagagag

SEQ ID NO: 112228 - DNA, 22 bp, synthetic construct
  misc_feature 1..22: note = chemically synthesized
  source 1..22: mol_type = other DNA
actgaccagagaggcatgaagg

SEQ ID NO: 112229 - DNA, 22 bp, synthetic construct
  misc_feature 1..22: note = chemically synthesized
  source 1..22: mol_type = other DNA
accagagaggcatgaagggggc

SEQ ID NO: 112230 - DNA, 22 bp, synthetic construct
  misc_feature 1..22: note = chemically synthesized
  source 1..22: mol_type = other DNA
agcatgatcaccagcactgaga

SEQ ID NO: 112231 - DNA, 22 bp, synthetic construct
  misc_feature 1..22: note = chemically synthesized
  source 1..22: mol_type = other DNA
agaaccacacaaactgaagaac

SEQ ID NO: 112232 - DNA, 22 bp, synthetic construct
  misc_feature 1..22: note = chemically synthesized
  source 1..22: mol_type = other DNA
aagaactgctaggtgctggcta

SEQ ID NO: 112233 - DNA, 22 bp, synthetic construct
  misc_feature 1..22: note = chemically synthesized
  source 1..22: mol_type = other DNA
ctaggtgctggctagtgggaga

SEQ ID NO: 112234 - DNA, 22 bp, synthetic construct
  misc_feature 1..22: note = chemically synthesized
  source 1..22: mol_type = other DNA
ggtgctggctagtgggagactt

SEQ ID NO: 112235 - DNA, 22 bp, synthetic construct
  misc_feature 1..22: note = chemically synthesized
  source 1..22: mol_type = other DNA
gctagtgggagacttaagacca

SEQ ID NO: 112236 - DNA, 22 bp, synthetic construct
  misc_feature 1..22: note = chemically synthesized
  source 1..22: mol_type = other DNA
gtgggagacttaagaccaacca

SEQ ID NO: 112237 - DNA, 22 bp, synthetic construct
  misc_feature 1..22: note = chemically synthesized
  source 1..22: mol_type = other DNA
aagaccaaccaaccaccctatg

SEQ ID NO: 112238 - DNA, 22 bp, synthetic construct
  misc_feature 1..22: note = chemically synthesized
  source 1..22: mol_type = other DNA
agaccaaccaaccaccctatgg

SEQ ID NO: 112239 - DNA, 22 bp, synthetic construct
  misc_feature 1..22: note = chemically synthesized
  source 1..22: mol_type = other DNA
tggagcagccaggtaatcagca

SEQ ID NO: 112240 - DNA, 22 bp, synthetic construct
  misc_feature 1..22: note = chemically synthesized
  source 1..22: mol_type = other DNA
gggggctgttaatggaagagtt

SEQ ID NO: 112241 - DNA, 22 bp, synthetic construct
  misc_feature 1..22: note = chemically synthesized
  source 1..22: mol_type = other DNA
ggggctgttaatggaagagttg

SEQ ID NO: 112242 - DNA, 22 bp, synthetic construct
  misc_feature 1..22: note = chemically synthesized
  source 1..22: mol_type = other DNA
ttaatggaagagttgctgaggg

SEQ ID NO: 112243 - DNA, 22 bp, synthetic construct
  misc_feature 1..22: note = chemically synthesized
  source 1..22: mol_type = other DNA
atggaagagttgctgaggggta

SEQ ID NO: 112244 - DNA, 22 bp, synthetic construct
  misc_feature 1..22: note = chemically synthesized
  source 1..22: mol_type = other DNA
ctgaggggtatgcttacttgtc

SEQ ID NO: 112245 - DNA, 22 bp, synthetic construct
  misc_feature 1..22: note = chemically synthesized
  source 1..22: mol_type = other DNA
aggggtatgcttacttgtccag

SEQ ID NO: 112246 - DNA, 22 bp, synthetic construct
  misc_feature 1..22: note = chemically synthesized
  source 1..22: mol_type = other DNA
acttgtccagttgtgtgtgact

SEQ ID NO: 112247 - DNA, 22 bp, synthetic construct
  misc_feature 1..22: note = chemically synthesized
  source 1..22: mol_type = other DNA
cttgtccagttgtgtgtgactt

SEQ ID NO: 112248 - DNA, 22 bp, synthetic construct
  misc_feature 1..22: note = chemically synthesized
  source 1..22: mol_type = other DNA
gtccagttgtgtgtgacttaga

SEQ ID NO: 112249 - DNA, 22 bp, synthetic construct
  misc_feature 1..22: note = chemically synthesized
  source 1..22: mol_type = other DNA
tccagttgtgtgtgacttagag

SEQ ID NO: 112250 - DNA, 22 bp, synthetic construct
  misc_feature 1..22: note = chemically synthesized
  source 1..22: mol_type = other DNA
tgtgtgacttagaggtgaaccc

SEQ ID NO: 112251 - DNA, 22 bp, synthetic construct
  misc_feature 1..22: note = chemically synthesized
  source 1..22: mol_type = other DNA
agaggtgaacccagtgggcaaa

SEQ ID NO: 112252 - DNA, 22 bp, synthetic construct
  misc_feature 1..22: note = chemically synthesized
  source 1..22: mol_type = other DNA
gaggtgaacccagtgggcaaaa

SEQ ID NO: 112253 - DNA, 22 bp, synthetic construct
  misc_feature 1..22: note = chemically synthesized
  source 1..22: mol_type = other DNA
aagtaggaagttaaggatgagg

SEQ ID NO: 112254 - DNA, 22 bp, synthetic construct
  misc_feature 1..22: note = chemically synthesized
  source 1..22: mol_type = other DNA
agtaggaagttaaggatgaggg

SEQ ID NO: 112255 - DNA, 22 bp, synthetic construct
  misc_feature 1..22: note = chemically synthesized
  source 1..22: mol_type = other DNA
aggatgagggaaacaggaagga

SEQ ID NO: 112256 - DNA, 22 bp, synthetic construct
  misc_feature 1..22: note = chemically synthesized
  source 1..22: mol_type = other DNA
aaaaggagctcaagggaaggtt

SEQ ID NO: 112257 - DNA, 22 bp, synthetic construct
  misc_feature 1..22: note = chemically synthesized
  source 1..22: mol_type = other DNA
aagggaaggttcctctgtgggt

SEQ ID NO: 112258 - DNA, 22 bp, synthetic construct
  misc_feature 1..22: note = chemically synthesized
  source 1..22: mol_type = other DNA
ctctgtgggtagcctgttaaag

SEQ ID NO: 112259 - DNA, 22 bp, synthetic construct
  misc_feature 1..22: note = chemically synthesized
  source 1..22: mol_type = other DNA
tgtgggtagcctgttaaagaaa

SEQ ID NO: 112260 - DNA, 22 bp, synthetic construct
  misc_feature 1..22: note = chemically synthesized
  source 1..22: mol_type = other DNA
tgggtagcctgttaaagaaaag

SEQ ID NO: 112261 - DNA, 22 bp, synthetic construct
  misc_feature 1..22: note = chemically synthesized
  source 1..22: mol_type = other DNA
ttaaagaaaaggctacattaca

SEQ ID NO: 112262 - DNA, 22 bp, synthetic construct
  misc_feature 1..22: note = chemically synthesized
  source 1..22: mol_type = other DNA
aagaaaaggctacattacagac

SEQ ID NO: 112263 - DNA, 22 bp, synthetic construct
  misc_feature 1..22: note = chemically synthesized
  source 1..22: mol_type = other DNA
cattacagactcatgcctgtaa

SEQ ID NO: 112264 - DNA, 22 bp, synthetic construct
  misc_feature 1..22: note = chemically synthesized
  source 1..22: mol_type = other DNA
cagactcatgcctgtaatccca

SEQ ID NO: 112265 - DNA, 22 bp, synthetic construct
  misc_feature 1..22: note = chemically synthesized
  source 1..22: mol_type = other DNA
atgcctgtaatcccagcacttt

SEQ ID NO: 112266 - DNA, 22 bp, synthetic construct
  misc_feature 1..22: note = chemically synthesized
  source 1..22: mol_type = other DNA
taatcccagcactttgggtggc

SEQ ID NO: 112267 - DNA, 22 bp, synthetic construct
  misc_feature 1..22: note = chemically synthesized
  source 1..22: mol_type = other DNA
tgggtggctgaggcaggaggat

SEQ ID NO: 112268 - DNA, 22 bp, synthetic construct
  misc_feature 1..22: note = chemically synthesized
  source 1..22: mol_type = other DNA
gggtggctgaggcaggaggatc

SEQ ID NO: 112269 - DNA, 22 bp, synthetic construct
  misc_feature 1..22: note = chemically synthesized
  source 1..22: mol_type = other DNA
ggtggctgaggcaggaggatca

SEQ ID NO: 112270 - DNA, 22 bp, synthetic construct
  misc_feature 1..22: note = chemically synthesized
  source 1..22: mol_type = other DNA
aggcaggaggatcacctgaggg

SEQ ID NO: 112271 - DNA, 22 bp, synthetic construct
  misc_feature 1..22: note = chemically synthesized
  source 1..22: mol_type = other DNA
agggcaagagttcgagaccagc

SEQ ID NO: 112272 - DNA, 22 bp, synthetic construct
  misc_feature 1..22: note = chemically synthesized
  source 1..22: mol_type = other DNA
gagaccagcctgaccaacatgg

SEQ ID NO: 112273 - DNA, 22 bp, synthetic construct
  misc_feature 1..22: note = chemically synthesized
  source 1..22: mol_type = other DNA
accaacatggtgaaaccctgtc

SEQ ID NO: 112274 - DNA, 22 bp, synthetic construct
  misc_feature 1..22: note = chemically synthesized
  source 1..22: mol_type = other DNA
tctctaataaaaatacaaaaaa

SEQ ID NO: 112275 - DNA, 22 bp, synthetic construct
  misc_feature 1..22: note = chemically synthesized
  source 1..22: mol_type = other DNA
taataaaaatacaaaaaaatta

SEQ ID NO: 112276 - DNA, 22 bp, synthetic construct
  misc_feature 1..22: note = chemically synthesized
  source 1..22: mol_type = other DNA
ataaaaatacaaaaaaattagc

SEQ ID NO: 112277 - DNA, 22 bp, synthetic construct
  misc_feature 1..22: note = chemically synthesized
  source 1..22: mol_type = other DNA
gcagggcctggtggcagatgcc

SEQ ID NO: 112278 - DNA, 22 bp, synthetic construct
  misc_feature 1..22: note = chemically synthesized
  source 1..22: mol_type = other DNA
gtggcagatgcctgtaattgca

SEQ ID NO: 112279 - DNA, 22 bp, synthetic construct
  misc_feature 1..22: note = chemically synthesized
  source 1..22: mol_type = other DNA
taattgcagctacacaggaggc

SEQ ID NO: 112280 - DNA, 22 bp, synthetic construct
  misc_feature 1..22: note = chemically synthesized
  source 1..22: mol_type = other DNA
cagctacacaggaggctgaggt

SEQ ID NO: 112281 - DNA, 22 bp, synthetic construct
  misc_feature 1..22: note = chemically synthesized
  source 1..22: mol_type = other DNA
cacaggaggctgaggtaggaga

SEQ ID NO: 112282 - DNA, 22 bp, synthetic construct
  misc_feature 1..22: note = chemically synthesized
  source 1..22: mol_type = other DNA
aggtaggagaatcgcttgaacc

SEQ ID NO: 112283 - DNA, 22 bp, synthetic construct
  misc_feature 1..22: note = chemically synthesized
  source 1..22: mol_type = other DNA
gaacctgggaggcggaggttgc

SEQ ID NO: 112284 - DNA, 22 bp, synthetic construct
  misc_feature 1..22: note = chemically synthesized
  source 1..22: mol_type = other DNA
aacctgggaggcggaggttgca

SEQ ID NO: 112285 - DNA, 22 bp, synthetic construct
  misc_feature 1..22: note = chemically synthesized
  source 1..22: mol_type = other DNA
ggaggcggaggttgcagtgagc

SEQ ID NO: 112286 - DNA, 22 bp, synthetic construct
  misc_feature 1..22: note = chemically synthesized
  source 1..22: mol_type = other DNA
cagtgagccgagatcgcgccat

SEQ ID NO: 112287 - DNA, 22 bp, synthetic construct
  misc_feature 1..22: note = chemically synthesized
  source 1..22: mol_type = other DNA
cactccagcagcctggaaggca

SEQ ID NO: 112288 - DNA, 22 bp, synthetic construct
  misc_feature 1..22: note = chemically synthesized
  source 1..22: mol_type = other DNA
cagcagcctggaaggcaaaagc

SEQ ID NO: 112289 - DNA, 22 bp, synthetic construct
  misc_feature 1..22: note = chemically synthesized
  source 1..22: mol_type = other DNA
gaaggcaaaagcaagatgagaa

SEQ ID NO: 112290 - DNA, 22 bp, synthetic construct
  misc_feature 1..22: note = chemically synthesized
  source 1..22: mol_type = other DNA
acttgagattcaaagtctttag

SEQ ID NO: 112291 - DNA, 22 bp, synthetic construct
  misc_feature 1..22: note = chemically synthesized
  source 1..22: mol_type = other DNA
gagattcaaagtctttagaata

SEQ ID NO: 112292 - DNA, 22 bp, synthetic construct
  misc_feature 1..22: note = chemically synthesized
  source 1..22: mol_type = other DNA
agattcaaagtctttagaataa

SEQ ID NO: 112293 - DNA, 22 bp, synthetic construct
  misc_feature 1..22: note = chemically synthesized
  source 1..22: mol_type = other DNA
aaagtctttagaataaaaatta

SEQ ID NO: 112294 - DNA, 22 bp, synthetic construct
  misc_feature 1..22: note = chemically synthesized
  source 1..22: mol_type = other DNA
tagaataaaaattaaaatttgg

SEQ ID NO: 112295 - DNA, 22 bp, synthetic construct
  misc_feature 1..22: note = chemically synthesized
  source 1..22: mol_type = other DNA
agaataaaaattaaaatttggg

SEQ ID NO: 112296 - DNA, 22 bp, synthetic construct
  misc_feature 1..22: note = chemically synthesized
  source 1..22: mol_type = other DNA
gaataaaaattaaaatttggga

SEQ ID NO: 112297 - DNA, 22 bp, synthetic construct
  misc_feature 1..22: note = chemically synthesized
  source 1..22: mol_type = other DNA
aaatttgggaaaataagtttgt

SEQ ID NO: 112298 - DNA, 22 bp, synthetic construct
  misc_feature 1..22: note = chemically synthesized
  source 1..22: mol_type = other DNA
gggaaaataagtttgtattgat

SEQ ID NO: 112299 - DNA, 22 bp, synthetic construct
  misc_feature 1..22: note = chemically synthesized
  source 1..22: mol_type = other DNA
ggaaaataagtttgtattgatg

SEQ ID NO: 112300 - DNA, 22 bp, synthetic construct
  misc_feature 1..22: note = chemically synthesized
  source 1..22: mol_type = other DNA
gtattgatgactaattccaatc

SEQ ID NO: 112301 - DNA, 22 bp, synthetic construct
  misc_feature 1..22: note = chemically synthesized
  source 1..22: mol_type = other DNA
tattgatgactaattccaatcc

SEQ ID NO: 112302 - DNA, 22 bp, synthetic construct
  misc_feature 1..22: note = chemically synthesized
  source 1..22: mol_type = other DNA
atgactaattccaatcccaagc

SEQ ID NO: 112303 - DNA, 22 bp, synthetic construct
  misc_feature 1..22: note = chemically synthesized
  source 1..22: mol_type = other DNA
attccaatcccaagcacgggtc

SEQ ID NO: 112304 - DNA, 22 bp, synthetic construct
  misc_feature 1..22: note = chemically synthesized
  source 1..22: mol_type = other DNA
caatcccaagcacgggtctctg

SEQ ID NO: 112305 - DNA, 22 bp, synthetic construct
  misc_feature 1..22: note = chemically synthesized
  source 1..22: mol_type = other DNA
tgtgcaatgcaggactgggaag

SEQ ID NO: 112306 - DNA, 22 bp, synthetic construct
  misc_feature 1..22: note = chemically synthesized
  source 1..22: mol_type = other DNA
tgcaatgcaggactgggaaggt

SEQ ID NO: 112307 - DNA, 22 bp, synthetic construct
  misc_feature 1..22: note = chemically synthesized
  source 1..22: mol_type = other DNA
ggaaggtttaggcaggggtgct

SEQ ID NO: 112308 - DNA, 22 bp, synthetic construct
  misc_feature 1..22: note = chemically synthesized
  source 1..22: mol_type = other DNA
aggcaggggtgctatctgattc

SEQ ID NO: 112309 - DNA, 22 bp, synthetic construct
  misc_feature 1..22: note = chemically synthesized
  source 1..22: mol_type = other DNA
ggcaggggtgctatctgattca

SEQ ID NO: 112310 - DNA, 22 bp, synthetic construct
  misc_feature 1..22: note = chemically synthesized
  source 1..22: mol_type = other DNA
tctgattcatgagacaacaggc

SEQ ID NO: 112311 - DNA, 22 bp, synthetic construct
  misc_feature 1..22: note = chemically synthesized
  source 1..22: mol_type = other DNA
attcatgagacaacaggcacaa

SEQ ID NO: 112312 - DNA, 22 bp, synthetic construct
  misc_feature 1..22: note = chemically synthesized
  source 1..22: mol_type = other DNA
atgagacaacaggcacaaagtt

SEQ ID NO: 112313 - DNA, 22 bp, synthetic construct
  misc_feature 1..22: note = chemically synthesized
  source 1..22: mol_type = other DNA
tagtccctgcctggacttggtg

SEQ ID NO: 112314 - DNA, 22 bp, synthetic construct
  misc_feature 1..22: note = chemically synthesized
  source 1..22: mol_type = other DNA
agtccctgcctggacttggtgt

SEQ ID NO: 112315 - DNA, 22 bp, synthetic construct
  misc_feature 1..22: note = chemically synthesized
  source 1..22: mol_type = other DNA
gtccctgcctggacttggtgtc

SEQ ID NO: 112316 - DNA, 22 bp, synthetic construct
  misc_feature 1..22: note = chemically synthesized
  source 1..22: mol_type = other DNA
cctggacttggtgtcatctctt

SEQ ID NO: 112317 - DNA, 22 bp, synthetic construct
  misc_feature 1..22: note = chemically synthesized
  source 1..22: mol_type = other DNA
gacttggtgtcatctcttgagc

SEQ ID NO: 112318 - DNA, 22 bp, synthetic construct
  misc_feature 1..22: note = chemically synthesized
  source 1..22: mol_type = other DNA
ggtgtcatctcttgagcacatg

SEQ ID NO: 112319 - DNA, 22 bp, synthetic construct
  misc_feature 1..22: note = chemically synthesized
  source 1..22: mol_type = other DNA
gtgtcatctcttgagcacatgc

SEQ ID NO: 112320 - DNA, 22 bp, synthetic construct
  misc_feature 1..22: note = chemically synthesized
  source 1..22: mol_type = other DNA
ttgagcacatgcctaatggtct

SEQ ID NO: 112321 - DNA, 22 bp, synthetic construct
  misc_feature 1..22: note = chemically synthesized
  source 1..22: mol_type = other DNA
gagcacatgcctaatggtctcc

SEQ ID NO: 112322 - DNA, 22 bp, synthetic construct
  misc_feature 1..22: note = chemically synthesized
  source 1..22: mol_type = other DNA
agcacatgcctaatggtctcct

SEQ ID NO: 112323 - DNA, 22 bp, synthetic construct
  misc_feature 1..22: note = chemically synthesized
  source 1..22: mol_type = other DNA
atggtctcctaacattcccctc

SEQ ID NO: 112324 - DNA, 22 bp, synthetic construct
  misc_feature 1..22: note = chemically synthesized
  source 1..22: mol_type = other DNA
ctaacattcccctcccaaagtt

SEQ ID NO: 112325 - DNA, 22 bp, synthetic construct
  misc_feature 1..22: note = chemically synthesized
  source 1..22: mol_type = other DNA
acattcccctcccaaagtttga

SEQ ID NO: 112326 - DNA, 22 bp, synthetic construct
  misc_feature 1..22: note = chemically synthesized
  source 1..22: mol_type = other DNA
ccctcccaaagtttgaaaatgc

SEQ ID NO: 112327 - DNA, 22 bp, synthetic construct
  misc_feature 1..22: note = chemically synthesized
  source 1..22: mol_type = other DNA
ccaaagtttgaaaatgcttcca

SEQ ID NO: 112328 - DNA, 22 bp, synthetic construct
  misc_feature 1..22: note = chemically synthesized
  source 1..22: mol_type = other DNA
gaaaatgcttccacctcccgct

SEQ ID NO: 112329 - DNA, 22 bp, synthetic construct
  misc_feature 1..22: note = chemically synthesized
  source 1..22: mol_type = other DNA
aaaatgcttccacctcccgctg

SEQ ID NO: 112330 - DNA, 22 bp, synthetic construct
  misc_feature 1..22: note = chemically synthesized
  source 1..22: mol_type = other DNA
ccacctcccgctgcagtccatg

SEQ ID NO: 112331 - DNA, 22 bp, synthetic construct
  misc_feature 1..22: note = chemically synthesized
  source 1..22: mol_type = other DNA
cacctcccgctgcagtccatga

SEQ ID NO: 112332 - DNA, 22 bp, synthetic construct
  misc_feature 1..22: note = chemically synthesized
  source 1..22: mol_type = other DNA
ccgctgcagtccatgaaccagg

SEQ ID NO: 112333 - DNA, 22 bp, synthetic construct
  misc_feature 1..22: note = chemically synthesized
  source 1..22: mol_type = other DNA
cagtccatgaaccaggataaaa

SEQ ID NO: 112334 - DNA, 22 bp, synthetic construct
  misc_feature 1..22: note = chemically synthesized
  source 1..22: mol_type = other DNA
tctagcagcagagaccaaagac

SEQ ID NO: 112335 - DNA, 22 bp, synthetic construct
  misc_feature 1..22: note = chemically synthesized
  source 1..22: mol_type = other DNA
tagcagcagagaccaaagacat

SEQ ID NO: 112336 - DNA, 22 bp, synthetic construct
  misc_feature 1..22: note = chemically synthesized
  source 1..22: mol_type = other DNA
gcagcagagaccaaagacattc

SEQ ID NO: 112337 - DNA, 22 bp, synthetic construct
  misc_feature 1..22: note = chemically synthesized
  source 1..22: mol_type = other DNA
tctcaagtctcaggaatgtggt

SEQ ID NO: 112338 - DNA, 22 bp, synthetic construct
  misc_feature 1..22: note = chemically synthesized
  source 1..22: mol_type = other DNA
tcaagtctcaggaatgtggttc

SEQ ID NO: 112339 - DNA, 22 bp, synthetic construct
  misc_feature 1..22: note = chemically synthesized
  source 1..22: mol_type = other DNA
aagtctcaggaatgtggttctg

SEQ ID NO: 112340 - DNA, 22 bp, synthetic construct
  misc_feature 1..22: note = chemically synthesized
  source 1..22: mol_type = other DNA
aggaatgtggttctgaaggaag

SEQ ID NO: 112341 - DNA, 22 bp, synthetic construct
  misc_feature 1..22: note = chemically synthesized
  source 1..22: mol_type = other DNA
tgaaggaagagaagctctgcca

SEQ ID NO: 112342 - DNA, 22 bp, synthetic construct
  misc_feature 1..22: note = chemically synthesized
  source 1..22: mol_type = other DNA
aaggaagagaagctctgccaca

SEQ ID NO: 112343 - DNA, 22 bp, synthetic construct
  misc_feature 1..22: note = chemically synthesized
  source 1..22: mol_type = other DNA
tgccacacatacacatgccacc

SEQ ID NO: 112344 - DNA, 22 bp, synthetic construct
  misc_feature 1..22: note = chemically synthesized
  source 1..22: mol_type = other DNA
ccacacatacacatgccacctt

SEQ ID NO: 112345 - DNA, 22 bp, synthetic construct
  misc_feature 1..22: note = chemically synthesized
  source 1..22: mol_type = other DNA
gcaaagccacttagtgacacag

SEQ ID NO: 112346 - DNA, 22 bp, synthetic construct
  misc_feature 1..22: note = chemically synthesized
  source 1..22: mol_type = other DNA
caaagccacttagtgacacaga

SEQ ID NO: 112347 - DNA, 22 bp, synthetic construct
  misc_feature 1..22: note = chemically synthesized
  source 1..22: mol_type = other DNA
agtgacacagagttttagttat

SEQ ID NO: 112348 - DNA, 22 bp, synthetic construct
  misc_feature 1..22: note = chemically synthesized
  source 1..22: mol_type = other DNA
gtgacacagagttttagttatt

SEQ ID NO: 112349 - DNA, 22 bp, synthetic construct
  misc_feature 1..22: note = chemically synthesized
  source 1..22: mol_type = other DNA
tagttatttcattgtgaactgg

SEQ ID NO: 112350 - DNA, 22 bp, synthetic construct
  misc_feature 1..22: note = chemically synthesized
  source 1..22: mol_type = other DNA
agttatttcattgtgaactgga

SEQ ID NO: 112351 - DNA, 22 bp, synthetic construct
  misc_feature 1..22: note = chemically synthesized
  source 1..22: mol_type = other DNA
gttatttcattgtgaactggaa

SEQ ID NO: 112352 - DNA, 22 bp, synthetic construct
  misc_feature 1..22: note = chemically synthesized
  source 1..22: mol_type = other DNA
tttcattgtgaactggaataaa

SEQ ID NO: 112353 - DNA, 22 bp, synthetic construct
  misc_feature 1..22: note = chemically synthesized
  source 1..22: mol_type = other DNA
cattgtgaactggaataaaatc

SEQ ID NO: 112354 - DNA, 22 bp, synthetic construct
  misc_feature 1..22: note = chemically synthesized
  source 1..22: mol_type = other DNA
attgtgaactggaataaaatca

SEQ ID NO: 112355 - DNA, 22 bp, synthetic construct
  misc_feature 1..22: note = chemically synthesized
  source 1..22: mol_type = other DNA
tgaactggaataaaatcatttt

SEQ ID NO: 112356 - DNA, 22 bp, synthetic construct
  misc_feature 1..22: note = chemically synthesized
  source 1..22: mol_type = other DNA
gaataaaatcattttgaaagga

SEQ ID NO: 112357 - DNA, 22 bp, synthetic construct
  misc_feature 1..22: note = chemically synthesized
  source 1..22: mol_type = other DNA
tgaaaggagatttttgaagtta

SEQ ID NO: 112358 - DNA, 22 bp, synthetic construct
  misc_feature 1..22: note = chemically synthesized
  source 1..22: mol_type = other DNA
gaaaggagatttttgaagttaa

SEQ ID NO: 112359 - DNA, 22 bp, synthetic construct
  misc_feature 1..22: note = chemically synthesized
  source 1..22: mol_type = other DNA
aaaggagatttttgaagttaaa

SEQ ID NO: 112360 - DNA, 22 bp, synthetic construct
  misc_feature 1..22: note = chemically synthesized
  source 1..22: mol_type = other DNA
ttgaagttaaaagcattgccag

SEQ ID NO: 112361 - DNA, 22 bp, synthetic construct
  misc_feature 1..22: note = chemically synthesized
  source 1..22: mol_type = other DNA
tgaagttaaaagcattgccaga

SEQ ID NO: 112362 - DNA, 22 bp, synthetic construct
  misc_feature 1..22: note = chemically synthesized
  source 1..22: mol_type = other DNA
gaagttaaaagcattgccagaa

SEQ ID NO: 112363 - DNA, 22 bp, synthetic construct
  misc_feature 1..22: note = chemically synthesized
  source 1..22: mol_type = other DNA
aagttaaaagcattgccagaaa

SEQ ID NO: 112364 - DNA, 22 bp, synthetic construct
  misc_feature 1..22: note = chemically synthesized
  source 1..22: mol_type = other DNA
aaagcattgccagaaaggagtc

SEQ ID NO: 112365 - DNA, 22 bp, synthetic construct
  misc_feature 1..22: note = chemically synthesized
  source 1..22: mol_type = other DNA
ccagaaaggagtcacaatccag

SEQ ID NO: 112366 - DNA, 22 bp, synthetic construct
  misc_feature 1..22: note = chemically synthesized
  source 1..22: mol_type = other DNA
agagagggttcttggatttcgt

SEQ ID NO: 112367 - DNA, 22 bp, synthetic construct
  misc_feature 1..22: note = chemically synthesized
  source 1..22: mol_type = other DNA
ttggatttcgtgcccaagaaag

SEQ ID NO: 112368 - DNA, 22 bp, synthetic construct
  misc_feature 1..22: note = chemically synthesized
  source 1..22: mol_type = other DNA
ggatttcgtgcccaagaaagaa

SEQ ID NO: 112369 - DNA, 22 bp, synthetic construct
  misc_feature 1..22: note = chemically synthesized
  source 1..22: mol_type = other DNA
gatttcgtgcccaagaaagaat

SEQ ID NO: 112370 - DNA, 22 bp, synthetic construct
  misc_feature 1..22: note = chemically synthesized
  source 1..22: mol_type = other DNA
cgtgcccaagaaagaatttggg

SEQ ID NO: 112371 - DNA, 22 bp, synthetic construct
  misc_feature 1..22: note = chemically synthesized
  source 1..22: mol_type = other DNA
gtgcccaagaaagaatttgggg

SEQ ID NO: 112372 - DNA, 22 bp, synthetic construct
  misc_feature 1..22: note = chemically synthesized
  source 1..22: mol_type = other DNA
ggggcaaatccatacagaaaag

SEQ ID NO: 112373 - DNA, 22 bp, synthetic construct
  misc_feature 1..22: note = chemically synthesized
  source 1..22: mol_type = other DNA
gggcaaatccatacagaaaagt

SEQ ID NO: 112374 - DNA, 22 bp, synthetic construct
  misc_feature 1..22: note = chemically synthesized
  source 1..22: mol_type = other DNA
attaagaaagtaaaggagtaaa

SEQ ID NO: 112375 - DNA, 22 bp, synthetic construct
  misc_feature 1..22: note = chemically synthesized
  source 1..22: mol_type = other DNA
agaaagtaaaggagtaaaataa

SEQ ID NO: 112376 - DNA, 22 bp, synthetic construct
  misc_feature 1..22: note = chemically synthesized
  source 1..22: mol_type = other DNA
ccctataggcagaacagtcctg

SEQ ID NO: 112377 - DNA, 22 bp, synthetic construct
  misc_feature 1..22: note = chemically synthesized
  source 1..22: mol_type = other DNA
taggcagaacagtcctgaggac

SEQ ID NO: 112378 - DNA, 22 bp, synthetic construct
  misc_feature 1..22: note = chemically synthesized
  source 1..22: mol_type = other DNA
aggactgctggttgcccatttt

SEQ ID NO: 112379 - DNA, 22 bp, synthetic construct
  misc_feature 1..22: note = chemically synthesized
  source 1..22: mol_type = other DNA
ctggttgcccatttttatggtt

SEQ ID NO: 112380 - DNA, 22 bp, synthetic construct
  misc_feature 1..22: note = chemically synthesized
  source 1..22: mol_type = other DNA
gttgcccatttttatggttatt

SEQ ID NO: 112381 - DNA, 22 bp, synthetic construct
  misc_feature 1..22: note = chemically synthesized
  source 1..22: mol_type = other DNA
cccatttttatggttatttatt

SEQ ID NO: 112382 - DNA, 22 bp, synthetic construct
  misc_feature 1..22: note = chemically synthesized
  source 1..22: mol_type = other DNA
ttatggttatttattgatgata

SEQ ID NO: 112383 - DNA, 22 bp, synthetic construct
  misc_feature 1..22: note = chemically synthesized
  source 1..22: mol_type = other DNA
tatggttatttattgatgatat

SEQ ID NO: 112384 - DNA, 22 bp, synthetic construct
  misc_feature 1..22: note = chemically synthesized
  source 1..22: mol_type = other DNA
atggttatttattgatgatatg

SEQ ID NO: 112385 - DNA, 22 bp, synthetic construct
  misc_feature 1..22: note = chemically synthesized
  source 1..22: mol_type = other DNA
tggttatttattgatgatatgc

SEQ ID NO: 112386 - DNA, 22 bp, synthetic construct
  misc_feature 1..22: note = chemically synthesized
  source 1..22: mol_type = other DNA
tttattgatgatatgctaaaca

SEQ ID NO: 112387 - DNA, 22 bp, synthetic construct
  misc_feature 1..22: note = chemically synthesized
  source 1..22: mol_type = other DNA
attgatgatatgctaaacaagg

SEQ ID NO: 112388 - DNA, 22 bp, synthetic construct
  misc_feature 1..22: note = chemically synthesized
  source 1..22: mol_type = other DNA
ttgatgatatgctaaacaaggg

SEQ ID NO: 112389 - DNA, 22 bp, synthetic construct
  misc_feature 1..22: note = chemically synthesized
  source 1..22: mol_type = other DNA
atgatatgctaaacaaggggtg

SEQ ID NO: 112390 - DNA, 22 bp, synthetic construct
  misc_feature 1..22: note = chemically synthesized
  source 1..22: mol_type = other DNA
aacaaggggtggattattcatg

SEQ ID NO: 112391 - DNA, 22 bp, synthetic construct
  misc_feature 1..22: note = chemically synthesized
  source 1..22: mol_type = other DNA
ttcatgcctccccttttcagac

SEQ ID NO: 112392 - DNA, 22 bp, synthetic construct
  misc_feature 1..22: note = chemically synthesized
  source 1..22: mol_type = other DNA
atgcctccccttttcagaccgc

SEQ ID NO: 112393 - DNA, 22 bp, synthetic construct
  misc_feature 1..22: note = chemically synthesized
  source 1..22: mol_type = other DNA
cccttttcagaccgcttagcgt

SEQ ID NO: 112394 - DNA, 22 bp, synthetic construct
  misc_feature 1..22: note = chemically synthesized
  source 1..22: mol_type = other DNA
ttcagaccgcttagcgtaactt

SEQ ID NO: 112395 - DNA, 22 bp, synthetic construct
  misc_feature 1..22: note = chemically synthesized
  source 1..22: mol_type = other DNA
tcagaccgcttagcgtaacttc

SEQ ID NO: 112396 - DNA, 22 bp, synthetic construct
  misc_feature 1..22: note = chemically synthesized
  source 1..22: mol_type = other DNA
cagaccgcttagcgtaacttcc

SEQ ID NO: 112397 - DNA, 22 bp, synthetic construct
  misc_feature 1..22: note = chemically synthesized
  source 1..22: mol_type = other DNA
agaccgcttagcgtaacttcct

SEQ ID NO: 112398 - DNA, 22 bp, synthetic construct
  misc_feature 1..22: note = chemically synthesized
  source 1..22: mol_type = other DNA
agcgtaacttcctgatgttgcc

SEQ ID NO: 112399 - DNA, 22 bp, synthetic construct
  misc_feature 1..22: note = chemically synthesized
  source 1..22: mol_type = other DNA
gcgtaacttcctgatgttgcca

SEQ ID NO: 112400 - DNA, 22 bp, synthetic construct
  misc_feature 1..22: note = chemically synthesized
  source 1..22: mol_type = other DNA
cctgatgttgccatggcatttc

SEQ ID NO: 112401 - DNA, 22 bp, synthetic construct
  misc_feature 1..22: note = chemically synthesized
  source 1..22: mol_type = other DNA
ctgatgttgccatggcatttct

SEQ ID NO: 112402 - DNA, 22 bp, synthetic construct
  misc_feature 1..22: note = chemically synthesized
  source 1..22: mol_type = other DNA
atgttgccatggcatttctaaa

SEQ ID NO: 112403 - DNA, 22 bp, synthetic construct
  misc_feature 1..22: note = chemically synthesized
  source 1..22: mol_type = other DNA
ccatggcatttctaaacagtca

SEQ ID NO: 112404 - DNA, 22 bp, synthetic construct
  misc_feature 1..22: note = chemically synthesized
  source 1..22: mol_type = other DNA
ctaaacagtcatagtgctggtg

SEQ ID NO: 112405 - DNA, 22 bp, synthetic construct
  misc_feature 1..22: note = chemically synthesized
  source 1..22: mol_type = other DNA
taaacagtcatagtgctggtgg

SEQ ID NO: 112406 - DNA, 22 bp, synthetic construct
  misc_feature 1..22: note = chemically synthesized
  source 1..22: mol_type = other DNA
aacagtcatagtgctggtggga

SEQ ID NO: 112407 - DNA, 22 bp, synthetic construct
  misc_feature 1..22: note = chemically synthesized
  source 1..22: mol_type = other DNA
gtgggagagtagcagtgaggac

SEQ ID NO: 112408 - DNA, 22 bp, synthetic construct
  misc_feature 1..22: note = chemically synthesized
  source 1..22: mol_type = other DNA
ccagaggtcactctcatcacaa

SEQ ID NO: 112409 - DNA, 22 bp, synthetic construct
  misc_feature 1..22: note = chemically synthesized
  source 1..22: mol_type = other DNA
tcatcacaatcttggtttggtg

SEQ ID NO: 112410 - DNA, 22 bp, synthetic construct
  misc_feature 1..22: note = chemically synthesized
  source 1..22: mol_type = other DNA
atcacaatcttggtttggtggg

SEQ ID NO: 112411 - DNA, 22 bp, synthetic construct
  misc_feature 1..22: note = chemically synthesized
  source 1..22: mol_type = other DNA
ggtttggtgggtttcagccagc

SEQ ID NO: 112412 - DNA, 22 bp, synthetic construct
  misc_feature 1..22: note = chemically synthesized
  source 1..22: mol_type = other DNA
gtttggtgggtttcagccagct

SEQ ID NO: 112413 - DNA, 22 bp, synthetic construct
  misc_feature 1..22: note = chemically synthesized
  source 1..22: mol_type = other DNA
ggtgggtttcagccagcttctt

SEQ ID NO: 112414 - DNA, 22 bp, synthetic construct
  misc_feature 1..22: note = chemically synthesized
  source 1..22: mol_type = other DNA
gtgggtttcagccagcttcttt

SEQ ID NO: 112415 - DNA, 22 bp, synthetic construct
  misc_feature 1..22: note = chemically synthesized
  source 1..22: mol_type = other DNA
cagccagcttctttactgcaaa

SEQ ID NO: 112416 - DNA, 22 bp, synthetic construct
  misc_feature 1..22: note = chemically synthesized
  source 1..22: mol_type = other DNA
agccagcttctttactgcaaac

SEQ ID NO: 112417 - DNA, 22 bp, synthetic construct
  misc_feature 1..22: note = chemically synthesized
  source 1..22: mol_type = other DNA
ctttactgcaaactgttttttc

SEQ ID NO: 112418 - DNA, 22 bp, synthetic construct
  misc_feature 1..22: note = chemically synthesized
  source 1..22: mol_type = other DNA
tttactgcaaactgttttttca

SEQ ID NO: 112419 - DNA, 22 bp, synthetic construct
  misc_feature 1..22: note = chemically synthesized
  source 1..22: mol_type = other DNA
tactgcaaactgttttttcagc

SEQ ID NO: 112420 - DNA, 22 bp, synthetic construct
  misc_feature 1..22: note = chemically synthesized
  source 1..22: mol_type = other DNA
actgcaaactgttttttcagca

SEQ ID NO: 112421 - DNA, 22 bp, synthetic construct
  misc_feature 1..22: note = chemically synthesized
  source 1..22: mol_type = other DNA
ctgcaaactgttttttcagcaa

SEQ ID NO: 112422 - DNA, 22 bp, synthetic construct
  misc_feature 1..22: note = chemically synthesized
  source 1..22: mol_type = other DNA
caaactgttttttcagcaaggt

SEQ ID NO: 112423 - DNA, 22 bp, synthetic construct
  misc_feature 1..22: note = chemically synthesized
  source 1..22: mol_type = other DNA
ttttttcagcaaggtctttatg

SEQ ID NO: 112424 - DNA, 22 bp, synthetic construct
  misc_feature 1..22: note = chemically synthesized
  source 1..22: mol_type = other DNA
tttcagcaaggtctttatgacc

SEQ ID NO: 112425 - DNA, 22 bp, synthetic construct
  misc_feature 1..22: note = chemically synthesized
  source 1..22: mol_type = other DNA
ttcagcaaggtctttatgacct

SEQ ID NO: 112426 - DNA, 22 bp, synthetic construct
  misc_feature 1..22: note = chemically synthesized
  source 1..22: mol_type = other DNA
tcagcaaggtctttatgacctg

SEQ ID NO: 112427 - DNA, 22 bp, synthetic construct
  misc_feature 1..22: note = chemically synthesized
  source 1..22: mol_type = other DNA
cagcaaggtctttatgacctgt

SEQ ID NO: 112428 - DNA, 22 bp, synthetic construct
  misc_feature 1..22: note = chemically synthesized
  source 1..22: mol_type = other DNA
agcaaggtctttatgacctgta

SEQ ID NO: 112429 - DNA, 22 bp, synthetic construct
  misc_feature 1..22: note = chemically synthesized
  source 1..22: mol_type = other DNA
tatgacctgtatcttgtgccaa

SEQ ID NO: 112430 - DNA, 22 bp, synthetic construct
  misc_feature 1..22: note = chemically synthesized
  source 1..22: mol_type = other DNA
atgacctgtatcttgtgccaac

SEQ ID NO: 112431 - DNA, 22 bp, synthetic construct
  misc_feature 1..22: note = chemically synthesized
  source 1..22: mol_type = other DNA
tgacctgtatcttgtgccaacc

SEQ ID NO: 112432 - DNA, 22 bp, synthetic construct
  misc_feature 1..22: note = chemically synthesized
  source 1..22: mol_type = other DNA
tatcttgtgccaacctcttatc

SEQ ID NO: 112433 - DNA, 22 bp, synthetic construct
  misc_feature 1..22: note = chemically synthesized
  source 1..22: mol_type = other DNA
gtgccaacctcttatctcatcc

SEQ ID NO: 112434 - DNA, 22 bp, synthetic construct
  misc_feature 1..22: note = chemically synthesized
  source 1..22: mol_type = other DNA
tgccaacctcttatctcatcct

SEQ ID NO: 112435 - DNA, 22 bp, synthetic construct
  misc_feature 1..22: note = chemically synthesized
  source 1..22: mol_type = other DNA
ttatctcatcctgtgactgaga

SEQ ID NO: 112436 - DNA, 22 bp, synthetic construct
  misc_feature 1..22: note = chemically synthesized
  source 1..22: mol_type = other DNA
atctcatcctgtgactgagaat

SEQ ID NO: 112437 - DNA, 22 bp, synthetic construct
  misc_feature 1..22: note = chemically synthesized
  source 1..22: mol_type = other DNA
tctcatcctgtgactgagaatg

SEQ ID NO: 112438 - DNA, 22 bp, synthetic construct
  misc_feature 1..22: note = chemically synthesized
  source 1..22: mol_type = other DNA
atcctgtgactgagaatgccta

SEQ ID NO: 112439 - DNA, 22 bp, synthetic construct
  misc_feature 1..22: note = chemically synthesized
  source 1..22: mol_type = other DNA
tgactgagaatgcctaactttc

SEQ ID NO: 112440 - DNA, 22 bp, synthetic construct
  misc_feature 1..22: note = chemically synthesized
  source 1..22: mol_type = other DNA
agaatgcctaactttctgggaa

SEQ ID NO: 112441 - DNA, 22 bp, synthetic construct
  misc_feature 1..22: note = chemically synthesized
  source 1..22: mol_type = other DNA
actttctgggaatacagcccag

SEQ ID NO: 112442 - DNA, 22 bp, synthetic construct
  misc_feature 1..22: note = chemically synthesized
  source 1..22: mol_type = other DNA
tctgggaatacagcccagtagg

SEQ ID NO: 112443 - DNA, 22 bp, synthetic construct
  misc_feature 1..22: note = chemically synthesized
  source 1..22: mol_type = other DNA
ctgggaatacagcccagtaggt

SEQ ID NO: 112444 - DNA, 22 bp, synthetic construct
  misc_feature 1..22: note = chemically synthesized
  source 1..22: mol_type = other DNA
tgggaatacagcccagtaggtc

SEQ ID NO: 112445 - DNA, 22 bp, synthetic construct
  misc_feature 1..22: note = chemically synthesized
  source 1..22: mol_type = other DNA
ggaatacagcccagtaggtctc

SEQ ID NO: 112446 - DNA, 22 bp, synthetic construct
  misc_feature 1..22: note = chemically synthesized
  source 1..22: mol_type = other DNA
agccttattgtacccagctcct

SEQ ID NO: 112447 - DNA, 22 bp, synthetic construct
  misc_feature 1..22: note = chemically synthesized
  source 1..22: mol_type = other DNA
attgtacccagctcctatttaa

SEQ ID NO: 112448 - DNA, 22 bp, synthetic construct
  misc_feature 1..22: note = chemically synthesized
  source 1..22: mol_type = other DNA
ttgtacccagctcctatttaag

SEQ ID NO: 112449 - DNA, 22 bp, synthetic construct
  misc_feature 1..22: note = chemically synthesized
  source 1..22: mol_type = other DNA
tacccagctcctatttaagatg

SEQ ID NO: 112450 - DNA, 22 bp, synthetic construct
  misc_feature 1..22: note = chemically synthesized
  source 1..22: mol_type = other DNA
ctatttaagatggagttgctct

SEQ ID NO: 112451 - DNA, 22 bp, synthetic construct
  misc_feature 1..22: note = chemically synthesized
  source 1..22: mol_type = other DNA
tttaagatggagttgctctggt

SEQ ID NO: 112452 - DNA, 22 bp, synthetic construct
  misc_feature 1..22: note = chemically synthesized
  source 1..22: mol_type = other DNA
aagatggagttgctctggttca

SEQ ID NO: 112453 - DNA, 22 bp, synthetic construct
  misc_feature 1..22: note = chemically synthesized
  source 1..22: mol_type = other DNA
agatggagttgctctggttcaa

SEQ ID NO: 112454 - DNA, 22 bp, synthetic construct
  misc_feature 1..22: note = chemically synthesized
  source 1..22: mol_type = other DNA
ctctggttcaaatgcctctgac

SEQ ID NO: 112455 - DNA, 22 bp, synthetic construct
  misc_feature 1..22: note = chemically synthesized
  source 1..22: mol_type = other DNA
tggttcaaatgcctctgacaaa

SEQ ID NO: 112456 - DNA, 22 bp, synthetic construct
  misc_feature 1..22: note = chemically synthesized
  source 1..22: mol_type = other DNA
gttcaaatgcctctgacaaaag

SEQ ID NO: 112457 - DNA, 22 bp, synthetic construct
  misc_feature 1..22: note = chemically synthesized
  source 1..22: mol_type = other DNA
aaatgcctctgacaaaaggaac

SEQ ID NO: 112458 - DNA, 22 bp, synthetic construct
  misc_feature 1..22: note = chemically synthesized
  source 1..22: mol_type = other DNA
tgacaaaaggaacaaaaatgtt

SEQ ID NO: 112459 - DNA, 22 bp, synthetic construct
  misc_feature 1..22: note = chemically synthesized
  source 1..22: mol_type = other DNA
acaaaaggaacaaaaatgttgt

SEQ ID NO: 112460 - DNA, 22 bp, synthetic construct
  misc_feature 1..22: note = chemically synthesized
  source 1..22: mol_type = other DNA
tttctggtatgctagcacccag

SEQ ID NO: 112461 - DNA, 22 bp, synthetic construct
  misc_feature 1..22: note = chemically synthesized
  source 1..22: mol_type = other DNA
ctggtatgctagcacccagaat

SEQ ID NO: 112462 - DNA, 22 bp, synthetic construct
  misc_feature 1..22: note = chemically synthesized
  source 1..22: mol_type = other DNA
tggtatgctagcacccagaata

SEQ ID NO: 112463 - DNA, 22 bp, synthetic construct
  misc_feature 1..22: note = chemically synthesized
  source 1..22: mol_type = other DNA
gtatgctagcacccagaataga

SEQ ID NO: 112464 - DNA, 22 bp, synthetic construct
  misc_feature 1..22: note = chemically synthesized
  source 1..22: mol_type = other DNA
gcacccagaatagaggcacttg

SEQ ID NO: 112465 - DNA, 22 bp, synthetic construct
  misc_feature 1..22: note = chemically synthesized
  source 1..22: mol_type = other DNA
gcacaatatatgcattcaaaaa

SEQ ID NO: 112466 - DNA, 22 bp, synthetic construct
  misc_feature 1..22: note = chemically synthesized
  source 1..22: mol_type = other DNA
cacaatatatgcattcaaaaat

SEQ ID NO: 112467 - DNA, 22 bp, synthetic construct
  misc_feature 1..22: note = chemically synthesized
  source 1..22: mol_type = other DNA
aaaaatgtattttttttcactt

SEQ ID NO: 112468 - DNA, 22 bp, synthetic construct
  misc_feature 1..22: note = chemically synthesized
  source 1..22: mol_type = other DNA
tttttcacttgtgctttctgcc

SEQ ID NO: 112469 - DNA, 22 bp, synthetic construct
  misc_feature 1..22: note = chemically synthesized
  source 1..22: mol_type = other DNA
ttttcacttgtgctttctgcct

SEQ ID NO: 112470 - DNA, 22 bp, synthetic construct
  misc_feature 1..22: note = chemically synthesized
  source 1..22: mol_type = other DNA
tttcacttgtgctttctgccta

SEQ ID NO: 112471 - DNA, 22 bp, synthetic construct
  misc_feature 1..22: note = chemically synthesized
  source 1..22: mol_type = other DNA
ttcacttgtgctttctgcctat

SEQ ID NO: 112472 - DNA, 22 bp, synthetic construct
  misc_feature 1..22: note = chemically synthesized
  source 1..22: mol_type = other DNA
tcacttgtgctttctgcctata

SEQ ID NO: 112473 - DNA, 22 bp, synthetic construct
  misc_feature 1..22: note = chemically synthesized
  source 1..22: mol_type = other DNA
cacttgtgctttctgcctatat

SEQ ID NO: 112474 - DNA, 22 bp, synthetic construct
  misc_feature 1..22: note = chemically synthesized
  source 1..22: mol_type = other DNA
acttgtgctttctgcctatatc

SEQ ID NO: 112475 - DNA, 22 bp, synthetic construct
  misc_feature 1..22: note = chemically synthesized
  source 1..22: mol_type = other DNA
gtgctttctgcctatatctatt

SEQ ID NO: 112476 - DNA, 22 bp, synthetic construct
  misc_feature 1..22: note = chemically synthesized
  source 1..22: mol_type = other DNA
tgctttctgcctatatctattt

SEQ ID NO: 112477 - DNA, 22 bp, synthetic construct
  misc_feature 1..22: note = chemically synthesized
  source 1..22: mol_type = other DNA
tctgcctatatctatttttatg

SEQ ID NO: 112478 - DNA, 22 bp, synthetic construct
  misc_feature 1..22: note = chemically synthesized
  source 1..22: mol_type = other DNA
ctgcctatatctatttttatgt

SEQ ID NO: 112479 - DNA, 22 bp, synthetic construct
  misc_feature 1..22: note = chemically synthesized
  source 1..22: mol_type = other DNA
tgcctatatctatttttatgtc

SEQ ID NO: 112480 - DNA, 22 bp, synthetic construct
  misc_feature 1..22: note = chemically synthesized
  source 1..22: mol_type = other DNA
cctatatctatttttatgtcct

SEQ ID NO: 112481 - DNA, 22 bp, synthetic construct
  misc_feature 1..22: note = chemically synthesized
  source 1..22: mol_type = other DNA
tatctatttttatgtcctcatg

SEQ ID NO: 112482 - DNA, 22 bp, synthetic construct
  misc_feature 1..22: note = chemically synthesized
  source 1..22: mol_type = other DNA
tttttatgtcctcatgcttaaa

SEQ ID NO: 112483 - DNA, 22 bp, synthetic construct
  misc_feature 1..22: note = chemically synthesized
  source 1..22: mol_type = other DNA
ttatgtcctcatgcttaaatct

SEQ ID NO: 112484 - DNA, 22 bp, synthetic construct
  misc_feature 1..22: note = chemically synthesized
  source 1..22: mol_type = other DNA
tatgtcctcatgcttaaatctt

SEQ ID NO: 112485 - DNA, 22 bp, synthetic construct
  misc_feature 1..22: note = chemically synthesized
  source 1..22: mol_type = other DNA
atgtcctcatgcttaaatcttg

SEQ ID NO: 112486 - DNA, 22 bp, synthetic construct
  misc_feature 1..22: note = chemically synthesized
  source 1..22: mol_type = other DNA
tgtcctcatgcttaaatcttga

SEQ ID NO: 112487 - DNA, 22 bp, synthetic construct
  misc_feature 1..22: note = chemically synthesized
  source 1..22: mol_type = other DNA
atgcttaaatcttgaccaaggc

SEQ ID NO: 112488 - DNA, 22 bp, synthetic construct
  misc_feature 1..22: note = chemically synthesized
  source 1..22: mol_type = other DNA
aaatcttgaccaaggctatgca

SEQ ID NO: 112489 - DNA, 22 bp, synthetic construct
  misc_feature 1..22: note = chemically synthesized
  source 1..22: mol_type = other DNA
aatcttgaccaaggctatgcat

SEQ ID NO: 112490 - DNA, 22 bp, synthetic construct
  misc_feature 1..22: note = chemically synthesized
  source 1..22: mol_type = other DNA
gaccaaggctatgcattttcct

SEQ ID NO: 112491 - DNA, 22 bp, synthetic construct
  misc_feature 1..22: note = chemically synthesized
  source 1..22: mol_type = other DNA
accaaggctatgcattttccta

SEQ ID NO: 112492 - DNA, 22 bp, synthetic construct
  misc_feature 1..22: note = chemically synthesized
  source 1..22: mol_type = other DNA
tgcattttcctatccttactca

SEQ ID NO: 112493 - DNA, 22 bp, synthetic construct
  misc_feature 1..22: note = chemically synthesized
  source 1..22: mol_type = other DNA
tcctatccttactcagcagttt

SEQ ID NO: 112494 - DNA, 22 bp, synthetic construct
  misc_feature 1..22: note = chemically synthesized
  source 1..22: mol_type = other DNA
cctatccttactcagcagtttg

SEQ ID NO: 112495 - DNA, 22 bp, synthetic construct
  misc_feature 1..22: note = chemically synthesized
  source 1..22: mol_type = other DNA
ctatccttactcagcagtttgt

SEQ ID NO: 112496 - DNA, 22 bp, synthetic construct
  misc_feature 1..22: note = chemically synthesized
  source 1..22: mol_type = other DNA
tccttactcagcagtttgtgag

SEQ ID NO: 112497 - DNA, 22 bp, synthetic construct
  misc_feature 1..22: note = chemically synthesized
  source 1..22: mol_type = other DNA
actcagcagtttgtgaggaatc

SEQ ID NO: 112498 - DNA, 22 bp, synthetic construct
  misc_feature 1..22: note = chemically synthesized
  source 1..22: mol_type = other DNA
ctcagcagtttgtgaggaatca

SEQ ID NO: 112499 - DNA, 22 bp, synthetic construct
  misc_feature 1..22: note = chemically synthesized
  source 1..22: mol_type = other DNA
agcagtttgtgaggaatcagac

SEQ ID NO: 112500 - DNA, 22 bp, synthetic construct
  misc_feature 1..22: note = chemically synthesized
  source 1..22: mol_type = other DNA
gtgaggaatcagacattcttca

SEQ ID NO: 112501 - DNA, 22 bp, synthetic construct
  misc_feature 1..22: note = chemically synthesized
  source 1..22: mol_type = other DNA
tgaggaatcagacattcttcaa

SEQ ID NO: 112502 - DNA, 22 bp, synthetic construct
  misc_feature 1..22: note = chemically synthesized
  source 1..22: mol_type = other DNA
ttcaaagtttcacttctaccag

SEQ ID NO: 112503 - DNA, 22 bp, synthetic construct
  misc_feature 1..22: note = chemically synthesized
  source 1..22: mol_type = other DNA
caaagtttcacttctaccagag

SEQ ID NO: 112504 - DNA, 22 bp, synthetic construct
  misc_feature 1..22: note = chemically synthesized
  source 1..22: mol_type = other DNA
aaagtttcacttctaccagagt

SEQ ID NO: 112505 - DNA, 22 bp, synthetic construct
  misc_feature 1..22: note = chemically synthesized
  source 1..22: mol_type = other DNA
cacttctaccagagtagagcta

SEQ ID NO: 112506 - DNA, 22 bp, synthetic construct
  misc_feature 1..22: note = chemically synthesized
  source 1..22: mol_type = other DNA
acttctaccagagtagagctac

SEQ ID NO: 112507 - DNA, 22 bp, synthetic construct
  misc_feature 1..22: note = chemically synthesized
  source 1..22: mol_type = other DNA
ctaccagagtagagctacttct

SEQ ID NO: 112508 - DNA, 22 bp, synthetic construct
  misc_feature 1..22: note = chemically synthesized
  source 1..22: mol_type = other DNA
taccagagtagagctacttctc

SEQ ID NO: 112509 - DNA, 22 bp, synthetic construct
  misc_feature 1..22: note = chemically synthesized
  source 1..22: mol_type = other DNA
ccagagtagagctacttctctt

SEQ ID NO: 112510 - DNA, 22 bp, synthetic construct
  misc_feature 1..22: note = chemically synthesized
  source 1..22: mol_type = other DNA
cttctcttctaattatatctta

SEQ ID NO: 112511 - DNA, 22 bp, synthetic construct
  misc_feature 1..22: note = chemically synthesized
  source 1..22: mol_type = other DNA
ctcttctaattatatcttacac

SEQ ID NO: 112512 - DNA, 22 bp, synthetic construct
  misc_feature 1..22: note = chemically synthesized
  source 1..22: mol_type = other DNA
tcttctaattatatcttacacc

SEQ ID NO: 112513 - DNA, 22 bp, synthetic construct
  misc_feature 1..22: note = chemically synthesized
  source 1..22: mol_type = other DNA
ttctaattatatcttacacccc

SEQ ID NO: 112514 - DNA, 22 bp, synthetic construct
  misc_feature 1..22: note = chemically synthesized
  source 1..22: mol_type = other DNA
ctaattatatcttacaccccac

SEQ ID NO: 112515 - DNA, 22 bp, synthetic construct
  misc_feature 1..22: note = chemically synthesized
  source 1..22: mol_type = other DNA
taattatatcttacaccccaca

SEQ ID NO: 112516 - DNA, 22 bp, synthetic construct
  misc_feature 1..22: note = chemically synthesized
  source 1..22: mol_type = other DNA
attatatcttacaccccacaac

SEQ ID NO: 112517 - DNA, 22 bp, synthetic construct
  misc_feature 1..22: note = chemically synthesized
  source 1..22: mol_type = other DNA
tatcttacaccccacaactaac

SEQ ID NO: 112518 - DNA, 22 bp, synthetic construct
  misc_feature 1..22: note = chemically synthesized
  source 1..22: mol_type = other DNA
acaccccacaactaacccaagc

SEQ ID NO: 112519 - DNA, 22 bp, synthetic construct
  misc_feature 1..22: note = chemically synthesized
  source 1..22: mol_type = other DNA
caccccacaactaacccaagct

SEQ ID NO: 112520 - DNA, 22 bp, synthetic construct
  misc_feature 1..22: note = chemically synthesized
  source 1..22: mol_type = other DNA
acccaagcttcacttggttctt

SEQ ID NO: 112521 - DNA, 22 bp, synthetic construct
  misc_feature 1..22: note = chemically synthesized
  source 1..22: mol_type = other DNA
cacttggttctttgctcctatg

SEQ ID NO: 112522 - DNA, 22 bp, synthetic construct
  misc_feature 1..22: note = chemically synthesized
  source 1..22: mol_type = other DNA
acttggttctttgctcctatgg

SEQ ID NO: 112523 - DNA, 22 bp, synthetic construct
  misc_feature 1..22: note = chemically synthesized
  source 1..22: mol_type = other DNA
ggttctttgctcctatggagac

SEQ ID NO: 112524 - DNA, 22 bp, synthetic construct
  misc_feature 1..22: note = chemically synthesized
  source 1..22: mol_type = other DNA
gttctttgctcctatggagacc

SEQ ID NO: 112525 - DNA, 22 bp, synthetic construct
  misc_feature 1..22: note = chemically synthesized
  source 1..22: mol_type = other DNA
tttgctcctatggagacccagg

SEQ ID NO: 112526 - DNA, 22 bp, synthetic construct
  misc_feature 1..22: note = chemically synthesized
  source 1..22: mol_type = other DNA
tgctcctatggagacccaggct

SEQ ID NO: 112527 - DNA, 22 bp, synthetic construct
  misc_feature 1..22: note = chemically synthesized
  source 1..22: mol_type = other DNA
gctcctatggagacccaggctc

SEQ ID NO: 112528 - DNA, 22 bp, synthetic construct
  misc_feature 1..22: note = chemically synthesized
  source 1..22: mol_type = other DNA
ctcctatggagacccaggctca

SEQ ID NO: 112529 - DNA, 22 bp, synthetic construct
  misc_feature 1..22: note = chemically synthesized
  source 1..22: mol_type = other DNA
ctatggagacccaggctcactc

SEQ ID NO: 112530 - DNA, 22 bp, synthetic construct
  misc_feature 1..22: note = chemically synthesized
  source 1..22: mol_type = other DNA
tggagacccaggctcactcaga

SEQ ID NO: 112531 - DNA, 22 bp, synthetic construct
  misc_feature 1..22: note = chemically synthesized
  source 1..22: mol_type = other DNA
actcagaactctctttctttgt

SEQ ID NO: 112532 - DNA, 22 bp, synthetic construct
  misc_feature 1..22: note = chemically synthesized
  source 1..22: mol_type = other DNA
agaactctctttctttgttttt

SEQ ID NO: 112533 - DNA, 22 bp, synthetic construct
  misc_feature 1..22: note = chemically synthesized
  source 1..22: mol_type = other DNA
tctttctttgttttttcctctg

SEQ ID NO: 112534 - DNA, 22 bp, synthetic construct
  misc_feature 1..22: note = chemically synthesized
  source 1..22: mol_type = other DNA
tttctttgttttttcctctgcc

SEQ ID NO: 112535 - DNA, 22 bp, synthetic construct
  misc_feature 1..22: note = chemically synthesized
  source 1..22: mol_type = other DNA
tctttgttttttcctctgccat

SEQ ID NO: 112536 - DNA, 22 bp, synthetic construct
  misc_feature 1..22: note = chemically synthesized
  source 1..22: mol_type = other DNA
ctttgttttttcctctgccatt

SEQ ID NO: 112537 - DNA, 22 bp, synthetic construct
  misc_feature 1..22: note = chemically synthesized
  source 1..22: mol_type = other DNA
tttgttttttcctctgccattc

SEQ ID NO: 112538 - DNA, 22 bp, synthetic construct
  misc_feature 1..22: note = chemically synthesized
  source 1..22: mol_type = other DNA
tgttttttcctctgccattcag

SEQ ID NO: 112539 - DNA, 22 bp, synthetic construct
  misc_feature 1..22: note = chemically synthesized
  source 1..22: mol_type = other DNA
gttttttcctctgccattcaga

SEQ ID NO: 112540 - DNA, 22 bp, synthetic construct
  misc_feature 1..22: note = chemically synthesized
  source 1..22: mol_type = other DNA
ttttttcctctgccattcagat

SEQ ID NO: 112541 - DNA, 22 bp, synthetic construct
  misc_feature 1..22: note = chemically synthesized
  source 1..22: mol_type = other DNA
tttcctctgccattcagatttg

SEQ ID NO: 112542 - DNA, 22 bp, synthetic construct
  misc_feature 1..22: note = chemically synthesized
  source 1..22: mol_type = other DNA
ttcctctgccattcagatttgt

SEQ ID NO: 112543 - DNA, 22 bp, synthetic construct
  misc_feature 1..22: note = chemically synthesized
  source 1..22: mol_type = other DNA
tcctctgccattcagatttgtt

SEQ ID NO: 112544 - DNA, 22 bp, synthetic construct
  misc_feature 1..22: note = chemically synthesized
  source 1..22: mol_type = other DNA
cctctgccattcagatttgttg

SEQ ID NO: 112545 - DNA, 22 bp, synthetic construct
  misc_feature 1..22: note = chemically synthesized
  source 1..22: mol_type = other DNA
ctctgccattcagatttgttgc

SEQ ID NO: 112546 - DNA, 22 bp, synthetic construct
  misc_feature 1..22: note = chemically synthesized
  source 1..22: mol_type = other DNA
tgccattcagatttgttgcatc

SEQ ID NO: 112547 - DNA, 22 bp, synthetic construct
  misc_feature 1..22: note = chemically synthesized
  source 1..22: mol_type = other DNA
ccattcagatttgttgcatctt

SEQ ID NO: 112548 - DNA, 22 bp, synthetic construct
  misc_feature 1..22: note = chemically synthesized
  source 1..22: mol_type = other DNA
agatttgttgcatcttcaacca

SEQ ID NO: 112549 - DNA, 22 bp, synthetic construct
  misc_feature 1..22: note = chemically synthesized
  source 1..22: mol_type = other DNA
gttgcatcttcaaccaataact

SEQ ID NO: 112550 - DNA, 22 bp, synthetic construct
  misc_feature 1..22: note = chemically synthesized
  source 1..22: mol_type = other DNA
ttgcatcttcaaccaataactt

SEQ ID NO: 112551 - DNA, 22 bp, synthetic construct
  misc_feature 1..22: note = chemically synthesized
  source 1..22: mol_type = other DNA
catcttcaaccaataacttaac

SEQ ID NO: 112552 - DNA, 22 bp, synthetic construct
  misc_feature 1..22: note = chemically synthesized
  source 1..22: mol_type = other DNA
caaccaataacttaactatgaa

SEQ ID NO: 112553 - DNA, 22 bp, synthetic construct
  misc_feature 1..22: note = chemically synthesized
  source 1..22: mol_type = other DNA
aaccaataacttaactatgaac

SEQ ID NO: 112554 - DNA, 22 bp, synthetic construct
  misc_feature 1..22: note = chemically synthesized
  source 1..22: mol_type = other DNA
aactatgaaccagcatgaaaaa

SEQ ID NO: 112555 - DNA, 22 bp, synthetic construct
  misc_feature 1..22: note = chemically synthesized
  source 1..22: mol_type = other DNA
actatgaaccagcatgaaaaat

SEQ ID NO: 112556 - DNA, 22 bp, synthetic construct
  misc_feature 1..22: note = chemically synthesized
  source 1..22: mol_type = other DNA
tgaaccagcatgaaaaatcctg

SEQ ID NO: 112557 - DNA, 22 bp, synthetic construct
  misc_feature 1..22: note = chemically synthesized
  source 1..22: mol_type = other DNA
ttaagtgttctgtaggcttctt

SEQ ID NO: 112558 - DNA, 22 bp, synthetic construct
  misc_feature 1..22: note = chemically synthesized
  source 1..22: mol_type = other DNA
agtgttctgtaggcttcttgaa

SEQ ID NO: 112559 - DNA, 22 bp, synthetic construct
  misc_feature 1..22: note = chemically synthesized
  source 1..22: mol_type = other DNA
tgtaggcttcttgaaacctatt

SEQ ID NO: 112560 - DNA, 22 bp, synthetic construct
  misc_feature 1..22: note = chemically synthesized
  source 1..22: mol_type = other DNA
taggcttcttgaaacctattgt

SEQ ID NO: 112561 - DNA, 22 bp, synthetic construct
  misc_feature 1..22: note = chemically synthesized
  source 1..22: mol_type = other DNA
cttgaaacctattgtttcatgc

SEQ ID NO: 112562 - DNA, 22 bp, synthetic construct
  misc_feature 1..22: note = chemically synthesized
  source 1..22: mol_type = other DNA
ttgaaacctattgtttcatgct

SEQ ID NO: 112563 - DNA, 22 bp, synthetic construct
  misc_feature 1..22: note = chemically synthesized
  source 1..22: mol_type = other DNA
gaaacctattgtttcatgcttc

SEQ ID NO: 112564 - DNA, 22 bp, synthetic construct
  misc_feature 1..22: note = chemically synthesized
  source 1..22: mol_type = other DNA
aaacctattgtttcatgcttct

SEQ ID NO: 112565 - DNA, 22 bp, synthetic construct
  misc_feature 1..22: note = chemically synthesized
  source 1..22: mol_type = other DNA
ttgtttcatgcttcttcataca

SEQ ID NO: 112566 - DNA, 22 bp, synthetic construct
  misc_feature 1..22: note = chemically synthesized
  source 1..22: mol_type = other DNA
tttcatgcttcttcatacagtc

SEQ ID NO: 112567 - DNA, 22 bp, synthetic construct
  misc_feature 1..22: note = chemically synthesized
  source 1..22: mol_type = other DNA
catgcttcttcatacagtctta

SEQ ID NO: 112568 - DNA, 22 bp, synthetic construct
  misc_feature 1..22: note = chemically synthesized
  source 1..22: mol_type = other DNA
atgcttcttcatacagtcttat

SEQ ID NO: 112569 - DNA, 22 bp, synthetic construct
  misc_feature 1..22: note = chemically synthesized
  source 1..22: mol_type = other DNA
cttcatacagtcttatgcagta

SEQ ID NO: 112570 - DNA, 22 bp, synthetic construct
  misc_feature 1..22: note = chemically synthesized
  source 1..22: mol_type = other DNA
ttcatacagtcttatgcagtag

SEQ ID NO: 112571 - DNA, 22 bp, synthetic construct
  misc_feature 1..22: note = chemically synthesized
  source 1..22: mol_type = other DNA
catacagtcttatgcagtagtt

SEQ ID NO: 112572 - DNA, 22 bp, synthetic construct
  misc_feature 1..22: note = chemically synthesized
  source 1..22: mol_type = other DNA
atacagtcttatgcagtagttt

SEQ ID NO: 112573 - DNA, 22 bp, synthetic construct
  misc_feature 1..22: note = chemically synthesized
  source 1..22: mol_type = other DNA
atgcagtagttttgggaattaa

SEQ ID NO: 112574 - DNA, 22 bp, synthetic construct
  misc_feature 1..22: note = chemically synthesized
  source 1..22: mol_type = other DNA
tgcagtagttttgggaattaaa

SEQ ID NO: 112575 - DNA, 22 bp, synthetic construct
  misc_feature 1..22: note = chemically synthesized
  source 1..22: mol_type = other DNA
tgggaattaaacagtttggttt

SEQ ID NO: 112576 - DNA, 22 bp, synthetic construct
  misc_feature 1..22: note = chemically synthesized
  source 1..22: mol_type = other DNA
gggaattaaacagtttggttta

SEQ ID NO: 112577 - DNA, 22 bp, synthetic construct
  misc_feature 1..22: note = chemically synthesized
  source 1..22: mol_type = other DNA
ggaattaaacagtttggtttac

SEQ ID NO: 112578 - DNA, 22 bp, synthetic construct
  misc_feature 1..22: note = chemically synthesized
  source 1..22: mol_type = other DNA
aacagtttggtttacaatccca

SEQ ID NO: 112579 - DNA, 22 bp, synthetic construct
  misc_feature 1..22: note = chemically synthesized
  source 1..22: mol_type = other DNA
ggtttacaatcccaccttccac

SEQ ID NO: 112580 - DNA, 22 bp, synthetic construct
  misc_feature 1..22: note = chemically synthesized
  source 1..22: mol_type = other DNA
gtttacaatcccaccttccact

SEQ ID NO: 112581 - DNA, 22 bp, synthetic construct
  misc_feature 1..22: note = chemically synthesized
  source 1..22: mol_type = other DNA
acaatcccaccttccacttatt

SEQ ID NO: 112582 - DNA, 22 bp, synthetic construct
  misc_feature 1..22: note = chemically synthesized
  source 1..22: mol_type = other DNA
caatcccaccttccacttattg

SEQ ID NO: 112583 - DNA, 22 bp, synthetic construct
  misc_feature 1..22: note = chemically synthesized
  source 1..22: mol_type = other DNA
ccacttattggctgcgtaccct

SEQ ID NO: 112584 - DNA, 22 bp, synthetic construct
  misc_feature 1..22: note = chemically synthesized
  source 1..22: mol_type = other DNA
cacttattggctgcgtacccta

SEQ ID NO: 112585 - DNA, 22 bp, synthetic construct
  misc_feature 1..22: note = chemically synthesized
  source 1..22: mol_type = other DNA
attggctgcgtaccctatagca

SEQ ID NO: 112586 - DNA, 22 bp, synthetic construct
  misc_feature 1..22: note = chemically synthesized
  source 1..22: mol_type = other DNA
ttggctgcgtaccctatagcaa

SEQ ID NO: 112587 - DNA, 22 bp, synthetic construct
  misc_feature 1..22: note = chemically synthesized
  source 1..22: mol_type = other DNA
gctgcgtaccctatagcaaagc

SEQ ID NO: 112588 - DNA, 22 bp, synthetic construct
  misc_feature 1..22: note = chemically synthesized
  source 1..22: mol_type = other DNA
cgtaccctatagcaaagcaatt

SEQ ID NO: 112589 - DNA, 22 bp, synthetic construct
  misc_feature 1..22: note = chemically synthesized
  source 1..22: mol_type = other DNA
tagcaaagcaatttatctttct

SEQ ID NO: 112590 - DNA, 22 bp, synthetic construct
  misc_feature 1..22: note = chemically synthesized
  source 1..22: mol_type = other DNA
atctttctgtgttttggtccac

SEQ ID NO: 112591 - DNA, 22 bp, synthetic construct
  misc_feature 1..22: note = chemically synthesized
  source 1..22: mol_type = other DNA
tctttctgtgttttggtccact

SEQ ID NO: 112592 - DNA, 22 bp, synthetic construct
  misc_feature 1..22: note = chemically synthesized
  source 1..22: mol_type = other DNA
tctgtgttttggtccactcatc

SEQ ID NO: 112593 - DNA, 22 bp, synthetic construct
  misc_feature 1..22: note = chemically synthesized
  source 1..22: mol_type = other DNA
ctgtgttttggtccactcatct

SEQ ID NO: 112594 - DNA, 22 bp, synthetic construct
  misc_feature 1..22: note = chemically synthesized
  source 1..22: mol_type = other DNA
tgtgttttggtccactcatctt

SEQ ID NO: 112595 - DNA, 22 bp, synthetic construct
  misc_feature 1..22: note = chemically synthesized
  source 1..22: mol_type = other DNA
tgttttggtccactcatcttta

SEQ ID NO: 112596 - DNA, 22 bp, synthetic construct
  misc_feature 1..22: note = chemically synthesized
  source 1..22: mol_type = other DNA
tggtccactcatctttaagtgg

SEQ ID NO: 112597 - DNA, 22 bp, synthetic construct
  misc_feature 1..22: note = chemically synthesized
  source 1..22: mol_type = other DNA
ggtccactcatctttaagtggg

SEQ ID NO: 112598 - DNA, 22 bp, synthetic construct
  misc_feature 1..22: note = chemically synthesized
  source 1..22: mol_type = other DNA
gtccactcatctttaagtgggg

SEQ ID NO: 112599 - DNA, 22 bp, synthetic construct
  misc_feature 1..22: note = chemically synthesized
  source 1..22: mol_type = other DNA
atctttaagtggggataccaat

SEQ ID NO: 112600 - DNA, 22 bp, synthetic construct
  misc_feature 1..22: note = chemically synthesized
  source 1..22: mol_type = other DNA
taagtggggataccaatagtac

SEQ ID NO: 112601 - DNA, 22 bp, synthetic construct
  misc_feature 1..22: note = chemically synthesized
  source 1..22: mol_type = other DNA
aagtggggataccaatagtacc

SEQ ID NO: 112602 - DNA, 22 bp, synthetic construct
  misc_feature 1..22: note = chemically synthesized
  source 1..22: mol_type = other DNA
agtggggataccaatagtaccc

SEQ ID NO: 112603 - DNA, 22 bp, synthetic construct
  misc_feature 1..22: note = chemically synthesized
  source 1..22: mol_type = other DNA
aattattttaatgattaaatac

SEQ ID NO: 112604 - DNA, 22 bp, synthetic construct
  misc_feature 1..22: note = chemically synthesized
  source 1..22: mol_type = other DNA
ttttaatgattaaatacattaa

SEQ ID NO: 112605 - DNA, 22 bp, synthetic construct
  misc_feature 1..22: note = chemically synthesized
  source 1..22: mol_type = other DNA
taatgattaaatacattaatat

SEQ ID NO: 112606 - DNA, 22 bp, synthetic construct
  misc_feature 1..22: note = chemically synthesized
  source 1..22: mol_type = other DNA
aatgattaaatacattaatatg

SEQ ID NO: 112607 - DNA, 22 bp, synthetic construct
  misc_feature 1..22: note = chemically synthesized
  source 1..22: mol_type = other DNA
atgattaaatacattaatatgt

SEQ ID NO: 112608 - DNA, 22 bp, synthetic construct
  misc_feature 1..22: note = chemically synthesized
  source 1..22: mol_type = other DNA
aatacattaatatgtctaacgt

SEQ ID NO: 112609 - DNA, 22 bp, synthetic construct
  misc_feature 1..22: note = chemically synthesized
  source 1..22: mol_type = other DNA
atatgtctaacgtgttcaatag

SEQ ID NO: 112610 - DNA, 22 bp, synthetic construct
  misc_feature 1..22: note = chemically synthesized
  source 1..22: mol_type = other DNA
acgtgttcaatagtgcctggtc

SEQ ID NO: 112611 - DNA, 22 bp, synthetic construct
  misc_feature 1..22: note = chemically synthesized
  source 1..22: mol_type = other DNA
aatagtgcctggtccattgtaa

SEQ ID NO: 112612 - DNA, 22 bp, synthetic construct
  misc_feature 1..22: note = chemically synthesized
  source 1..22: mol_type = other DNA
gtccattgtaagtattatagaa

SEQ ID NO: 112613 - DNA, 22 bp, synthetic construct
  misc_feature 1..22: note = chemically synthesized
  source 1..22: mol_type = other DNA
taagtattatagaaatcattgc

SEQ ID NO: 112614 - DNA, 22 bp, synthetic construct
  misc_feature 1..22: note = chemically synthesized
  source 1..22: mol_type = other DNA
tagaaatcattgctattattac

SEQ ID NO: 112615 - DNA, 22 bp, synthetic construct
  misc_feature 1..22: note = chemically synthesized
  source 1..22: mol_type = other DNA
ctattattactataatcatcat

SEQ ID NO: 112616 - DNA, 22 bp, synthetic construct
  misc_feature 1..22: note = chemically synthesized
  source 1..22: mol_type = other DNA
ttattactataatcatcattga

SEQ ID NO: 112617 - DNA, 22 bp, synthetic construct
  misc_feature 1..22: note = chemically synthesized
  source 1..22: mol_type = other DNA
ttactataatcatcattgaaaa

SEQ ID NO: 112618 - DNA, 22 bp, synthetic construct
  misc_feature 1..22: note = chemically synthesized
  source 1..22: mol_type = other DNA
ctataatcatcattgaaaattt

SEQ ID NO: 112619 - DNA, 22 bp, synthetic construct
  misc_feature 1..22: note = chemically synthesized
  source 1..22: mol_type = other DNA
taatcatcattgaaaattttgt

SEQ ID NO: 112620 - DNA, 22 bp, synthetic construct
  misc_feature 1..22: note = chemically synthesized
  source 1..22: mol_type = other DNA
aaaattttgtgaaaatgagaca

SEQ ID NO: 112621 - DNA, 22 bp, synthetic construct
  misc_feature 1..22: note = chemically synthesized
  source 1..22: mol_type = other DNA
tgtgaaaatgagacaatttgac

SEQ ID NO: 112622 - DNA, 22 bp, synthetic construct
  misc_feature 1..22: note = chemically synthesized
  source 1..22: mol_type = other DNA
gtgaaaatgagacaatttgacc

SEQ ID NO: 112623 - DNA, 22 bp, synthetic construct
  misc_feature 1..22: note = chemically synthesized
  source 1..22: mol_type = other DNA
tgaaaatgagacaatttgacct

SEQ ID NO: 112624 - DNA, 22 bp, synthetic construct
  misc_feature 1..22: note = chemically synthesized
  source 1..22: mol_type = other DNA
gacctttgggctgagaagatac

SEQ ID NO: 112625 - DNA, 22 bp, synthetic construct
  misc_feature 1..22: note = chemically synthesized
  source 1..22: mol_type = other DNA
acctttgggctgagaagatact

SEQ ID NO: 112626 - DNA, 22 bp, synthetic construct
  misc_feature 1..22: note = chemically synthesized
  source 1..22: mol_type = other DNA
tgggctgagaagatactctgtc

SEQ ID NO: 112627 - DNA, 22 bp, synthetic construct
  misc_feature 1..22: note = chemically synthesized
  source 1..22: mol_type = other DNA
gggctgagaagatactctgtct

SEQ ID NO: 112628 - DNA, 22 bp, synthetic construct
  misc_feature 1..22: note = chemically synthesized
  source 1..22: mol_type = other DNA
ggctgagaagatactctgtcta

SEQ ID NO: 112629 - DNA, 22 bp, synthetic construct
  misc_feature 1..22: note = chemically synthesized
  source 1..22: mol_type = other DNA
agaagatactctgtctagctct

SEQ ID NO: 112630 - DNA, 22 bp, synthetic construct
  misc_feature 1..22: note = chemically synthesized
  source 1..22: mol_type = other DNA
tgtctagctctgacaaagaaaa

SEQ ID NO: 112631 - DNA, 22 bp, synthetic construct
  misc_feature 1..22: note = chemically synthesized
  source 1..22: mol_type = other DNA
tctagctctgacaaagaaaata

SEQ ID NO: 112632 - DNA, 22 bp, synthetic construct
  misc_feature 1..22: note = chemically synthesized
  source 1..22: mol_type = other DNA
gctctgacaaagaaaataaaaa

SEQ ID NO: 112633 - DNA, 22 bp, synthetic construct
  misc_feature 1..22: note = chemically synthesized
  source 1..22: mol_type = other DNA
tgacaaagaaaataaaaacctt

SEQ ID NO: 112634 - DNA, 22 bp, synthetic construct
  misc_feature 1..22: note = chemically synthesized
  source 1..22: mol_type = other DNA
acaaagaaaataaaaaccttta

SEQ ID NO: 112635 - DNA, 22 bp, synthetic construct
  misc_feature 1..22: note = chemically synthesized
  source 1..22: mol_type = other DNA
taaaaagctctctcacaatcgt

SEQ ID NO: 112636 - DNA, 22 bp, synthetic construct
  misc_feature 1..22: note = chemically synthesized
  source 1..22: mol_type = other DNA
aaaaagctctctcacaatcgta

SEQ ID NO: 112637 - DNA, 22 bp, synthetic construct
  misc_feature 1..22: note = chemically synthesized
  source 1..22: mol_type = other DNA
aaaagctctctcacaatcgtaa

SEQ ID NO: 112638 - DNA, 22 bp, synthetic construct
  misc_feature 1..22: note = chemically synthesized
  source 1..22: mol_type = other DNA
tctcacaatcgtaatacttgaa

SEQ ID NO: 112639 - DNA, 22 bp, synthetic construct
  misc_feature 1..22: note = chemically synthesized
  source 1..22: mol_type = other DNA
tcacaatcgtaatacttgaagt

SEQ ID NO: 112640 - DNA, 22 bp, synthetic construct
  misc_feature 1..22: note = chemically synthesized
  source 1..22: mol_type = other DNA
acaatcgtaatacttgaagtta

SEQ ID NO: 112641 - DNA, 22 bp, synthetic construct
  misc_feature 1..22: note = chemically synthesized
  source 1..22: mol_type = other DNA
gaagttacacaagatattctaa

SEQ ID NO: 112642 - DNA, 22 bp, synthetic construct
  misc_feature 1..22: note = chemically synthesized
  source 1..22: mol_type = other DNA
aagttacacaagatattctaac

SEQ ID NO: 112643 - DNA, 22 bp, synthetic construct
  misc_feature 1..22: note = chemically synthesized
  source 1..22: mol_type = other DNA
cacaagatattctaacataaag

SEQ ID NO: 112644 - DNA, 22 bp, synthetic construct
  misc_feature 1..22: note = chemically synthesized
  source 1..22: mol_type = other DNA
taacataaagactttgtgtttt

SEQ ID NO: 112645 - DNA, 22 bp, synthetic construct
  misc_feature 1..22: note = chemically synthesized
  source 1..22: mol_type = other DNA
acataaagactttgtgttttat

SEQ ID NO: 112646 - DNA, 22 bp, synthetic construct
  misc_feature 1..22: note = chemically synthesized
  source 1..22: mol_type = other DNA
tgtgttttattctcacatgcat

SEQ ID NO: 112647 - DNA, 22 bp, synthetic construct
  misc_feature 1..22: note = chemically synthesized
  source 1..22: mol_type = other DNA
gtgttttattctcacatgcatc

SEQ ID NO: 112648 - DNA, 22 bp, synthetic construct
  misc_feature 1..22: note = chemically synthesized
  source 1..22: mol_type = other DNA
tgttttattctcacatgcatcc

SEQ ID NO: 112649 - DNA, 22 bp, synthetic construct
  misc_feature 1..22: note = chemically synthesized
  source 1..22: mol_type = other DNA
tattctcacatgcatcctgtga

SEQ ID NO: 112650 - DNA, 22 bp, synthetic construct
  misc_feature 1..22: note = chemically synthesized
  source 1..22: mol_type = other DNA
attctcacatgcatcctgtgag

SEQ ID NO: 112651 - DNA, 22 bp, synthetic construct
  misc_feature 1..22: note = chemically synthesized
  source 1..22: mol_type = other DNA
ttctcacatgcatcctgtgaga

SEQ ID NO: 112652 - DNA, 22 bp, synthetic construct
  misc_feature 1..22: note = chemically synthesized
  source 1..22: mol_type = other DNA
tcacatgcatcctgtgagaaag

SEQ ID NO: 112653 - DNA, 22 bp, synthetic construct
  misc_feature 1..22: note = chemically synthesized
  source 1..22: mol_type = other DNA
acatgcatcctgtgagaaagca

SEQ ID NO: 112654 - DNA, 22 bp, synthetic construct
  misc_feature 1..22: note = chemically synthesized
  source 1..22: mol_type = other DNA
tgagaaagcagagcatagtaga

SEQ ID NO: 112655 - DNA, 22 bp, synthetic construct
  misc_feature 1..22: note = chemically synthesized
  source 1..22: mol_type = other DNA
cagttttatctgtcaagagcaa

SEQ ID NO: 112656 - DNA, 22 bp, synthetic construct
  misc_feature 1..22: note = chemically synthesized
  source 1..22: mol_type = other DNA
agttttatctgtcaagagcaaa

SEQ ID NO: 112657 - DNA, 22 bp, synthetic construct
  misc_feature 1..22: note = chemically synthesized
  source 1..22: mol_type = other DNA
tatctgtcaagagcaaaatttg

SEQ ID NO: 112658 - DNA, 22 bp, synthetic construct
  misc_feature 1..22: note = chemically synthesized
  source 1..22: mol_type = other DNA
atctgtcaagagcaaaatttga

SEQ ID NO: 112659 - DNA, 22 bp, synthetic construct
  misc_feature 1..22: note = chemically synthesized
  source 1..22: mol_type = other DNA
tctgtcaagagcaaaatttgag

SEQ ID NO: 112660 - DNA, 22 bp, synthetic construct
  misc_feature 1..22: note = chemically synthesized
  source 1..22: mol_type = other DNA
tcaagagcaaaatttgaggttt

SEQ ID NO: 112661 - DNA, 22 bp, synthetic construct
  misc_feature 1..22: note = chemically synthesized
  source 1..22: mol_type = other DNA
gaggtttctaaacattgagtta

SEQ ID NO: 112662 - DNA, 22 bp, synthetic construct
  misc_feature 1..22: note = chemically synthesized
  source 1..22: mol_type = other DNA
aggtttctaaacattgagttac

SEQ ID NO: 112663 - DNA, 22 bp, synthetic construct
  misc_feature 1..22: note = chemically synthesized
  source 1..22: mol_type = other DNA
ctaaacattgagttactcaaaa

SEQ ID NO: 112664 - DNA, 22 bp, synthetic construct
  misc_feature 1..22: note = chemically synthesized
  source 1..22: mol_type = other DNA
taaacattgagttactcaaaat

SEQ ID NO: 112665 - DNA, 22 bp, synthetic construct
  misc_feature 1..22: note = chemically synthesized
  source 1..22: mol_type = other DNA
aacattgagttactcaaaatat

SEQ ID NO: 112666 - DNA, 22 bp, synthetic construct
  misc_feature 1..22: note = chemically synthesized
  source 1..22: mol_type = other DNA
agttactcaaaatattatgctt

SEQ ID NO: 112667 - DNA, 22 bp, synthetic construct
  misc_feature 1..22: note = chemically synthesized
  source 1..22: mol_type = other DNA
ctcaaaatattatgctttaaaa

SEQ ID NO: 112668 - DNA, 22 bp, synthetic construct
  misc_feature 1..22: note = chemically synthesized
  source 1..22: mol_type = other DNA
aaaatattatgctttaaaactg

SEQ ID NO: 112669 - DNA, 22 bp, synthetic construct
  misc_feature 1..22: note = chemically synthesized
  source 1..22: mol_type = other DNA
tgctttaaaactgaaggaagca

SEQ ID NO: 112670 - DNA, 22 bp, synthetic construct
  misc_feature 1..22: note = chemically synthesized
  source 1..22: mol_type = other DNA
taaaactgaaggaagcaaaacc

SEQ ID NO: 112671 - DNA, 22 bp, synthetic construct
  misc_feature 1..22: note = chemically synthesized
  source 1..22: mol_type = other DNA
aaaactgaaggaagcaaaacct

SEQ ID NO: 112672 - DNA, 22 bp, synthetic construct
  misc_feature 1..22: note = chemically synthesized
  source 1..22: mol_type = other DNA
aaactgaaggaagcaaaacctc

SEQ ID NO: 112673 - DNA, 22 bp, synthetic construct
  misc_feature 1..22: note = chemically synthesized
  source 1..22: mol_type = other DNA
aaggaagcaaaacctcagcata

SEQ ID NO: 112674 - DNA, 22 bp, synthetic construct
  misc_feature 1..22: note = chemically synthesized
  source 1..22: mol_type = other DNA
agcataggccttctgaaagctt

SEQ ID NO: 112675 - DNA, 22 bp, synthetic construct
  misc_feature 1..22: note = chemically synthesized
  source 1..22: mol_type = other DNA
ctgaaagcttacgatggctttt

SEQ ID NO: 112676 - DNA, 22 bp, synthetic construct
  misc_feature 1..22: note = chemically synthesized
  source 1..22: mol_type = other DNA
tgaaagcttacgatggcttttc

SEQ ID NO: 112677 - DNA, 22 bp, synthetic construct
  misc_feature 1..22: note = chemically synthesized
  source 1..22: mol_type = other DNA
aaagcttacgatggcttttctt

SEQ ID NO: 112678 - DNA, 22 bp, synthetic construct
  misc_feature 1..22: note = chemically synthesized
  source 1..22: mol_type = other DNA
acgatggcttttctttttttcc

SEQ ID NO: 112679 - DNA, 22 bp, synthetic construct
  misc_feature 1..22: note = chemically synthesized
  source 1..22: mol_type = other DNA
cgatggcttttctttttttccc

SEQ ID NO: 112680 - DNA, 22 bp, synthetic construct
  misc_feature 1..22: note = chemically synthesized
  source 1..22: mol_type = other DNA
ttctttttttcccccagggcaa

SEQ ID NO: 112681 - DNA, 22 bp, synthetic construct
  misc_feature 1..22: note = chemically synthesized
  source 1..22: mol_type = other DNA
tctttttttcccccagggcaaa

SEQ ID NO: 112682 - DNA, 22 bp, synthetic construct
  misc_feature 1..22: note = chemically synthesized
  source 1..22: mol_type = other DNA
ctttttttcccccagggcaaag

SEQ ID NO: 112683 - DNA, 22 bp, synthetic construct
  misc_feature 1..22: note = chemically synthesized
  source 1..22: mol_type = other DNA
tttttttcccccagggcaaagt

SEQ ID NO: 112684 - DNA, 22 bp, synthetic construct
  misc_feature 1..22: note = chemically synthesized
  source 1..22: mol_type = other DNA
tttttcccccagggcaaagtgt

SEQ ID NO: 112685 - DNA, 22 bp, synthetic construct
  misc_feature 1..22: note = chemically synthesized
  source 1..22: mol_type = other DNA
ttttcccccagggcaaagtgtt

SEQ ID NO: 112686 - DNA, 22 bp, synthetic construct
  misc_feature 1..22: note = chemically synthesized
  source 1..22: mol_type = other DNA
tttcccccagggcaaagtgttc

SEQ ID NO: 112687 - DNA, 22 bp, synthetic construct
  misc_feature 1..22: note = chemically synthesized
  source 1..22: mol_type = other DNA
ttcccccagggcaaagtgttct

SEQ ID NO: 112688 - DNA, 22 bp, synthetic construct
  misc_feature 1..22: note = chemically synthesized
  source 1..22: mol_type = other DNA
tcccccagggcaaagtgttctt

SEQ ID NO: 112689 - DNA, 22 bp, synthetic construct
  misc_feature 1..22: note = chemically synthesized
  source 1..22: mol_type = other DNA
cccccagggcaaagtgttctta

SEQ ID NO: 112690 - DNA, 22 bp, synthetic construct
  misc_feature 1..22: note = chemically synthesized
  source 1..22: mol_type = other DNA
ccccagggcaaagtgttcttag

SEQ ID NO: 112691 - DNA, 22 bp, synthetic construct
  misc_feature 1..22: note = chemically synthesized
  source 1..22: mol_type = other DNA
ttaggagcaagatgttggaatt

SEQ ID NO: 112692 - DNA, 22 bp, synthetic construct
  misc_feature 1..22: note = chemically synthesized
  source 1..22: mol_type = other DNA
aggagcaagatgttggaattta

SEQ ID NO: 112693 - DNA, 22 bp, synthetic construct
  misc_feature 1..22: note = chemically synthesized
  source 1..22: mol_type = other DNA
ggagcaagatgttggaatttac

SEQ ID NO: 112694 - DNA, 22 bp, synthetic construct
  misc_feature 1..22: note = chemically synthesized
  source 1..22: mol_type = other DNA
gaatttacaccattcttatgtg

SEQ ID NO: 112695 - DNA, 22 bp, synthetic construct
  misc_feature 1..22: note = chemically synthesized
  source 1..22: mol_type = other DNA
acaccattcttatgtggattaa

SEQ ID NO: 112696 - DNA, 22 bp, synthetic construct
  misc_feature 1..22: note = chemically synthesized
  source 1..22: mol_type = other DNA
caccattcttatgtggattaag

SEQ ID NO: 112697 - DNA, 22 bp, synthetic construct
  misc_feature 1..22: note = chemically synthesized
  source 1..22: mol_type = other DNA
ttatgtggattaagagaggttt

SEQ ID NO: 112698 - DNA, 22 bp, synthetic construct
  misc_feature 1..22: note = chemically synthesized
  source 1..22: mol_type = other DNA
atgtggattaagagaggtttcc

SEQ ID NO: 112699 - DNA, 22 bp, synthetic construct
  misc_feature 1..22: note = chemically synthesized
  source 1..22: mol_type = other DNA
tgtggattaagagaggtttcct

SEQ ID NO: 112700 - DNA, 22 bp, synthetic construct
  misc_feature 1..22: note = chemically synthesized
  source 1..22: mol_type = other DNA
agagaggtttccttctgaggat

SEQ ID NO: 112701 - DNA, 22 bp, synthetic construct
  misc_feature 1..22: note = chemically synthesized
  source 1..22: mol_type = other DNA
ccttctgaggatgttggaagcc

SEQ ID NO: 112702 - DNA, 22 bp, synthetic construct
  misc_feature 1..22: note = chemically synthesized
  source 1..22: mol_type = other DNA
cttctgaggatgttggaagcct

SEQ ID NO: 112703 - DNA, 22 bp, synthetic construct
  misc_feature 1..22: note = chemically synthesized
  source 1..22: mol_type = other DNA
ctgaggatgttggaagcctctg

SEQ ID NO: 112704 - DNA, 22 bp, synthetic construct
  misc_feature 1..22: note = chemically synthesized
  source 1..22: mol_type = other DNA
tgaggatgttggaagcctctgt

SEQ ID NO: 112705 - DNA, 22 bp, synthetic construct
  misc_feature 1..22: note = chemically synthesized
  source 1..22: mol_type = other DNA
aggatgttggaagcctctgttc

SEQ ID NO: 112706 - DNA, 22 bp, synthetic construct
  misc_feature 1..22: note = chemically synthesized
  source 1..22: mol_type = other DNA
gaagcctctgttcaggaacttt

SEQ ID NO: 112707 - DNA, 22 bp, synthetic construct
  misc_feature 1..22: note = chemically synthesized
  source 1..22: mol_type = other DNA
tgttcaggaactttttctttcc

SEQ ID NO: 112708 - DNA, 22 bp, synthetic construct
  misc_feature 1..22: note = chemically synthesized
  source 1..22: mol_type = other DNA
ttcaggaactttttctttccgg

SEQ ID NO: 112709 - DNA, 22 bp, synthetic construct
  misc_feature 1..22: note = chemically synthesized
  source 1..22: mol_type = other DNA
aggaactttttctttccggatc

SEQ ID NO: 112710 - DNA, 22 bp, synthetic construct
  misc_feature 1..22: note = chemically synthesized
  source 1..22: mol_type = other DNA
tttctttccggatcatgcttac

SEQ ID NO: 112711 - DNA, 22 bp, synthetic construct
  misc_feature 1..22: note = chemically synthesized
  source 1..22: mol_type = other DNA
ttctttccggatcatgcttaca

SEQ ID NO: 112712 - DNA, 22 bp, synthetic construct
  misc_feature 1..22: note = chemically synthesized
  source 1..22: mol_type = other DNA
tctttccggatcatgcttacag

SEQ ID NO: 112713 - DNA, 22 bp, synthetic construct
  misc_feature 1..22: note = chemically synthesized
  source 1..22: mol_type = other DNA
ctttccggatcatgcttacaga

SEQ ID NO: 112714 - DNA, 22 bp, synthetic construct
  misc_feature 1..22: note = chemically synthesized
  source 1..22: mol_type = other DNA
tttccggatcatgcttacagat

SEQ ID NO: 112715 - DNA, 22 bp, synthetic construct
  misc_feature 1..22: note = chemically synthesized
  source 1..22: mol_type = other DNA
tccggatcatgcttacagatct

SEQ ID NO: 112716 - DNA, 22 bp, synthetic construct
  misc_feature 1..22: note = chemically synthesized
  source 1..22: mol_type = other DNA
ccggatcatgcttacagatctg

SEQ ID NO: 112717 - DNA, 22 bp, synthetic construct
  misc_feature 1..22: note = chemically synthesized
  source 1..22: mol_type = other DNA
cggatcatgcttacagatctga

SEQ ID NO: 112718 - DNA, 22 bp, synthetic construct
  misc_feature 1..22: note = chemically synthesized
  source 1..22: mol_type = other DNA
acagatctgattacacccaaga

SEQ ID NO: 112719 - DNA, 22 bp, synthetic construct
  misc_feature 1..22: note = chemically synthesized
  source 1..22: mol_type = other DNA
cagatctgattacacccaagaa

SEQ ID NO: 112720 - DNA, 22 bp, synthetic construct
  misc_feature 1..22: note = chemically synthesized
  source 1..22: mol_type = other DNA
attacacccaagaagcctaaat

SEQ ID NO: 112721 - DNA, 22 bp, synthetic construct
  misc_feature 1..22: note = chemically synthesized
  source 1..22: mol_type = other DNA
cacccaagaagcctaaattgtg

SEQ ID NO: 112722 - DNA, 22 bp, synthetic construct
  misc_feature 1..22: note = chemically synthesized
  source 1..22: mol_type = other DNA
aattgtgtgtcagccaactaga

SEQ ID NO: 112723 - DNA, 22 bp, synthetic construct
  misc_feature 1..22: note = chemically synthesized
  source 1..22: mol_type = other DNA
tgtgtcagccaactagatgtgg

SEQ ID NO: 112724 - DNA, 22 bp, synthetic construct
  misc_feature 1..22: note = chemically synthesized
  source 1..22: mol_type = other DNA
gatgtggacaagatagttttta

SEQ ID NO: 112725 - DNA, 22 bp, synthetic construct
  misc_feature 1..22: note = chemically synthesized
  source 1..22: mol_type = other DNA
ttagcctccttctgggactaga

SEQ ID NO: 112726 - DNA, 22 bp, synthetic construct
  misc_feature 1..22: note = chemically synthesized
  source 1..22: mol_type = other DNA
tagcctccttctgggactagat

SEQ ID NO: 112727 - DNA, 22 bp, synthetic construct
  misc_feature 1..22: note = chemically synthesized
  source 1..22: mol_type = other DNA
agcctccttctgggactagata

SEQ ID NO: 112728 - DNA, 22 bp, synthetic construct
  misc_feature 1..22: note = chemically synthesized
  source 1..22: mol_type = other DNA
gcctccttctgggactagatat

SEQ ID NO: 112729 - DNA, 22 bp, synthetic construct
  misc_feature 1..22: note = chemically synthesized
  source 1..22: mol_type = other DNA
cttctgggactagatattcatt

SEQ ID NO: 112730 - DNA, 22 bp, synthetic construct
  misc_feature 1..22: note = chemically synthesized
  source 1..22: mol_type = other DNA
ctgggactagatattcattcac

SEQ ID NO: 112731 - DNA, 22 bp, synthetic construct
  misc_feature 1..22: note = chemically synthesized
  source 1..22: mol_type = other DNA
tgggactagatattcattcacc

SEQ ID NO: 112732 - DNA, 22 bp, synthetic construct
  misc_feature 1..22: note = chemically synthesized
  source 1..22: mol_type = other DNA
ggactagatattcattcaccaa

SEQ ID NO: 112733 - DNA, 22 bp, synthetic construct
  misc_feature 1..22: note = chemically synthesized
  source 1..22: mol_type = other DNA
gatattcattcaccaagatgag

SEQ ID NO: 112734 - DNA, 22 bp, synthetic construct
  misc_feature 1..22: note = chemically synthesized
  source 1..22: mol_type = other DNA
attcaccaagatgagtgccttt

SEQ ID NO: 112735 - DNA, 22 bp, synthetic construct
  misc_feature 1..22: note = chemically synthesized
  source 1..22: mol_type = other DNA
accaagatgagtgcctttgaag

SEQ ID NO: 112736 - DNA, 22 bp, synthetic construct
  misc_feature 1..22: note = chemically synthesized
  source 1..22: mol_type = other DNA
tgaagcagaatctgtgataggg

SEQ ID NO: 112737 - DNA, 22 bp, synthetic construct
  misc_feature 1..22: note = chemically synthesized
  source 1..22: mol_type = other DNA
gaagcagaatctgtgatagggt

SEQ ID NO: 112738 - DNA, 22 bp, synthetic construct
  misc_feature 1..22: note = chemically synthesized
  source 1..22: mol_type = other DNA
aagcagaatctgtgatagggtg

SEQ ID NO: 112739 - DNA, 22 bp, synthetic construct
  misc_feature 1..22: note = chemically synthesized
  source 1..22: mol_type = other DNA
tgatagggtggttgggccacct

SEQ ID NO: 112740 - DNA, 22 bp, synthetic construct
  misc_feature 1..22: note = chemically synthesized
  source 1..22: mol_type = other DNA
ggccacctagagacatatggcc

SEQ ID NO: 112741 - DNA, 22 bp, synthetic construct
  misc_feature 1..22: note = chemically synthesized
  source 1..22: mol_type = other DNA
gagacatatggccatgactaga

SEQ ID NO: 112742 - DNA, 22 bp, synthetic construct
  misc_feature 1..22: note = chemically synthesized
  source 1..22: mol_type = other DNA
gaatctaaggttagacatacag

SEQ ID NO: 112743 - DNA, 22 bp, synthetic construct
  misc_feature 1..22: note = chemically synthesized
  source 1..22: mol_type = other DNA
aggttagacatacagaaaggat

SEQ ID NO: 112744 - DNA, 22 bp, synthetic construct
  misc_feature 1..22: note = chemically synthesized
  source 1..22: mol_type = other DNA
gacatacagaaaggatgaagtc

SEQ ID NO: 112745 - DNA, 22 bp, synthetic construct
  misc_feature 1..22: note = chemically synthesized
  source 1..22: mol_type = other DNA
taaaaataggcattcattcatt

SEQ ID NO: 112746 - DNA, 22 bp, synthetic construct
  misc_feature 1..22: note = chemically synthesized
  source 1..22: mol_type = other DNA
aaaaataggcattcattcattt

SEQ ID NO: 112747 - DNA, 22 bp, synthetic construct
  misc_feature 1..22: note = chemically synthesized
  source 1..22: mol_type = other DNA
aaaataggcattcattcattta

SEQ ID NO: 112748 - DNA, 22 bp, synthetic construct
  misc_feature 1..22: note = chemically synthesized
  source 1..22: mol_type = other DNA
attcatttattcatccattcac

SEQ ID NO: 112749 - DNA, 22 bp, synthetic construct
  misc_feature 1..22: note = chemically synthesized
  source 1..22: mol_type = other DNA
atttattcatccattcacacat

SEQ ID NO: 112750 - DNA, 22 bp, synthetic construct
  misc_feature 1..22: note = chemically synthesized
  source 1..22: mol_type = other DNA
attcatccattcacacatataa

SEQ ID NO: 112751 - DNA, 22 bp, synthetic construct
  misc_feature 1..22: note = chemically synthesized
  source 1..22: mol_type = other DNA
ttcatccattcacacatataac

SEQ ID NO: 112752 - DNA, 22 bp, synthetic construct
  misc_feature 1..22: note = chemically synthesized
  source 1..22: mol_type = other DNA
atccattcacacatataacctg

SEQ ID NO: 112753 - DNA, 22 bp, synthetic construct
  misc_feature 1..22: note = chemically synthesized
  source 1..22: mol_type = other DNA
acacatataacctgagtcccta

SEQ ID NO: 112754 - DNA, 22 bp, synthetic construct
  misc_feature 1..22: note = chemically synthesized
  source 1..22: mol_type = other DNA
agtccctactgattttctagta

SEQ ID NO: 112755 - DNA, 22 bp, synthetic construct
  misc_feature 1..22: note = chemically synthesized
  source 1..22: mol_type = other DNA
ctgattttctagtactgtactg

SEQ ID NO: 112756 - DNA, 22 bp, synthetic construct
  misc_feature 1..22: note = chemically synthesized
  source 1..22: mol_type = other DNA
attttctagtactgtactgaat

SEQ ID NO: 112757 - DNA, 22 bp, synthetic construct
  misc_feature 1..22: note = chemically synthesized
  source 1..22: mol_type = other DNA
tctagtactgtactgaatgagg

SEQ ID NO: 112758 - DNA, 22 bp, synthetic construct
  misc_feature 1..22: note = chemically synthesized
  source 1..22: mol_type = other DNA
ctagtactgtactgaatgaggc

SEQ ID NO: 112759 - DNA, 22 bp, synthetic construct
  misc_feature 1..22: note = chemically synthesized
  source 1..22: mol_type = other DNA
tagtactgtactgaatgaggcc

SEQ ID NO: 112760 - DNA, 22 bp, synthetic construct
  misc_feature 1..22: note = chemically synthesized
  source 1..22: mol_type = other DNA
gtactgtactgaatgaggccaa

SEQ ID NO: 112761 - DNA, 22 bp, synthetic construct
  misc_feature 1..22: note = chemically synthesized
  source 1..22: mol_type = other DNA
tactgaatgaggccaacatgat

SEQ ID NO: 112762 - DNA, 22 bp, synthetic construct
  misc_feature 1..22: note = chemically synthesized
  source 1..22: mol_type = other DNA
aatgaggccaacatgatagaag

SEQ ID NO: 112763 - DNA, 22 bp, synthetic construct
  misc_feature 1..22: note = chemically synthesized
  source 1..22: mol_type = other DNA
aacaaatattaattaaagttat

SEQ ID NO: 112764 - DNA, 22 bp, synthetic construct
  misc_feature 1..22: note = chemically synthesized
  source 1..22: mol_type = other DNA
acaaatattaattaaagttatt

SEQ ID NO: 112765 - DNA, 22 bp, synthetic construct
  misc_feature 1..22: note = chemically synthesized
  source 1..22: mol_type = other DNA
attaaagttattattactagtt

SEQ ID NO: 112766 - DNA, 22 bp, synthetic construct
  misc_feature 1..22: note = chemically synthesized
  source 1..22: mol_type = other DNA
aagttattattactagttagtg

SEQ ID NO: 112767 - DNA, 22 bp, synthetic construct
  misc_feature 1..22: note = chemically synthesized
  source 1..22: mol_type = other DNA
ttattactagttagtggaatac

SEQ ID NO: 112768 - DNA, 22 bp, synthetic construct
  misc_feature 1..22: note = chemically synthesized
  source 1..22: mol_type = other DNA
ttactagttagtggaatactat

SEQ ID NO: 112769 - DNA, 22 bp, synthetic construct
  misc_feature 1..22: note = chemically synthesized
  source 1..22: mol_type = other DNA
ctagttagtggaatactattaa

SEQ ID NO: 112770 - DNA, 22 bp, synthetic construct
  misc_feature 1..22: note = chemically synthesized
  source 1..22: mol_type = other DNA
gttagtggaatactattaacaa

SEQ ID NO: 112771 - DNA, 22 bp, synthetic construct
  misc_feature 1..22: note = chemically synthesized
  source 1..22: mol_type = other DNA
gtggaatactattaacaataat

SEQ ID NO: 112772 - DNA, 22 bp, synthetic construct
  misc_feature 1..22: note = chemically synthesized
  source 1..22: mol_type = other DNA
ttaacaataatattttagcagc

SEQ ID NO: 112773 - DNA, 22 bp, synthetic construct
  misc_feature 1..22: note = chemically synthesized
  source 1..22: mol_type = other DNA
acaataatattttagcagccac

SEQ ID NO: 112774 - DNA, 22 bp, synthetic construct
  misc_feature 1..22: note = chemically synthesized
  source 1..22: mol_type = other DNA
tagcagccactatttgcaaaat

SEQ ID NO: 112775 - DNA, 22 bp, synthetic construct
  misc_feature 1..22: note = chemically synthesized
  source 1..22: mol_type = other DNA
agcagccactatttgcaaaata

SEQ ID NO: 112776 - DNA, 22 bp, synthetic construct
  misc_feature 1..22: note = chemically synthesized
  source 1..22: mol_type = other DNA
gcagccactatttgcaaaatat

SEQ ID NO: 112777 - DNA, 22 bp, synthetic construct
  misc_feature 1..22: note = chemically synthesized
  source 1..22: mol_type = other DNA
tttgcaaaatataacactttta

SEQ ID NO: 112778 - DNA, 22 bp, synthetic construct
  misc_feature 1..22: note = chemically synthesized
  source 1..22: mol_type = other DNA
gcaaaatataacacttttagga

SEQ ID NO: 112779 - DNA, 22 bp, synthetic construct
  misc_feature 1..22: note = chemically synthesized
  source 1..22: mol_type = other DNA
caaaatataacacttttaggag

SEQ ID NO: 112780 - DNA, 22 bp, synthetic construct
  misc_feature 1..22: note = chemically synthesized
  source 1..22: mol_type = other DNA
ttaggagaattacatctattat

SEQ ID NO: 112781 - DNA, 22 bp, synthetic construct
  misc_feature 1..22: note = chemically synthesized
  source 1..22: mol_type = other DNA
taggagaattacatctattata

SEQ ID NO: 112782 - DNA, 22 bp, synthetic construct
  misc_feature 1..22: note = chemically synthesized
  source 1..22: mol_type = other DNA
aggagaattacatctattatac

SEQ ID NO: 112783 - DNA, 22 bp, synthetic construct
  misc_feature 1..22: note = chemically synthesized
  source 1..22: mol_type = other DNA
ggagaattacatctattatacc

SEQ ID NO: 112784 - DNA, 22 bp, synthetic construct
  misc_feature 1..22: note = chemically synthesized
  source 1..22: mol_type = other DNA
catctattatacctcagtaaaa

SEQ ID NO: 112785 - DNA, 22 bp, synthetic construct
  misc_feature 1..22: note = chemically synthesized
  source 1..22: mol_type = other DNA
ttatacctcagtaaaactctat

SEQ ID NO: 112786 - DNA, 22 bp, synthetic construct
  misc_feature 1..22: note = chemically synthesized
  source 1..22: mol_type = other DNA
tacctcagtaaaactctatgaa

SEQ ID NO: 112787 - DNA, 22 bp, synthetic construct
  misc_feature 1..22: note = chemically synthesized
  source 1..22: mol_type = other DNA
agtaaaactctatgaaacagac

SEQ ID NO: 112788 - DNA, 22 bp, synthetic construct
  misc_feature 1..22: note = chemically synthesized
  source 1..22: mol_type = other DNA
tatgaaacagactttttatata

SEQ ID NO: 112789 - DNA, 22 bp, synthetic construct
  misc_feature 1..22: note = chemically synthesized
  source 1..22: mol_type = other DNA
tgaaacagactttttatatatt

SEQ ID NO: 112790 - DNA, 22 bp, synthetic construct
  misc_feature 1..22: note = chemically synthesized
  source 1..22: mol_type = other DNA
tttatatattttttctggataa

SEQ ID NO: 112791 - DNA, 22 bp, synthetic construct
  misc_feature 1..22: note = chemically synthesized
  source 1..22: mol_type = other DNA
ttatatattttttctggataaa

SEQ ID NO: 112792 - DNA, 22 bp, synthetic construct
  misc_feature 1..22: note = chemically synthesized
  source 1..22: mol_type = other DNA
tatatattttttctggataaaa

SEQ ID NO: 112793 - DNA, 22 bp, synthetic construct
  misc_feature 1..22: note = chemically synthesized
  source 1..22: mol_type = other DNA
atatattttttctggataaaaa

SEQ ID NO: 112794 - DNA, 22 bp, synthetic construct
  misc_feature 1..22: note = chemically synthesized
  source 1..22: mol_type = other DNA
tatattttttctggataaaaaa

SEQ ID NO: 112795 - DNA, 22 bp, synthetic construct
  misc_feature 1..22: note = chemically synthesized
  source 1..22: mol_type = other DNA
tttctggataaaaaataaaatc

SEQ ID NO: 112796 - DNA, 22 bp, synthetic construct
  misc_feature 1..22: note = chemically synthesized
  source 1..22: mol_type = other DNA
ttctggataaaaaataaaatct

SEQ ID NO: 112797 - DNA, 22 bp, synthetic construct
  misc_feature 1..22: note = chemically synthesized
  source 1..22: mol_type = other DNA
tctggataaaaaataaaatctg

SEQ ID NO: 112798 - DNA, 22 bp, synthetic construct
  misc_feature 1..22: note = chemically synthesized
  source 1..22: mol_type = other DNA
ctggataaaaaataaaatctga

SEQ ID NO: 112799 - DNA, 22 bp, synthetic construct
  misc_feature 1..22: note = chemically synthesized
  source 1..22: mol_type = other DNA
tggataaaaaataaaatctgat

SEQ ID NO: 112800 - DNA, 22 bp, synthetic construct
  misc_feature 1..22: note = chemically synthesized
  source 1..22: mol_type = other DNA
gataaaaaataaaatctgataa

SEQ ID NO: 112801 - DNA, 22 bp, synthetic construct
  misc_feature 1..22: note = chemically synthesized
  source 1..22: mol_type = other DNA
ataatttgagacatttaaaaaa

SEQ ID NO: 112802 - DNA, 22 bp, synthetic construct
  misc_feature 1..22: note = chemically synthesized
  source 1..22: mol_type = other DNA
gagacatttaaaaaagtataca

SEQ ID NO: 112803 - DNA, 22 bp, synthetic construct
  misc_feature 1..22: note = chemically synthesized
  source 1..22: mol_type = other DNA
agacatttaaaaaagtatacaa

SEQ ID NO: 112804 - DNA, 22 bp, synthetic construct
  misc_feature 1..22: note = chemically synthesized
  source 1..22: mol_type = other DNA
aaaaaagtatacaactagtaag

SEQ ID NO: 112805 - DNA, 22 bp, synthetic construct
  misc_feature 1..22: note = chemically synthesized
  source 1..22: mol_type = other DNA
aaaaagtatacaactagtaagt

SEQ ID NO: 112806 - DNA, 22 bp, synthetic construct
  misc_feature 1..22: note = chemically synthesized
  source 1..22: mol_type = other DNA
gtaagtagttgtatttttaaaa

SEQ ID NO: 112807 - DNA, 22 bp, synthetic construct
  misc_feature 1..22: note = chemically synthesized
  source 1..22: mol_type = other DNA
tatttttaaaattttccattca

SEQ ID NO: 112808 - DNA, 22 bp, synthetic construct
  misc_feature 1..22: note = chemically synthesized
  source 1..22: mol_type = other DNA
ttaaaattttccattcactatc

SEQ ID NO: 112809 - DNA, 22 bp, synthetic construct
  misc_feature 1..22: note = chemically synthesized
  source 1..22: mol_type = other DNA
taaaattttccattcactatcc

SEQ ID NO: 112810 - DNA, 22 bp, synthetic construct
  misc_feature 1..22: note = chemically synthesized
  source 1..22: mol_type = other DNA
aaaattttccattcactatcct

SEQ ID NO: 112811 - DNA, 22 bp, synthetic construct
  misc_feature 1..22: note = chemically synthesized
  source 1..22: mol_type = other DNA
aaattttccattcactatccta

SEQ ID NO: 112812 - DNA, 22 bp, synthetic construct
  misc_feature 1..22: note = chemically synthesized
  source 1..22: mol_type = other DNA
tccattcactatcctaaatatg

SEQ ID NO: 112813 - DNA, 22 bp, synthetic construct
  misc_feature 1..22: note = chemically synthesized
  source 1..22: mol_type = other DNA
ccattcactatcctaaatatgt

SEQ ID NO: 112814 - DNA, 22 bp, synthetic construct
  misc_feature 1..22: note = chemically synthesized
  source 1..22: mol_type = other DNA
cattcactatcctaaatatgtc

SEQ ID NO: 112815 - DNA, 22 bp, synthetic construct
  misc_feature 1..22: note = chemically synthesized
  source 1..22: mol_type = other DNA
actatcctaaatatgtctatga

SEQ ID NO: 112816 - DNA, 22 bp, synthetic construct
  misc_feature 1..22: note = chemically synthesized
  source 1..22: mol_type = other DNA
tcctaaatatgtctatgatata

SEQ ID NO: 112817 - DNA, 22 bp, synthetic construct
  misc_feature 1..22: note = chemically synthesized
  source 1..22: mol_type = other DNA
aatatgtctatgatataattta

SEQ ID NO: 112818 - DNA, 22 bp, synthetic construct
  misc_feature 1..22: note = chemically synthesized
  source 1..22: mol_type = other DNA
tgatataatttaaaaaattata

SEQ ID NO: 112819 - DNA, 22 bp, synthetic construct
  misc_feature 1..22: note = chemically synthesized
  source 1..22: mol_type = other DNA
aaaaaattatatatactccatg

SEQ ID NO: 112820 - DNA, 22 bp, synthetic construct
  misc_feature 1..22: note = chemically synthesized
  source 1..22: mol_type = other DNA
aaaaattatatatactccatgt

SEQ ID NO: 112821 - DNA, 22 bp, synthetic construct
  misc_feature 1..22: note = chemically synthesized
  source 1..22: mol_type = other DNA
tatatactccatgtatattaaa

SEQ ID NO: 112822 - DNA, 22 bp, synthetic construct
  misc_feature 1..22: note = chemically synthesized
  source 1..22: mol_type = other DNA
catgtatattaaatataaagta

SEQ ID NO: 112823 - DNA, 22 bp, synthetic construct
  misc_feature 1..22: note = chemically synthesized
  source 1..22: mol_type = other DNA
aatataaagtaaagacctttta

SEQ ID NO: 112824 - DNA, 22 bp, synthetic construct
  misc_feature 1..22: note = chemically synthesized
  source 1..22: mol_type = other DNA
ttatccttacctttctatcctc

SEQ ID NO: 112825 - DNA, 22 bp, synthetic construct
  misc_feature 1..22: note = chemically synthesized
  source 1..22: mol_type = other DNA
tatccttacctttctatcctcc

SEQ ID NO: 112826 - DNA, 22 bp, synthetic construct
  misc_feature 1..22: note = chemically synthesized
  source 1..22: mol_type = other DNA
atccttacctttctatcctccc

SEQ ID NO: 112827 - DNA, 22 bp, synthetic construct
  misc_feature 1..22: note = chemically synthesized
  source 1..22: mol_type = other DNA
tccttacctttctatcctccct

SEQ ID NO: 112828 - DNA, 22 bp, synthetic construct
  misc_feature 1..22: note = chemically synthesized
  source 1..22: mol_type = other DNA
acctttctatcctccctggaga

SEQ ID NO: 112829 - DNA, 22 bp, synthetic construct
  misc_feature 1..22: note = chemically synthesized
  source 1..22: mol_type = other DNA
cctttctatcctccctggagat

SEQ ID NO: 112830 - DNA, 22 bp, synthetic construct
  misc_feature 1..22: note = chemically synthesized
  source 1..22: mol_type = other DNA
tctatcctccctggagataatt

SEQ ID NO: 112831 - DNA, 22 bp, synthetic construct
  misc_feature 1..22: note = chemically synthesized
  source 1..22: mol_type = other DNA
ctatcctccctggagataattt

SEQ ID NO: 112832 - DNA, 22 bp, synthetic construct
  misc_feature 1..22: note = chemically synthesized
  source 1..22: mol_type = other DNA
tatcctccctggagataatttc

SEQ ID NO: 112833 - DNA, 22 bp, synthetic construct
  misc_feature 1..22: note = chemically synthesized
  source 1..22: mol_type = other DNA
tcctccctggagataatttccc

SEQ ID NO: 112834 - DNA, 22 bp, synthetic construct
  misc_feature 1..22: note = chemically synthesized
  source 1..22: mol_type = other DNA
cctggagataatttccctttat

SEQ ID NO: 112835 - DNA, 22 bp, synthetic construct
  misc_feature 1..22: note = chemically synthesized
  source 1..22: mol_type = other DNA
gagataatttccctttataatc

SEQ ID NO: 112836 - DNA, 22 bp, synthetic construct
  misc_feature 1..22: note = chemically synthesized
  source 1..22: mol_type = other DNA
ccctttataatctgccatacat

SEQ ID NO: 112837 - DNA, 22 bp, synthetic construct
  misc_feature 1..22: note = chemically synthesized
  source 1..22: mol_type = other DNA
cctttataatctgccatacatt

SEQ ID NO: 112838 - DNA, 22 bp, synthetic construct
  misc_feature 1..22: note = chemically synthesized
  source 1..22: mol_type = other DNA
tataatctgccatacatttctc

SEQ ID NO: 112839 - DNA, 22 bp, synthetic construct
  misc_feature 1..22: note = chemically synthesized
  source 1..22: mol_type = other DNA
ataatctgccatacatttctct

SEQ ID NO: 112840 - DNA, 22 bp, synthetic construct
  misc_feature 1..22: note = chemically synthesized
  source 1..22: mol_type = other DNA
taatctgccatacatttctctg

SEQ ID NO: 112841 - DNA, 22 bp, synthetic construct
  misc_feature 1..22: note = chemically synthesized
  source 1..22: mol_type = other DNA
ccatacatttctctgcaacttt

SEQ ID NO: 112842 - DNA, 22 bp, synthetic construct
  misc_feature 1..22: note = chemically synthesized
  source 1..22: mol_type = other DNA
ctctgcaacttttctacacatt

SEQ ID NO: 112843 - DNA, 22 bp, synthetic construct
  misc_feature 1..22: note = chemically synthesized
  source 1..22: mol_type = other DNA
tctgcaacttttctacacattt

SEQ ID NO: 112844 - DNA, 22 bp, synthetic construct
  misc_feature 1..22: note = chemically synthesized
  source 1..22: mol_type = other DNA
tgcaacttttctacacatttat

SEQ ID NO: 112845 - DNA, 22 bp, synthetic construct
  misc_feature 1..22: note = chemically synthesized
  source 1..22: mol_type = other DNA
caacttttctacacatttatat

SEQ ID NO: 112846 - DNA, 22 bp, synthetic construct
  misc_feature 1..22: note = chemically synthesized
  source 1..22: mol_type = other DNA
ttctacacatttatatatacat

SEQ ID NO: 112847 - DNA, 22 bp, synthetic construct
  misc_feature 1..22: note = chemically synthesized
  source 1..22: mol_type = other DNA
tctacacatttatatatacata

SEQ ID NO: 112848 - DNA, 22 bp, synthetic construct
  misc_feature 1..22: note = chemically synthesized
  source 1..22: mol_type = other DNA
ctacacatttatatatacatat

SEQ ID NO: 112849 - DNA, 22 bp, synthetic construct
  misc_feature 1..22: note = chemically synthesized
  source 1..22: mol_type = other DNA
tacacatttatatatacatata

SEQ ID NO: 112850 - DNA, 22 bp, synthetic construct
  misc_feature 1..22: note = chemically synthesized
  source 1..22: mol_type = other DNA
cacatttatatatacatatatg

SEQ ID NO: 112851 - DNA, 22 bp, synthetic construct
  misc_feature 1..22: note = chemically synthesized
  source 1..22: mol_type = other DNA
atatatacatatatgaacatac

SEQ ID NO: 112852 - DNA, 22 bp, synthetic construct
  misc_feature 1..22: note = chemically synthesized
  source 1..22: mol_type = other DNA
tatatacatatatgaacatact

SEQ ID NO: 112853 - DNA, 22 bp, synthetic construct
  misc_feature 1..22: note = chemically synthesized
  source 1..22: mol_type = other DNA
aaataaatagtcctattggctg

SEQ ID NO: 112854 - DNA, 22 bp, synthetic construct
  misc_feature 1..22: note = chemically synthesized
  source 1..22: mol_type = other DNA
ttggctggtagcaagggctatg

SEQ ID NO: 112855 - DNA, 22 bp, synthetic construct
  misc_feature 1..22: note = chemically synthesized
  source 1..22: mol_type = other DNA
gctggtagcaagggctatgtgt

SEQ ID NO: 112856 - DNA, 22 bp, synthetic construct
  misc_feature 1..22: note = chemically synthesized
  source 1..22: mol_type = other DNA
gtagcaagggctatgtgtagca

SEQ ID NO: 112857 - DNA, 22 bp, synthetic construct
  misc_feature 1..22: note = chemically synthesized
  source 1..22: mol_type = other DNA
tgtgtagcactgttatttccat

SEQ ID NO: 112858 - DNA, 22 bp, synthetic construct
  misc_feature 1..22: note = chemically synthesized
  source 1..22: mol_type = other DNA
ttatttccatgatgccacacta

SEQ ID NO: 112859 - DNA, 22 bp, synthetic construct
  misc_feature 1..22: note = chemically synthesized
  source 1..22: mol_type = other DNA
tttccatgatgccacactaaaa

SEQ ID NO: 112860 - DNA, 22 bp, synthetic construct
  misc_feature 1..22: note = chemically synthesized
  source 1..22: mol_type = other DNA
ccatgatgccacactaaaatca

SEQ ID NO: 112861 - DNA, 22 bp, synthetic construct
  misc_feature 1..22: note = chemically synthesized
  source 1..22: mol_type = other DNA
catgatgccacactaaaatcag

SEQ ID NO: 112862 - DNA, 22 bp, synthetic construct
  misc_feature 1..22: note = chemically synthesized
  source 1..22: mol_type = other DNA
aaatcagtgctgcttgtctgca

SEQ ID NO: 112863 - DNA, 22 bp, synthetic construct
  misc_feature 1..22: note = chemically synthesized
  source 1..22: mol_type = other DNA
cttgtctgcatttttgtgttac

SEQ ID NO: 112864 - DNA, 22 bp, synthetic construct
  misc_feature 1..22: note = chemically synthesized
  source 1..22: mol_type = other DNA
gtctgcatttttgtgttacagt

SEQ ID NO: 112865 - DNA, 22 bp, synthetic construct
  misc_feature 1..22: note = chemically synthesized
  source 1..22: mol_type = other DNA
tctgcatttttgtgttacagtg

SEQ ID NO: 112866 - DNA, 22 bp, synthetic construct
  misc_feature 1..22: note = chemically synthesized
  source 1..22: mol_type = other DNA
catttttgtgttacagtgaatg

SEQ ID NO: 112867 - DNA, 22 bp, synthetic construct
  misc_feature 1..22: note = chemically synthesized
  source 1..22: mol_type = other DNA
ttgtgttacagtgaatgtagac

SEQ ID NO: 112868 - DNA, 22 bp, synthetic construct
  misc_feature 1..22: note = chemically synthesized
  source 1..22: mol_type = other DNA
tgtgttacagtgaatgtagact

SEQ ID NO: 112869 - DNA, 22 bp, synthetic construct
  misc_feature 1..22: note = chemically synthesized
  source 1..22: mol_type = other DNA
gtgttacagtgaatgtagacta

SEQ ID NO: 112870 - DNA, 22 bp, synthetic construct
  misc_feature 1..22: note = chemically synthesized
  source 1..22: mol_type = other DNA
tgttacagtgaatgtagactaa

SEQ ID NO: 112871 - DNA, 22 bp, synthetic construct
  misc_feature 1..22: note = chemically synthesized
  source 1..22: mol_type = other DNA
cagtgaatgtagactaaaatcc

SEQ ID NO: 112872 - DNA, 22 bp, synthetic construct
  misc_feature 1..22: note = chemically synthesized
  source 1..22: mol_type = other DNA
aaatccaaaataagtcaacagt

SEQ ID NO: 112873 - DNA, 22 bp, synthetic construct
  misc_feature 1..22: note = chemically synthesized
  source 1..22: mol_type = other DNA
ttaaaagtgatgacctcattgg

SEQ ID NO: 112874 - DNA, 22 bp, synthetic construct
  misc_feature 1..22: note = chemically synthesized
  source 1..22: mol_type = other DNA
aaagtgatgacctcattggttt

SEQ ID NO: 112875 - DNA, 22 bp, synthetic construct
  misc_feature 1..22: note = chemically synthesized
  source 1..22: mol_type = other DNA
attggttttgctatcaacatag

SEQ ID NO: 112876 - DNA, 22 bp, synthetic construct
  misc_feature 1..22: note = chemically synthesized
  source 1..22: mol_type = other DNA
gttttgctatcaacatagaaag

SEQ ID NO: 112877 - DNA, 22 bp, synthetic construct
  misc_feature 1..22: note = chemically synthesized
  source 1..22: mol_type = other DNA
tgctatcaacatagaaagaaag

SEQ ID NO: 112878 - DNA, 22 bp, synthetic construct
  misc_feature 1..22: note = chemically synthesized
  source 1..22: mol_type = other DNA
gctatcaacatagaaagaaagg

SEQ ID NO: 112879 - DNA, 22 bp, synthetic construct
  misc_feature 1..22: note = chemically synthesized
  source 1..22: mol_type = other DNA
ctatcaacatagaaagaaaggg

SEQ ID NO: 112880 - DNA, 22 bp, synthetic construct
  misc_feature 1..22: note = chemically synthesized
  source 1..22: mol_type = other DNA
tcaacatagaaagaaagggaag

SEQ ID NO: 112881 - DNA, 22 bp, synthetic construct
  misc_feature 1..22: note = chemically synthesized
  source 1..22: mol_type = other DNA
tctcaggatttttactcaagga

SEQ ID NO: 112882 - DNA, 22 bp, synthetic construct
  misc_feature 1..22: note = chemically synthesized
  source 1..22: mol_type = other DNA
ctcaggatttttactcaaggaa

SEQ ID NO: 112883 - DNA, 22 bp, synthetic construct
  misc_feature 1..22: note = chemically synthesized
  source 1..22: mol_type = other DNA
tcaggatttttactcaaggaaa

SEQ ID NO: 112884 - DNA, 22 bp, synthetic construct
  misc_feature 1..22: note = chemically synthesized
  source 1..22: mol_type = other DNA
aggatttttactcaaggaaagg

SEQ ID NO: 112885 - DNA, 22 bp, synthetic construct
  misc_feature 1..22: note = chemically synthesized
  source 1..22: mol_type = other DNA
ttactcaaggaaaggcagtggg

SEQ ID NO: 112886 - DNA, 22 bp, synthetic construct
  misc_feature 1..22: note = chemically synthesized
  source 1..22: mol_type = other DNA
tactcaaggaaaggcagtgggg

SEQ ID NO: 112887 - DNA, 22 bp, synthetic construct
  misc_feature 1..22: note = chemically synthesized
  source 1..22: mol_type = other DNA
actcaaggaaaggcagtgggga

SEQ ID NO: 112888 - DNA, 22 bp, synthetic construct
  misc_feature 1..22: note = chemically synthesized
  source 1..22: mol_type = other DNA
ctcaaggaaaggcagtggggaa

SEQ ID NO: 112889 - DNA, 22 bp, synthetic construct
  misc_feature 1..22: note = chemically synthesized
  source 1..22: mol_type = other DNA
aaggaaaggcagtggggaaaga

SEQ ID NO: 112890 - DNA, 22 bp, synthetic construct
  misc_feature 1..22: note = chemically synthesized
  source 1..22: mol_type = other DNA
tggtattctgtgtcaatctgta

SEQ ID NO: 112891 - DNA, 22 bp, synthetic construct
  misc_feature 1..22: note = chemically synthesized
  source 1..22: mol_type = other DNA
ggtattctgtgtcaatctgtat

SEQ ID NO: 112892 - DNA, 22 bp, synthetic construct
  misc_feature 1..22: note = chemically synthesized
  source 1..22: mol_type = other DNA
gtattctgtgtcaatctgtatc

SEQ ID NO: 112893 - DNA, 22 bp, synthetic construct
  misc_feature 1..22: note = chemically synthesized
  source 1..22: mol_type = other DNA
tgtgtcaatctgtatcaacaag

SEQ ID NO: 112894 - DNA, 22 bp, synthetic construct
  misc_feature 1..22: note = chemically synthesized
  source 1..22: mol_type = other DNA
tgtcaatctgtatcaacaagat

SEQ ID NO: 112895 - DNA, 22 bp, synthetic construct
  misc_feature 1..22: note = chemically synthesized
  source 1..22: mol_type = other DNA
tatcaacaagatcttcaaacct

SEQ ID NO: 112896 - DNA, 22 bp, synthetic construct
  misc_feature 1..22: note = chemically synthesized
  source 1..22: mol_type = other DNA
caaacctccctctgcatggccc

SEQ ID NO: 112897 - DNA, 22 bp, synthetic construct
  misc_feature 1..22: note = chemically synthesized
  source 1..22: mol_type = other DNA
aaacctccctctgcatggcccc

SEQ ID NO: 112898 - DNA, 22 bp, synthetic construct
  misc_feature 1..22: note = chemically synthesized
  source 1..22: mol_type = other DNA
cctctgcatggccccaggagag

SEQ ID NO: 112899 - DNA, 22 bp, synthetic construct
  misc_feature 1..22: note = chemically synthesized
  source 1..22: mol_type = other DNA
tgcatggccccaggagagtcag

SEQ ID NO: 112900 - DNA, 22 bp, synthetic construct
  misc_feature 1..22: note = chemically synthesized
  source 1..22: mol_type = other DNA
catggccccaggagagtcagtg

SEQ ID NO: 112901 - DNA, 22 bp, synthetic construct
  misc_feature 1..22: note = chemically synthesized
  source 1..22: mol_type = other DNA
cacaaacctctcctgccatctt

SEQ ID NO: 112902 - DNA, 22 bp, synthetic construct
  misc_feature 1..22: note = chemically synthesized
  source 1..22: mol_type = other DNA
tcctgccatcttatggtttgta

SEQ ID NO: 112903 - DNA, 22 bp, synthetic construct
  misc_feature 1..22: note = chemically synthesized
  source 1..22: mol_type = other DNA
ctgccatcttatggtttgtaca

SEQ ID NO: 112904 - DNA, 22 bp, synthetic construct
  misc_feature 1..22: note = chemically synthesized
  source 1..22: mol_type = other DNA
ccatcttatggtttgtacagca

SEQ ID NO: 112905 - DNA, 22 bp, synthetic construct
  misc_feature 1..22: note = chemically synthesized
  source 1..22: mol_type = other DNA
atggtttgtacagcatgtgcaa

SEQ ID NO: 112906 - DNA, 22 bp, synthetic construct
  misc_feature 1..22: note = chemically synthesized
  source 1..22: mol_type = other DNA
tggtttgtacagcatgtgcaag

SEQ ID NO: 112907 - DNA, 22 bp, synthetic construct
  misc_feature 1..22: note = chemically synthesized
  source 1..22: mol_type = other DNA
gtacagcatgtgcaagctgctt

SEQ ID NO: 112908 - DNA, 22 bp, synthetic construct
  misc_feature 1..22: note = chemically synthesized
  source 1..22: mol_type = other DNA
tacagcatgtgcaagctgcttc

SEQ ID NO: 112909 - DNA, 22 bp, synthetic construct
  misc_feature 1..22: note = chemically synthesized
  source 1..22: mol_type = other DNA
cttctatagaaatgcatataga

SEQ ID NO: 112910 - DNA, 22 bp, synthetic construct
  misc_feature 1..22: note = chemically synthesized
  source 1..22: mol_type = other DNA
ctatagaaatgcatatagaaaa

SEQ ID NO: 112911 - DNA, 22 bp, synthetic construct
  misc_feature 1..22: note = chemically synthesized
  source 1..22: mol_type = other DNA
tatagaaatgcatatagaaaat

SEQ ID NO: 112912 - DNA, 22 bp, synthetic construct
  misc_feature 1..22: note = chemically synthesized
  source 1..22: mol_type = other DNA
tagaaatgcatatagaaaatac

SEQ ID NO: 112913 - DNA, 22 bp, synthetic construct
  misc_feature 1..22: note = chemically synthesized
  source 1..22: mol_type = other DNA
gaggctaccaagttgtaattta

SEQ ID NO: 112914 - DNA, 22 bp, synthetic construct
  misc_feature 1..22: note = chemically synthesized
  source 1..22: mol_type = other DNA
ccaagttgtaatttaaaaataa

SEQ ID NO: 112915 - DNA, 22 bp, synthetic construct
  misc_feature 1..22: note = chemically synthesized
  source 1..22: mol_type = other DNA
taatttaaaaataatgctcata

SEQ ID NO: 112916 - DNA, 22 bp, synthetic construct
  misc_feature 1..22: note = chemically synthesized
  source 1..22: mol_type = other DNA
aaaaataatgctcataatcatc

SEQ ID NO: 112917 - DNA, 22 bp, synthetic construct
  misc_feature 1..22: note = chemically synthesized
  source 1..22: mol_type = other DNA
aaaataatgctcataatcatca

SEQ ID NO: 112918 - DNA, 22 bp, synthetic construct
  misc_feature 1..22: note = chemically synthesized
  source 1..22: mol_type = other DNA
ataatcatcaatgtatttatta

SEQ ID NO: 112919 - DNA, 22 bp, synthetic construct
  misc_feature 1..22: note = chemically synthesized
  source 1..22: mol_type = other DNA
attattatcattaacagtcaca

SEQ ID NO: 112920 - DNA, 22 bp, synthetic construct
  misc_feature 1..22: note = chemically synthesized
  source 1..22: mol_type = other DNA
ttattatcattaacagtcacag

SEQ ID NO: 112921 - DNA, 22 bp, synthetic construct
  misc_feature 1..22: note = chemically synthesized
  source 1..22: mol_type = other DNA
ttatcattaacagtcacagtct

SEQ ID NO: 112922 - DNA, 22 bp, synthetic construct
  misc_feature 1..22: note = chemically synthesized
  source 1..22: mol_type = other DNA
tcattaacagtcacagtctttt

SEQ ID NO: 112923 - DNA, 22 bp, synthetic construct
  misc_feature 1..22: note = chemically synthesized
  source 1..22: mol_type = other DNA
acagtcacagtcttttatagta

SEQ ID NO: 112924 - DNA, 22 bp, synthetic construct
  misc_feature 1..22: note = chemically synthesized
  source 1..22: mol_type = other DNA
ttatagtaaatcctaaagttga

SEQ ID NO: 112925 - DNA, 22 bp, synthetic construct
  misc_feature 1..22: note = chemically synthesized
  source 1..22: mol_type = other DNA
tatagtaaatcctaaagttgaa

SEQ ID NO: 112926 - DNA, 22 bp, synthetic construct
  misc_feature 1..22: note = chemically synthesized
  source 1..22: mol_type = other DNA
atagtaaatcctaaagttgaag

SEQ ID NO: 112927 - DNA, 22 bp, synthetic construct
  misc_feature 1..22: note = chemically synthesized
  source 1..22: mol_type = other DNA
tagtaaatcctaaagttgaagg

SEQ ID NO: 112928 - DNA, 22 bp, synthetic construct
  misc_feature 1..22: note = chemically synthesized
  source 1..22: mol_type = other DNA
aagttgaaggtttgaatgttta

SEQ ID NO: 112929 - DNA, 22 bp, synthetic construct
  misc_feature 1..22: note = chemically synthesized
  source 1..22: mol_type = other DNA
aaggtttgaatgtttaatgcta

SEQ ID NO: 112930 - DNA, 22 bp, synthetic construct
  misc_feature 1..22: note = chemically synthesized
  source 1..22: mol_type = other DNA
gaatgtttaatgctatgaaata

SEQ ID NO: 112931 - DNA, 22 bp, synthetic construct
  misc_feature 1..22: note = chemically synthesized
  source 1..22: mol_type = other DNA
aatgtttaatgctatgaaatat

SEQ ID NO: 112932 - DNA, 22 bp, synthetic construct
  misc_feature 1..22: note = chemically synthesized
  source 1..22: mol_type = other DNA
aatgctatgaaatattaaataa

SEQ ID NO: 112933 - DNA, 22 bp, synthetic construct
  misc_feature 1..22: note = chemically synthesized
  source 1..22: mol_type = other DNA
atgctatgaaatattaaataag

SEQ ID NO: 112934 - DNA, 22 bp, synthetic construct
  misc_feature 1..22: note = chemically synthesized
  source 1..22: mol_type = other DNA
tgaaatattaaataagtgacga

SEQ ID NO: 112935 - DNA, 22 bp, synthetic construct
  misc_feature 1..22: note = chemically synthesized
  source 1..22: mol_type = other DNA
aataagtgacgatagtatcttt

SEQ ID NO: 112936 - DNA, 22 bp, synthetic construct
  misc_feature 1..22: note = chemically synthesized
  source 1..22: mol_type = other DNA
ttatgctgactgtccaggattg

SEQ ID NO: 112937 - DNA, 22 bp, synthetic construct
  misc_feature 1..22: note = chemically synthesized
  source 1..22: mol_type = other DNA
tatgctgactgtccaggattgg

SEQ ID NO: 112938 - DNA, 22 bp, synthetic construct
  misc_feature 1..22: note = chemically synthesized
  source 1..22: mol_type = other DNA
atgctgactgtccaggattgga

SEQ ID NO: 112939 - DNA, 22 bp, synthetic construct
  misc_feature 1..22: note = chemically synthesized
  source 1..22: mol_type = other DNA
tgctgactgtccaggattggaa

SEQ ID NO: 112940 - DNA, 22 bp, synthetic construct
  misc_feature 1..22: note = chemically synthesized
  source 1..22: mol_type = other DNA
actgtccaggattggaaatgct

SEQ ID NO: 112941 - DNA, 22 bp, synthetic construct
  misc_feature 1..22: note = chemically synthesized
  source 1..22: mol_type = other DNA
tccaggattggaaatgctacag

SEQ ID NO: 112942 - DNA, 22 bp, synthetic construct
  misc_feature 1..22: note = chemically synthesized
  source 1..22: mol_type = other DNA
gaaatgctacagcaaagtgaga

SEQ ID NO: 112943 - DNA, 22 bp, synthetic construct
  misc_feature 1..22: note = chemically synthesized
  source 1..22: mol_type = other DNA
cagcaaagtgagataggcattt

SEQ ID NO: 112944 - DNA, 22 bp, synthetic construct
  misc_feature 1..22: note = chemically synthesized
  source 1..22: mol_type = other DNA
tatgtatatcatctgcaaagac

SEQ ID NO: 112945 - DNA, 22 bp, synthetic construct
  misc_feature 1..22: note = chemically synthesized
  source 1..22: mol_type = other DNA
atgtatatcatctgcaaagact

SEQ ID NO: 112946 - DNA, 22 bp, synthetic construct
  misc_feature 1..22: note = chemically synthesized
  source 1..22: mol_type = other DNA
tgtatatcatctgcaaagacta

SEQ ID NO: 112947 - DNA, 22 bp, synthetic construct
  misc_feature 1..22: note = chemically synthesized
  source 1..22: mol_type = other DNA
caaagactaaactaaaatagct

SEQ ID NO: 112948 - DNA, 22 bp, synthetic construct
  misc_feature 1..22: note = chemically synthesized
  source 1..22: mol_type = other DNA
aactaaaatagctgggttgtca

SEQ ID NO: 112949 - DNA, 22 bp, synthetic construct
  misc_feature 1..22: note = chemically synthesized
  source 1..22: mol_type = other DNA
aaatagctgggttgtcaggtca

SEQ ID NO: 112950 - DNA, 22 bp, synthetic construct
  misc_feature 1..22: note = chemically synthesized
  source 1..22: mol_type = other DNA
ggttgtcaggtcagagcaattt

SEQ ID NO: 112951 - DNA, 22 bp, synthetic construct
  misc_feature 1..22: note = chemically synthesized
  source 1..22: mol_type = other DNA
tcaggtcagagcaatttacagg

SEQ ID NO: 112952 - DNA, 22 bp, synthetic construct
  misc_feature 1..22: note = chemically synthesized
  source 1..22: mol_type = other DNA
acagggaaaattaaattcaaat

SEQ ID NO: 112953 - DNA, 22 bp, synthetic construct
  misc_feature 1..22: note = chemically synthesized
  source 1..22: mol_type = other DNA
cagggaaaattaaattcaaatc

SEQ ID NO: 112954 - DNA, 22 bp, synthetic construct
  misc_feature 1..22: note = chemically synthesized
  source 1..22: mol_type = other DNA
aattcaaatcttcagaggatca

SEQ ID NO: 112955 - DNA, 22 bp, synthetic construct
  misc_feature 1..22: note = chemically synthesized
  source 1..22: mol_type = other DNA
aaatcttcagaggatcatttgt

SEQ ID NO: 112956 - DNA, 22 bp, synthetic construct
  misc_feature 1..22: note = chemically synthesized
  source 1..22: mol_type = other DNA
cagaggatcatttgttggtatg

SEQ ID NO: 112957 - DNA, 22 bp, synthetic construct
  misc_feature 1..22: note = chemically synthesized
  source 1..22: mol_type = other DNA
agaggatcatttgttggtatgt

SEQ ID NO: 112958 - DNA, 22 bp, synthetic construct
  misc_feature 1..22: note = chemically synthesized
  source 1..22: mol_type = other DNA
gttggtatgtctctgtccaatt

SEQ ID NO: 112959 - DNA, 22 bp, synthetic construct
  misc_feature 1..22: note = chemically synthesized
  source 1..22: mol_type = other DNA
ttggtatgtctctgtccaattt

SEQ ID NO: 112960 - DNA, 22 bp, synthetic construct
  misc_feature 1..22: note = chemically synthesized
  source 1..22: mol_type = other DNA
gtatgtctctgtccaatttgag

SEQ ID NO: 112961 - DNA, 22 bp, synthetic construct
  misc_feature 1..22: note = chemically synthesized
  source 1..22: mol_type = other DNA
tgtccaatttgagggcaataat

SEQ ID NO: 112962 - DNA, 22 bp, synthetic construct
  misc_feature 1..22: note = chemically synthesized
  source 1..22: mol_type = other DNA
tccaatttgagggcaataattt

SEQ ID NO: 112963 - DNA, 22 bp, synthetic construct
  misc_feature 1..22: note = chemically synthesized
  source 1..22: mol_type = other DNA
gagggcaataatttaatgccag

SEQ ID NO: 112964 - DNA, 22 bp, synthetic construct
  misc_feature 1..22: note = chemically synthesized
  source 1..22: mol_type = other DNA
agggcaataatttaatgccaga

SEQ ID NO: 112965 - DNA, 22 bp, synthetic construct
  misc_feature 1..22: note = chemically synthesized
  source 1..22: mol_type = other DNA
aatgccagaaaatatctattct

SEQ ID NO: 112966 - DNA, 22 bp, synthetic construct
  misc_feature 1..22: note = chemically synthesized
  source 1..22: mol_type = other DNA
atgccagaaaatatctattctt

SEQ ID NO: 112967 - DNA, 22 bp, synthetic construct
  misc_feature 1..22: note = chemically synthesized
  source 1..22: mol_type = other DNA
ttctttatctcactctctttct

SEQ ID NO: 112968 - DNA, 22 bp, synthetic construct
  misc_feature 1..22: note = chemically synthesized
  source 1..22: mol_type = other DNA
tttatctcactctctttctttc

SEQ ID NO: 112969 - DNA, 22 bp, synthetic construct
  misc_feature 1..22: note = chemically synthesized
  source 1..22: mol_type = other DNA
tatctcactctctttctttcat

SEQ ID NO: 112970 - DNA, 22 bp, synthetic construct
  misc_feature 1..22: note = chemically synthesized
  source 1..22: mol_type = other DNA
atctcactctctttctttcatt

SEQ ID NO: 112971 - DNA, 22 bp, synthetic construct
  misc_feature 1..22: note = chemically synthesized
  source 1..22: mol_type = other DNA
tctcactctctttctttcattc

SEQ ID NO: 112972 - DNA, 22 bp, synthetic construct
  misc_feature 1..22: note = chemically synthesized
  source 1..22: mol_type = other DNA
actctctttctttcattcttac

SEQ ID NO: 112973 - DNA, 22 bp, synthetic construct
  misc_feature 1..22: note = chemically synthesized
  source 1..22: mol_type = other DNA
tctttctttcattcttactttc

SEQ ID NO: 112974 - DNA, 22 bp, synthetic construct
  misc_feature 1..22: note = chemically synthesized
  source 1..22: mol_type = other DNA
tttctttcattcttactttctg

SEQ ID NO: 112975 - DNA, 22 bp, synthetic construct
  misc_feature 1..22: note = chemically synthesized
  source 1..22: mol_type = other DNA
tctttcattcttactttctgtc

SEQ ID NO: 112976 - DNA, 22 bp, synthetic construct
  misc_feature 1..22: note = chemically synthesized
  source 1..22: mol_type = other DNA
ctttcattcttactttctgtct

SEQ ID NO: 112977 - DNA, 22 bp, synthetic construct
  misc_feature 1..22: note = chemically synthesized
  source 1..22: mol_type = other DNA
tttcattcttactttctgtctt

SEQ ID NO: 112978 - DNA, 22 bp, synthetic construct
  misc_feature 1..22: note = chemically synthesized
  source 1..22: mol_type = other DNA
tcattcttactttctgtctttc

SEQ ID NO: 112979 - DNA, 22 bp, synthetic construct
  misc_feature 1..22: note = chemically synthesized
  source 1..22: mol_type = other DNA
cattcttactttctgtctttct

SEQ ID NO: 112980 - DNA, 22 bp, synthetic construct
  misc_feature 1..22: note = chemically synthesized
  source 1..22: mol_type = other DNA
attcttactttctgtctttctc

SEQ ID NO: 112981 - DNA, 22 bp, synthetic construct
  misc_feature 1..22: note = chemically synthesized
  source 1..22: mol_type = other DNA
ttactttctgtctttctccctt

SEQ ID NO: 112982 - DNA, 22 bp, synthetic construct
  misc_feature 1..22: note = chemically synthesized
  source 1..22: mol_type = other DNA
actttctgtctttctccctttc

SEQ ID NO: 112983 - DNA, 22 bp, synthetic construct
  misc_feature 1..22: note = chemically synthesized
  source 1..22: mol_type = other DNA
ctttctgtctttctccctttct

SEQ ID NO: 112984 - DNA, 22 bp, synthetic construct
  misc_feature 1..22: note = chemically synthesized
  source 1..22: mol_type = other DNA
tctgtctttctccctttctcac

SEQ ID NO: 112985 - DNA, 22 bp, synthetic construct
  misc_feature 1..22: note = chemically synthesized
  source 1..22: mol_type = other DNA
ctgtctttctccctttctcact

SEQ ID NO: 112986 - DNA, 22 bp, synthetic construct
  misc_feature 1..22: note = chemically synthesized
  source 1..22: mol_type = other DNA
tgtctttctccctttctcactc

SEQ ID NO: 112987 - DNA, 22 bp, synthetic construct
  misc_feature 1..22: note = chemically synthesized
  source 1..22: mol_type = other DNA
tctttctccctttctcactctt

SEQ ID NO: 112988 - DNA, 22 bp, synthetic construct
  misc_feature 1..22: note = chemically synthesized
  source 1..22: mol_type = other DNA
tctccctttctcactctttctg

SEQ ID NO: 112989 - DNA, 22 bp, synthetic construct
  misc_feature 1..22: note = chemically synthesized
  source 1..22: mol_type = other DNA
ctccctttctcactctttctgt

SEQ ID NO: 112990 - DNA, 22 bp, synthetic construct
  misc_feature 1..22: note = chemically synthesized
  source 1..22: mol_type = other DNA
tccctttctcactctttctgtg

SEQ ID NO: 112991 - DNA, 22 bp, synthetic construct
  misc_feature 1..22: note = chemically synthesized
  source 1..22: mol_type = other DNA
cctttctcactctttctgtgtt

SEQ ID NO: 112992 - DNA, 22 bp, synthetic construct
  misc_feature 1..22: note = chemically synthesized
  source 1..22: mol_type = other DNA
tctcactctttctgtgtttaga

SEQ ID NO: 112993 - DNA, 22 bp, synthetic construct
  misc_feature 1..22: note = chemically synthesized
  source 1..22: mol_type = other DNA
ctcactctttctgtgtttagaa

SEQ ID NO: 112994 - DNA, 22 bp, synthetic construct
  misc_feature 1..22: note = chemically synthesized
  source 1..22: mol_type = other DNA
tcactctttctgtgtttagaaa

SEQ ID NO: 112995 - DNA, 22 bp, synthetic construct
  misc_feature 1..22: note = chemically synthesized
  source 1..22: mol_type = other DNA
actctttctgtgtttagaaatg

SEQ ID NO: 112996 - DNA, 22 bp, synthetic construct
  misc_feature 1..22: note = chemically synthesized
  source 1..22: mol_type = other DNA
tttctgtgtttagaaatgaata

SEQ ID NO: 112997 - DNA, 22 bp, synthetic construct
  misc_feature 1..22: note = chemically synthesized
  source 1..22: mol_type = other DNA
tctgtgtttagaaatgaataat

SEQ ID NO: 112998 - DNA, 22 bp, synthetic construct
  misc_feature 1..22: note = chemically synthesized
  source 1..22: mol_type = other DNA
ctgtgtttagaaatgaataata

SEQ ID NO: 112999 - DNA, 22 bp, synthetic construct
  misc_feature 1..22: note = chemically synthesized
  source 1..22: mol_type = other DNA
tgtgtttagaaatgaataatag

SEQ ID NO: 113000 - DNA, 22 bp, synthetic construct
  misc_feature 1..22: note = chemically synthesized
  source 1..22: mol_type = other DNA
tgtttagaaatgaataatagaa

SEQ ID NO: 113001 - DNA, 22 bp, synthetic construct
  misc_feature 1..22: note = chemically synthesized
  source 1..22: mol_type = other DNA
agaaatgaataatagaataact

SEQ ID NO: 113002 - DNA, 22 bp, synthetic construct
  misc_feature 1..22: note = chemically synthesized
  source 1..22: mol_type = other DNA
gaaatgaataatagaataacta

SEQ ID NO: 113003 - DNA, 22 bp, synthetic construct
  misc_feature 1..22: note = chemically synthesized
  source 1..22: mol_type = other DNA
aatacatttatttaacaagcgg

SEQ ID NO: 113004 - DNA, 22 bp, synthetic construct
  misc_feature 1..22: note = chemically synthesized
  source 1..22: mol_type = other DNA
atttaacaagcggtcattgttt

SEQ ID NO: 113005 - DNA, 22 bp, synthetic construct
  misc_feature 1..22: note = chemically synthesized
  source 1..22: mol_type = other DNA
tttaacaagcggtcattgttta

SEQ ID NO: 113006 - DNA, 22 bp, synthetic construct
  misc_feature 1..22: note = chemically synthesized
  source 1..22: mol_type = other DNA
aacaagcggtcattgtttagtt

SEQ ID NO: 113007 - DNA, 22 bp, synthetic construct
  misc_feature 1..22: note = chemically synthesized
  source 1..22: mol_type = other DNA
acaagcggtcattgtttagttg

SEQ ID NO: 113008 - DNA, 22 bp, synthetic construct
  misc_feature 1..22: note = chemically synthesized
  source 1..22: mol_type = other DNA
tttagttgtttgtttatctaat

SEQ ID NO: 113009 - DNA, 22 bp, synthetic construct
  misc_feature 1..22: note = chemically synthesized
  source 1..22: mol_type = other DNA
agttgtttgtttatctaatgag

SEQ ID NO: 113010 - DNA, 22 bp, synthetic construct
  misc_feature 1..22: note = chemically synthesized
  source 1..22: mol_type = other DNA
gttgtttgtttatctaatgaga

SEQ ID NO: 113011 - DNA, 22 bp, synthetic construct
  misc_feature 1..22: note = chemically synthesized
  source 1..22: mol_type = other DNA
tttgtttatctaatgagaggct

SEQ ID NO: 113012 - DNA, 22 bp, synthetic construct
  misc_feature 1..22: note = chemically synthesized
  source 1..22: mol_type = other DNA
gtttatctaatgagaggcttct

SEQ ID NO: 113013 - DNA, 22 bp, synthetic construct
  misc_feature 1..22: note = chemically synthesized
  source 1..22: mol_type = other DNA
tttatctaatgagaggcttctc

SEQ ID NO: 113014 - DNA, 22 bp, synthetic construct
  misc_feature 1..22: note = chemically synthesized
  source 1..22: mol_type = other DNA
atctaatgagaggcttctctat

SEQ ID NO: 113015 - DNA, 22 bp, synthetic construct
  misc_feature 1..22: note = chemically synthesized
  source 1..22: mol_type = other DNA
tctaatgagaggcttctctatt

SEQ ID NO: 113016 - DNA, 22 bp, synthetic construct
  misc_feature 1..22: note = chemically synthesized
  source 1..22: mol_type = other DNA
atgagaggcttctctattttag

SEQ ID NO: 113017 - DNA, 22 bp, synthetic construct
  misc_feature 1..22: note = chemically synthesized
  source 1..22: mol_type = other DNA
ctctattttagcaactactggg

SEQ ID NO: 113018 - DNA, 22 bp, synthetic construct
  misc_feature 1..22: note = chemically synthesized
  source 1..22: mol_type = other DNA
tctattttagcaactactgggt

SEQ ID NO: 113019 - DNA, 22 bp, synthetic construct
  misc_feature 1..22: note = chemically synthesized
  source 1..22: mol_type = other DNA
tattttagcaactactgggtac

SEQ ID NO: 113020 - DNA, 22 bp, synthetic construct
  misc_feature 1..22: note = chemically synthesized
  source 1..22: mol_type = other DNA
ttttagcaactactgggtacaa

SEQ ID NO: 113021 - DNA, 22 bp, synthetic construct
  misc_feature 1..22: note = chemically synthesized
  source 1..22: mol_type = other DNA
tagcaactactgggtacaaaaa

SEQ ID NO: 113022 - DNA, 22 bp, synthetic construct
  misc_feature 1..22: note = chemically synthesized
  source 1..22: mol_type = other DNA
agcaactactgggtacaaaaat

SEQ ID NO: 113023 - DNA, 22 bp, synthetic construct
  misc_feature 1..22: note = chemically synthesized
  source 1..22: mol_type = other DNA
gcaactactgggtacaaaaata

SEQ ID NO: 113024 - DNA, 22 bp, synthetic construct
  misc_feature 1..22: note = chemically synthesized
  source 1..22: mol_type = other DNA
ctgggtacaaaaatacattggt

SEQ ID NO: 113025 - DNA, 22 bp, synthetic construct
  misc_feature 1..22: note = chemically synthesized
  source 1..22: mol_type = other DNA
ggtacaaaaatacattggtgca

SEQ ID NO: 113026 - DNA, 22 bp, synthetic construct
  misc_feature 1..22: note = chemically synthesized
  source 1..22: mol_type = other DNA
gtgcatatattctctgttccta

SEQ ID NO: 113027 - DNA, 22 bp, synthetic construct
  misc_feature 1..22: note = chemically synthesized
  source 1..22: mol_type = other DNA
tctgttcctatgaagcttgtat

SEQ ID NO: 113028 - DNA, 22 bp, synthetic construct
  misc_feature 1..22: note = chemically synthesized
  source 1..22: mol_type = other DNA
tgttcctatgaagcttgtattt

SEQ ID NO: 113029 - DNA, 22 bp, synthetic construct
  misc_feature 1..22: note = chemically synthesized
  source 1..22: mol_type = other DNA
ttcctatgaagcttgtatttta

SEQ ID NO: 113030 - DNA, 22 bp, synthetic construct
  misc_feature 1..22: note = chemically synthesized
  source 1..22: mol_type = other DNA
ctatgaagcttgtattttaacg

SEQ ID NO: 113031 - DNA, 22 bp, synthetic construct
  misc_feature 1..22: note = chemically synthesized
  source 1..22: mol_type = other DNA
tgaagcttgtattttaacggaa

SEQ ID NO: 113032 - DNA, 22 bp, synthetic construct
  misc_feature 1..22: note = chemically synthesized
  source 1..22: mol_type = other DNA
gtattttaacggaaaggaaata

SEQ ID NO: 113033 - DNA, 22 bp, synthetic construct
  misc_feature 1..22: note = chemically synthesized
  source 1..22: mol_type = other DNA
tattttaacggaaaggaaataa

SEQ ID NO: 113034 - DNA, 22 bp, synthetic construct
  misc_feature 1..22: note = chemically synthesized
  source 1..22: mol_type = other DNA
taacggaaaggaaataataaaa

SEQ ID NO: 113035 - DNA, 22 bp, synthetic construct
  misc_feature 1..22: note = chemically synthesized
  source 1..22: mol_type = other DNA
aacggaaaggaaataataaaaa

SEQ ID NO: 113036 - DNA, 22 bp, synthetic construct
  misc_feature 1..22: note = chemically synthesized
  source 1..22: mol_type = other DNA
acggaaaggaaataataaaaaa

SEQ ID NO: 113037 - DNA, 22 bp, synthetic construct
  misc_feature 1..22: note = chemically synthesized
  source 1..22: mol_type = other DNA
caacctcatatagctgctatga

SEQ ID NO: 113038 - DNA, 22 bp, synthetic construct
  misc_feature 1..22: note = chemically synthesized
  source 1..22: mol_type = other DNA
atatagctgctatgaaagaaag

SEQ ID NO: 113039 - DNA, 22 bp, synthetic construct
  misc_feature 1..22: note = chemically synthesized
  source 1..22: mol_type = other DNA
ctatgaaagaaagaaaaaattt

SEQ ID NO: 113040 - DNA, 22 bp, synthetic construct
  misc_feature 1..22: note = chemically synthesized
  source 1..22: mol_type = other DNA
tgaaagaaagaaaaaatttgat

SEQ ID NO: 113041 - DNA, 22 bp, synthetic construct
  misc_feature 1..22: note = chemically synthesized
  source 1..22: mol_type = other DNA
gatgcaatagagaataacaaaa

SEQ ID NO: 113042 - DNA, 22 bp, synthetic construct
  misc_feature 1..22: note = chemically synthesized
  source 1..22: mol_type = other DNA
atgcaatagagaataacaaaat

SEQ ID NO: 113043 - DNA, 22 bp, synthetic construct
  misc_feature 1..22: note = chemically synthesized
  source 1..22: mol_type = other DNA
atgtaagctagtgtgacaaatg

SEQ ID NO: 113044 - DNA, 22 bp, synthetic construct
  misc_feature 1..22: note = chemically synthesized
  source 1..22: mol_type = other DNA
tgtaagctagtgtgacaaatgc

SEQ ID NO: 113045 - DNA, 22 bp, synthetic construct
  misc_feature 1..22: note = chemically synthesized
  source 1..22: mol_type = other DNA
gtgtgacaaatgcgggttctga

SEQ ID NO: 113046 - DNA, 22 bp, synthetic construct
  misc_feature 1..22: note = chemically synthesized
  source 1..22: mol_type = other DNA
tgagaggaggtaatatttcagc

SEQ ID NO: 113047 - DNA, 22 bp, synthetic construct
  misc_feature 1..22: note = chemically synthesized
  source 1..22: mol_type = other DNA
agaggaggtaatatttcagctg

SEQ ID NO: 113048 - DNA, 22 bp, synthetic construct
  misc_feature 1..22: note = chemically synthesized
  source 1..22: mol_type = other DNA
cagctgtgacctgagagttgta

SEQ ID NO: 113049 - DNA, 22 bp, synthetic construct
  misc_feature 1..22: note = chemically synthesized
  source 1..22: mol_type = other DNA
agctgtgacctgagagttgtag

SEQ ID NO: 113050 - DNA, 22 bp, synthetic construct
  misc_feature 1..22: note = chemically synthesized
  source 1..22: mol_type = other DNA
tgacctgagagttgtagaggca

SEQ ID NO: 113051 - DNA, 22 bp, synthetic construct
  misc_feature 1..22: note = chemically synthesized
  source 1..22: mol_type = other DNA
agagttgtagaggcaaaagaag

SEQ ID NO: 113052 - DNA, 22 bp, synthetic construct
  misc_feature 1..22: note = chemically synthesized
  source 1..22: mol_type = other DNA
tagaggcaaaagaagtattgcc

SEQ ID NO: 113053 - DNA, 22 bp, synthetic construct
  misc_feature 1..22: note = chemically synthesized
  source 1..22: mol_type = other DNA
ccatagtggtattggtcctgga

SEQ ID NO: 113054 - DNA, 22 bp, synthetic construct
  misc_feature 1..22: note = chemically synthesized
  source 1..22: mol_type = other DNA
gtcctggagctctggttcaatg

SEQ ID NO: 113055 - DNA, 22 bp, synthetic construct
  misc_feature 1..22: note = chemically synthesized
  source 1..22: mol_type = other DNA
gagctctggttcaatgagcaga

SEQ ID NO: 113056 - DNA, 22 bp, synthetic construct
  misc_feature 1..22: note = chemically synthesized
  source 1..22: mol_type = other DNA
tggttcaatgagcagacagaag

SEQ ID NO: 113057 - DNA, 22 bp, synthetic construct
  misc_feature 1..22: note = chemically synthesized
  source 1..22: mol_type = other DNA
gttcaatgagcagacagaagga

SEQ ID NO: 113058 - DNA, 22 bp, synthetic construct
  misc_feature 1..22: note = chemically synthesized
  source 1..22: mol_type = other DNA
aatgagcagacagaaggaagag

SEQ ID NO: 113059 - DNA, 22 bp, synthetic construct
  misc_feature 1..22: note = chemically synthesized
  source 1..22: mol_type = other DNA
caggaaaaagacttacacatga

SEQ ID NO: 113060 - DNA, 22 bp, synthetic construct
  misc_feature 1..22: note = chemically synthesized
  source 1..22: mol_type = other DNA
aggaaaaagacttacacatgat

SEQ ID NO: 113061 - DNA, 22 bp, synthetic construct
  misc_feature 1..22: note = chemically synthesized
  source 1..22: mol_type = other DNA
acacatgattggggctacccaa

SEQ ID NO: 113062 - DNA, 22 bp, synthetic construct
  misc_feature 1..22: note = chemically synthesized
  source 1..22: mol_type = other DNA
cacatgattggggctacccaaa

SEQ ID NO: 113063 - DNA, 22 bp, synthetic construct
  misc_feature 1..22: note = chemically synthesized
  source 1..22: mol_type = other DNA
gggctacccaaagggactggtt

SEQ ID NO: 113064 - DNA, 22 bp, synthetic construct
  misc_feature 1..22: note = chemically synthesized
  source 1..22: mol_type = other DNA
cccaaagggactggtttttcca

SEQ ID NO: 113065 - DNA, 22 bp, synthetic construct
  misc_feature 1..22: note = chemically synthesized
  source 1..22: mol_type = other DNA
gtttttccaagagcagataatt

SEQ ID NO: 113066 - DNA, 22 bp, synthetic construct
  misc_feature 1..22: note = chemically synthesized
  source 1..22: mol_type = other DNA
ttccaagagcagataatttgag

SEQ ID NO: 113067 - DNA, 22 bp, synthetic construct
  misc_feature 1..22: note = chemically synthesized
  source 1..22: mol_type = other DNA
tccaagagcagataatttgagt

SEQ ID NO: 113068 - DNA, 22 bp, synthetic construct
  misc_feature 1..22: note = chemically synthesized
  source 1..22: mol_type = other DNA
ccaagagcagataatttgagtg

SEQ ID NO: 113069 - DNA, 22 bp, synthetic construct
  misc_feature 1..22: note = chemically synthesized
  source 1..22: mol_type = other DNA
caagagcagataatttgagtga

SEQ ID NO: 113070 - DNA, 22 bp, synthetic construct
  misc_feature 1..22: note = chemically synthesized
  source 1..22: mol_type = other DNA
gagtgataaaaatagtgatttt

SEQ ID NO: 113071 - DNA, 22 bp, synthetic construct
  misc_feature 1..22: note = chemically synthesized
  source 1..22: mol_type = other DNA
agtgataaaaatagtgattttg

SEQ ID NO: 113072 - DNA, 22 bp, synthetic construct
  misc_feature 1..22: note = chemically synthesized
  source 1..22: mol_type = other DNA
tgaacccttccttctgctagcc

SEQ ID NO: 113073 - DNA, 22 bp, synthetic construct
  misc_feature 1..22: note = chemically synthesized
  source 1..22: mol_type = other DNA
gaacccttccttctgctagccc

SEQ ID NO: 113074 - DNA, 22 bp, synthetic construct
  misc_feature 1..22: note = chemically synthesized
  source 1..22: mol_type = other DNA
aacccttccttctgctagccct

SEQ ID NO: 113075 - DNA, 22 bp, synthetic construct
  misc_feature 1..22: note = chemically synthesized
  source 1..22: mol_type = other DNA
ccttctgctagccctagctatg

SEQ ID NO: 113076 - DNA, 22 bp, synthetic construct
  misc_feature 1..22: note = chemically synthesized
  source 1..22: mol_type = other DNA
cttctgctagccctagctatgg

SEQ ID NO: 113077 - DNA, 22 bp, synthetic construct
  misc_feature 1..22: note = chemically synthesized
  source 1..22: mol_type = other DNA
ctgctagccctagctatggacc

SEQ ID NO: 113078 - DNA, 22 bp, synthetic construct
  misc_feature 1..22: note = chemically synthesized
  source 1..22: mol_type = other DNA
tgctagccctagctatggacca

SEQ ID NO: 113079 - DNA, 22 bp, synthetic construct
  misc_feature 1..22: note = chemically synthesized
  source 1..22: mol_type = other DNA
ctagccctagctatggaccacc

SEQ ID NO: 113080 - DNA, 22 bp, synthetic construct
  misc_feature 1..22: note = chemically synthesized
  source 1..22: mol_type = other DNA
gccctagctatggaccaccatg

SEQ ID NO: 113081 - DNA, 22 bp, synthetic construct
  misc_feature 1..22: note = chemically synthesized
  source 1..22: mol_type = other DNA
gctatggaccaccatggatatt

SEQ ID NO: 113082 - DNA, 22 bp, synthetic construct
  misc_feature 1..22: note = chemically synthesized
  source 1..22: mol_type = other DNA
tggaccaccatggatattgaag

SEQ ID NO: 113083 - DNA, 22 bp, synthetic construct
  misc_feature 1..22: note = chemically synthesized
  source 1..22: mol_type = other DNA
aagtaagggctttgttttggaa

SEQ ID NO: 113084 - DNA, 22 bp, synthetic construct
  misc_feature 1..22: note = chemically synthesized
  source 1..22: mol_type = other DNA
tgttttggaattactctccaca

SEQ ID NO: 113085 - DNA, 22 bp, synthetic construct
  misc_feature 1..22: note = chemically synthesized
  source 1..22: mol_type = other DNA
gttttggaattactctccacac

SEQ ID NO: 113086 - DNA, 22 bp, synthetic construct
  misc_feature 1..22: note = chemically synthesized
  source 1..22: mol_type = other DNA
ttttggaattactctccacaca

SEQ ID NO: 113087 - DNA, 22 bp, synthetic construct
  misc_feature 1..22: note = chemically synthesized
  source 1..22: mol_type = other DNA
tggaattactctccacacattc

SEQ ID NO: 113088 - DNA, 22 bp, synthetic construct
  misc_feature 1..22: note = chemically synthesized
  source 1..22: mol_type = other DNA
ggaattactctccacacattct

SEQ ID NO: 113089 - DNA, 22 bp, synthetic construct
  misc_feature 1..22: note = chemically synthesized
  source 1..22: mol_type = other DNA
gaattactctccacacattctg

SEQ ID NO: 113090 - DNA, 22 bp, synthetic construct
  misc_feature 1..22: note = chemically synthesized
  source 1..22: mol_type = other DNA
ctctccacacattctgaggata

SEQ ID NO: 113091 - DNA, 22 bp, synthetic construct
  misc_feature 1..22: note = chemically synthesized
  source 1..22: mol_type = other DNA
tccacacattctgaggatatac

SEQ ID NO: 113092 - DNA, 22 bp, synthetic construct
  misc_feature 1..22: note = chemically synthesized
  source 1..22: mol_type = other DNA
cacacattctgaggatatacaa

SEQ ID NO: 113093 - DNA, 22 bp, synthetic construct
  misc_feature 1..22: note = chemically synthesized
  source 1..22: mol_type = other DNA
tgaggatatacaagggcactga

SEQ ID NO: 113094 - DNA, 22 bp, synthetic construct
  misc_feature 1..22: note = chemically synthesized
  source 1..22: mol_type = other DNA
aggatatacaagggcactgaaa

SEQ ID NO: 113095 - DNA, 22 bp, synthetic construct
  misc_feature 1..22: note = chemically synthesized
  source 1..22: mol_type = other DNA
aaatattctagaaagtccatag

SEQ ID NO: 113096 - DNA, 22 bp, synthetic construct
  misc_feature 1..22: note = chemically synthesized
  source 1..22: mol_type = other DNA
tagaaagtccatagcacattct

SEQ ID NO: 113097 - DNA, 22 bp, synthetic construct
  misc_feature 1..22: note = chemically synthesized
  source 1..22: mol_type = other DNA
gaaagtccatagcacattctga

SEQ ID NO: 113098 - DNA, 22 bp, synthetic construct
  misc_feature 1..22: note = chemically synthesized
  source 1..22: mol_type = other DNA
tgatgtttatactctaagccac

SEQ ID NO: 113099 - DNA, 22 bp, synthetic construct
  misc_feature 1..22: note = chemically synthesized
  source 1..22: mol_type = other DNA
atgtttatactctaagccacac

SEQ ID NO: 113100 - DNA, 22 bp, synthetic construct
  misc_feature 1..22: note = chemically synthesized
  source 1..22: mol_type = other DNA
atactctaagccacacagcacc

SEQ ID NO: 113101 - DNA, 22 bp, synthetic construct
  misc_feature 1..22: note = chemically synthesized
  source 1..22: mol_type = other DNA
tactctaagccacacagcacct

SEQ ID NO: 113102 - DNA, 22 bp, synthetic construct
  misc_feature 1..22: note = chemically synthesized
  source 1..22: mol_type = other DNA
taagccacacagcacctttccc

SEQ ID NO: 113103 - DNA, 22 bp, synthetic construct
  misc_feature 1..22: note = chemically synthesized
  source 1..22: mol_type = other DNA
agccacacagcacctttccccg

SEQ ID NO: 113104 - DNA, 22 bp, synthetic construct
  misc_feature 1..22: note = chemically synthesized
  source 1..22: mol_type = other DNA
tccccggatctagggtctttca

SEQ ID NO: 113105 - DNA, 22 bp, synthetic construct
  misc_feature 1..22: note = chemically synthesized
  source 1..22: mol_type = other DNA
ccccggatctagggtctttcac

SEQ ID NO: 113106 - DNA, 22 bp, synthetic construct
  misc_feature 1..22: note = chemically synthesized
  source 1..22: mol_type = other DNA
cccggatctagggtctttcaca

SEQ ID NO: 113107 - DNA, 22 bp, synthetic construct
  misc_feature 1..22: note = chemically synthesized
  source 1..22: mol_type = other DNA
gggtctttcacattaggttaat

SEQ ID NO: 113108 - DNA, 22 bp, synthetic construct
  misc_feature 1..22: note = chemically synthesized
  source 1..22: mol_type = other DNA
tcacattaggttaattttttta

SEQ ID NO: 113109 - DNA, 22 bp, synthetic construct
  misc_feature 1..22: note = chemically synthesized
  source 1..22: mol_type = other DNA
cacattaggttaatttttttaa

SEQ ID NO: 113110 - DNA, 22 bp, synthetic construct
  misc_feature 1..22: note = chemically synthesized
  source 1..22: mol_type = other DNA
acattaggttaatttttttaaa

SEQ ID NO: 113111 - DNA, 22 bp, synthetic construct
  misc_feature 1..22: note = chemically synthesized
  source 1..22: mol_type = other DNA
ggttaatttttttaaaactcaa

SEQ ID NO: 113112 - DNA, 22 bp, synthetic construct
  misc_feature 1..22: note = chemically synthesized
  source 1..22: mol_type = other DNA
atttttttaaaactcaaacaca

SEQ ID NO: 113113 - DNA, 22 bp, synthetic construct
  misc_feature 1..22: note = chemically synthesized
  source 1..22: mol_type = other DNA
ttttaaaactcaaacacagaag

SEQ ID NO: 113114 - DNA, 22 bp, synthetic construct
  misc_feature 1..22: note = chemically synthesized
  source 1..22: mol_type = other DNA
tttaaaactcaaacacagaagt

SEQ ID NO: 113115 - DNA, 22 bp, synthetic construct
  misc_feature 1..22: note = chemically synthesized
  source 1..22: mol_type = other DNA
ttaaaactcaaacacagaagtt

SEQ ID NO: 113116 - DNA, 22 bp, synthetic construct
  misc_feature 1..22: note = chemically synthesized
  source 1..22: mol_type = other DNA
taaaactcaaacacagaagttc

SEQ ID NO: 113117 - DNA, 22 bp, synthetic construct
  misc_feature 1..22: note = chemically synthesized
  source 1..22: mol_type = other DNA
aaaactcaaacacagaagttca

SEQ ID NO: 113118 - DNA, 22 bp, synthetic construct
  misc_feature 1..22: note = chemically synthesized
  source 1..22: mol_type = other DNA
aaactcaaacacagaagttcaa

SEQ ID NO: 113119 - DNA, 22 bp, synthetic construct
  misc_feature 1..22: note = chemically synthesized
  source 1..22: mol_type = other DNA
aaacacagaagttcaaaaaaat

SEQ ID NO: 113120 - DNA, 22 bp, synthetic construct
  misc_feature 1..22: note = chemically synthesized
  source 1..22: mol_type = other DNA
aaaaaaattgaacatataattc

SEQ ID NO: 113121 - DNA, 22 bp, synthetic construct
  misc_feature 1..22: note = chemically synthesized
  source 1..22: mol_type = other DNA
aacatataattctcattctctg

SEQ ID NO: 113122 - DNA, 22 bp, synthetic construct
  misc_feature 1..22: note = chemically synthesized
  source 1..22: mol_type = other DNA
tcattctctgtggctcataaac

SEQ ID NO: 113123 - DNA, 22 bp, synthetic construct
  misc_feature 1..22: note = chemically synthesized
  source 1..22: mol_type = other DNA
attctctgtggctcataaacat

SEQ ID NO: 113124 - DNA, 22 bp, synthetic construct
  misc_feature 1..22: note = chemically synthesized
  source 1..22: mol_type = other DNA
tctgtggctcataaacatttaa

SEQ ID NO: 113125 - DNA, 22 bp, synthetic construct
  misc_feature 1..22: note = chemically synthesized
  source 1..22: mol_type = other DNA
tgtggctcataaacatttaata

SEQ ID NO: 113126 - DNA, 22 bp, synthetic construct
  misc_feature 1..22: note = chemically synthesized
  source 1..22: mol_type = other DNA
tggctcataaacatttaataga

SEQ ID NO: 113127 - DNA, 22 bp, synthetic construct
  misc_feature 1..22: note = chemically synthesized
  source 1..22: mol_type = other DNA
ataaacatttaatagagacatt

SEQ ID NO: 113128 - DNA, 22 bp, synthetic construct
  misc_feature 1..22: note = chemically synthesized
  source 1..22: mol_type = other DNA
aatagagacattgatgaaactg

SEQ ID NO: 113129 - DNA, 22 bp, synthetic construct
  misc_feature 1..22: note = chemically synthesized
  source 1..22: mol_type = other DNA
atagagacattgatgaaactgt

SEQ ID NO: 113130 - DNA, 22 bp, synthetic construct
  misc_feature 1..22: note = chemically synthesized
  source 1..22: mol_type = other DNA
atgaaactgtaaaaccctgagt

SEQ ID NO: 113131 - DNA, 22 bp, synthetic construct
  misc_feature 1..22: note = chemically synthesized
  source 1..22: mol_type = other DNA
taaaaccctgagttgtaggccg

SEQ ID NO: 113132 - DNA, 22 bp, synthetic construct
  misc_feature 1..22: note = chemically synthesized
  source 1..22: mol_type = other DNA
agttgtaggccggagatataaa

SEQ ID NO: 113133 - DNA, 22 bp, synthetic construct
  misc_feature 1..22: note = chemically synthesized
  source 1..22: mol_type = other DNA
taggccggagatataaaatttc

SEQ ID NO: 113134 - DNA, 22 bp, synthetic construct
  misc_feature 1..22: note = chemically synthesized
  source 1..22: mol_type = other DNA
caacataaagaatgaacaaaat

SEQ ID NO: 113135 - DNA, 22 bp, synthetic construct
  misc_feature 1..22: note = chemically synthesized
  source 1..22: mol_type = other DNA
aacataaagaatgaacaaaatg

SEQ ID NO: 113136 - DNA, 22 bp, synthetic construct
  misc_feature 1..22: note = chemically synthesized
  source 1..22: mol_type = other DNA
agagacagtgatagctgtatct

SEQ ID NO: 113137 - DNA, 22 bp, synthetic construct
  misc_feature 1..22: note = chemically synthesized
  source 1..22: mol_type = other DNA
tatctaaagagtactgatatta

SEQ ID NO: 113138 - DNA, 22 bp, synthetic construct
  misc_feature 1..22: note = chemically synthesized
  source 1..22: mol_type = other DNA
aagagtactgatattaaaaata

SEQ ID NO: 113139 - DNA, 22 bp, synthetic construct
  misc_feature 1..22: note = chemically synthesized
  source 1..22: mol_type = other DNA
atattaaaaatagagaaaaaca

SEQ ID NO: 113140 - DNA, 22 bp, synthetic construct
  misc_feature 1..22: note = chemically synthesized
  source 1..22: mol_type = other DNA
aaaatagagaaaaacatatatc

SEQ ID NO: 113141 - DNA, 22 bp, synthetic construct
  misc_feature 1..22: note = chemically synthesized
  source 1..22: mol_type = other DNA
attatatccaaagggttacata

SEQ ID NO: 113142 - DNA, 22 bp, synthetic construct
  misc_feature 1..22: note = chemically synthesized
  source 1..22: mol_type = other DNA
tatccaaagggttacataagtt

SEQ ID NO: 113143 - DNA, 22 bp, synthetic construct
  misc_feature 1..22: note = chemically synthesized
  source 1..22: mol_type = other DNA
cataagttttaagagtggaaat

SEQ ID NO: 113144 - DNA, 22 bp, synthetic construct
  misc_feature 1..22: note = chemically synthesized
  source 1..22: mol_type = other DNA
taagagtggaaataacatgaag

SEQ ID NO: 113145 - DNA, 22 bp, synthetic construct
  misc_feature 1..22: note = chemically synthesized
  source 1..22: mol_type = other DNA
aagagtggaaataacatgaagg

SEQ ID NO: 113146 - DNA, 22 bp, synthetic construct
  misc_feature 1..22: note = chemically synthesized
  source 1..22: mol_type = other DNA
agagtggaaataacatgaagga

SEQ ID NO: 113147 - DNA, 22 bp, synthetic construct
  misc_feature 1..22: note = chemically synthesized
  source 1..22: mol_type = other DNA
aacaattaggaaacagaaattt

SEQ ID NO: 113148 - DNA, 22 bp, synthetic construct
  misc_feature 1..22: note = chemically synthesized
  source 1..22: mol_type = other DNA
ggaaacagaaatttgacttgct

SEQ ID NO: 113149 - DNA, 22 bp, synthetic construct
  misc_feature 1..22: note = chemically synthesized
  source 1..22: mol_type = other DNA
gacttgcttcagataaaagctt

SEQ ID NO: 113150 - DNA, 22 bp, synthetic construct
  misc_feature 1..22: note = chemically synthesized
  source 1..22: mol_type = other DNA
acttgcttcagataaaagcttt

SEQ ID NO: 113151 - DNA, 22 bp, synthetic construct
  misc_feature 1..22: note = chemically synthesized
  source 1..22: mol_type = other DNA
gcttcagataaaagcttttaaa

SEQ ID NO: 113152 - DNA, 22 bp, synthetic construct
  misc_feature 1..22: note = chemically synthesized
  source 1..22: mol_type = other DNA
cttcagataaaagcttttaaaa

SEQ ID NO: 113153 - DNA, 22 bp, synthetic construct
  misc_feature 1..22: note = chemically synthesized
  source 1..22: mol_type = other DNA
cagataaaagcttttaaaatat

SEQ ID NO: 113154 - DNA, 22 bp, synthetic construct
  misc_feature 1..22: note = chemically synthesized
  source 1..22: mol_type = other DNA
agataaaagcttttaaaatatt

SEQ ID NO: 113155 - DNA, 22 bp, synthetic construct
  misc_feature 1..22: note = chemically synthesized
  source 1..22: mol_type = other DNA
ttaaaatattttatctgaaaca

SEQ ID NO: 113156 - DNA, 22 bp, synthetic construct
  misc_feature 1..22: note = chemically synthesized
  source 1..22: mol_type = other DNA
taaaatattttatctgaaacaa

SEQ ID NO: 113157 - DNA, 22 bp, synthetic construct
  misc_feature 1..22: note = chemically synthesized
  source 1..22: mol_type = other DNA
aaaatattttatctgaaacaag

SEQ ID NO: 113158 - DNA, 22 bp, synthetic construct
  misc_feature 1..22: note = chemically synthesized
  source 1..22: mol_type = other DNA
aaatattttatctgaaacaagt

SEQ ID NO: 113159 - DNA, 22 bp, synthetic construct
  misc_feature 1..22: note = chemically synthesized
  source 1..22: mol_type = other DNA
tatctgaaacaagtaagcttgt

SEQ ID NO: 113160 - DNA, 22 bp, synthetic construct
  misc_feature 1..22: note = chemically synthesized
  source 1..22: mol_type = other DNA
atctgaaacaagtaagcttgtt

SEQ ID NO: 113161 - DNA, 22 bp, synthetic construct
  misc_feature 1..22: note = chemically synthesized
  source 1..22: mol_type = other DNA
tctgaaacaagtaagcttgttc

SEQ ID NO: 113162 - DNA, 22 bp, synthetic construct
  misc_feature 1..22: note = chemically synthesized
  source 1..22: mol_type = other DNA
aaacaagtaagcttgttcaaaa

SEQ ID NO: 113163 - DNA, 22 bp, synthetic construct
  misc_feature 1..22: note = chemically synthesized
  source 1..22: mol_type = other DNA
gttcaaaaaatataggatatat

SEQ ID NO: 113164 - DNA, 22 bp, synthetic construct
  misc_feature 1..22: note = chemically synthesized
  source 1..22: mol_type = other DNA
ttcaaaaaatataggatatatg

SEQ ID NO: 113165 - DNA, 22 bp, synthetic construct
  misc_feature 1..22: note = chemically synthesized
  source 1..22: mol_type = other DNA
aaaaaatataggatatatgtgt

SEQ ID NO: 113166 - DNA, 22 bp, synthetic construct
  misc_feature 1..22: note = chemically synthesized
  source 1..22: mol_type = other DNA
cttcaatcaagcaaattaacct

SEQ ID NO: 113167 - DNA, 22 bp, synthetic construct
  misc_feature 1..22: note = chemically synthesized
  source 1..22: mol_type = other DNA
caatcaagcaaattaacctatc

SEQ ID NO: 113168 - DNA, 22 bp, synthetic construct
  misc_feature 1..22: note = chemically synthesized
  source 1..22: mol_type = other DNA
aatcaagcaaattaacctatcc

SEQ ID NO: 113169 - DNA, 22 bp, synthetic construct
  misc_feature 1..22: note = chemically synthesized
  source 1..22: mol_type = other DNA
acctatccatcaatacaacacc

SEQ ID NO: 113170 - DNA, 22 bp, synthetic construct
  misc_feature 1..22: note = chemically synthesized
  source 1..22: mol_type = other DNA
tccatcaatacaacaccttcca

SEQ ID NO: 113171 - DNA, 22 bp, synthetic construct
  misc_feature 1..22: note = chemically synthesized
  source 1..22: mol_type = other DNA
ccatagataccttttgcttttt

SEQ ID NO: 113172 - DNA, 22 bp, synthetic construct
  misc_feature 1..22: note = chemically synthesized
  source 1..22: mol_type = other DNA
catagataccttttgctttttc

SEQ ID NO: 113173 - DNA, 22 bp, synthetic construct
  misc_feature 1..22: note = chemically synthesized
  source 1..22: mol_type = other DNA
ttgctttttctttgtgtaaggg

SEQ ID NO: 113174 - DNA, 22 bp, synthetic construct
  misc_feature 1..22: note = chemically synthesized
  source 1..22: mol_type = other DNA
tgctttttctttgtgtaagggc

SEQ ID NO: 113175 - DNA, 22 bp, synthetic construct
  misc_feature 1..22: note = chemically synthesized
  source 1..22: mol_type = other DNA
gctttttctttgtgtaagggca

SEQ ID NO: 113176 - DNA, 22 bp, synthetic construct
  misc_feature 1..22: note = chemically synthesized
  source 1..22: mol_type = other DNA
ctttttctttgtgtaagggcat

SEQ ID NO: 113177 - DNA, 22 bp, synthetic construct
  misc_feature 1..22: note = chemically synthesized
  source 1..22: mol_type = other DNA
tttctttgtgtaagggcatcta

SEQ ID NO: 113178 - DNA, 22 bp, synthetic construct
  misc_feature 1..22: note = chemically synthesized
  source 1..22: mol_type = other DNA
ttctttgtgtaagggcatctaa

SEQ ID NO: 113179 - DNA, 22 bp, synthetic construct
  misc_feature 1..22: note = chemically synthesized
  source 1..22: mol_type = other DNA
tctttgtgtaagggcatctaac

SEQ ID NO: 113180 - DNA, 22 bp, synthetic construct
  misc_feature 1..22: note = chemically synthesized
  source 1..22: mol_type = other DNA
ctttgtgtaagggcatctaaca

SEQ ID NO: 113181 - DNA, 22 bp, synthetic construct
  misc_feature 1..22: note = chemically synthesized
  source 1..22: mol_type = other DNA
tttgtgtaagggcatctaacat

SEQ ID NO: 113182 - DNA, 22 bp, synthetic construct
  misc_feature 1..22: note = chemically synthesized
  source 1..22: mol_type = other DNA
tgtgtaagggcatctaacatct

SEQ ID NO: 113183 - DNA, 22 bp, synthetic construct
  misc_feature 1..22: note = chemically synthesized
  source 1..22: mol_type = other DNA
gtgtaagggcatctaacatcta

SEQ ID NO: 113184 - DNA, 22 bp, synthetic construct
  misc_feature 1..22: note = chemically synthesized
  source 1..22: mol_type = other DNA
tgtaagggcatctaacatctac

SEQ ID NO: 113185 - DNA, 22 bp, synthetic construct
  misc_feature 1..22: note = chemically synthesized
  source 1..22: mol_type = other DNA
acatctactgtcataacaaatg

SEQ ID NO: 113186 - DNA, 22 bp, synthetic construct
  misc_feature 1..22: note = chemically synthesized
  source 1..22: mol_type = other DNA
ctgtcataacaaatgtttagtt

SEQ ID NO: 113187 - DNA, 22 bp, synthetic construct
  misc_feature 1..22: note = chemically synthesized
  source 1..22: mol_type = other DNA
tcataacaaatgtttagtttac

SEQ ID NO: 113188 - DNA, 22 bp, synthetic construct
  misc_feature 1..22: note = chemically synthesized
  source 1..22: mol_type = other DNA
agtttacagtacagtattaagt

SEQ ID NO: 113189 - DNA, 22 bp, synthetic construct
  misc_feature 1..22: note = chemically synthesized
  source 1..22: mol_type = other DNA
gtttacagtacagtattaagtc

SEQ ID NO: 113190 - DNA, 22 bp, synthetic construct
  misc_feature 1..22: note = chemically synthesized
  source 1..22: mol_type = other DNA
acagtacagtattaagtcttca

SEQ ID NO: 113191 - DNA, 22 bp, synthetic construct
  misc_feature 1..22: note = chemically synthesized
  source 1..22: mol_type = other DNA
cagtacagtattaagtcttcat

SEQ ID NO: 113192 - DNA, 22 bp, synthetic construct
  misc_feature 1..22: note = chemically synthesized
  source 1..22: mol_type = other DNA
agtcttcatgccatacactaga

SEQ ID NO: 113193 - DNA, 22 bp, synthetic construct
  misc_feature 1..22: note = chemically synthesized
  source 1..22: mol_type = other DNA
catgccatacactagatctcta

SEQ ID NO: 113194 - DNA, 22 bp, synthetic construct
  misc_feature 1..22: note = chemically synthesized
  source 1..22: mol_type = other DNA
atgccatacactagatctctaa

SEQ ID NO: 113195 - DNA, 22 bp, synthetic construct
  misc_feature 1..22: note = chemically synthesized
  source 1..22: mol_type = other DNA
gatctctaaacttatttatcct

SEQ ID NO: 113196 - DNA, 22 bp, synthetic construct
  misc_feature 1..22: note = chemically synthesized
  source 1..22: mol_type = other DNA
taaacttatttatcctatacag

SEQ ID NO: 113197 - DNA, 22 bp, synthetic construct
  misc_feature 1..22: note = chemically synthesized
  source 1..22: mol_type = other DNA
aacttatttatcctatacagct

SEQ ID NO: 113198 - DNA, 22 bp, synthetic construct
  misc_feature 1..22: note = chemically synthesized
  source 1..22: mol_type = other DNA
atttatcctatacagctgcaag

SEQ ID NO: 113199 - DNA, 22 bp, synthetic construct
  misc_feature 1..22: note = chemically synthesized
  source 1..22: mol_type = other DNA
tttatcctatacagctgcaagt

SEQ ID NO: 113200 - DNA, 22 bp, synthetic construct
  misc_feature 1..22: note = chemically synthesized
  source 1..22: mol_type = other DNA
atcctatacagctgcaagttta

SEQ ID NO: 113201 - DNA, 22 bp, synthetic construct
  misc_feature 1..22: note = chemically synthesized
  source 1..22: mol_type = other DNA
tcctatacagctgcaagtttat

SEQ ID NO: 113202 - DNA, 22 bp, synthetic construct
  misc_feature 1..22: note = chemically synthesized
  source 1..22: mol_type = other DNA
tacagctgcaagtttataacct

SEQ ID NO: 113203 - DNA, 22 bp, synthetic construct
  misc_feature 1..22: note = chemically synthesized
  source 1..22: mol_type = other DNA
caagtttataacctttgaccta

SEQ ID NO: 113204 - DNA, 22 bp, synthetic construct
  misc_feature 1..22: note = chemically synthesized
  source 1..22: mol_type = other DNA
ataacctttgacctacttctcc

SEQ ID NO: 113205 - DNA, 22 bp, synthetic construct
  misc_feature 1..22: note = chemically synthesized
  source 1..22: mol_type = other DNA
taacctttgacctacttctccc

SEQ ID NO: 113206 - DNA, 22 bp, synthetic construct
  misc_feature 1..22: note = chemically synthesized
  source 1..22: mol_type = other DNA
tgacctacttctccctattttc

SEQ ID NO: 113207 - DNA, 22 bp, synthetic construct
  misc_feature 1..22: note = chemically synthesized
  source 1..22: mol_type = other DNA
gacctacttctccctattttct

SEQ ID NO: 113208 - DNA, 22 bp, synthetic construct
  misc_feature 1..22: note = chemically synthesized
  source 1..22: mol_type = other DNA
acctacttctccctattttctc

SEQ ID NO: 113209 - DNA, 22 bp, synthetic construct
  misc_feature 1..22: note = chemically synthesized
  source 1..22: mol_type = other DNA
cttctccctattttctctttct

SEQ ID NO: 113210 - DNA, 22 bp, synthetic construct
  misc_feature 1..22: note = chemically synthesized
  source 1..22: mol_type = other DNA
ctccctattttctctttctttc

SEQ ID NO: 113211 - DNA, 22 bp, synthetic construct
  misc_feature 1..22: note = chemically synthesized
  source 1..22: mol_type = other DNA
tccctattttctctttctttct

SEQ ID NO: 113212 - DNA, 22 bp, synthetic construct
  misc_feature 1..22: note = chemically synthesized
  source 1..22: mol_type = other DNA
cctattttctctttctttcttc

SEQ ID NO: 113213 - DNA, 22 bp, synthetic construct
  misc_feature 1..22: note = chemically synthesized
  source 1..22: mol_type = other DNA
ttttctctttctttcttcccct

SEQ ID NO: 113214 - DNA, 22 bp, synthetic construct
  misc_feature 1..22: note = chemically synthesized
  source 1..22: mol_type = other DNA
tctctttctttcttcccctttt

SEQ ID NO: 113215 - DNA, 22 bp, synthetic construct
  misc_feature 1..22: note = chemically synthesized
  source 1..22: mol_type = other DNA
ctctttctttcttccccttttt

SEQ ID NO: 113216 - DNA, 22 bp, synthetic construct
  misc_feature 1..22: note = chemically synthesized
  source 1..22: mol_type = other DNA
tctttctttcttccccttttta

SEQ ID NO: 113217 - DNA, 22 bp, synthetic construct
  misc_feature 1..22: note = chemically synthesized
  source 1..22: mol_type = other DNA
tttctttcttcccctttttaca

SEQ ID NO: 113218 - DNA, 22 bp, synthetic construct
  misc_feature 1..22: note = chemically synthesized
  source 1..22: mol_type = other DNA
tctttcttcccctttttacact

SEQ ID NO: 113219 - DNA, 22 bp, synthetic construct
  misc_feature 1..22: note = chemically synthesized
  source 1..22: mol_type = other DNA
ctttcttcccctttttacactg

SEQ ID NO: 113220 - DNA, 22 bp, synthetic construct
  misc_feature 1..22: note = chemically synthesized
  source 1..22: mol_type = other DNA
tttcttcccctttttacactgt

SEQ ID NO: 113221 - DNA, 22 bp, synthetic construct
  misc_feature 1..22: note = chemically synthesized
  source 1..22: mol_type = other DNA
tcttcccctttttacactgttt

SEQ ID NO: 113222 - DNA, 22 bp, synthetic construct
  misc_feature 1..22: note = chemically synthesized
  source 1..22: mol_type = other DNA
cttcccctttttacactgtttc

SEQ ID NO: 113223 - DNA, 22 bp, synthetic construct
  misc_feature 1..22: note = chemically synthesized
  source 1..22: mol_type = other DNA
ttcccctttttacactgtttct

SEQ ID NO: 113224 - DNA, 22 bp, synthetic construct
  misc_feature 1..22: note = chemically synthesized
  source 1..22: mol_type = other DNA
cccctttttacactgtttctat

SEQ ID NO: 113225 - DNA, 22 bp, synthetic construct
  misc_feature 1..22: note = chemically synthesized
  source 1..22: mol_type = other DNA
ccctttttacactgtttctatg

SEQ ID NO: 113226 - DNA, 22 bp, synthetic construct
  misc_feature 1..22: note = chemically synthesized
  source 1..22: mol_type = other DNA
tttacactgtttctatgcattt

SEQ ID NO: 113227 - DNA, 22 bp, synthetic construct
  misc_feature 1..22: note = chemically synthesized
  source 1..22: mol_type = other DNA
ttacactgtttctatgcatttg

SEQ ID NO: 113228 - DNA, 22 bp, synthetic construct
  misc_feature 1..22: note = chemically synthesized
  source 1..22: mol_type = other DNA
tacactgtttctatgcatttga

SEQ ID NO: 113229 - DNA, 22 bp, synthetic construct
  misc_feature 1..22: note = chemically synthesized
  source 1..22: mol_type = other DNA
acactgtttctatgcatttgac

SEQ ID NO: 113230 - DNA, 22 bp, synthetic construct
  misc_feature 1..22: note = chemically synthesized
  source 1..22: mol_type = other DNA
cactgtttctatgcatttgacc

SEQ ID NO: 113231 - DNA, 22 bp, synthetic construct
  misc_feature 1..22: note = chemically synthesized
  source 1..22: mol_type = other DNA
tttctatgcatttgaccttatt

SEQ ID NO: 113232 - DNA, 22 bp, synthetic construct
  misc_feature 1..22: note = chemically synthesized
  source 1..22: mol_type = other DNA
ctatgcatttgaccttattttt

SEQ ID NO: 113233 - DNA, 22 bp, synthetic construct
  misc_feature 1..22: note = chemically synthesized
  source 1..22: mol_type = other DNA
tatgcatttgaccttatttttc

SEQ ID NO: 113234 - DNA, 22 bp, synthetic construct
  misc_feature 1..22: note = chemically synthesized
  source 1..22: mol_type = other DNA
tgcatttgaccttatttttctt

SEQ ID NO: 113235 - DNA, 22 bp, synthetic construct
  misc_feature 1..22: note = chemically synthesized
  source 1..22: mol_type = other DNA
gaccttatttttcttttgagat

SEQ ID NO: 113236 - DNA, 22 bp, synthetic construct
  misc_feature 1..22: note = chemically synthesized
  source 1..22: mol_type = other DNA
accttatttttcttttgagatt

SEQ ID NO: 113237 - DNA, 22 bp, synthetic construct
  misc_feature 1..22: note = chemically synthesized
  source 1..22: mol_type = other DNA
atttttcttttgagattccaca

SEQ ID NO: 113238 - DNA, 22 bp, synthetic construct
  misc_feature 1..22: note = chemically synthesized
  source 1..22: mol_type = other DNA
tttttcttttgagattccacat

SEQ ID NO: 113239 - DNA, 22 bp, synthetic construct
  misc_feature 1..22: note = chemically synthesized
  source 1..22: mol_type = other DNA
ttcttttgagattccacatata

SEQ ID NO: 113240 - DNA, 22 bp, synthetic construct
  misc_feature 1..22: note = chemically synthesized
  source 1..22: mol_type = other DNA
tcttttgagattccacatataa

SEQ ID NO: 113241 - DNA, 22 bp, synthetic construct
  misc_feature 1..22: note = chemically synthesized
  source 1..22: mol_type = other DNA
cttttgagattccacatataag

SEQ ID NO: 113242 - DNA, 22 bp, synthetic construct
  misc_feature 1..22: note = chemically synthesized
  source 1..22: mol_type = other DNA
ttttgagattccacatataagt

SEQ ID NO: 113243 - DNA, 22 bp, synthetic construct
  misc_feature 1..22: note = chemically synthesized
  source 1..22: mol_type = other DNA
ttgagattccacatataagtaa

SEQ ID NO: 113244 - DNA, 22 bp, synthetic construct
  misc_feature 1..22: note = chemically synthesized
  source 1..22: mol_type = other DNA
tgagattccacatataagtaat

SEQ ID NO: 113245 - DNA, 22 bp, synthetic construct
  misc_feature 1..22: note = chemically synthesized
  source 1..22: mol_type = other DNA
gagattccacatataagtaata

SEQ ID NO: 113246 - DNA, 22 bp, synthetic construct
  misc_feature 1..22: note = chemically synthesized
  source 1..22: mol_type = other DNA
agattccacatataagtaatat

SEQ ID NO: 113247 - DNA, 22 bp, synthetic construct
  misc_feature 1..22: note = chemically synthesized
  source 1..22: mol_type = other DNA
cacatataagtaatatcatgcc

SEQ ID NO: 113248 - DNA, 22 bp, synthetic construct
  misc_feature 1..22: note = chemically synthesized
  source 1..22: mol_type = other DNA
tatttgtttctgtgtctggttt

SEQ ID NO: 113249 - DNA, 22 bp, synthetic construct
  misc_feature 1..22: note = chemically synthesized
  source 1..22: mol_type = other DNA
atttgtttctgtgtctggttta

SEQ ID NO: 113250 - DNA, 22 bp, synthetic construct
  misc_feature 1..22: note = chemically synthesized
  source 1..22: mol_type = other DNA
tttgtttctgtgtctggtttat

SEQ ID NO: 113251 - DNA, 22 bp, synthetic construct
  misc_feature 1..22: note = chemically synthesized
  source 1..22: mol_type = other DNA
gtttctgtgtctggtttatttc

SEQ ID NO: 113252 - DNA, 22 bp, synthetic construct
  misc_feature 1..22: note = chemically synthesized
  source 1..22: mol_type = other DNA
tttctgtgtctggtttatttca

SEQ ID NO: 113253 - DNA, 22 bp, synthetic construct
  misc_feature 1..22: note = chemically synthesized
  source 1..22: mol_type = other DNA
ctgtgtctggtttatttcactt

SEQ ID NO: 113254 - DNA, 22 bp, synthetic construct
  misc_feature 1..22: note = chemically synthesized
  source 1..22: mol_type = other DNA
tgtgtctggtttatttcactta

SEQ ID NO: 113255 - DNA, 22 bp, synthetic construct
  misc_feature 1..22: note = chemically synthesized
  source 1..22: mol_type = other DNA
tgtctggtttatttcacttagc

SEQ ID NO: 113256 - DNA, 22 bp, synthetic construct
  misc_feature 1..22: note = chemically synthesized
  source 1..22: mol_type = other DNA
gtttatttcacttagcaaaatg

SEQ ID NO: 113257 - DNA, 22 bp, synthetic construct
  misc_feature 1..22: note = chemically synthesized
  source 1..22: mol_type = other DNA
atttcacttagcaaaatgtact

SEQ ID NO: 113258 - DNA, 22 bp, synthetic construct
  misc_feature 1..22: note = chemically synthesized
  source 1..22: mol_type = other DNA
tttcacttagcaaaatgtactc

SEQ ID NO: 113259 - DNA, 22 bp, synthetic construct
  misc_feature 1..22: note = chemically synthesized
  source 1..22: mol_type = other DNA
cacttagcaaaatgtactctag

SEQ ID NO: 113260 - DNA, 22 bp, synthetic construct
  misc_feature 1..22: note = chemically synthesized
  source 1..22: mol_type = other DNA
acttagcaaaatgtactctagg

SEQ ID NO: 113261 - DNA, 22 bp, synthetic construct
  misc_feature 1..22: note = chemically synthesized
  source 1..22: mol_type = other DNA
agcaaaatgtactctaggttta

SEQ ID NO: 113262 - DNA, 22 bp, synthetic construct
  misc_feature 1..22: note = chemically synthesized
  source 1..22: mol_type = other DNA
gcaaaatgtactctaggtttat

SEQ ID NO: 113263 - DNA, 22 bp, synthetic construct
  misc_feature 1..22: note = chemically synthesized
  source 1..22: mol_type = other DNA
taggtttatacattccccccat

SEQ ID NO: 113264 - DNA, 22 bp, synthetic construct
  misc_feature 1..22: note = chemically synthesized
  source 1..22: mol_type = other DNA
ggtttatacattccccccatct

SEQ ID NO: 113265 - DNA, 22 bp, synthetic construct
  misc_feature 1..22: note = chemically synthesized
  source 1..22: mol_type = other DNA
atacattccccccatctccttt

SEQ ID NO: 113266 - DNA, 22 bp, synthetic construct
  misc_feature 1..22: note = chemically synthesized
  source 1..22: mol_type = other DNA
tacattccccccatctcctttt

SEQ ID NO: 113267 - DNA, 22 bp, synthetic construct
  misc_feature 1..22: note = chemically synthesized
  source 1..22: mol_type = other DNA
cccccatctccttttttaaggc

SEQ ID NO: 113268 - DNA, 22 bp, synthetic construct
  misc_feature 1..22: note = chemically synthesized
  source 1..22: mol_type = other DNA
cttttttaaggctgaataatat

SEQ ID NO: 113269 - DNA, 22 bp, synthetic construct
  misc_feature 1..22: note = chemically synthesized
  source 1..22: mol_type = other DNA
ttttaaggctgaataatattgt

SEQ ID NO: 113270 - DNA, 22 bp, synthetic construct
  misc_feature 1..22: note = chemically synthesized
  source 1..22: mol_type = other DNA
tttaaggctgaataatattgtg

SEQ ID NO: 113271 - DNA, 22 bp, synthetic construct
  misc_feature 1..22: note = chemically synthesized
  source 1..22: mol_type = other DNA
ttaaggctgaataatattgtga

SEQ ID NO: 113272 - DNA, 22 bp, synthetic construct
  misc_feature 1..22: note = chemically synthesized
  source 1..22: mol_type = other DNA
taaggctgaataatattgtgat

SEQ ID NO: 113273 - DNA, 22 bp, synthetic construct
  misc_feature 1..22: note = chemically synthesized
  source 1..22: mol_type = other DNA
aaggctgaataatattgtgata

SEQ ID NO: 113274 - DNA, 22 bp, synthetic construct
  misc_feature 1..22: note = chemically synthesized
  source 1..22: mol_type = other DNA
aggctgaataatattgtgatat

SEQ ID NO: 113275 - DNA, 22 bp, synthetic construct
  misc_feature 1..22: note = chemically synthesized
  source 1..22: mol_type = other DNA
aataatattgtgatatcataca

SEQ ID NO: 113276 - DNA, 22 bp, synthetic construct
  misc_feature 1..22: note = chemically synthesized
  source 1..22: mol_type = other DNA
tgatatcatacatacatatgac

SEQ ID NO: 113277 - DNA, 22 bp, synthetic construct
  misc_feature 1..22: note = chemically synthesized
  source 1..22: mol_type = other DNA
tcacaatgtctttatctgttca

SEQ ID NO: 113278 - DNA, 22 bp, synthetic construct
  misc_feature 1..22: note = chemically synthesized
  source 1..22: mol_type = other DNA
tatctgttcatctatatataga

SEQ ID NO: 113279 - DNA, 22 bp, synthetic construct
  misc_feature 1..22: note = chemically synthesized
  source 1..22: mol_type = other DNA
atctgttcatctatatatagat

SEQ ID NO: 113280 - DNA, 22 bp, synthetic construct
  misc_feature 1..22: note = chemically synthesized
  source 1..22: mol_type = other DNA
tctgttcatctatatatagata

SEQ ID NO: 113281 - DNA, 22 bp, synthetic construct
  misc_feature 1..22: note = chemically synthesized
  source 1..22: mol_type = other DNA
ttcatctatatatagataccac

SEQ ID NO: 113282 - DNA, 22 bp, synthetic construct
  misc_feature 1..22: note = chemically synthesized
  source 1..22: mol_type = other DNA
atctatatatagataccactta

SEQ ID NO: 113283 - DNA, 22 bp, synthetic construct
  misc_feature 1..22: note = chemically synthesized
  source 1..22: mol_type = other DNA
tatatagataccacttagattg

SEQ ID NO: 113284 - DNA, 22 bp, synthetic construct
  misc_feature 1..22: note = chemically synthesized
  source 1..22: mol_type = other DNA
agattgtttccatgtcttggct

SEQ ID NO: 113285 - DNA, 22 bp, synthetic construct
  misc_feature 1..22: note = chemically synthesized
  source 1..22: mol_type = other DNA
gattgtttccatgtcttggcta

SEQ ID NO: 113286 - DNA, 22 bp, synthetic construct
  misc_feature 1..22: note = chemically synthesized
  source 1..22: mol_type = other DNA
tttccatgtcttggctattgtg

SEQ ID NO: 113287 - DNA, 22 bp, synthetic construct
  misc_feature 1..22: note = chemically synthesized
  source 1..22: mol_type = other DNA
ccatgtcttggctattgtgaat

SEQ ID NO: 113288 - DNA, 22 bp, synthetic construct
  misc_feature 1..22: note = chemically synthesized
  source 1..22: mol_type = other DNA
catgtcttggctattgtgaata

SEQ ID NO: 113289 - DNA, 22 bp, synthetic construct
  misc_feature 1..22: note = chemically synthesized
  source 1..22: mol_type = other DNA
ggctattgtgaataatgctgca

SEQ ID NO: 113290 - DNA, 22 bp, synthetic construct
  misc_feature 1..22: note = chemically synthesized
  source 1..22: mol_type = other DNA
gctattgtgaataatgctgcaa

SEQ ID NO: 113291 - DNA, 22 bp, synthetic construct
  misc_feature 1..22: note = chemically synthesized
  source 1..22: mol_type = other DNA
ttgtgaataatgctgcaattaa

SEQ ID NO: 113292 - DNA, 22 bp, synthetic construct
  misc_feature 1..22: note = chemically synthesized
  source 1..22: mol_type = other DNA
tgaataatgctgcaattaacat

SEQ ID NO: 113293 - DNA, 22 bp, synthetic construct
  misc_feature 1..22: note = chemically synthesized
  source 1..22: mol_type = other DNA
caattaacatgagagtgcagat

SEQ ID NO: 113294 - DNA, 22 bp, synthetic construct
  misc_feature 1..22: note = chemically synthesized
  source 1..22: mol_type = other DNA
acatgagagtgcagatagctct

SEQ ID NO: 113295 - DNA, 22 bp, synthetic construct
  misc_feature 1..22: note = chemically synthesized
  source 1..22: mol_type = other DNA
tagaaaatgcggattttattta

SEQ ID NO: 113296 - DNA, 22 bp, synthetic construct
  misc_feature 1..22: note = chemically synthesized
  source 1..22: mol_type = other DNA
gaaaatgcggattttatttatt

SEQ ID NO: 113297 - DNA, 22 bp, synthetic construct
  misc_feature 1..22: note = chemically synthesized
  source 1..22: mol_type = other DNA
tatttattttggatacatatac

SEQ ID NO: 113298 - DNA, 22 bp, synthetic construct
  misc_feature 1..22: note = chemically synthesized
  source 1..22: mol_type = other DNA
atttattttggatacatataca

SEQ ID NO: 113299 - DNA, 22 bp, synthetic construct
  misc_feature 1..22: note = chemically synthesized
  source 1..22: mol_type = other DNA
tttattttggatacatatacag

SEQ ID NO: 113300 - DNA, 22 bp, synthetic construct
  misc_feature 1..22: note = chemically synthesized
  source 1..22: mol_type = other DNA
attttggatacatatacagcag

SEQ ID NO: 113301 - DNA, 22 bp, synthetic construct
  misc_feature 1..22: note = chemically synthesized
  source 1..22: mol_type = other DNA
ttttggatacatatacagcaga

SEQ ID NO: 113302 - DNA, 22 bp, synthetic construct
  misc_feature 1..22: note = chemically synthesized
  source 1..22: mol_type = other DNA
tggatacatatacagcagagaa

SEQ ID NO: 113303 - DNA, 22 bp, synthetic construct
  misc_feature 1..22: note = chemically synthesized
  source 1..22: mol_type = other DNA
ggatacatatacagcagagaaa

SEQ ID NO: 113304 - DNA, 22 bp, synthetic construct
  misc_feature 1..22: note = chemically synthesized
  source 1..22: mol_type = other DNA
gatacatatacagcagagaaat

SEQ ID NO: 113305 - DNA, 22 bp, synthetic construct
  misc_feature 1..22: note = chemically synthesized
  source 1..22: mol_type = other DNA
cttcatcatacaataactctat

SEQ ID NO: 113306 - DNA, 22 bp, synthetic construct
  misc_feature 1..22: note = chemically synthesized
  source 1..22: mol_type = other DNA
ttcatcatacaataactctatt

SEQ ID NO: 113307 - DNA, 22 bp, synthetic construct
  misc_feature 1..22: note = chemically synthesized
  source 1..22: mol_type = other DNA
catcatacaataactctatttt

SEQ ID NO: 113308 - DNA, 22 bp, synthetic construct
  misc_feature 1..22: note = chemically synthesized
  source 1..22: mol_type = other DNA
atcatacaataactctattttt

SEQ ID NO: 113309 - DNA, 22 bp, synthetic construct
  misc_feature 1..22: note = chemically synthesized
  source 1..22: mol_type = other DNA
tatttttagttgtttgagaaac

SEQ ID NO: 113310 - DNA, 22 bp, synthetic construct
  misc_feature 1..22: note = chemically synthesized
  source 1..22: mol_type = other DNA
tttttagttgtttgagaaactt

SEQ ID NO: 113311 - DNA, 22 bp, synthetic construct
  misc_feature 1..22: note = chemically synthesized
  source 1..22: mol_type = other DNA
ttagttgtttgagaaacttcca

SEQ ID NO: 113312 - DNA, 22 bp, synthetic construct
  misc_feature 1..22: note = chemically synthesized
  source 1..22: mol_type = other DNA
tagttgtttgagaaacttccat

SEQ ID NO: 113313 - DNA, 22 bp, synthetic construct
  misc_feature 1..22: note = chemically synthesized
  source 1..22: mol_type = other DNA
agttgtttgagaaacttccata

SEQ ID NO: 113314 - DNA, 22 bp, synthetic construct
  misc_feature 1..22: note = chemically synthesized
  source 1..22: mol_type = other DNA
gttgtttgagaaacttccatac

SEQ ID NO: 113315 - DNA, 22 bp, synthetic construct
  misc_feature 1..22: note = chemically synthesized
  source 1..22: mol_type = other DNA
tttgagaaacttccatacgttt

SEQ ID NO: 113316 - DNA, 22 bp, synthetic construct
  misc_feature 1..22: note = chemically synthesized
  source 1..22: mol_type = other DNA
gagaaacttccatacgttttct

SEQ ID NO: 113317 - DNA, 22 bp, synthetic construct
  misc_feature 1..22: note = chemically synthesized
  source 1..22: mol_type = other DNA
agaaacttccatacgttttcta

SEQ ID NO: 113318 - DNA, 22 bp, synthetic construct
  misc_feature 1..22: note = chemically synthesized
  source 1..22: mol_type = other DNA
ccatacgttttctataatggct

SEQ ID NO: 113319 - DNA, 22 bp, synthetic construct
  misc_feature 1..22: note = chemically synthesized
  source 1..22: mol_type = other DNA
catacgttttctataatggcta

SEQ ID NO: 113320 - DNA, 22 bp, synthetic construct
  misc_feature 1..22: note = chemically synthesized
  source 1..22: mol_type = other DNA
tctataatggctatgttaactt

SEQ ID NO: 113321 - DNA, 22 bp, synthetic construct
  misc_feature 1..22: note = chemically synthesized
  source 1..22: mol_type = other DNA
ctataatggctatgttaactta

SEQ ID NO: 113322 - DNA, 22 bp, synthetic construct
  misc_feature 1..22: note = chemically synthesized
  source 1..22: mol_type = other DNA
tataatggctatgttaacttac

SEQ ID NO: 113323 - DNA, 22 bp, synthetic construct
  misc_feature 1..22: note = chemically synthesized
  source 1..22: mol_type = other DNA
taatggctatgttaacttacat

SEQ ID NO: 113324 - DNA, 22 bp, synthetic construct
  misc_feature 1..22: note = chemically synthesized
  source 1..22: mol_type = other DNA
tgttaacttacattcccaccag

SEQ ID NO: 113325 - DNA, 22 bp, synthetic construct
  misc_feature 1..22: note = chemically synthesized
  source 1..22: mol_type = other DNA
acttacattcccaccagctatg

SEQ ID NO: 113326 - DNA, 22 bp, synthetic construct
  misc_feature 1..22: note = chemically synthesized
  source 1..22: mol_type = other DNA
acattcccaccagctatgcaca

SEQ ID NO: 113327 - DNA, 22 bp, synthetic construct
  misc_feature 1..22: note = chemically synthesized
  source 1..22: mol_type = other DNA
cattcccaccagctatgcacaa

SEQ ID NO: 113328 - DNA, 22 bp, synthetic construct
  misc_feature 1..22: note = chemically synthesized
  source 1..22: mol_type = other DNA
ccaccagctatgcacaagagtt

SEQ ID NO: 113329 - DNA, 22 bp, synthetic construct
  misc_feature 1..22: note = chemically synthesized
  source 1..22: mol_type = other DNA
tgcacaagagttctcctttctc

SEQ ID NO: 113330 - DNA, 22 bp, synthetic construct
  misc_feature 1..22: note = chemically synthesized
  source 1..22: mol_type = other DNA
tcctttctccacagcctctcca

SEQ ID NO: 113331 - DNA, 22 bp, synthetic construct
  misc_feature 1..22: note = chemically synthesized
  source 1..22: mol_type = other DNA
ctttctccacagcctctccaac

SEQ ID NO: 113332 - DNA, 22 bp, synthetic construct
  misc_feature 1..22: note = chemically synthesized
  source 1..22: mol_type = other DNA
tctccacagcctctccaacccc

SEQ ID NO: 113333 - DNA, 22 bp, synthetic construct
  misc_feature 1..22: note = chemically synthesized
  source 1..22: mol_type = other DNA
ctccacagcctctccaacccct

SEQ ID NO: 113334 - DNA, 22 bp, synthetic construct
  misc_feature 1..22: note = chemically synthesized
  source 1..22: mol_type = other DNA
tccacagcctctccaaccccta

SEQ ID NO: 113335 - DNA, 22 bp, synthetic construct
  misc_feature 1..22: note = chemically synthesized
  source 1..22: mol_type = other DNA
cacagcctctccaacccctatc

SEQ ID NO: 113336 - DNA, 22 bp, synthetic construct
  misc_feature 1..22: note = chemically synthesized
  source 1..22: mol_type = other DNA
tccaacccctatctcttgtctt

SEQ ID NO: 113337 - DNA, 22 bp, synthetic construct
  misc_feature 1..22: note = chemically synthesized
  source 1..22: mol_type = other DNA
caacccctatctcttgtctttt

SEQ ID NO: 113338 - DNA, 22 bp, synthetic construct
  misc_feature 1..22: note = chemically synthesized
  source 1..22: mol_type = other DNA
tctcttgtcttttttgataata

SEQ ID NO: 113339 - DNA, 22 bp, synthetic construct
  misc_feature 1..22: note = chemically synthesized
  source 1..22: mol_type = other DNA
ttgtcttttttgataatagcca

SEQ ID NO: 113340 - DNA, 22 bp, synthetic construct
  misc_feature 1..22: note = chemically synthesized
  source 1..22: mol_type = other DNA
gtcttttttgataatagccatc

SEQ ID NO: 113341 - DNA, 22 bp, synthetic construct
  misc_feature 1..22: note = chemically synthesized
  source 1..22: mol_type = other DNA
tcttttttgataatagccatct

SEQ ID NO: 113342 - DNA, 22 bp, synthetic construct
  misc_feature 1..22: note = chemically synthesized
  source 1..22: mol_type = other DNA
ttttgataatagccatctcaac

SEQ ID NO: 113343 - DNA, 22 bp, synthetic construct
  misc_feature 1..22: note = chemically synthesized
  source 1..22: mol_type = other DNA
tttgataatagccatctcaaca

SEQ ID NO: 113344 - DNA, 22 bp, synthetic construct
  misc_feature 1..22: note = chemically synthesized
  source 1..22: mol_type = other DNA
ttgataatagccatctcaacag

SEQ ID NO: 113345 - DNA, 22 bp, synthetic construct
  misc_feature 1..22: note = chemically synthesized
  source 1..22: mol_type = other DNA
tgataatagccatctcaacagg

SEQ ID NO: 113346 - DNA, 22 bp, synthetic construct
  misc_feature 1..22: note = chemically synthesized
  source 1..22: mol_type = other DNA
gataatagccatctcaacaggt

SEQ ID NO: 113347 - DNA, 22 bp, synthetic construct
  misc_feature 1..22: note = chemically synthesized
  source 1..22: mol_type = other DNA
ataatagccatctcaacaggtg

SEQ ID NO: 113348 - DNA, 22 bp, synthetic construct
  misc_feature 1..22: note = chemically synthesized
  source 1..22: mol_type = other DNA
aacaggtgtgagtgatacttgt

SEQ ID NO: 113349 - DNA, 22 bp, synthetic construct
  misc_feature 1..22: note = chemically synthesized
  source 1..22: mol_type = other DNA
gtggttttgatttgcattttcc

SEQ ID NO: 113350 - DNA, 22 bp, synthetic construct
  misc_feature 1..22: note = chemically synthesized
  source 1..22: mol_type = other DNA
tggttttgatttgcattttcct

SEQ ID NO: 113351 - DNA, 22 bp, synthetic construct
  misc_feature 1..22: note = chemically synthesized
  source 1..22: mol_type = other DNA
tgatttgcattttcctgatgat

SEQ ID NO: 113352 - DNA, 22 bp, synthetic construct
  misc_feature 1..22: note = chemically synthesized
  source 1..22: mol_type = other DNA
gatttgcattttcctgatgatt

SEQ ID NO: 113353 - DNA, 22 bp, synthetic construct
  misc_feature 1..22: note = chemically synthesized
  source 1..22: mol_type = other DNA
atttgcattttcctgatgattg

SEQ ID NO: 113354 - DNA, 22 bp, synthetic construct
  misc_feature 1..22: note = chemically synthesized
  source 1..22: mol_type = other DNA
gcattttcctgatgattggtga

SEQ ID NO: 113355 - DNA, 22 bp, synthetic construct
  misc_feature 1..22: note = chemically synthesized
  source 1..22: mol_type = other DNA
cattttcctgatgattggtgat

SEQ ID NO: 113356 - DNA, 22 bp, synthetic construct
  misc_feature 1..22: note = chemically synthesized
  source 1..22: mol_type = other DNA
tcctgatgattggtgatgtagt

SEQ ID NO: 113357 - DNA, 22 bp, synthetic construct
  misc_feature 1..22: note = chemically synthesized
  source 1..22: mol_type = other DNA
cctgatgattggtgatgtagtg

SEQ ID NO: 113358 - DNA, 22 bp, synthetic construct
  misc_feature 1..22: note = chemically synthesized
  source 1..22: mol_type = other DNA
ctgatgattggtgatgtagtgc

SEQ ID NO: 113359 - DNA, 22 bp, synthetic construct
  misc_feature 1..22: note = chemically synthesized
  source 1..22: mol_type = other DNA
atgattggtgatgtagtgcacc

SEQ ID NO: 113360 - DNA, 22 bp, synthetic construct
  misc_feature 1..22: note = chemically synthesized
  source 1..22: mol_type = other DNA
gtgatgtagtgcaccttttcat

SEQ ID NO: 113361 - DNA, 22 bp, synthetic construct
  misc_feature 1..22: note = chemically synthesized
  source 1..22: mol_type = other DNA
ttcatatgcctgctgaccattt

SEQ ID NO: 113362 - DNA, 22 bp, synthetic construct
  misc_feature 1..22: note = chemically synthesized
  source 1..22: mol_type = other DNA
tcatatgcctgctgaccatttg

SEQ ID NO: 113363 - DNA, 22 bp, synthetic construct
  misc_feature 1..22: note = chemically synthesized
  source 1..22: mol_type = other DNA
catatgcctgctgaccatttgc

SEQ ID NO: 113364 - DNA, 22 bp, synthetic construct
  misc_feature 1..22: note = chemically synthesized
  source 1..22: mol_type = other DNA
atatgcctgctgaccatttgca

SEQ ID NO: 113365 - DNA, 22 bp, synthetic construct
  misc_feature 1..22: note = chemically synthesized
  source 1..22: mol_type = other DNA
ctgaccatttgcatgtcttcag

SEQ ID NO: 113366 - DNA, 22 bp, synthetic construct
  misc_feature 1..22: note = chemically synthesized
  source 1..22: mol_type = other DNA
accatttgcatgtcttcagaga

SEQ ID NO: 113367 - DNA, 22 bp, synthetic construct
  misc_feature 1..22: note = chemically synthesized
  source 1..22: mol_type = other DNA
gcatgtcttcagagaaatgtat

SEQ ID NO: 113368 - DNA, 22 bp, synthetic construct
  misc_feature 1..22: note = chemically synthesized
  source 1..22: mol_type = other DNA
catgtcttcagagaaatgtata

SEQ ID NO: 113369 - DNA, 22 bp, synthetic construct
  misc_feature 1..22: note = chemically synthesized
  source 1..22: mol_type = other DNA
cagagaaatgtatattcagatc

SEQ ID NO: 113370 - DNA, 22 bp, synthetic construct
  misc_feature 1..22: note = chemically synthesized
  source 1..22: mol_type = other DNA
agagaaatgtatattcagatcc

SEQ ID NO: 113371 - DNA, 22 bp, synthetic construct
  misc_feature 1..22: note = chemically synthesized
  source 1..22: mol_type = other DNA
agatcctttgcccatttttact

SEQ ID NO: 113372 - DNA, 22 bp, synthetic construct
  misc_feature 1..22: note = chemically synthesized
  source 1..22: mol_type = other DNA
tgcccatttttacttaggttac

SEQ ID NO: 113373 - DNA, 22 bp, synthetic construct
  misc_feature 1..22: note = chemically synthesized
  source 1..22: mol_type = other DNA
gcccatttttacttaggttact

SEQ ID NO: 113374 - DNA, 22 bp, synthetic construct
  misc_feature 1..22: note = chemically synthesized
  source 1..22: mol_type = other DNA
cccatttttacttaggttacta

SEQ ID NO: 113375 - DNA, 22 bp, synthetic construct
  misc_feature 1..22: note = chemically synthesized
  source 1..22: mol_type = other DNA
ttacttaggttactattatatt

SEQ ID NO: 113376 - DNA, 22 bp, synthetic construct
  misc_feature 1..22: note = chemically synthesized
  source 1..22: mol_type = other DNA
tacttaggttactattatattt

SEQ ID NO: 113377 - DNA, 22 bp, synthetic construct
  misc_feature 1..22: note = chemically synthesized
  source 1..22: mol_type = other DNA
acttaggttactattatatttt

SEQ ID NO: 113378 - DNA, 22 bp, synthetic construct
  misc_feature 1..22: note = chemically synthesized
  source 1..22: mol_type = other DNA
cttaggttactattatattttt

SEQ ID NO: 113379 - DNA, 22 bp, synthetic construct
  misc_feature 1..22: note = chemically synthesized
  source 1..22: mol_type = other DNA
aggttactattatattttttca

SEQ ID NO: 113380 - DNA, 22 bp, synthetic construct
  misc_feature 1..22: note = chemically synthesized
  source 1..22: mol_type = other DNA
ggttactattatattttttcat

SEQ ID NO: 113381 - DNA, 22 bp, synthetic construct
  misc_feature 1..22: note = chemically synthesized
  source 1..22: mol_type = other DNA
ctattatattttttcatattta

SEQ ID NO: 113382 - DNA, 22 bp, synthetic construct
  misc_feature 1..22: note = chemically synthesized
  source 1..22: mol_type = other DNA
ttatattttttcatatttagtt

SEQ ID NO: 113383 - DNA, 22 bp, synthetic construct
  misc_feature 1..22: note = chemically synthesized
  source 1..22: mol_type = other DNA
tattttttcatatttagttgat

SEQ ID NO: 113384 - DNA, 22 bp, synthetic construct
  misc_feature 1..22: note = chemically synthesized
  source 1..22: mol_type = other DNA
tttcatatttagttgattgagt

SEQ ID NO: 113385 - DNA, 22 bp, synthetic construct
  misc_feature 1..22: note = chemically synthesized
  source 1..22: mol_type = other DNA
ttcatatttagttgattgagtt

SEQ ID NO: 113386 - DNA, 22 bp, synthetic construct
  misc_feature 1..22: note = chemically synthesized
  source 1..22: mol_type = other DNA
tcatatttagttgattgagttc

SEQ ID NO: 113387 - DNA, 22 bp, synthetic construct
  misc_feature 1..22: note = chemically synthesized
  source 1..22: mol_type = other DNA
catatttagttgattgagttcc

SEQ ID NO: 113388 - DNA, 22 bp, synthetic construct
  misc_feature 1..22: note = chemically synthesized
  source 1..22: mol_type = other DNA
atatttagttgattgagttcct

SEQ ID NO: 113389 - DNA, 22 bp, synthetic construct
  misc_feature 1..22: note = chemically synthesized
  source 1..22: mol_type = other DNA
agttgattgagttccttatata

SEQ ID NO: 113390 - DNA, 22 bp, synthetic construct
  misc_feature 1..22: note = chemically synthesized
  source 1..22: mol_type = other DNA
gttgattgagttccttatatat

SEQ ID NO: 113391 - DNA, 22 bp, synthetic construct
  misc_feature 1..22: note = chemically synthesized
  source 1..22: mol_type = other DNA
attgagttccttatatattttg

SEQ ID NO: 113392 - DNA, 22 bp, synthetic construct
  misc_feature 1..22: note = chemically synthesized
  source 1..22: mol_type = other DNA
agttccttatatattttgggta

SEQ ID NO: 113393 - DNA, 22 bp, synthetic construct
  misc_feature 1..22: note = chemically synthesized
  source 1..22: mol_type = other DNA
cttatatattttgggtattaga

SEQ ID NO: 113394 - DNA, 22 bp, synthetic construct
  misc_feature 1..22: note = chemically synthesized
  source 1..22: mol_type = other DNA
atatattttgggtattagactt

SEQ ID NO: 113395 - DNA, 22 bp, synthetic construct
  misc_feature 1..22: note = chemically synthesized
  source 1..22: mol_type = other DNA
tatattttgggtattagacttg

SEQ ID NO: 113396 - DNA, 22 bp, synthetic construct
  misc_feature 1..22: note = chemically synthesized
  source 1..22: mol_type = other DNA
tgggtattagacttgtatcaga

SEQ ID NO: 113397 - DNA, 22 bp, synthetic construct
  misc_feature 1..22: note = chemically synthesized
  source 1..22: mol_type = other DNA
gggtattagacttgtatcagat

SEQ ID NO: 113398 - DNA, 22 bp, synthetic construct
  misc_feature 1..22: note = chemically synthesized
  source 1..22: mol_type = other DNA
ggtattagacttgtatcagata

SEQ ID NO: 113399 - DNA, 22 bp, synthetic construct
  misc_feature 1..22: note = chemically synthesized
  source 1..22: mol_type = other DNA
gacttgtatcagatatatgatc

SEQ ID NO: 113400 - DNA, 22 bp, synthetic construct
  misc_feature 1..22: note = chemically synthesized
  source 1..22: mol_type = other DNA
gtatcagatatatgatctgtaa

SEQ ID NO: 113401 - DNA, 22 bp, synthetic construct
  misc_feature 1..22: note = chemically synthesized
  source 1..22: mol_type = other DNA
tatcagatatatgatctgtaaa

SEQ ID NO: 113402 - DNA, 22 bp, synthetic construct
  misc_feature 1..22: note = chemically synthesized
  source 1..22: mol_type = other DNA
taaatattttctcccaaactgt

SEQ ID NO: 113403 - DNA, 22 bp, synthetic construct
  misc_feature 1..22: note = chemically synthesized
  source 1..22: mol_type = other DNA
tctcccaaactgttccttttga

SEQ ID NO: 113404 - DNA, 22 bp, synthetic construct
  misc_feature 1..22: note = chemically synthesized
  source 1..22: mol_type = other DNA
ctcccaaactgttccttttgat

SEQ ID NO: 113405 - DNA, 22 bp, synthetic construct
  misc_feature 1..22: note = chemically synthesized
  source 1..22: mol_type = other DNA
tcccaaactgttccttttgatg

SEQ ID NO: 113406 - DNA, 22 bp, synthetic construct
  misc_feature 1..22: note = chemically synthesized
  source 1..22: mol_type = other DNA
ccaaactgttccttttgatgat

SEQ ID NO: 113407 - DNA, 22 bp, synthetic construct
  misc_feature 1..22: note = chemically synthesized
  source 1..22: mol_type = other DNA
ttccttttgatgattgttttct

SEQ ID NO: 113408 - DNA, 22 bp, synthetic construct
  misc_feature 1..22: note = chemically synthesized
  source 1..22: mol_type = other DNA
cttttgatgattgttttctttg

SEQ ID NO: 113409 - DNA, 22 bp, synthetic construct
  misc_feature 1..22: note = chemically synthesized
  source 1..22: mol_type = other DNA
ttgatgattgttttctttgctg

SEQ ID NO: 113410 - DNA, 22 bp, synthetic construct
  misc_feature 1..22: note = chemically synthesized
  source 1..22: mol_type = other DNA
tgatgattgttttctttgctgt

SEQ ID NO: 113411 - DNA, 22 bp, synthetic construct
  misc_feature 1..22: note = chemically synthesized
  source 1..22: mol_type = other DNA
gatgattgttttctttgctgtg

SEQ ID NO: 113412 - DNA, 22 bp, synthetic construct
  misc_feature 1..22: note = chemically synthesized
  source 1..22: mol_type = other DNA
atgattgttttctttgctgtgc

SEQ ID NO: 113413 - DNA, 22 bp, synthetic construct
  misc_feature 1..22: note = chemically synthesized
  source 1..22: mol_type = other DNA
ttttctttgctgtgcagaaaat

SEQ ID NO: 113414 - DNA, 22 bp, synthetic construct
  misc_feature 1..22: note = chemically synthesized
  source 1..22: mol_type = other DNA
tctttgctgtgcagaaaatatt

SEQ ID NO: 113415 - DNA, 22 bp, synthetic construct
  misc_feature 1..22: note = chemically synthesized
  source 1..22: mol_type = other DNA
ctttgctgtgcagaaaatattt

SEQ ID NO: 113416 - DNA, 22 bp, synthetic construct
  misc_feature 1..22: note = chemically synthesized
  source 1..22: mol_type = other DNA
tttgctgtgcagaaaatattta

SEQ ID NO: 113417 - DNA, 22 bp, synthetic construct
  misc_feature 1..22: note = chemically synthesized
  source 1..22: mol_type = other DNA
tgctgtgcagaaaatatttagt

SEQ ID NO: 113418 - DNA, 22 bp, synthetic construct
  misc_feature 1..22: note = chemically synthesized
  source 1..22: mol_type = other DNA
gctgtgcagaaaatatttagtt

SEQ ID NO: 113419 - DNA, 22 bp, synthetic construct
  misc_feature 1..22: note = chemically synthesized
  source 1..22: mol_type = other DNA
ctgtgcagaaaatatttagttt

SEQ ID NO: 113420 - DNA, 22 bp, synthetic construct
  misc_feature 1..22: note = chemically synthesized
  source 1..22: mol_type = other DNA
tgcagaaaatatttagtttgat

SEQ ID NO: 113421 - DNA, 22 bp, synthetic construct
  misc_feature 1..22: note = chemically synthesized
  source 1..22: mol_type = other DNA
agtttgatgttgctccacttgt

SEQ ID NO: 113422 - DNA, 22 bp, synthetic construct
  misc_feature 1..22: note = chemically synthesized
  source 1..22: mol_type = other DNA
gtttgatgttgctccacttgtt

SEQ ID NO: 113423 - DNA, 22 bp, synthetic construct
  misc_feature 1..22: note = chemically synthesized
  source 1..22: mol_type = other DNA
gatgttgctccacttgtttatt

SEQ ID NO: 113424 - DNA, 22 bp, synthetic construct
  misc_feature 1..22: note = chemically synthesized
  source 1..22: mol_type = other DNA
atgttgctccacttgtttattt

SEQ ID NO: 113425 - DNA, 22 bp, synthetic construct
  misc_feature 1..22: note = chemically synthesized
  source 1..22: mol_type = other DNA
ctccacttgtttatttttgctt

SEQ ID NO: 113426 - DNA, 22 bp, synthetic construct
  misc_feature 1..22: note = chemically synthesized
  source 1..22: mol_type = other DNA
cacttgtttatttttgcttttg

SEQ ID NO: 113427 - DNA, 22 bp, synthetic construct
  misc_feature 1..22: note = chemically synthesized
  source 1..22: mol_type = other DNA
gtttatttttgcttttgttacc

SEQ ID NO: 113428 - DNA, 22 bp, synthetic construct
  misc_feature 1..22: note = chemically synthesized
  source 1..22: mol_type = other DNA
tttatttttgcttttgttacct

SEQ ID NO: 113429 - DNA, 22 bp, synthetic construct
  misc_feature 1..22: note = chemically synthesized
  source 1..22: mol_type = other DNA
atttttgcttttgttacctgag

SEQ ID NO: 113430 - DNA, 22 bp, synthetic construct
  misc_feature 1..22: note = chemically synthesized
  source 1..22: mol_type = other DNA
tttttgcttttgttacctgagc

SEQ ID NO: 113431 - DNA, 22 bp, synthetic construct
  misc_feature 1..22: note = chemically synthesized
  source 1..22: mol_type = other DNA
ttgcttttgttacctgagctct

SEQ ID NO: 113432 - DNA, 22 bp, synthetic construct
  misc_feature 1..22: note = chemically synthesized
  source 1..22: mol_type = other DNA
tgcttttgttacctgagctctg

SEQ ID NO: 113433 - DNA, 22 bp, synthetic construct
  misc_feature 1..22: note = chemically synthesized
  source 1..22: mol_type = other DNA
gcttttgttacctgagctctgg

SEQ ID NO: 113434 - DNA, 22 bp, synthetic construct
  misc_feature 1..22: note = chemically synthesized
  source 1..22: mol_type = other DNA
cttttgttacctgagctctggc

SEQ ID NO: 113435 - DNA, 22 bp, synthetic construct
  misc_feature 1..22: note = chemically synthesized
  source 1..22: mol_type = other DNA
ttgttacctgagctctggcaca

SEQ ID NO: 113436 - DNA, 22 bp, synthetic construct
  misc_feature 1..22: note = chemically synthesized
  source 1..22: mol_type = other DNA
tgttacctgagctctggcacat

SEQ ID NO: 113437 - DNA, 22 bp, synthetic construct
  misc_feature 1..22: note = chemically synthesized
  source 1..22: mol_type = other DNA
gttacctgagctctggcacatt

SEQ ID NO: 113438 - DNA, 22 bp, synthetic construct
  misc_feature 1..22: note = chemically synthesized
  source 1..22: mol_type = other DNA
ttacctgagctctggcacattt

SEQ ID NO: 113439 - DNA, 22 bp, synthetic construct
  misc_feature 1..22: note = chemically synthesized
  source 1..22: mol_type = other DNA
cctgagctctggcacattttac

SEQ ID NO: 113440 - DNA, 22 bp, synthetic construct
  misc_feature 1..22: note = chemically synthesized
  source 1..22: mol_type = other DNA
agctctggcacattttacagaa

SEQ ID NO: 113441 - DNA, 22 bp, synthetic construct
  misc_feature 1..22: note = chemically synthesized
  source 1..22: mol_type = other DNA
tggcacattttacagaaaacaa

SEQ ID NO: 113442 - DNA, 22 bp, synthetic construct
  misc_feature 1..22: note = chemically synthesized
  source 1..22: mol_type = other DNA
gcacattttacagaaaacaatt

SEQ ID NO: 113443 - DNA, 22 bp, synthetic construct
  misc_feature 1..22: note = chemically synthesized
  source 1..22: mol_type = other DNA
tacagaaaacaatttgaaaatt

SEQ ID NO: 113444 - DNA, 22 bp, synthetic construct
  misc_feature 1..22: note = chemically synthesized
  source 1..22: mol_type = other DNA
acagaaaacaatttgaaaattt

SEQ ID NO: 113445 - DNA, 22 bp, synthetic construct
  misc_feature 1..22: note = chemically synthesized
  source 1..22: mol_type = other DNA
cagaaaacaatttgaaaatttg

SEQ ID NO: 113446 - DNA, 22 bp, synthetic construct
  misc_feature 1..22: note = chemically synthesized
  source 1..22: mol_type = other DNA
gaaaatttgtatgaaaccacag

SEQ ID NO: 113447 - DNA, 22 bp, synthetic construct
  misc_feature 1..22: note = chemically synthesized
  source 1..22: mol_type = other DNA
aaaatttgtatgaaaccacaga

SEQ ID NO: 113448 - DNA, 22 bp, synthetic construct
  misc_feature 1..22: note = chemically synthesized
  source 1..22: mol_type = other DNA
gtatgaaaccacagaacacccc

SEQ ID NO: 113449 - DNA, 22 bp, synthetic construct
  misc_feature 1..22: note = chemically synthesized
  source 1..22: mol_type = other DNA
tatgaaaccacagaacaccccc

SEQ ID NO: 113450 - DNA, 22 bp, synthetic construct
  misc_feature 1..22: note = chemically synthesized
  source 1..22: mol_type = other DNA
gagaaagaaaaaccaacttgat

SEQ ID NO: 113451 - DNA, 22 bp, synthetic construct
  misc_feature 1..22: note = chemically synthesized
  source 1..22: mol_type = other DNA
agaaagaaaaaccaacttgatg

SEQ ID NO: 113452 - DNA, 22 bp, synthetic construct
  misc_feature 1..22: note = chemically synthesized
  source 1..22: mol_type = other DNA
gatggcagcacacgttctgatt

SEQ ID NO: 113453 - DNA, 22 bp, synthetic construct
  misc_feature 1..22: note = chemically synthesized
  source 1..22: mol_type = other DNA
atggcagcacacgttctgattt

SEQ ID NO: 113454 - DNA, 22 bp, synthetic construct
  misc_feature 1..22: note = chemically synthesized
  source 1..22: mol_type = other DNA
tgatttcaaattatattacaaa

SEQ ID NO: 113455 - DNA, 22 bp, synthetic construct
  misc_feature 1..22: note = chemically synthesized
  source 1..22: mol_type = other DNA
atttcaaattatattacaaagc

SEQ ID NO: 113456 - DNA, 22 bp, synthetic construct
  misc_feature 1..22: note = chemically synthesized
  source 1..22: mol_type = other DNA
caaattatattacaaagctata

SEQ ID NO: 113457 - DNA, 22 bp, synthetic construct
  misc_feature 1..22: note = chemically synthesized
  source 1..22: mol_type = other DNA
aaattatattacaaagctatag

SEQ ID NO: 113458 - DNA, 22 bp, synthetic construct
  misc_feature 1..22: note = chemically synthesized
  source 1..22: mol_type = other DNA
tattacaaagctatagtaacca

SEQ ID NO: 113459 - DNA, 22 bp, synthetic construct
  misc_feature 1..22: note = chemically synthesized
  source 1..22: mol_type = other DNA
caaagctatagtaaccaaaaaa

SEQ ID NO: 113460 - DNA, 22 bp, synthetic construct
  misc_feature 1..22: note = chemically synthesized
  source 1..22: mol_type = other DNA
tagtaaccaaaaaagtatggta

SEQ ID NO: 113461 - DNA, 22 bp, synthetic construct
  misc_feature 1..22: note = chemically synthesized
  source 1..22: mol_type = other DNA
tcacataaatagacacatagac

SEQ ID NO: 113462 - DNA, 22 bp, synthetic construct
  misc_feature 1..22: note = chemically synthesized
  source 1..22: mol_type = other DNA
aacagaataaagagcccagaaa

SEQ ID NO: 113463 - DNA, 22 bp, synthetic construct
  misc_feature 1..22: note = chemically synthesized
  source 1..22: mol_type = other DNA
acgtatatacagtccagtaatt

SEQ ID NO: 113464 - DNA, 22 bp, synthetic construct
  misc_feature 1..22: note = chemically synthesized
  source 1..22: mol_type = other DNA
cgtatatacagtccagtaattc

SEQ ID NO: 113465 - DNA, 22 bp, synthetic construct
  misc_feature 1..22: note = chemically synthesized
  source 1..22: mol_type = other DNA
tcaacaaggccaccaacacaat

SEQ ID NO: 113466 - DNA, 22 bp, synthetic construct
  misc_feature 1..22: note = chemically synthesized
  source 1..22: mol_type = other DNA
aacaaggccaccaacacaatag

SEQ ID NO: 113467 - DNA, 22 bp, synthetic construct
  misc_feature 1..22: note = chemically synthesized
  source 1..22: mol_type = other DNA
ctcaacaaatagtgttgggaaa

SEQ ID NO: 113468 - DNA, 22 bp, synthetic construct
  misc_feature 1..22: note = chemically synthesized
  source 1..22: mol_type = other DNA
aacaaatagtgttgggaaaact

SEQ ID NO: 113469 - DNA, 22 bp, synthetic construct
  misc_feature 1..22: note = chemically synthesized
  source 1..22: mol_type = other DNA
ggaaaactggatatccaaatgc

SEQ ID NO: 113470 - DNA, 22 bp, synthetic construct
  misc_feature 1..22: note = chemically synthesized
  source 1..22: mol_type = other DNA
gatatccaaatgcaaaagaata

SEQ ID NO: 113471 - DNA, 22 bp, synthetic construct
  misc_feature 1..22: note = chemically synthesized
  source 1..22: mol_type = other DNA
gacctttaccttaagccataag

SEQ ID NO: 113472 - DNA, 22 bp, synthetic construct
  misc_feature 1..22: note = chemically synthesized
  source 1..22: mol_type = other DNA
taccttaagccataagtcaact

SEQ ID NO: 113473 - DNA, 22 bp, synthetic construct
  misc_feature 1..22: note = chemically synthesized
  source 1..22: mol_type = other DNA
accttaagccataagtcaactc

SEQ ID NO: 113474 - DNA, 22 bp, synthetic construct
  misc_feature 1..22: note = chemically synthesized
  source 1..22: mol_type = other DNA
ccttaagccataagtcaactca

SEQ ID NO: 113475 - DNA, 22 bp, synthetic construct
  misc_feature 1..22: note = chemically synthesized
  source 1..22: mol_type = other DNA
aagccataagtcaactcaaaat

SEQ ID NO: 113476 - DNA, 22 bp, synthetic construct
  misc_feature 1..22: note = chemically synthesized
  source 1..22: mol_type = other DNA
agccataagtcaactcaaaata

SEQ ID NO: 113477 - DNA, 22 bp, synthetic construct
  misc_feature 1..22: note = chemically synthesized
  source 1..22: mol_type = other DNA
aaaatagattaaagacataaat

SEQ ID NO: 113478 - DNA, 22 bp, synthetic construct
  misc_feature 1..22: note = chemically synthesized
  source 1..22: mol_type = other DNA
aagacataaatgtaagacctga

SEQ ID NO: 113479 - DNA, 22 bp, synthetic construct
  misc_feature 1..22: note = chemically synthesized
  source 1..22: mol_type = other DNA
aaatcacaaaactcctggaaga

SEQ ID NO: 113480 - DNA, 22 bp, synthetic construct
  misc_feature 1..22: note = chemically synthesized
  source 1..22: mol_type = other DNA
ctggaagaacatgtatagagat

SEQ ID NO: 113481 - DNA, 22 bp, synthetic construct
  misc_feature 1..22: note = chemically synthesized
  source 1..22: mol_type = other DNA
gaagaacatgtatagagatagc

SEQ ID NO: 113482 - DNA, 22 bp, synthetic construct
  misc_feature 1..22: note = chemically synthesized
  source 1..22: mol_type = other DNA
cttgatatcagtctcggcaatt

SEQ ID NO: 113483 - DNA, 22 bp, synthetic construct
  misc_feature 1..22: note = chemically synthesized
  source 1..22: mol_type = other DNA
gatatcagtctcggcaattttt

SEQ ID NO: 113484 - DNA, 22 bp, synthetic construct
  misc_feature 1..22: note = chemically synthesized
  source 1..22: mol_type = other DNA
atatcagtctcggcaatttttt

SEQ ID NO: 113485 - DNA, 22 bp, synthetic construct
  misc_feature 1..22: note = chemically synthesized
  source 1..22: mol_type = other DNA
ggcaattttttagatattgtct

SEQ ID NO: 113486 - DNA, 22 bp, synthetic construct
  misc_feature 1..22: note = chemically synthesized
  source 1..22: mol_type = other DNA
tttagatattgtcttgatttga

SEQ ID NO: 113487 - DNA, 22 bp, synthetic construct
  misc_feature 1..22: note = chemically synthesized
  source 1..22: mol_type = other DNA
ttagatattgtcttgatttgaa

SEQ ID NO: 113488 - DNA, 22 bp, synthetic construct
  misc_feature 1..22: note = chemically synthesized
  source 1..22: mol_type = other DNA
tagatattgtcttgatttgaag

SEQ ID NO: 113489 - DNA, 22 bp, synthetic construct
  misc_feature 1..22: note = chemically synthesized
  source 1..22: mol_type = other DNA
agatattgtcttgatttgaaga

SEQ ID NO: 113490 - DNA, 22 bp, synthetic construct
  misc_feature 1..22: note = chemically synthesized
  source 1..22: mol_type = other DNA
gatattgtcttgatttgaagaa

SEQ ID NO: 113491 - DNA, 22 bp, synthetic construct
  misc_feature 1..22: note = chemically synthesized
  source 1..22: mol_type = other DNA
tcttgatttgaagaaaattttc

SEQ ID NO: 113492 - DNA, 22 bp, synthetic construct
  misc_feature 1..22: note = chemically synthesized
  source 1..22: mol_type = other DNA
gatttgaagaaaattttcactg

SEQ ID NO: 113493 - DNA, 22 bp, synthetic construct
  misc_feature 1..22: note = chemically synthesized
  source 1..22: mol_type = other DNA
atttgaagaaaattttcactgg

SEQ ID NO: 113494 - DNA, 22 bp, synthetic construct
  misc_feature 1..22: note = chemically synthesized
  source 1..22: mol_type = other DNA
gaagaaaattttcactggaagt

SEQ ID NO: 113495 - DNA, 22 bp, synthetic construct
  misc_feature 1..22: note = chemically synthesized
  source 1..22: mol_type = other DNA
aagaaaattttcactggaagtc

SEQ ID NO: 113496 - DNA, 22 bp, synthetic construct
  misc_feature 1..22: note = chemically synthesized
  source 1..22: mol_type = other DNA
tcactggaagtctatattgatc

SEQ ID NO: 113497 - DNA, 22 bp, synthetic construct
  misc_feature 1..22: note = chemically synthesized
  source 1..22: mol_type = other DNA
cactggaagtctatattgatcg

SEQ ID NO: 113498 - DNA, 22 bp, synthetic construct
  misc_feature 1..22: note = chemically synthesized
  source 1..22: mol_type = other DNA
actggaagtctatattgatcga

SEQ ID NO: 113499 - DNA, 22 bp, synthetic construct
  misc_feature 1..22: note = chemically synthesized
  source 1..22: mol_type = other DNA
gaagtctatattgatcgatttt

SEQ ID NO: 113500 - DNA, 22 bp, synthetic construct
  misc_feature 1..22: note = chemically synthesized
  source 1..22: mol_type = other DNA
tattgatcgattttttctttca

SEQ ID NO: 113501 - DNA, 22 bp, synthetic construct
  misc_feature 1..22: note = chemically synthesized
  source 1..22: mol_type = other DNA
atcgattttttctttcacaaat

SEQ ID NO: 113502 - DNA, 22 bp, synthetic construct
  misc_feature 1..22: note = chemically synthesized
  source 1..22: mol_type = other DNA
tttctttcacaaataaagttcc

SEQ ID NO: 113503 - DNA, 22 bp, synthetic construct
  misc_feature 1..22: note = chemically synthesized
  source 1..22: mol_type = other DNA
ttctttcacaaataaagttcca

SEQ ID NO: 113504 - DNA, 22 bp, synthetic construct
  misc_feature 1..22: note = chemically synthesized
  source 1..22: mol_type = other DNA
tctttcacaaataaagttccag

SEQ ID NO: 113505 - DNA, 22 bp, synthetic construct
  misc_feature 1..22: note = chemically synthesized
  source 1..22: mol_type = other DNA
ctttcacaaataaagttccagt

SEQ ID NO: 113506 - DNA, 22 bp, synthetic construct
  misc_feature 1..22: note = chemically synthesized
  source 1..22: mol_type = other DNA
tttcacaaataaagttccagtt

SEQ ID NO: 113507 - DNA, 22 bp, synthetic construct
  misc_feature 1..22: note = chemically synthesized
  source 1..22: mol_type = other DNA
tcacaaataaagttccagtttt

SEQ ID NO: 113508 - DNA, 22 bp, synthetic construct
  misc_feature 1..22: note = chemically synthesized
  source 1..22: mol_type = other DNA
cacaaataaagttccagttttt

SEQ ID NO: 113509 - DNA, 22 bp, synthetic construct
  misc_feature 1..22: note = chemically synthesized
  source 1..22: mol_type = other DNA
acaaataaagttccagtttttg

SEQ ID NO: 113510 - DNA, 22 bp, synthetic construct
  misc_feature 1..22: note = chemically synthesized
  source 1..22: mol_type = other DNA
cagtttttgagccaagatggcc

SEQ ID NO: 113511 - DNA, 22 bp, synthetic construct
  misc_feature 1..22: note = chemically synthesized
  source 1..22: mol_type = other DNA
ttgagccaagatggccaaatag

SEQ ID NO: 113512 - DNA, 22 bp, synthetic construct
  misc_feature 1..22: note = chemically synthesized
  source 1..22: mol_type = other DNA
tgagccaagatggccaaatagg

SEQ ID NO: 113513 - DNA, 22 bp, synthetic construct
  misc_feature 1..22: note = chemically synthesized
  source 1..22: mol_type = other DNA
gagccaagatggccaaatagga

SEQ ID NO: 113514 - DNA, 22 bp, synthetic construct
  misc_feature 1..22: note = chemically synthesized
  source 1..22: mol_type = other DNA
agccaagatggccaaataggaa

SEQ ID NO: 113515 - DNA, 22 bp, synthetic construct
  misc_feature 1..22: note = chemically synthesized
  source 1..22: mol_type = other DNA
tggtctacagctcccagcgtga

SEQ ID NO: 113516 - DNA, 22 bp, synthetic construct
  misc_feature 1..22: note = chemically synthesized
  source 1..22: mol_type = other DNA
gtctacagctcccagcgtgaac

SEQ ID NO: 113517 - DNA, 22 bp, synthetic construct
  misc_feature 1..22: note = chemically synthesized
  source 1..22: mol_type = other DNA
cagctcccagcgtgaacaacac

SEQ ID NO: 113518 - DNA, 22 bp, synthetic construct
  misc_feature 1..22: note = chemically synthesized
  source 1..22: mol_type = other DNA
ccagcgtgaacaacacagaaga

SEQ ID NO: 113519 - DNA, 22 bp, synthetic construct
  misc_feature 1..22: note = chemically synthesized
  source 1..22: mol_type = other DNA
ctgcatttccatctgaggtatg

SEQ ID NO: 113520 - DNA, 22 bp, synthetic construct
  misc_feature 1..22: note = chemically synthesized
  source 1..22: mol_type = other DNA
tgcatttccatctgaggtatgg

SEQ ID NO: 113521 - DNA, 22 bp, synthetic construct
  misc_feature 1..22: note = chemically synthesized
  source 1..22: mol_type = other DNA
catttccatctgaggtatgggg

SEQ ID NO: 113522 - DNA, 22 bp, synthetic construct
  misc_feature 1..22: note = chemically synthesized
  source 1..22: mol_type = other DNA
ccatctgaggtatggggttcat

SEQ ID NO: 113523 - DNA, 22 bp, synthetic construct
  misc_feature 1..22: note = chemically synthesized
  source 1..22: mol_type = other DNA
catctgaggtatggggttcatc

SEQ ID NO: 113524 - DNA, 22 bp, synthetic construct
  misc_feature 1..22: note = chemically synthesized
  source 1..22: mol_type = other DNA
aggtatggggttcatctcgcta

SEQ ID NO: 113525 - DNA, 22 bp, synthetic construct
  misc_feature 1..22: note = chemically synthesized
  source 1..22: mol_type = other DNA
atctcgctagggagtgccagac

SEQ ID NO: 113526 - DNA, 22 bp, synthetic construct
  misc_feature 1..22: note = chemically synthesized
  source 1..22: mol_type = other DNA
gctagggagtgccagacagtgg

SEQ ID NO: 113527 - DNA, 22 bp, synthetic construct
  misc_feature 1..22: note = chemically synthesized
  source 1..22: mol_type = other DNA
gggagtgccagacagtgggcac

SEQ ID NO: 113528 - DNA, 22 bp, synthetic construct
  misc_feature 1..22: note = chemically synthesized
  source 1..22: mol_type = other DNA
cctcacttgggaagcacaaggg

SEQ ID NO: 113529 - DNA, 22 bp, synthetic construct
  misc_feature 1..22: note = chemically synthesized
  source 1..22: mol_type = other DNA
acttgggaagcacaaggggtca

SEQ ID NO: 113530 - DNA, 22 bp, synthetic construct
  misc_feature 1..22: note = chemically synthesized
  source 1..22: mol_type = other DNA
gggaagcacaaggggtcatgga

SEQ ID NO: 113531 - DNA, 22 bp, synthetic construct
  misc_feature 1..22: note = chemically synthesized
  source 1..22: mol_type = other DNA
ggaagcacaaggggtcatggag

SEQ ID NO: 113532 - DNA, 22 bp, synthetic construct
  misc_feature 1..22: note = chemically synthesized
  source 1..22: mol_type = other DNA
cctttcctggtcaaggaaaggg

SEQ ID NO: 113533 - DNA, 22 bp, synthetic construct
  misc_feature 1..22: note = chemically synthesized
  source 1..22: mol_type = other DNA
tcctggtcaaggaaaggggtga

SEQ ID NO: 113534 - DNA, 22 bp, synthetic construct
  misc_feature 1..22: note = chemically synthesized
  source 1..22: mol_type = other DNA
cctggtcaaggaaaggggtgac

SEQ ID NO: 113535 - DNA, 22 bp, synthetic construct
  misc_feature 1..22: note = chemically synthesized
  source 1..22: mol_type = other DNA
ctggtcaaggaaaggggtgaca

SEQ ID NO: 113536 - DNA, 22 bp, synthetic construct
  misc_feature 1..22: note = chemically synthesized
  source 1..22: mol_type = other DNA
gtcaaggaaaggggtgacatac

SEQ ID NO: 113537 - DNA, 22 bp, synthetic construct
  misc_feature 1..22: note = chemically synthesized
  source 1..22: mol_type = other DNA
gaaaattgggccactcccaccc

SEQ ID NO: 113538 - DNA, 22 bp, synthetic construct
  misc_feature 1..22: note = chemically synthesized
  source 1..22: mol_type = other DNA
ggccactcccacccgaatactg

SEQ ID NO: 113539 - DNA, 22 bp, synthetic construct
  misc_feature 1..22: note = chemically synthesized
  source 1..22: mol_type = other DNA
ccacccgaatactgtgcttttc

SEQ ID NO: 113540 - DNA, 22 bp, synthetic construct
  misc_feature 1..22: note = chemically synthesized
  source 1..22: mol_type = other DNA
tgcttttctgacaggcttagga

SEQ ID NO: 113541 - DNA, 22 bp, synthetic construct
  misc_feature 1..22: note = chemically synthesized
  source 1..22: mol_type = other DNA
ttctgacaggcttaggaaatgg

SEQ ID NO: 113542 - DNA, 22 bp, synthetic construct
  misc_feature 1..22: note = chemically synthesized
  source 1..22: mol_type = other DNA
tctgacaggcttaggaaatggc

SEQ ID NO: 113543 - DNA, 22 bp, synthetic construct
  misc_feature 1..22: note = chemically synthesized
  source 1..22: mol_type = other DNA
ctgacaggcttaggaaatggcg

SEQ ID NO: 113544 - DNA, 22 bp, synthetic construct
  misc_feature 1..22: note = chemically synthesized
  source 1..22: mol_type = other DNA
tgacaggcttaggaaatggcgc

SEQ ID NO: 113545 - DNA, 22 bp, synthetic construct
  misc_feature 1..22: note = chemically synthesized
  source 1..22: mol_type = other DNA
acaggcttaggaaatggcgcac

SEQ ID NO: 113546 - DNA, 22 bp, synthetic construct
  misc_feature 1..22: note = chemically synthesized
  source 1..22: mol_type = other DNA
aggaaatggcgcaccaggagat

SEQ ID NO: 113547 - DNA, 22 bp, synthetic construct
  misc_feature 1..22: note = chemically synthesized
  source 1..22: mol_type = other DNA
ggaaatggcgcaccaggagatt

SEQ ID NO: 113548 - DNA, 22 bp, synthetic construct
  misc_feature 1..22: note = chemically synthesized
  source 1..22: mol_type = other DNA
tatcctgcacatggctccgagg

SEQ ID NO: 113549 - DNA, 22 bp, synthetic construct
  misc_feature 1..22: note = chemically synthesized
  source 1..22: mol_type = other DNA
cacatggctccgagggtcctac

SEQ ID NO: 113550 - DNA, 22 bp, synthetic construct
  misc_feature 1..22: note = chemically synthesized
  source 1..22: mol_type = other DNA
cgagggtcctacgcccacggag

SEQ ID NO: 113551 - DNA, 22 bp, synthetic construct
  misc_feature 1..22: note = chemically synthesized
  source 1..22: mol_type = other DNA
cgcccacggagtctccctgatt

SEQ ID NO: 113552 - DNA, 22 bp, synthetic construct
  misc_feature 1..22: note = chemically synthesized
  source 1..22: mol_type = other DNA
cctgattgctagcacagcagtc

SEQ ID NO: 113553 - DNA, 22 bp, synthetic construct
  misc_feature 1..22: note = chemically synthesized
  source 1..22: mol_type = other DNA
attgctagcacagcagtctgag

SEQ ID NO: 113554 - DNA, 22 bp, synthetic construct
  misc_feature 1..22: note = chemically synthesized
  source 1..22: mol_type = other DNA
ctagcacagcagtctgagatca

SEQ ID NO: 113555 - DNA, 22 bp, synthetic construct
  misc_feature 1..22: note = chemically synthesized
  source 1..22: mol_type = other DNA
gcacagcagtctgagatcaaac

SEQ ID NO: 113556 - DNA, 22 bp, synthetic construct
  misc_feature 1..22: note = chemically synthesized
  source 1..22: mol_type = other DNA
agatcaaactgcaaggtggcag

SEQ ID NO: 113557 - DNA, 22 bp, synthetic construct
  misc_feature 1..22: note = chemically synthesized
  source 1..22: mol_type = other DNA
caaggtggcagcgaggctgggg

SEQ ID NO: 113558 - DNA, 22 bp, synthetic construct
  misc_feature 1..22: note = chemically synthesized
  source 1..22: mol_type = other DNA
ggggaggggcagccgccattgc

SEQ ID NO: 113559 - DNA, 22 bp, synthetic construct
  misc_feature 1..22: note = chemically synthesized
  source 1..22: mol_type = other DNA
cccaggcttgcttaggtaaaca

SEQ ID NO: 113560 - DNA, 22 bp, synthetic construct
  misc_feature 1..22: note = chemically synthesized
  source 1..22: mol_type = other DNA
gcttaggtaaacaaagcagcca

SEQ ID NO: 113561 - DNA, 22 bp, synthetic construct
  misc_feature 1..22: note = chemically synthesized
  source 1..22: mol_type = other DNA
cttaggtaaacaaagcagccag

SEQ ID NO: 113562 - DNA, 22 bp, synthetic construct
  misc_feature 1..22: note = chemically synthesized
  source 1..22: mol_type = other DNA
aggtaaacaaagcagccaggaa

SEQ ID NO: 113563 - DNA, 22 bp, synthetic construct
  misc_feature 1..22: note = chemically synthesized
  source 1..22: mol_type = other DNA
ggtaaacaaagcagccaggaag

SEQ ID NO: 113564 - DNA, 22 bp, synthetic construct
  misc_feature 1..22: note = chemically synthesized
  source 1..22: mol_type = other DNA
aaactgggtggaccccaccaca

SEQ ID NO: 113565 - DNA, 22 bp, synthetic construct
  misc_feature 1..22: note = chemically synthesized
  source 1..22: mol_type = other DNA
ggtggaccccaccacagctcaa

SEQ ID NO: 113566 - DNA, 22 bp, synthetic construct
  misc_feature 1..22: note = chemically synthesized
  source 1..22: mol_type = other DNA
aaggaggcctgcctgcctctgt

SEQ ID NO: 113567 - DNA, 22 bp, synthetic construct
  misc_feature 1..22: note = chemically synthesized
  source 1..22: mol_type = other DNA
cctgcctctgtaggctccacct

SEQ ID NO: 113568 - DNA, 22 bp, synthetic construct
  misc_feature 1..22: note = chemically synthesized
  source 1..22: mol_type = other DNA
cctctgtaggctccacctttgg

SEQ ID NO: 113569 - DNA, 22 bp, synthetic construct
  misc_feature 1..22: note = chemically synthesized
  source 1..22: mol_type = other DNA
tgtaggctccacctttgggggc

SEQ ID NO: 113570 - DNA, 22 bp, synthetic construct
  misc_feature 1..22: note = chemically synthesized
  source 1..22: mol_type = other DNA
taggctccacctttgggggcag

SEQ ID NO: 113571 - DNA, 22 bp, synthetic construct
  misc_feature 1..22: note = chemically synthesized
  source 1..22: mol_type = other DNA
cacctttgggggcagggcacag

SEQ ID NO: 113572 - DNA, 22 bp, synthetic construct
  misc_feature 1..22: note = chemically synthesized
  source 1..22: mol_type = other DNA
tgggggcagggcacagacaaac

SEQ ID NO: 113573 - DNA, 22 bp, synthetic construct
  misc_feature 1..22: note = chemically synthesized
  source 1..22: mol_type = other DNA
gggggcagggcacagacaaaca

SEQ ID NO: 113574 - DNA, 22 bp, synthetic construct
  misc_feature 1..22: note = chemically synthesized
  source 1..22: mol_type = other DNA
ggggcagggcacagacaaacaa

SEQ ID NO: 113575 - DNA, 22 bp, synthetic construct
  misc_feature 1..22: note = chemically synthesized
  source 1..22: mol_type = other DNA
tgcagacttaaatgtccctgtc

SEQ ID NO: 113576 - DNA, 22 bp, synthetic construct
  misc_feature 1..22: note = chemically synthesized
  source 1..22: mol_type = other DNA
cagacttaaatgtccctgtctg

SEQ ID NO: 113577 - DNA, 22 bp, synthetic construct
  misc_feature 1..22: note = chemically synthesized
  source 1..22: mol_type = other DNA
aaatgtccctgtctgacagctt

SEQ ID NO: 113578 - DNA, 22 bp, synthetic construct
  misc_feature 1..22: note = chemically synthesized
  source 1..22: mol_type = other DNA
aatgtccctgtctgacagcttt

SEQ ID NO: 113579 - DNA, 22 bp, synthetic construct
  misc_feature 1..22: note = chemically synthesized
  source 1..22: mol_type = other DNA
tctgacagctttgaggagagca

SEQ ID NO: 113580 - DNA, 22 bp, synthetic construct
  misc_feature 1..22: note = chemically synthesized
  source 1..22: mol_type = other DNA
acagctttgaggagagcagtgg

SEQ ID NO: 113581 - DNA, 22 bp, synthetic construct
  misc_feature 1..22: note = chemically synthesized
  source 1..22: mol_type = other DNA
tgaggagagcagtggttctccc

SEQ ID NO: 113582 - DNA, 22 bp, synthetic construct
  misc_feature 1..22: note = chemically synthesized
  source 1..22: mol_type = other DNA
gaggagagcagtggttctccca

SEQ ID NO: 113583 - DNA, 22 bp, synthetic construct
  misc_feature 1..22: note = chemically synthesized
  source 1..22: mol_type = other DNA
aggagagcagtggttctcccag

SEQ ID NO: 113584 - DNA, 22 bp, synthetic construct
  misc_feature 1..22: note = chemically synthesized
  source 1..22: mol_type = other DNA
tcccagcacacagctggagatc

SEQ ID NO: 113585 - DNA, 22 bp, synthetic construct
  misc_feature 1..22: note = chemically synthesized
  source 1..22: mol_type = other DNA
ccagcacacagctggagatctg

SEQ ID NO: 113586 - DNA, 22 bp, synthetic construct
  misc_feature 1..22: note = chemically synthesized
  source 1..22: mol_type = other DNA
gagatctgagaacgggcagact

SEQ ID NO: 113587 - DNA, 22 bp, synthetic construct
  misc_feature 1..22: note = chemically synthesized
  source 1..22: mol_type = other DNA
agaacgggcagactgcctcctc

SEQ ID NO: 113588 - DNA, 22 bp, synthetic construct
  misc_feature 1..22: note = chemically synthesized
  source 1..22: mol_type = other DNA
cctcctcaagtgggtccctgac

SEQ ID NO: 113589 - DNA, 22 bp, synthetic construct
  misc_feature 1..22: note = chemically synthesized
  source 1..22: mol_type = other DNA
ctcaagtgggtccctgacccct

SEQ ID NO: 113590 - DNA, 22 bp, synthetic construct
  misc_feature 1..22: note = chemically synthesized
  source 1..22: mol_type = other DNA
aagtgggtccctgacccctgac

SEQ ID NO: 113591 - DNA, 22 bp, synthetic construct
  misc_feature 1..22: note = chemically synthesized
  source 1..22: mol_type = other DNA
acccctgacccccgagcagcct

SEQ ID NO: 113592 - DNA, 22 bp, synthetic construct
  misc_feature 1..22: note = chemically synthesized
  source 1..22: mol_type = other DNA
acccccgagcagcctaactggg

SEQ ID NO: 113593 - DNA, 22 bp, synthetic construct
  misc_feature 1..22: note = chemically synthesized
  source 1..22: mol_type = other DNA
actgggaggcacccccaagtaa

SEQ ID NO: 113594 - DNA, 22 bp, synthetic construct
  misc_feature 1..22: note = chemically synthesized
  source 1..22: mol_type = other DNA
ggaggcacccccaagtaagggc

SEQ ID NO: 113595 - DNA, 22 bp, synthetic construct
  misc_feature 1..22: note = chemically synthesized
  source 1..22: mol_type = other DNA
acacctcacacggccaggtact

SEQ ID NO: 113596 - DNA, 22 bp, synthetic construct
  misc_feature 1..22: note = chemically synthesized
  source 1..22: mol_type = other DNA
acacggccaggtactcctctga

SEQ ID NO: 113597 - DNA, 22 bp, synthetic construct
  misc_feature 1..22: note = chemically synthesized
  source 1..22: mol_type = other DNA
ctctgagacaaaacttccagag

SEQ ID NO: 113598 - DNA, 22 bp, synthetic construct
  misc_feature 1..22: note = chemically synthesized
  source 1..22: mol_type = other DNA
tgagacaaaacttccagaggaa

SEQ ID NO: 113599 - DNA, 22 bp, synthetic construct
  misc_feature 1..22: note = chemically synthesized
  source 1..22: mol_type = other DNA
agacaaaacttccagaggaacg

SEQ ID NO: 113600 - DNA, 22 bp, synthetic construct
  misc_feature 1..22: note = chemically synthesized
  source 1..22: mol_type = other DNA
ccagaggaacgatcagacagca

SEQ ID NO: 113601 - DNA, 22 bp, synthetic construct
  misc_feature 1..22: note = chemically synthesized
  source 1..22: mol_type = other DNA
cagaggaacgatcagacagcag

SEQ ID NO: 113602 - DNA, 22 bp, synthetic construct
  misc_feature 1..22: note = chemically synthesized
  source 1..22: mol_type = other DNA
gcggatcacgaaaatctgcggt

SEQ ID NO: 113603 - DNA, 22 bp, synthetic construct
  misc_feature 1..22: note = chemically synthesized
  source 1..22: mol_type = other DNA
cggttctgcagacaccgctgct

SEQ ID NO: 113604 - DNA, 22 bp, synthetic construct
  misc_feature 1..22: note = chemically synthesized
  source 1..22: mol_type = other DNA
tgcagacaccgctgctgatacc

SEQ ID NO: 113605 - DNA, 22 bp, synthetic construct
  misc_feature 1..22: note = chemically synthesized
  source 1..22: mol_type = other DNA
cagacaccgctgctgataccca

SEQ ID NO: 113606 - DNA, 22 bp, synthetic construct
  misc_feature 1..22: note = chemically synthesized
  source 1..22: mol_type = other DNA
ctgatacccaggcaaacagggt

SEQ ID NO: 113607 - DNA, 22 bp, synthetic construct
  misc_feature 1..22: note = chemically synthesized
  source 1..22: mol_type = other DNA
atacccaggcaaacagggtctg

SEQ ID NO: 113608 - DNA, 22 bp, synthetic construct
  misc_feature 1..22: note = chemically synthesized
  source 1..22: mol_type = other DNA
gagtggacctctagcaaactcc

SEQ ID NO: 113609 - DNA, 22 bp, synthetic construct
  misc_feature 1..22: note = chemically synthesized
  source 1..22: mol_type = other DNA
tagcaaactccaacagacctgc

SEQ ID NO: 113610 - DNA, 22 bp, synthetic construct
  misc_feature 1..22: note = chemically synthesized
  source 1..22: mol_type = other DNA
gcaaactccaacagacctgcag

SEQ ID NO: 113611 - DNA, 22 bp, synthetic construct
  misc_feature 1..22: note = chemically synthesized
  source 1..22: mol_type = other DNA
caacagacctgcagctgagggt

SEQ ID NO: 113612 - DNA, 22 bp, synthetic construct
  misc_feature 1..22: note = chemically synthesized
  source 1..22: mol_type = other DNA
cagctgagggtcctgtctgtta

SEQ ID NO: 113613 - DNA, 22 bp, synthetic construct
  misc_feature 1..22: note = chemically synthesized
  source 1..22: mol_type = other DNA
agggtcctgtctgttagaagga

SEQ ID NO: 113614 - DNA, 22 bp, synthetic construct
  misc_feature 1..22: note = chemically synthesized
  source 1..22: mol_type = other DNA
tctgttagaaggaaaactaaca

SEQ ID NO: 113615 - DNA, 22 bp, synthetic construct
  misc_feature 1..22: note = chemically synthesized
  source 1..22: mol_type = other DNA
ttagaaggaaaactaacaaaca

SEQ ID NO: 113616 - DNA, 22 bp, synthetic construct
  misc_feature 1..22: note = chemically synthesized
  source 1..22: mol_type = other DNA
gaaggaaaactaacaaacagaa

SEQ ID NO: 113617 - DNA, 22 bp, synthetic construct
  misc_feature 1..22: note = chemically synthesized
  source 1..22: mol_type = other DNA
acaaacagaaaggacatccaca

SEQ ID NO: 113618 - DNA, 22 bp, synthetic construct
  misc_feature 1..22: note = chemically synthesized
  source 1..22: mol_type = other DNA
tcatcaaagaccaaaagtagat

SEQ ID NO: 113619 - DNA, 22 bp, synthetic construct
  misc_feature 1..22: note = chemically synthesized
  source 1..22: mol_type = other DNA
gggaaaaaacagagcagaaaaa

SEQ ID NO: 113620 - DNA, 22 bp, synthetic construct
  misc_feature 1..22: note = chemically synthesized
  source 1..22: mol_type = other DNA
gaaactctaaaaagcagagcac

SEQ ID NO: 113621 - DNA, 22 bp, synthetic construct
  misc_feature 1..22: note = chemically synthesized
  source 1..22: mol_type = other DNA
taaaaagcagagcacctttcct

SEQ ID NO: 113622 - DNA, 22 bp, synthetic construct
  misc_feature 1..22: note = chemically synthesized
  source 1..22: mol_type = other DNA
aaaagcagagcacctttcctcc

SEQ ID NO: 113623 - DNA, 22 bp, synthetic construct
  misc_feature 1..22: note = chemically synthesized
  source 1..22: mol_type = other DNA
tcctcctccaaaggaaagcagt

SEQ ID NO: 113624 - DNA, 22 bp, synthetic construct
  misc_feature 1..22: note = chemically synthesized
  source 1..22: mol_type = other DNA
cctcctccaaaggaaagcagtt

SEQ ID NO: 113625 - DNA, 22 bp, synthetic construct
  misc_feature 1..22: note = chemically synthesized
  source 1..22: mol_type = other DNA
ctcctccaaaggaaagcagttc

SEQ ID NO: 113626 - DNA, 22 bp, synthetic construct
  misc_feature 1..22: note = chemically synthesized
  source 1..22: mol_type = other DNA
ctccaaaggaaagcagttcctc

SEQ ID NO: 113627 - DNA, 22 bp, synthetic construct
  misc_feature 1..22: note = chemically synthesized
  source 1..22: mol_type = other DNA
caaaggaaagcagttcctcacc

SEQ ID NO: 113628 - DNA, 22 bp, synthetic construct
  misc_feature 1..22: note = chemically synthesized
  source 1..22: mol_type = other DNA
ctcaccagcaacggaacaaagc

SEQ ID NO: 113629 - DNA, 22 bp, synthetic construct
  misc_feature 1..22: note = chemically synthesized
  source 1..22: mol_type = other DNA
accagcaacggaacaaagctgg

SEQ ID NO: 113630 - DNA, 22 bp, synthetic construct
  misc_feature 1..22: note = chemically synthesized
  source 1..22: mol_type = other DNA
gatggagaatgactttgacgag

SEQ ID NO: 113631 - DNA, 22 bp, synthetic construct
  misc_feature 1..22: note = chemically synthesized
  source 1..22: mol_type = other DNA
tgacgagctgagagaagaagac

SEQ ID NO: 113632 - DNA, 22 bp, synthetic construct
  misc_feature 1..22: note = chemically synthesized
  source 1..22: mol_type = other DNA
gacgagctgagagaagaagact

SEQ ID NO: 113633 - DNA, 22 bp, synthetic construct
  misc_feature 1..22: note = chemically synthesized
  source 1..22: mol_type = other DNA
acgagctgagagaagaagactt

SEQ ID NO: 113634 - DNA, 22 bp, synthetic construct
  misc_feature 1..22: note = chemically synthesized
  source 1..22: mol_type = other DNA
agagaagaagacttcagacgat

SEQ ID NO: 113635 - DNA, 22 bp, synthetic construct
  misc_feature 1..22: note = chemically synthesized
  source 1..22: mol_type = other DNA
cagacgatgaaactactccgag

SEQ ID NO: 113636 - DNA, 22 bp, synthetic construct
  misc_feature 1..22: note = chemically synthesized
  source 1..22: mol_type = other DNA
agacgatgaaactactccgagc

SEQ ID NO: 113637 - DNA, 22 bp, synthetic construct
  misc_feature 1..22: note = chemically synthesized
  source 1..22: mol_type = other DNA
ctccgagctacaggaggaaatt

SEQ ID NO: 113638 - DNA, 22 bp, synthetic construct
  misc_feature 1..22: note = chemically synthesized
  source 1..22: mol_type = other DNA
cgagctacaggaggaaattcaa

SEQ ID NO: 113639 - DNA, 22 bp, synthetic construct
  misc_feature 1..22: note = chemically synthesized
  source 1..22: mol_type = other DNA
caggaggaaattcaaaccaaag

SEQ ID NO: 113640 - DNA, 22 bp, synthetic construct
  misc_feature 1..22: note = chemically synthesized
  source 1..22: mol_type = other DNA
aaaccaaaggcaaagaagataa

SEQ ID NO: 113641 - DNA, 22 bp, synthetic construct
  misc_feature 1..22: note = chemically synthesized
  source 1..22: mol_type = other DNA
tgaaaaaaaatttagatgaatg

SEQ ID NO: 113642 - DNA, 22 bp, synthetic construct
  misc_feature 1..22: note = chemically synthesized
  source 1..22: mol_type = other DNA
gaaaaaaaatttagatgaatgt

SEQ ID NO: 113643 - DNA, 22 bp, synthetic construct
  misc_feature 1..22: note = chemically synthesized
  source 1..22: mol_type = other DNA
aaaaaaaatttagatgaatgta

SEQ ID NO: 113644 - DNA, 22 bp, synthetic construct
  misc_feature 1..22: note = chemically synthesized
  source 1..22: mol_type = other DNA
agatgaatgtataactagaata

SEQ ID NO: 113645 - DNA, 22 bp, synthetic construct
  misc_feature 1..22: note = chemically synthesized
  source 1..22: mol_type = other DNA
gatgaatgtataactagaataa

SEQ ID NO: 113646 - DNA, 22 bp, synthetic construct
  misc_feature 1..22: note = chemically synthesized
  source 1..22: mol_type = other DNA
gaataaccaatacagagaagtg

SEQ ID NO: 113647 - DNA, 22 bp, synthetic construct
  misc_feature 1..22: note = chemically synthesized
  source 1..22: mol_type = other DNA
aaaggagctgatggagctgaaa

SEQ ID NO: 113648 - DNA, 22 bp, synthetic construct
  misc_feature 1..22: note = chemically synthesized
  source 1..22: mol_type = other DNA
aaggagctgatggagctgaaag

SEQ ID NO: 113649 - DNA, 22 bp, synthetic construct
  misc_feature 1..22: note = chemically synthesized
  source 1..22: mol_type = other DNA
atggagctgaaagccaaggctc

SEQ ID NO: 113650 - DNA, 22 bp, synthetic construct
  misc_feature 1..22: note = chemically synthesized
  source 1..22: mol_type = other DNA
aaagccaaggctcgagaatgac

SEQ ID NO: 113651 - DNA, 22 bp, synthetic construct
  misc_feature 1..22: note = chemically synthesized
  source 1..22: mol_type = other DNA
gagaatgacgtgaagaatggag

SEQ ID NO: 113652 - DNA, 22 bp, synthetic construct
  misc_feature 1..22: note = chemically synthesized
  source 1..22: mol_type = other DNA
aggagctgatgcgatcaactgg

SEQ ID NO: 113653 - DNA, 22 bp, synthetic construct
  misc_feature 1..22: note = chemically synthesized
  source 1..22: mol_type = other DNA
atgcgatcaactggaagaaagg

SEQ ID NO: 113654 - DNA, 22 bp, synthetic construct
  misc_feature 1..22: note = chemically synthesized
  source 1..22: mol_type = other DNA
gaagaaagggtatcagtgatgg

SEQ ID NO: 113655 - DNA, 22 bp, synthetic construct
  misc_feature 1..22: note = chemically synthesized
  source 1..22: mol_type = other DNA
agagaaaaaagaataaaaagaa

SEQ ID NO: 113656 - DNA, 22 bp, synthetic construct
  misc_feature 1..22: note = chemically synthesized
  source 1..22: mol_type = other DNA
gagaaaaaagaataaaaagaaa

SEQ ID NO: 113657 - DNA, 22 bp, synthetic construct
  misc_feature 1..22: note = chemically synthesized
  source 1..22: mol_type = other DNA
caagaaatatgggactatgtga

SEQ ID NO: 113658 - DNA, 22 bp, synthetic construct
  misc_feature 1..22: note = chemically synthesized
  source 1..22: mol_type = other DNA
tgtgaaaagatcaaatctaggt

SEQ ID NO: 113659 - DNA, 22 bp, synthetic construct
  misc_feature 1..22: note = chemically synthesized
  source 1..22: mol_type = other DNA
ggtctgattggtgtacctgaaa

SEQ ID NO: 113660 - DNA, 22 bp, synthetic construct
  misc_feature 1..22: note = chemically synthesized
  source 1..22: mol_type = other DNA
attggtgtacctgaaagtgacg

SEQ ID NO: 113661 - DNA, 22 bp, synthetic construct
  misc_feature 1..22: note = chemically synthesized
  source 1..22: mol_type = other DNA
gtgtacctgaaagtgacgggga

SEQ ID NO: 113662 - DNA, 22 bp, synthetic construct
  misc_feature 1..22: note = chemically synthesized
  source 1..22: mol_type = other DNA
aaagtgacggggagaatcgaac

SEQ ID NO: 113663 - DNA, 22 bp, synthetic construct
  misc_feature 1..22: note = chemically synthesized
  source 1..22: mol_type = other DNA
gaaaacactctgcaggatatta

SEQ ID NO: 113664 - DNA, 22 bp, synthetic construct
  misc_feature 1..22: note = chemically synthesized
  source 1..22: mol_type = other DNA
tgcaggatattatccaggagaa

SEQ ID NO: 113665 - DNA, 22 bp, synthetic construct
  misc_feature 1..22: note = chemically synthesized
  source 1..22: mol_type = other DNA
caggatattatccaggagaact

SEQ ID NO: 113666 - DNA, 22 bp, synthetic construct
  misc_feature 1..22: note = chemically synthesized
  source 1..22: mol_type = other DNA
tccaggagaacttccccaatct

SEQ ID NO: 113667 - DNA, 22 bp, synthetic construct
  misc_feature 1..22: note = chemically synthesized
  source 1..22: mol_type = other DNA
ccccaatctagcaaggcaggcc

SEQ ID NO: 113668 - DNA, 22 bp, synthetic construct
  misc_feature 1..22: note = chemically synthesized
  source 1..22: mol_type = other DNA
cccaatctagcaaggcaggcca

SEQ ID NO: 113669 - DNA, 22 bp, synthetic construct
  misc_feature 1..22: note = chemically synthesized
  source 1..22: mol_type = other DNA
gcaaggcaggccaacattcaga

SEQ ID NO: 113670 - DNA, 22 bp, synthetic construct
  misc_feature 1..22: note = chemically synthesized
  source 1..22: mol_type = other DNA
agattcaggaaatacagagaac

SEQ ID NO: 113671 - DNA, 22 bp, synthetic construct
  misc_feature 1..22: note = chemically synthesized
  source 1..22: mol_type = other DNA
aggaaatacagagaacgccaca

SEQ ID NO: 113672 - DNA, 22 bp, synthetic construct
  misc_feature 1..22: note = chemically synthesized
  source 1..22: mol_type = other DNA
ctcgagaagagcaactccaaga

SEQ ID NO: 113673 - DNA, 22 bp, synthetic construct
  misc_feature 1..22: note = chemically synthesized
  source 1..22: mol_type = other DNA
gagaagagcaactccaagacac

SEQ ID NO: 113674 - DNA, 22 bp, synthetic construct
  misc_feature 1..22: note = chemically synthesized
  source 1..22: mol_type = other DNA
caagacacataattgtcagatt

SEQ ID NO: 113675 - DNA, 22 bp, synthetic construct
  misc_feature 1..22: note = chemically synthesized
  source 1..22: mol_type = other DNA
tcagattcaccaaagttgaaat

SEQ ID NO: 113676 - DNA, 22 bp, synthetic construct
  misc_feature 1..22: note = chemically synthesized
  source 1..22: mol_type = other DNA
accaaagttgaaatgaaggaaa

SEQ ID NO: 113677 - DNA, 22 bp, synthetic construct
  misc_feature 1..22: note = chemically synthesized
  source 1..22: mol_type = other DNA
aaatgaaggaaaaaatgttaag

SEQ ID NO: 113678 - DNA, 22 bp, synthetic construct
  misc_feature 1..22: note = chemically synthesized
  source 1..22: mol_type = other DNA
agggcagccagagagaaaggtc

SEQ ID NO: 113679 - DNA, 22 bp, synthetic construct
  misc_feature 1..22: note = chemically synthesized
  source 1..22: mol_type = other DNA
cccacaaagggaagcccatcag

SEQ ID NO: 113680 - DNA, 22 bp, synthetic construct
  misc_feature 1..22: note = chemically synthesized
  source 1..22: mol_type = other DNA
acagcagctctcttggcagaaa

SEQ ID NO: 113681 - DNA, 22 bp, synthetic construct
  misc_feature 1..22: note = chemically synthesized
  source 1..22: mol_type = other DNA
tcttggcagaaactctacaagc

SEQ ID NO: 113682 - DNA, 22 bp, synthetic construct
  misc_feature 1..22: note = chemically synthesized
  source 1..22: mol_type = other DNA
ttggcagaaactctacaagcca

SEQ ID NO: 113683 - DNA, 22 bp, synthetic construct
  misc_feature 1..22: note = chemically synthesized
  source 1..22: mol_type = other DNA
ggcagaaactctacaagccaga

SEQ ID NO: 113684 - DNA, 22 bp, synthetic construct
  misc_feature 1..22: note = chemically synthesized
  source 1..22: mol_type = other DNA
gcagaaactctacaagccagaa

SEQ ID NO: 113685 - DNA, 22 bp, synthetic construct
  misc_feature 1..22: note = chemically synthesized
  source 1..22: mol_type = other DNA
tacaagccagaagagagtgggg

SEQ ID NO: 113686 - DNA, 22 bp, synthetic construct
  misc_feature 1..22: note = chemically synthesized
  source 1..22: mol_type = other DNA
caagccagaagagagtgggggc

SEQ ID NO: 113687 - DNA, 22 bp, synthetic construct
  misc_feature 1..22: note = chemically synthesized
  source 1..22: mol_type = other DNA
aacatccttaaaggaaagaatt

SEQ ID NO: 113688 - DNA, 22 bp, synthetic construct
  misc_feature 1..22: note = chemically synthesized
  source 1..22: mol_type = other DNA
aaaggaaagaattttcaacaca

SEQ ID NO: 113689 - DNA, 22 bp, synthetic construct
  misc_feature 1..22: note = chemically synthesized
  source 1..22: mol_type = other DNA
aaggaaagaattttcaacacag

SEQ ID NO: 113690 - DNA, 22 bp, synthetic construct
  misc_feature 1..22: note = chemically synthesized
  source 1..22: mol_type = other DNA
tcaacacagaatttaatatcca

SEQ ID NO: 113691 - DNA, 22 bp, synthetic construct
  misc_feature 1..22: note = chemically synthesized
  source 1..22: mol_type = other DNA
caacacagaatttaatatccag

SEQ ID NO: 113692 - DNA, 22 bp, synthetic construct
  misc_feature 1..22: note = chemically synthesized
  source 1..22: mol_type = other DNA
aacacagaatttaatatccagc

SEQ ID NO: 113693 - DNA, 22 bp, synthetic construct
  misc_feature 1..22: note = chemically synthesized
  source 1..22: mol_type = other DNA
aatatccagccaaactaagctt

SEQ ID NO: 113694 - DNA, 22 bp, synthetic construct
  misc_feature 1..22: note = chemically synthesized
  source 1..22: mol_type = other DNA
atatccagccaaactaagcttc

SEQ ID NO: 113695 - DNA, 22 bp, synthetic construct
  misc_feature 1..22: note = chemically synthesized
  source 1..22: mol_type = other DNA
agcttcataagtgaaggagaaa

SEQ ID NO: 113696 - DNA, 22 bp, synthetic construct
  misc_feature 1..22: note = chemically synthesized
  source 1..22: mol_type = other DNA
cataagtgaaggagaaataaaa

SEQ ID NO: 113697 - DNA, 22 bp, synthetic construct
  misc_feature 1..22: note = chemically synthesized
  source 1..22: mol_type = other DNA
ataagtgaaggagaaataaaat

SEQ ID NO: 113698 - DNA, 22 bp, synthetic construct
  misc_feature 1..22: note = chemically synthesized
  source 1..22: mol_type = other DNA
tacagacaagcaaatgctgaga

SEQ ID NO: 113699 - DNA, 22 bp, synthetic construct
  misc_feature 1..22: note = chemically synthesized
  source 1..22: mol_type = other DNA
acagacaagcaaatgctgagag

SEQ ID NO: 113700 - DNA, 22 bp, synthetic construct
  misc_feature 1..22: note = chemically synthesized
  source 1..22: mol_type = other DNA
cagacaagcaaatgctgagaga

SEQ ID NO: 113701 - DNA, 22 bp, synthetic construct
  misc_feature 1..22: note = chemically synthesized
  source 1..22: mol_type = other DNA
agagattttgtcatcaccaggc

SEQ ID NO: 113702 - DNA, 22 bp, synthetic construct
  misc_feature 1..22: note = chemically synthesized
  source 1..22: mol_type = other DNA
tgtcatcaccaggcctgaccta

SEQ ID NO: 113703 - DNA, 22 bp, synthetic construct
  misc_feature 1..22: note = chemically synthesized
  source 1..22: mol_type = other DNA
gtcatcaccaggcctgacctaa

SEQ ID NO: 113704 - DNA, 22 bp, synthetic construct
  misc_feature 1..22: note = chemically synthesized
  source 1..22: mol_type = other DNA
tcatcaccaggcctgacctaaa

SEQ ID NO: 113705 - DNA, 22 bp, synthetic construct
  misc_feature 1..22: note = chemically synthesized
  source 1..22: mol_type = other DNA
acctaaaagagctcctgaagga

SEQ ID NO: 113706 - DNA, 22 bp, synthetic construct
  misc_feature 1..22: note = chemically synthesized
  source 1..22: mol_type = other DNA
aaagagctcctgaaggaagcac

SEQ ID NO: 113707 - DNA, 22 bp, synthetic construct
  misc_feature 1..22: note = chemically synthesized
  source 1..22: mol_type = other DNA
ctgaaggaagcactaaacatgg

SEQ ID NO: 113708 - DNA, 22 bp, synthetic construct
  misc_feature 1..22: note = chemically synthesized
  source 1..22: mol_type = other DNA
aaggaagcactaaacatggaaa

SEQ ID NO: 113709 - DNA, 22 bp, synthetic construct
  misc_feature 1..22: note = chemically synthesized
  source 1..22: mol_type = other DNA
aacatggaaaggcacaaccggt

SEQ ID NO: 113710 - DNA, 22 bp, synthetic construct
  misc_feature 1..22: note = chemically synthesized
  source 1..22: mol_type = other DNA
caaaatcaggccaaaatgtgaa

SEQ ID NO: 113711 - DNA, 22 bp, synthetic construct
  misc_feature 1..22: note = chemically synthesized
  source 1..22: mol_type = other DNA
ggaagaaactgcatcaactaac

SEQ ID NO: 113712 - DNA, 22 bp, synthetic construct
  misc_feature 1..22: note = chemically synthesized
  source 1..22: mol_type = other DNA
catcaactaacgagcaaaataa

SEQ ID NO: 113713 - DNA, 22 bp, synthetic construct
  misc_feature 1..22: note = chemically synthesized
  source 1..22: mol_type = other DNA
acgagcaaaataaccagctatc

SEQ ID NO: 113714 - DNA, 22 bp, synthetic construct
  misc_feature 1..22: note = chemically synthesized
  source 1..22: mol_type = other DNA
tcataatgacaggatcaaattc

SEQ ID NO: 113715 - DNA, 22 bp, synthetic construct
  misc_feature 1..22: note = chemically synthesized
  source 1..22: mol_type = other DNA
acacatacaatattaactttaa

SEQ ID NO: 113716 - DNA, 22 bp, synthetic construct
  misc_feature 1..22: note = chemically synthesized
  source 1..22: mol_type = other DNA
actttaaatgtaaatggactaa

SEQ ID NO: 113717 - DNA, 22 bp, synthetic construct
  misc_feature 1..22: note = chemically synthesized
  source 1..22: mol_type = other DNA
taaatgtaaatggactaagtgc

SEQ ID NO: 113718 - DNA, 22 bp, synthetic construct
  misc_feature 1..22: note = chemically synthesized
  source 1..22: mol_type = other DNA
aaatgtaaatggactaagtgct

SEQ ID NO: 113719 - DNA, 22 bp, synthetic construct
  misc_feature 1..22: note = chemically synthesized
  source 1..22: mol_type = other DNA
aatgtaaatggactaagtgctc

SEQ ID NO: 113720 - DNA, 22 bp, synthetic construct
  misc_feature 1..22: note = chemically synthesized
  source 1..22: mol_type = other DNA
agtgctccaattgaaagacaca

SEQ ID NO: 113721 - DNA, 22 bp, synthetic construct
  misc_feature 1..22: note = chemically synthesized
  source 1..22: mol_type = other DNA
caattgaaagacacagactggc

SEQ ID NO: 113722 - DNA, 22 bp, synthetic construct
  misc_feature 1..22: note = chemically synthesized
  source 1..22: mol_type = other DNA
aaagacacagactggcaaattg

SEQ ID NO: 113723 - DNA, 22 bp, synthetic construct
  misc_feature 1..22: note = chemically synthesized
  source 1..22: mol_type = other DNA
gcaaattggataaagagtgtat

SEQ ID NO: 113724 - DNA, 22 bp, synthetic construct
  misc_feature 1..22: note = chemically synthesized
  source 1..22: mol_type = other DNA
gataaagagtgtattcaggaaa

SEQ ID NO: 113725 - DNA, 22 bp, synthetic construct
  misc_feature 1..22: note = chemically synthesized
  source 1..22: mol_type = other DNA
aggaaacccatctcatgtgcac

SEQ ID NO: 113726 - DNA, 22 bp, synthetic construct
  misc_feature 1..22: note = chemically synthesized
  source 1..22: mol_type = other DNA
atgtgcacacacacacataggc

SEQ ID NO: 113727 - DNA, 22 bp, synthetic construct
  misc_feature 1..22: note = chemically synthesized
  source 1..22: mol_type = other DNA
aaaataaaaggatggaggaaga

SEQ ID NO: 113728 - DNA, 22 bp, synthetic construct
  misc_feature 1..22: note = chemically synthesized
  source 1..22: mol_type = other DNA
ccaagcaaatggaaaacaaaaa

SEQ ID NO: 113729 - DNA, 22 bp, synthetic construct
  misc_feature 1..22: note = chemically synthesized
  source 1..22: mol_type = other DNA
caatcctagtctctgataaaac

SEQ ID NO: 113730 - DNA, 22 bp, synthetic construct
  misc_feature 1..22: note = chemically synthesized
  source 1..22: mol_type = other DNA
gtctctgataaaacaggcttta

SEQ ID NO: 113731 - DNA, 22 bp, synthetic construct
  misc_feature 1..22: note = chemically synthesized
  source 1..22: mol_type = other DNA
tgataaaacaggctttaaacca

SEQ ID NO: 113732 - DNA, 22 bp, synthetic construct
  misc_feature 1..22: note = chemically synthesized
  source 1..22: mol_type = other DNA
ataaaacaggctttaaaccaac

SEQ ID NO: 113733 - DNA, 22 bp, synthetic construct
  misc_feature 1..22: note = chemically synthesized
  source 1..22: mol_type = other DNA
taaaccaacaaagatcaaaaga

SEQ ID NO: 113734 - DNA, 22 bp, synthetic construct
  misc_feature 1..22: note = chemically synthesized
  source 1..22: mol_type = other DNA
aaaccaacaaagatcaaaagag

SEQ ID NO: 113735 - DNA, 22 bp, synthetic construct
  misc_feature 1..22: note = chemically synthesized
  source 1..22: mol_type = other DNA
aaccaacaaagatcaaaagaga

SEQ ID NO: 113736 - DNA, 22 bp, synthetic construct
  misc_feature 1..22: note = chemically synthesized
  source 1..22: mol_type = other DNA
cataatggtaaagggatcaatt

SEQ ID NO: 113737 - DNA, 22 bp, synthetic construct
  misc_feature 1..22: note = chemically synthesized
  source 1..22: mol_type = other DNA
aacaagaagagctaactatcct

SEQ ID NO: 113738 - DNA, 22 bp, synthetic construct
  misc_feature 1..22: note = chemically synthesized
  source 1..22: mol_type = other DNA
actatcctaaatatatatgcac

SEQ ID NO: 113739 - DNA, 22 bp, synthetic construct
  misc_feature 1..22: note = chemically synthesized
  source 1..22: mol_type = other DNA
tcctaaatatatatgcacccaa

SEQ ID NO: 113740 - DNA, 22 bp, synthetic construct
  misc_feature 1..22: note = chemically synthesized
  source 1..22: mol_type = other DNA
aatatatatgcacccaatacag

SEQ ID NO: 113741 - DNA, 22 bp, synthetic construct
  misc_feature 1..22: note = chemically synthesized
  source 1..22: mol_type = other DNA
ataaagcaagtccttagagacc

SEQ ID NO: 113742 - DNA, 22 bp, synthetic construct
  misc_feature 1..22: note = chemically synthesized
  source 1..22: mol_type = other DNA
agagacctacaaagagacttag

SEQ ID NO: 113743 - DNA, 22 bp, synthetic construct
  misc_feature 1..22: note = chemically synthesized
  source 1..22: mol_type = other DNA
gagacctacaaagagacttaga

SEQ ID NO: 113744 - DNA, 22 bp, synthetic construct
  misc_feature 1..22: note = chemically synthesized
  source 1..22: mol_type = other DNA
caaagagacttagactcccaca

SEQ ID NO: 113745 - DNA, 22 bp, synthetic construct
  misc_feature 1..22: note = chemically synthesized
  source 1..22: mol_type = other DNA
agactcccacactttaataatg

SEQ ID NO: 113746 - DNA, 22 bp, synthetic construct
  misc_feature 1..22: note = chemically synthesized
  source 1..22: mol_type = other DNA
gactcccacactttaataatgg

SEQ ID NO: 113747 - DNA, 22 bp, synthetic construct
  misc_feature 1..22: note = chemically synthesized
  source 1..22: mol_type = other DNA
ccacactttaataatgggagac

SEQ ID NO: 113748 - DNA, 22 bp, synthetic construct
  misc_feature 1..22: note = chemically synthesized
  source 1..22: mol_type = other DNA
taataatgggagactttaatac

SEQ ID NO: 113749 - DNA, 22 bp, synthetic construct
  misc_feature 1..22: note = chemically synthesized
  source 1..22: mol_type = other DNA
aataatgggagactttaatacc

SEQ ID NO: 113750 - DNA, 22 bp, synthetic construct
  misc_feature 1..22: note = chemically synthesized
  source 1..22: mol_type = other DNA
ataatgggagactttaataccc

SEQ ID NO: 113751 - DNA, 22 bp, synthetic construct
  misc_feature 1..22: note = chemically synthesized
  source 1..22: mol_type = other DNA
taataccccactgtcaacatta

SEQ ID NO: 113752 - DNA, 22 bp, synthetic construct
  misc_feature 1..22: note = chemically synthesized
  source 1..22: mol_type = other DNA
aataccccactgtcaacattag

SEQ ID NO: 113753 - DNA, 22 bp, synthetic construct
  misc_feature 1..22: note = chemically synthesized
  source 1..22: mol_type = other DNA
ataccccactgtcaacattaga

SEQ ID NO: 113754 - DNA, 22 bp, synthetic construct
  misc_feature 1..22: note = chemically synthesized
  source 1..22: mol_type = other DNA
tcaacattagacagatcaacga

SEQ ID NO: 113755 - DNA, 22 bp, synthetic construct
  misc_feature 1..22: note = chemically synthesized
  source 1..22: mol_type = other DNA
gacagatcaacgagacagaaag

SEQ ID NO: 113756 - DNA, 22 bp, synthetic construct
  misc_feature 1..22: note = chemically synthesized
  source 1..22: mol_type = other DNA
acaaggatatccaggaattgaa

SEQ ID NO: 113757 - DNA, 22 bp, synthetic construct
  misc_feature 1..22: note = chemically synthesized
  source 1..22: mol_type = other DNA
aacacagctctgcaccaagcag

SEQ ID NO: 113758 - DNA, 22 bp, synthetic construct
  misc_feature 1..22: note = chemically synthesized
  source 1..22: mol_type = other DNA
tgcaccaagcagacctaataga

SEQ ID NO: 113759 - DNA, 22 bp, synthetic construct
  misc_feature 1..22: note = chemically synthesized
  source 1..22: mol_type = other DNA
caccaagcagacctaatagaca

SEQ ID NO: 113760 - DNA, 22 bp, synthetic construct
  misc_feature 1..22: note = chemically synthesized
  source 1..22: mol_type = other DNA
atagacatctacagaactctcc

SEQ ID NO: 113761 - DNA, 22 bp, synthetic construct
  misc_feature 1..22: note = chemically synthesized
  source 1..22: mol_type = other DNA
cagaactctccaccccaaatca

SEQ ID NO: 113762 - DNA, 22 bp, synthetic construct
  misc_feature 1..22: note = chemically synthesized
  source 1..22: mol_type = other DNA
tccaccccaaatcaacagaata

SEQ ID NO: 113763 - DNA, 22 bp, synthetic construct
  misc_feature 1..22: note = chemically synthesized
  source 1..22: mol_type = other DNA
caccccaaatcaacagaatata

SEQ ID NO: 113764 - DNA, 22 bp, synthetic construct
  misc_feature 1..22: note = chemically synthesized
  source 1..22: mol_type = other DNA
tttttcagcaccacacaacacc

SEQ ID NO: 113765 - DNA, 22 bp, synthetic construct
  misc_feature 1..22: note = chemically synthesized
  source 1..22: mol_type = other DNA
ttttcagcaccacacaacacct

SEQ ID NO: 113766 - DNA, 22 bp, synthetic construct
  misc_feature 1..22: note = chemically synthesized
  source 1..22: mol_type = other DNA
tttcagcaccacacaacaccta

SEQ ID NO: 113767 - DNA, 22 bp, synthetic construct
  misc_feature 1..22: note = chemically synthesized
  source 1..22: mol_type = other DNA
ttcagcaccacacaacacctat

SEQ ID NO: 113768 - DNA, 22 bp, synthetic construct
  misc_feature 1..22: note = chemically synthesized
  source 1..22: mol_type = other DNA
tcagcaccacacaacacctatt

SEQ ID NO: 113769 - DNA, 22 bp, synthetic construct
  misc_feature 1..22: note = chemically synthesized
  source 1..22: mol_type = other DNA
cagcaccacacaacacctattc

SEQ ID NO: 113770 - DNA, 22 bp, synthetic construct
  misc_feature 1..22: note = chemically synthesized
  source 1..22: mol_type = other DNA
agcaccacacaacacctattcc

SEQ ID NO: 113771 - DNA, 22 bp, synthetic construct
  misc_feature 1..22: note = chemically synthesized
  source 1..22: mol_type = other DNA
ttccaaaattgaccacatactt

SEQ ID NO: 113772 - DNA, 22 bp, synthetic construct
  misc_feature 1..22: note = chemically synthesized
  source 1..22: mol_type = other DNA
caaaattgaccacatacttgga

SEQ ID NO: 113773 - DNA, 22 bp, synthetic construct
  misc_feature 1..22: note = chemically synthesized
  source 1..22: mol_type = other DNA
accacatacttggaagtaaagc

SEQ ID NO: 113774 - DNA, 22 bp, synthetic construct
  misc_feature 1..22: note = chemically synthesized
  source 1..22: mol_type = other DNA
ggaagtaaagctctcctcagca

SEQ ID NO: 113775 - DNA, 22 bp, synthetic construct
  misc_feature 1..22: note = chemically synthesized
  source 1..22: mol_type = other DNA
gaagtaaagctctcctcagcaa

SEQ ID NO: 113776 - DNA, 22 bp, synthetic construct
  misc_feature 1..22: note = chemically synthesized
  source 1..22: mol_type = other DNA
tcctcagcaaatataaaagaac

SEQ ID NO: 113777 - DNA, 22 bp, synthetic construct
  misc_feature 1..22: note = chemically synthesized
  source 1..22: mol_type = other DNA
ctcagcaaatataaaagaacag

SEQ ID NO: 113778 - DNA, 22 bp, synthetic construct
  misc_feature 1..22: note = chemically synthesized
  source 1..22: mol_type = other DNA
agcaaatataaaagaacagaaa

SEQ ID NO: 113779 - DNA, 22 bp, synthetic construct
  misc_feature 1..22: note = chemically synthesized
  source 1..22: mol_type = other DNA
taacaaactgtctctcagacca

SEQ ID NO: 113780 - DNA, 22 bp, synthetic construct
  misc_feature 1..22: note = chemically synthesized
  source 1..22: mol_type = other DNA
tctctcagaccacagtgcaatc

SEQ ID NO: 113781 - DNA, 22 bp, synthetic construct
  misc_feature 1..22: note = chemically synthesized
  source 1..22: mol_type = other DNA
tcagaccacagtgcaatcaaac

SEQ ID NO: 113782 - DNA, 22 bp, synthetic construct
  misc_feature 1..22: note = chemically synthesized
  source 1..22: mol_type = other DNA
agaccacagtgcaatcaaacta

SEQ ID NO: 113783 - DNA, 22 bp, synthetic construct
  misc_feature 1..22: note = chemically synthesized
  source 1..22: mol_type = other DNA
gaactcaggattaagaaactca

SEQ ID NO: 113784 - DNA, 22 bp, synthetic construct
  misc_feature 1..22: note = chemically synthesized
  source 1..22: mol_type = other DNA
aggattaagaaactcactcaaa

SEQ ID NO: 113785 - DNA, 22 bp, synthetic construct
  misc_feature 1..22: note = chemically synthesized
  source 1..22: mol_type = other DNA
agaaactcactcaaaaccactc

SEQ ID NO: 113786 - DNA, 22 bp, synthetic construct
  misc_feature 1..22: note = chemically synthesized
  source 1..22: mol_type = other DNA
actcaaaaccactcaactacat

SEQ ID NO: 113787 - DNA, 22 bp, synthetic construct
  misc_feature 1..22: note = chemically synthesized
  source 1..22: mol_type = other DNA
aaaaccactcaactacatggaa

SEQ ID NO: 113788 - DNA, 22 bp, synthetic construct
  misc_feature 1..22: note = chemically synthesized
  source 1..22: mol_type = other DNA
aactacatggaaactgaacaac

SEQ ID NO: 113789 - DNA, 22 bp, synthetic construct
  misc_feature 1..22: note = chemically synthesized
  source 1..22: mol_type = other DNA
catggaaactgaacaacctgct

SEQ ID NO: 113790 - DNA, 22 bp, synthetic construct
  misc_feature 1..22: note = chemically synthesized
  source 1..22: mol_type = other DNA
aacaacctgctcctgaatgact

SEQ ID NO: 113791 - DNA, 22 bp, synthetic construct
  misc_feature 1..22: note = chemically synthesized
  source 1..22: mol_type = other DNA
ctcctgaatgactactgggtac

SEQ ID NO: 113792 - DNA, 22 bp, synthetic construct
  misc_feature 1..22: note = chemically synthesized
  source 1..22: mol_type = other DNA
ctgaatgactactgggtacata

SEQ ID NO: 113793 - DNA, 22 bp, synthetic construct
  misc_feature 1..22: note = chemically synthesized
  source 1..22: mol_type = other DNA
aatgactactgggtacataacg

SEQ ID NO: 113794 - DNA, 22 bp, synthetic construct
  misc_feature 1..22: note = chemically synthesized
  source 1..22: mol_type = other DNA
ctgggtacataacgaaatgaag

SEQ ID NO: 113795 - DNA, 22 bp, synthetic construct
  misc_feature 1..22: note = chemically synthesized
  source 1..22: mol_type = other DNA
ggtacataacgaaatgaaggca

SEQ ID NO: 113796 - DNA, 22 bp, synthetic construct
  misc_feature 1..22: note = chemically synthesized
  source 1..22: mol_type = other DNA
tttgaaaccaatgagaacaaag

SEQ ID NO: 113797 - DNA, 22 bp, synthetic construct
  misc_feature 1..22: note = chemically synthesized
  source 1..22: mol_type = other DNA
tgaaaccaatgagaacaaagac

SEQ ID NO: 113798 - DNA, 22 bp, synthetic construct
  misc_feature 1..22: note = chemically synthesized
  source 1..22: mol_type = other DNA
gaaaccaatgagaacaaagaca

SEQ ID NO: 113799 - DNA, 22 bp, synthetic construct
  misc_feature 1..22: note = chemically synthesized
  source 1..22: mol_type = other DNA
aaaccaatgagaacaaagacac

SEQ ID NO: 113800 - DNA, 22 bp, synthetic construct
  misc_feature 1..22: note = chemically synthesized
  source 1..22: mol_type = other DNA
tgggacacattcgaatcagtgt

SEQ ID NO: 113801 - DNA, 22 bp, synthetic construct
  misc_feature 1..22: note = chemically synthesized
  source 1..22: mol_type = other DNA
ggacacattcgaatcagtgtgt

SEQ ID NO: 113802 - DNA, 22 bp, synthetic construct
  misc_feature 1..22: note = chemically synthesized
  source 1..22: mol_type = other DNA
gaatcagtgtgtagggggaaat

SEQ ID NO: 113803 - DNA, 22 bp, synthetic construct
  misc_feature 1..22: note = chemically synthesized
  source 1..22: mol_type = other DNA
atagcactaaacgcccacaaga

SEQ ID NO: 113804 - DNA, 22 bp, synthetic construct
  misc_feature 1..22: note = chemically synthesized
  source 1..22: mol_type = other DNA
tagcactaaacgcccacaagag

SEQ ID NO: 113805 - DNA, 22 bp, synthetic construct
  misc_feature 1..22: note = chemically synthesized
  source 1..22: mol_type = other DNA
aacgcccacaagagaaagcaag

SEQ ID NO: 113806 - DNA, 22 bp, synthetic construct
  misc_feature 1..22: note = chemically synthesized
  source 1..22: mol_type = other DNA
acaccctaacatcacaattaaa

SEQ ID NO: 113807 - DNA, 22 bp, synthetic construct
  misc_feature 1..22: note = chemically synthesized
  source 1..22: mol_type = other DNA
acatcacaattaaaagaactag

SEQ ID NO: 113808 - DNA, 22 bp, synthetic construct
  misc_feature 1..22: note = chemically synthesized
  source 1..22: mol_type = other DNA
aaagaactagataagcaagagc

SEQ ID NO: 113809 - DNA, 22 bp, synthetic construct
  misc_feature 1..22: note = chemically synthesized
  source 1..22: mol_type = other DNA
gataagcaagagcaaacacatt

SEQ ID NO: 113810 - DNA, 22 bp, synthetic construct
  misc_feature 1..22: note = chemically synthesized
  source 1..22: mol_type = other DNA
aaaagctagcagaagtcaagaa

SEQ ID NO: 113811 - DNA, 22 bp, synthetic construct
  misc_feature 1..22: note = chemically synthesized
  source 1..22: mol_type = other DNA
gcagaagtcaagaaataactaa

SEQ ID NO: 113812 - DNA, 22 bp, synthetic construct
  misc_feature 1..22: note = chemically synthesized
  source 1..22: mol_type = other DNA
aaatcagagcagaactgaagga

SEQ ID NO: 113813 - DNA, 22 bp, synthetic construct
  misc_feature 1..22: note = chemically synthesized
  source 1..22: mol_type = other DNA
aaggaaacagagacacaaaaaa

SEQ ID NO: 113814 - DNA, 22 bp, synthetic construct
  misc_feature 1..22: note = chemically synthesized
  source 1..22: mol_type = other DNA
caaaaaattaatgaatctggga

SEQ ID NO: 113815 - DNA, 22 bp, synthetic construct
  misc_feature 1..22: note = chemically synthesized
  source 1..22: mol_type = other DNA
aaaaaattaatgaatctgggag

SEQ ID NO: 113816 - DNA, 22 bp, synthetic construct
  misc_feature 1..22: note = chemically synthesized
  source 1..22: mol_type = other DNA
atgaatctgggagctggttttt

SEQ ID NO: 113817 - DNA, 22 bp, synthetic construct
  misc_feature 1..22: note = chemically synthesized
  source 1..22: mol_type = other DNA
ggagctggttttttgaaaggat

SEQ ID NO: 113818 - DNA, 22 bp, synthetic construct
  misc_feature 1..22: note = chemically synthesized
  source 1..22: mol_type = other DNA
gttttttgaaaggatcaacaaa

SEQ ID NO: 113819 - DNA, 22 bp, synthetic construct
  misc_feature 1..22: note = chemically synthesized
  source 1..22: mol_type = other DNA
tttgaaaggatcaacaaaactg

SEQ ID NO: 113820 - DNA, 22 bp, synthetic construct
  misc_feature 1..22: note = chemically synthesized
  source 1..22: mol_type = other DNA
ttgaaaggatcaacaaaactga

SEQ ID NO: 113821 - DNA, 22 bp, synthetic construct
  misc_feature 1..22: note = chemically synthesized
  source 1..22: mol_type = other DNA
tgaaaggatcaacaaaactgat

SEQ ID NO: 113822 - DNA, 22 bp, synthetic construct
  misc_feature 1..22: note = chemically synthesized
  source 1..22: mol_type = other DNA
gaaaggatcaacaaaactgata

SEQ ID NO: 113823 - DNA, 22 bp, synthetic construct
  misc_feature 1..22: note = chemically synthesized
  source 1..22: mol_type = other DNA
aaaggatcaacaaaactgatag

SEQ ID NO: 113824 - DNA, 22 bp, synthetic construct
  misc_feature 1..22: note = chemically synthesized
  source 1..22: mol_type = other DNA
atagaccgctagcaagactaat

SEQ ID NO: 113825 - DNA, 22 bp, synthetic construct
  misc_feature 1..22: note = chemically synthesized
  source 1..22: mol_type = other DNA
gcaagactaataagaaaagaga

SEQ ID NO: 113826 - DNA, 22 bp, synthetic construct
  misc_feature 1..22: note = chemically synthesized
  source 1..22: mol_type = other DNA
ataagaaaagagagaagaatca

SEQ ID NO: 113827 - DNA, 22 bp, synthetic construct
  misc_feature 1..22: note = chemically synthesized
  source 1..22: mol_type = other DNA
ccatcagagaatactacaaaca

SEQ ID NO: 113828 - DNA, 22 bp, synthetic construct
  misc_feature 1..22: note = chemically synthesized
  source 1..22: mol_type = other DNA
caaacacctctacgcaaataaa

SEQ ID NO: 113829 - DNA, 22 bp, synthetic construct
  misc_feature 1..22: note = chemically synthesized
  source 1..22: mol_type = other DNA
tacgcaaataaactagaaaatc

SEQ ID NO: 113830 - DNA, 22 bp, synthetic construct
  misc_feature 1..22: note = chemically synthesized
  source 1..22: mol_type = other DNA
cgcaaataaactagaaaatcta

SEQ ID NO: 113831 - DNA, 22 bp, synthetic construct
  misc_feature 1..22: note = chemically synthesized
  source 1..22: mol_type = other DNA
gaaaatctagaagaaatggata

SEQ ID NO: 113832 - DNA, 22 bp, synthetic construct
  misc_feature 1..22: note = chemically synthesized
  source 1..22: mol_type = other DNA
gaagaaatggataaattcctgg

SEQ ID NO: 113833 - DNA, 22 bp, synthetic construct
  misc_feature 1..22: note = chemically synthesized
  source 1..22: mol_type = other DNA
ctggacacatacactatcccaa

SEQ ID NO: 113834 - DNA, 22 bp, synthetic construct
  misc_feature 1..22: note = chemically synthesized
  source 1..22: mol_type = other DNA
gacacatacactatcccaagac

SEQ ID NO: 113835 - DNA, 22 bp, synthetic construct
  misc_feature 1..22: note = chemically synthesized
  source 1..22: mol_type = other DNA
tcccaagactaaaccaggaaga

SEQ ID NO: 113836 - DNA, 22 bp, synthetic construct
  misc_feature 1..22: note = chemically synthesized
  source 1..22: mol_type = other DNA
aaccaggaagaagttgaatctc

SEQ ID NO: 113837 - DNA, 22 bp, synthetic construct
  misc_feature 1..22: note = chemically synthesized
  source 1..22: mol_type = other DNA
aatctctgaatagaccaataac

SEQ ID NO: 113838 - DNA, 22 bp, synthetic construct
  misc_feature 1..22: note = chemically synthesized
  source 1..22: mol_type = other DNA
tgaatagaccaataacaggatc

SEQ ID NO: 113839 - DNA, 22 bp, synthetic construct
  misc_feature 1..22: note = chemically synthesized
  source 1..22: mol_type = other DNA
aatagaccaataacaggatctg

SEQ ID NO: 113840 - DNA, 22 bp, synthetic construct
  misc_feature 1..22: note = chemically synthesized
  source 1..22: mol_type = other DNA
aaattgtggcaataatcaatag

SEQ ID NO: 113841 - DNA, 22 bp, synthetic construct
  misc_feature 1..22: note = chemically synthesized
  source 1..22: mol_type = other DNA
tggcaataatcaatagcttacc

SEQ ID NO: 113842 - DNA, 22 bp, synthetic construct
  misc_feature 1..22: note = chemically synthesized
  source 1..22: mol_type = other DNA
accaaccaaaaagagtccagga

SEQ ID NO: 113843 - DNA, 22 bp, synthetic construct
  misc_feature 1..22: note = chemically synthesized
  source 1..22: mol_type = other DNA
ccaaccaaaaagagtccaggac

SEQ ID NO: 113844 - DNA, 22 bp, synthetic construct
  misc_feature 1..22: note = chemically synthesized
  source 1..22: mol_type = other DNA
acagccaaattctaacagaggt

SEQ ID NO: 113845 - DNA, 22 bp, synthetic construct
  misc_feature 1..22: note = chemically synthesized
  source 1..22: mol_type = other DNA
taacagaggtacaaggaggaat

SEQ ID NO: 113846 - DNA, 22 bp, synthetic construct
  misc_feature 1..22: note = chemically synthesized
  source 1..22: mol_type = other DNA
acagaggtacaaggaggaattg

SEQ ID NO: 113847 - DNA, 22 bp, synthetic construct
  misc_feature 1..22: note = chemically synthesized
  source 1..22: mol_type = other DNA
gtaccattccttctgaaactat

SEQ ID NO: 113848 - DNA, 22 bp, synthetic construct
  misc_feature 1..22: note = chemically synthesized
  source 1..22: mol_type = other DNA
cttctgaaactattccaatcaa

SEQ ID NO: 113849 - DNA, 22 bp, synthetic construct
  misc_feature 1..22: note = chemically synthesized
  source 1..22: mol_type = other DNA
ctgaaactattccaatcaacag

SEQ ID NO: 113850 - DNA, 22 bp, synthetic construct
  misc_feature 1..22: note = chemically synthesized
  source 1..22: mol_type = other DNA
tgaaactattccaatcaacaga

SEQ ID NO: 113851 - DNA, 22 bp, synthetic construct
  misc_feature 1..22: note = chemically synthesized
  source 1..22: mol_type = other DNA
aaactattccaatcaacagaaa

SEQ ID NO: 113852 - DNA, 22 bp, synthetic construct
  misc_feature 1..22: note = chemically synthesized
  source 1..22: mol_type = other DNA
ttccaatcaacagaaaaagaag

SEQ ID NO: 113853 - DNA, 22 bp, synthetic construct
  misc_feature 1..22: note = chemically synthesized
  source 1..22: mol_type = other DNA
caatcaacagaaaaagaaggaa

SEQ ID NO: 113854 - DNA, 22 bp, synthetic construct
  misc_feature 1..22: note = chemically synthesized
  source 1..22: mol_type = other DNA
cctaactcattttatgaggcca

SEQ ID NO: 113855 - DNA, 22 bp, synthetic construct
  misc_feature 1..22: note = chemically synthesized
  source 1..22: mol_type = other DNA
actcattttatgaggccagcat

SEQ ID NO: 113856 - DNA, 22 bp, synthetic construct
  misc_feature 1..22: note = chemically synthesized
  source 1..22: mol_type = other DNA
attttatgaggccagcatcatc

SEQ ID NO: 113857 - DNA, 22 bp, synthetic construct
  misc_feature 1..22: note = chemically synthesized
  source 1..22: mol_type = other DNA
tatgaggccagcatcatcctaa

SEQ ID NO: 113858 - DNA, 22 bp, synthetic construct
  misc_feature 1..22: note = chemically synthesized
  source 1..22: mol_type = other DNA
atgaggccagcatcatcctaat

SEQ ID NO: 113859 - DNA, 22 bp, synthetic construct
  misc_feature 1..22: note = chemically synthesized
  source 1..22: mol_type = other DNA
tgaggccagcatcatcctaata

SEQ ID NO: 113860 - DNA, 22 bp, synthetic construct
  misc_feature 1..22: note = chemically synthesized
  source 1..22: mol_type = other DNA
ataccaaagccagaaagagaca

SEQ ID NO: 113861 - DNA, 22 bp, synthetic construct
  misc_feature 1..22: note = chemically synthesized
  source 1..22: mol_type = other DNA
tagatgaatatccctgatgaac

SEQ ID NO: 113862 - DNA, 22 bp, synthetic construct
  misc_feature 1..22: note = chemically synthesized
  source 1..22: mol_type = other DNA
agatgaatatccctgatgaaca

SEQ ID NO: 113863 - DNA, 22 bp, synthetic construct
  misc_feature 1..22: note = chemically synthesized
  source 1..22: mol_type = other DNA
gatgaatatccctgatgaacat

SEQ ID NO: 113864 - DNA, 22 bp, synthetic construct
  misc_feature 1..22: note = chemically synthesized
  source 1..22: mol_type = other DNA
atgaacatcgatgcaaaaatcc

SEQ ID NO: 113865 - DNA, 22 bp, synthetic construct
  misc_feature 1..22: note = chemically synthesized
  source 1..22: mol_type = other DNA
aataaaatactggcaaaccgaa

SEQ ID NO: 113866 - DNA, 22 bp, synthetic construct
  misc_feature 1..22: note = chemically synthesized
  source 1..22: mol_type = other DNA
gcaaaccgaatccagcagcaca

SEQ ID NO: 113867 - DNA, 22 bp, synthetic construct
  misc_feature 1..22: note = chemically synthesized
  source 1..22: mol_type = other DNA
atccacgatgatcaagtggact

SEQ ID NO: 113868 - DNA, 22 bp, synthetic construct
  misc_feature 1..22: note = chemically synthesized
  source 1..22: mol_type = other DNA
tccacgatgatcaagtggactt

SEQ ID NO: 113869 - DNA, 22 bp, synthetic construct
  misc_feature 1..22: note = chemically synthesized
  source 1..22: mol_type = other DNA
catccctgggatgcaaggctgg

SEQ ID NO: 113870 - DNA, 22 bp, synthetic construct
  misc_feature 1..22: note = chemically synthesized
  source 1..22: mol_type = other DNA
atccctgggatgcaaggctggt

SEQ ID NO: 113871 - DNA, 22 bp, synthetic construct
  misc_feature 1..22: note = chemically synthesized
  source 1..22: mol_type = other DNA
ggatgcaaggctggttcaatat

SEQ ID NO: 113872 - DNA, 22 bp, synthetic construct
  misc_feature 1..22: note = chemically synthesized
  source 1..22: mol_type = other DNA
gttcaatatatgcaaatcaata

SEQ ID NO: 113873 - DNA, 22 bp, synthetic construct
  misc_feature 1..22: note = chemically synthesized
  source 1..22: mol_type = other DNA
aatatatgcaaatcaataaatg

SEQ ID NO: 113874 - DNA, 22 bp, synthetic construct
  misc_feature 1..22: note = chemically synthesized
  source 1..22: mol_type = other DNA
tctcaatagatgcagaaaaggc

SEQ ID NO: 113875 - DNA, 22 bp, synthetic construct
  misc_feature 1..22: note = chemically synthesized
  source 1..22: mol_type = other DNA
aatagatgcagaaaaggccttt

SEQ ID NO: 113876 - DNA, 22 bp, synthetic construct
  misc_feature 1..22: note = chemically synthesized
  source 1..22: mol_type = other DNA
tgacaaaattcaacaacccttc

SEQ ID NO: 113877 - DNA, 22 bp, synthetic construct
  misc_feature 1..22: note = chemically synthesized
  source 1..22: mol_type = other DNA
gacaaaattcaacaacccttca

SEQ ID NO: 113878 - DNA, 22 bp, synthetic construct
  misc_feature 1..22: note = chemically synthesized
  source 1..22: mol_type = other DNA
acaaaattcaacaacccttcat

SEQ ID NO: 113879 - DNA, 22 bp, synthetic construct
  misc_feature 1..22: note = chemically synthesized
  source 1..22: mol_type = other DNA
aacaacccttcatgctaaaaac

SEQ ID NO: 113880 - DNA, 22 bp, synthetic construct
  misc_feature 1..22: note = chemically synthesized
  source 1..22: mol_type = other DNA
catgctaaaaactttcaataaa

SEQ ID NO: 113881 - DNA, 22 bp, synthetic construct
  misc_feature 1..22: note = chemically synthesized
  source 1..22: mol_type = other DNA
atgctaaaaactttcaataaat

SEQ ID NO: 113882 - DNA, 22 bp, synthetic construct
  misc_feature 1..22: note = chemically synthesized
  source 1..22: mol_type = other DNA
aaaactttcaataaattaggta

SEQ ID NO: 113883 - DNA, 22 bp, synthetic construct
  misc_feature 1..22: note = chemically synthesized
  source 1..22: mol_type = other DNA
tcaataaattaggtattgatgg

SEQ ID NO: 113884 - DNA, 22 bp, synthetic construct
  misc_feature 1..22: note = chemically synthesized
  source 1..22: mol_type = other DNA
caataaattaggtattgatggg

SEQ ID NO: 113885 - DNA, 22 bp, synthetic construct
  misc_feature 1..22: note = chemically synthesized
  source 1..22: mol_type = other DNA
aataaattaggtattgatggga

SEQ ID NO: 113886 - DNA, 22 bp, synthetic construct
  misc_feature 1..22: note = chemically synthesized
  source 1..22: mol_type = other DNA
ggtattgatgggacatatctca

SEQ ID NO: 113887 - DNA, 22 bp, synthetic construct
  misc_feature 1..22: note = chemically synthesized
  source 1..22: mol_type = other DNA
atgggacatatctcaaaataat

SEQ ID NO: 113888 - DNA, 22 bp, synthetic construct
  misc_feature 1..22: note = chemically synthesized
  source 1..22: mol_type = other DNA
aaaataataagagctatctatg

SEQ ID NO: 113889 - DNA, 22 bp, synthetic construct
  misc_feature 1..22: note = chemically synthesized
  source 1..22: mol_type = other DNA
tctatgacaaacccacagccaa

SEQ ID NO: 113890 - DNA, 22 bp, synthetic construct
  misc_feature 1..22: note = chemically synthesized
  source 1..22: mol_type = other DNA
tgacaaacccacagccaatatc

SEQ ID NO: 113891 - DNA, 22 bp, synthetic construct
  misc_feature 1..22: note = chemically synthesized
  source 1..22: mol_type = other DNA
aatgggcaaaaactggaagcat

SEQ ID NO: 113892 - DNA, 22 bp, synthetic construct
  misc_feature 1..22: note = chemically synthesized
  source 1..22: mol_type = other DNA
gaagcattccctttgtaaactg

SEQ ID NO: 113893 - DNA, 22 bp, synthetic construct
  misc_feature 1..22: note = chemically synthesized
  source 1..22: mol_type = other DNA
cctttgtaaactggcacaagac

SEQ ID NO: 113894 - DNA, 22 bp, synthetic construct
  misc_feature 1..22: note = chemically synthesized
  source 1..22: mol_type = other DNA
tgtaaactggcacaagacaggg

SEQ ID NO: 113895 - DNA, 22 bp, synthetic construct
  misc_feature 1..22: note = chemically synthesized
  source 1..22: mol_type = other DNA
gtaaactggcacaagacaggga

SEQ ID NO: 113896 - DNA, 22 bp, synthetic construct
  misc_feature 1..22: note = chemically synthesized
  source 1..22: mol_type = other DNA
taaactggcacaagacagggat

SEQ ID NO: 113897 - DNA, 22 bp, synthetic construct
  misc_feature 1..22: note = chemically synthesized
  source 1..22: mol_type = other DNA
gcacaagacagggatgccctct

SEQ ID NO: 113898 - DNA, 22 bp, synthetic construct
  misc_feature 1..22: note = chemically synthesized
  source 1..22: mol_type = other DNA
tctcactactcctattcaacat

SEQ ID NO: 113899 - DNA, 22 bp, synthetic construct
  misc_feature 1..22: note = chemically synthesized
  source 1..22: mol_type = other DNA
tcactactcctattcaacatag

SEQ ID NO: 113900 - DNA, 22 bp, synthetic construct
  misc_feature 1..22: note = chemically synthesized
  source 1..22: mol_type = other DNA
actactcctattcaacatagtg

SEQ ID NO: 113901 - DNA, 22 bp, synthetic construct
  misc_feature 1..22: note = chemically synthesized
  source 1..22: mol_type = other DNA
ctcctattcaacatagtgttgg

SEQ ID NO: 113902 - DNA, 22 bp, synthetic construct
  misc_feature 1..22: note = chemically synthesized
  source 1..22: mol_type = other DNA
ctattcaacatagtgttggaag

SEQ ID NO: 113903 - DNA, 22 bp, synthetic construct
  misc_feature 1..22: note = chemically synthesized
  source 1..22: mol_type = other DNA
ttcaacatagtgttggaagttc

SEQ ID NO: 113904 - DNA, 22 bp, synthetic construct
  misc_feature 1..22: note = chemically synthesized
  source 1..22: mol_type = other DNA
aacatagtgttggaagttctgg

SEQ ID NO: 113905 - DNA, 22 bp, synthetic construct
  misc_feature 1..22: note = chemically synthesized
  source 1..22: mol_type = other DNA
gaagttctggccagggcaatta

SEQ ID NO: 113906 - DNA, 22 bp, synthetic construct
  misc_feature 1..22: note = chemically synthesized
  source 1..22: mol_type = other DNA
tggccagggcaattaggcagaa

SEQ ID NO: 113907 - DNA, 22 bp, synthetic construct
  misc_feature 1..22: note = chemically synthesized
  source 1..22: mol_type = other DNA
gccagggcaattaggcagaaga

SEQ ID NO: 113908 - DNA, 22 bp, synthetic construct
  misc_feature 1..22: note = chemically synthesized
  source 1..22: mol_type = other DNA
ggcagaagacaggaaaaaaggg

SEQ ID NO: 113909 - DNA, 22 bp, synthetic construct
  misc_feature 1..22: note = chemically synthesized
  source 1..22: mol_type = other DNA
aattaagaaaagaggaagtcaa

SEQ ID NO: 113910 - DNA, 22 bp, synthetic construct
  misc_feature 1..22: note = chemically synthesized
  source 1..22: mol_type = other DNA
agaaaagaggaagtcaaattgt

SEQ ID NO: 113911 - DNA, 22 bp, synthetic construct
  misc_feature 1..22: note = chemically synthesized
  source 1..22: mol_type = other DNA
tccctgtttgcagacgacatga

SEQ ID NO: 113912 - DNA, 22 bp, synthetic construct
  misc_feature 1..22: note = chemically synthesized
  source 1..22: mol_type = other DNA
tttgcagacgacatgattgtat

SEQ ID NO: 113913 - DNA, 22 bp, synthetic construct
  misc_feature 1..22: note = chemically synthesized
  source 1..22: mol_type = other DNA
gcagacgacatgattgtatatc

SEQ ID NO: 113914 - DNA, 22 bp, synthetic construct
  misc_feature 1..22: note = chemically synthesized
  source 1..22: mol_type = other DNA
cagacgacatgattgtatatct

SEQ ID NO: 113915 - DNA, 22 bp, synthetic construct
  misc_feature 1..22: note = chemically synthesized
  source 1..22: mol_type = other DNA
tatatctagaaaacccccttgt

SEQ ID NO: 113916 - DNA, 22 bp, synthetic construct
  misc_feature 1..22: note = chemically synthesized
  source 1..22: mol_type = other DNA
gaaaacccccttgtctcagccc

SEQ ID NO: 113917 - DNA, 22 bp, synthetic construct
  misc_feature 1..22: note = chemically synthesized
  source 1..22: mol_type = other DNA
gtctcagcccaaaatctcctta

SEQ ID NO: 113918 - DNA, 22 bp, synthetic construct
  misc_feature 1..22: note = chemically synthesized
  source 1..22: mol_type = other DNA
tctcagcccaaaatctccttaa

SEQ ID NO: 113919 - DNA, 22 bp, synthetic construct
  misc_feature 1..22: note = chemically synthesized
  source 1..22: mol_type = other DNA
agcccaaaatctccttaagctg

SEQ ID NO: 113920 - DNA, 22 bp, synthetic construct
  misc_feature 1..22: note = chemically synthesized
  source 1..22: mol_type = other DNA
cttaagctgataagcaacttca

SEQ ID NO: 113921 - DNA, 22 bp, synthetic construct
  misc_feature 1..22: note = chemically synthesized
  source 1..22: mol_type = other DNA
aagctgataagcaacttcagca

SEQ ID NO: 113922 - DNA, 22 bp, synthetic construct
  misc_feature 1..22: note = chemically synthesized
  source 1..22: mol_type = other DNA
agctgataagcaacttcagcaa

SEQ ID NO: 113923 - DNA, 22 bp, synthetic construct
  misc_feature 1..22: note = chemically synthesized
  source 1..22: mol_type = other DNA
ataagcaacttcagcaaagcct

SEQ ID NO: 113924 - DNA, 22 bp, synthetic construct
  misc_feature 1..22: note = chemically synthesized
  source 1..22: mol_type = other DNA
cagcaaagcctcaggatacaaa

SEQ ID NO: 113925 - DNA, 22 bp, synthetic construct
  misc_feature 1..22: note = chemically synthesized
  source 1..22: mol_type = other DNA
agcaaagcctcaggatacaaaa

SEQ ID NO: 113926 - DNA, 22 bp, synthetic construct
  misc_feature 1..22: note = chemically synthesized
  source 1..22: mol_type = other DNA
aggatacaaaaccaatgtgcaa

SEQ ID NO: 113927 - DNA, 22 bp, synthetic construct
  misc_feature 1..22: note = chemically synthesized
  source 1..22: mol_type = other DNA
ttatacaccaataacagacaaa

SEQ ID NO: 113928 - DNA, 22 bp, synthetic construct
  misc_feature 1..22: note = chemically synthesized
  source 1..22: mol_type = other DNA
atacaccaataacagacaaaca

SEQ ID NO: 113929 - DNA, 22 bp, synthetic construct
  misc_feature 1..22: note = chemically synthesized
  source 1..22: mol_type = other DNA
tacaccaataacagacaaacag

SEQ ID NO: 113930 - DNA, 22 bp, synthetic construct
  misc_feature 1..22: note = chemically synthesized
  source 1..22: mol_type = other DNA
ccattcacaattgcttcaaaga

SEQ ID NO: 113931 - DNA, 22 bp, synthetic construct
  misc_feature 1..22: note = chemically synthesized
  source 1..22: mol_type = other DNA
acaattgcttcaaagagaataa

SEQ ID NO: 113932 - DNA, 22 bp, synthetic construct
  misc_feature 1..22: note = chemically synthesized
  source 1..22: mol_type = other DNA
cttcaaagagaataaaatacct

SEQ ID NO: 113933 - DNA, 22 bp, synthetic construct
  misc_feature 1..22: note = chemically synthesized
  source 1..22: mol_type = other DNA
caaagagaataaaatacctagg

SEQ ID NO: 113934 - DNA, 22 bp, synthetic construct
  misc_feature 1..22: note = chemically synthesized
  source 1..22: mol_type = other DNA
aaagagaataaaatacctagga

SEQ ID NO: 113935 - DNA, 22 bp, synthetic construct
  misc_feature 1..22: note = chemically synthesized
  source 1..22: mol_type = other DNA
ggaatccaacttacaagggatg

SEQ ID NO: 113936 - DNA, 22 bp, synthetic construct
  misc_feature 1..22: note = chemically synthesized
  source 1..22: mol_type = other DNA
acaagggatgtgaaggacctct

SEQ ID NO: 113937 - DNA, 22 bp, synthetic construct
  misc_feature 1..22: note = chemically synthesized
  source 1..22: mol_type = other DNA
caagggatgtgaaggacctctt

SEQ ID NO: 113938 - DNA, 22 bp, synthetic construct
  misc_feature 1..22: note = chemically synthesized
  source 1..22: mol_type = other DNA
ttcaaggagaactacaaaccac

SEQ ID NO: 113939 - DNA, 22 bp, synthetic construct
  misc_feature 1..22: note = chemically synthesized
  source 1..22: mol_type = other DNA
caaggagaactacaaaccactg

SEQ ID NO: 113940 - DNA, 22 bp, synthetic construct
  misc_feature 1..22: note = chemically synthesized
  source 1..22: mol_type = other DNA
aaggagaactacaaaccactgc

SEQ ID NO: 113941 - DNA, 22 bp, synthetic construct
  misc_feature 1..22: note = chemically synthesized
  source 1..22: mol_type = other DNA
caaaccactgctcaatgaaata

SEQ ID NO: 113942 - DNA, 22 bp, synthetic construct
  misc_feature 1..22: note = chemically synthesized
  source 1..22: mol_type = other DNA
ctcaatgaaataaaagaagata

SEQ ID NO: 113943 - DNA, 22 bp, synthetic construct
  misc_feature 1..22: note = chemically synthesized
  source 1..22: mol_type = other DNA
aatgaaataaaagaagatacaa

SEQ ID NO: 113944 - DNA, 22 bp, synthetic construct
  misc_feature 1..22: note = chemically synthesized
  source 1..22: mol_type = other DNA
catgcttatgggtaggaagaat

SEQ ID NO: 113945 - DNA, 22 bp, synthetic construct
  misc_feature 1..22: note = chemically synthesized
  source 1..22: mol_type = other DNA
atgggtaggaagaatcaatatc

SEQ ID NO: 113946 - DNA, 22 bp, synthetic construct
  misc_feature 1..22: note = chemically synthesized
  source 1..22: mol_type = other DNA
tgggtaggaagaatcaatatca

SEQ ID NO: 113947 - DNA, 22 bp, synthetic construct
  misc_feature 1..22: note = chemically synthesized
  source 1..22: mol_type = other DNA
atagattcaatgccatccccat

SEQ ID NO: 113948 - DNA, 22 bp, synthetic construct
  misc_feature 1..22: note = chemically synthesized
  source 1..22: mol_type = other DNA
tagattcaatgccatccccatc

SEQ ID NO: 113949 - DNA, 22 bp, synthetic construct
  misc_feature 1..22: note = chemically synthesized
  source 1..22: mol_type = other DNA
aatgccatccccatcaagctac

SEQ ID NO: 113950 - DNA, 22 bp, synthetic construct
  misc_feature 1..22: note = chemically synthesized
  source 1..22: mol_type = other DNA
ccaatgattttcttcacagaat

SEQ ID NO: 113951 - DNA, 22 bp, synthetic construct
  misc_feature 1..22: note = chemically synthesized
  source 1..22: mol_type = other DNA
tcttcacagaattggaaaaacg

SEQ ID NO: 113952 - DNA, 22 bp, synthetic construct
  misc_feature 1..22: note = chemically synthesized
  source 1..22: mol_type = other DNA
cttcacagaattggaaaaacga

SEQ ID NO: 113953 - DNA, 22 bp, synthetic construct
  misc_feature 1..22: note = chemically synthesized
  source 1..22: mol_type = other DNA
ttcacagaattggaaaaacgac

SEQ ID NO: 113954 - DNA, 22 bp, synthetic construct
  misc_feature 1..22: note = chemically synthesized
  source 1..22: mol_type = other DNA
cacagaattggaaaaacgactt

SEQ ID NO: 113955 - DNA, 22 bp, synthetic construct
  misc_feature 1..22: note = chemically synthesized
  source 1..22: mol_type = other DNA
acagaattggaaaaacgacttt

SEQ ID NO: 113956 - DNA, 22 bp, synthetic construct
  misc_feature 1..22: note = chemically synthesized
  source 1..22: mol_type = other DNA
gaaaaacgactttaaagttcat

SEQ ID NO: 113957 - DNA, 22 bp, synthetic construct
  misc_feature 1..22: note = chemically synthesized
  source 1..22: mol_type = other DNA
taaagttcatatggaaccaaaa

SEQ ID NO: 113958 - DNA, 22 bp, synthetic construct
  misc_feature 1..22: note = chemically synthesized
  source 1..22: mol_type = other DNA
aaagttcatatggaaccaaaaa

SEQ ID NO: 113959 - DNA, 22 bp, synthetic construct
  misc_feature 1..22: note = chemically synthesized
  source 1..22: mol_type = other DNA
aagttcatatggaaccaaaaaa

SEQ ID NO: 113960 - DNA, 22 bp, synthetic construct
  misc_feature 1..22: note = chemically synthesized
  source 1..22: mol_type = other DNA
atatggaaccaaaaaagagcct

SEQ ID NO: 113961 - DNA, 22 bp, synthetic construct
  misc_feature 1..22: note = chemically synthesized
  source 1..22: mol_type = other DNA
cattgccaagtcaatcctaagc

SEQ ID NO: 113962 - DNA, 22 bp, synthetic construct
  misc_feature 1..22: note = chemically synthesized
  source 1..22: mol_type = other DNA
ccaagtcaatcctaagccaaaa

SEQ ID NO: 113963 - DNA, 22 bp, synthetic construct
  misc_feature 1..22: note = chemically synthesized
  source 1..22: mol_type = other DNA
agccaaaagaacaaagctggag

SEQ ID NO: 113964 - DNA, 22 bp, synthetic construct
  misc_feature 1..22: note = chemically synthesized
  source 1..22: mol_type = other DNA
gaggcatcaggctacctcactt

SEQ ID NO: 113965 - DNA, 22 bp, synthetic construct
  misc_feature 1..22: note = chemically synthesized
  source 1..22: mol_type = other DNA
cctcacttcaaactatactaca

SEQ ID NO: 113966 - DNA, 22 bp, synthetic construct
  misc_feature 1..22: note = chemically synthesized
  source 1..22: mol_type = other DNA
acttcaaactatactacaaggc

SEQ ID NO: 113967 - DNA, 22 bp, synthetic construct
  misc_feature 1..22: note = chemically synthesized
  source 1..22: mol_type = other DNA
caaactatactacaaggctaca

SEQ ID NO: 113968 - DNA, 22 bp, synthetic construct
  misc_feature 1..22: note = chemically synthesized
  source 1..22: mol_type = other DNA
aaactatactacaaggctacag

SEQ ID NO: 113969 - DNA, 22 bp, synthetic construct
  misc_feature 1..22: note = chemically synthesized
  source 1..22: mol_type = other DNA
tactacaaggctacagtaacca

SEQ ID NO: 113970 - DNA, 22 bp, synthetic construct
  misc_feature 1..22: note = chemically synthesized
  source 1..22: mol_type = other DNA
caaggctacagtaaccaaaaca

SEQ ID NO: 113971 - DNA, 22 bp, synthetic construct
  misc_feature 1..22: note = chemically synthesized
  source 1..22: mol_type = other DNA
cagtaaccaaaacagcatgtta

SEQ ID NO: 113972 - DNA, 22 bp, synthetic construct
  misc_feature 1..22: note = chemically synthesized
  source 1..22: mol_type = other DNA
ctggtaccaaaacacagatata

SEQ ID NO: 113973 - DNA, 22 bp, synthetic construct
  misc_feature 1..22: note = chemically synthesized
  source 1..22: mol_type = other DNA
gtaccaaaacacagatatagat

SEQ ID NO: 113974 - DNA, 22 bp, synthetic construct
  misc_feature 1..22: note = chemically synthesized
  source 1..22: mol_type = other DNA
agaaataacgacgcatatctac

SEQ ID NO: 113975 - DNA, 22 bp, synthetic construct
  misc_feature 1..22: note = chemically synthesized
  source 1..22: mol_type = other DNA
caactatctgatctttgaaaaa

SEQ ID NO: 113976 - DNA, 22 bp, synthetic construct
  misc_feature 1..22: note = chemically synthesized
  source 1..22: mol_type = other DNA
tctgatctttgaaaaacctgag

SEQ ID NO: 113977 - DNA, 22 bp, synthetic construct
  misc_feature 1..22: note = chemically synthesized
  source 1..22: mol_type = other DNA
atctttgaaaaacctgagaaaa

SEQ ID NO: 113978 - DNA, 22 bp, synthetic construct
  misc_feature 1..22: note = chemically synthesized
  source 1..22: mol_type = other DNA
tgaaaaacctgagaaaaacaag

SEQ ID NO: 113979 - DNA, 22 bp, synthetic construct
  misc_feature 1..22: note = chemically synthesized
  source 1..22: mol_type = other DNA
gaaaaacctgagaaaaacaaga

SEQ ID NO: 113980 - DNA, 22 bp, synthetic construct
  misc_feature 1..22: note = chemically synthesized
  source 1..22: mol_type = other DNA
aaaaacctgagaaaaacaagaa

SEQ ID NO: 113981 - DNA, 22 bp, synthetic construct
  misc_feature 1..22: note = chemically synthesized
  source 1..22: mol_type = other DNA
agaaaaacaagaaatggggaaa

SEQ ID NO: 113982 - DNA, 22 bp, synthetic construct
  misc_feature 1..22: note = chemically synthesized
  source 1..22: mol_type = other DNA
cctatttaataaatggtgctgg

SEQ ID NO: 113983 - DNA, 22 bp, synthetic construct
  misc_feature 1..22: note = chemically synthesized
  source 1..22: mol_type = other DNA
tttaataaatggtgctgggaga

SEQ ID NO: 113984 - DNA, 22 bp, synthetic construct
  misc_feature 1..22: note = chemically synthesized
  source 1..22: mol_type = other DNA
aataaatggtgctgggagaact

SEQ ID NO: 113985 - DNA, 22 bp, synthetic construct
  misc_feature 1..22: note = chemically synthesized
  source 1..22: mol_type = other DNA
ataaatggtgctgggagaactg

SEQ ID NO: 113986 - DNA, 22 bp, synthetic construct
  misc_feature 1..22: note = chemically synthesized
  source 1..22: mol_type = other DNA
ggagaactggctagccatatgt

SEQ ID NO: 113987 - DNA, 22 bp, synthetic construct
  misc_feature 1..22: note = chemically synthesized
  source 1..22: mol_type = other DNA
gctagccatatgtagaatgctg

SEQ ID NO: 113988 - DNA, 22 bp, synthetic construct
  misc_feature 1..22: note = chemically synthesized
  source 1..22: mol_type = other DNA
gccatatgtagaatgctgaaac

SEQ ID NO: 113989 - DNA, 22 bp, synthetic construct
  misc_feature 1..22: note = chemically synthesized
  source 1..22: mol_type = other DNA
aaactggatcccttccttacac

SEQ ID NO: 113990 - DNA, 22 bp, synthetic construct
  misc_feature 1..22: note = chemically synthesized
  source 1..22: mol_type = other DNA
gatcccttccttacaccttata

SEQ ID NO: 113991 - DNA, 22 bp, synthetic construct
  misc_feature 1..22: note = chemically synthesized
  source 1..22: mol_type = other DNA
ccttacaccttatacaaaaatt

SEQ ID NO: 113992 - DNA, 22 bp, synthetic construct
  misc_feature 1..22: note = chemically synthesized
  source 1..22: mol_type = other DNA
cttacaccttatacaaaaatta

SEQ ID NO: 113993 - DNA, 22 bp, synthetic construct
  misc_feature 1..22: note = chemically synthesized
  source 1..22: mol_type = other DNA
acaccttatacaaaaattaatt

SEQ ID NO: 113994 - DNA, 22 bp, synthetic construct
  misc_feature 1..22: note = chemically synthesized
  source 1..22: mol_type = other DNA
caccttatacaaaaattaattc

SEQ ID NO: 113995 - DNA, 22 bp, synthetic construct
  misc_feature 1..22: note = chemically synthesized
  source 1..22: mol_type = other DNA
atacaaaaattaattcaagatg

SEQ ID NO: 113996 - DNA, 22 bp, synthetic construct
  misc_feature 1..22: note = chemically synthesized
  source 1..22: mol_type = other DNA
tacaaaaattaattcaagatgg

SEQ ID NO: 113997 - DNA, 22 bp, synthetic construct
  misc_feature 1..22: note = chemically synthesized
  source 1..22: mol_type = other DNA
attcaagatggattaaagactt

SEQ ID NO: 113998 - DNA, 22 bp, synthetic construct
  misc_feature 1..22: note = chemically synthesized
  source 1..22: mol_type = other DNA
aagatggattaaagacttaaac

SEQ ID NO: 113999 - DNA, 22 bp, synthetic construct
  misc_feature 1..22: note = chemically synthesized
  source 1..22: mol_type = other DNA
aagacttaaacattagacctaa

SEQ ID NO: 114000 - DNA, 22 bp, synthetic construct
  misc_feature 1..22: note = chemically synthesized
  source 1..22: mol_type = other DNA
aaacattagacctaaaaccata

SEQ ID NO: 114001 - DNA, 22 bp, synthetic construct
  misc_feature 1..22: note = chemically synthesized
  source 1..22: mol_type = other DNA
aacattagacctaaaaccataa

SEQ ID NO: 114002 - DNA, 22 bp, synthetic construct
  misc_feature 1..22: note = chemically synthesized
  source 1..22: mol_type = other DNA
gacctaaaaccataaaaaccct

SEQ ID NO: 114003 - DNA, 22 bp, synthetic construct
  misc_feature 1..22: note = chemically synthesized
  source 1..22: mol_type = other DNA
aaaccataaaaaccctagaaga

SEQ ID NO: 114004 - DNA, 22 bp, synthetic construct
  misc_feature 1..22: note = chemically synthesized
  source 1..22: mol_type = other DNA
gaagaaaacgcaggcattacca

SEQ ID NO: 114005 - DNA, 22 bp, synthetic construct
  misc_feature 1..22: note = chemically synthesized
  source 1..22: mol_type = other DNA
ccattcaggacataggcatggg

SEQ ID NO: 114006 - DNA, 22 bp, synthetic construct
  misc_feature 1..22: note = chemically synthesized
  source 1..22: mol_type = other DNA
aggacataggcatgggcaagga

SEQ ID NO: 114007 - DNA, 22 bp, synthetic construct
  misc_feature 1..22: note = chemically synthesized
  source 1..22: mol_type = other DNA
catgtctaaaacaccaaaagcg

SEQ ID NO: 114008 - DNA, 22 bp, synthetic construct
  misc_feature 1..22: note = chemically synthesized
  source 1..22: mol_type = other DNA
atgtctaaaacaccaaaagcga

SEQ ID NO: 114009 - DNA, 22 bp, synthetic construct
  misc_feature 1..22: note = chemically synthesized
  source 1..22: mol_type = other DNA
aaacaccaaaagcgatggcaac

SEQ ID NO: 114010 - DNA, 22 bp, synthetic construct
  misc_feature 1..22: note = chemically synthesized
  source 1..22: mol_type = other DNA
actaatgggatctaatgaaact

SEQ ID NO: 114011 - DNA, 22 bp, synthetic construct
  misc_feature 1..22: note = chemically synthesized
  source 1..22: mol_type = other DNA
atgggatctaatgaaactaaag

SEQ ID NO: 114012 - DNA, 22 bp, synthetic construct
  misc_feature 1..22: note = chemically synthesized
  source 1..22: mol_type = other DNA
atgaaactaaagagcttctgca

SEQ ID NO: 114013 - DNA, 22 bp, synthetic construct
  misc_feature 1..22: note = chemically synthesized
  source 1..22: mol_type = other DNA
aagagcttctgcacagctaaag

SEQ ID NO: 114014 - DNA, 22 bp, synthetic construct
  misc_feature 1..22: note = chemically synthesized
  source 1..22: mol_type = other DNA
ctgcacagctaaagaaactacc

SEQ ID NO: 114015 - DNA, 22 bp, synthetic construct
  misc_feature 1..22: note = chemically synthesized
  source 1..22: mol_type = other DNA
tgcacagctaaagaaactacca

SEQ ID NO: 114016 - DNA, 22 bp, synthetic construct
  misc_feature 1..22: note = chemically synthesized
  source 1..22: mol_type = other DNA
cacagctaaagaaactaccatc

SEQ ID NO: 114017 - DNA, 22 bp, synthetic construct
  misc_feature 1..22: note = chemically synthesized
  source 1..22: mol_type = other DNA
aagaaactaccatcagagtgaa

SEQ ID NO: 114018 - DNA, 22 bp, synthetic construct
  misc_feature 1..22: note = chemically synthesized
  source 1..22: mol_type = other DNA
ccatcagagtgaacaggcaacc

SEQ ID NO: 114019 - DNA, 22 bp, synthetic construct
  misc_feature 1..22: note = chemically synthesized
  source 1..22: mol_type = other DNA
cacaatgggagaaaattttcac

SEQ ID NO: 114020 - DNA, 22 bp, synthetic construct
  misc_feature 1..22: note = chemically synthesized
  source 1..22: mol_type = other DNA
tcacaacctactcatctgacaa

SEQ ID NO: 114021 - DNA, 22 bp, synthetic construct
  misc_feature 1..22: note = chemically synthesized
  source 1..22: mol_type = other DNA
cacaacctactcatctgacaaa

SEQ ID NO: 114022 - DNA, 22 bp, synthetic construct
  misc_feature 1..22: note = chemically synthesized
  source 1..22: mol_type = other DNA
acaacctactcatctgacaaag

SEQ ID NO: 114023 - DNA, 22 bp, synthetic construct
  misc_feature 1..22: note = chemically synthesized
  source 1..22: mol_type = other DNA
ctcatctgacaaagggctaata

SEQ ID NO: 114024 - DNA, 22 bp, synthetic construct
  misc_feature 1..22: note = chemically synthesized
  source 1..22: mol_type = other DNA
atctgacaaagggctaatatcc

SEQ ID NO: 114025 - DNA, 22 bp, synthetic construct
  misc_feature 1..22: note = chemically synthesized
  source 1..22: mol_type = other DNA
acaaagggctaatatccagaat

SEQ ID NO: 114026 - DNA, 22 bp, synthetic construct
  misc_feature 1..22: note = chemically synthesized
  source 1..22: mol_type = other DNA
atatccagaatctataatgaac

SEQ ID NO: 114027 - DNA, 22 bp, synthetic construct
  misc_feature 1..22: note = chemically synthesized
  source 1..22: mol_type = other DNA
taatgaactcaaacaaatttac

SEQ ID NO: 114028 - DNA, 22 bp, synthetic construct
  misc_feature 1..22: note = chemically synthesized
  source 1..22: mol_type = other DNA
aaacaaatttacaagaaaaaaa

SEQ ID NO: 114029 - DNA, 22 bp, synthetic construct
  misc_feature 1..22: note = chemically synthesized
  source 1..22: mol_type = other DNA
acaagaaaaaaacaaacagccc

SEQ ID NO: 114030 - DNA, 22 bp, synthetic construct
  misc_feature 1..22: note = chemically synthesized
  source 1..22: mol_type = other DNA
caagaaaaaaacaaacagcccc

SEQ ID NO: 114031 - DNA, 22 bp, synthetic construct
  misc_feature 1..22: note = chemically synthesized
  source 1..22: mol_type = other DNA
ctcaaaagaaaacatttatgca

SEQ ID NO: 114032 - DNA, 22 bp, synthetic construct
  misc_feature 1..22: note = chemically synthesized
  source 1..22: mol_type = other DNA
tcaaaagaaaacatttatgcaa

SEQ ID NO: 114033 - DNA, 22 bp, synthetic construct
  misc_feature 1..22: note = chemically synthesized
  source 1..22: mol_type = other DNA
aaaagaaaacatttatgcaacc

SEQ ID NO: 114034 - DNA, 22 bp, synthetic construct
  misc_feature 1..22: note = chemically synthesized
  source 1..22: mol_type = other DNA
atgcaaccaaaagacacatgaa

SEQ ID NO: 114035 - DNA, 22 bp, synthetic construct
  misc_feature 1..22: note = chemically synthesized
  source 1..22: mol_type = other DNA
tgcaaccaaaagacacatgaaa

SEQ ID NO: 114036 - DNA, 22 bp, synthetic construct
  misc_feature 1..22: note = chemically synthesized
  source 1..22: mol_type = other DNA
atcatcactggccatcagagaa

SEQ ID NO: 114037 - DNA, 22 bp, synthetic construct
  misc_feature 1..22: note = chemically synthesized
  source 1..22: mol_type = other DNA
gccatcagagaaatgcaaatca

SEQ ID NO: 114038 - DNA, 22 bp, synthetic construct
  misc_feature 1..22: note = chemically synthesized
  source 1..22: mol_type = other DNA
ataccagttagaatggcaatca

SEQ ID NO: 114039 - DNA, 22 bp, synthetic construct
  misc_feature 1..22: note = chemically synthesized
  source 1..22: mol_type = other DNA
gaatggcaatcattaaaaagtc

SEQ ID NO: 114040 - DNA, 22 bp, synthetic construct
  misc_feature 1..22: note = chemically synthesized
  source 1..22: mol_type = other DNA
aaaagtcaggaaacaacaggtg

SEQ ID NO: 114041 - DNA, 22 bp, synthetic construct
  misc_feature 1..22: note = chemically synthesized
  source 1..22: mol_type = other DNA
gagaggatgtggagaaatagga

SEQ ID NO: 114042 - DNA, 22 bp, synthetic construct
  misc_feature 1..22: note = chemically synthesized
  source 1..22: mol_type = other DNA
ttacactcttggtgggactgta

SEQ ID NO: 114043 - DNA, 22 bp, synthetic construct
  misc_feature 1..22: note = chemically synthesized
  source 1..22: mol_type = other DNA
tacactcttggtgggactgtaa

SEQ ID NO: 114044 - DNA, 22 bp, synthetic construct
  misc_feature 1..22: note = chemically synthesized
  source 1..22: mol_type = other DNA
acactcttggtgggactgtaaa

SEQ ID NO: 114045 - DNA, 22 bp, synthetic construct
  misc_feature 1..22: note = chemically synthesized
  source 1..22: mol_type = other DNA
cactcttggtgggactgtaaac

SEQ ID NO: 114046 - DNA, 22 bp, synthetic construct
  misc_feature 1..22: note = chemically synthesized
  source 1..22: mol_type = other DNA
ttggtgggactgtaaactagtt

SEQ ID NO: 114047 - DNA, 22 bp, synthetic construct
  misc_feature 1..22: note = chemically synthesized
  source 1..22: mol_type = other DNA
ggtgggactgtaaactagttca

SEQ ID NO: 114048 - DNA, 22 bp, synthetic construct
  misc_feature 1..22: note = chemically synthesized
  source 1..22: mol_type = other DNA
gtgggactgtaaactagttcaa

SEQ ID NO: 114049 - DNA, 22 bp, synthetic construct
  misc_feature 1..22: note = chemically synthesized
  source 1..22: mol_type = other DNA
taaactagttcaaccattgtgg

SEQ ID NO: 114050 - DNA, 22 bp, synthetic construct
  misc_feature 1..22: note = chemically synthesized
  source 1..22: mol_type = other DNA
gttcaaccattgtggaagtcag

SEQ ID NO: 114051 - DNA, 22 bp, synthetic construct
  misc_feature 1..22: note = chemically synthesized
  source 1..22: mol_type = other DNA
aaccattgtggaagtcagtgtg

SEQ ID NO: 114052 - DNA, 22 bp, synthetic construct
  misc_feature 1..22: note = chemically synthesized
  source 1..22: mol_type = other DNA
tggaagtcagtgtggcgattcc

SEQ ID NO: 114053 - DNA, 22 bp, synthetic construct
  misc_feature 1..22: note = chemically synthesized
  source 1..22: mol_type = other DNA
ctcagggatctagaactagaaa

SEQ ID NO: 114054 - DNA, 22 bp, synthetic construct
  misc_feature 1..22: note = chemically synthesized
  source 1..22: mol_type = other DNA
agggatctagaactagaaatac

SEQ ID NO: 114055 - DNA, 22 bp, synthetic construct
  misc_feature 1..22: note = chemically synthesized
  source 1..22: mol_type = other DNA
gaactagaaataccatttgacc

SEQ ID NO: 114056 - DNA, 22 bp, synthetic construct
  misc_feature 1..22: note = chemically synthesized
  source 1..22: mol_type = other DNA
gaaataccatttgacccagcca

SEQ ID NO: 114057 - DNA, 22 bp, synthetic construct
  misc_feature 1..22: note = chemically synthesized
  source 1..22: mol_type = other DNA
gacccagccatcccattactgg

SEQ ID NO: 114058 - DNA, 22 bp, synthetic construct
  misc_feature 1..22: note = chemically synthesized
  source 1..22: mol_type = other DNA
acccagccatcccattactggg

SEQ ID NO: 114059 - DNA, 22 bp, synthetic construct
  misc_feature 1..22: note = chemically synthesized
  source 1..22: mol_type = other DNA
ctgggtatatacccaaaggaat

SEQ ID NO: 114060 - DNA, 22 bp, synthetic construct
  misc_feature 1..22: note = chemically synthesized
  source 1..22: mol_type = other DNA
ggtatatacccaaaggaatata

SEQ ID NO: 114061 - DNA, 22 bp, synthetic construct
  misc_feature 1..22: note = chemically synthesized
  source 1..22: mol_type = other DNA
ctataaagacacatgcacacgt

SEQ ID NO: 114062 - DNA, 22 bp, synthetic construct
  misc_feature 1..22: note = chemically synthesized
  source 1..22: mol_type = other DNA
taaagacacatgcacacgtatg

SEQ ID NO: 114063 - DNA, 22 bp, synthetic construct
  misc_feature 1..22: note = chemically synthesized
  source 1..22: mol_type = other DNA
attgcggtactattcacaatag

SEQ ID NO: 114064 - DNA, 22 bp, synthetic construct
  misc_feature 1..22: note = chemically synthesized
  source 1..22: mol_type = other DNA
ttgcggtactattcacaatagc

SEQ ID NO: 114065 - DNA, 22 bp, synthetic construct
  misc_feature 1..22: note = chemically synthesized
  source 1..22: mol_type = other DNA
cggtactattcacaatagcaaa

SEQ ID NO: 114066 - DNA, 22 bp, synthetic construct
  misc_feature 1..22: note = chemically synthesized
  source 1..22: mol_type = other DNA
ttcacaatagcaaagacttgga

SEQ ID NO: 114067 - DNA, 22 bp, synthetic construct
  misc_feature 1..22: note = chemically synthesized
  source 1..22: mol_type = other DNA
acaatagcaaagacttggaacc

SEQ ID NO: 114068 - DNA, 22 bp, synthetic construct
  misc_feature 1..22: note = chemically synthesized
  source 1..22: mol_type = other DNA
ggaaccaacccaaatgtccaac

SEQ ID NO: 114069 - DNA, 22 bp, synthetic construct
  misc_feature 1..22: note = chemically synthesized
  source 1..22: mol_type = other DNA
gaaccaacccaaatgtccaaca

SEQ ID NO: 114070 - DNA, 22 bp, synthetic construct
  misc_feature 1..22: note = chemically synthesized
  source 1..22: mol_type = other DNA
gattaagaaaatgtggcacata

SEQ ID NO: 114071 - DNA, 22 bp, synthetic construct
  misc_feature 1..22: note = chemically synthesized
  source 1..22: mol_type = other DNA
agaaaatgtggcacatatacac

SEQ ID NO: 114072 - DNA, 22 bp, synthetic construct
  misc_feature 1..22: note = chemically synthesized
  source 1..22: mol_type = other DNA
tgcagccataaaaatgatgagt

SEQ ID NO: 114073 - DNA, 22 bp, synthetic construct
  misc_feature 1..22: note = chemically synthesized
  source 1..22: mol_type = other DNA
atgtcctttgtagggacatgga

SEQ ID NO: 114074 - DNA, 22 bp, synthetic construct
  misc_feature 1..22: note = chemically synthesized
  source 1..22: mol_type = other DNA
tgtagggacatggatgaaattg

SEQ ID NO: 114075 - DNA, 22 bp, synthetic construct
  misc_feature 1..22: note = chemically synthesized
  source 1..22: mol_type = other DNA
gtagggacatggatgaaattgg

SEQ ID NO: 114076 - DNA, 22 bp, synthetic construct
  misc_feature 1..22: note = chemically synthesized
  source 1..22: mol_type = other DNA
tagggacatggatgaaattgga

SEQ ID NO: 114077 - DNA, 22 bp, synthetic construct
  misc_feature 1..22: note = chemically synthesized
  source 1..22: mol_type = other DNA
gaaatcatcattctcagtaaac

SEQ ID NO: 114078 - DNA, 22 bp, synthetic construct
  misc_feature 1..22: note = chemically synthesized
  source 1..22: mol_type = other DNA
tcagtaaactatcgcaaggaca

SEQ ID NO: 114079 - DNA, 22 bp, synthetic construct
  misc_feature 1..22: note = chemically synthesized
  source 1..22: mol_type = other DNA
agtaaactatcgcaaggacaaa

SEQ ID NO: 114080 - DNA, 22 bp, synthetic construct
  misc_feature 1..22: note = chemically synthesized
  source 1..22: mol_type = other DNA
tcgcaaggacaaaaaaccaaac

SEQ ID NO: 114081 - DNA, 22 bp, synthetic construct
  misc_feature 1..22: note = chemically synthesized
  source 1..22: mol_type = other DNA
tcactcatagatgggaactgaa

SEQ ID NO: 114082 - DNA, 22 bp, synthetic construct
  misc_feature 1..22: note = chemically synthesized
  source 1..22: mol_type = other DNA
actcatagatgggaactgaaca

SEQ ID NO: 114083 - DNA, 22 bp, synthetic construct
  misc_feature 1..22: note = chemically synthesized
  source 1..22: mol_type = other DNA
atagatgggaactgaacaatga

SEQ ID NO: 114084 - DNA, 22 bp, synthetic construct
  misc_feature 1..22: note = chemically synthesized
  source 1..22: mol_type = other DNA
aacaatgagaacacatggacac

SEQ ID NO: 114085 - DNA, 22 bp, synthetic construct
  misc_feature 1..22: note = chemically synthesized
  source 1..22: mol_type = other DNA
tggggactgttgtggggtgggg

SEQ ID NO: 114086 - DNA, 22 bp, synthetic construct
  misc_feature 1..22: note = chemically synthesized
  source 1..22: mol_type = other DNA
gggactgttgtggggtgggggt

SEQ ID NO: 114087 - DNA, 22 bp, synthetic construct
  misc_feature 1..22: note = chemically synthesized
  source 1..22: mol_type = other DNA
ttgtggggtgggggtgcaggga

SEQ ID NO: 114088 - DNA, 22 bp, synthetic construct
  misc_feature 1..22: note = chemically synthesized
  source 1..22: mol_type = other DNA
tggggtgggggtgcagggaggg

SEQ ID NO: 114089 - DNA, 22 bp, synthetic construct
  misc_feature 1..22: note = chemically synthesized
  source 1..22: mol_type = other DNA
ggagatatacctaatgctaaat

SEQ ID NO: 114090 - DNA, 22 bp, synthetic construct
  misc_feature 1..22: note = chemically synthesized
  source 1..22: mol_type = other DNA
atgctaaattacgagttaatgg

SEQ ID NO: 114091 - DNA, 22 bp, synthetic construct
  misc_feature 1..22: note = chemically synthesized
  source 1..22: mol_type = other DNA
aattacgagttaatgggtgcag

SEQ ID NO: 114092 - DNA, 22 bp, synthetic construct
  misc_feature 1..22: note = chemically synthesized
  source 1..22: mol_type = other DNA
cgagttaatgggtgcagcacac

SEQ ID NO: 114093 - DNA, 22 bp, synthetic construct
  misc_feature 1..22: note = chemically synthesized
  source 1..22: mol_type = other DNA
atgggtgcagcacaccaacatg

SEQ ID NO: 114094 - DNA, 22 bp, synthetic construct
  misc_feature 1..22: note = chemically synthesized
  source 1..22: mol_type = other DNA
accggcacattatgcacatgta

SEQ ID NO: 114095 - DNA, 22 bp, synthetic construct
  misc_feature 1..22: note = chemically synthesized
  source 1..22: mol_type = other DNA
tgcacatgtaccctaaatctta

SEQ ID NO: 114096 - DNA, 22 bp, synthetic construct
  misc_feature 1..22: note = chemically synthesized
  source 1..22: mol_type = other DNA
aatcttaaagtataataataat

SEQ ID NO: 114097 - DNA, 22 bp, synthetic construct
  misc_feature 1..22: note = chemically synthesized
  source 1..22: mol_type = other DNA
aaagtataataataataataaa

SEQ ID NO: 114098 - DNA, 22 bp, synthetic construct
  misc_feature 1..22: note = chemically synthesized
  source 1..22: mol_type = other DNA
aagtataataataataataaat

SEQ ID NO: 114099 - DNA, 22 bp, synthetic construct
  misc_feature 1..22: note = chemically synthesized
  source 1..22: mol_type = other DNA
cagtttattttttcaggtttcc

SEQ ID NO: 114100 - DNA, 22 bp, synthetic construct
  misc_feature 1..22: note = chemically synthesized
  source 1..22: mol_type = other DNA
attttttcaggtttccgttgtt

SEQ ID NO: 114101 - DNA, 22 bp, synthetic construct
  misc_feature 1..22: note = chemically synthesized
  source 1..22: mol_type = other DNA
ttttttcaggtttccgttgttt

SEQ ID NO: 114102 - DNA, 22 bp, synthetic construct
  misc_feature 1..22: note = chemically synthesized
  source 1..22: mol_type = other DNA
tttcaggtttccgttgtttcct

SEQ ID NO: 114103 - DNA, 22 bp, synthetic construct
  misc_feature 1..22: note = chemically synthesized
  source 1..22: mol_type = other DNA
ttcaggtttccgttgtttcctc

SEQ ID NO: 114104 - DNA, 22 bp, synthetic construct
  misc_feature 1..22: note = chemically synthesized
  source 1..22: mol_type = other DNA
tcaggtttccgttgtttcctct

SEQ ID NO: 114105 - DNA, 22 bp, synthetic construct
  misc_feature 1..22: note = chemically synthesized
  source 1..22: mol_type = other DNA
caggtttccgttgtttcctcta

SEQ ID NO: 114106 - DNA, 22 bp, synthetic construct
  misc_feature 1..22: note = chemically synthesized
  source 1..22: mol_type = other DNA
aggtttccgttgtttcctctaa

SEQ ID NO: 114107 - DNA, 22 bp, synthetic construct
  misc_feature 1..22: note = chemically synthesized
  source 1..22: mol_type = other DNA
ccgttgtttcctctaataattt

SEQ ID NO: 114108 - DNA, 22 bp, synthetic construct
  misc_feature 1..22: note = chemically synthesized
  source 1..22: mol_type = other DNA
cgttgtttcctctaataatttt

SEQ ID NO: 114109 - DNA, 22 bp, synthetic construct
  misc_feature 1..22: note = chemically synthesized
  source 1..22: mol_type = other DNA
tttcctctaataattttcttgt

SEQ ID NO: 114110 - DNA, 22 bp, synthetic construct
  misc_feature 1..22: note = chemically synthesized
  source 1..22: mol_type = other DNA
cctctaataattttcttgtatg

SEQ ID NO: 114111 - DNA, 22 bp, synthetic construct
  misc_feature 1..22: note = chemically synthesized
  source 1..22: mol_type = other DNA
ctctaataattttcttgtatgc

SEQ ID NO: 114112 - DNA, 22 bp, synthetic construct
  misc_feature 1..22: note = chemically synthesized
  source 1..22: mol_type = other DNA
taataattttcttgtatgcaat

SEQ ID NO: 114113 - DNA, 22 bp, synthetic construct
  misc_feature 1..22: note = chemically synthesized
  source 1..22: mol_type = other DNA
ataattttcttgtatgcaatgt

SEQ ID NO: 114114 - DNA, 22 bp, synthetic construct
  misc_feature 1..22: note = chemically synthesized
  source 1..22: mol_type = other DNA
tcttgtatgcaatgtgtctttt

SEQ ID NO: 114115 - DNA, 22 bp, synthetic construct
  misc_feature 1..22: note = chemically synthesized
  source 1..22: mol_type = other DNA
cttgtatgcaatgtgtcttttt

SEQ ID NO: 114116 - DNA, 22 bp, synthetic construct
  misc_feature 1..22: note = chemically synthesized
  source 1..22: mol_type = other DNA
ttgtatgcaatgtgtctttttc

SEQ ID NO: 114117 - DNA, 22 bp, synthetic construct
  misc_feature 1..22: note = chemically synthesized
  source 1..22: mol_type = other DNA
gtatgcaatgtgtctttttcta

SEQ ID NO: 114118 - DNA, 22 bp, synthetic construct
  misc_feature 1..22: note = chemically synthesized
  source 1..22: mol_type = other DNA
tatgcaatgtgtctttttctat

SEQ ID NO: 114119 - DNA, 22 bp, synthetic construct
  misc_feature 1..22: note = chemically synthesized
  source 1..22: mol_type = other DNA
tttctatgtctgcttttaagat

SEQ ID NO: 114120 - DNA, 22 bp, synthetic construct
  misc_feature 1..22: note = chemically synthesized
  source 1..22: mol_type = other DNA
ttctatgtctgcttttaagatt

SEQ ID NO: 114121 - DNA, 22 bp, synthetic construct
  misc_feature 1..22: note = chemically synthesized
  source 1..22: mol_type = other DNA
tctatgtctgcttttaagattg

SEQ ID NO: 114122 - DNA, 22 bp, synthetic construct
  misc_feature 1..22: note = chemically synthesized
  source 1..22: mol_type = other DNA
ctatgtctgcttttaagattgg

SEQ ID NO: 114123 - DNA, 22 bp, synthetic construct
  misc_feature 1..22: note = chemically synthesized
  source 1..22: mol_type = other DNA
tatgtctgcttttaagattggc

SEQ ID NO: 114124 - DNA, 22 bp, synthetic construct
  misc_feature 1..22: note = chemically synthesized
  source 1..22: mol_type = other DNA
tgtctgcttttaagattggcat

SEQ ID NO: 114125 - DNA, 22 bp, synthetic construct
  misc_feature 1..22: note = chemically synthesized
  source 1..22: mol_type = other DNA
cttttaagattggcatacattt

SEQ ID NO: 114126 - DNA, 22 bp, synthetic construct
  misc_feature 1..22: note = chemically synthesized
  source 1..22: mol_type = other DNA
ttaagattggcatacatttgtt

SEQ ID NO: 114127 - DNA, 22 bp, synthetic construct
  misc_feature 1..22: note = chemically synthesized
  source 1..22: mol_type = other DNA
taagattggcatacatttgttg

SEQ ID NO: 114128 - DNA, 22 bp, synthetic construct
  misc_feature 1..22: note = chemically synthesized
  source 1..22: mol_type = other DNA
aagattggcatacatttgttgt

SEQ ID NO: 114129 - DNA, 22 bp, synthetic construct
  misc_feature 1..22: note = chemically synthesized
  source 1..22: mol_type = other DNA
agattggcatacatttgttgtt

SEQ ID NO: 114130 - DNA, 22 bp, synthetic construct
  misc_feature 1..22: note = chemically synthesized
  source 1..22: mol_type = other DNA
gcatacatttgttgtttatgcc

SEQ ID NO: 114131 - DNA, 22 bp, synthetic construct
  misc_feature 1..22: note = chemically synthesized
  source 1..22: mol_type = other DNA
gttgtttatgccatttgtaaga

SEQ ID NO: 114132 - DNA, 22 bp, synthetic construct
  misc_feature 1..22: note = chemically synthesized
  source 1..22: mol_type = other DNA
ttgtttatgccatttgtaagat

SEQ ID NO: 114133 - DNA, 22 bp, synthetic construct
  misc_feature 1..22: note = chemically synthesized
  source 1..22: mol_type = other DNA
tttatgccatttgtaagatatg

SEQ ID NO: 114134 - DNA, 22 bp, synthetic construct
  misc_feature 1..22: note = chemically synthesized
  source 1..22: mol_type = other DNA
atgccatttgtaagatatgcat

SEQ ID NO: 114135 - DNA, 22 bp, synthetic construct
  misc_feature 1..22: note = chemically synthesized
  source 1..22: mol_type = other DNA
tgccatttgtaagatatgcatt

SEQ ID NO: 114136 - DNA, 22 bp, synthetic construct
  misc_feature 1..22: note = chemically synthesized
  source 1..22: mol_type = other DNA
gtaagatatgcatttagttgtg

SEQ ID NO: 114137 - DNA, 22 bp, synthetic construct
  misc_feature 1..22: note = chemically synthesized
  source 1..22: mol_type = other DNA
taagatatgcatttagttgtgt

SEQ ID NO: 114138 - DNA, 22 bp, synthetic construct
  misc_feature 1..22: note = chemically synthesized
  source 1..22: mol_type = other DNA
agttgtgttttattttttaatt

SEQ ID NO: 114139 - DNA, 22 bp, synthetic construct
  misc_feature 1..22: note = chemically synthesized
  source 1..22: mol_type = other DNA
gttgtgttttattttttaattg

SEQ ID NO: 114140 - DNA, 22 bp, synthetic construct
  misc_feature 1..22: note = chemically synthesized
  source 1..22: mol_type = other DNA
tgttttattttttaattgacat

SEQ ID NO: 114141 - DNA, 22 bp, synthetic construct
  misc_feature 1..22: note = chemically synthesized
  source 1..22: mol_type = other DNA
tattttttaattgacattgctc

SEQ ID NO: 114142 - DNA, 22 bp, synthetic construct
  misc_feature 1..22: note = chemically synthesized
  source 1..22: mol_type = other DNA
attttttaattgacattgctca

SEQ ID NO: 114143 - DNA, 22 bp, synthetic construct
  misc_feature 1..22: note = chemically synthesized
  source 1..22: mol_type = other DNA
ttttttaattgacattgctcaa

SEQ ID NO: 114144 - DNA, 22 bp, synthetic construct
  misc_feature 1..22: note = chemically synthesized
  source 1..22: mol_type = other DNA
tttaattgacattgctcaaggt

SEQ ID NO: 114145 - DNA, 22 bp, synthetic construct
  misc_feature 1..22: note = chemically synthesized
  source 1..22: mol_type = other DNA
ttaattgacattgctcaaggtt

SEQ ID NO: 114146 - DNA, 22 bp, synthetic construct
  misc_feature 1..22: note = chemically synthesized
  source 1..22: mol_type = other DNA
taattgacattgctcaaggtta

SEQ ID NO: 114147 - DNA, 22 bp, synthetic construct
  misc_feature 1..22: note = chemically synthesized
  source 1..22: mol_type = other DNA
aattgacattgctcaaggttag

SEQ ID NO: 114148 - DNA, 22 bp, synthetic construct
  misc_feature 1..22: note = chemically synthesized
  source 1..22: mol_type = other DNA
attgacattgctcaaggttagc

SEQ ID NO: 114149 - DNA, 22 bp, synthetic construct
  misc_feature 1..22: note = chemically synthesized
  source 1..22: mol_type = other DNA
acattgctcaaggttagctaaa

SEQ ID NO: 114150 - DNA, 22 bp, synthetic construct
  misc_feature 1..22: note = chemically synthesized
  source 1..22: mol_type = other DNA
ctcaaggttagctaaagatatg

SEQ ID NO: 114151 - DNA, 22 bp, synthetic construct
  misc_feature 1..22: note = chemically synthesized
  source 1..22: mol_type = other DNA
aaggttagctaaagatatgaat

SEQ ID NO: 114152 - DNA, 22 bp, synthetic construct
  misc_feature 1..22: note = chemically synthesized
  source 1..22: mol_type = other DNA
gctaaagatatgaattaataga

SEQ ID NO: 114153 - DNA, 22 bp, synthetic construct
  misc_feature 1..22: note = chemically synthesized
  source 1..22: mol_type = other DNA
aagatatgaattaatagatttt

SEQ ID NO: 114154 - DNA, 22 bp, synthetic construct
  misc_feature 1..22: note = chemically synthesized
  source 1..22: mol_type = other DNA
atagattttatgtccagatgtt

SEQ ID NO: 114155 - DNA, 22 bp, synthetic construct
  misc_feature 1..22: note = chemically synthesized
  source 1..22: mol_type = other DNA
tatgtccagatgttgaaacatt

SEQ ID NO: 114156 - DNA, 22 bp, synthetic construct
  misc_feature 1..22: note = chemically synthesized
  source 1..22: mol_type = other DNA
atgtccagatgttgaaacattc

SEQ ID NO: 114157 - DNA, 22 bp, synthetic construct
  misc_feature 1..22: note = chemically synthesized
  source 1..22: mol_type = other DNA
tgtccagatgttgaaacattca

SEQ ID NO: 114158 - DNA, 22 bp, synthetic construct
  misc_feature 1..22: note = chemically synthesized
  source 1..22: mol_type = other DNA
aaacattcagtcaataattcct

SEQ ID NO: 114159 - DNA, 22 bp, synthetic construct
  misc_feature 1..22: note = chemically synthesized
  source 1..22: mol_type = other DNA
agtcaataattcctcaaaaaac

SEQ ID NO: 114160 - DNA, 22 bp, synthetic construct
  misc_feature 1..22: note = chemically synthesized
  source 1..22: mol_type = other DNA
ctcaaaaaacgtttaatccatt

SEQ ID NO: 114161 - DNA, 22 bp, synthetic construct
  misc_feature 1..22: note = chemically synthesized
  source 1..22: mol_type = other DNA
aaaaaacgtttaatccattttt

SEQ ID NO: 114162 - DNA, 22 bp, synthetic construct
  misc_feature 1..22: note = chemically synthesized
  source 1..22: mol_type = other DNA
aatccattttttgtttcctttt

SEQ ID NO: 114163 - DNA, 22 bp, synthetic construct
  misc_feature 1..22: note = chemically synthesized
  source 1..22: mol_type = other DNA
atccattttttgtttcctttta

SEQ ID NO: 114164 - DNA, 22 bp, synthetic construct
  misc_feature 1..22: note = chemically synthesized
  source 1..22: mol_type = other DNA
tttgtttccttttagaattcta

SEQ ID NO: 114165 - DNA, 22 bp, synthetic construct
  misc_feature 1..22: note = chemically synthesized
  source 1..22: mol_type = other DNA
ttgtttccttttagaattctaa

SEQ ID NO: 114166 - DNA, 22 bp, synthetic construct
  misc_feature 1..22: note = chemically synthesized
  source 1..22: mol_type = other DNA
tgtttccttttagaattctaat

SEQ ID NO: 114167 - DNA, 22 bp, synthetic construct
  misc_feature 1..22: note = chemically synthesized
  source 1..22: mol_type = other DNA
gtttccttttagaattctaatt

SEQ ID NO: 114168 - DNA, 22 bp, synthetic construct
  misc_feature 1..22: note = chemically synthesized
  source 1..22: mol_type = other DNA
tttccttttagaattctaattt

SEQ ID NO: 114169 - DNA, 22 bp, synthetic construct
  misc_feature 1..22: note = chemically synthesized
  source 1..22: mol_type = other DNA
ccttttagaattctaatttcac

SEQ ID NO: 114170 - DNA, 22 bp, synthetic construct
  misc_feature 1..22: note = chemically synthesized
  source 1..22: mol_type = other DNA
cttttagaattctaatttcaca

SEQ ID NO: 114171 - DNA, 22 bp, synthetic construct
  misc_feature 1..22: note = chemically synthesized
  source 1..22: mol_type = other DNA
ttagaattctaatttcacatat

SEQ ID NO: 114172 - DNA, 22 bp, synthetic construct
  misc_feature 1..22: note = chemically synthesized
  source 1..22: mol_type = other DNA
tagaattctaatttcacatatg

SEQ ID NO: 114173 - DNA, 22 bp, synthetic construct
  misc_feature 1..22: note = chemically synthesized
  source 1..22: mol_type = other DNA
agaattctaatttcacatatgg

SEQ ID NO: 114174 - DNA, 22 bp, synthetic construct
  misc_feature 1..22: note = chemically synthesized
  source 1..22: mol_type = other DNA
gaattctaatttcacatatggt

SEQ ID NO: 114175 - DNA, 22 bp, synthetic construct
  misc_feature 1..22: note = chemically synthesized
  source 1..22: mol_type = other DNA
taatttcacatatggtggacag

SEQ ID NO: 114176 - DNA, 22 bp, synthetic construct
  misc_feature 1..22: note = chemically synthesized
  source 1..22: mol_type = other DNA
atttcacatatggtggacagct

SEQ ID NO: 114177 - DNA, 22 bp, synthetic construct
  misc_feature 1..22: note = chemically synthesized
  source 1..22: mol_type = other DNA
cacatatggtggacagcttgat

SEQ ID NO: 114178 - DNA, 22 bp, synthetic construct
  misc_feature 1..22: note = chemically synthesized
  source 1..22: mol_type = other DNA
acatatggtggacagcttgata

SEQ ID NO: 114179 - DNA, 22 bp, synthetic construct
  misc_feature 1..22: note = chemically synthesized
  source 1..22: mol_type = other DNA
gatactttcccatgagtctggc

SEQ ID NO: 114180 - DNA, 22 bp, synthetic construct
  misc_feature 1..22: note = chemically synthesized
  source 1..22: mol_type = other DNA
atactttcccatgagtctggct

SEQ ID NO: 114181 - DNA, 22 bp, synthetic construct
  misc_feature 1..22: note = chemically synthesized
  source 1..22: mol_type = other DNA
tcccatgagtctggctttctgg

SEQ ID NO: 114182 - DNA, 22 bp, synthetic construct
  misc_feature 1..22: note = chemically synthesized
  source 1..22: mol_type = other DNA
cccatgagtctggctttctggg

SEQ ID NO: 114183 - DNA, 22 bp, synthetic construct
  misc_feature 1..22: note = chemically synthesized
  source 1..22: mol_type = other DNA
ccatgagtctggctttctgggt

SEQ ID NO: 114184 - DNA, 22 bp, synthetic construct
  misc_feature 1..22: note = chemically synthesized
  source 1..22: mol_type = other DNA
gctttctgggtttctctccctg

SEQ ID NO: 114185 - DNA, 22 bp, synthetic construct
  misc_feature 1..22: note = chemically synthesized
  source 1..22: mol_type = other DNA
tctgggtttctctccctggcgt

SEQ ID NO: 114186 - DNA, 22 bp, synthetic construct
  misc_feature 1..22: note = chemically synthesized
  source 1..22: mol_type = other DNA
ctgggtttctctccctggcgtc

SEQ ID NO: 114187 - DNA, 22 bp, synthetic construct
  misc_feature 1..22: note = chemically synthesized
  source 1..22: mol_type = other DNA
tgggtttctctccctggcgtcc

SEQ ID NO: 114188 - DNA, 22 bp, synthetic construct
  misc_feature 1..22: note = chemically synthesized
  source 1..22: mol_type = other DNA
ggtttctctccctggcgtcctc

SEQ ID NO: 114189 - DNA, 22 bp, synthetic construct
  misc_feature 1..22: note = chemically synthesized
  source 1..22: mol_type = other DNA
ctctccctggcgtcctctctca

SEQ ID NO: 114190 - DNA, 22 bp, synthetic construct
  misc_feature 1..22: note = chemically synthesized
  source 1..22: mol_type = other DNA
tctccctggcgtcctctctcat

SEQ ID NO: 114191 - DNA, 22 bp, synthetic construct
  misc_feature 1..22: note = chemically synthesized
  source 1..22: mol_type = other DNA
tccctggcgtcctctctcatca

SEQ ID NO: 114192 - DNA, 22 bp, synthetic construct
  misc_feature 1..22: note = chemically synthesized
  source 1..22: mol_type = other DNA
cctggcgtcctctctcatcatg

SEQ ID NO: 114193 - DNA, 22 bp, synthetic construct
  misc_feature 1..22: note = chemically synthesized
  source 1..22: mol_type = other DNA
gcgtcctctctcatcatgtgat

SEQ ID NO: 114194 - DNA, 22 bp, synthetic construct
  misc_feature 1..22: note = chemically synthesized
  source 1..22: mol_type = other DNA
tctcatcatgtgatctccttgc

SEQ ID NO: 114195 - DNA, 22 bp, synthetic construct
  misc_feature 1..22: note = chemically synthesized
  source 1..22: mol_type = other DNA
tcatcatgtgatctccttgcat

SEQ ID NO: 114196 - DNA, 22 bp, synthetic construct
  misc_feature 1..22: note = chemically synthesized
  source 1..22: mol_type = other DNA
atcatgtgatctccttgcatgc

SEQ ID NO: 114197 - DNA, 22 bp, synthetic construct
  misc_feature 1..22: note = chemically synthesized
  source 1..22: mol_type = other DNA
cttgcatgcacttgctctttgt

SEQ ID NO: 114198 - DNA, 22 bp, synthetic construct
  misc_feature 1..22: note = chemically synthesized
  source 1..22: mol_type = other DNA
gcatgcacttgctctttgtctg

SEQ ID NO: 114199 - DNA, 22 bp, synthetic construct
  misc_feature 1..22: note = chemically synthesized
  source 1..22: mol_type = other DNA
catgcacttgctctttgtctgc

SEQ ID NO: 114200 - DNA, 22 bp, synthetic construct
  misc_feature 1..22: note = chemically synthesized
  source 1..22: mol_type = other DNA
gctctttgtctgctttctgcca

SEQ ID NO: 114201 - DNA, 22 bp, synthetic construct
  misc_feature 1..22: note = chemically synthesized
  source 1..22: mol_type = other DNA
ctctttgtctgctttctgccat

SEQ ID NO: 114202 - DNA, 22 bp, synthetic construct
  misc_feature 1..22: note = chemically synthesized
  source 1..22: mol_type = other DNA
tttgtctgctttctgccatgtt

SEQ ID NO: 114203 - DNA, 22 bp, synthetic construct
  misc_feature 1..22: note = chemically synthesized
  source 1..22: mol_type = other DNA
tgtctgctttctgccatgtttg

SEQ ID NO: 114204 - DNA, 22 bp, synthetic construct
  misc_feature 1..22: note = chemically synthesized
  source 1..22: mol_type = other DNA
gtctgctttctgccatgtttgg

SEQ ID NO: 114205 - DNA, 22 bp, synthetic construct
  misc_feature 1..22: note = chemically synthesized
  source 1..22: mol_type = other DNA
tctgctttctgccatgtttgga

SEQ ID NO: 114206 - DNA, 22 bp, synthetic construct
  misc_feature 1..22: note = chemically synthesized
  source 1..22: mol_type = other DNA
ctttctgccatgtttggaacca

SEQ ID NO: 114207 - DNA, 22 bp, synthetic construct
  misc_feature 1..22: note = chemically synthesized
  source 1..22: mol_type = other DNA
tctgccatgtttggaaccagca

SEQ ID NO: 114208 - DNA, 22 bp, synthetic construct
  misc_feature 1..22: note = chemically synthesized
  source 1..22: mol_type = other DNA
ctgccatgtttggaaccagcat

SEQ ID NO: 114209 - DNA, 22 bp, synthetic construct
  misc_feature 1..22: note = chemically synthesized
  source 1..22: mol_type = other DNA
tgccatgtttggaaccagcatg

SEQ ID NO: 114210 - DNA, 22 bp, synthetic construct
  misc_feature 1..22: note = chemically synthesized
  source 1..22: mol_type = other DNA
ccatgtttggaaccagcatgag

SEQ ID NO: 114211 - DNA, 22 bp, synthetic construct
  misc_feature 1..22: note = chemically synthesized
  source 1..22: mol_type = other DNA
ggaaccagcatgagacctttat

SEQ ID NO: 114212 - DNA, 22 bp, synthetic construct
  misc_feature 1..22: note = chemically synthesized
  source 1..22: mol_type = other DNA
gaaccagcatgagacctttatc

SEQ ID NO: 114213 - DNA, 22 bp, synthetic construct
  misc_feature 1..22: note = chemically synthesized
  source 1..22: mol_type = other DNA
tatcagatgcaaccgcccgatc

SEQ ID NO: 114214 - DNA, 22 bp, synthetic construct
  misc_feature 1..22: note = chemically synthesized
  source 1..22: mol_type = other DNA
atcagatgcaaccgcccgatct

SEQ ID NO: 114215 - DNA, 22 bp, synthetic construct
  misc_feature 1..22: note = chemically synthesized
  source 1..22: mol_type = other DNA
tcagatgcaaccgcccgatctt

SEQ ID NO: 114216 - DNA, 22 bp, synthetic construct
  misc_feature 1..22: note = chemically synthesized
  source 1..22: mol_type = other DNA
ggacttttaagtcaccagaatc

SEQ ID NO: 114217 - DNA, 22 bp, synthetic construct
  misc_feature 1..22: note = chemically synthesized
  source 1..22: mol_type = other DNA
gacttttaagtcaccagaatca

SEQ ID NO: 114218 - DNA, 22 bp, synthetic construct
  misc_feature 1..22: note = chemically synthesized
  source 1..22: mol_type = other DNA
ttaagtcaccagaatcatgaac

SEQ ID NO: 114219 - DNA, 22 bp, synthetic construct
  misc_feature 1..22: note = chemically synthesized
  source 1..22: mol_type = other DNA
taagtcaccagaatcatgaacc

SEQ ID NO: 114220 - DNA, 22 bp, synthetic construct
  misc_feature 1..22: note = chemically synthesized
  source 1..22: mol_type = other DNA
aagtcaccagaatcatgaacca

SEQ ID NO: 114221 - DNA, 22 bp, synthetic construct
  misc_feature 1..22: note = chemically synthesized
  source 1..22: mol_type = other DNA
agtcaccagaatcatgaaccaa

SEQ ID NO: 114222 - DNA, 22 bp, synthetic construct
  misc_feature 1..22: note = chemically synthesized
  source 1..22: mol_type = other DNA
taaaaaaaaaaaataagctacc

SEQ ID NO: 114223 - DNA, 22 bp, synthetic construct
  misc_feature 1..22: note = chemically synthesized
  source 1..22: mol_type = other DNA
aaaaaaaaaaaataagctaccc

SEQ ID NO: 114224 - DNA, 22 bp, synthetic construct
  misc_feature 1..22: note = chemically synthesized
  source 1..22: mol_type = other DNA
aaaaaaaaaaataagctaccca

SEQ ID NO: 114225 - DNA, 22 bp, synthetic construct
  misc_feature 1..22: note = chemically synthesized
  source 1..22: mol_type = other DNA
cccagactcaggtactctgtta

SEQ ID NO: 114226 - DNA, 22 bp, synthetic construct
  misc_feature 1..22: note = chemically synthesized
  source 1..22: mol_type = other DNA
aggtactctgttatagcaaatc

SEQ ID NO: 114227 - DNA, 22 bp, synthetic construct
  misc_feature 1..22: note = chemically synthesized
  source 1..22: mol_type = other DNA
tgttatagcaaatcaaaatatg

SEQ ID NO: 114228 - DNA, 22 bp, synthetic construct
  misc_feature 1..22: note = chemically synthesized
  source 1..22: mol_type = other DNA
ttatagcaaatcaaaatatgca

SEQ ID NO: 114229 - DNA, 22 bp, synthetic construct
  misc_feature 1..22: note = chemically synthesized
  source 1..22: mol_type = other DNA
tagcaaatcaaaatatgcaaaa

SEQ ID NO: 114230 - DNA, 22 bp, synthetic construct
  misc_feature 1..22: note = chemically synthesized
  source 1..22: mol_type = other DNA
aaactttagcccaacttggagt

SEQ ID NO: 114231 - DNA, 22 bp, synthetic construct
  misc_feature 1..22: note = chemically synthesized
  source 1..22: mol_type = other DNA
tagcccaacttggagtggggag

SEQ ID NO: 114232 - DNA, 22 bp, synthetic construct
  misc_feature 1..22: note = chemically synthesized
  source 1..22: mol_type = other DNA
agcccaacttggagtggggaga

SEQ ID NO: 114233 - DNA, 22 bp, synthetic construct
  misc_feature 1..22: note = chemically synthesized
  source 1..22: mol_type = other DNA
gcccaacttggagtggggagaa

SEQ ID NO: 114234 - DNA, 22 bp, synthetic construct
  misc_feature 1..22: note = chemically synthesized
  source 1..22: mol_type = other DNA
ggagtggggagaagagatggtt

SEQ ID NO: 114235 - DNA, 22 bp, synthetic construct
  misc_feature 1..22: note = chemically synthesized
  source 1..22: mol_type = other DNA
gagtggggagaagagatggttt

SEQ ID NO: 114236 - DNA, 22 bp, synthetic construct
  misc_feature 1..22: note = chemically synthesized
  source 1..22: mol_type = other DNA
cccaaaaggggtctctctgaaa

SEQ ID NO: 114237 - DNA, 22 bp, synthetic construct
  misc_feature 1..22: note = chemically synthesized
  source 1..22: mol_type = other DNA
ccaaaaggggtctctctgaaaa

SEQ ID NO: 114238 - DNA, 22 bp, synthetic construct
  misc_feature 1..22: note = chemically synthesized
  source 1..22: mol_type = other DNA
tctgaaaagttttcacaatgaa

SEQ ID NO: 114239 - DNA, 22 bp, synthetic construct
  misc_feature 1..22: note = chemically synthesized
  source 1..22: mol_type = other DNA
tgaaaagttttcacaatgaaaa

SEQ ID NO: 114240 - DNA, 22 bp, synthetic construct
  misc_feature 1..22: note = chemically synthesized
  source 1..22: mol_type = other DNA
aaaagttttcacaatgaaaatg

SEQ ID NO: 114241 - DNA, 22 bp, synthetic construct
  misc_feature 1..22: note = chemically synthesized
  source 1..22: mol_type = other DNA
tcacaatgaaaatgaaaatcgg

SEQ ID NO: 114242 - DNA, 22 bp, synthetic construct
  misc_feature 1..22: note = chemically synthesized
  source 1..22: mol_type = other DNA
cacaatgaaaatgaaaatcggt

SEQ ID NO: 114243 - DNA, 22 bp, synthetic construct
  misc_feature 1..22: note = chemically synthesized
  source 1..22: mol_type = other DNA
acaatgaaaatgaaaatcggtt

SEQ ID NO: 114244 - DNA, 22 bp, synthetic construct
  misc_feature 1..22: note = chemically synthesized
  source 1..22: mol_type = other DNA
cctttcataatgactgaagaga

SEQ ID NO: 114245 - DNA, 22 bp, synthetic construct
  misc_feature 1..22: note = chemically synthesized
  source 1..22: mol_type = other DNA
tcataatgactgaagagaggta

SEQ ID NO: 114246 - DNA, 22 bp, synthetic construct
  misc_feature 1..22: note = chemically synthesized
  source 1..22: mol_type = other DNA
cataatgactgaagagaggtag

SEQ ID NO: 114247 - DNA, 22 bp, synthetic construct
  misc_feature 1..22: note = chemically synthesized
  source 1..22: mol_type = other DNA
ataatgactgaagagaggtagg

SEQ ID NO: 114248 - DNA, 22 bp, synthetic construct
  misc_feature 1..22: note = chemically synthesized
  source 1..22: mol_type = other DNA
aagagaggtaggatgttacgaa

SEQ ID NO: 114249 - DNA, 22 bp, synthetic construct
  misc_feature 1..22: note = chemically synthesized
  source 1..22: mol_type = other DNA
cgaaagaaggcgtttctgaaag

SEQ ID NO: 114250 - DNA, 22 bp, synthetic construct
  misc_feature 1..22: note = chemically synthesized
  source 1..22: mol_type = other DNA
ctgaaagagttgctgtgggaag

SEQ ID NO: 114251 - DNA, 22 bp, synthetic construct
  misc_feature 1..22: note = chemically synthesized
  source 1..22: mol_type = other DNA
tgaaagagttgctgtgggaaga

SEQ ID NO: 114252 - DNA, 22 bp, synthetic construct
  misc_feature 1..22: note = chemically synthesized
  source 1..22: mol_type = other DNA
aaagagttgctgtgggaagatg

SEQ ID NO: 114253 - DNA, 22 bp, synthetic construct
  misc_feature 1..22: note = chemically synthesized
  source 1..22: mol_type = other DNA
ctgtgggaagatgtggagactt

SEQ ID NO: 114254 - DNA, 22 bp, synthetic construct
  misc_feature 1..22: note = chemically synthesized
  source 1..22: mol_type = other DNA
tgggaagatgtggagacttctc

SEQ ID NO: 114255 - DNA, 22 bp, synthetic construct
  misc_feature 1..22: note = chemically synthesized
  source 1..22: mol_type = other DNA
ctctgtaaaccttccagactct

SEQ ID NO: 114256 - DNA, 22 bp, synthetic construct
  misc_feature 1..22: note = chemically synthesized
  source 1..22: mol_type = other DNA
tctgtaaaccttccagactctc

SEQ ID NO: 114257 - DNA, 22 bp, synthetic construct
  misc_feature 1..22: note = chemically synthesized
  source 1..22: mol_type = other DNA
tgtaaaccttccagactctctg

SEQ ID NO: 114258 - DNA, 22 bp, synthetic construct
  misc_feature 1..22: note = chemically synthesized
  source 1..22: mol_type = other DNA
taaaccttccagactctctgtg

SEQ ID NO: 114259 - DNA, 22 bp, synthetic construct
  misc_feature 1..22: note = chemically synthesized
  source 1..22: mol_type = other DNA
ccagactctctgtgcacacaca

SEQ ID NO: 114260 - DNA, 22 bp, synthetic construct
  misc_feature 1..22: note = chemically synthesized
  source 1..22: mol_type = other DNA
cagactctctgtgcacacacag

SEQ ID NO: 114261 - DNA, 22 bp, synthetic construct
  misc_feature 1..22: note = chemically synthesized
  source 1..22: mol_type = other DNA
tctgtgcacacacagatgcagg

SEQ ID NO: 114262 - DNA, 22 bp, synthetic construct
  misc_feature 1..22: note = chemically synthesized
  source 1..22: mol_type = other DNA
tgtgcacacacagatgcaggtg

SEQ ID NO: 114263 - DNA, 22 bp, synthetic construct
  misc_feature 1..22: note = chemically synthesized
  source 1..22: mol_type = other DNA
tgcacacacagatgcaggtgtc

SEQ ID NO: 114264 - DNA, 22 bp, synthetic construct
  misc_feature 1..22: note = chemically synthesized
  source 1..22: mol_type = other DNA
caacatgaaaatttcttagggg

SEQ ID NO: 114265 - DNA, 22 bp, synthetic construct
  misc_feature 1..22: note = chemically synthesized
  source 1..22: mol_type = other DNA
cttaggggctgtggaccagtcc

SEQ ID NO: 114266 - DNA, 22 bp, synthetic construct
  misc_feature 1..22: note = chemically synthesized
  source 1..22: mol_type = other DNA
ttaggggctgtggaccagtcca

SEQ ID NO: 114267 - DNA, 22 bp, synthetic construct
  misc_feature 1..22: note = chemically synthesized
  source 1..22: mol_type = other DNA
aggggctgtggaccagtccaga

SEQ ID NO: 114268 - DNA, 22 bp, synthetic construct
  misc_feature 1..22: note = chemically synthesized
  source 1..22: mol_type = other DNA
ggggctgtggaccagtccagaa

SEQ ID NO: 114269 - DNA, 22 bp, synthetic construct
  misc_feature 1..22: note = chemically synthesized
  source 1..22: mol_type = other DNA
tggaccagtccagaagaccctt

SEQ ID NO: 114270 - DNA, 22 bp, synthetic construct
  misc_feature 1..22: note = chemically synthesized
  source 1..22: mol_type = other DNA
ttggcaatcctaacttctgtgg

SEQ ID NO: 114271 - DNA, 22 bp, synthetic construct
  misc_feature 1..22: note = chemically synthesized
  source 1..22: mol_type = other DNA
tggcaatcctaacttctgtggg

SEQ ID NO: 114272 - DNA, 22 bp, synthetic construct
  misc_feature 1..22: note = chemically synthesized
  source 1..22: mol_type = other DNA
ggcaatcctaacttctgtgggt

SEQ ID NO: 114273 - DNA, 22 bp, synthetic construct
  misc_feature 1..22: note = chemically synthesized
  source 1..22: mol_type = other DNA
gcaatcctaacttctgtgggtc

SEQ ID NO: 114274 - DNA, 22 bp, synthetic construct
  misc_feature 1..22: note = chemically synthesized
  source 1..22: mol_type = other DNA
acttctgtgggtctctccagtc

SEQ ID NO: 114275 - DNA, 22 bp, synthetic construct
  misc_feature 1..22: note = chemically synthesized
  source 1..22: mol_type = other DNA
ctgtgggtctctccagtctgaa

SEQ ID NO: 114276 - DNA, 22 bp, synthetic construct
  misc_feature 1..22: note = chemically synthesized
  source 1..22: mol_type = other DNA
tgtgggtctctccagtctgaaa

SEQ ID NO: 114277 - DNA, 22 bp, synthetic construct
  misc_feature 1..22: note = chemically synthesized
  source 1..22: mol_type = other DNA
tgggtctctccagtctgaaaga

SEQ ID NO: 114278 - DNA, 22 bp, synthetic construct
  misc_feature 1..22: note = chemically synthesized
  source 1..22: mol_type = other DNA
tccagtctgaaagacccgcatc

SEQ ID NO: 114279 - DNA, 22 bp, synthetic construct
  misc_feature 1..22: note = chemically synthesized
  source 1..22: mol_type = other DNA
cagtctgaaagacccgcatcga

SEQ ID NO: 114280 - DNA, 22 bp, synthetic construct
  misc_feature 1..22: note = chemically synthesized
  source 1..22: mol_type = other DNA
aaagacccgcatcgatctcaca

SEQ ID NO: 114281 - DNA, 22 bp, synthetic construct
  misc_feature 1..22: note = chemically synthesized
  source 1..22: mol_type = other DNA
acaccacaaaatggagttcttc

SEQ ID NO: 114282 - DNA, 22 bp, synthetic construct
  misc_feature 1..22: note = chemically synthesized
  source 1..22: mol_type = other DNA
ttctgggaaggacttgttctaa

SEQ ID NO: 114283 - DNA, 22 bp, synthetic construct
  misc_feature 1..22: note = chemically synthesized
  source 1..22: mol_type = other DNA
ctgggaaggacttgttctaaca

SEQ ID NO: 114284 - DNA, 22 bp, synthetic construct
  misc_feature 1..22: note = chemically synthesized
  source 1..22: mol_type = other DNA
tgggaaggacttgttctaacag

SEQ ID NO: 114285 - DNA, 22 bp, synthetic construct
  misc_feature 1..22: note = chemically synthesized
  source 1..22: mol_type = other DNA
ggaaggacttgttctaacaggc

SEQ ID NO: 114286 - DNA, 22 bp, synthetic construct
  misc_feature 1..22: note = chemically synthesized
  source 1..22: mol_type = other DNA
gttctaacaggcctgagagtga

SEQ ID NO: 114287 - DNA, 22 bp, synthetic construct
  misc_feature 1..22: note = chemically synthesized
  source 1..22: mol_type = other DNA
ttctaacaggcctgagagtgag

SEQ ID NO: 114288 - DNA, 22 bp, synthetic construct
  misc_feature 1..22: note = chemically synthesized
  source 1..22: mol_type = other DNA
taacaggcctgagagtgaggtg

SEQ ID NO: 114289 - DNA, 22 bp, synthetic construct
  misc_feature 1..22: note = chemically synthesized
  source 1..22: mol_type = other DNA
acaggcctgagagtgaggtgac

SEQ ID NO: 114290 - DNA, 22 bp, synthetic construct
  misc_feature 1..22: note = chemically synthesized
  source 1..22: mol_type = other DNA
agagtgaggtgaccttgtggcc

SEQ ID NO: 114291 - DNA, 22 bp, synthetic construct
  misc_feature 1..22: note = chemically synthesized
  source 1..22: mol_type = other DNA
gtggccattttctgtgacagag

SEQ ID NO: 114292 - DNA, 22 bp, synthetic construct
  misc_feature 1..22: note = chemically synthesized
  source 1..22: mol_type = other DNA
tggccattttctgtgacagaga

SEQ ID NO: 114293 - DNA, 22 bp, synthetic construct
  misc_feature 1..22: note = chemically synthesized
  source 1..22: mol_type = other DNA
tctgtgacagagacacctaaaa

SEQ ID NO: 114294 - DNA, 22 bp, synthetic construct
  misc_feature 1..22: note = chemically synthesized
  source 1..22: mol_type = other DNA
ctgtgacagagacacctaaaaa

SEQ ID NO: 114295 - DNA, 22 bp, synthetic construct
  misc_feature 1..22: note = chemically synthesized
  source 1..22: mol_type = other DNA
tgtgacagagacacctaaaaag

SEQ ID NO: 114296 - DNA, 22 bp, synthetic construct
  misc_feature 1..22: note = chemically synthesized
  source 1..22: mol_type = other DNA
tgacagagacacctaaaaagag

SEQ ID NO: 114297 - DNA, 22 bp, synthetic construct
  misc_feature 1..22: note = chemically synthesized
  source 1..22: mol_type = other DNA
aaaagagtctgttgtgagtctg

SEQ ID NO: 114298 - DNA, 22 bp, synthetic construct
  misc_feature 1..22: note = chemically synthesized
  source 1..22: mol_type = other DNA
ttgtgagtctggagacattgag

SEQ ID NO: 114299 - DNA, 22 bp, synthetic construct
  misc_feature 1..22: note = chemically synthesized
  source 1..22: mol_type = other DNA
tgagtctggagacattgagaac

SEQ ID NO: 114300 - DNA, 22 bp, synthetic construct
  misc_feature 1..22: note = chemically synthesized
  source 1..22: mol_type = other DNA
gagacattgagaaccctgtgag

SEQ ID NO: 114301 - DNA, 22 bp, synthetic construct
  misc_feature 1..22: note = chemically synthesized
  source 1..22: mol_type = other DNA
agaaccctgtgagtaaggattt

SEQ ID NO: 114302 - DNA, 22 bp, synthetic construct
  misc_feature 1..22: note = chemically synthesized
  source 1..22: mol_type = other DNA
tgagtaaggattttatttaggt

SEQ ID NO: 114303 - DNA, 22 bp, synthetic construct
  misc_feature 1..22: note = chemically synthesized
  source 1..22: mol_type = other DNA
tatttaggtctgtttctggtca

SEQ ID NO: 114304 - DNA, 22 bp, synthetic construct
  misc_feature 1..22: note = chemically synthesized
  source 1..22: mol_type = other DNA
atttaggtctgtttctggtcag

SEQ ID NO: 114305 - DNA, 22 bp, synthetic construct
  misc_feature 1..22: note = chemically synthesized
  source 1..22: mol_type = other DNA
tttaggtctgtttctggtcaga

SEQ ID NO: 114306 - DNA, 22 bp, synthetic construct
  misc_feature 1..22: note = chemically synthesized
  source 1..22: mol_type = other DNA
aggtctgtttctggtcagagtg

SEQ ID NO: 114307 - DNA, 22 bp, synthetic construct
  misc_feature 1..22: note = chemically synthesized
  source 1..22: mol_type = other DNA
ggtctgtttctggtcagagtgg

SEQ ID NO: 114308 - DNA, 22 bp, synthetic construct
  misc_feature 1..22: note = chemically synthesized
  source 1..22: mol_type = other DNA
tttctggtcagagtggggattt

SEQ ID NO: 114309 - DNA, 22 bp, synthetic construct
  misc_feature 1..22: note = chemically synthesized
  source 1..22: mol_type = other DNA
ctggtcagagtggggatttaag

SEQ ID NO: 114310 - DNA, 22 bp, synthetic construct
  misc_feature 1..22: note = chemically synthesized
  source 1..22: mol_type = other DNA
tggtcagagtggggatttaagg

SEQ ID NO: 114311 - DNA, 22 bp, synthetic construct
  misc_feature 1..22: note = chemically synthesized
  source 1..22: mol_type = other DNA
gtcagagtggggatttaaggct

SEQ ID NO: 114312 - DNA, 22 bp, synthetic construct
  misc_feature 1..22: note = chemically synthesized
  source 1..22: mol_type = other DNA
aaggcttggtcaatatgattaa

SEQ ID NO: 114313 - DNA, 22 bp, synthetic construct
  misc_feature 1..22: note = chemically synthesized
  source 1..22: mol_type = other DNA
aggcttggtcaatatgattaag

SEQ ID NO: 114314 - DNA, 22 bp, synthetic construct
  misc_feature 1..22: note = chemically synthesized
  source 1..22: mol_type = other DNA
ggtcaatatgattaagactaaa

SEQ ID NO: 114315 - DNA, 22 bp, synthetic construct
  misc_feature 1..22: note = chemically synthesized
  source 1..22: mol_type = other DNA
gtcaatatgattaagactaaag

SEQ ID NO: 114316 - DNA, 22 bp, synthetic construct
  misc_feature 1..22: note = chemically synthesized
  source 1..22: mol_type = other DNA
agactaaaggccacacacatag

SEQ ID NO: 114317 - DNA, 22 bp, synthetic construct
  misc_feature 1..22: note = chemically synthesized
  source 1..22: mol_type = other DNA
aaggccacacacatagatttgt

SEQ ID NO: 114318 - DNA, 22 bp, synthetic construct
  misc_feature 1..22: note = chemically synthesized
  source 1..22: mol_type = other DNA
gtgtgagattaccatctgtaaa

SEQ ID NO: 114319 - DNA, 22 bp, synthetic construct
  misc_feature 1..22: note = chemically synthesized
  source 1..22: mol_type = other DNA
tgtgagattaccatctgtaaaa

SEQ ID NO: 114320 - DNA, 22 bp, synthetic construct
  misc_feature 1..22: note = chemically synthesized
  source 1..22: mol_type = other DNA
ccatctgtaaaaatctgaaaaa

SEQ ID NO: 114321 - DNA, 22 bp, synthetic construct
  misc_feature 1..22: note = chemically synthesized
  source 1..22: mol_type = other DNA
taaaaatctgaaaaagctaaga

SEQ ID NO: 114322 - DNA, 22 bp, synthetic construct
  misc_feature 1..22: note = chemically synthesized
  source 1..22: mol_type = other DNA
aaaaagctaagaaaacctatct

SEQ ID NO: 114323 - DNA, 22 bp, synthetic construct
  misc_feature 1..22: note = chemically synthesized
  source 1..22: mol_type = other DNA
agaaaacctatctctctccatc

SEQ ID NO: 114324 - DNA, 22 bp, synthetic construct
  misc_feature 1..22: note = chemically synthesized
  source 1..22: mol_type = other DNA
tctctctccatcaattttagtt

SEQ ID NO: 114325 - DNA, 22 bp, synthetic construct
  misc_feature 1..22: note = chemically synthesized
  source 1..22: mol_type = other DNA
tctccatcaattttagttttta

SEQ ID NO: 114326 - DNA, 22 bp, synthetic construct
  misc_feature 1..22: note = chemically synthesized
  source 1..22: mol_type = other DNA
tccatcaattttagtttttatg

SEQ ID NO: 114327 - DNA, 22 bp, synthetic construct
  misc_feature 1..22: note = chemically synthesized
  source 1..22: mol_type = other DNA
catcaattttagtttttatgtg

SEQ ID NO: 114328 - DNA, 22 bp, synthetic construct
  misc_feature 1..22: note = chemically synthesized
  source 1..22: mol_type = other DNA
tagtttttatgtgtttgtaaga

SEQ ID NO: 114329 - DNA, 22 bp, synthetic construct
  misc_feature 1..22: note = chemically synthesized
  source 1..22: mol_type = other DNA
agtttttatgtgtttgtaagat

SEQ ID NO: 114330 - DNA, 22 bp, synthetic construct
  misc_feature 1..22: note = chemically synthesized
  source 1..22: mol_type = other DNA
gtttttatgtgtttgtaagatg

SEQ ID NO: 114331 - DNA, 22 bp, synthetic construct
  misc_feature 1..22: note = chemically synthesized
  source 1..22: mol_type = other DNA
ttatgtgtttgtaagatgtaga

SEQ ID NO: 114332 - DNA, 22 bp, synthetic construct
  misc_feature 1..22: note = chemically synthesized
  source 1..22: mol_type = other DNA
tatgtgtttgtaagatgtagat

SEQ ID NO: 114333 - DNA, 22 bp, synthetic construct
  misc_feature 1..22: note = chemically synthesized
  source 1..22: mol_type = other DNA
atgtgtttgtaagatgtagata

SEQ ID NO: 114334 - DNA, 22 bp, synthetic construct
  misc_feature 1..22: note = chemically synthesized
  source 1..22: mol_type = other DNA
tgtgtttgtaagatgtagatat

SEQ ID NO: 114335 - DNA, 22 bp, synthetic construct
  misc_feature 1..22: note = chemically synthesized
  source 1..22: mol_type = other DNA
gtaagatgtagatatgtctatt

SEQ ID NO: 114336 - DNA, 22 bp, synthetic construct
  misc_feature 1..22: note = chemically synthesized
  source 1..22: mol_type = other DNA
taagatgtagatatgtctattt

SEQ ID NO: 114337 - DNA, 22 bp, synthetic construct
  misc_feature 1..22: note = chemically synthesized
  source 1..22: mol_type = other DNA
ttttgtgcatgagagagaggaa

SEQ ID NO: 114338 - DNA, 22 bp, synthetic construct
  misc_feature 1..22: note = chemically synthesized
  source 1..22: mol_type = other DNA
tgtgcatgagagagaggaagat

SEQ ID NO: 114339 - DNA, 22 bp, synthetic construct
  misc_feature 1..22: note = chemically synthesized
  source 1..22: mol_type = other DNA
gtgcatgagagagaggaagatc

SEQ ID NO: 114340 - DNA, 22 bp, synthetic construct
  misc_feature 1..22: note = chemically synthesized
  source 1..22: mol_type = other DNA
tgcatgagagagaggaagatca

SEQ ID NO: 114341 - DNA, 22 bp, synthetic construct
  misc_feature 1..22: note = chemically synthesized
  source 1..22: mol_type = other DNA
aaaggaagaatgaactggttgg

SEQ ID NO: 114342 - DNA, 22 bp, synthetic construct
  misc_feature 1..22: note = chemically synthesized
  source 1..22: mol_type = other DNA
gttggcagctttcagctgtgta

SEQ ID NO: 114343 - DNA, 22 bp, synthetic construct
  misc_feature 1..22: note = chemically synthesized
  source 1..22: mol_type = other DNA
gcagctttcagctgtgtagtgg

SEQ ID NO: 114344 - DNA, 22 bp, synthetic construct
  misc_feature 1..22: note = chemically synthesized
  source 1..22: mol_type = other DNA
tcagctgtgtagtgggtattga

SEQ ID NO: 114345 - DNA, 22 bp, synthetic construct
  misc_feature 1..22: note = chemically synthesized
  source 1..22: mol_type = other DNA
cagctgtgtagtgggtattgag

SEQ ID NO: 114346 - DNA, 22 bp, synthetic construct
  misc_feature 1..22: note = chemically synthesized
  source 1..22: mol_type = other DNA
agctgtgtagtgggtattgagg

SEQ ID NO: 114347 - DNA, 22 bp, synthetic construct
  misc_feature 1..22: note = chemically synthesized
  source 1..22: mol_type = other DNA
tgtagtgggtattgaggacacg

SEQ ID NO: 114348 - DNA, 22 bp, synthetic construct
  misc_feature 1..22: note = chemically synthesized
  source 1..22: mol_type = other DNA
aggacacgggaaggtggtgctg

SEQ ID NO: 114349 - DNA, 22 bp, synthetic construct
  misc_feature 1..22: note = chemically synthesized
  source 1..22: mol_type = other DNA
gaagaaaagccacattttcttg

SEQ ID NO: 114350 - DNA, 22 bp, synthetic construct
  misc_feature 1..22: note = chemically synthesized
  source 1..22: mol_type = other DNA
tcttgtgccctggggatagtag

SEQ ID NO: 114351 - DNA, 22 bp, synthetic construct
  misc_feature 1..22: note = chemically synthesized
  source 1..22: mol_type = other DNA
cttgtgccctggggatagtagg

SEQ ID NO: 114352 - DNA, 22 bp, synthetic construct
  misc_feature 1..22: note = chemically synthesized
  source 1..22: mol_type = other DNA
ttgtgccctggggatagtaggg

SEQ ID NO: 114353 - DNA, 22 bp, synthetic construct
  misc_feature 1..22: note = chemically synthesized
  source 1..22: mol_type = other DNA
gtgccctggggatagtagggcc

SEQ ID NO: 114354 - DNA, 22 bp, synthetic construct
  misc_feature 1..22: note = chemically synthesized
  source 1..22: mol_type = other DNA
tgccctggggatagtagggcct

SEQ ID NO: 114355 - DNA, 22 bp, synthetic construct
  misc_feature 1..22: note = chemically synthesized
  source 1..22: mol_type = other DNA
gggatagtagggccttggtgct

SEQ ID NO: 114356 - DNA, 22 bp, synthetic construct
  misc_feature 1..22: note = chemically synthesized
  source 1..22: mol_type = other DNA
ggtgctggtcagaatttaagcc

SEQ ID NO: 114357 - DNA, 22 bp, synthetic construct
  misc_feature 1..22: note = chemically synthesized
  source 1..22: mol_type = other DNA
gtgctggtcagaatttaagcct

SEQ ID NO: 114358 - DNA, 22 bp, synthetic construct
  misc_feature 1..22: note = chemically synthesized
  source 1..22: mol_type = other DNA
gtcagaatttaagcctatcctt

SEQ ID NO: 114359 - DNA, 22 bp, synthetic construct
  misc_feature 1..22: note = chemically synthesized
  source 1..22: mol_type = other DNA
aagcctatccttgggctgaatg

SEQ ID NO: 114360 - DNA, 22 bp, synthetic construct
  misc_feature 1..22: note = chemically synthesized
  source 1..22: mol_type = other DNA
agcctatccttgggctgaatgc

SEQ ID NO: 114361 - DNA, 22 bp, synthetic construct
  misc_feature 1..22: note = chemically synthesized
  source 1..22: mol_type = other DNA
tccttgggctgaatgctccccc

SEQ ID NO: 114362 - DNA, 22 bp, synthetic construct
  misc_feature 1..22: note = chemically synthesized
  source 1..22: mol_type = other DNA
gggctgaatgctccccctggtg

SEQ ID NO: 114363 - DNA, 22 bp, synthetic construct
  misc_feature 1..22: note = chemically synthesized
  source 1..22: mol_type = other DNA
ggctgaatgctccccctggtgg

SEQ ID NO: 114364 - DNA, 22 bp, synthetic construct
  misc_feature 1..22: note = chemically synthesized
  source 1..22: mol_type = other DNA
aatgctccccctggtggctaca

SEQ ID NO: 114365 - DNA, 22 bp, synthetic construct
  misc_feature 1..22: note = chemically synthesized
  source 1..22: mol_type = other DNA
cccctggtggctacattggaaa

SEQ ID NO: 114366 - DNA, 22 bp, synthetic construct
  misc_feature 1..22: note = chemically synthesized
  source 1..22: mol_type = other DNA
gtggctacattggaaaaccaca

SEQ ID NO: 114367 - DNA, 22 bp, synthetic construct
  misc_feature 1..22: note = chemically synthesized
  source 1..22: mol_type = other DNA
cattggaaaaccacagcatgtg

SEQ ID NO: 114368 - DNA, 22 bp, synthetic construct
  misc_feature 1..22: note = chemically synthesized
  source 1..22: mol_type = other DNA
gaaaaccacagcatgtgtacag

SEQ ID NO: 114369 - DNA, 22 bp, synthetic construct
  misc_feature 1..22: note = chemically synthesized
  source 1..22: mol_type = other DNA
ggggattcagttctcctgaagg

SEQ ID NO: 114370 - DNA, 22 bp, synthetic construct
  misc_feature 1..22: note = chemically synthesized
  source 1..22: mol_type = other DNA
gggattcagttctcctgaagga

SEQ ID NO: 114371 - DNA, 22 bp, synthetic construct
  misc_feature 1..22: note = chemically synthesized
  source 1..22: mol_type = other DNA
agttctcctgaaggaatctcct

SEQ ID NO: 114372 - DNA, 22 bp, synthetic construct
  misc_feature 1..22: note = chemically synthesized
  source 1..22: mol_type = other DNA
tcctgaaggaatctcctacttc

SEQ ID NO: 114373 - DNA, 22 bp, synthetic construct
  misc_feature 1..22: note = chemically synthesized
  source 1..22: mol_type = other DNA
ctgaaggaatctcctacttcac

SEQ ID NO: 114374 - DNA, 22 bp, synthetic construct
  misc_feature 1..22: note = chemically synthesized
  source 1..22: mol_type = other DNA
aaggaatctcctacttcaccaa

SEQ ID NO: 114375 - DNA, 22 bp, synthetic construct
  misc_feature 1..22: note = chemically synthesized
  source 1..22: mol_type = other DNA
ctacttcaccaagcctggctca

SEQ ID NO: 114376 - DNA, 22 bp, synthetic construct
  misc_feature 1..22: note = chemically synthesized
  source 1..22: mol_type = other DNA
cttcaccaagcctggctcagtg

SEQ ID NO: 114377 - DNA, 22 bp, synthetic construct
  misc_feature 1..22: note = chemically synthesized
  source 1..22: mol_type = other DNA
caccaagcctggctcagtgggc

SEQ ID NO: 114378 - DNA, 22 bp, synthetic construct
  misc_feature 1..22: note = chemically synthesized
  source 1..22: mol_type = other DNA
accaagcctggctcagtgggct

SEQ ID NO: 114379 - DNA, 22 bp, synthetic construct
  misc_feature 1..22: note = chemically synthesized
  source 1..22: mol_type = other DNA
gctcagtgggctggctaggtat

SEQ ID NO: 114380 - DNA, 22 bp, synthetic construct
  misc_feature 1..22: note = chemically synthesized
  source 1..22: mol_type = other DNA
agtgggctggctaggtatcaat

SEQ ID NO: 114381 - DNA, 22 bp, synthetic construct
  misc_feature 1..22: note = chemically synthesized
  source 1..22: mol_type = other DNA
gctaggtatcaattctggatag

SEQ ID NO: 114382 - DNA, 22 bp, synthetic construct
  misc_feature 1..22: note = chemically synthesized
  source 1..22: mol_type = other DNA
ggtatcaattctggatagaggt

SEQ ID NO: 114383 - DNA, 22 bp, synthetic construct
  misc_feature 1..22: note = chemically synthesized
  source 1..22: mol_type = other DNA
tggatagaggttccttaaataa

SEQ ID NO: 114384 - DNA, 22 bp, synthetic construct
  misc_feature 1..22: note = chemically synthesized
  source 1..22: mol_type = other DNA
gatagaggttccttaaataaaa

SEQ ID NO: 114385 - DNA, 22 bp, synthetic construct
  misc_feature 1..22: note = chemically synthesized
  source 1..22: mol_type = other DNA
cttaaataaaacttatactggc

SEQ ID NO: 114386 - DNA, 22 bp, synthetic construct
  misc_feature 1..22: note = chemically synthesized
  source 1..22: mol_type = other DNA
aaataaaacttatactggcccc

SEQ ID NO: 114387 - DNA, 22 bp, synthetic construct
  misc_feature 1..22: note = chemically synthesized
  source 1..22: mol_type = other DNA
aataaaacttatactggcccct

SEQ ID NO: 114388 - DNA, 22 bp, synthetic construct
  misc_feature 1..22: note = chemically synthesized
  source 1..22: mol_type = other DNA
atactggccccttgaaagccag

SEQ ID NO: 114389 - DNA, 22 bp, synthetic construct
  misc_feature 1..22: note = chemically synthesized
  source 1..22: mol_type = other DNA
tactggccccttgaaagccagg

SEQ ID NO: 114390 - DNA, 22 bp, synthetic construct
  misc_feature 1..22: note = chemically synthesized
  source 1..22: mol_type = other DNA
gccccttgaaagccaggctttc

SEQ ID NO: 114391 - DNA, 22 bp, synthetic construct
  misc_feature 1..22: note = chemically synthesized
  source 1..22: mol_type = other DNA
gaaagccaggctttccacccca

SEQ ID NO: 114392 - DNA, 22 bp, synthetic construct
  misc_feature 1..22: note = chemically synthesized
  source 1..22: mol_type = other DNA
aaagccaggctttccaccccac

SEQ ID NO: 114393 - DNA, 22 bp, synthetic construct
  misc_feature 1..22: note = chemically synthesized
  source 1..22: mol_type = other DNA
tccaccccaccatacccccacc

SEQ ID NO: 114394 - DNA, 22 bp, synthetic construct
  misc_feature 1..22: note = chemically synthesized
  source 1..22: mol_type = other DNA
ccaccccaccatacccccaccc

SEQ ID NO: 114395 - DNA, 22 bp, synthetic construct
  misc_feature 1..22: note = chemically synthesized
  source 1..22: mol_type = other DNA
caccccaccatacccccacccc

SEQ ID NO: 114396 - DNA, 22 bp, synthetic construct
  misc_feature 1..22: note = chemically synthesized
  source 1..22: mol_type = other DNA
tctctctctgtcgctcgctcgc

SEQ ID NO: 114397 - DNA, 22 bp, synthetic construct
  misc_feature 1..22: note = chemically synthesized
  source 1..22: mol_type = other DNA
tctctctgtcgctcgctcgctg

SEQ ID NO: 114398 - DNA, 22 bp, synthetic construct
  misc_feature 1..22: note = chemically synthesized
  source 1..22: mol_type = other DNA
tctctgtcgctcgctcgctgtt

SEQ ID NO: 114399 - DNA, 22 bp, synthetic construct
  misc_feature 1..22: note = chemically synthesized
  source 1..22: mol_type = other DNA
tctgtcgctcgctcgctgtttc

SEQ ID NO: 114400 - DNA, 22 bp, synthetic construct
  misc_feature 1..22: note = chemically synthesized
  source 1..22: mol_type = other DNA
tgtcgctcgctcgctgtttctc

SEQ ID NO: 114401 - DNA, 22 bp, synthetic construct
  misc_feature 1..22: note = chemically synthesized
  source 1..22: mol_type = other DNA
tcgctcgctcgctgtttctctc

SEQ ID NO: 114402 - DNA, 22 bp, synthetic construct
  misc_feature 1..22: note = chemically synthesized
  source 1..22: mol_type = other DNA
gctcgctgtttctctctctctc

SEQ ID NO: 114403 - DNA, 22 bp, synthetic construct
  misc_feature 1..22: note = chemically synthesized
  source 1..22: mol_type = other DNA
gctgtttctctctctctctctc

SEQ ID NO: 114404 - DNA, 22 bp, synthetic construct
  misc_feature 1..22: note = chemically synthesized
  source 1..22: mol_type = other DNA
tttctctctctctctctcacac

SEQ ID NO: 114405 - DNA, 22 bp, synthetic construct
  misc_feature 1..22: note = chemically synthesized
  source 1..22: mol_type = other DNA
ctctctctctctctcacacaca

SEQ ID NO: 114406 - DNA, 22 bp, synthetic construct
  misc_feature 1..22: note = chemically synthesized
  source 1..22: mol_type = other DNA
tctctctctctctcacacacac

SEQ ID NO: 114407 - DNA, 22 bp, synthetic construct
  misc_feature 1..22: note = chemically synthesized
  source 1..22: mol_type = other DNA
tctctctctctcacacacacac

SEQ ID NO: 114408 - DNA, 22 bp, synthetic construct
  misc_feature 1..22: note = chemically synthesized
  source 1..22: mol_type = other DNA
tctctctctcacacacacacaa

SEQ ID NO: 114409 - DNA, 22 bp, synthetic construct
  misc_feature 1..22: note = chemically synthesized
  source 1..22: mol_type = other DNA
tctctctcacacacacacaaac

SEQ ID NO: 114410 - DNA, 22 bp, synthetic construct
  misc_feature 1..22: note = chemically synthesized
  source 1..22: mol_type = other DNA
tctctcacacacacacaaacaa

SEQ ID NO: 114411 - DNA, 22 bp, synthetic construct
  misc_feature 1..22: note = chemically synthesized
  source 1..22: mol_type = other DNA
tctcacacacacacaaacaata

SEQ ID NO: 114412 - DNA, 22 bp, synthetic construct
  misc_feature 1..22: note = chemically synthesized
  source 1..22: mol_type = other DNA
tcacacacacacaaacaatatt

SEQ ID NO: 114413 - DNA, 22 bp, synthetic construct
  misc_feature 1..22: note = chemically synthesized
  source 1..22: mol_type = other DNA
acacacacacaaacaatattac

SEQ ID NO: 114414 - DNA, 22 bp, synthetic construct
  misc_feature 1..22: note = chemically synthesized
  source 1..22: mol_type = other DNA
catgcaatgaaaaccatttgca

SEQ ID NO: 114415 - DNA, 22 bp, synthetic construct
  misc_feature 1..22: note = chemically synthesized
  source 1..22: mol_type = other DNA
gcacattaacaaataggtacac

SEQ ID NO: 114416 - DNA, 22 bp, synthetic construct
  misc_feature 1..22: note = chemically synthesized
  source 1..22: mol_type = other DNA
cacattaacaaataggtacact

SEQ ID NO: 114417 - DNA, 22 bp, synthetic construct
  misc_feature 1..22: note = chemically synthesized
  source 1..22: mol_type = other DNA
acaaataggtacactgttacag

SEQ ID NO: 114418 - DNA, 22 bp, synthetic construct
  misc_feature 1..22: note = chemically synthesized
  source 1..22: mol_type = other DNA
ttacagtgacacttttcacttt

SEQ ID NO: 114419 - DNA, 22 bp, synthetic construct
  misc_feature 1..22: note = chemically synthesized
  source 1..22: mol_type = other DNA
cagtgacacttttcacttttag

SEQ ID NO: 114420 - DNA, 22 bp, synthetic construct
  misc_feature 1..22: note = chemically synthesized
  source 1..22: mol_type = other DNA
ttcacttttagtaatggattta

SEQ ID NO: 114421 - DNA, 22 bp, synthetic construct
  misc_feature 1..22: note = chemically synthesized
  source 1..22: mol_type = other DNA
tcacttttagtaatggatttag

SEQ ID NO: 114422 - DNA, 22 bp, synthetic construct
  misc_feature 1..22: note = chemically synthesized
  source 1..22: mol_type = other DNA
cacttttagtaatggatttaga

SEQ ID NO: 114423 - DNA, 22 bp, synthetic construct
  misc_feature 1..22: note = chemically synthesized
  source 1..22: mol_type = other DNA
acttttagtaatggatttagat

SEQ ID NO: 114424 - DNA, 22 bp, synthetic construct
  misc_feature 1..22: note = chemically synthesized
  source 1..22: mol_type = other DNA
ttagtaatggatttagattctt

SEQ ID NO: 114425 - DNA, 22 bp, synthetic construct
  misc_feature 1..22: note = chemically synthesized
  source 1..22: mol_type = other DNA
tagtaatggatttagattcttt

SEQ ID NO: 114426 - DNA, 22 bp, synthetic construct
  misc_feature 1..22: note = chemically synthesized
  source 1..22: mol_type = other DNA
agtaatggatttagattcttta

SEQ ID NO: 114427 - DNA, 22 bp, synthetic construct
  misc_feature 1..22: note = chemically synthesized
  source 1..22: mol_type = other DNA
gtaatggatttagattctttaa

SEQ ID NO: 114428 - DNA, 22 bp, synthetic construct
  misc_feature 1..22: note = chemically synthesized
  source 1..22: mol_type = other DNA
agattctttaataatgaattct

SEQ ID NO: 114429 - DNA, 22 bp, synthetic construct
  misc_feature 1..22: note = chemically synthesized
  source 1..22: mol_type = other DNA
gattctttaataatgaattcta

SEQ ID NO: 114430 - DNA, 22 bp, synthetic construct
  misc_feature 1..22: note = chemically synthesized
  source 1..22: mol_type = other DNA
tttaataatgaattctaatacc

SEQ ID NO: 114431 - DNA, 22 bp, synthetic construct
  misc_feature 1..22: note = chemically synthesized
  source 1..22: mol_type = other DNA
taataatgaattctaatacctt

SEQ ID NO: 114432 - DNA, 22 bp, synthetic construct
  misc_feature 1..22: note = chemically synthesized
  source 1..22: mol_type = other DNA
aataatgaattctaatacctta

SEQ ID NO: 114433 - DNA, 22 bp, synthetic construct
  misc_feature 1..22: note = chemically synthesized
  source 1..22: mol_type = other DNA
ataatgaattctaataccttaa

SEQ ID NO: 114434 - DNA, 22 bp, synthetic construct
  misc_feature 1..22: note = chemically synthesized
  source 1..22: mol_type = other DNA
taataccttaaaggttaaggcc

SEQ ID NO: 114435 - DNA, 22 bp, synthetic construct
  misc_feature 1..22: note = chemically synthesized
  source 1..22: mol_type = other DNA
ataccttaaaggttaaggcctg

SEQ ID NO: 114436 - DNA, 22 bp, synthetic construct
  misc_feature 1..22: note = chemically synthesized
  source 1..22: mol_type = other DNA
aaaggttaaggcctgaatgcct

SEQ ID NO: 114437 - DNA, 22 bp, synthetic construct
  misc_feature 1..22: note = chemically synthesized
  source 1..22: mol_type = other DNA
aaggttaaggcctgaatgcctc

SEQ ID NO: 114438 - DNA, 22 bp, synthetic construct
  misc_feature 1..22: note = chemically synthesized
  source 1..22: mol_type = other DNA
aggcctgaatgcctcacactaa

SEQ ID NO: 114439 - DNA, 22 bp, synthetic construct
  misc_feature 1..22: note = chemically synthesized
  source 1..22: mol_type = other DNA
aatgcctcacactaatgtgttg

SEQ ID NO: 114440 - DNA, 22 bp, synthetic construct
  misc_feature 1..22: note = chemically synthesized
  source 1..22: mol_type = other DNA
acactaatgtgttgatacttca

SEQ ID NO: 114441 - DNA, 22 bp, synthetic construct
  misc_feature 1..22: note = chemically synthesized
  source 1..22: mol_type = other DNA
atgtgttgatacttcaccttcc

SEQ ID NO: 114442 - DNA, 22 bp, synthetic construct
  misc_feature 1..22: note = chemically synthesized
  source 1..22: mol_type = other DNA
atacttcaccttccccaaccat

SEQ ID NO: 114443 - DNA, 22 bp, synthetic construct
  misc_feature 1..22: note = chemically synthesized
  source 1..22: mol_type = other DNA
caccttccccaaccatcatgca

SEQ ID NO: 114444 - DNA, 22 bp, synthetic construct
  misc_feature 1..22: note = chemically synthesized
  source 1..22: mol_type = other DNA
accttccccaaccatcatgcac

SEQ ID NO: 114445 - DNA, 22 bp, synthetic construct
  misc_feature 1..22: note = chemically synthesized
  source 1..22: mol_type = other DNA
ccccaaccatcatgcacccaca

SEQ ID NO: 114446 - DNA, 22 bp, synthetic construct
  misc_feature 1..22: note = chemically synthesized
  source 1..22: mol_type = other DNA
cccaaccatcatgcacccacat

SEQ ID NO: 114447 - DNA, 22 bp, synthetic construct
  misc_feature 1..22: note = chemically synthesized
  source 1..22: mol_type = other DNA
acttcacctaatattcgcatga

SEQ ID NO: 114448 - DNA, 22 bp, synthetic construct
  misc_feature 1..22: note = chemically synthesized
  source 1..22: mol_type = other DNA
cacctaatattcgcatgattac

SEQ ID NO: 114449 - DNA, 22 bp, synthetic construct
  misc_feature 1..22: note = chemically synthesized
  source 1..22: mol_type = other DNA
acctaatattcgcatgattacc

SEQ ID NO: 114450 - DNA, 22 bp, synthetic construct
  misc_feature 1..22: note = chemically synthesized
  source 1..22: mol_type = other DNA
atattcgcatgattacccacag

SEQ ID NO: 114451 - DNA, 22 bp, synthetic construct
  misc_feature 1..22: note = chemically synthesized
  source 1..22: mol_type = other DNA
gcatgattacccacagtgatag

SEQ ID NO: 114452 - DNA, 22 bp, synthetic construct
  misc_feature 1..22: note = chemically synthesized
  source 1..22: mol_type = other DNA
cccacagtgatagagataggtc

SEQ ID NO: 114453 - DNA, 22 bp, synthetic construct
  misc_feature 1..22: note = chemically synthesized
  source 1..22: mol_type = other DNA
gctccttcattgtccccatcat

SEQ ID NO: 114454 - DNA, 22 bp, synthetic construct
  misc_feature 1..22: note = chemically synthesized
  source 1..22: mol_type = other DNA
ctccttcattgtccccatcatc

SEQ ID NO: 114455 - DNA, 22 bp, synthetic construct
  misc_feature 1..22: note = chemically synthesized
  source 1..22: mol_type = other DNA
cttcattgtccccatcatcctc

SEQ ID NO: 114456 - DNA, 22 bp, synthetic construct
  misc_feature 1..22: note = chemically synthesized
  source 1..22: mol_type = other DNA
cattgtccccatcatcctcctc

SEQ ID NO: 114457 - DNA, 22 bp, synthetic construct
  misc_feature 1..22: note = chemically synthesized
  source 1..22: mol_type = other DNA
attgtccccatcatcctcctct

SEQ ID NO: 114458 - DNA, 22 bp, synthetic construct
  misc_feature 1..22: note = chemically synthesized
  source 1..22: mol_type = other DNA
tccccatcatcctcctcttggc

SEQ ID NO: 114459 - DNA, 22 bp, synthetic construct
  misc_feature 1..22: note = chemically synthesized
  source 1..22: mol_type = other DNA
ctcttggcctccaggcttcaga

SEQ ID NO: 114460 - DNA, 22 bp, synthetic construct
  misc_feature 1..22: note = chemically synthesized
  source 1..22: mol_type = other DNA
ttggcctccaggcttcagaaac

SEQ ID NO: 114461 - DNA, 22 bp, synthetic construct
  misc_feature 1..22: note = chemically synthesized
  source 1..22: mol_type = other DNA
ggcctccaggcttcagaaacta

SEQ ID NO: 114462 - DNA, 22 bp, synthetic construct
  misc_feature 1..22: note = chemically synthesized
  source 1..22: mol_type = other DNA
gcctccaggcttcagaaactac

SEQ ID NO: 114463 - DNA, 22 bp, synthetic construct
  misc_feature 1..22: note = chemically synthesized
  source 1..22: mol_type = other DNA
caggcttcagaaactacctctg

SEQ ID NO: 114464 - DNA, 22 bp, synthetic construct
  misc_feature 1..22: note = chemically synthesized
  source 1..22: mol_type = other DNA
cagaaactacctctgccttcct

SEQ ID NO: 114465 - DNA, 22 bp, synthetic construct
  misc_feature 1..22: note = chemically synthesized
  source 1..22: mol_type = other DNA
agaaactacctctgccttccta

SEQ ID NO: 114466 - DNA, 22 bp, synthetic construct
  misc_feature 1..22: note = chemically synthesized
  source 1..22: mol_type = other DNA
cctctgccttcctagcctgggc

SEQ ID NO: 114467 - DNA, 22 bp, synthetic construct
  misc_feature 1..22: note = chemically synthesized
  source 1..22: mol_type = other DNA
tgccttcctagcctgggctagt

SEQ ID NO: 114468 - DNA, 22 bp, synthetic construct
  misc_feature 1..22: note = chemically synthesized
  source 1..22: mol_type = other DNA
ccttcctagcctgggctagtga

SEQ ID NO: 114469 - DNA, 22 bp, synthetic construct
  misc_feature 1..22: note = chemically synthesized
  source 1..22: mol_type = other DNA
cctagcctgggctagtgaccct

SEQ ID NO: 114470 - DNA, 22 bp, synthetic construct
  misc_feature 1..22: note = chemically synthesized
  source 1..22: mol_type = other DNA
ctagcctgggctagtgacccta

SEQ ID NO: 114471 - DNA, 22 bp, synthetic construct
  misc_feature 1..22: note = chemically synthesized
  source 1..22: mol_type = other DNA
gcctgggctagtgaccctattt

SEQ ID NO: 114472 - DNA, 22 bp, synthetic construct
  misc_feature 1..22: note = chemically synthesized
  source 1..22: mol_type = other DNA
ggctagtgaccctattttggaa

SEQ ID NO: 114473 - DNA, 22 bp, synthetic construct
  misc_feature 1..22: note = chemically synthesized
  source 1..22: mol_type = other DNA
gtgaccctattttggaaacttc

SEQ ID NO: 114474 - DNA, 22 bp, synthetic construct
  misc_feature 1..22: note = chemically synthesized
  source 1..22: mol_type = other DNA
ttttggaaacttcgttgaacaa

SEQ ID NO: 114475 - DNA, 22 bp, synthetic construct
  misc_feature 1..22: note = chemically synthesized
  source 1..22: mol_type = other DNA
tggaaacttcgttgaacaatct

SEQ ID NO: 114476 - DNA, 22 bp, synthetic construct
  misc_feature 1..22: note = chemically synthesized
  source 1..22: mol_type = other DNA
ggaaacttcgttgaacaatcta

SEQ ID NO: 114477 - DNA, 22 bp, synthetic construct
  misc_feature 1..22: note = chemically synthesized
  source 1..22: mol_type = other DNA
gaaacttcgttgaacaatctaa

SEQ ID NO: 114478 - DNA, 22 bp, synthetic construct
  misc_feature 1..22: note = chemically synthesized
  source 1..22: mol_type = other DNA
cgttgaacaatctaacatcttt

SEQ ID NO: 114479 - DNA, 22 bp, synthetic construct
  misc_feature 1..22: note = chemically synthesized
  source 1..22: mol_type = other DNA
gttgaacaatctaacatcttta

SEQ ID NO: 114480 - DNA, 22 bp, synthetic construct
  misc_feature 1..22: note = chemically synthesized
  source 1..22: mol_type = other DNA
aacaatctaacatctttactca

SEQ ID NO: 114481 - DNA, 22 bp, synthetic construct
  misc_feature 1..22: note = chemically synthesized
  source 1..22: mol_type = other DNA
acatctttactcaatgtgagct

SEQ ID NO: 114482 - DNA, 22 bp, synthetic construct
  misc_feature 1..22: note = chemically synthesized
  source 1..22: mol_type = other DNA
tactcaatgtgagcttcataaa

SEQ ID NO: 114483 - DNA, 22 bp, synthetic construct
  misc_feature 1..22: note = chemically synthesized
  source 1..22: mol_type = other DNA
actcaatgtgagcttcataaag

SEQ ID NO: 114484 - DNA, 22 bp, synthetic construct
  misc_feature 1..22: note = chemically synthesized
  source 1..22: mol_type = other DNA
ctcaatgtgagcttcataaagg

SEQ ID NO: 114485 - DNA, 22 bp, synthetic construct
  misc_feature 1..22: note = chemically synthesized
  source 1..22: mol_type = other DNA
aatgtgagcttcataaaggcaa

SEQ ID NO: 114486 - DNA, 22 bp, synthetic construct
  misc_feature 1..22: note = chemically synthesized
  source 1..22: mol_type = other DNA
cataaaggcaagaccatgacat

SEQ ID NO: 114487 - DNA, 22 bp, synthetic construct
  misc_feature 1..22: note = chemically synthesized
  source 1..22: mol_type = other DNA
ataaaggcaagaccatgacatg

SEQ ID NO: 114488 - DNA, 22 bp, synthetic construct
  misc_feature 1..22: note = chemically synthesized
  source 1..22: mol_type = other DNA
atctgtctatcttcaagttctt

SEQ ID NO: 114489 - DNA, 22 bp, synthetic construct
  misc_feature 1..22: note = chemically synthesized
  source 1..22: mol_type = other DNA
tctatcttcaagttcttgatca

SEQ ID NO: 114490 - DNA, 22 bp, synthetic construct
  misc_feature 1..22: note = chemically synthesized
  source 1..22: mol_type = other DNA
tcttcaagttcttgatcagagt

SEQ ID NO: 114491 - DNA, 22 bp, synthetic construct
  misc_feature 1..22: note = chemically synthesized
  source 1..22: mol_type = other DNA
caagttcttgatcagagtttct

SEQ ID NO: 114492 - DNA, 22 bp, synthetic construct
  misc_feature 1..22: note = chemically synthesized
  source 1..22: mol_type = other DNA
aagttcttgatcagagtttctc

SEQ ID NO: 114493 - DNA, 22 bp, synthetic construct
  misc_feature 1..22: note = chemically synthesized
  source 1..22: mol_type = other DNA
ttgatcagagtttctcacagga

SEQ ID NO: 114494 - DNA, 22 bp, synthetic construct
  misc_feature 1..22: note = chemically synthesized
  source 1..22: mol_type = other DNA
gatcagagtttctcacaggacg

SEQ ID NO: 114495 - DNA, 22 bp, synthetic construct
  misc_feature 1..22: note = chemically synthesized
  source 1..22: mol_type = other DNA
atcagagtttctcacaggacgc

SEQ ID NO: 114496 - DNA, 22 bp, synthetic construct
  misc_feature 1..22: note = chemically synthesized
  source 1..22: mol_type = other DNA
ctcacaggacgcacttaatgca

SEQ ID NO: 114497 - DNA, 22 bp, synthetic construct
  misc_feature 1..22: note = chemically synthesized
  source 1..22: mol_type = other DNA
tcacaggacgcacttaatgcac

SEQ ID NO: 114498 - DNA, 22 bp, synthetic construct
  misc_feature 1..22: note = chemically synthesized
  source 1..22: mol_type = other DNA
acaggacgcacttaatgcacgt

SEQ ID NO: 114499 - DNA, 22 bp, synthetic construct
  misc_feature 1..22: note = chemically synthesized
  source 1..22: mol_type = other DNA
aatgcacgtcaatgaaaattga

SEQ ID NO: 114500 - DNA, 22 bp, synthetic construct
  misc_feature 1..22: note = chemically synthesized
  source 1..22: mol_type = other DNA
atgcacgtcaatgaaaattgat

SEQ ID NO: 114501 - DNA, 22 bp, synthetic construct
  misc_feature 1..22: note = chemically synthesized
  source 1..22: mol_type = other DNA
atgagaatgtttaatgtaattt

SEQ ID NO: 114502 - DNA, 22 bp, synthetic construct
  misc_feature 1..22: note = chemically synthesized
  source 1..22: mol_type = other DNA
aatgtaatttcagtcacacttc

SEQ ID NO: 114503 - DNA, 22 bp, synthetic construct
  misc_feature 1..22: note = chemically synthesized
  source 1..22: mol_type = other DNA
atgtaatttcagtcacacttca

SEQ ID NO: 114504 - DNA, 22 bp, synthetic construct
  misc_feature 1..22: note = chemically synthesized
  source 1..22: mol_type = other DNA
cagtcacacttcaaagaggact

SEQ ID NO: 114505 - DNA, 22 bp, synthetic construct
  misc_feature 1..22: note = chemically synthesized
  source 1..22: mol_type = other DNA
agtcacacttcaaagaggacta

SEQ ID NO: 114506 - DNA, 22 bp, synthetic construct
  misc_feature 1..22: note = chemically synthesized
  source 1..22: mol_type = other DNA
caaagaggactattttgtgata

SEQ ID NO: 114507 - DNA, 22 bp, synthetic construct
  misc_feature 1..22: note = chemically synthesized
  source 1..22: mol_type = other DNA
aaagaggactattttgtgatat

SEQ ID NO: 114508 - DNA, 22 bp, synthetic construct
  misc_feature 1..22: note = chemically synthesized
  source 1..22: mol_type = other DNA
ttttgtgatatgataaaacaaa

SEQ ID NO: 114509 - DNA, 22 bp, synthetic construct
  misc_feature 1..22: note = chemically synthesized
  source 1..22: mol_type = other DNA
tgtgatatgataaaacaaatct

SEQ ID NO: 114510 - DNA, 22 bp, synthetic construct
  misc_feature 1..22: note = chemically synthesized
  source 1..22: mol_type = other DNA
gtgatatgataaaacaaatcta

SEQ ID NO: 114511 - DNA, 22 bp, synthetic construct
  misc_feature 1..22: note = chemically synthesized
  source 1..22: mol_type = other DNA
tgatatgataaaacaaatctaa

SEQ ID NO: 114512 - DNA, 22 bp, synthetic construct
  misc_feature 1..22: note = chemically synthesized
  source 1..22: mol_type = other DNA
aaggtcatttagagcaataaag

SEQ ID NO: 114513 - DNA, 22 bp, synthetic construct
  misc_feature 1..22: note = chemically synthesized
  source 1..22: mol_type = other DNA
agagcaataaagaatcaaaaat

SEQ ID NO: 114514 - DNA, 22 bp, synthetic construct
  misc_feature 1..22: note = chemically synthesized
  source 1..22: mol_type = other DNA
gagcaataaagaatcaaaaatg

SEQ ID NO: 114515 - DNA, 22 bp, synthetic construct
  misc_feature 1..22: note = chemically synthesized
  source 1..22: mol_type = other DNA
agttctttcatttggttttcaa

SEQ ID NO: 114516 - DNA, 22 bp, synthetic construct
  misc_feature 1..22: note = chemically synthesized
  source 1..22: mol_type = other DNA
tttcatttggttttcaaataaa

SEQ ID NO: 114517 - DNA, 22 bp, synthetic construct
  misc_feature 1..22: note = chemically synthesized
  source 1..22: mol_type = other DNA
tcatttggttttcaaataaatc

SEQ ID NO: 114518 - DNA, 22 bp, synthetic construct
  misc_feature 1..22: note = chemically synthesized
  source 1..22: mol_type = other DNA
catttggttttcaaataaatct

SEQ ID NO: 114519 - DNA, 22 bp, synthetic construct
  misc_feature 1..22: note = chemically synthesized
  source 1..22: mol_type = other DNA
atttggttttcaaataaatcta

SEQ ID NO: 114520 - DNA, 22 bp, synthetic construct
  misc_feature 1..22: note = chemically synthesized
  source 1..22: mol_type = other DNA
ggttttcaaataaatctattgc

SEQ ID NO: 114521 - DNA, 22 bp, synthetic construct
  misc_feature 1..22: note = chemically synthesized
  source 1..22: mol_type = other DNA
gttttcaaataaatctattgct

SEQ ID NO: 114522 - DNA, 22 bp, synthetic construct
  misc_feature 1..22: note = chemically synthesized
  source 1..22: mol_type = other DNA
tcaaataaatctattgcttgga

SEQ ID NO: 114523 - DNA, 22 bp, synthetic construct
  misc_feature 1..22: note = chemically synthesized
  source 1..22: mol_type = other DNA
caaataaatctattgcttggaa

SEQ ID NO: 114524 - DNA, 22 bp, synthetic construct
  misc_feature 1..22: note = chemically synthesized
  source 1..22: mol_type = other DNA
aaataaatctattgcttggaaa

SEQ ID NO: 114525 - DNA, 22 bp, synthetic construct
  misc_feature 1..22: note = chemically synthesized
  source 1..22: mol_type = other DNA
ttgcttggaaactggtccttca

SEQ ID NO: 114526 - DNA, 22 bp, synthetic construct
  misc_feature 1..22: note = chemically synthesized
  source 1..22: mol_type = other DNA
cttggaaactggtccttcaatt

SEQ ID NO: 114527 - DNA, 22 bp, synthetic construct
  misc_feature 1..22: note = chemically synthesized
  source 1..22: mol_type = other DNA
ggaaactggtccttcaattata

SEQ ID NO: 114528 - DNA, 22 bp, synthetic construct
  misc_feature 1..22: note = chemically synthesized
  source 1..22: mol_type = other DNA
gaaactggtccttcaattatat

SEQ ID NO: 114529 - DNA, 22 bp, synthetic construct
  misc_feature 1..22: note = chemically synthesized
  source 1..22: mol_type = other DNA
gtccttcaattatataattcag

SEQ ID NO: 114530 - DNA, 22 bp, synthetic construct
  misc_feature 1..22: note = chemically synthesized
  source 1..22: mol_type = other DNA
caattatataattcagagaaat

SEQ ID NO: 114531 - DNA, 22 bp, synthetic construct
  misc_feature 1..22: note = chemically synthesized
  source 1..22: mol_type = other DNA
aattatataattcagagaaata

SEQ ID NO: 114532 - DNA, 22 bp, synthetic construct
  misc_feature 1..22: note = chemically synthesized
  source 1..22: mol_type = other DNA
tataattcagagaaatagaata

SEQ ID NO: 114533 - DNA, 22 bp, synthetic construct
  misc_feature 1..22: note = chemically synthesized
  source 1..22: mol_type = other DNA
agagaaatagaatataaagcta

SEQ ID NO: 114534 - DNA, 22 bp, synthetic construct
  misc_feature 1..22: note = chemically synthesized
  source 1..22: mol_type = other DNA
ttatacagatgttagtttaaaa

SEQ ID NO: 114535 - DNA, 22 bp, synthetic construct
  misc_feature 1..22: note = chemically synthesized
  source 1..22: mol_type = other DNA
tacagatgttagtttaaaaaag

SEQ ID NO: 114536 - DNA, 22 bp, synthetic construct
  misc_feature 1..22: note = chemically synthesized
  source 1..22: mol_type = other DNA
gtttaaaaaagtaagcaaatat

SEQ ID NO: 114537 - DNA, 22 bp, synthetic construct
  misc_feature 1..22: note = chemically synthesized
  source 1..22: mol_type = other DNA
aaaaaagtaagcaaatattaga

SEQ ID NO: 114538 - DNA, 22 bp, synthetic construct
  misc_feature 1..22: note = chemically synthesized
  source 1..22: mol_type = other DNA
aaaaagtaagcaaatattagag

SEQ ID NO: 114539 - DNA, 22 bp, synthetic construct
  misc_feature 1..22: note = chemically synthesized
  source 1..22: mol_type = other DNA
gagatctctaaatggtaggtta

SEQ ID NO: 114540 - DNA, 22 bp, synthetic construct
  misc_feature 1..22: note = chemically synthesized
  source 1..22: mol_type = other DNA
taaatggtaggttatccactaa

SEQ ID NO: 114541 - DNA, 22 bp, synthetic construct
  misc_feature 1..22: note = chemically synthesized
  source 1..22: mol_type = other DNA
aatggtaggttatccactaaac

SEQ ID NO: 114542 - DNA, 22 bp, synthetic construct
  misc_feature 1..22: note = chemically synthesized
  source 1..22: mol_type = other DNA
tccactaaacagtattgtttat

SEQ ID NO: 114543 - DNA, 22 bp, synthetic construct
  misc_feature 1..22: note = chemically synthesized
  source 1..22: mol_type = other DNA
aacagtattgtttatctacgta

SEQ ID NO: 114544 - DNA, 22 bp, synthetic construct
  misc_feature 1..22: note = chemically synthesized
  source 1..22: mol_type = other DNA
tttatctacgtaaaaagctgtc

SEQ ID NO: 114545 - DNA, 22 bp, synthetic construct
  misc_feature 1..22: note = chemically synthesized
  source 1..22: mol_type = other DNA
atctacgtaaaaagctgtcaat

SEQ ID NO: 114546 - DNA, 22 bp, synthetic construct
  misc_feature 1..22: note = chemically synthesized
  source 1..22: mol_type = other DNA
tctacgtaaaaagctgtcaatt

SEQ ID NO: 114547 - DNA, 22 bp, synthetic construct
  misc_feature 1..22: note = chemically synthesized
  source 1..22: mol_type = other DNA
cgtaaaaagctgtcaattacat

SEQ ID NO: 114548 - DNA, 22 bp, synthetic construct
  misc_feature 1..22: note = chemically synthesized
  source 1..22: mol_type = other DNA
tcaattacatatctgcatccag

SEQ ID NO: 114549 - DNA, 22 bp, synthetic construct
  misc_feature 1..22: note = chemically synthesized
  source 1..22: mol_type = other DNA
catatctgcatccagctccata

SEQ ID NO: 114550 - DNA, 22 bp, synthetic construct
  misc_feature 1..22: note = chemically synthesized
  source 1..22: mol_type = other DNA
catccagctccatacaccaaaa

SEQ ID NO: 114551 - DNA, 22 bp, synthetic construct
  misc_feature 1..22: note = chemically synthesized
  source 1..22: mol_type = other DNA
catacaccaaaataacatctgt

SEQ ID NO: 114552 - DNA, 22 bp, synthetic construct
  misc_feature 1..22: note = chemically synthesized
  source 1..22: mol_type = other DNA
tttccagtgcagactttaaatc

SEQ ID NO: 114553 - DNA, 22 bp, synthetic construct
  misc_feature 1..22: note = chemically synthesized
  source 1..22: mol_type = other DNA
ccagtgcagactttaaatcctt

SEQ ID NO: 114554 - DNA, 22 bp, synthetic construct
  misc_feature 1..22: note = chemically synthesized
  source 1..22: mol_type = other DNA
cagtgcagactttaaatccttc

SEQ ID NO: 114555 - DNA, 22 bp, synthetic construct
  misc_feature 1..22: note = chemically synthesized
  source 1..22: mol_type = other DNA
taaatccttcctgcatattgtt

SEQ ID NO: 114556 - DNA, 22 bp, synthetic construct
  misc_feature 1..22: note = chemically synthesized
  source 1..22: mol_type = other DNA
aaatccttcctgcatattgtta

SEQ ID NO: 114557 - DNA, 22 bp, synthetic construct
  misc_feature 1..22: note = chemically synthesized
  source 1..22: mol_type = other DNA
aatccttcctgcatattgttaa

SEQ ID NO: 114558 - DNA, 22 bp, synthetic construct
  misc_feature 1..22: note = chemically synthesized
  source 1..22: mol_type = other DNA
cctgcatattgttaacaatgta

SEQ ID NO: 114559 - DNA, 22 bp, synthetic construct
  misc_feature 1..22: note = chemically synthesized
  source 1..22: mol_type = other DNA
ctgcatattgttaacaatgtac

SEQ ID NO: 114560 - DNA, 22 bp, synthetic construct
  misc_feature 1..22: note = chemically synthesized
  source 1..22: mol_type = other DNA
catattgttaacaatgtactct

SEQ ID NO: 114561 - DNA, 22 bp, synthetic construct
  misc_feature 1..22: note = chemically synthesized
  source 1..22: mol_type = other DNA
ttaacaatgtactctggaaaat

SEQ ID NO: 114562 - DNA, 22 bp, synthetic construct
  misc_feature 1..22: note = chemically synthesized
  source 1..22: mol_type = other DNA
acaatgtactctggaaaatatg

SEQ ID NO: 114563 - DNA, 22 bp, synthetic construct
  misc_feature 1..22: note = chemically synthesized
  source 1..22: mol_type = other DNA
tggaaaatatgattgttatctc

SEQ ID NO: 114564 - DNA, 22 bp, synthetic construct
  misc_feature 1..22: note = chemically synthesized
  source 1..22: mol_type = other DNA
gaaaatatgattgttatctcct

SEQ ID NO: 114565 - DNA, 22 bp, synthetic construct
  misc_feature 1..22: note = chemically synthesized
  source 1..22: mol_type = other DNA
ttatctcctgcctttttaaacc

SEQ ID NO: 114566 - DNA, 22 bp, synthetic construct
  misc_feature 1..22: note = chemically synthesized
  source 1..22: mol_type = other DNA
tctcctgcctttttaaacccaa

SEQ ID NO: 114567 - DNA, 22 bp, synthetic construct
  misc_feature 1..22: note = chemically synthesized
  source 1..22: mol_type = other DNA
ctgcctttttaaacccaaccat

SEQ ID NO: 114568 - DNA, 22 bp, synthetic construct
  misc_feature 1..22: note = chemically synthesized
  source 1..22: mol_type = other DNA
cctttttaaacccaaccatcaa

SEQ ID NO: 114569 - DNA, 22 bp, synthetic construct
  misc_feature 1..22: note = chemically synthesized
  source 1..22: mol_type = other DNA
tttaaacccaaccatcaaaatg

SEQ ID NO: 114570 - DNA, 22 bp, synthetic construct
  misc_feature 1..22: note = chemically synthesized
  source 1..22: mol_type = other DNA
ttaaacccaaccatcaaaatgt

SEQ ID NO: 114571 - DNA, 22 bp, synthetic construct
  misc_feature 1..22: note = chemically synthesized
  source 1..22: mol_type = other DNA
taaacccaaccatcaaaatgtg

SEQ ID NO: 114572 - DNA, 22 bp, synthetic construct
  misc_feature 1..22: note = chemically synthesized
  source 1..22: mol_type = other DNA
aaacccaaccatcaaaatgtgt

SEQ ID NO: 114573 - DNA, 22 bp, synthetic construct
  misc_feature 1..22: note = chemically synthesized
  source 1..22: mol_type = other DNA
aacccaaccatcaaaatgtgta

SEQ ID NO: 114574 - DNA, 22 bp, synthetic construct
  misc_feature 1..22: note = chemically synthesized
  source 1..22: mol_type = other DNA
gacatgtcatataaactcattc

SEQ ID NO: 114575 - DNA, 22 bp, synthetic construct
  misc_feature 1..22: note = chemically synthesized
  source 1..22: mol_type = other DNA
acatgtcatataaactcattca

SEQ ID NO: 114576 - DNA, 22 bp, synthetic construct
  misc_feature 1..22: note = chemically synthesized
  source 1..22: mol_type = other DNA
attcagggtcttgcccctgcct

SEQ ID NO: 114577 - DNA, 22 bp, synthetic construct
  misc_feature 1..22: note = chemically synthesized
  source 1..22: mol_type = other DNA
agggtcttgcccctgcctacct

SEQ ID NO: 114578 - DNA, 22 bp, synthetic construct
  misc_feature 1..22: note = chemically synthesized
  source 1..22: mol_type = other DNA
gcccctgcctacctctactgtt

SEQ ID NO: 114579 - DNA, 22 bp, synthetic construct
  misc_feature 1..22: note = chemically synthesized
  source 1..22: mol_type = other DNA
cccctgcctacctctactgttt

SEQ ID NO: 114580 - DNA, 22 bp, synthetic construct
  misc_feature 1..22: note = chemically synthesized
  source 1..22: mol_type = other DNA
cctacctctactgttttattcc

SEQ ID NO: 114581 - DNA, 22 bp, synthetic construct
  misc_feature 1..22: note = chemically synthesized
  source 1..22: mol_type = other DNA
cctctactgttttattccaagg

SEQ ID NO: 114582 - DNA, 22 bp, synthetic construct
  misc_feature 1..22: note = chemically synthesized
  source 1..22: mol_type = other DNA
tactgttttattccaaggtatt

SEQ ID NO: 114583 - DNA, 22 bp, synthetic construct
  misc_feature 1..22: note = chemically synthesized
  source 1..22: mol_type = other DNA
ctgttttattccaaggtattaa

SEQ ID NO: 114584 - DNA, 22 bp, synthetic construct
  misc_feature 1..22: note = chemically synthesized
  source 1..22: mol_type = other DNA
ttttattccaaggtattaactc

SEQ ID NO: 114585 - DNA, 22 bp, synthetic construct
  misc_feature 1..22: note = chemically synthesized
  source 1..22: mol_type = other DNA
tattccaaggtattaactctct

SEQ ID NO: 114586 - DNA, 22 bp, synthetic construct
  misc_feature 1..22: note = chemically synthesized
  source 1..22: mol_type = other DNA
attccaaggtattaactctctt

SEQ ID NO: 114587 - DNA, 22 bp, synthetic construct
  misc_feature 1..22: note = chemically synthesized
  source 1..22: mol_type = other DNA
ttccaaggtattaactctctta

SEQ ID NO: 114588 - DNA, 22 bp, synthetic construct
  misc_feature 1..22: note = chemically synthesized
  source 1..22: mol_type = other DNA
caaggtattaactctcttaaat

SEQ ID NO: 114589 - DNA, 22 bp, synthetic construct
  misc_feature 1..22: note = chemically synthesized
  source 1..22: mol_type = other DNA
actctcttaaatgttatatttg

SEQ ID NO: 114590 - DNA, 22 bp, synthetic construct
  misc_feature 1..22: note = chemically synthesized
  source 1..22: mol_type = other DNA
tcttaaatgttatatttgatca

SEQ ID NO: 114591 - DNA, 22 bp, synthetic construct
  misc_feature 1..22: note = chemically synthesized
  source 1..22: mol_type = other DNA
ttaaatgttatatttgatcacc

SEQ ID NO: 114592 - DNA, 22 bp, synthetic construct
  misc_feature 1..22: note = chemically synthesized
  source 1..22: mol_type = other DNA
aaatgttatatttgatcaccgg

SEQ ID NO: 114593 - DNA, 22 bp, synthetic construct
  misc_feature 1..22: note = chemically synthesized
  source 1..22: mol_type = other DNA
aatgttatatttgatcaccgga

SEQ ID NO: 114594 - DNA, 22 bp, synthetic construct
  misc_feature 1..22: note = chemically synthesized
  source 1..22: mol_type = other DNA
tatttgatcaccggaaaatctt

SEQ ID NO: 114595 - DNA, 22 bp, synthetic construct
  misc_feature 1..22: note = chemically synthesized
  source 1..22: mol_type = other DNA
gatcaccggaaaatcttatagt

SEQ ID NO: 114596 - DNA, 22 bp, synthetic construct
  misc_feature 1..22: note = chemically synthesized
  source 1..22: mol_type = other DNA
atcaccggaaaatcttatagtt

SEQ ID NO: 114597 - DNA, 22 bp, synthetic construct
  misc_feature 1..22: note = chemically synthesized
  source 1..22: mol_type = other DNA
atagttctcaaaacacataaac

SEQ ID NO: 114598 - DNA, 22 bp, synthetic construct
  misc_feature 1..22: note = chemically synthesized
  source 1..22: mol_type = other DNA
tagttctcaaaacacataaaca

SEQ ID NO: 114599 - DNA, 22 bp, synthetic construct
  misc_feature 1..22: note = chemically synthesized
  source 1..22: mol_type = other DNA
tcaaaacacataaacaactttt

SEQ ID NO: 114600 - DNA, 22 bp, synthetic construct
  misc_feature 1..22: note = chemically synthesized
  source 1..22: mol_type = other DNA
aaaacacataaacaacttttcc

SEQ ID NO: 114601 - DNA, 22 bp, synthetic construct
  misc_feature 1..22: note = chemically synthesized
  source 1..22: mol_type = other DNA
ttcctcacctccatgcccttgc

SEQ ID NO: 114602 - DNA, 22 bp, synthetic construct
  misc_feature 1..22: note = chemically synthesized
  source 1..22: mol_type = other DNA
tcctcacctccatgcccttgct

SEQ ID NO: 114603 - DNA, 22 bp, synthetic construct
  misc_feature 1..22: note = chemically synthesized
  source 1..22: mol_type = other DNA
cctcacctccatgcccttgctt

SEQ ID NO: 114604 - DNA, 22 bp, synthetic construct
  misc_feature 1..22: note = chemically synthesized
  source 1..22: mol_type = other DNA
ctcacctccatgcccttgctta

SEQ ID NO: 114605 - DNA, 22 bp, synthetic construct
  misc_feature 1..22: note = chemically synthesized
  source 1..22: mol_type = other DNA
acctccatgcccttgcttacac

SEQ ID NO: 114606 - DNA, 22 bp, synthetic construct
  misc_feature 1..22: note = chemically synthesized
  source 1..22: mol_type = other DNA
catgcccttgcttacactaccc

SEQ ID NO: 114607 - DNA, 22 bp, synthetic construct
  misc_feature 1..22: note = chemically synthesized
  source 1..22: mol_type = other DNA
gcttacactacccctccttttt

SEQ ID NO: 114608 - DNA, 22 bp, synthetic construct
  misc_feature 1..22: note = chemically synthesized
  source 1..22: mol_type = other DNA
cttacactacccctcctttttg

SEQ ID NO: 114609 - DNA, 22 bp, synthetic construct
  misc_feature 1..22: note = chemically synthesized
  source 1..22: mol_type = other DNA
acactacccctcctttttggaa

SEQ ID NO: 114610 - DNA, 22 bp, synthetic construct
  misc_feature 1..22: note = chemically synthesized
  source 1..22: mol_type = other DNA
cactacccctcctttttggaaa

SEQ ID NO: 114611 - DNA, 22 bp, synthetic construct
  misc_feature 1..22: note = chemically synthesized
  source 1..22: mol_type = other DNA
cccctcctttttggaaatacct

SEQ ID NO: 114612 - DNA, 22 bp, synthetic construct
  misc_feature 1..22: note = chemically synthesized
  source 1..22: mol_type = other DNA
ctttttggaaatacctttctat

SEQ ID NO: 114613 - DNA, 22 bp, synthetic construct
  misc_feature 1..22: note = chemically synthesized
  source 1..22: mol_type = other DNA
tttggaaatacctttctataaa

SEQ ID NO: 114614 - DNA, 22 bp, synthetic construct
  misc_feature 1..22: note = chemically synthesized
  source 1..22: mol_type = other DNA
ttggaaatacctttctataaag

SEQ ID NO: 114615 - DNA, 22 bp, synthetic construct
  misc_feature 1..22: note = chemically synthesized
  source 1..22: mol_type = other DNA
tggaaatacctttctataaagc

SEQ ID NO: 114616 - DNA, 22 bp, synthetic construct
  misc_feature 1..22: note = chemically synthesized
  source 1..22: mol_type = other DNA
ggaaatacctttctataaagcc

SEQ ID NO: 114617 - DNA, 22 bp, synthetic construct
  misc_feature 1..22: note = chemically synthesized
  source 1..22: mol_type = other DNA
gaaatacctttctataaagccc

SEQ ID NO: 114618 - DNA, 22 bp, synthetic construct
  misc_feature 1..22: note = chemically synthesized
  source 1..22: mol_type = other DNA
tctataaagccctatctgtggt

SEQ ID NO: 114619 - DNA, 22 bp, synthetic construct
  misc_feature 1..22: note = chemically synthesized
  source 1..22: mol_type = other DNA
ctataaagccctatctgtggtt

SEQ ID NO: 114620 - DNA, 22 bp, synthetic construct
  misc_feature 1..22: note = chemically synthesized
  source 1..22: mol_type = other DNA
tataaagccctatctgtggttg

SEQ ID NO: 114621 - DNA, 22 bp, synthetic construct
  misc_feature 1..22: note = chemically synthesized
  source 1..22: mol_type = other DNA
taaagccctatctgtggttgat

SEQ ID NO: 114622 - DNA, 22 bp, synthetic construct
  misc_feature 1..22: note = chemically synthesized
  source 1..22: mol_type = other DNA
tctgtggttgattcttaattag

SEQ ID NO: 114623 - DNA, 22 bp, synthetic construct
  misc_feature 1..22: note = chemically synthesized
  source 1..22: mol_type = other DNA
tggttgattcttaattagtctt

SEQ ID NO: 114624 - DNA, 22 bp, synthetic construct
  misc_feature 1..22: note = chemically synthesized
  source 1..22: mol_type = other DNA
attcttaattagtcttcatagc

SEQ ID NO: 114625 - DNA, 22 bp, synthetic construct
  misc_feature 1..22: note = chemically synthesized
  source 1..22: mol_type = other DNA
ttaattagtcttcatagctcag

SEQ ID NO: 114626 - DNA, 22 bp, synthetic construct
  misc_feature 1..22: note = chemically synthesized
  source 1..22: mol_type = other DNA
aattagtcttcatagctcaggt

SEQ ID NO: 114627 - DNA, 22 bp, synthetic construct
  misc_feature 1..22: note = chemically synthesized
  source 1..22: mol_type = other DNA
attagtcttcatagctcaggtt

SEQ ID NO: 114628 - DNA, 22 bp, synthetic construct
  misc_feature 1..22: note = chemically synthesized
  source 1..22: mol_type = other DNA
gtcttcatagctcaggttgggg

SEQ ID NO: 114629 - DNA, 22 bp, synthetic construct
  misc_feature 1..22: note = chemically synthesized
  source 1..22: mol_type = other DNA
catagctcaggttggggccttc

SEQ ID NO: 114630 - DNA, 22 bp, synthetic construct
  misc_feature 1..22: note = chemically synthesized
  source 1..22: mol_type = other DNA
atagctcaggttggggccttcc

SEQ ID NO: 114631 - DNA, 22 bp, synthetic construct
  misc_feature 1..22: note = chemically synthesized
  source 1..22: mol_type = other DNA
aggttggggccttccctggccc

SEQ ID NO: 114632 - DNA, 22 bp, synthetic construct
  misc_feature 1..22: note = chemically synthesized
  source 1..22: mol_type = other DNA
gggccttccctggccctcacct

SEQ ID NO: 114633 - DNA, 22 bp, synthetic construct
  misc_feature 1..22: note = chemically synthesized
  source 1..22: mol_type = other DNA
ccctggccctcacctgtgggcc

SEQ ID NO: 114634 - DNA, 22 bp, synthetic construct
  misc_feature 1..22: note = chemically synthesized
  source 1..22: mol_type = other DNA
cctggccctcacctgtgggcca

SEQ ID NO: 114635 - DNA, 22 bp, synthetic construct
  misc_feature 1..22: note = chemically synthesized
  source 1..22: mol_type = other DNA
gccctcacctgtgggccaggtg

SEQ ID NO: 114636 - DNA, 22 bp, synthetic construct
  misc_feature 1..22: note = chemically synthesized
  source 1..22: mol_type = other DNA
acctgtgggccaggtgctaccc

SEQ ID NO: 114637 - DNA, 22 bp, synthetic construct
  misc_feature 1..22: note = chemically synthesized
  source 1..22: mol_type = other DNA
tgggccaggtgctacccacaaa

SEQ ID NO: 114638 - DNA, 22 bp, synthetic construct
  misc_feature 1..22: note = chemically synthesized
  source 1..22: mol_type = other DNA
cccacaaatattaatataattg

SEQ ID NO: 114639 - DNA, 22 bp, synthetic construct
  misc_feature 1..22: note = chemically synthesized
  source 1..22: mol_type = other DNA
atataattgccatgtccatctc

SEQ ID NO: 114640 - DNA, 22 bp, synthetic construct
  misc_feature 1..22: note = chemically synthesized
  source 1..22: mol_type = other DNA
ccatgtccatctcttacattgc

SEQ ID NO: 114641 - DNA, 22 bp, synthetic construct
  misc_feature 1..22: note = chemically synthesized
  source 1..22: mol_type = other DNA
ttacattgcgctaagatagttg

SEQ ID NO: 114642 - DNA, 22 bp, synthetic construct
  misc_feature 1..22: note = chemically synthesized
  source 1..22: mol_type = other DNA
acattgcgctaagatagttgtt

SEQ ID NO: 114643 - DNA, 22 bp, synthetic construct
  misc_feature 1..22: note = chemically synthesized
  source 1..22: mol_type = other DNA
cattgcgctaagatagttgttt

SEQ ID NO: 114644 - DNA, 22 bp, synthetic construct
  misc_feature 1..22: note = chemically synthesized
  source 1..22: mol_type = other DNA
cgctaagatagttgttttccta

SEQ ID NO: 114645 - DNA, 22 bp, synthetic construct
  misc_feature 1..22: note = chemically synthesized
  source 1..22: mol_type = other DNA
agatagttgttttcctatctta

SEQ ID NO: 114646 - DNA, 22 bp, synthetic construct
  misc_feature 1..22: note = chemically synthesized
  source 1..22: mol_type = other DNA
ttttcctatcttatgtgtgata

SEQ ID NO: 114647 - DNA, 22 bp, synthetic construct
  misc_feature 1..22: note = chemically synthesized
  source 1..22: mol_type = other DNA
tcctatcttatgtgtgatagat

SEQ ID NO: 114648 - DNA, 22 bp, synthetic construct
  misc_feature 1..22: note = chemically synthesized
  source 1..22: mol_type = other DNA
cctatcttatgtgtgatagatg

SEQ ID NO: 114649 - DNA, 22 bp, synthetic construct
  misc_feature 1..22: note = chemically synthesized
  source 1..22: mol_type = other DNA
ctatcttatgtgtgatagatgc

SEQ ID NO: 114650 - DNA, 22 bp, synthetic construct
  misc_feature 1..22: note = chemically synthesized
  source 1..22: mol_type = other DNA
tcttatgtgtgatagatgcccc

SEQ ID NO: 114651 - DNA, 22 bp, synthetic construct
  misc_feature 1..22: note = chemically synthesized
  source 1..22: mol_type = other DNA
atgtgtgatagatgcccctgaa

SEQ ID NO: 114652 - DNA, 22 bp, synthetic construct
  misc_feature 1..22: note = chemically synthesized
  source 1..22: mol_type = other DNA
tgtgtgatagatgcccctgaat

SEQ ID NO: 114653 - DNA, 22 bp, synthetic construct
  misc_feature 1..22: note = chemically synthesized
  source 1..22: mol_type = other DNA
aataatagcaatatttgctgtt

SEQ ID NO: 114654 - DNA, 22 bp, synthetic construct
  misc_feature 1..22: note = chemically synthesized
  source 1..22: mol_type = other DNA
gctgttgctggtaataatagca

SEQ ID NO: 114655 - DNA, 22 bp, synthetic construct
  misc_feature 1..22: note = chemically synthesized
  source 1..22: mol_type = other DNA
ctgttgctggtaataatagcag

SEQ ID NO: 114656 - DNA, 22 bp, synthetic construct
  misc_feature 1..22: note = chemically synthesized
  source 1..22: mol_type = other DNA
ttgctggtaataatagcagcat

SEQ ID NO: 114657 - DNA, 22 bp, synthetic construct
  misc_feature 1..22: note = chemically synthesized
  source 1..22: mol_type = other DNA
ctggtaataatagcagcattgt

SEQ ID NO: 114658 - DNA, 22 bp, synthetic construct
  misc_feature 1..22: note = chemically synthesized
  source 1..22: mol_type = other DNA
gtaataatagcagcattgttgc

SEQ ID NO: 114659 - DNA, 22 bp, synthetic construct
  misc_feature 1..22: note = chemically synthesized
  source 1..22: mol_type = other DNA
ttgctgttatactgtccttggc

SEQ ID NO: 114660 - DNA, 22 bp, synthetic construct
  misc_feature 1..22: note = chemically synthesized
  source 1..22: mol_type = other DNA
ctgttatactgtccttggctag

SEQ ID NO: 114661 - DNA, 22 bp, synthetic construct
  misc_feature 1..22: note = chemically synthesized
  source 1..22: mol_type = other DNA
ttatactgtccttggctaggat

SEQ ID NO: 114662 - DNA, 22 bp, synthetic construct
  misc_feature 1..22: note = chemically synthesized
  source 1..22: mol_type = other DNA
tactgtccttggctaggatccc

SEQ ID NO: 114663 - DNA, 22 bp, synthetic construct
  misc_feature 1..22: note = chemically synthesized
  source 1..22: mol_type = other DNA
tccttggctaggatcccagtga

SEQ ID NO: 114664 - DNA, 22 bp, synthetic construct
  misc_feature 1..22: note = chemically synthesized
  source 1..22: mol_type = other DNA
ggctaggatcccagtgaaatag

SEQ ID NO: 114665 - DNA, 22 bp, synthetic construct
  misc_feature 1..22: note = chemically synthesized
  source 1..22: mol_type = other DNA
gctaggatcccagtgaaatagg

SEQ ID NO: 114666 - DNA, 22 bp, synthetic construct
  misc_feature 1..22: note = chemically synthesized
  source 1..22: mol_type = other DNA
ggatcccagtgaaataggctaa

SEQ ID NO: 114667 - DNA, 22 bp, synthetic construct
  misc_feature 1..22: note = chemically synthesized
  source 1..22: mol_type = other DNA
aaatcatgttcttaataaatgc

SEQ ID NO: 114668 - DNA, 22 bp, synthetic construct
  misc_feature 1..22: note = chemically synthesized
  source 1..22: mol_type = other DNA
ttaataaatgcaggattttctg

SEQ ID NO: 114669 - DNA, 22 bp, synthetic construct
  misc_feature 1..22: note = chemically synthesized
  source 1..22: mol_type = other DNA
aataaatgcaggattttctgaa

SEQ ID NO: 114670 - DNA, 22 bp, synthetic construct
  misc_feature 1..22: note = chemically synthesized
  source 1..22: mol_type = other DNA
ataaatgcaggattttctgaaa

SEQ ID NO: 114671 - DNA, 22 bp, synthetic construct
  misc_feature 1..22: note = chemically synthesized
  source 1..22: mol_type = other DNA
tctgaaatttttctggtagtgg

SEQ ID NO: 114672 - DNA, 22 bp, synthetic construct
  misc_feature 1..22: note = chemically synthesized
  source 1..22: mol_type = other DNA
ctgaaatttttctggtagtggt

SEQ ID NO: 114673 - DNA, 22 bp, synthetic construct
  misc_feature 1..22: note = chemically synthesized
  source 1..22: mol_type = other DNA
tgaaatttttctggtagtggtg

SEQ ID NO: 114674 - DNA, 22 bp, synthetic construct
  misc_feature 1..22: note = chemically synthesized
  source 1..22: mol_type = other DNA
aaatttttctggtagtggtgcc

SEQ ID NO: 114675 - DNA, 22 bp, synthetic construct
  misc_feature 1..22: note = chemically synthesized
  source 1..22: mol_type = other DNA
ttctggtagtggtgccctctcc

SEQ ID NO: 114676 - DNA, 22 bp, synthetic construct
  misc_feature 1..22: note = chemically synthesized
  source 1..22: mol_type = other DNA
tctggtagtggtgccctctcct

SEQ ID NO: 114677 - DNA, 22 bp, synthetic construct
  misc_feature 1..22: note = chemically synthesized
  source 1..22: mol_type = other DNA
ctggtagtggtgccctctccta

SEQ ID NO: 114678 - DNA, 22 bp, synthetic construct
  misc_feature 1..22: note = chemically synthesized
  source 1..22: mol_type = other DNA
tggtagtggtgccctctcctac

SEQ ID NO: 114679 - DNA, 22 bp, synthetic construct
  misc_feature 1..22: note = chemically synthesized
  source 1..22: mol_type = other DNA
gtagtggtgccctctcctacaa

SEQ ID NO: 114680 - DNA, 22 bp, synthetic construct
  misc_feature 1..22: note = chemically synthesized
  source 1..22: mol_type = other DNA
tcctacaagcctaaatgaagat

SEQ ID NO: 114681 - DNA, 22 bp, synthetic construct
  misc_feature 1..22: note = chemically synthesized
  source 1..22: mol_type = other DNA
ctacaagcctaaatgaagatgc

SEQ ID NO: 114682 - DNA, 22 bp, synthetic construct
  misc_feature 1..22: note = chemically synthesized
  source 1..22: mol_type = other DNA
caagcctaaatgaagatgctca

SEQ ID NO: 114683 - DNA, 22 bp, synthetic construct
  misc_feature 1..22: note = chemically synthesized
  source 1..22: mol_type = other DNA
aatgaagatgctcagctccttc

SEQ ID NO: 114684 - DNA, 22 bp, synthetic construct
  misc_feature 1..22: note = chemically synthesized
  source 1..22: mol_type = other DNA
agctccttcctattgtaccgaa

SEQ ID NO: 114685 - DNA, 22 bp, synthetic construct
  misc_feature 1..22: note = chemically synthesized
  source 1..22: mol_type = other DNA
cttcctattgtaccgaagccag

SEQ ID NO: 114686 - DNA, 22 bp, synthetic construct
  misc_feature 1..22: note = chemically synthesized
  source 1..22: mol_type = other DNA
cctattgtaccgaagccagaac

SEQ ID NO: 114687 - DNA, 22 bp, synthetic construct
  misc_feature 1..22: note = chemically synthesized
  source 1..22: mol_type = other DNA
ctattgtaccgaagccagaacc

SEQ ID NO: 114688 - DNA, 22 bp, synthetic construct
  misc_feature 1..22: note = chemically synthesized
  source 1..22: mol_type = other DNA
ttgtaccgaagccagaaccttc

SEQ ID NO: 114689 - DNA, 22 bp, synthetic construct
  misc_feature 1..22: note = chemically synthesized
  source 1..22: mol_type = other DNA
taccgaagccagaaccttcctc

SEQ ID NO: 114690 - DNA, 22 bp, synthetic construct
  misc_feature 1..22: note = chemically synthesized
  source 1..22: mol_type = other DNA
cctcataactacaatttaataa

SEQ ID NO: 114691 - DNA, 22 bp, synthetic construct
  misc_feature 1..22: note = chemically synthesized
  source 1..22: mol_type = other DNA
ctcataactacaatttaataag

SEQ ID NO: 114692 - DNA, 22 bp, synthetic construct
  misc_feature 1..22: note = chemically synthesized
  source 1..22: mol_type = other DNA
ataactacaatttaataagaca

SEQ ID NO: 114693 - DNA, 22 bp, synthetic construct
  misc_feature 1..22: note = chemically synthesized
  source 1..22: mol_type = other DNA
caatttaataagacatcctgct

SEQ ID NO: 114694 - DNA, 22 bp, synthetic construct
  misc_feature 1..22: note = chemically synthesized
  source 1..22: mol_type = other DNA
aataagacatcctgctctctgc

SEQ ID NO: 114695 - DNA, 22 bp, synthetic construct
  misc_feature 1..22: note = chemically synthesized
  source 1..22: mol_type = other DNA
ataagacatcctgctctctgca

SEQ ID NO: 114696 - DNA, 22 bp, synthetic construct
  misc_feature 1..22: note = chemically synthesized
  source 1..22: mol_type = other DNA
ctctctgcatcttgtcctatca

SEQ ID NO: 114697 - DNA, 22 bp, synthetic construct
  misc_feature 1..22: note = chemically synthesized
  source 1..22: mol_type = other DNA
tctgcatcttgtcctatcaccc

SEQ ID NO: 114698 - DNA, 22 bp, synthetic construct
  misc_feature 1..22: note = chemically synthesized
  source 1..22: mol_type = other DNA
tgcatcttgtcctatcaccctg

SEQ ID NO: 114699 - DNA, 22 bp, synthetic construct
  misc_feature 1..22: note = chemically synthesized
  source 1..22: mol_type = other DNA
catcttgtcctatcaccctgac

SEQ ID NO: 114700 - DNA, 22 bp, synthetic construct
  misc_feature 1..22: note = chemically synthesized
  source 1..22: mol_type = other DNA
gtcctatcaccctgactctcct

SEQ ID NO: 114701 - DNA, 22 bp, synthetic construct
  misc_feature 1..22: note = chemically synthesized
  source 1..22: mol_type = other DNA
tcctatcaccctgactctccta

SEQ ID NO: 114702 - DNA, 22 bp, synthetic construct
  misc_feature 1..22: note = chemically synthesized
  source 1..22: mol_type = other DNA
tcaccctgactctcctacactc

SEQ ID NO: 114703 - DNA, 22 bp, synthetic construct
  misc_feature 1..22: note = chemically synthesized
  source 1..22: mol_type = other DNA
actctcctacactctggcccta

SEQ ID NO: 114704 - DNA, 22 bp, synthetic construct
  misc_feature 1..22: note = chemically synthesized
  source 1..22: mol_type = other DNA
tcctacactctggccctaacaa

SEQ ID NO: 114705 - DNA, 22 bp, synthetic construct
  misc_feature 1..22: note = chemically synthesized
  source 1..22: mol_type = other DNA
ctacactctggccctaacaacc

SEQ ID NO: 114706 - DNA, 22 bp, synthetic construct
  misc_feature 1..22: note = chemically synthesized
  source 1..22: mol_type = other DNA
cactctggccctaacaaccagt

SEQ ID NO: 114707 - DNA, 22 bp, synthetic construct
  misc_feature 1..22: note = chemically synthesized
  source 1..22: mol_type = other DNA
tggccctaacaaccagttactt

SEQ ID NO: 114708 - DNA, 22 bp, synthetic construct
  misc_feature 1..22: note = chemically synthesized
  source 1..22: mol_type = other DNA
gccctaacaaccagttacttac

SEQ ID NO: 114709 - DNA, 22 bp, synthetic construct
  misc_feature 1..22: note = chemically synthesized
  source 1..22: mol_type = other DNA
acaaccagttacttacccggtg

SEQ ID NO: 114710 - DNA, 22 bp, synthetic construct
  misc_feature 1..22: note = chemically synthesized
  source 1..22: mol_type = other DNA
cttacccggtgtaaggtggtgc

SEQ ID NO: 114711 - DNA, 22 bp, synthetic construct
  misc_feature 1..22: note = chemically synthesized
  source 1..22: mol_type = other DNA
acccggtgtaaggtggtgccac

SEQ ID NO: 114712 - DNA, 22 bp, synthetic construct
  misc_feature 1..22: note = chemically synthesized
  source 1..22: mol_type = other DNA
cccggtgtaaggtggtgccact

SEQ ID NO: 114713 - DNA, 22 bp, synthetic construct
  misc_feature 1..22: note = chemically synthesized
  source 1..22: mol_type = other DNA
ctgtctgggtgtggtctgatca

SEQ ID NO: 114714 - DNA, 22 bp, synthetic construct
  misc_feature 1..22: note = chemically synthesized
  source 1..22: mol_type = other DNA
tgtctgggtgtggtctgatcac

SEQ ID NO: 114715 - DNA, 22 bp, synthetic construct
  misc_feature 1..22: note = chemically synthesized
  source 1..22: mol_type = other DNA
tctgggtgtggtctgatcacaa

SEQ ID NO: 114716 - DNA, 22 bp, synthetic construct
  misc_feature 1..22: note = chemically synthesized
  source 1..22: mol_type = other DNA
ggtgtggtctgatcacaatggc

SEQ ID NO: 114717 - DNA, 22 bp, synthetic construct
  misc_feature 1..22: note = chemically synthesized
  source 1..22: mol_type = other DNA
atcacaatggcatgtcataaac

SEQ ID NO: 114718 - DNA, 22 bp, synthetic construct
  misc_feature 1..22: note = chemically synthesized
  source 1..22: mol_type = other DNA
catgggtctctgtcctggtttt

SEQ ID NO: 114719 - DNA, 22 bp, synthetic construct
  misc_feature 1..22: note = chemically synthesized
  source 1..22: mol_type = other DNA
atgggtctctgtcctggtttta

SEQ ID NO: 114720 - DNA, 22 bp, synthetic construct
  misc_feature 1..22: note = chemically synthesized
  source 1..22: mol_type = other DNA
tgtcctggttttagatctgtat

SEQ ID NO: 114721 - DNA, 22 bp, synthetic construct
  misc_feature 1..22: note = chemically synthesized
  source 1..22: mol_type = other DNA
tcctggttttagatctgtatgc

SEQ ID NO: 114722 - DNA, 22 bp, synthetic construct
  misc_feature 1..22: note = chemically synthesized
  source 1..22: mol_type = other DNA
gttttagatctgtatgccccgt

SEQ ID NO: 114723 - DNA, 22 bp, synthetic construct
  misc_feature 1..22: note = chemically synthesized
  source 1..22: mol_type = other DNA
tagatctgtatgccccgttttg

SEQ ID NO: 114724 - DNA, 22 bp, synthetic construct
  misc_feature 1..22: note = chemically synthesized
  source 1..22: mol_type = other DNA
agatctgtatgccccgttttgg

SEQ ID NO: 114725 - DNA, 22 bp, synthetic construct
  misc_feature 1..22: note = chemically synthesized
  source 1..22: mol_type = other DNA
gatctgtatgccccgttttgga

SEQ ID NO: 114726 - DNA, 22 bp, synthetic construct
  misc_feature 1..22: note = chemically synthesized
  source 1..22: mol_type = other DNA
tatgccccgttttggagctcat

SEQ ID NO: 114727 - DNA, 22 bp, synthetic construct
  misc_feature 1..22: note = chemically synthesized
  source 1..22: mol_type = other DNA
tggagctcatccccacacaact

SEQ ID NO: 114728 - DNA, 22 bp, synthetic construct
  misc_feature 1..22: note = chemically synthesized
  source 1..22: mol_type = other DNA
ggagctcatccccacacaactc

SEQ ID NO: 114729 - DNA, 22 bp, synthetic construct
  misc_feature 1..22: note = chemically synthesized
  source 1..22: mol_type = other DNA
gagctcatccccacacaactct

SEQ ID NO: 114730 - DNA, 22 bp, synthetic construct
  misc_feature 1..22: note = chemically synthesized
  source 1..22: mol_type = other DNA
atccccacacaactctaatcaa

SEQ ID NO: 114731 - DNA, 22 bp, synthetic construct
  misc_feature 1..22: note = chemically synthesized
  source 1..22: mol_type = other DNA
taatcaaccatgccctatttaa

SEQ ID NO: 114732 - DNA, 22 bp, synthetic construct
  misc_feature 1..22: note = chemically synthesized
  source 1..22: mol_type = other DNA
atcaaccatgccctatttaaag

SEQ ID NO: 114733 - DNA, 22 bp, synthetic construct
  misc_feature 1..22: note = chemically synthesized
  source 1..22: mol_type = other DNA
tttaaaggatgtaataccttgc

SEQ ID NO: 114734 - DNA, 22 bp, synthetic construct
  misc_feature 1..22: note = chemically synthesized
  source 1..22: mol_type = other DNA
aaaggatgtaataccttgcttc

SEQ ID NO: 114735 - DNA, 22 bp, synthetic construct
  misc_feature 1..22: note = chemically synthesized
  source 1..22: mol_type = other DNA
aaggatgtaataccttgcttca

SEQ ID NO: 114736 - DNA, 22 bp, synthetic construct
  misc_feature 1..22: note = chemically synthesized
  source 1..22: mol_type = other DNA
gcttcatgccagtctccaagag

SEQ ID NO: 114737 - DNA, 22 bp, synthetic construct
  misc_feature 1..22: note = chemically synthesized
  source 1..22: mol_type = other DNA
cttcatgccagtctccaagagt

SEQ ID NO: 114738 - DNA, 22 bp, synthetic construct
  misc_feature 1..22: note = chemically synthesized
  source 1..22: mol_type = other DNA
catgccagtctccaagagtgtg

SEQ ID NO: 114739 - DNA, 22 bp, synthetic construct
  misc_feature 1..22: note = chemically synthesized
  source 1..22: mol_type = other DNA
atgccagtctccaagagtgtgt

SEQ ID NO: 114740 - DNA, 22 bp, synthetic construct
  misc_feature 1..22: note = chemically synthesized
  source 1..22: mol_type = other DNA
caagagtgtgtgtgtgtttgtg

SEQ ID NO: 114741 - DNA, 22 bp, synthetic construct
  misc_feature 1..22: note = chemically synthesized
  source 1..22: mol_type = other DNA
gtggtggagaggttgtgtgtga

SEQ ID NO: 114742 - DNA, 22 bp, synthetic construct
  misc_feature 1..22: note = chemically synthesized
  source 1..22: mol_type = other DNA
tggtggagaggttgtgtgtgag

SEQ ID NO: 114743 - DNA, 22 bp, synthetic construct
  misc_feature 1..22: note = chemically synthesized
  source 1..22: mol_type = other DNA
tgtgtgagttttgaaagaaaag

SEQ ID NO: 114744 - DNA, 22 bp, synthetic construct
  misc_feature 1..22: note = chemically synthesized
  source 1..22: mol_type = other DNA
tgaaagaaaagagaaatgtaca

SEQ ID NO: 114745 - DNA, 22 bp, synthetic construct
  misc_feature 1..22: note = chemically synthesized
  source 1..22: mol_type = other DNA
gaaagaaaagagaaatgtacac

SEQ ID NO: 114746 - DNA, 22 bp, synthetic construct
  misc_feature 1..22: note = chemically synthesized
  source 1..22: mol_type = other DNA
aaagaaaagagaaatgtacaca

SEQ ID NO: 114747 - DNA, 22 bp, synthetic construct
  misc_feature 1..22: note = chemically synthesized
  source 1..22: mol_type = other DNA
atcacattaactcaggttctgt

SEQ ID NO: 114748 - DNA, 22 bp, synthetic construct
  misc_feature 1..22: note = chemically synthesized
  source 1..22: mol_type = other DNA
actcaggttctgtagcatagtc

SEQ ID NO: 114749 - DNA, 22 bp, synthetic construct
  misc_feature 1..22: note = chemically synthesized
  source 1..22: mol_type = other DNA
aggttctgtagcatagtctggg

SEQ ID NO: 114750 - DNA, 22 bp, synthetic construct
  misc_feature 1..22: note = chemically synthesized
  source 1..22: mol_type = other DNA
tgtagcatagtctggggaagaa

SEQ ID NO: 114751 - DNA, 22 bp, synthetic construct
  misc_feature 1..22: note = chemically synthesized
  source 1..22: mol_type = other DNA
tagcatagtctggggaagaagt

SEQ ID NO: 114752 - DNA, 22 bp, synthetic construct
  misc_feature 1..22: note = chemically synthesized
  source 1..22: mol_type = other DNA
gggaagaagtacaagactattt

SEQ ID NO: 114753 - DNA, 22 bp, synthetic construct
  misc_feature 1..22: note = chemically synthesized
  source 1..22: mol_type = other DNA
tttttttttttctaaatgttga

SEQ ID NO: 114754 - DNA, 22 bp, synthetic construct
  misc_feature 1..22: note = chemically synthesized
  source 1..22: mol_type = other DNA
ttttttttctaaatgttgatgg

SEQ ID NO: 114755 - DNA, 22 bp, synthetic construct
  misc_feature 1..22: note = chemically synthesized
  source 1..22: mol_type = other DNA
tttttttctaaatgttgatggc

SEQ ID NO: 114756 - DNA, 22 bp, synthetic construct
  misc_feature 1..22: note = chemically synthesized
  source 1..22: mol_type = other DNA
ttttttctaaatgttgatggca

SEQ ID NO: 114757 - DNA, 22 bp, synthetic construct
  misc_feature 1..22: note = chemically synthesized
  source 1..22: mol_type = other DNA
tttttctaaatgttgatggcat

SEQ ID NO: 114758 - DNA, 22 bp, synthetic construct
  misc_feature 1..22: note = chemically synthesized
  source 1..22: mol_type = other DNA
ttttctaaatgttgatggcatt

SEQ ID NO: 114759 - DNA, 22 bp, synthetic construct
  misc_feature 1..22: note = chemically synthesized
  source 1..22: mol_type = other DNA
tttctaaatgttgatggcattt

SEQ ID NO: 114760 - DNA, 22 bp, synthetic construct
  misc_feature 1..22: note = chemically synthesized
  source 1..22: mol_type = other DNA
ttctaaatgttgatggcatttg

SEQ ID NO: 114761 - DNA, 22 bp, synthetic construct
  misc_feature 1..22: note = chemically synthesized
  source 1..22: mol_type = other DNA
tctaaatgttgatggcatttgc

SEQ ID NO: 114762 - DNA, 22 bp, synthetic construct
  misc_feature 1..22: note = chemically synthesized
  source 1..22: mol_type = other DNA
ctaaatgttgatggcatttgct

SEQ ID NO: 114763 - DNA, 22 bp, synthetic construct
  misc_feature 1..22: note = chemically synthesized
  source 1..22: mol_type = other DNA
taaatgttgatggcatttgcta

SEQ ID NO: 114764 - DNA, 22 bp, synthetic construct
  misc_feature 1..22: note = chemically synthesized
  source 1..22: mol_type = other DNA
aatgttgatggcatttgctacc

SEQ ID NO: 114765 - DNA, 22 bp, synthetic construct
  misc_feature 1..22: note = chemically synthesized
  source 1..22: mol_type = other DNA
atggcatttgctaccagaaaag

SEQ ID NO: 114766 - DNA, 22 bp, synthetic construct
  misc_feature 1..22: note = chemically synthesized
  source 1..22: mol_type = other DNA
gctaccagaaaagaaggaaaaa

SEQ ID NO: 114767 - DNA, 22 bp, synthetic construct
  misc_feature 1..22: note = chemically synthesized
  source 1..22: mol_type = other DNA
ctaccagaaaagaaggaaaaaa

SEQ ID NO: 114768 - DNA, 22 bp, synthetic construct
  misc_feature 1..22: note = chemically synthesized
  source 1..22: mol_type = other DNA
ccagaaaagaaggaaaaaagtt

SEQ ID NO: 114769 - DNA, 22 bp, synthetic construct
  misc_feature 1..22: note = chemically synthesized
  source 1..22: mol_type = other DNA
tgtaaaggctacttgttgtagg

SEQ ID NO: 114770 - DNA, 22 bp, synthetic construct
  misc_feature 1..22: note = chemically synthesized
  source 1..22: mol_type = other DNA
gtaaaggctacttgttgtaggg

SEQ ID NO: 114771 - DNA, 22 bp, synthetic construct
  misc_feature 1..22: note = chemically synthesized
  source 1..22: mol_type = other DNA
taaaggctacttgttgtagggc

SEQ ID NO: 114772 - DNA, 22 bp, synthetic construct
  misc_feature 1..22: note = chemically synthesized
  source 1..22: mol_type = other DNA
cttgttgtagggctcattgaag

SEQ ID NO: 114773 - DNA, 22 bp, synthetic construct
  misc_feature 1..22: note = chemically synthesized
  source 1..22: mol_type = other DNA
gttgtagggctcattgaaggaa

SEQ ID NO: 114774 - DNA, 22 bp, synthetic construct
  misc_feature 1..22: note = chemically synthesized
  source 1..22: mol_type = other DNA
ttgtagggctcattgaaggaaa

SEQ ID NO: 114775 - DNA, 22 bp, synthetic construct
  misc_feature 1..22: note = chemically synthesized
  source 1..22: mol_type = other DNA
tagggctcattgaaggaaagtc

SEQ ID NO: 114776 - DNA, 22 bp, synthetic construct
  misc_feature 1..22: note = chemically synthesized
  source 1..22: mol_type = other DNA
attgaaggaaagtccagtgcat

SEQ ID NO: 114777 - DNA, 22 bp, synthetic construct
  misc_feature 1..22: note = chemically synthesized
  source 1..22: mol_type = other DNA
aaggaaagtccagtgcattcaa

SEQ ID NO: 114778 - DNA, 22 bp, synthetic construct
  misc_feature 1..22: note = chemically synthesized
  source 1..22: mol_type = other DNA
aaagatgaagtagagagctttg

SEQ ID NO: 114779 - DNA, 22 bp, synthetic construct
  misc_feature 1..22: note = chemically synthesized
  source 1..22: mol_type = other DNA
tgggaaagcctgagacactgac

SEQ ID NO: 114780 - DNA, 22 bp, synthetic construct
  misc_feature 1..22: note = chemically synthesized
  source 1..22: mol_type = other DNA
gggaaagcctgagacactgacc

SEQ ID NO: 114781 - DNA, 22 bp, synthetic construct
  misc_feature 1..22: note = chemically synthesized
  source 1..22: mol_type = other DNA
ggaaagcctgagacactgacct

SEQ ID NO: 114782 - DNA, 22 bp, synthetic construct
  misc_feature 1..22: note = chemically synthesized
  source 1..22: mol_type = other DNA
agacactgacctggacatttgt

SEQ ID NO: 114783 - DNA, 22 bp, synthetic construct
  misc_feature 1..22: note = chemically synthesized
  source 1..22: mol_type = other DNA
acctggacatttgtttggggta

SEQ ID NO: 114784 - DNA, 22 bp, synthetic construct
  misc_feature 1..22: note = chemically synthesized
  source 1..22: mol_type = other DNA
gacatttgtttggggtaggatt

SEQ ID NO: 114785 - DNA, 22 bp, synthetic construct
  misc_feature 1..22: note = chemically synthesized
  source 1..22: mol_type = other DNA
gtttggggtaggattgaatatg

SEQ ID NO: 114786 - DNA, 22 bp, synthetic construct
  misc_feature 1..22: note = chemically synthesized
  source 1..22: mol_type = other DNA
tttggggtaggattgaatatgc

SEQ ID NO: 114787 - DNA, 22 bp, synthetic construct
  misc_feature 1..22: note = chemically synthesized
  source 1..22: mol_type = other DNA
ggggtaggattgaatatgcaag

SEQ ID NO: 114788 - DNA, 22 bp, synthetic construct
  misc_feature 1..22: note = chemically synthesized
  source 1..22: mol_type = other DNA
gggtaggattgaatatgcaaga

SEQ ID NO: 114789 - DNA, 22 bp, synthetic construct
  misc_feature 1..22: note = chemically synthesized
  source 1..22: mol_type = other DNA
aatatgcaagattgacttctag

SEQ ID NO: 114790 - DNA, 22 bp, synthetic construct
  misc_feature 1..22: note = chemically synthesized
  source 1..22: mol_type = other DNA
acttctaggtccaaagatatag

SEQ ID NO: 114791 - DNA, 22 bp, synthetic construct
  misc_feature 1..22: note = chemically synthesized
  source 1..22: mol_type = other DNA
ctaggtccaaagatatagaggc

SEQ ID NO: 114792 - DNA, 22 bp, synthetic construct
  misc_feature 1..22: note = chemically synthesized
  source 1..22: mol_type = other DNA
taggtccaaagatatagaggct

SEQ ID NO: 114793 - DNA, 22 bp, synthetic construct
  misc_feature 1..22: note = chemically synthesized
  source 1..22: mol_type = other DNA
ggtccaaagatatagaggctgg

SEQ ID NO: 114794 - DNA, 22 bp, synthetic construct
  misc_feature 1..22: note = chemically synthesized
  source 1..22: mol_type = other DNA
gcagagatggagggcaatttaa

SEQ ID NO: 114795 - DNA, 22 bp, synthetic construct
  misc_feature 1..22: note = chemically synthesized
  source 1..22: mol_type = other DNA
aattatctgcagtaaatggaaa

SEQ ID NO: 114796 - DNA, 22 bp, synthetic construct
  misc_feature 1..22: note = chemically synthesized
  source 1..22: mol_type = other DNA
attatctgcagtaaatggaaat

SEQ ID NO: 114797 - DNA, 22 bp, synthetic construct
  misc_feature 1..22: note = chemically synthesized
  source 1..22: mol_type = other DNA
tctgcagtaaatggaaatataa

SEQ ID NO: 114798 - DNA, 22 bp, synthetic construct
  misc_feature 1..22: note = chemically synthesized
  source 1..22: mol_type = other DNA
cagtaaatggaaatataaaaat

SEQ ID NO: 114799 - DNA, 22 bp, synthetic construct
  misc_feature 1..22: note = chemically synthesized
  source 1..22: mol_type = other DNA
gaagtagtggtgattgtggtgc

SEQ ID NO: 114800 - DNA, 22 bp, synthetic construct
  misc_feature 1..22: note = chemically synthesized
  source 1..22: mol_type = other DNA
aagtagtggtgattgtggtgct

SEQ ID NO: 114801 - DNA, 22 bp, synthetic construct
  misc_feature 1..22: note = chemically synthesized
  source 1..22: mol_type = other DNA
tggtgcttcaaggcagatgtgc

SEQ ID NO: 114802 - DNA, 22 bp, synthetic construct
  misc_feature 1..22: note = chemically synthesized
  source 1..22: mol_type = other DNA
caaggcagatgtgcaatttaaa

SEQ ID NO: 114803 - DNA, 22 bp, synthetic construct
  misc_feature 1..22: note = chemically synthesized
  source 1..22: mol_type = other DNA
aaggcagatgtgcaatttaaaa

SEQ ID NO: 114804 - DNA, 22 bp, synthetic construct
  misc_feature 1..22: note = chemically synthesized
  source 1..22: mol_type = other DNA
aaaagccactgtgaacatcaca

SEQ ID NO: 114805 - DNA, 22 bp, synthetic construct
  misc_feature 1..22: note = chemically synthesized
  source 1..22: mol_type = other DNA
aaagccactgtgaacatcacat

SEQ ID NO: 114806 - DNA, 22 bp, synthetic construct
  misc_feature 1..22: note = chemically synthesized
  source 1..22: mol_type = other DNA
tgaacatcacatggataatcct

SEQ ID NO: 114807 - DNA, 22 bp, synthetic construct
  misc_feature 1..22: note = chemically synthesized
  source 1..22: mol_type = other DNA
ttcatatactacatccgacctc

SEQ ID NO: 114808 - DNA, 22 bp, synthetic construct
  misc_feature 1..22: note = chemically synthesized
  source 1..22: mol_type = other DNA
catatactacatccgacctctc

SEQ ID NO: 114809 - DNA, 22 bp, synthetic construct
  misc_feature 1..22: note = chemically synthesized
  source 1..22: mol_type = other DNA
atatactacatccgacctctct

SEQ ID NO: 114810 - DNA, 22 bp, synthetic construct
  misc_feature 1..22: note = chemically synthesized
  source 1..22: mol_type = other DNA
catccgacctctctggaaaacg

SEQ ID NO: 114811 - DNA, 22 bp, synthetic construct
  misc_feature 1..22: note = chemically synthesized
  source 1..22: mol_type = other DNA
tctggaaaacgacgggtccatt

SEQ ID NO: 114812 - DNA, 22 bp, synthetic construct
  misc_feature 1..22: note = chemically synthesized
  source 1..22: mol_type = other DNA
tggaaaacgacgggtccattac

SEQ ID NO: 114813 - DNA, 22 bp, synthetic construct
  misc_feature 1..22: note = chemically synthesized
  source 1..22: mol_type = other DNA
gaaaacgacgggtccattacta

SEQ ID NO: 114814 - DNA, 22 bp, synthetic construct
  misc_feature 1..22: note = chemically synthesized
  source 1..22: mol_type = other DNA
ctagtggataacagaagacagt

SEQ ID NO: 114815 - DNA, 22 bp, synthetic construct
  misc_feature 1..22: note = chemically synthesized
  source 1..22: mol_type = other DNA
gtggataacagaagacagtaaa

SEQ ID NO: 114816 - DNA, 22 bp, synthetic construct
  misc_feature 1..22: note = chemically synthesized
  source 1..22: mol_type = other DNA
acttctttatgaaattaaaaat

SEQ ID NO: 114817 - DNA, 22 bp, synthetic construct
  misc_feature 1..22: note = chemically synthesized
  source 1..22: mol_type = other DNA
ctttatgaaattaaaaataaac

SEQ ID NO: 114818 - DNA, 22 bp, synthetic construct
  misc_feature 1..22: note = chemically synthesized
  source 1..22: mol_type = other DNA
tttatgaaattaaaaataaaca

SEQ ID NO: 114819 - DNA, 22 bp, synthetic construct
  misc_feature 1..22: note = chemically synthesized
  source 1..22: mol_type = other DNA
tatgaaattaaaaataaacaga

SEQ ID NO: 114820 - DNA, 22 bp, synthetic construct
  misc_feature 1..22: note = chemically synthesized
  source 1..22: mol_type = other DNA
atgaaattaaaaataaacagat

SEQ ID NO: 114821 - DNA, 22 bp, synthetic construct
  misc_feature 1..22: note = chemically synthesized
  source 1..22: mol_type = other DNA
tgaaattaaaaataaacagata

SEQ ID NO: 114822 - DNA, 22 bp, synthetic construct
  misc_feature 1..22: note = chemically synthesized
  source 1..22: mol_type = other DNA
aaaataaacagataaggcagta

SEQ ID NO: 114823 - DNA, 22 bp, synthetic construct
  misc_feature 1..22: note = chemically synthesized
  source 1..22: mol_type = other DNA
ttgttgcagcagatgtctgtgt

SEQ ID NO: 114824 - DNA, 22 bp, synthetic construct
  misc_feature 1..22: note = chemically synthesized
  source 1..22: mol_type = other DNA
tgttgcagcagatgtctgtgta

SEQ ID NO: 114825 - DNA, 22 bp, synthetic construct
  misc_feature 1..22: note = chemically synthesized
  source 1..22: mol_type = other DNA
gttgcagcagatgtctgtgtag

SEQ ID NO: 114826 - DNA, 22 bp, synthetic construct
  misc_feature 1..22: note = chemically synthesized
  source 1..22: mol_type = other DNA
ttgcagcagatgtctgtgtagc

SEQ ID NO: 114827 - DNA, 22 bp, synthetic construct
  misc_feature 1..22: note = chemically synthesized
  source 1..22: mol_type = other DNA
cagcagatgtctgtgtagccaa

SEQ ID NO: 114828 - DNA, 22 bp, synthetic construct
  misc_feature 1..22: note = chemically synthesized
  source 1..22: mol_type = other DNA
tgtagccaaaacctggggactg

SEQ ID NO: 114829 - DNA, 22 bp, synthetic construct
  misc_feature 1..22: note = chemically synthesized
  source 1..22: mol_type = other DNA
gggactgaatgctaaaaagtta

SEQ ID NO: 114830 - DNA, 22 bp, synthetic construct
  misc_feature 1..22: note = chemically synthesized
  source 1..22: mol_type = other DNA
aatgctaaaaagttagggctct

SEQ ID NO: 114831 - DNA, 22 bp, synthetic construct
  misc_feature 1..22: note = chemically synthesized
  source 1..22: mol_type = other DNA
aaaagttagggctcttcagctt

SEQ ID NO: 114832 - DNA, 22 bp, synthetic construct
  misc_feature 1..22: note = chemically synthesized
  source 1..22: mol_type = other DNA
gggctcttcagcttcaggagac

SEQ ID NO: 114833 - DNA, 22 bp, synthetic construct
  misc_feature 1..22: note = chemically synthesized
  source 1..22: mol_type = other DNA
ttcagcttcaggagacaggggt

SEQ ID NO: 114834 - DNA, 22 bp, synthetic construct
  misc_feature 1..22: note = chemically synthesized
  source 1..22: mol_type = other DNA
cagcttcaggagacaggggtgg

SEQ ID NO: 114835 - DNA, 22 bp, synthetic construct
  misc_feature 1..22: note = chemically synthesized
  source 1..22: mol_type = other DNA
agcttcaggagacaggggtgga

SEQ ID NO: 114836 - DNA, 22 bp, synthetic construct
  misc_feature 1..22: note = chemically synthesized
  source 1..22: mol_type = other DNA
caggagacaggggtggagataa

SEQ ID NO: 114837 - DNA, 22 bp, synthetic construct
  misc_feature 1..22: note = chemically synthesized
  source 1..22: mol_type = other DNA
aggagacaggggtggagataaa

SEQ ID NO: 114838 - DNA, 22 bp, synthetic construct
  misc_feature 1..22: note = chemically synthesized
  source 1..22: mol_type = other DNA
cctgcccataggattcccagcc

SEQ ID NO: 114839 - DNA, 22 bp, synthetic construct
  misc_feature 1..22: note = chemically synthesized
  source 1..22: mol_type = other DNA
ctgcccataggattcccagccc

SEQ ID NO: 114840 - DNA, 22 bp, synthetic construct
  misc_feature 1..22: note = chemically synthesized
  source 1..22: mol_type = other DNA
cccataggattcccagccctgg

SEQ ID NO: 114841 - DNA, 22 bp, synthetic construct
  misc_feature 1..22: note = chemically synthesized
  source 1..22: mol_type = other DNA
ccagccctggggaccctttgtt

SEQ ID NO: 114842 - DNA, 22 bp, synthetic construct
  misc_feature 1..22: note = chemically synthesized
  source 1..22: mol_type = other DNA
gggaccctttgtttaccattaa

SEQ ID NO: 114843 - DNA, 22 bp, synthetic construct
  misc_feature 1..22: note = chemically synthesized
  source 1..22: mol_type = other DNA
tgtttaccattaagttctccca

SEQ ID NO: 114844 - DNA, 22 bp, synthetic construct
  misc_feature 1..22: note = chemically synthesized
  source 1..22: mol_type = other DNA
gtttaccattaagttctcccag

SEQ ID NO: 114845 - DNA, 22 bp, synthetic construct
  misc_feature 1..22: note = chemically synthesized
  source 1..22: mol_type = other DNA
tttaccattaagttctcccagc

SEQ ID NO: 114846 - DNA, 22 bp, synthetic construct
  misc_feature 1..22: note = chemically synthesized
  source 1..22: mol_type = other DNA
accattaagttctcccagctgg

SEQ ID NO: 114847 - DNA, 22 bp, synthetic construct
  misc_feature 1..22: note = chemically synthesized
  source 1..22: mol_type = other DNA
ccattaagttctcccagctgga

SEQ ID NO: 114848 - DNA, 22 bp, synthetic construct
  misc_feature 1..22: note = chemically synthesized
  source 1..22: mol_type = other DNA
agttctcccagctggagccatg

SEQ ID NO: 114849 - DNA, 22 bp, synthetic construct
  misc_feature 1..22: note = chemically synthesized
  source 1..22: mol_type = other DNA
tcccagctggagccatggtctt

SEQ ID NO: 114850 - DNA, 22 bp, synthetic construct
  misc_feature 1..22: note = chemically synthesized
  source 1..22: mol_type = other DNA
ccagctggagccatggtcttta

SEQ ID NO: 114851 - DNA, 22 bp, synthetic construct
  misc_feature 1..22: note = chemically synthesized
  source 1..22: mol_type = other DNA
gagccatggtctttaggaggat

SEQ ID NO: 114852 - DNA, 22 bp, synthetic construct
  misc_feature 1..22: note = chemically synthesized
  source 1..22: mol_type = other DNA
taggaggataaatccttctgtg

SEQ ID NO: 114853 - DNA, 22 bp, synthetic construct
  misc_feature 1..22: note = chemically synthesized
  source 1..22: mol_type = other DNA
aggaggataaatccttctgtga

SEQ ID NO: 114854 - DNA, 22 bp, synthetic construct
  misc_feature 1..22: note = chemically synthesized
  source 1..22: mol_type = other DNA
ggaggataaatccttctgtgac

SEQ ID NO: 114855 - DNA, 22 bp, synthetic construct
  misc_feature 1..22: note = chemically synthesized
  source 1..22: mol_type = other DNA
ctgtgacagccacagccttgtg

SEQ ID NO: 114856 - DNA, 22 bp, synthetic construct
  misc_feature 1..22: note = chemically synthesized
  source 1..22: mol_type = other DNA
tgtgacagccacagccttgtgc

SEQ ID NO: 114857 - DNA, 22 bp, synthetic construct
  misc_feature 1..22: note = chemically synthesized
  source 1..22: mol_type = other DNA
tgacagccacagccttgtgcct

SEQ ID NO: 114858 - DNA, 22 bp, synthetic construct
  misc_feature 1..22: note = chemically synthesized
  source 1..22: mol_type = other DNA
gtgcctctcagtgacccttgtg

SEQ ID NO: 114859 - DNA, 22 bp, synthetic construct
  misc_feature 1..22: note = chemically synthesized
  source 1..22: mol_type = other DNA
tgcctctcagtgacccttgtgt

SEQ ID NO: 114860 - DNA, 22 bp, synthetic construct
  misc_feature 1..22: note = chemically synthesized
  source 1..22: mol_type = other DNA
tcagtgacccttgtgtcatcct

SEQ ID NO: 114861 - DNA, 22 bp, synthetic construct
  misc_feature 1..22: note = chemically synthesized
  source 1..22: mol_type = other DNA
agtgacccttgtgtcatcctta

SEQ ID NO: 114862 - DNA, 22 bp, synthetic construct
  misc_feature 1..22: note = chemically synthesized
  source 1..22: mol_type = other DNA
gtgtcatccttatctatactct

SEQ ID NO: 114863 - DNA, 22 bp, synthetic construct
  misc_feature 1..22: note = chemically synthesized
  source 1..22: mol_type = other DNA
tgtcatccttatctatactctt
